United States Patent Application Publication US 2018/0305689 A1 - sequence listing, part 153

SEQ ID NO: 2183522 - RNA, 19 nt, Artificial Sequence
  Description of Artificial Sequence: Synthetic oligonucleotide
  Sense strand starting at position 2264 of SEQ ID NO: 1883297
gagacuaaauguuccugga

SEQ ID NO: 2183523 - RNA, 19 nt, Artificial Sequence
  Description of Artificial Sequence: Synthetic oligonucleotide
  Antisense strand to SEQ ID NO: 2183522
uccaggaacauuuagucuc

SEQ ID NO: 2183524 - RNA, 19 nt, Artificial Sequence
  Description of Artificial Sequence: Synthetic oligonucleotide
  Sense strand starting at position 2266 of SEQ ID NO: 1883297
gacuaaauguuccuggaca

SEQ ID NO: 2183525 - RNA, 19 nt, Artificial Sequence
  Description of Artificial Sequence: Synthetic oligonucleotide
  Antisense strand to SEQ ID NO: 2183524
uguccaggaacauuuaguc

SEQ ID NO: 2183526 - RNA, 19 nt, Artificial Sequence
  Description of Artificial Sequence: Synthetic oligonucleotide
  Sense strand starting at position 2357 of SEQ ID NO: 1883297
ucgacagagcugugauuug

SEQ ID NO: 2183527 - RNA, 19 nt, Artificial Sequence
  Description of Artificial Sequence: Synthetic oligonucleotide
  Antisense strand to SEQ ID NO: 2183526
caaaucacagcucugucga

SEQ ID NO: 2183528 - RNA, 19 nt, Artificial Sequence
  Description of Artificial Sequence: Synthetic oligonucleotide
  Sense strand starting at position 2367 of SEQ ID NO: 1883297
ugugauuugcccugugauu

SEQ ID NO: 2183529 - RNA, 19 nt, Artificial Sequence
  Description of Artificial Sequence: Synthetic oligonucleotide
  Antisense strand to SEQ ID NO: 2183528
aaucacagggcaaaucaca

SEQ ID NO: 2183530 - RNA, 19 nt, Artificial Sequence
  Description of Artificial Sequence: Synthetic oligonucleotide
  Sense strand starting at position 2558 of SEQ ID NO: 1883297
cgugucuuugaugacuuga

SEQ ID NO: 2183531 - RNA, 19 nt, Artificial Sequence
  Description of Artificial Sequence: Synthetic oligonucleotide
  Antisense strand to SEQ ID NO: 2183530
ucaagucaucaaagacacg

SEQ ID NO: 2183532 - RNA, 19 nt, Artificial Sequence
  Description of Artificial Sequence: Synthetic oligonucleotide
  Sense strand starting at position 2630 of SEQ ID NO: 1883297
augccacuucuaugagaca

SEQ ID NO: 2183533 - RNA, 19 nt, Artificial Sequence
  Description of Artificial Sequence: Synthetic oligonucleotide
  Antisense strand to SEQ ID NO: 2183532
ugucucauagaaguggcau

SEQ ID NO: 2183534 - RNA, 19 nt, Artificial Sequence
  Description of Artificial Sequence: Synthetic oligonucleotide
  Sense strand starting at position 2653 of SEQ ID NO: 1883297
guuucugugccagaaacag

SEQ ID NO: 2183535 - RNA, 19 nt, Artificial Sequence
  Description of Artificial Sequence: Synthetic oligonucleotide
  Antisense strand to SEQ ID NO: 2183534
cuguuucuggcacagaaac

SEQ ID NO: 2183536 - RNA, 19 nt, Artificial Sequence
  Description of Artificial Sequence: Synthetic oligonucleotide
  Sense strand starting at position 2706 of SEQ ID NO: 1883297
agagcaaggaucuggcaau

SEQ ID NO: 2183537 - RNA, 19 nt, Artificial Sequence
  Description of Artificial Sequence: Synthetic oligonucleotide
  Antisense strand to SEQ ID NO: 2183536
auugccagauccuugcucu

SEQ ID NO: 2183538 - RNA, 19 nt, Artificial Sequence
  Description of Artificial Sequence: Synthetic oligonucleotide
  Sense strand starting at position 2756 of SEQ ID NO: 1883297
agcucugaccuugagcaaa

SEQ ID NO: 2183539 - RNA, 19 nt, Artificial Sequence
  Description of Artificial Sequence: Synthetic oligonucleotide
  Antisense strand to SEQ ID NO: 2183538
uuugcucaaggucagagcu

SEQ ID NO: 2183540 - RNA, 19 nt, Artificial Sequence
  Description of Artificial Sequence: Synthetic oligonucleotide
  Sense strand starting at position 2758 of SEQ ID NO: 1883297
cucugaccuugagcaaauu

SEQ ID NO: 2183541 - RNA, 19 nt, Artificial Sequence
  Description of Artificial Sequence: Synthetic oligonucleotide
  Antisense strand to SEQ ID NO: 2183540
aauuugcucaaggucagag

SEQ ID NO: 2183542 - RNA, 19 nt, Artificial Sequence
  Description of Artificial Sequence: Synthetic oligonucleotide
  Sense strand starting at position 2879 of SEQ ID NO: 1883297
guauccaucggucaccaaa

SEQ ID NO: 2183543 - RNA, 19 nt, Artificial Sequence
  Description of Artificial Sequence: Synthetic oligonucleotide
  Antisense strand to SEQ ID NO: 2183542
uuuggugaccgauggauac

SEQ ID NO: 2183544 - RNA, 19 nt, Artificial Sequence
  Description of Artificial Sequence: Synthetic oligonucleotide
  Sense strand starting at position 2980 of SEQ ID NO: 1883297
aguuaucccuucccauuga

SEQ ID NO: 2183545 - RNA, 19 nt, Artificial Sequence
  Description of Artificial Sequence: Synthetic oligonucleotide
  Antisense strand to SEQ ID NO: 2183544
ucaaugggaagggauaacu

SEQ ID NO: 2183546 - RNA, 19 nt, Artificial Sequence
  Description of Artificial Sequence: Synthetic oligonucleotide
  Sense strand starting at position 3061 of SEQ ID NO: 1883297
agcugucuugcacaauaua

SEQ ID NO: 2183547 - RNA, 19 nt, Artificial Sequence
  Description of Artificial Sequence: Synthetic oligonucleotide
  Antisense strand to SEQ ID NO: 2183546
uauauugugcaagacagcu

SEQ ID NO: 2183548 - RNA, 19 nt, Artificial Sequence
  Description of Artificial Sequence: Synthetic oligonucleotide
  Sense strand starting at position 3084 of SEQ ID NO: 1883297
gucaauacaugucugauca

SEQ ID NO: 2183549 - RNA, 19 nt, Artificial Sequence
  Description of Artificial Sequence: Synthetic oligonucleotide
  Antisense strand to SEQ ID NO: 2183548
ugaucagacauguauugac

SEQ ID NO: 2183550 - RNA, 19 nt, Artificial Sequence
  Description of Artificial Sequence: Synthetic oligonucleotide
  Sense strand starting at position 3092 of SEQ ID NO: 1883297
augucugaucaacggaaug

SEQ ID NO: 2183551 - RNA, 19 nt, Artificial Sequence
  Description of Artificial Sequence: Synthetic oligonucleotide
  Antisense strand to SEQ ID NO: 2183550
cauuccguugaucagacau

SEQ ID NO: 2183552 - RNA, 19 nt, Artificial Sequence
  Description of Artificial Sequence: Synthetic oligonucleotide
  Sense strand starting at position 3136 of SEQ ID NO: 1883297
acucucuaucagugauaca

SEQ ID NO: 2183553 - RNA, 19 nt, Artificial Sequence
  Description of Artificial Sequence: Synthetic oligonucleotide
  Antisense strand to SEQ ID NO: 2183552
uguaucacugauagagagu

SEQ ID NO: 2183554 - RNA, 19 nt, Artificial Sequence
  Description of Artificial Sequence: Synthetic oligonucleotide
  Sense strand starting at position 3143 of SEQ ID NO: 1883297
aucagugauacaggagcua

SEQ ID NO: 2183555 - RNA, 19 nt, Artificial Sequence
  Description of Artificial Sequence: Synthetic oligonucleotide
  Antisense strand to SEQ ID NO: 2183554
uagcuccuguaucacugau

SEQ ID NO: 2183556 - RNA, 19 nt, Artificial Sequence
  Description of Artificial Sequence: Synthetic oligonucleotide
  Sense strand starting at position 3873 of SEQ ID NO: 1883297
auuaguauuguacaacacu

SEQ ID NO: 2183557 - RNA, 19 nt, Artificial Sequence
  Description of Artificial Sequence: Synthetic oligonucleotide
  Antisense strand to SEQ ID NO: 2183556
aguguuguacaauacuaau

SEQ ID NO: 2183558 - RNA, 19 nt, Artificial Sequence
  Description of Artificial Sequence: Synthetic oligonucleotide
  Sense strand starting at position 28 of SEQ ID NO: 1883298
guauaaagauuggaaagga

SEQ ID NO: 2183559 - RNA, 19 nt, Artificial Sequence
  Description of Artificial Sequence: Synthetic oligonucleotide
  Antisense strand to SEQ ID NO: 2183558
uccuuuccaaucuuuauac

SEQ ID NO: 2183560 - RNA, 19 nt, Artificial Sequence
  Description of Artificial Sequence: Synthetic oligonucleotide
  Sense strand starting at position 73 of SEQ ID NO: 1883298
acaauaggauugcuuacau

SEQ ID NO: 2183561 - RNA, 19 nt, Artificial Sequence
  Description of Artificial Sequence: Synthetic oligonucleotide
  Antisense strand to SEQ ID NO: 2183560
auguaagcaauccuauugu

SEQ ID NO: 2183562 - RNA, 19 nt, Artificial Sequence
  Description of Artificial Sequence: Synthetic oligonucleotide
  Sense strand starting at position 139 of SEQ ID NO: 1883298
uuagcaguaccauagcaua

SEQ ID NO: 2183563 - RNA, 19 nt, Artificial Sequence
  Description of Artificial Sequence: Synthetic oligonucleotide
  Antisense strand to SEQ ID NO: 2183562
uaugcuaugguacugcuaa

SEQ ID NO: 2183564 - RNA, 19 nt, Artificial Sequence
  Description of Artificial Sequence: Synthetic oligonucleotide
  Sense strand starting at position 188 of SEQ ID NO: 1883298
ucuguauaguugcaacaaa

SEQ ID NO: 2183565 - RNA, 19 nt, Artificial Sequence
  Description of Artificial Sequence: Synthetic oligonucleotide
  Antisense strand to SEQ ID NO: 2183564
uuuguugcaacuauacaga

SEQ ID NO: 2183566 - RNA, 19 nt, Artificial Sequence
  Description of Artificial Sequence: Synthetic oligonucleotide
  Sense strand starting at position 563 of SEQ ID NO: 1883298
agcucauaauuaggacaau

SEQ ID NO: 2183567 - RNA, 19 nt, Artificial Sequence
  Description of Artificial Sequence: Synthetic oligonucleotide
  Antisense strand to SEQ ID NO: 2183566
auuguccuaauuaugagcu

SEQ ID NO: 2183568 - RNA, 19 nt, Artificial Sequence
  Description of Artificial Sequence: Synthetic oligonucleotide
  Sense strand starting at position 569 of SEQ ID NO: 1883298
uaauuaggacaauguggua

SEQ ID NO: 2183569 - RNA, 19 nt, Artificial Sequence
  Description of Artificial Sequence: Synthetic oligonucleotide
  Antisense strand to SEQ ID NO: 2183568
uaccacauuguccuaauua

SEQ ID NO: 2183570 - RNA, 19 nt, Artificial Sequence
  Description of Artificial Sequence: Synthetic oligonucleotide
  Sense strand starting at position 572 of SEQ ID NO: 1883298
uuaggacaaugugguaauu

SEQ ID NO: 2183571 - RNA, 19 nt, Artificial Sequence
  Description of Artificial Sequence: Synthetic oligonucleotide
  Antisense strand to SEQ ID NO: 2183570
aauuaccacauuguccuaa

SEQ ID NO: 2183572 - RNA, 19 nt, Artificial Sequence
  Description of Artificial Sequence: Synthetic oligonucleotide
  Sense strand starting at position 581 of SEQ ID NO: 1883298
ugugguaauuagcaugaga

SEQ ID NO: 2183573 - RNA, 19 nt, Artificial Sequence
  Description of Artificial Sequence: Synthetic oligonucleotide
  Antisense strand to SEQ ID NO: 2183572
ucucaugcuaauuaccaca

SEQ ID NO: 2183574 - RNA, 19 nt, Artificial Sequence
  Description of Artificial Sequence: Synthetic oligonucleotide
  Sense strand starting at position 583 of SEQ ID NO: 1883298
ugguaauuagcaugagaau

SEQ ID NO: 2183575 - RNA, 19 nt, Artificial Sequence
  Description of Artificial Sequence: Synthetic oligonucleotide
  Antisense strand to SEQ ID NO: 2183574
auucucaugcuaauuacca

SEQ ID NO: 2183576 - RNA, 19 nt, Artificial Sequence
  Description of Artificial Sequence: Synthetic oligonucleotide
  Sense strand starting at position 592 of SEQ ID NO: 1883298
gcaugagaauagccaaaua

SEQ ID NO: 2183577 - RNA, 19 nt, Artificial Sequence
  Description of Artificial Sequence: Synthetic oligonucleotide
  Antisense strand to SEQ ID NO: 2183576
uauuuggcuauucucaugc

SEQ ID NO: 2183578 - RNA, 19 nt, Artificial Sequence
  Description of Artificial Sequence: Synthetic oligonucleotide
  Sense strand starting at position 622 of SEQ ID NO: 1883298
cagaauagaguccggaaau

SEQ ID NO: 2183579 - RNA, 19 nt, Artificial Sequence
  Description of Artificial Sequence: Synthetic oligonucleotide
  Antisense strand to SEQ ID NO: 2183578
auuuccggacucuauucug

SEQ ID NO: 2183580 - RNA, 19 nt, Artificial Sequence
  Description of Artificial Sequence: Synthetic oligonucleotide
  Sense strand starting at position 623 of SEQ ID NO: 1883298
agaauagaguccggaaaug

SEQ ID NO: 2183581 - RNA, 19 nt, Artificial Sequence
  Description of Artificial Sequence: Synthetic oligonucleotide
  Antisense strand to SEQ ID NO: 2183580
cauuuccggacucuauucu

SEQ ID NO: 2183582 - RNA, 19 nt, Artificial Sequence
  Description of Artificial Sequence: Synthetic oligonucleotide
  Sense strand starting at position 682 of SEQ ID NO: 1883298
ugauaaggcuauuggauaa

SEQ ID NO: 2183583 - RNA, 19 nt, Artificial Sequence
  Description of Artificial Sequence: Synthetic oligonucleotide
  Antisense strand to SEQ ID NO: 2183582
uuauccaauagccuuauca

SEQ ID NO: 2183584 - RNA, 19 nt, Artificial Sequence
  Description of Artificial Sequence: Synthetic oligonucleotide
  Sense strand starting at position 2103 of SEQ ID NO: 1883298
augcgaaguucugucuugu

SEQ ID NO: 2183585 - RNA, 19 nt, Artificial Sequence
  Description of Artificial Sequence: Synthetic oligonucleotide
  Antisense strand to SEQ ID NO: 2183584
acaagacagaacuucgcau

SEQ ID NO: 2183586 - RNA, 19 nt, Artificial Sequence
  Description of Artificial Sequence: Synthetic oligonucleotide
  Sense strand starting at position 2104 of SEQ ID NO: 1883298
ugcgaaguucugucuuguc

SEQ ID NO: 2183587 - RNA, 19 nt, Artificial Sequence
  Description of Artificial Sequence: Synthetic oligonucleotide
  Antisense strand to SEQ ID NO: 2183586
gacaagacagaacuucgca

SEQ ID NO: 2183588 - RNA, 19 nt, Artificial Sequence
  Description of Artificial Sequence: Synthetic oligonucleotide
  Sense strand starting at position 2107 of SEQ ID NO: 1883298
gaaguucugucuugucaua

SEQ ID NO: 2183589 - RNA, 19 nt, Artificial Sequence
  Description of Artificial Sequence: Synthetic oligonucleotide
  Antisense strand to SEQ ID NO: 2183588
uaugacaagacagaacuuc

SEQ ID NO: 2183590 - RNA, 19 nt, Artificial Sequence
  Description of Artificial Sequence: Synthetic oligonucleotide
  Sense strand starting at position 2112 of SEQ ID NO: 1883298
ucugucuugucauagccaa

SEQ ID NO: 2183591 - RNA, 19 nt, Artificial Sequence
  Description of Artificial Sequence: Synthetic oligonucleotide
  Antisense strand to SEQ ID NO: 2183590
uuggcuaugacaagacaga

SEQ ID NO: 2183592 - RNA, 19 nt, Artificial Sequence
  Description of Artificial Sequence: Synthetic oligonucleotide
  Sense strand starting at position 2131 of SEQ ID NO: 1883298
gcacgcugcuucuuggauu

SEQ ID NO: 2183593 - RNA, 19 nt, Artificial Sequence
  Description of Artificial Sequence: Synthetic oligonucleotide
  Antisense strand to SEQ ID NO: 2183592
aauccaagaagcagcgugc

SEQ ID NO: 2183594 - RNA, 19 nt, Artificial Sequence
  Description of Artificial Sequence: Synthetic oligonucleotide
  Sense strand starting at position 2191 of SEQ ID NO: 1883298
ggugcguuccuggcaguga

SEQ ID NO: 2183595 - RNA, 19 nt, Artificial Sequence
  Description of Artificial Sequence: Synthetic oligonucleotide
  Antisense strand to SEQ ID NO: 2183594
ucacugccaggaacgcacc

SEQ ID NO: 2183596 - RNA, 19 nt, Artificial Sequence
  Description of Artificial Sequence: Synthetic oligonucleotide
  Sense strand starting at position 2750 of SEQ ID NO: 1883298
ucacgauguaucgggaagu

SEQ ID NO: 2183597 - RNA, 19 nt, Artificial Sequence
  Description of Artificial Sequence: Synthetic oligonucleotide
  Antisense strand to SEQ ID NO: 2183596
acuucccgauacaucguga

SEQ ID NO: 2183598 - RNA, 19 nt, Artificial Sequence
  Description of Artificial Sequence: Synthetic oligonucleotide
  Sense strand starting at position 2751 of SEQ ID NO: 1883298
cacgauguaucgggaaguu

SEQ ID NO: 2183599 - RNA, 19 nt, Artificial Sequence
  Description of Artificial Sequence: Synthetic oligonucleotide
  Antisense strand to SEQ ID NO: 2183598
aacuucccgauacaucgug

SEQ ID NO: 2183600 - RNA, 19 nt, Artificial Sequence
  Description of Artificial Sequence: Synthetic oligonucleotide
  Sense strand starting at position 2761 of SEQ ID NO: 1883298
cgggaaguuucggaaucga

SEQ ID NO: 2183601 - RNA, 19 nt, Artificial Sequence
  Description of Artificial Sequence: Synthetic oligonucleotide
  Antisense strand to SEQ ID NO: 2183600
ucgauuccgaaacuucccg

SEQ ID NO: 2183602 - RNA, 19 nt, Artificial Sequence
  Description of Artificial Sequence: Synthetic oligonucleotide
  Sense strand starting at position 2765 of SEQ ID NO: 1883298
aaguuucggaaucgauaga

SEQ ID NO: 2183603 - RNA, 19 nt, Artificial Sequence
  Description of Artificial Sequence: Synthetic oligonucleotide
  Antisense strand to SEQ ID NO: 2183602
ucuaucgauuccgaaacuu

SEQ ID NO: 2183604 - RNA, 19 nt, Artificial Sequence
  Description of Artificial Sequence: Synthetic oligonucleotide
  Sense strand starting at position 2782 of SEQ ID NO: 1883298
gagcucaaguguguaaacu

SEQ ID NO: 2183605 - RNA, 19 nt, Artificial Sequence
  Description of Artificial Sequence: Synthetic oligonucleotide
  Antisense strand to SEQ ID NO: 2183604
aguuuacacacuugagcuc

SEQ ID NO: 2183606 - RNA, 19 nt, Artificial Sequence
  Description of Artificial Sequence: Synthetic oligonucleotide
  Sense strand starting at position 2783 of SEQ ID NO: 1883298
agcucaaguguguaaacuu

SEQ ID NO: 2183607 - RNA, 19 nt, Artificial Sequence
  Description of Artificial Sequence: Synthetic oligonucleotide
  Antisense strand to SEQ ID NO: 2183606
aaguuuacacacuugagcu

SEQ ID NO: 2183608 - RNA, 19 nt, Artificial Sequence
  Description of Artificial Sequence: Synthetic oligonucleotide
  Sense strand starting at position 2791 of SEQ ID NO: 1883298
uguguaaacuuccaagcca

SEQ ID NO: 2183609 - RNA, 19 nt, Artificial Sequence
  Description of Artificial Sequence: Synthetic oligonucleotide
  Antisense strand to SEQ ID NO: 2183608
uggcuuggaaguuuacaca

SEQ ID NO: 2183610 - RNA, 19 nt, Artificial Sequence
  Description of Artificial Sequence: Synthetic oligonucleotide
  Sense strand starting at position 3254 of SEQ ID NO: 1883298
guugucuuccguuucgagu

SEQ ID NO: 2183611 - RNA, 19 nt, Artificial Sequence
  Description of Artificial Sequence: Synthetic oligonucleotide
  Antisense strand to SEQ ID NO: 2183610
acucgaaacggaagacaac

SEQ ID NO: 2183612 - RNA, 19 nt, Artificial Sequence
  Description of Artificial Sequence: Synthetic oligonucleotide
  Sense strand starting at position 3306 of SEQ ID NO: 1883298
ccacuuucuugcgcaucaa

SEQ ID NO: 2183613 - RNA, 19 nt, Artificial Sequence
  Description of Artificial Sequence: Synthetic oligonucleotide
  Antisense strand to SEQ ID NO: 2183612
uugaugcgcaagaaagugg

SEQ ID NO: 2183614 - RNA, 19 nt, Artificial Sequence
  Description of Artificial Sequence: Synthetic oligonucleotide
  Sense strand starting at position 3397 of SEQ ID NO: 1883298
cagcguuuccugugaaagc

SEQ ID NO: 2183615 - RNA, 19 nt, Artificial Sequence
  Description of Artificial Sequence: Synthetic oligonucleotide
  Antisense strand to SEQ ID NO: 2183614
gcuuucacaggaaacgcug

SEQ ID NO: 2183616 - RNA, 19 nt, Artificial Sequence
  Description of Artificial Sequence: Synthetic oligonucleotide
  Sense strand starting at position 3492 of SEQ ID NO: 1883298
ccagauuccuucuauguua

SEQ ID NO: 2183617 - RNA, 19 nt, Artificial Sequence
  Description of Artificial Sequence: Synthetic oligonucleotide
  Antisense strand to SEQ ID NO: 2183616
uaacauagaaggaaucugg

SEQ ID NO: 2183618 - RNA, 19 nt, Artificial Sequence
  Description of Artificial Sequence: Synthetic oligonucleotide
  Sense strand starting at position 3494 of SEQ ID NO: 1883298
agauuccuucuauguuaag

SEQ ID NO: 2183619 - RNA, 19 nt, Artificial Sequence
  Description of Artificial Sequence: Synthetic oligonucleotide
  Antisense strand to SEQ ID NO: 2183618
cuuaacauagaaggaaucu

SEQ ID NO: 2183620 - RNA, 19 nt, Artificial Sequence
  Description of Artificial Sequence: Synthetic oligonucleotide
  Sense strand starting at position 3497 of SEQ ID NO: 1883298
uuccuucuauguuaaggaa

SEQ ID NO: 2183621 - RNA, 19 nt, Artificial Sequence
  Description of Artificial Sequence: Synthetic oligonucleotide
  Antisense strand to SEQ ID NO: 2183620
uuccuuaacauagaaggaa

SEQ ID NO: 2183622 - RNA, 19 nt, Artificial Sequence
  Description of Artificial Sequence: Synthetic oligonucleotide
  Sense strand starting at position 3545 of SEQ ID NO: 1883298
auaaaccagucuuacaagu

SEQ ID NO: 2183623 - RNA, 19 nt, Artificial Sequence
  Description of Artificial Sequence: Synthetic oligonucleotide
  Antisense strand to SEQ ID NO: 2183622
acuuguaagacugguuuau

SEQ ID NO: 2183624 - RNA, 19 nt, Artificial Sequence
  Description of Artificial Sequence: Synthetic oligonucleotide
  Sense strand starting at position 3554 of SEQ ID NO: 1883298
ucuuacaagugucaggaaa

SEQ ID NO: 2183625 - RNA, 19 nt, Artificial Sequence
  Description of Artificial Sequence: Synthetic oligonucleotide
  Antisense strand to SEQ ID NO: 2183624
uuuccugacacuuguaaga

SEQ ID NO: 2183626 - RNA, 19 nt, Artificial Sequence
  Description of Artificial Sequence: Synthetic oligonucleotide
  Sense strand starting at position 3556 of SEQ ID NO: 1883298
uuacaagugucaggaaauu

SEQ ID NO: 2183627 - RNA, 19 nt, Artificial Sequence
  Description of Artificial Sequence: Synthetic oligonucleotide
  Antisense strand to SEQ ID NO: 2183626
aauuuccugacacuuguaa

SEQ ID NO: 2183628 - RNA, 19 nt, Artificial Sequence
  Description of Artificial Sequence: Synthetic oligonucleotide
  Sense strand starting at position 3668 of SEQ ID NO: 1883298
caguuuauguuagguggaa

SEQ ID NO: 2183629 - RNA, 19 nt, Artificial Sequence
  Description of Artificial Sequence: Synthetic oligonucleotide
  Antisense strand to SEQ ID NO: 2183628
uuccaccuaacauaaacug

SEQ ID NO: 2183630 - RNA, 19 nt, Artificial Sequence
  Description of Artificial Sequence: Synthetic oligonucleotide
  Sense strand starting at position 3748 of SEQ ID NO: 1883298
gcgauuccagguggaugua

SEQ ID NO: 2183631 - RNA, 19 nt, Artificial Sequence
  Description of Artificial Sequence: Synthetic oligonucleotide
  Antisense strand to SEQ ID NO: 2183630
uacauccaccuggaaucgc

SEQ ID NO: 2183632 - RNA, 19 nt, Artificial Sequence
  Description of Artificial Sequence: Synthetic oligonucleotide
  Sense strand starting at position 3768 of SEQ ID NO: 1883298
ggcucaccuguauagacaa

SEQ ID NO: 2183633 - RNA, 19 nt, Artificial Sequence
  Description of Artificial Sequence: Synthetic oligonucleotide
  Antisense strand to SEQ ID NO: 2183632
uugucuauacaggugagcc

SEQ ID NO: 2183634 - RNA, 19 nt, Artificial Sequence
  Description of Artificial Sequence: Synthetic oligonucleotide
  Sense strand starting at position 3775 of SEQ ID NO: 1883298
cuguauagacaaggugaaa

SEQ ID NO: 2183635 - RNA, 19 nt, Artificial Sequence
  Description of Artificial Sequence: Synthetic oligonucleotide
  Antisense strand to SEQ ID NO: 2183634
uuucaccuugucuauacag

SEQ ID NO: 2183636 - RNA, 19 nt, Artificial Sequence
  Description of Artificial Sequence: Synthetic oligonucleotide
  Sense strand starting at position 3787 of SEQ ID NO: 1883298
ggugaaacaucugaauuug

SEQ ID NO: 2183637 - RNA, 19 nt, Artificial Sequence
  Description of Artificial Sequence: Synthetic oligonucleotide
  Antisense strand to SEQ ID NO: 2183636
caaauucagauguuucacc

SEQ ID NO: 2183638 - RNA, 19 nt, Artificial Sequence
  Description of Artificial Sequence: Synthetic oligonucleotide
  Sense strand starting at position 21 of SEQ ID NO: 1883299
uccaguuacucauugugag

SEQ ID NO: 2183639 - RNA, 19 nt, Artificial Sequence
  Description of Artificial Sequence: Synthetic oligonucleotide
  Antisense strand to SEQ ID NO: 2183638
cucacaaugaguaacugga

SEQ ID NO: 2183640 - RNA, 19 nt, Artificial Sequence
  Description of Artificial Sequence: Synthetic oligonucleotide
  Sense strand starting at position 27 of SEQ ID NO: 1883299
uacucauugugagguggaa

SEQ ID NO: 2183641 - RNA, 19 nt, Artificial Sequence
  Description of Artificial Sequence: Synthetic oligonucleotide
  Antisense strand to SEQ ID NO: 2183640
uuccaccucacaaugagua

SEQ ID NO: 2183642 - RNA, 19 nt, Artificial Sequence
  Description of Artificial Sequence: Synthetic oligonucleotide
  Sense strand starting at position 29 of SEQ ID NO: 1883299
cucauugugagguggaacu

SEQ ID NO: 2183643 - RNA, 19 nt, Artificial Sequence
  Description of Artificial Sequence: Synthetic oligonucleotide
  Antisense strand to SEQ ID NO: 2183642
aguuccaccucacaaugag

SEQ ID NO: 2183644 - RNA, 19 nt, Artificial Sequence
  Description of Artificial Sequence: Synthetic oligonucleotide
  Sense strand starting at position 40 of SEQ ID NO: 1883299
guggaacugcaguaacuau

SEQ ID NO: 2183645 - RNA, 19 nt, Artificial Sequence
  Description of Artificial Sequence: Synthetic oligonucleotide
  Antisense strand to SEQ ID NO: 2183644
auaguuacugcaguuccac

SEQ ID NO: 2183646 - RNA, 19 nt, Artificial Sequence
  Description of Artificial Sequence: Synthetic oligonucleotide
  Sense strand starting at position 51 of SEQ ID NO: 1883299
guaacuauauuuggugcaa

SEQ ID NO: 2183647 - RNA, 19 nt, Artificial Sequence
  Description of Artificial Sequence: Synthetic oligonucleotide
  Antisense strand to SEQ ID NO: 2183646
uugcaccaaauauaguuac

SEQ ID NO: 2183648 - RNA, 19 nt, Artificial Sequence
  Description of Artificial Sequence: Synthetic oligonucleotide
  Sense strand starting at position 511 of SEQ ID NO: 1883299
ccuugauccagugagaguu

SEQ ID NO: 2183649 - RNA, 19 nt, Artificial Sequence
  Description of Artificial Sequence: Synthetic oligonucleotide
  Antisense strand to SEQ ID NO: 2183648
aacucucacuggaucaagg

SEQ ID NO: 2183650 - RNA, 19 nt, Artificial Sequence
  Description of Artificial Sequence: Synthetic oligonucleotide
  Sense strand starting at position 562 of SEQ ID NO: 1883299
acugauguguuaucucuuu

SEQ ID NO: 2183651 - RNA, 19 nt, Artificial Sequence
  Description of Artificial Sequence: Synthetic oligonucleotide
  Antisense strand to SEQ ID NO: 2183650
aaagagauaacacaucagu

SEQ ID NO: 2183652 - RNA, 19 nt, Artificial Sequence
  Description of Artificial Sequence: Synthetic oligonucleotide
  Sense strand starting at position 672 of SEQ ID NO: 1883299
acuggaaguucuuaucucu

SEQ ID NO: 2183653 - RNA, 19 nt, Artificial Sequence
  Description of Artificial Sequence: Synthetic oligonucleotide
  Antisense strand to SEQ ID NO: 2183652
agagauaagaacuuccagu

SEQ ID NO: 2183654 - RNA, 19 nt, Artificial Sequence
  Description of Artificial Sequence: Synthetic oligonucleotide
  Sense strand starting at position 754 of SEQ ID NO: 1883299
auaaaucugcugcaagauu

SEQ ID NO: 2183655 - RNA, 19 nt, Artificial Sequence
  Description of Artificial Sequence: Synthetic oligonucleotide
  Antisense strand to SEQ ID NO: 2183654
aaucuugcagcagauuuau

SEQ ID NO: 2183656 - RNA, 19 nt, Artificial Sequence
  Description of Artificial Sequence: Synthetic oligonucleotide
  Sense strand starting at position 970 of SEQ ID NO: 1883299
ccuucuugaguuugacaca

SEQ ID NO: 2183657 - RNA, 19 nt, Artificial Sequence
  Description of Artificial Sequence: Synthetic oligonucleotide
  Antisense strand to SEQ ID NO: 2183656
ugugucaaacucaagaagg

SEQ ID NO: 2183658 - RNA, 19 nt, Artificial Sequence
  Description of Artificial Sequence: Synthetic oligonucleotide
  Sense strand starting at position 971 of SEQ ID NO: 1883299
cuucuugaguuugacacaa

SEQ ID NO: 2183659 - RNA, 19 nt, Artificial Sequence
  Description of Artificial Sequence: Synthetic oligonucleotide
  Antisense strand to SEQ ID NO: 2183658
uugugucaaacucaagaag

SEQ ID NO: 2183660 - RNA, 19 nt, Artificial Sequence
  Description of Artificial Sequence: Synthetic oligonucleotide
  Sense strand starting at position 973 of SEQ ID NO: 1883299
ucuugaguuugacacaaga

SEQ ID NO: 2183661 - RNA, 19 nt, Artificial Sequence
  Description of Artificial Sequence: Synthetic oligonucleotide
  Antisense strand to SEQ ID NO: 2183660
ucuugugucaaacucaaga

SEQ ID NO: 2183662 - RNA, 19 nt, Artificial Sequence
  Description of Artificial Sequence: Synthetic oligonucleotide
  Sense strand starting at position 1105 of SEQ ID NO: 1883299
caggauauugcagauucuu

SEQ ID NO: 2183663 - RNA, 19 nt, Artificial Sequence
  Description of Artificial Sequence: Synthetic oligonucleotide
  Antisense strand to SEQ ID NO: 2183662
aagaaucugcaauauccug

SEQ ID NO: 2183664 - RNA, 19 nt, Artificial Sequence
  Description of Artificial Sequence: Synthetic oligonucleotide
  Sense strand starting at position 1111 of SEQ ID NO: 1883299
auugcagauucuuggcaag

SEQ ID NO: 2183665 - RNA, 19 nt, Artificial Sequence
  Description of Artificial Sequence: Synthetic oligonucleotide
  Antisense strand to SEQ ID NO: 2183664
cuugccaagaaucugcaau

SEQ ID NO: 2183666 - RNA, 19 nt, Artificial Sequence
  Description of Artificial Sequence: Synthetic oligonucleotide
  Sense strand starting at position 1113 of SEQ ID NO: 1883299
ugcagauucuuggcaaguu

SEQ ID NO: 2183667 - RNA, 19 nt, Artificial Sequence
  Description of Artificial Sequence: Synthetic oligonucleotide
  Antisense strand to SEQ ID NO: 2183666
aacuugccaagaaucugca

SEQ ID NO: 2183668 - RNA, 19 nt, Artificial Sequence
  Description of Artificial Sequence: Synthetic oligonucleotide
  Sense strand starting at position 1114 of SEQ ID NO: 1883299
gcagauucuuggcaaguuu

SEQ ID NO: 2183669 - RNA, 19 nt, Artificial Sequence
  Description of Artificial Sequence: Synthetic oligonucleotide
  Antisense strand to SEQ ID NO: 2183668
aaacuugccaagaaucugc

SEQ ID NO: 2183670 - RNA, 19 nt, Artificial Sequence
  Description of Artificial Sequence: Synthetic oligonucleotide
  Sense strand starting at position 1723 of SEQ ID NO: 1883299
gcauucaaguggcagguau

SEQ ID NO: 2183671 - RNA, 19 nt, Artificial Sequence
  Description of Artificial Sequence: Synthetic oligonucleotide
  Antisense strand to SEQ ID NO: 2183670
auaccugccacuugaaugc

SEQ ID NO: 2183672 - RNA, 19 nt, Artificial Sequence
  Description of Artificial Sequence: Synthetic oligonucleotide
  Sense strand starting at position 1917 of SEQ ID NO: 1883299
agcugcaucuggcugagaa

SEQ ID NO: 2183673 - RNA, 19 nt, Artificial Sequence
  Description of Artificial Sequence: Synthetic oligonucleotide
  Antisense strand to SEQ ID NO: 2183672
uucucagccagaugcagcu

SEQ ID NO: 2183674 - RNA, 19 nt, Artificial Sequence
  Description of Artificial Sequence: Synthetic oligonucleotide
  Sense strand starting at position 1918 of SEQ ID NO: 1883299
gcugcaucuggcugagaag

SEQ ID NO: 2183675 - RNA, 19 nt, Artificial Sequence
  Description of Artificial Sequence: Synthetic oligonucleotide
  Antisense strand to SEQ ID NO: 2183674
cuucucagccagaugcagc

SEQ ID NO: 2183676 - RNA, 19 nt, Artificial Sequence
  Description of Artificial Sequence: Synthetic oligonucleotide
  Sense strand starting at position 1919 of SEQ ID NO: 1883299
cugcaucuggcugagaaga

SEQ ID NO: 2183677 - RNA, 19 nt, Artificial Sequence
  Description of Artificial Sequence: Synthetic oligonucleotide
  Antisense strand to SEQ ID NO: 2183676
ucuucucagccagaugcag

SEQ ID NO: 2183678 - RNA, 19 nt, Artificial Sequence
  Description of Artificial Sequence: Synthetic oligonucleotide
  Sense strand starting at position 1981 of SEQ ID NO: 1883299
uagagugagucuuccucca

SEQ ID NO: 2183679 - RNA, 19 nt, Artificial Sequence
  Description of Artificial Sequence: Synthetic oligonucleotide
  Antisense strand to SEQ ID NO: 2183678
uggaggaagacucacucua

SEQ ID NO: 2183680 - RNA, 19 nt, Artificial Sequence
  Description of Artificial Sequence: Synthetic oligonucleotide
  Sense strand starting at position 1983 of SEQ ID NO: 1883299
gagugagucuuccuccaug

SEQ ID NO: 2183681 - RNA, 19 nt, Artificial Sequence
  Description of Artificial Sequence: Synthetic oligonucleotide
  Antisense strand to SEQ ID NO: 2183680
cauggaggaagacucacuc

SEQ ID NO: 2183682 - RNA, 19 nt, Artificial Sequence
  Description of Artificial Sequence: Synthetic oligonucleotide
  Sense strand starting at position 2397 of SEQ ID NO: 1883299
uaugaaaccgugugaguau

SEQ ID NO: 2183683 - RNA, 19 nt, Artificial Sequence
  Description of Artificial Sequence: Synthetic oligonucleotide
  Antisense strand to SEQ ID NO: 2183682
auacucacacgguuucaua

SEQ ID NO: 2183684 - RNA, 19 nt, Artificial Sequence
  Description of Artificial Sequence: Synthetic oligonucleotide
  Sense strand starting at position 2549 of SEQ ID NO: 1883299
ggcaaugaaguacaguaau

SEQ ID NO: 2183685 - RNA, 19 nt, Artificial Sequence
  Description of Artificial Sequence: Synthetic oligonucleotide
  Antisense strand to SEQ ID NO: 2183684
auuacuguacuucauugcc

SEQ ID NO: 2183686 - RNA, 19 nt, Artificial Sequence
  Description of Artificial Sequence: Synthetic oligonucleotide
  Sense strand starting at position 2632 of SEQ ID NO: 1883299
gcgauaaccuuuccauguu

SEQ ID NO: 2183687 - RNA, 19 nt, Artificial Sequence
  Description of Artificial Sequence: Synthetic oligonucleotide
  Antisense strand to SEQ ID NO: 2183686
aacauggaaagguuaucgc

SEQ ID NO: 2183688 - RNA, 19 nt, Artificial Sequence
  Description of Artificial Sequence: Synthetic oligonucleotide
  Sense strand starting at position 2834 of SEQ ID NO: 1883299
uaaugcaaucaccgagaga

SEQ ID NO: 2183689 - RNA, 19 nt, Artificial Sequence
  Description of Artificial Sequence: Synthetic oligonucleotide
  Antisense strand to SEQ ID NO: 2183688
ucucucggugauugcauua

SEQ ID NO: 2183690 - RNA, 19 nt, Artificial Sequence
  Description of Artificial Sequence: Synthetic oligonucleotide
  Sense strand starting at position 3252 of SEQ ID NO: 1883299
uguuaauacuagccauugu

SEQ ID NO: 2183691 - RNA, 19 nt, Artificial Sequence
  Description of Artificial Sequence: Synthetic oligonucleotide
  Antisense strand to SEQ ID NO: 2183690
acaauggcuaguauuaaca

SEQ ID NO: 2183692 - RNA, 19 nt, Artificial Sequence
  Description of Artificial Sequence: Synthetic oligonucleotide
  Sense strand starting at position 3263 of SEQ ID NO: 1883299
gccauuguuucagugggaa

SEQ ID NO: 2183693 - RNA, 19 nt, Artificial Sequence
  Description of Artificial Sequence: Synthetic oligonucleotide
  Antisense strand to SEQ ID NO: 2183692
uucccacugaaacaauggc

SEQ ID NO: 2183694 - RNA, 19 nt, Artificial Sequence
  Description of Artificial Sequence: Synthetic oligonucleotide
  Sense strand starting at position 3294 of SEQ ID NO: 1883299
agcggugugucuccuagau

SEQ ID NO: 2183695 - RNA, 19 nt, Artificial Sequence
  Description of Artificial Sequence: Synthetic oligonucleotide
  Antisense strand to SEQ ID NO: 2183694
aucuaggagacacaccgcu

SEQ ID NO: 2183696 - RNA, 19 nt, Artificial Sequence
  Description of Artificial Sequence: Synthetic oligonucleotide
  Sense strand starting at position 3296 of SEQ ID NO: 1883299
cggugugucuccuagauuc

SEQ ID NO: 2183697 - RNA, 19 nt, Artificial Sequence
  Description of Artificial Sequence: Synthetic oligonucleotide
  Antisense strand to SEQ ID NO: 2183696
gaaucuaggagacacaccg

SEQ ID NO: 2183698 - RNA, 19 nt, Artificial Sequence
  Description of Artificial Sequence: Synthetic oligonucleotide
  Sense strand starting at position 3335 of SEQ ID NO: 1883299
augagauguugccucuauu

SEQ ID NO: 2183699 - RNA, 19 nt, Artificial Sequence
  Description of Artificial Sequence: Synthetic oligonucleotide
  Antisense strand to SEQ ID NO: 2183698
aauagaggcaacaucucau

SEQ ID NO: 2183700 - RNA, 19 nt, Artificial Sequence
  Description of Artificial Sequence: Synthetic oligonucleotide
  Sense strand starting at position 3344 of SEQ ID NO: 1883299
ugccucuauuuccaguuau

SEQ ID NO: 2183701 - RNA, 19 nt, Artificial Sequence
  Description of Artificial Sequence: Synthetic oligonucleotide
  Antisense strand to SEQ ID NO: 2183700
auaacuggaaauagaggca

SEQ ID NO: 2183702 - RNA, 19 nt, Artificial Sequence
  Description of Artificial Sequence: Synthetic oligonucleotide
  Sense strand starting at position 3601 of SEQ ID NO: 1883299
cgcagagcccaugaaauua

SEQ ID NO: 2183703 - RNA, 19 nt, Artificial Sequence
  Description of Artificial Sequence: Synthetic oligonucleotide
  Antisense strand to SEQ ID NO: 2183702
uaauuucaugggcucugcg

SEQ ID NO: 2183704 - RNA, 19 nt, Artificial Sequence
  Description of Artificial Sequence: Synthetic oligonucleotide
  Sense strand starting at position 3645 of SEQ ID NO: 1883299
augagaggacugugauguu

SEQ ID NO: 2183705 - RNA, 19 nt, Artificial Sequence
  Description of Artificial Sequence: Synthetic oligonucleotide
  Antisense strand to SEQ ID NO: 2183704
aacaucacaguccucucau

SEQ ID NO: 2183706 - RNA, 19 nt, Artificial Sequence
  Description of Artificial Sequence: Synthetic oligonucleotide
  Sense strand starting at position 3896 of SEQ ID NO: 1883299
gggcaucgguguccuuuaa

SEQ ID NO: 2183707 - RNA, 19 nt, Artificial Sequence
  Description of Artificial Sequence: Synthetic oligonucleotide
  Antisense strand to SEQ ID NO: 2183706
uuaaaggacaccgaugccc

SEQ ID NO: 2183708 - RNA, 19 nt, Artificial Sequence
  Description of Artificial Sequence: Synthetic oligonucleotide
  Sense strand starting at position 294 of SEQ ID NO: 1883300
aaaccacaugggugauauu

SEQ ID NO: 2183709 - RNA, 19 nt, Artificial Sequence
  Description of Artificial Sequence: Synthetic oligonucleotide
  Antisense strand to SEQ ID NO: 2183708
aauaucacccaugugguuu

SEQ ID NO: 2183710 - RNA, 19 nt, Artificial Sequence
  Description of Artificial Sequence: Synthetic oligonucleotide
  Sense strand starting at position 334 of SEQ ID NO: 1883300
gucccauauuaauuguaaa

SEQ ID NO: 2183711 - RNA, 19 nt, Artificial Sequence
  Description of Artificial Sequence: Synthetic oligonucleotide
  Antisense strand to SEQ ID NO: 2183710
uuuacaauuaauaugggac

SEQ ID NO: 2183712 - RNA, 19 nt, Artificial Sequence
  Description of Artificial Sequence: Synthetic oligonucleotide
  Sense strand starting at position 352 of SEQ ID NO: 1883300
agauacuauccuggagggu

SEQ ID NO: 2183713 - RNA, 19 nt, Artificial Sequence
  Description of Artificial Sequence: Synthetic oligonucleotide
  Antisense strand to SEQ ID NO: 2183712
acccuccaggauaguaucu

SEQ ID NO: 2183714 - RNA, 19 nt, Artificial Sequence
  Description of Artificial Sequence: Synthetic oligonucleotide
  Sense strand starting at position 386 of SEQ ID NO: 1883300
cucuguucucugcaauaag

SEQ ID NO: 2183715 - RNA, 19 nt, Artificial Sequence
  Description of Artificial Sequence: Synthetic oligonucleotide
  Antisense strand to SEQ ID NO: 2183714
cuuauugcagagaacagag

SEQ ID NO: 2183716 - RNA, 19 nt, Artificial Sequence
  Description of Artificial Sequence: Synthetic oligonucleotide
  Sense strand starting at position 634 of SEQ ID NO: 1883300
cugcuaggacuuuaacaua

SEQ ID NO: 2183717 - RNA, 19 nt, Artificial Sequence
  Description of Artificial Sequence: Synthetic oligonucleotide
  Antisense strand to SEQ ID NO: 2183716
uauguuaaaguccuagcag

SEQ ID NO: 2183718 - RNA, 19 nt, Artificial Sequence
  Description of Artificial Sequence: Synthetic oligonucleotide
  Sense strand starting at position 716 of SEQ ID NO: 1883300
cucagucagguguauaaua

SEQ ID NO: 2183719 - RNA, 19 nt, Artificial Sequence
  Description of Artificial Sequence: Synthetic oligonucleotide
  Antisense strand to SEQ ID NO: 2183718
uauuauacaccugacugag

SEQ ID NO: 2183720 - RNA, 19 nt, Artificial Sequence
  Description of Artificial Sequence: Synthetic oligonucleotide
  Sense strand starting at position 766 of SEQ ID NO: 1883300
uguccaucagugcaagacu

SEQ ID NO: 2183721 - RNA, 19 nt, Artificial Sequence
  Description of Artificial Sequence: Synthetic oligonucleotide
  Antisense strand to SEQ ID NO: 2183720
agucuugcacugauggaca

SEQ ID NO: 2183722 - RNA, 19 nt, Artificial Sequence
  Description of Artificial Sequence: Synthetic oligonucleotide
  Sense strand starting at position 775 of SEQ ID NO: 1883300
gugcaagacugguuaaaua

SEQ ID NO: 2183723 - RNA, 19 nt, Artificial Sequence
  Description of Artificial Sequence: Synthetic oligonucleotide
  Antisense strand to SEQ ID NO: 2183722
uauuuaaccagucuugcac

SEQ ID NO: 2183724 - RNA, 19 nt, Artificial Sequence
  Description of Artificial Sequence: Synthetic oligonucleotide
  Sense strand starting at position 819 of SEQ ID NO: 1883300
auguuaugaagcugguaaa

SEQ ID NO: 2183725 - RNA, 19 nt, Artificial Sequence
  Description of Artificial Sequence: Synthetic oligonucleotide
  Antisense strand to SEQ ID NO: 2183724
uuuaccagcuucauaacau

SEQ ID NO: 2183726 - RNA, 19 nt, Artificial Sequence
  Description of Artificial Sequence: Synthetic oligonucleotide
  Sense strand starting at position 1010 of SEQ ID NO: 1883300
acaugauuccacuguugaa

SEQ ID NO: 2183727 - RNA, 19 nt, Artificial Sequence
  Description of Artificial Sequence: Synthetic oligonucleotide
  Antisense strand to SEQ ID NO: 2183726
uucaacaguggaaucaugu

SEQ ID NO: 2183728 - RNA, 19 nt, Artificial Sequence
  Description of Artificial Sequence: Synthetic oligonucleotide
  Sense strand starting at position 1047 of SEQ ID NO: 1883300
uuuggagagucucuuuaau

SEQ ID NO: 2183729 - RNA, 19 nt, Artificial Sequence
  Description of Artificial Sequence: Synthetic oligonucleotide
  Antisense strand to SEQ ID NO: 2183728
auuaaagagacucuccaaa

SEQ ID NO: 2183730 - RNA, 19 nt, Artificial Sequence
  Description of Artificial Sequence: Synthetic oligonucleotide
  Sense strand starting at position 1049 of SEQ ID NO: 1883300
uggagagucucuuuaaugu

SEQ ID NO: 2183731 - RNA, 19 nt, Artificial Sequence
  Description of Artificial Sequence: Synthetic oligonucleotide
  Antisense strand to SEQ ID NO: 2183730
acauuaaagagacucucca

SEQ ID NO: 2183732 - RNA, 19 nt, Artificial Sequence
  Description of Artificial Sequence: Synthetic oligonucleotide
  Sense strand starting at position 1191 of SEQ ID NO: 1883300
ccuuuaggucccgagaacu

SEQ ID NO: 2183733 - RNA, 19 nt, Artificial Sequence
  Description of Artificial Sequence: Synthetic oligonucleotide
  Antisense strand to SEQ ID NO: 2183732
aguucucgggaccuaaagg

SEQ ID NO: 2183734 - RNA, 19 nt, Artificial Sequence
  Description of Artificial Sequence: Synthetic oligonucleotide
  Sense strand starting at position 1199 of SEQ ID NO: 1883300
ucccgagaacugcauaaca

SEQ ID NO: 2183735 - RNA, 19 nt, Artificial Sequence
  Description of Artificial Sequence: Synthetic oligonucleotide
  Antisense strand to SEQ ID NO: 2183734
uguuaugcaguucucggga

SEQ ID NO: 2183736 - RNA, 19 nt, Artificial Sequence
  Description of Artificial Sequence: Synthetic oligonucleotide
  Sense strand starting at position 1223 of SEQ ID NO: 1883300
guaccuauccuagagccuu

SEQ ID NO: 2183737 - RNA, 19 nt, Artificial Sequence
  Description of Artificial Sequence: Synthetic oligonucleotide
  Antisense strand to SEQ ID NO: 2183736
aaggcucuaggauagguac

SEQ ID NO: 2183738 - RNA, 19 nt, Artificial Sequence
  Description of Artificial Sequence: Synthetic oligonucleotide
  Sense strand starting at position 1309 of SEQ ID NO: 1883300
gaaggaauucgccaguucu

SEQ ID NO: 2183739 - RNA, 19 nt, Artificial Sequence
  Description of Artificial Sequence: Synthetic oligonucleotide
  Antisense strand to SEQ ID NO: 2183738
agaacuggcgaauuccuuc

SEQ ID NO: 2183740 - RNA, 19 nt, Artificial Sequence
  Description of Artificial Sequence: Synthetic oligonucleotide
  Sense strand starting at position 1319 of SEQ ID NO: 1883300
gccaguucugucuccguuu

SEQ ID NO: 2183741 - RNA, 19 nt, Artificial Sequence
  Description of Artificial Sequence: Synthetic oligonucleotide
  Antisense strand to SEQ ID NO: 2183740
aaacggagacagaacuggc

SEQ ID NO: 2183742 - RNA, 19 nt, Artificial Sequence
  Description of Artificial Sequence: Synthetic oligonucleotide
  Sense strand starting at position 1410 of SEQ ID NO: 1883300
uuaaauaguuauccgacga

SEQ ID NO: 2183743 - RNA, 19 nt, Artificial Sequence
  Description of Artificial Sequence: Synthetic oligonucleotide
  Antisense strand to SEQ ID NO: 2183742
ucgucggauaacuauuuaa

SEQ ID NO: 2183744 - RNA, 19 nt, Artificial Sequence
  Description of Artificial Sequence: Synthetic oligonucleotide
  Sense strand starting at position 1414 of SEQ ID NO: 1883300
auaguuauccgacgacaau

SEQ ID NO: 2183745 - RNA, 19 nt, Artificial Sequence
  Description of Artificial Sequence: Synthetic oligonucleotide
  Antisense strand to SEQ ID NO: 2183744
auugucgucggauaacuau

SEQ ID NO: 2183746 - RNA, 19 nt, Artificial Sequence
  Description of Artificial Sequence: Synthetic oligonucleotide
  Sense strand starting at position 1415 of SEQ ID NO: 1883300
uaguuauccgacgacaauc

SEQ ID NO: 2183747 - RNA, 19 nt, Artificial Sequence
  Description of Artificial Sequence: Synthetic oligonucleotide
  Antisense strand to SEQ ID NO: 2183746
gauugucgucggauaacua

SEQ ID NO: 2183748 - RNA, 19 nt, Artificial Sequence
  Description of Artificial Sequence: Synthetic oligonucleotide
  Sense strand starting at position 1439 of SEQ ID NO: 1883300
cagccuuucggcuauuuga

SEQ ID NO: 2183749 - RNA, 19 nt, Artificial Sequence
  Description of Artificial Sequence: Synthetic oligonucleotide
  Antisense strand to SEQ ID NO: 2183748
ucaaauagccgaaaggcug

SEQ ID NO: 2183750 - RNA, 19 nt, Artificial Sequence
  Description of Artificial Sequence: Synthetic oligonucleotide
  Sense strand starting at position 1568 of SEQ ID NO: 1883300
uagguuucccuggacuaca

SEQ ID NO: 2183751 - RNA, 19 nt, Artificial Sequence
  Description of Artificial Sequence: Synthetic oligonucleotide
  Antisense strand to SEQ ID NO: 2183750
uguaguccagggaaaccua

SEQ ID NO: 2183752 - RNA, 19 nt, Artificial Sequence
  Description of Artificial Sequence: Synthetic oligonucleotide
  Sense strand starting at position 1583 of SEQ ID NO: 1883300
uacaguuguccaggagcaa

SEQ ID NO: 2183753 - RNA, 19 nt, Artificial Sequence
  Description of Artificial Sequence: Synthetic oligonucleotide
  Antisense strand to SEQ ID NO: 2183752
uugcuccuggacaacugua

SEQ ID NO: 2183754 - RNA, 19 nt, Artificial Sequence
  Description of Artificial Sequence: Synthetic oligonucleotide
  Sense strand starting at position 1584 of SEQ ID NO: 1883300
acaguuguccaggagcaag

SEQ ID NO: 2183755 - RNA, 19 nt, Artificial Sequence
  Description of Artificial Sequence: Synthetic oligonucleotide
  Antisense strand to SEQ ID NO: 2183754
cuugcuccuggacaacugu

SEQ ID NO: 2183756 - RNA, 19 nt, Artificial Sequence
  Description of Artificial Sequence: Synthetic oligonucleotide
  Sense strand starting at position 1598 of SEQ ID NO: 1883300
gcaagaauagauugggcaa

SEQ ID NO: 2183757 - RNA, 19 nt, Artificial Sequence
  Description of Artificial Sequence: Synthetic oligonucleotide
  Antisense strand to SEQ ID NO: 2183756
uugcccaaucuauucuugc

SEQ ID NO: 2183758 - RNA, 19 nt, Artificial Sequence
  Description of Artificial Sequence: Synthetic oligonucleotide
  Sense strand starting at position 2316 of SEQ ID NO: 1883300
ugcagcgaauuuguuguaa

SEQ ID NO: 2183759 - RNA, 19 nt, Artificial Sequence
  Description of Artificial Sequence: Synthetic oligonucleotide
  Antisense strand to SEQ ID NO: 2183758
uuacaacaaauucgcugca

SEQ ID NO: 2183760 - RNA, 19 nt, Artificial Sequence
  Description of Artificial Sequence: Synthetic oligonucleotide
  Sense strand starting at position 2327 of SEQ ID NO: 1883300
uguuguaaucuacacauua

SEQ ID NO: 2183761 - RNA, 19 nt, Artificial Sequence
  Description of Artificial Sequence: Synthetic oligonucleotide
  Antisense strand to SEQ ID NO: 2183760
uaauguguagauuacaaca

SEQ ID NO: 2183762 - RNA, 19 nt, Artificial Sequence
  Description of Artificial Sequence: Synthetic oligonucleotide
  Sense strand starting at position 2592 of SEQ ID NO: 1883300
uuccaaacauuugggagaa

SEQ ID NO: 2183763 - RNA, 19 nt, Artificial Sequence
  Description of Artificial Sequence: Synthetic oligonucleotide
  Antisense strand to SEQ ID NO: 2183762
uucucccaaauguuuggaa

SEQ ID NO: 2183764 - RNA, 19 nt, Artificial Sequence
  Description of Artificial Sequence: Synthetic oligonucleotide
  Sense strand starting at position 2593 of SEQ ID NO: 1883300
uccaaacauuugggagaau

SEQ ID NO: 2183765 - RNA, 19 nt, Artificial Sequence
  Description of Artificial Sequence: Synthetic oligonucleotide
  Antisense strand to SEQ ID NO: 2183764
auucucccaaauguuugga

SEQ ID NO: 2183766 - RNA, 19 nt, Artificial Sequence
  Description of Artificial Sequence: Synthetic oligonucleotide
  Sense strand starting at position 2667 of SEQ ID NO: 1883300
ucccauuuccugcggauaa

SEQ ID NO: 2183767 - RNA, 19 nt, Artificial Sequence
  Description of Artificial Sequence: Synthetic oligonucleotide
  Antisense strand to SEQ ID NO: 2183766
uuauccgcaggaaauggga

SEQ ID NO: 2183768 - RNA, 19 nt, Artificial Sequence
  Description of Artificial Sequence: Synthetic oligonucleotide
  Sense strand starting at position 2781 of SEQ ID NO: 1883300
cccagcuuuguuugaaaga

SEQ ID NO: 2183769 - RNA, 19 nt, Artificial Sequence
  Description of Artificial Sequence: Synthetic oligonucleotide
  Antisense strand to SEQ ID NO: 2183768
ucuuucaaacaaagcuggg

SEQ ID NO: 2183770 - RNA, 19 nt, Artificial Sequence
  Description of Artificial Sequence: Synthetic oligonucleotide
  Sense strand starting at position 2828 of SEQ ID NO: 1883300
gugucaauuguguagaaua

SEQ ID NO: 2183771 - RNA, 19 nt, Artificial Sequence
  Description of Artificial Sequence: Synthetic oligonucleotide
  Antisense strand to SEQ ID NO: 2183770
uauucuacacaauugacac

SEQ ID NO: 2183772 - RNA, 19 nt, Artificial Sequence
  Description of Artificial Sequence: Synthetic oligonucleotide
  Sense strand starting at position 2830 of SEQ ID NO: 1883300
gucaauuguguagaauaaa

SEQ ID NO: 2183773 - RNA, 19 nt, Artificial Sequence
  Description of Artificial Sequence: Synthetic oligonucleotide
  Antisense strand to SEQ ID NO: 2183772
uuuauucuacacaauugac

SEQ ID NO: 2183774 - RNA, 19 nt, Artificial Sequence
  Description of Artificial Sequence: Synthetic oligonucleotide
  Sense strand starting at position 2878 of SEQ ID NO: 1883300
uucuauguuuauguacaga

SEQ ID NO: 2183775 - RNA, 19 nt, Artificial Sequence
  Description of Artificial Sequence: Synthetic oligonucleotide
  Antisense strand to SEQ ID NO: 2183774
ucuguacauaaacauagaa

SEQ ID NO: 2183776 - RNA, 19 nt, Artificial Sequence
  Description of Artificial Sequence: Synthetic oligonucleotide
  Sense strand starting at position 2929 of SEQ ID NO: 1883300
ucaaguuuacaaggcuaga

SEQ ID NO: 2183777 - RNA, 19 nt, Artificial Sequence
  Description of Artificial Sequence: Synthetic oligonucleotide
  Antisense strand to SEQ ID NO: 2183776
ucuagccuuguaaacuuga

SEQ ID NO: 2183778 - RNA, 19 nt, Artificial Sequence
  Description of Artificial Sequence: Synthetic oligonucleotide
  Sense strand starting at position 2962 of SEQ ID NO: 1883300
cuuuccaaggcugauuaua

SEQ ID NO: 2183779 - RNA, 19 nt, Artificial Sequence
  Description of Artificial Sequence: Synthetic oligonucleotide
  Antisense strand to SEQ ID NO: 2183778
uauaaucagccuuggaaag

SEQ ID NO: 2183780 - RNA, 19 nt, Artificial Sequence
  Description of Artificial Sequence: Synthetic oligonucleotide
  Sense strand starting at position 3332 of SEQ ID NO: 1883300
uauggcuugcuggaagaua

SEQ ID NO: 2183781 - RNA, 19 nt, Artificial Sequence
  Description of Artificial Sequence: Synthetic oligonucleotide
  Antisense strand to SEQ ID NO: 2183780
uaucuuccagcaagccaua

SEQ ID NO: 2183782 - RNA, 19 nt, Artificial Sequence
  Description of Artificial Sequence: Synthetic oligonucleotide
  Sense strand starting at position 3621 of SEQ ID NO: 1883300
ugauuacuuugaucaauug

SEQ ID NO: 2183783 - RNA, 19 nt, Artificial Sequence
  Description of Artificial Sequence: Synthetic oligonucleotide
  Antisense strand to SEQ ID NO: 2183782
caauugaucaaaguaauca

SEQ ID NO: 2183784 - RNA, 19 nt, Artificial Sequence
  Description of Artificial Sequence: Synthetic oligonucleotide
  Sense strand starting at position 3730 of SEQ ID NO: 1883300
gaaggcaugucaucagaug

SEQ ID NO: 2183785 - RNA, 19 nt, Artificial Sequence
  Description of Artificial Sequence: Synthetic oligonucleotide
  Antisense strand to SEQ ID NO: 2183784
caucugaugacaugccuuc

SEQ ID NO: 2183786 - RNA, 19 nt, Artificial Sequence
  Description of Artificial Sequence: Synthetic oligonucleotide
  Sense strand starting at position 3960 of SEQ ID NO: 1883300
auuugucuucuccagcuuu

SEQ ID NO: 2183787 - RNA, 19 nt, Artificial Sequence
  Description of Artificial Sequence: Synthetic oligonucleotide
  Antisense strand to SEQ ID NO: 2183786
aaagcuggagaagacaaau

SEQ ID NO: 2183788 - RNA, 19 nt, Artificial Sequence
  Description of Artificial Sequence: Synthetic oligonucleotide
  Sense strand starting at position 66 of SEQ ID NO: 1883301
ccaggcaaucccuaacagu

SEQ ID NO: 2183789 - RNA, 19 nt, Artificial Sequence
  Description of Artificial Sequence: Synthetic oligonucleotide
  Antisense strand to SEQ ID NO: 2183788
acuguuagggauugccugg

SEQ ID NO: 2183790 - RNA, 19 nt, Artificial Sequence
  Description of Artificial Sequence: Synthetic oligonucleotide
  Sense strand starting at position 76 of SEQ ID NO: 1883301
ccuaacaguguuuaccauu

SEQ ID NO: 2183791 - RNA, 19 nt, Artificial Sequence
  Description of Artificial Sequence: Synthetic oligonucleotide
  Antisense strand to SEQ ID NO: 2183790
aaugguaaacacuguuagg

SEQ ID NO: 2183792 - RNA, 19 nt, Artificial Sequence
  Description of Artificial Sequence: Synthetic oligonucleotide
  Sense strand starting at position 135 of SEQ ID NO: 1883301
guuuaauauucugugauga

SEQ ID NO: 2183793 - RNA, 19 nt, Artificial Sequence
  Description of Artificial Sequence: Synthetic oligonucleotide
  Antisense strand to SEQ ID NO: 2183792
ucaucacagaauauuaaac

SEQ ID NO: 2183794 - RNA, 19 nt, Artificial Sequence
  Description of Artificial Sequence: Synthetic oligonucleotide
  Sense strand starting at position 249 of SEQ ID NO: 1883301
cgguaugaauuccucauaa

SEQ ID NO: 2183795 - RNA, 19 nt, Artificial Sequence
  Description of Artificial Sequence: Synthetic oligonucleotide
  Antisense strand to SEQ ID NO: 2183794
uuaugaggaauucauaccg

SEQ ID NO: 2183796 - RNA, 19 nt, Artificial Sequence
  Description of Artificial Sequence: Synthetic oligonucleotide
  Sense strand starting at position 601 of SEQ ID NO: 1883301
ucgaaagaacgcuauacga

SEQ ID NO: 2183797 - RNA, 19 nt, Artificial Sequence
  Description of Artificial Sequence: Synthetic oligonucleotide
  Antisense strand to SEQ ID NO: 2183796
ucguauagcguucuuucga

SEQ ID NO: 2183798 - RNA, 19 nt, Artificial Sequence
  Description of Artificial Sequence: Synthetic oligonucleotide
  Sense strand starting at position 603 of SEQ ID NO: 1883301
gaaagaacgcuauacgaac

SEQ ID NO: 2183799 - RNA, 19 nt, Artificial Sequence
  Description of Artificial Sequence: Synthetic oligonucleotide
  Antisense strand to SEQ ID NO: 2183798
guucguauagcguucuuuc

SEQ ID NO: 2183800 - RNA, 19 nt, Artificial Sequence
  Description of Artificial Sequence: Synthetic oligonucleotide
  Sense strand starting at position 1514 of SEQ ID NO: 1883301
ggcuuuacucuuuagagua

SEQ ID NO: 2183801 - RNA, 19 nt, Artificial Sequence
  Description of Artificial Sequence: Synthetic oligonucleotide
  Antisense strand to SEQ ID NO: 2183800
uacucuaaagaguaaagcc

SEQ ID NO: 2183802 - RNA, 19 nt, Artificial Sequence
  Description of Artificial Sequence: Synthetic oligonucleotide
  Sense strand starting at position 1527 of SEQ ID NO: 1883301
agaguagauuauguuccau

SEQ ID NO: 2183803 - RNA, 19 nt, Artificial Sequence
  Description of Artificial Sequence: Synthetic oligonucleotide
  Antisense strand to SEQ ID NO: 2183802
auggaacauaaucuacucu

SEQ ID NO: 2183804 - RNA, 19 nt, Artificial Sequence
  Description of Artificial Sequence: Synthetic oligonucleotide
  Sense strand starting at position 1557 of SEQ ID NO: 1883301
uuggguuccuaucucaaau

SEQ ID NO: 2183805 - RNA, 19 nt, Artificial Sequence
  Description of Artificial Sequence: Synthetic oligonucleotide
  Antisense strand to SEQ ID NO: 2183804
auuugagauaggaacccaa

SEQ ID NO: 2183806 - RNA, 19 nt, Artificial Sequence
  Description of Artificial Sequence: Synthetic oligonucleotide
  Sense strand starting at position 1664 of SEQ ID NO: 1883301
cggugcugucugcugaaua

SEQ ID NO: 2183807 - RNA, 19 nt, Artificial Sequence
  Description of Artificial Sequence: Synthetic oligonucleotide
  Antisense strand to SEQ ID NO: 2183806
uauucagcagacagcaccg

SEQ ID NO: 2183808 - RNA, 19 nt, Artificial Sequence
  Description of Artificial Sequence: Synthetic oligonucleotide
  Sense strand starting at position 1708 of SEQ ID NO: 1883301
guguauucccucccgcagu

SEQ ID NO: 2183809 - RNA, 19 nt, Artificial Sequence
  Description of Artificial Sequence: Synthetic oligonucleotide
  Antisense strand to SEQ ID NO: 2183808
acugcgggagggaauacac

SEQ ID NO: 2183810 - RNA, 19 nt, Artificial Sequence
  Description of Artificial Sequence: Synthetic oligonucleotide
  Sense strand starting at position 1753 of SEQ ID NO: 1883301
aggugcucuggcguuuaua

SEQ ID NO: 2183811 - RNA, 19 nt, Artificial Sequence
  Description of Artificial Sequence: Synthetic oligonucleotide
  Antisense strand to SEQ ID NO: 2183810
uauaaacgccagagcaccu

SEQ ID NO: 2183812 - RNA, 19 nt, Artificial Sequence
  Description of Artificial Sequence: Synthetic oligonucleotide
  Sense strand starting at position 1754 of SEQ ID NO: 1883301
ggugcucuggcguuuauaa

SEQ ID NO: 2183813 - RNA, 19 nt, Artificial Sequence
  Description of Artificial Sequence: Synthetic oligonucleotide
  Antisense strand to SEQ ID NO: 2183812
uuauaaacgccagagcacc

SEQ ID NO: 2183814 - RNA, 19 nt, Artificial Sequence
  Description of Artificial Sequence: Synthetic oligonucleotide
  Sense strand starting at position 1755 of SEQ ID NO: 1883301
gugcucuggcguuuauaau

SEQ ID NO: 2183815 - RNA, 19 nt, Artificial Sequence
  Description of Artificial Sequence: Synthetic oligonucleotide
  Antisense strand to SEQ ID NO: 2183814
auuauaaacgccagagcac

SEQ ID NO: 2183816 - RNA, 19 nt, Artificial Sequence
  Description of Artificial Sequence: Synthetic oligonucleotide
  Sense strand starting at position 1761 of SEQ ID NO: 1883301
uggcguuuauaauuuggua

SEQ ID NO: 2183817 - RNA, 19 nt, Artificial Sequence
  Description of Artificial Sequence: Synthetic oligonucleotide
  Antisense strand to SEQ ID NO: 2183816
uaccaaauuauaaacgcca

SEQ ID NO: 2183818 - RNA, 19 nt, Artificial Sequence
  Description of Artificial Sequence: Synthetic oligonucleotide
  Sense strand starting at position 1763 of SEQ ID NO: 1883301
gcguuuauaauuugguauc

SEQ ID NO: 2183819 - RNA, 19 nt, Artificial Sequence
  Description of Artificial Sequence: Synthetic oligonucleotide
  Antisense strand to SEQ ID NO: 2183818
gauaccaaauuauaaacgc

SEQ ID NO: 2183820 - RNA, 19 nt, Artificial Sequence
  Description of Artificial Sequence: Synthetic oligonucleotide
  Sense strand starting at position 2000 of SEQ ID NO: 1883301
cagugacucucugugaaac

SEQ ID NO: 2183821 - RNA, 19 nt, Artificial Sequence
  Description of Artificial Sequence: Synthetic oligonucleotide
  Antisense strand to SEQ ID NO: 2183820
guuucacagagagucacug

SEQ ID NO: 2183822 - RNA, 19 nt, Artificial Sequence
  Description of Artificial Sequence: Synthetic oligonucleotide
  Sense strand starting at position 2001 of SEQ ID NO: 1883301
agugacucucugugaaacu

SEQ ID NO: 2183823 - RNA, 19 nt, Artificial Sequence
  Description of Artificial Sequence: Synthetic oligonucleotide
  Antisense strand to SEQ ID NO: 2183822
aguuucacagagagucacu

SEQ ID NO: 2183824 - RNA, 19 nt, Artificial Sequence
  Description of Artificial Sequence: Synthetic oligonucleotide
  Sense strand starting at position 2062 of SEQ ID NO: 1883301
ggucaucugugagucagaa

SEQ ID NO: 2183825 - RNA, 19 nt, Artificial Sequence
  Description of Artificial Sequence: Synthetic oligonucleotide
  Antisense strand to SEQ ID NO: 2183824
uucugacucacagaugacc

SEQ ID NO: 2183826 - RNA, 19 nt, Artificial Sequence
  Description of Artificial Sequence: Synthetic oligonucleotide
  Sense strand starting at position 2123 of SEQ ID NO: 1883301
agccgaaagcgcucauguu

SEQ ID NO: 2183827 - RNA, 19 nt, Artificial Sequence
  Description of Artificial Sequence: Synthetic oligonucleotide
  Antisense strand to SEQ ID NO: 2183826
aacaugagcgcuuucggcu

SEQ ID NO: 2183828 - RNA, 19 nt, Artificial Sequence
  Description of Artificial Sequence: Synthetic oligonucleotide
  Sense strand starting at position 2356 of SEQ ID NO: 1883301
agggcuggcgacgauuaaa

SEQ ID NO: 2183829 - RNA, 19 nt, Artificial Sequence
  Description of Artificial Sequence: Synthetic oligonucleotide
  Antisense strand to SEQ ID NO: 2183828
uuuaaucgucgccagcccu

SEQ ID NO: 2183830 - RNA, 19 nt, Artificial Sequence
  Description of Artificial Sequence: Synthetic oligonucleotide
  Sense strand starting at position 2364 of SEQ ID NO: 1883301
cgacgauuaaaccaaguaa

SEQ ID NO: 2183831 - RNA, 19 nt, Artificial Sequence
  Description of Artificial Sequence: Synthetic oligonucleotide
  Antisense strand to SEQ ID NO: 2183830
uuacuugguuuaaucgucg

SEQ ID NO: 2183832 - RNA, 19 nt, Artificial Sequence
  Description of Artificial Sequence: Synthetic oligonucleotide
  Sense strand starting at position 2416 of SEQ ID NO: 1883301
guaagauaaaugcaguguu

SEQ ID NO: 2183833 - RNA, 19 nt, Artificial Sequence
  Description of Artificial Sequence: Synthetic oligonucleotide
  Antisense strand to SEQ ID NO: 2183832
aacacugcauuuaucuuac

SEQ ID NO: 2183834 - RNA, 19 nt, Artificial Sequence
  Description of Artificial Sequence: Synthetic oligonucleotide
  Sense strand starting at position 2431 of SEQ ID NO: 1883301
uguuaagugccugacaacu

SEQ ID NO: 2183835 - RNA, 19 nt, Artificial Sequence
  Description of Artificial Sequence: Synthetic oligonucleotide
  Antisense strand to SEQ ID NO: 2183834
aguugucaggcacuuaaca

SEQ ID NO: 2183836 - RNA, 19 nt, Artificial Sequence
  Description of Artificial Sequence: Synthetic oligonucleotide
  Sense strand starting at position 2512 of SEQ ID NO: 1883301
uguuauaaggccgguauuu

SEQ ID NO: 2183837 - RNA, 19 nt, Artificial Sequence
  Description of Artificial Sequence: Synthetic oligonucleotide
  Antisense strand to SEQ ID NO: 2183836
aaauaccggccuuauaaca

SEQ ID NO: 2183838 - RNA, 19 nt, Artificial Sequence
  Description of Artificial Sequence: Synthetic oligonucleotide
  Sense strand starting at position 2648 of SEQ ID NO: 1883301
uuggcuccuaccgaguaaa

SEQ ID NO: 2183839 - RNA, 19 nt, Artificial Sequence
  Description of Artificial Sequence: Synthetic oligonucleotide
  Antisense strand to SEQ ID NO: 2183838
uuuacucgguaggagccaa

SEQ ID NO: 2183840 - RNA, 19 nt, Artificial Sequence
  Description of Artificial Sequence: Synthetic oligonucleotide
  Sense strand starting at position 2681 of SEQ ID NO: 1883301
aaguuuguuccagaagcuu

SEQ ID NO: 2183841 - RNA, 19 nt, Artificial Sequence
  Description of Artificial Sequence: Synthetic oligonucleotide
  Antisense strand to SEQ ID NO: 2183840
aagcuucuggaacaaacuu

SEQ ID NO: 2183842 - RNA, 19 nt, Artificial Sequence
  Description of Artificial Sequence: Synthetic oligonucleotide
  Sense strand starting at position 2761 of SEQ ID NO: 1883301
cgagaugcgcucaaguguu

SEQ ID NO: 2183843 - RNA, 19 nt, Artificial Sequence
  Description of Artificial Sequence: Synthetic oligonucleotide
  Antisense strand to SEQ ID NO: 2183842
aacacuugagcgcaucucg

SEQ ID NO: 2183844 - RNA, 19 nt, Artificial Sequence
  Description of Artificial Sequence: Synthetic oligonucleotide
  Sense strand starting at position 3033 of SEQ ID NO: 1883301
uaagucagacauugugaga

SEQ ID NO: 2183845 - RNA, 19 nt, Artificial Sequence
  Description of Artificial Sequence: Synthetic oligonucleotide
  Antisense strand to SEQ ID NO: 2183844
ucucacaaugucugacuua

SEQ ID NO: 2183846 - RNA, 19 nt, Artificial Sequence
  Description of Artificial Sequence: Synthetic oligonucleotide
  Sense strand starting at position 3162 of SEQ ID NO: 1883301
gagagaaccuuuguuuaug

SEQ ID NO: 2183847 - RNA, 19 nt, Artificial Sequence
  Description of Artificial Sequence: Synthetic oligonucleotide
  Antisense strand to SEQ ID NO: 2183846
cauaaacaaagguucucuc

SEQ ID NO: 2183848 - RNA, 19 nt, Artificial Sequence
  Description of Artificial Sequence: Synthetic oligonucleotide
  Sense strand starting at position 3163 of SEQ ID NO: 1883301
agagaaccuuuguuuauga

SEQ ID NO: 2183849 - RNA, 19 nt, Artificial Sequence
  Description of Artificial Sequence: Synthetic oligonucleotide
  Antisense strand to SEQ ID NO: 2183848
ucauaaacaaagguucucu

SEQ ID NO: 2183850 - RNA, 19 nt, Artificial Sequence
  Description of Artificial Sequence: Synthetic oligonucleotide
  Sense strand starting at position 3164 of SEQ ID NO: 1883301
gagaaccuuuguuuaugau

SEQ ID NO: 2183851 - RNA, 19 nt, Artificial Sequence
  Description of Artificial Sequence: Synthetic oligonucleotide
  Antisense strand to SEQ ID NO: 2183850
aucauaaacaaagguucuc

SEQ ID NO: 2183852 - RNA, 19 nt, Artificial Sequence
  Description of Artificial Sequence: Synthetic oligonucleotide
  Sense strand starting at position 3549 of SEQ ID NO: 1883301
ucauccuuuccaggugaaa

SEQ ID NO: 2183853 - RNA, 19 nt, Artificial Sequence
  Description of Artificial Sequence: Synthetic oligonucleotide
  Antisense strand to SEQ ID NO: 2183852
uuucaccuggaaaggauga

SEQ ID NO: 2183854 - RNA, 19 nt, Artificial Sequence
  Description of Artificial Sequence: Synthetic oligonucleotide
  Sense strand starting at position 3656 of SEQ ID NO: 1883301
uggcgaaccucauuuguga

SEQ ID NO: 2183855 - RNA, 19 nt, Artificial Sequence
  Description of Artificial Sequence: Synthetic oligonucleotide
  Antisense strand to SEQ ID NO: 2183854
ucacaaaugagguucgcca

SEQ ID NO: 2183856 - RNA, 19 nt, Artificial Sequence
  Description of Artificial Sequence: Synthetic oligonucleotide
  Sense strand starting at position 3658 of SEQ ID NO: 1883301
gcgaaccucauuugugaau

SEQ ID NO: 2183857 - RNA, 19 nt, Artificial Sequence
  Description of Artificial Sequence: Synthetic oligonucleotide
  Antisense strand to SEQ ID NO: 2183856
auucacaaaugagguucgc

SEQ ID NO: 2183858 - RNA, 19 nt, Artificial Sequence
  Description of Artificial Sequence: Synthetic oligonucleotide
  Sense strand starting at position 3817 of SEQ ID NO: 1883301
cuccgaaagccacaauuaa

SEQ ID NO: 2183859 - RNA, 19 nt, Artificial Sequence
  Description of Artificial Sequence: Synthetic oligonucleotide
  Antisense strand to SEQ ID NO: 2183858
uuaauuguggcuuucggag

SEQ ID NO: 2183860 - RNA, 19 nt, Artificial Sequence
  Description of Artificial Sequence: Synthetic oligonucleotide
  Sense strand starting at position 3882 of SEQ ID NO: 1883301
guacuucugccauauaaga

SEQ ID NO: 2183861 - RNA, 19 nt, Artificial Sequence
  Description of Artificial Sequence: Synthetic oligonucleotide
  Antisense strand to SEQ ID NO: 2183860
ucuuauauggcagaaguac

SEQ ID NO: 2183862 - RNA, 19 nt, Artificial Sequence
  Description of Artificial Sequence: Synthetic oligonucleotide
  Sense strand starting at position 3899 of SEQ ID NO: 1883301
gaaagaguuauuggaaggu

SEQ ID NO: 2183863 - RNA, 19 nt, Artificial Sequence
  Description of Artificial Sequence: Synthetic oligonucleotide
  Antisense strand to SEQ ID NO: 2183862
accuuccaauaacucuuuc

SEQ ID NO: 2183864 - RNA, 19 nt, Artificial Sequence
  Description of Artificial Sequence: Synthetic oligonucleotide
  Sense strand starting at position 3903 of SEQ ID NO: 1883301
gaguuauuggaagguguug

SEQ ID NO: 2183865 - RNA, 19 nt, Artificial Sequence
  Description of Artificial Sequence: Synthetic oligonucleotide
  Antisense strand to SEQ ID NO: 2183864
caacaccuuccaauaacuc

SEQ ID NO: 2183866 - RNA, 19 nt, Artificial Sequence
  Description of Artificial Sequence: Synthetic oligonucleotide
  Sense strand starting at position 3915 of SEQ ID NO: 1883301
gguguugggaaauauuguu

SEQ ID NO: 2183867 - RNA, 19 nt, Artificial Sequence
  Description of Artificial Sequence: Synthetic oligonucleotide
  Antisense strand to SEQ ID NO: 2183866
aacaauauuucccaacacc

SEQ ID NO: 2183868 - RNA, 19 nt, Artificial Sequence
  Description of Artificial Sequence: Synthetic oligonucleotide
  Sense strand starting at position 5 of SEQ ID NO: 1883302
gggacugugcuucagaggu

SEQ ID NO: 2183869 - RNA, 19 nt, Artificial Sequence
  Description of Artificial Sequence: Synthetic oligonucleotide
  Antisense strand to SEQ ID NO: 2183868
accucugaagcacaguccc

SEQ ID NO: 2183870 - RNA, 19 nt, Artificial Sequence
  Description of Artificial Sequence: Synthetic oligonucleotide
  Sense strand starting at position 209 of SEQ ID NO: 1883302
ucuguuucgacucauugga

SEQ ID NO: 2183871 - RNA, 19 nt, Artificial Sequence
  Description of Artificial Sequence: Synthetic oligonucleotide
  Antisense strand to SEQ ID NO: 2183870
uccaaugagucgaaacaga

SEQ ID NO: 2183872 - RNA, 19 nt, Artificial Sequence
  Description of Artificial Sequence: Synthetic oligonucleotide
  Sense strand starting at position 211 of SEQ ID NO: 1883302
uguuucgacucauuggaag

SEQ ID NO: 2183873 - RNA, 19 nt, Artificial Sequence
  Description of Artificial Sequence: Synthetic oligonucleotide
  Antisense strand to SEQ ID NO: 2183872
cuuccaaugagucgaaaca

SEQ ID NO: 2183874 - RNA, 19 nt, Artificial Sequence
  Description of Artificial Sequence: Synthetic oligonucleotide
  Sense strand starting at position 402 of SEQ ID NO: 1883302
acuauucaacguggcgaga

SEQ ID NO: 2183875 - RNA, 19 nt, Artificial Sequence
  Description of Artificial Sequence: Synthetic oligonucleotide
  Antisense strand to SEQ ID NO: 2183874
ucucgccacguugaauagu

SEQ ID NO: 2183876 - RNA, 19 nt, Artificial Sequence
  Description of Artificial Sequence: Synthetic oligonucleotide
  Sense strand starting at position 430 of SEQ ID NO: 1883302
ggaugucccacaugagcaa

SEQ ID NO: 2183877 - RNA, 19 nt, Artificial Sequence
  Description of Artificial Sequence: Synthetic oligonucleotide
  Antisense strand to SEQ ID NO: 2183876
uugcucaugugggacaucc

SEQ ID NO: 2183878 - RNA, 19 nt, Artificial Sequence
  Description of Artificial Sequence: Synthetic oligonucleotide
  Sense strand starting at position 550 of SEQ ID NO: 1883302
acgucaauaggucacauua

SEQ ID NO: 2183879 - RNA, 19 nt, Artificial Sequence
  Description of Artificial Sequence: Synthetic oligonucleotide
  Antisense strand to SEQ ID NO: 2183878
uaaugugaccuauugacgu

SEQ ID NO: 2183880 - RNA, 19 nt, Artificial Sequence
  Description of Artificial Sequence: Synthetic oligonucleotide
  Sense strand starting at position 744 of SEQ ID NO: 1883302
uuacuuuauguaggauaga

SEQ ID NO: 2183881 - RNA, 19 nt, Artificial Sequence
  Description of Artificial Sequence: Synthetic oligonucleotide
  Antisense strand to SEQ ID NO: 2183880
ucuauccuacauaaaguaa

SEQ ID NO: 2183882 - RNA, 19 nt, Artificial Sequence
  Description of Artificial Sequence: Synthetic oligonucleotide
  Sense strand starting at position 992 of SEQ ID NO: 1883302
gucggguucgucgaagaga

SEQ ID NO: 2183883 - RNA, 19 nt, Artificial Sequence
  Description of Artificial Sequence: Synthetic oligonucleotide
  Antisense strand to SEQ ID NO: 2183882
ucucuucgacgaacccgac

SEQ ID NO: 2183884 - RNA, 19 nt, Artificial Sequence
  Description of Artificial Sequence: Synthetic oligonucleotide
  Sense strand starting at position 1588 of SEQ ID NO: 1883302
uugcacauucuuggcaauu

SEQ ID NO: 2183885 - RNA, 19 nt, Artificial Sequence
  Description of Artificial Sequence: Synthetic oligonucleotide
  Antisense strand to SEQ ID NO: 2183884
aauugccaagaaugugcaa

SEQ ID NO: 2183886 - RNA, 19 nt, Artificial Sequence
  Description of Artificial Sequence: Synthetic oligonucleotide
  Sense strand starting at position 1589 of SEQ ID NO: 1883302
ugcacauucuuggcaauuu

SEQ ID NO: 2183887 - RNA, 19 nt, Artificial Sequence
  Description of Artificial Sequence: Synthetic oligonucleotide
  Antisense strand to SEQ ID NO: 2183886
aaauugccaagaaugugca

SEQ ID NO: 2183888 - RNA, 19 nt, Artificial Sequence
  Description of Artificial Sequence: Synthetic oligonucleotide
  Sense strand starting at position 1621 of SEQ ID NO: 1883302
aucggagaaucucuuccau

SEQ ID NO: 2183889 - RNA, 19 nt, Artificial Sequence
  Description of Artificial Sequence: Synthetic oligonucleotide
  Antisense strand to SEQ ID NO: 2183888
auggaagagauucuccgau

SEQ ID NO: 2183890 - RNA, 19 nt, Artificial Sequence
  Description of Artificial Sequence: Synthetic oligonucleotide
  Sense strand starting at position 1623 of SEQ ID NO: 1883302
cggagaaucucuuccauac

SEQ ID NO: 2183891 - RNA, 19 nt, Artificial Sequence
  Description of Artificial Sequence: Synthetic oligonucleotide
  Antisense strand to SEQ ID NO: 2183890
guauggaagagauucuccg

SEQ ID NO: 2183892 - RNA, 19 nt, Artificial Sequence
  Description of Artificial Sequence: Synthetic oligonucleotide
  Sense strand starting at position 1649 of SEQ ID NO: 1883302
aggaucuuggcagaagugu

SEQ ID NO: 2183893 - RNA, 19 nt, Artificial Sequence
  Description of Artificial Sequence: Synthetic oligonucleotide
  Antisense strand to SEQ ID NO: 2183892
acacuucugccaagauccu

SEQ ID NO: 2183894 - RNA, 19 nt, Artificial Sequence
  Description of Artificial Sequence: Synthetic oligonucleotide
  Sense strand starting at position 1854 of SEQ ID NO: 1883302
gucacuugauuugagaucu

SEQ ID NO: 2183895 - RNA, 19 nt, Artificial Sequence
  Description of Artificial Sequence: Synthetic oligonucleotide
  Antisense strand to SEQ ID NO: 2183894
agaucucaaaucaagugac

SEQ ID NO: 2183896 - RNA, 19 nt, Artificial Sequence
  Description of Artificial Sequence: Synthetic oligonucleotide
  Sense strand starting at position 2048 of SEQ ID NO: 1883302
augacauggccaggaaugu

SEQ ID NO: 2183897 - RNA, 19 nt, Artificial Sequence
  Description of Artificial Sequence: Synthetic oligonucleotide
  Antisense strand to SEQ ID NO: 2183896
acauuccuggccaugucau

SEQ ID NO: 2183898 - RNA, 19 nt, Artificial Sequence
  Description of Artificial Sequence: Synthetic oligonucleotide
  Sense strand starting at position 2120 of SEQ ID NO: 1883302
cgaugacauguuugagagu

SEQ ID NO: 2183899 - RNA, 19 nt, Artificial Sequence
  Description of Artificial Sequence: Synthetic oligonucleotide
  Antisense strand to SEQ ID NO: 2183898
acucucaaacaugucaucg

SEQ ID NO: 2183900 - RNA, 19 nt, Artificial Sequence
  Description of Artificial Sequence: Synthetic oligonucleotide
  Sense strand starting at position 2339 of SEQ ID NO: 1883302
ucaguugagaguugugacu

SEQ ID NO: 2183901 - RNA, 19 nt, Artificial Sequence
  Description of Artificial Sequence: Synthetic oligonucleotide
  Antisense strand to SEQ ID NO: 2183900
agucacaacucucaacuga

SEQ ID NO: 2183902 - RNA, 19 nt, Artificial Sequence
  Description of Artificial Sequence: Synthetic oligonucleotide
  Sense strand starting at position 2348 of SEQ ID NO: 1883302
aguugugacuucucaggga

SEQ ID NO: 2183903 - RNA, 19 nt, Artificial Sequence
  Description of Artificial Sequence: Synthetic oligonucleotide
  Antisense strand to SEQ ID NO: 2183902
ucccugagaagucacaacu

SEQ ID NO: 2183904 - RNA, 19 nt, Artificial Sequence
  Description of Artificial Sequence: Synthetic oligonucleotide
  Sense strand starting at position 2515 of SEQ ID NO: 1883302
ccuuauguugcagaaagac

SEQ ID NO: 2183905 - RNA, 19 nt, Artificial Sequence
  Description of Artificial Sequence: Synthetic oligonucleotide
  Antisense strand to SEQ ID NO: 2183904
gucuuucugcaacauaagg

SEQ ID NO: 2183906 - RNA, 19 nt, Artificial Sequence
  Description of Artificial Sequence: Synthetic oligonucleotide
  Sense strand starting at position 2774 of SEQ ID NO: 1883302
augauaggcagauguaaua

SEQ ID NO: 2183907 - RNA, 19 nt, Artificial Sequence
  Description of Artificial Sequence: Synthetic oligonucleotide
  Antisense strand to SEQ ID NO: 2183906
uauuacaucugccuaucau

SEQ ID NO: 2183908 - RNA, 19 nt, Artificial Sequence
  Description of Artificial Sequence: Synthetic oligonucleotide
  Sense strand starting at position 2781 of SEQ ID NO: 1883302
gcagauguaauaugagugu

SEQ ID NO: 2183909 - RNA, 19 nt, Artificial Sequence
  Description of Artificial Sequence: Synthetic oligonucleotide
  Antisense strand to SEQ ID NO: 2183908
acacucauauuacaucugc

SEQ ID NO: 2183910 - RNA, 19 nt, Artificial Sequence
  Description of Artificial Sequence: Synthetic oligonucleotide
  Sense strand starting at position 2784 of SEQ ID NO: 1883302
gauguaauaugaguguaac

SEQ ID NO: 2183911 - RNA, 19 nt, Artificial Sequence
  Description of Artificial Sequence: Synthetic oligonucleotide
  Antisense strand to SEQ ID NO: 2183910
guuacacucauauuacauc

SEQ ID NO: 2183912 - RNA, 19 nt, Artificial Sequence
  Description of Artificial Sequence: Synthetic oligonucleotide
  Sense strand starting at position 2787 of SEQ ID NO: 1883302
guaauaugaguguaaccag

SEQ ID NO: 2183913 - RNA, 19 nt, Artificial Sequence
  Description of Artificial Sequence: Synthetic oligonucleotide
  Antisense strand to SEQ ID NO: 2183912
cugguuacacucauauuac

SEQ ID NO: 2183914 - RNA, 19 nt, Artificial Sequence
  Description of Artificial Sequence: Synthetic oligonucleotide
  Sense strand starting at position 2790 of SEQ ID NO: 1883302
auaugaguguaaccagguu

SEQ ID NO: 2183915 - RNA, 19 nt, Artificial Sequence
  Description of Artificial Sequence: Synthetic oligonucleotide
  Antisense strand to SEQ ID NO: 2183914
aaccugguuacacucauau

SEQ ID NO: 2183916 - RNA, 19 nt, Artificial Sequence
  Description of Artificial Sequence: Synthetic oligonucleotide
  Sense strand starting at position 3071 of SEQ ID NO: 1883302
aggagagauccguggaaac

SEQ ID NO: 2183917 - RNA, 19 nt, Artificial Sequence
  Description of Artificial Sequence: Synthetic oligonucleotide
  Antisense strand to SEQ ID NO: 2183916
guuuccacggaucucuccu

SEQ ID NO: 2183918 - RNA, 19 nt, Artificial Sequence
  Description of Artificial Sequence: Synthetic oligonucleotide
  Sense strand starting at position 3103 of SEQ ID NO: 1883302
agcgauaagcuuuccacgu

SEQ ID NO: 2183919 - RNA, 19 nt, Artificial Sequence
  Description of Artificial Sequence: Synthetic oligonucleotide
  Antisense strand to SEQ ID NO: 2183918
acguggaaagcuuaucgcu

SEQ ID NO: 2183920 - RNA, 19 nt, Artificial Sequence
  Description of Artificial Sequence: Synthetic oligonucleotide
  Sense strand starting at position 3135 of SEQ ID NO: 1883302
ucucuauccgaaugaaauu

SEQ ID NO: 2183921 - RNA, 19 nt, Artificial Sequence
  Description of Artificial Sequence: Synthetic oligonucleotide
  Antisense strand to SEQ ID NO: 2183920
aauuucauucggauagaga

SEQ ID NO: 2183922 - RNA, 19 nt, Artificial Sequence
  Description of Artificial Sequence: Synthetic oligonucleotide
  Sense strand starting at position 3151 of SEQ ID NO: 1883302
auuagcugccaguggauaa

SEQ ID NO: 2183923 - RNA, 19 nt, Artificial Sequence
  Description of Artificial Sequence: Synthetic oligonucleotide
  Antisense strand to SEQ ID NO: 2183922
uuauccacuggcagcuaau

SEQ ID NO: 2183924 - RNA, 19 nt, Artificial Sequence
  Description of Artificial Sequence: Synthetic oligonucleotide
  Sense strand starting at position 3259 of SEQ ID NO: 1883302
aagagauacucagugcaua

SEQ ID NO: 2183925 - RNA, 19 nt, Artificial Sequence
  Description of Artificial Sequence: Synthetic oligonucleotide
  Antisense strand to SEQ ID NO: 2183924
uaugcacugaguaucucuu

SEQ ID NO: 2183926 - RNA, 19 nt, Artificial Sequence
  Description of Artificial Sequence: Synthetic oligonucleotide
  Sense strand starting at position 3260 of SEQ ID NO: 1883302
agagauacucagugcauaa

SEQ ID NO: 2183927 - RNA, 19 nt, Artificial Sequence
  Description of Artificial Sequence: Synthetic oligonucleotide
  Antisense strand to SEQ ID NO: 2183926
uuaugcacugaguaucucu

SEQ ID NO: 2183928 - RNA, 19 nt, Artificial Sequence
  Description of Artificial Sequence: Synthetic oligonucleotide
  Sense strand starting at position 3264 of SEQ ID NO: 1883302
auacucagugcauaaagua

SEQ ID NO: 2183929 - RNA, 19 nt, Artificial Sequence
  Description of Artificial Sequence: Synthetic oligonucleotide
  Antisense strand to SEQ ID NO: 2183928
uacuuuaugcacugaguau

SEQ ID NO: 2183930 - RNA, 19 nt, Artificial Sequence
  Description of Artificial Sequence: Synthetic oligonucleotide
  Sense strand starting at position 3274 of SEQ ID NO: 1883302
cauaaaguagacugugaaa

SEQ ID NO: 2183931 - RNA, 19 nt, Artificial Sequence
  Description of Artificial Sequence: Synthetic oligonucleotide
  Antisense strand to SEQ ID NO: 2183930
uuucacagucuacuuuaug

SEQ ID NO: 2183932 - RNA, 19 nt, Artificial Sequence
  Description of Artificial Sequence: Synthetic oligonucleotide
  Sense strand starting at position 3286 of SEQ ID NO: 1883302
ugugaaagacuuuguggaa

SEQ ID NO: 2183933 - RNA, 19 nt, Artificial Sequence
  Description of Artificial Sequence: Synthetic oligonucleotide
  Antisense strand to SEQ ID NO: 2183932
uuccacaaagucuuucaca

SEQ ID NO: 2183934 - RNA, 19 nt, Artificial Sequence
  Description of Artificial Sequence: Synthetic oligonucleotide
  Sense strand starting at position 3287 of SEQ ID NO: 1883302
gugaaagacuuuguggaaa

SEQ ID NO: 2183935 - RNA, 19 nt, Artificial Sequence
  Description of Artificial Sequence: Synthetic oligonucleotide
  Antisense strand to SEQ ID NO: 2183934
uuuccacaaagucuuucac

SEQ ID NO: 2183936 - RNA, 19 nt, Artificial Sequence
  Description of Artificial Sequence: Synthetic oligonucleotide
  Sense strand starting at position 3371 of SEQ ID NO: 1883302
uggucaugacauuguauag

SEQ ID NO: 2183937 - RNA, 19 nt, Artificial Sequence
  Description of Artificial Sequence: Synthetic oligonucleotide
  Antisense strand to SEQ ID NO: 2183936
cuauacaaugucaugacca

SEQ ID NO: 2183938 - RNA, 19 nt, Artificial Sequence
  Description of Artificial Sequence: Synthetic oligonucleotide
  Sense strand starting at position 3392 of SEQ ID NO: 1883302
aaugauuucggaugugcga

SEQ ID NO: 2183939 - RNA, 19 nt, Artificial Sequence
  Description of Artificial Sequence: Synthetic oligonucleotide
  Antisense strand to SEQ ID NO: 2183938
ucgcacauccgaaaucauu

SEQ ID NO: 2183940 - RNA, 19 nt, Artificial Sequence
  Description of Artificial Sequence: Synthetic oligonucleotide
  Sense strand starting at position 3850 of SEQ ID NO: 1883302
ucacaucaugggugauagu

SEQ ID NO: 2183941 - RNA, 19 nt, Artificial Sequence
  Description of Artificial Sequence: Synthetic oligonucleotide
  Antisense strand to SEQ ID NO: 2183940
acuaucacccaugauguga

SEQ ID NO: 2183942 - RNA, 19 nt, Artificial Sequence
  Description of Artificial Sequence: Synthetic oligonucleotide
  Sense strand starting at position 3859 of SEQ ID NO: 1883302
gggugauagucuuuccaua

SEQ ID NO: 2183943 - RNA, 19 nt, Artificial Sequence
  Description of Artificial Sequence: Synthetic oligonucleotide
  Antisense strand to SEQ ID NO: 2183942
uauggaaagacuaucaccc

SEQ ID NO: 2183944 - RNA, 19 nt, Artificial Sequence
  Description of Artificial Sequence: Synthetic oligonucleotide
  Sense strand starting at position 3861 of SEQ ID NO: 1883302
gugauagucuuuccauacg

SEQ ID NO: 2183945 - RNA, 19 nt, Artificial Sequence
  Description of Artificial Sequence: Synthetic oligonucleotide
  Antisense strand to SEQ ID NO: 2183944
cguauggaaagacuaucac

SEQ ID NO: 2183946 - RNA, 19 nt, Artificial Sequence
  Description of Artificial Sequence: Synthetic oligonucleotide
  Sense strand starting at position 3864 of SEQ ID NO: 1883302
auagucuuuccauacguau

SEQ ID NO: 2183947 - RNA, 19 nt, Artificial Sequence
  Description of Artificial Sequence: Synthetic oligonucleotide
  Antisense strand to SEQ ID NO: 2183946
auacguauggaaagacuau

SEQ ID NO: 2183948 - RNA, 19 nt, Artificial Sequence
  Description of Artificial Sequence: Synthetic oligonucleotide
  Sense strand starting at position 601 of SEQ ID NO: 1883303
gcucccuuggguuacuuau

SEQ ID NO: 2183949 - RNA, 19 nt, Artificial Sequence
  Description of Artificial Sequence: Synthetic oligonucleotide
  Antisense strand to SEQ ID NO: 2183948
auaaguaacccaagggagc

SEQ ID NO: 2183950 - RNA, 19 nt, Artificial Sequence
  Description of Artificial Sequence: Synthetic oligonucleotide
  Sense strand starting at position 688 of SEQ ID NO: 1883303
gaguauaaagucugacaug

SEQ ID NO: 2183951 - RNA, 19 nt, Artificial Sequence
  Description of Artificial Sequence: Synthetic oligonucleotide
  Antisense strand to SEQ ID NO: 2183950
caugucagacuuuauacuc

SEQ ID NO: 2183952 - RNA, 19 nt, Artificial Sequence
  Description of Artificial Sequence: Synthetic oligonucleotide
  Sense strand starting at position 731 of SEQ ID NO: 1883303
guguuaaguaaagaaagcu

SEQ ID NO: 2183953 - RNA, 19 nt, Artificial Sequence
  Description of Artificial Sequence: Synthetic oligonucleotide
  Antisense strand to SEQ ID NO: 2183952
agcuuucuuuacuuaacac

SEQ ID NO: 2183954 - RNA, 19 nt, Artificial Sequence
  Description of Artificial Sequence: Synthetic oligonucleotide
  Sense strand starting at position 1181 of SEQ ID NO: 1883303
aagccuucugcugggauau

SEQ ID NO: 2183955 - RNA, 19 nt, Artificial Sequence
  Description of Artificial Sequence: Synthetic oligonucleotide
  Antisense strand to SEQ ID NO: 2183954
auaucccagcagaaggcuu

SEQ ID NO: 2183956 - RNA, 19 nt, Artificial Sequence
  Description of Artificial Sequence: Synthetic oligonucleotide
  Sense strand starting at position 1182 of SEQ ID NO: 1883303
agccuucugcugggauaua

SEQ ID NO: 2183957 - RNA, 19 nt, Artificial Sequence
  Description of Artificial Sequence: Synthetic oligonucleotide
  Antisense strand to SEQ ID NO: 2183956
uauaucccagcagaaggcu

SEQ ID NO: 2183958 - RNA, 19 nt, Artificial Sequence
  Description of Artificial Sequence: Synthetic oligonucleotide
  Sense strand starting at position 1205 of SEQ ID NO: 1883303
ggaaccagucuauguaauc

SEQ ID NO: 2183959 - RNA, 19 nt, Artificial Sequence
  Description of Artificial Sequence: Synthetic oligonucleotide
  Antisense strand to SEQ ID NO: 2183958
gauuacauagacugguucc

SEQ ID NO: 2183960 - RNA, 19 nt, Artificial Sequence
  Description of Artificial Sequence: Synthetic oligonucleotide
  Sense strand starting at position 1222 of SEQ ID NO: 1883303
ucaagaaguuacuuugucu

SEQ ID NO: 2183961 - RNA, 19 nt, Artificial Sequence
  Description of Artificial Sequence: Synthetic oligonucleotide
  Antisense strand to SEQ ID NO: 2183960
agacaaaguaacuucuuga

SEQ ID NO: 2183962 - RNA, 19 nt, Artificial Sequence
  Description of Artificial Sequence: Synthetic oligonucleotide
  Sense strand starting at position 1676 of SEQ ID NO: 1883303
uugcacauuucuuucugua

SEQ ID NO: 2183963 - RNA, 19 nt, Artificial Sequence
  Description of Artificial Sequence: Synthetic oligonucleotide
  Antisense strand to SEQ ID NO: 2183962
uacagaaagaaaugugcaa

SEQ ID NO: 2183964 - RNA, 19 nt, Artificial Sequence
  Description of Artificial Sequence: Synthetic oligonucleotide
  Sense strand starting at position 1678 of SEQ ID NO: 1883303
gcacauuucuuucuguacu

SEQ ID NO: 2183965 - RNA, 19 nt, Artificial Sequence
  Description of Artificial Sequence: Synthetic oligonucleotide
  Antisense strand to SEQ ID NO: 2183964
aguacagaaagaaaugugc

SEQ ID NO: 2183966 - RNA, 19 nt, Artificial Sequence
  Description of Artificial Sequence: Synthetic oligonucleotide
  Sense strand starting at position 1712 of SEQ ID NO: 1883303
caggucuccgcagauacau

SEQ ID NO: 2183967 - RNA, 19 nt, Artificial Sequence
  Description of Artificial Sequence: Synthetic oligonucleotide
  Antisense strand to SEQ ID NO: 2183966
auguaucugcggagaccug

SEQ ID NO: 2183968 - RNA, 19 nt, Artificial Sequence
  Description of Artificial Sequence: Synthetic oligonucleotide
  Sense strand starting at position 1956 of SEQ ID NO: 1883303
caugguuuccaggagcaac

SEQ ID NO: 2183969 - RNA, 19 nt, Artificial Sequence
  Description of Artificial Sequence: Synthetic oligonucleotide
  Antisense strand to SEQ ID NO: 2183968
guugcuccuggaaaccaug

SEQ ID NO: 2183970 - RNA, 19 nt, Artificial Sequence
  Description of Artificial Sequence: Synthetic oligonucleotide
  Sense strand starting at position 2179 of SEQ ID NO: 1883303
gguuuccaccuugacagau

SEQ ID NO: 2183971 - RNA, 19 nt, Artificial Sequence
  Description of Artificial Sequence: Synthetic oligonucleotide
  Antisense strand to SEQ ID NO: 2183970
aucugucaagguggaaacc

SEQ ID NO: 2183972 - RNA, 19 nt, Artificial Sequence
  Description of Artificial Sequence: Synthetic oligonucleotide
  Sense strand starting at position 2193 of SEQ ID NO: 1883303
cagauauaauuuggucuga

SEQ ID NO: 2183973 - RNA, 19 nt, Artificial Sequence
  Description of Artificial Sequence: Synthetic oligonucleotide
  Antisense strand to SEQ ID NO: 2183972
ucagaccaaauuauaucug

SEQ ID NO: 2183974 - RNA, 19 nt, Artificial Sequence
  Description of Artificial Sequence: Synthetic oligonucleotide
  Sense strand starting at position 2198 of SEQ ID NO: 1883303
auaauuuggucugaggaau

SEQ ID NO: 2183975 - RNA, 19 nt, Artificial Sequence
  Description of Artificial Sequence: Synthetic oligonucleotide
  Antisense strand to SEQ ID NO: 2183974
auuccucagaccaaauuau

SEQ ID NO: 2183976 - RNA, 19 nt, Artificial Sequence
  Description of Artificial Sequence: Synthetic oligonucleotide
  Sense strand starting at position 2204 of SEQ ID NO: 1883303
uggucugaggaaugacguu

SEQ ID NO: 2183977 - RNA, 19 nt, Artificial Sequence
  Description of Artificial Sequence: Synthetic oligonucleotide
  Antisense strand to SEQ ID NO: 2183976
aacgucauuccucagacca

SEQ ID NO: 2183978 - RNA, 19 nt, Artificial Sequence
  Description of Artificial Sequence: Synthetic oligonucleotide
  Sense strand starting at position 2218 of SEQ ID NO: 1883303
acguuauuaacuuauggag

SEQ ID NO: 2183979 - RNA, 19 nt, Artificial Sequence
  Description of Artificial Sequence: Synthetic oligonucleotide
  Antisense strand to SEQ ID NO: 2183978
cuccauaaguuaauaacgu

SEQ ID NO: 2183980 - RNA, 19 nt, Artificial Sequence
  Description of Artificial Sequence: Synthetic oligonucleotide
  Sense strand starting at position 2248 of SEQ ID NO: 1883303
uuuaaaguuugguugguau

SEQ ID NO: 2183981 - RNA, 19 nt, Artificial Sequence
  Description of Artificial Sequence: Synthetic oligonucleotide
  Antisense strand to SEQ ID NO: 2183980
auaccaaccaaacuuuaaa

SEQ ID NO: 2183982 - RNA, 19 nt, Artificial Sequence
  Description of Artificial Sequence: Synthetic oligonucleotide
  Sense strand starting at position 2398 of SEQ ID NO: 1883303
auccuauauguggaaacgu

SEQ ID NO: 2183983 - RNA, 19 nt, Artificial Sequence
  Description of Artificial Sequence: Synthetic oligonucleotide
  Antisense strand to SEQ ID NO: 2183982
acguuuccacauauaggau

SEQ ID NO: 2183984 - RNA, 19 nt, Artificial Sequence
  Description of Artificial Sequence: Synthetic oligonucleotide
  Sense strand starting at position 2475 of SEQ ID NO: 1883303
guuaaacaagcuuguuauu

SEQ ID NO: 2183985 - RNA, 19 nt, Artificial Sequence
  Description of Artificial Sequence: Synthetic oligonucleotide
  Antisense strand to SEQ ID NO: 2183984
aauaacaagcuuguuuaac

SEQ ID NO: 2183986 - RNA, 19 nt, Artificial Sequence
  Description of Artificial Sequence: Synthetic oligonucleotide
  Sense strand starting at position 2561 of SEQ ID NO: 1883303
cucagaggcucuuauuuga

SEQ ID NO: 2183987 - RNA, 19 nt, Artificial Sequence
  Description of Artificial Sequence: Synthetic oligonucleotide
  Antisense strand to SEQ ID NO: 2183986
ucaaauaagagccucugag

SEQ ID NO: 2183988 - RNA, 19 nt, Artificial Sequence
  Description of Artificial Sequence: Synthetic oligonucleotide
  Sense strand starting at position 2765 of SEQ ID NO: 1883303
agaagucagcuuugguacu

SEQ ID NO: 2183989 - RNA, 19 nt, Artificial Sequence
  Description of Artificial Sequence: Synthetic oligonucleotide
  Antisense strand to SEQ ID NO: 2183988
aguaccaaagcugacuucu

SEQ ID NO: 2183990 - RNA, 19 nt, Artificial Sequence
  Description of Artificial Sequence: Synthetic oligonucleotide
  Sense strand starting at position 2791 of SEQ ID NO: 1883303
ugagauugcagcuggaaag

SEQ ID NO: 2183991 - RNA, 19 nt, Artificial Sequence
  Description of Artificial Sequence: Synthetic oligonucleotide
  Antisense strand to SEQ ID NO: 2183990
cuuuccagcugcaaucuca

SEQ ID NO: 2183992 - RNA, 19 nt, Artificial Sequence
  Description of Artificial Sequence: Synthetic oligonucleotide
  Sense strand starting at position 2819 of SEQ ID NO: 1883303
gggagagucaguuacagcu

SEQ ID NO: 2183993 - RNA, 19 nt, Artificial Sequence
  Description of Artificial Sequence: Synthetic oligonucleotide
  Antisense strand to SEQ ID NO: 2183992
agcuguaacugacucuccc

SEQ ID NO: 2183994 - RNA, 19 nt, Artificial Sequence
  Description of Artificial Sequence: Synthetic oligonucleotide
  Sense strand starting at position 2839 of SEQ ID NO: 1883303
uuccuacauuugucuguga

SEQ ID NO: 2183995 - RNA, 19 nt, Artificial Sequence
  Description of Artificial Sequence: Synthetic oligonucleotide
  Antisense strand to SEQ ID NO: 2183994
ucacagacaaauguaggaa

SEQ ID NO: 2183996 - RNA, 19 nt, Artificial Sequence
  Description of Artificial Sequence: Synthetic oligonucleotide
  Sense strand starting at position 2844 of SEQ ID NO: 1883303
acauuugucugugaaacaa

SEQ ID NO: 2183997 - RNA, 19 nt, Artificial Sequence
  Description of Artificial Sequence: Synthetic oligonucleotide
  Antisense strand to SEQ ID NO: 2183996
uuguuucacagacaaaugu

SEQ ID NO: 2183998 - RNA, 19 nt, Artificial Sequence
  Description of Artificial Sequence: Synthetic oligonucleotide
  Sense strand starting at position 2959 of SEQ ID NO: 1883303
uuguguuguuugauggagu

SEQ ID NO: 2183999 - RNA, 19 nt, Artificial Sequence
  Description of Artificial Sequence: Synthetic oligonucleotide
  Antisense strand to SEQ ID NO: 2183998
acuccaucaaacaacacaa

SEQ ID NO: 2184000 - RNA, 19 nt, Artificial Sequence
  Description of Artificial Sequence: Synthetic oligonucleotide
  Sense strand starting at position 3057 of SEQ ID NO: 1883303
gauuuaaugugcucagcuc

SEQ ID NO: 2184001 - RNA, 19 nt, Artificial Sequence
  Description of Artificial Sequence: Synthetic oligonucleotide
  Antisense strand to SEQ ID NO: 2184000
gagcugagcacauuaaauc

SEQ ID NO: 2184002 - RNA, 19 nt, Artificial Sequence
  Description of Artificial Sequence: Synthetic oligonucleotide
  Sense strand starting at position 3145 of SEQ ID NO: 1883303
gcugcuauugucuagggaa

SEQ ID NO: 2184003 - RNA, 19 nt, Artificial Sequence
  Description of Artificial Sequence: Synthetic oligonucleotide
  Antisense strand to SEQ ID NO: 2184002
uucccuagacaauagcagc

SEQ ID NO: 2184004 - RNA, 19 nt, Artificial Sequence
  Description of Artificial Sequence: Synthetic oligonucleotide
  Sense strand starting at position 3147 of SEQ ID NO: 1883303
ugcuauugucuagggaaag

SEQ ID NO: 2184005 - RNA, 19 nt, Artificial Sequence
  Description of Artificial Sequence: Synthetic oligonucleotide
  Antisense strand to SEQ ID NO: 2184004
cuuucccuagacaauagca

SEQ ID NO: 2184006 - RNA, 19 nt, Artificial Sequence
  Description of Artificial Sequence: Synthetic oligonucleotide
  Sense strand starting at position 3177 of SEQ ID NO: 1883303
acgcaagaaaugugcuaga

SEQ ID NO: 2184007 - RNA, 19 nt, Artificial Sequence
  Description of Artificial Sequence: Synthetic oligonucleotide
  Antisense strand to SEQ ID NO: 2184006
ucuagcacauuucuugcgu

SEQ ID NO: 2184008 - RNA, 19 nt, Artificial Sequence
  Description of Artificial Sequence: Synthetic oligonucleotide
  Sense strand starting at position 3182 of SEQ ID NO: 1883303
agaaaugugcuagaauugu

SEQ ID NO: 2184009 - RNA, 19 nt, Artificial Sequence
  Description of Artificial Sequence: Synthetic oligonucleotide
  Antisense strand to SEQ ID NO: 2184008
acaauucuagcacauuucu

SEQ ID NO: 2184010 - RNA, 19 nt, Artificial Sequence
  Description of Artificial Sequence: Synthetic oligonucleotide
  Sense strand starting at position 3191 of SEQ ID NO: 1883303
cuagaauuguuuguucuuc

SEQ ID NO: 2184011 - RNA, 19 nt, Artificial Sequence
  Description of Artificial Sequence: Synthetic oligonucleotide
  Antisense strand to SEQ ID NO: 2184010
gaagaacaaacaauucuag

SEQ ID NO: 2184012 - RNA, 19 nt, Artificial Sequence
  Description of Artificial Sequence: Synthetic oligonucleotide
  Sense strand starting at position 3390 of SEQ ID NO: 1883303
agcacacucccuugggaaa

SEQ ID NO: 2184013 - RNA, 19 nt, Artificial Sequence
  Description of Artificial Sequence: Synthetic oligonucleotide
  Antisense strand to SEQ ID NO: 2184012
uuucccaagggagugugcu

SEQ ID NO: 2184014 - RNA, 19 nt, Artificial Sequence
  Description of Artificial Sequence: Synthetic oligonucleotide
  Sense strand starting at position 3405 of SEQ ID NO: 1883303
gaaaguacauucuugagcu

SEQ ID NO: 2184015 - RNA, 19 nt, Artificial Sequence
  Description of Artificial Sequence: Synthetic oligonucleotide
  Antisense strand to SEQ ID NO: 2184014
agcucaagaauguacuuuc

SEQ ID NO: 2184016 - RNA, 19 nt, Artificial Sequence
  Description of Artificial Sequence: Synthetic oligonucleotide
  Sense strand starting at position 3411 of SEQ ID NO: 1883303
acauucuugagcuggugau

SEQ ID NO: 2184017 - RNA, 19 nt, Artificial Sequence
  Description of Artificial Sequence: Synthetic oligonucleotide
  Antisense strand to SEQ ID NO: 2184016
aucaccagcucaagaaugu

SEQ ID NO: 2184018 - RNA, 19 nt, Artificial Sequence
  Description of Artificial Sequence: Synthetic oligonucleotide
  Sense strand starting at position 3412 of SEQ ID NO: 1883303
cauucuugagcuggugauu

SEQ ID NO: 2184019 - RNA, 19 nt, Artificial Sequence
  Description of Artificial Sequence: Synthetic oligonucleotide
  Antisense strand to SEQ ID NO: 2184018
aaucaccagcucaagaaug

SEQ ID NO: 2184020 - RNA, 19 nt, Artificial Sequence
  Description of Artificial Sequence: Synthetic oligonucleotide
  Sense strand starting at position 3861 of SEQ ID NO: 1883303
cgucccaucccagagguaa

SEQ ID NO: 2184021 - RNA, 19 nt, Artificial Sequence
  Description of Artificial Sequence: Synthetic oligonucleotide
  Antisense strand to SEQ ID NO: 2184020
uuaccucugggaugggacg

SEQ ID NO: 2184022 - RNA, 19 nt, Artificial Sequence
  Description of Artificial Sequence: Synthetic oligonucleotide
  Sense strand starting at position 3929 of SEQ ID NO: 1883303
agcccauugcacuguaaga

SEQ ID NO: 2184023 - RNA, 19 nt, Artificial Sequence
  Description of Artificial Sequence: Synthetic oligonucleotide
  Antisense strand to SEQ ID NO: 2184022
ucuuacagugcaaugggcu

SEQ ID NO: 2184024 - RNA, 19 nt, Artificial Sequence
  Description of Artificial Sequence: Synthetic oligonucleotide
  Sense strand starting at position 3931 of SEQ ID NO: 1883303
cccauugcacuguaagauu

SEQ ID NO: 2184025 - RNA, 19 nt, Artificial Sequence
  Description of Artificial Sequence: Synthetic oligonucleotide
  Antisense strand to SEQ ID NO: 2184024
aaucuuacagugcaauggg

SEQ ID NO: 2184026 - RNA, 19 nt, Artificial Sequence
  Description of Artificial Sequence: Synthetic oligonucleotide
  Sense strand starting at position 3981 of SEQ ID NO: 1883303
cccuaccugugauugagaa

SEQ ID NO: 2184027 - RNA, 19 nt, Artificial Sequence
  Description of Artificial Sequence: Synthetic oligonucleotide
  Antisense strand to SEQ ID NO: 2184026
uucucaaucacagguaggg

SEQ ID NO: 2184028 - RNA, 19 nt, Artificial Sequence
  Description of Artificial Sequence: Synthetic oligonucleotide
  Sense strand starting at position 51 of SEQ ID NO: 1883304
cggcucuccuccucaaaga

SEQ ID NO: 2184029 - RNA, 19 nt, Artificial Sequence
  Description of Artificial Sequence: Synthetic oligonucleotide
  Antisense strand to SEQ ID NO: 2184028
ucuuugaggaggagagccg

SEQ ID NO: 2184030 - RNA, 19 nt, Artificial Sequence
  Description of Artificial Sequence: Synthetic oligonucleotide
  Sense strand starting at position 67 of SEQ ID NO: 1883304
agaaaucacugcugauucu

SEQ ID NO: 2184031 - RNA, 19 nt, Artificial Sequence
  Description of Artificial Sequence: Synthetic oligonucleotide
  Antisense strand to SEQ ID NO: 2184030
agaaucagcagugauuucu

SEQ ID NO: 2184032 - RNA, 19 nt, Artificial Sequence
  Description of Artificial Sequence: Synthetic oligonucleotide
  Sense strand starting at position 302 of SEQ ID NO: 1883304
caaggaugguuucuguuua

SEQ ID NO: 2184033 - RNA, 19 nt, Artificial Sequence
  Description of Artificial Sequence: Synthetic oligonucleotide
  Antisense strand to SEQ ID NO: 2184032
uaaacagaaaccauccuug

SEQ ID NO: 2184034 - RNA, 19 nt, Artificial Sequence
  Description of Artificial Sequence: Synthetic oligonucleotide
  Sense strand starting at position 306 of SEQ ID NO: 1883304
gaugguuucuguuuaguuc

SEQ ID NO: 2184035 - RNA, 19 nt, Artificial Sequence
  Description of Artificial Sequence: Synthetic oligonucleotide
  Antisense strand to SEQ ID NO: 2184034
gaacuaaacagaaaccauc

SEQ ID NO: 2184036 - RNA, 19 nt, Artificial Sequence
  Description of Artificial Sequence: Synthetic oligonucleotide
  Sense strand starting at position 314 of SEQ ID NO: 1883304
cuguuuaguuccuccauca

SEQ ID NO: 2184037 - RNA, 19 nt, Artificial Sequence
  Description of Artificial Sequence: Synthetic oligonucleotide
  Antisense strand to SEQ ID NO: 2184036
ugauggaggaacuaaacag

SEQ ID NO: 2184038 - RNA, 19 nt, Artificial Sequence
  Description of Artificial Sequence: Synthetic oligonucleotide
  Sense strand starting at position 618 of SEQ ID NO: 1883304
cuccaaaguccuugggacu

SEQ ID NO: 2184039 - RNA, 19 nt, Artificial Sequence
  Description of Artificial Sequence: Synthetic oligonucleotide
  Antisense strand to SEQ ID NO: 2184038
agucccaaggacuuuggag

SEQ ID NO: 2184040 - RNA, 19 nt, Artificial Sequence
  Description of Artificial Sequence: Synthetic oligonucleotide
  Sense strand starting at position 619 of SEQ ID NO: 1883304
uccaaaguccuugggacua

SEQ ID NO: 2184041 - RNA, 19 nt, Artificial Sequence
  Description of Artificial Sequence: Synthetic oligonucleotide
  Antisense strand to SEQ ID NO: 2184040
uagucccaaggacuuugga

SEQ ID NO: 2184042 - RNA, 19 nt, Artificial Sequence
  Description of Artificial Sequence: Synthetic oligonucleotide
  Sense strand starting at position 926 of SEQ ID NO: 1883304
cuaagugcuucuguggaua

SEQ ID NO: 2184043 - RNA, 19 nt, Artificial Sequence
  Description of Artificial Sequence: Synthetic oligonucleotide
  Antisense strand to SEQ ID NO: 2184042
uauccacagaagcacuuag

SEQ ID NO: 2184044 - RNA, 19 nt, Artificial Sequence
  Description of Artificial Sequence: Synthetic oligonucleotide
  Sense strand starting at position 928 of SEQ ID NO: 1883304
aagugcuucuguggauaag

SEQ ID NO: 2184045 - RNA, 19 nt, Artificial Sequence
  Description of Artificial Sequence: Synthetic oligonucleotide
  Antisense strand to SEQ ID NO: 2184044
cuuauccacagaagcacuu

SEQ ID NO: 2184046 - RNA, 19 nt, Artificial Sequence
  Description of Artificial Sequence: Synthetic oligonucleotide
  Sense strand starting at position 939 of SEQ ID NO: 1883304
uggauaagcuucccuuaau

SEQ ID NO: 2184047 - RNA, 19 nt, Artificial Sequence
  Description of Artificial Sequence: Synthetic oligonucleotide
  Antisense strand to SEQ ID NO: 2184046
auuaagggaagcuuaucca

SEQ ID NO: 2184048 - RNA, 19 nt, Artificial Sequence
  Description of Artificial Sequence: Synthetic oligonucleotide
  Sense strand starting at position 940 of SEQ ID NO: 1883304
ggauaagcuucccuuaauc

SEQ ID NO: 2184049 - RNA, 19 nt, Artificial Sequence
  Description of Artificial Sequence: Synthetic oligonucleotide
  Antisense strand to SEQ ID NO: 2184048
gauuaagggaagcuuaucc

SEQ ID NO: 2184050 - RNA, 19 nt, Artificial Sequence
  Description of Artificial Sequence: Synthetic oligonucleotide
  Sense strand starting at position 1031 of SEQ ID NO: 1883304
ggauaagaggcuugugcca

SEQ ID NO: 2184051 - RNA, 19 nt, Artificial Sequence
  Description of Artificial Sequence: Synthetic oligonucleotide
  Antisense strand to SEQ ID NO: 2184050
uggcacaagccucuuaucc

SEQ ID NO: 2184052 - RNA, 19 nt, Artificial Sequence
  Description of Artificial Sequence: Synthetic oligonucleotide
  Sense strand starting at position 1251 of SEQ ID NO: 1883304
ccguaauuguguucccgac

SEQ ID NO: 2184053 - RNA, 19 nt, Artificial Sequence
  Description of Artificial Sequence: Synthetic oligonucleotide
  Antisense strand to SEQ ID NO: 2184052
gucgggaacacaauuacgg

SEQ ID NO: 2184054 - RNA, 19 nt, Artificial Sequence
  Description of Artificial Sequence: Synthetic oligonucleotide
  Sense strand starting at position 1253 of SEQ ID NO: 1883304
guaauuguguucccgacca

SEQ ID NO: 2184055 - RNA, 19 nt, Artificial Sequence
  Description of Artificial Sequence: Synthetic oligonucleotide
  Antisense strand to SEQ ID NO: 2184054
uggucgggaacacaauuac

SEQ ID NO: 2184056 - RNA, 19 nt, Artificial Sequence
  Description of Artificial Sequence: Synthetic oligonucleotide
  Sense strand starting at position 2297 of SEQ ID NO: 1883304
cccuguuucuuccaugauu

SEQ ID NO: 2184057 - RNA, 19 nt, Artificial Sequence
  Description of Artificial Sequence: Synthetic oligonucleotide
  Antisense strand to SEQ ID NO: 2184056
aaucauggaagaaacaggg

SEQ ID NO: 2184058 - RNA, 19 nt, Artificial Sequence
  Description of Artificial Sequence: Synthetic oligonucleotide
  Sense strand starting at position 2454 of SEQ ID NO: 1883304
gggauauugcgguggacau

SEQ ID NO: 2184059 - RNA, 19 nt, Artificial Sequence
  Description of Artificial Sequence: Synthetic oligonucleotide
  Antisense strand to SEQ ID NO: 2184058
auguccaccgcaauauccc

SEQ ID NO: 2184060 - RNA, 19 nt, Artificial Sequence
  Description of Artificial Sequence: Synthetic oligonucleotide
  Sense strand starting at position 2455 of SEQ ID NO: 1883304
ggauauugcgguggacaug

SEQ ID NO: 2184061 - RNA, 19 nt, Artificial Sequence
  Description of Artificial Sequence: Synthetic oligonucleotide
  Antisense strand to SEQ ID NO: 2184060
cauguccaccgcaauaucc

SEQ ID NO: 2184062 - RNA, 19 nt, Artificial Sequence
  Description of Artificial Sequence: Synthetic oligonucleotide
  Sense strand starting at position 2533 of SEQ ID NO: 1883304
cauugucaacucggccaaa

SEQ ID NO: 2184063 - RNA, 19 nt, Artificial Sequence
  Description of Artificial Sequence: Synthetic oligonucleotide
  Antisense strand to SEQ ID NO: 2184062
uuuggccgaguugacaaug

SEQ ID NO: 2184064 - RNA, 19 nt, Artificial Sequence
  Description of Artificial Sequence: Synthetic oligonucleotide
  Sense strand starting at position 2608 of SEQ ID NO: 1883304
cggucuugcagcugggaga

SEQ ID NO: 2184065 - RNA, 19 nt, Artificial Sequence
  Description of Artificial Sequence: Synthetic oligonucleotide
  Antisense strand to SEQ ID NO: 2184064
ucucccagcugcaagaccg

SEQ ID NO: 2184066 - RNA, 19 nt, Artificial Sequence
  Description of Artificial Sequence: Synthetic oligonucleotide
  Sense strand starting at position 3002 of SEQ ID NO: 1883304
uuccuugguugugugauga

SEQ ID NO: 2184067 - RNA, 19 nt, Artificial Sequence
  Description of Artificial Sequence: Synthetic oligonucleotide
  Antisense strand to SEQ ID NO: 2184066
ucaucacacaaccaaggaa

SEQ ID NO: 2184068 - RNA, 19 nt, Artificial Sequence
  Description of Artificial Sequence: Synthetic oligonucleotide
  Sense strand starting at position 3301 of SEQ ID NO: 1883304
gcgcuggaaucguguugca

SEQ ID NO: 2184069 - RNA, 19 nt, Artificial Sequence
  Description of Artificial Sequence: Synthetic oligonucleotide
  Antisense strand to SEQ ID NO: 2184068
ugcaacacgauuccagcgc

SEQ ID NO: 2184070 - RNA, 19 nt, Artificial Sequence
  Description of Artificial Sequence: Synthetic oligonucleotide
  Sense strand starting at position 3304 of SEQ ID NO: 1883304
cuggaaucguguugcacaa

SEQ ID NO: 2184071 - RNA, 19 nt, Artificial Sequence
  Description of Artificial Sequence: Synthetic oligonucleotide
  Antisense strand to SEQ ID NO: 2184070
uugugcaacacgauuccag

SEQ ID NO: 2184072 - RNA, 19 nt, Artificial Sequence
  Description of Artificial Sequence: Synthetic oligonucleotide
  Sense strand starting at position 3616 of SEQ ID NO: 1883304
ggaggagauugagguauaa

SEQ ID NO: 2184073 - RNA, 19 nt, Artificial Sequence
  Description of Artificial Sequence: Synthetic oligonucleotide
  Antisense strand to SEQ ID NO: 2184072
uuauaccucaaucuccucc

SEQ ID NO: 2184074 - RNA, 19 nt, Artificial Sequence
  Description of Artificial Sequence: Synthetic oligonucleotide
  Sense strand starting at position 3670 of SEQ ID NO: 1883304
gggcuaagugaucagagca

SEQ ID NO: 2184075 - RNA, 19 nt, Artificial Sequence
  Description of Artificial Sequence: Synthetic oligonucleotide
  Antisense strand to SEQ ID NO: 2184074
ugcucugaucacuuagccc

SEQ ID NO: 2184076 - RNA, 19 nt, Artificial Sequence
  Description of Artificial Sequence: Synthetic oligonucleotide
  Sense strand starting at position 66 of SEQ ID NO: 1883305
ccuguuuccuuuccagaca

SEQ ID NO: 2184077 - RNA, 19 nt, Artificial Sequence
  Description of Artificial Sequence: Synthetic oligonucleotide
  Antisense strand to SEQ ID NO: 2184076
ugucuggaaaggaaacagg

SEQ ID NO: 2184078 - RNA, 19 nt, Artificial Sequence
  Description of Artificial Sequence: Synthetic oligonucleotide
  Sense strand starting at position 84 of SEQ ID NO: 1883305
agcacugcuuccucagaga

SEQ ID NO: 2184079 - RNA, 19 nt, Artificial Sequence
  Description of Artificial Sequence: Synthetic oligonucleotide
  Antisense strand to SEQ ID NO: 2184078
ucucugaggaagcagugcu

SEQ ID NO: 2184080 - RNA, 19 nt, Artificial Sequence
  Description of Artificial Sequence: Synthetic oligonucleotide
  Sense strand starting at position 172 of SEQ ID NO: 1883305
ggcuguaaccacuauacuu

SEQ ID NO: 2184081 - RNA, 19 nt, Artificial Sequence
  Description of Artificial Sequence: Synthetic oligonucleotide
  Antisense strand to SEQ ID NO: 2184080
aaguauagugguuacagcc

SEQ ID NO: 2184082 - RNA, 19 nt, Artificial Sequence
  Description of Artificial Sequence: Synthetic oligonucleotide
  Sense strand starting at position 295 of SEQ ID NO: 1883305
cugacaaguuaaugauuua

SEQ ID NO: 2184083 - RNA, 19 nt, Artificial Sequence
  Description of Artificial Sequence: Synthetic oligonucleotide
  Antisense strand to SEQ ID NO: 2184082
uaaaucauuaacuugucag

SEQ ID NO: 2184084 - RNA, 19 nt, Artificial Sequence
  Description of Artificial Sequence: Synthetic oligonucleotide
  Sense strand starting at position 673 of SEQ ID NO: 1883305
gaagaaauaucaguagcug

SEQ ID NO: 2184085 - RNA, 19 nt, Artificial Sequence
  Description of Artificial Sequence: Synthetic oligonucleotide
  Antisense strand to SEQ ID NO: 2184084
cagcuacugauauuucuuc

SEQ ID NO: 2184086 - RNA, 19 nt, Artificial Sequence
  Description of Artificial Sequence: Synthetic oligonucleotide
  Sense strand starting at position 762 of SEQ ID NO: 1883305
ucaggucuuccagggcaga

SEQ ID NO: 2184087 - RNA, 19 nt, Artificial Sequence
  Description of Artificial Sequence: Synthetic oligonucleotide
  Antisense strand to SEQ ID NO: 2184086
ucugcccuggaagaccuga

SEQ ID NO: 2184088 - RNA, 19 nt, Artificial Sequence
  Description of Artificial Sequence: Synthetic oligonucleotide
  Sense strand starting at position 763 of SEQ ID NO: 1883305
caggucuuccagggcagaa

SEQ ID NO: 2184089 - RNA, 19 nt, Artificial Sequence
  Description of Artificial Sequence: Synthetic oligonucleotide
  Antisense strand to SEQ ID NO: 2184088
uucugcccuggaagaccug

SEQ ID NO: 2184090 - RNA, 19 nt, Artificial Sequence
  Description of Artificial Sequence: Synthetic oligonucleotide
  Sense strand starting at position 848 of SEQ ID NO: 1883305
ugaucaauuagguagagcu

SEQ ID NO: 2184091 - RNA, 19 nt, Artificial Sequence
  Description of Artificial Sequence: Synthetic oligonucleotide
  Antisense strand to SEQ ID NO: 2184090
agcucuaccuaauugauca

SEQ ID NO: 2184092 - RNA, 19 nt, Artificial Sequence
  Description of Artificial Sequence: Synthetic oligonucleotide
  Sense strand starting at position 895 of SEQ ID NO: 1883305
aaacguugucgauaucaaa

SEQ ID NO: 2184093 - RNA, 19 nt, Artificial Sequence
  Description of Artificial Sequence: Synthetic oligonucleotide
  Antisense strand to SEQ ID NO: 2184092
uuugauaucgacaacguuu

SEQ ID NO: 2184094 - RNA, 19 nt, Artificial Sequence
  Description of Artificial Sequence: Synthetic oligonucleotide
  Sense strand starting at position 1317 of SEQ ID NO: 1883305
acaguaguaugauugccau

SEQ ID NO: 2184095 - RNA, 19 nt, Artificial Sequence
  Description of Artificial Sequence: Synthetic oligonucleotide
  Antisense strand to SEQ ID NO: 2184094
auggcaaucauacuacugu

SEQ ID NO: 2184096 - RNA, 19 nt, Artificial Sequence
  Description of Artificial Sequence: Synthetic oligonucleotide
  Sense strand starting at position 1320 of SEQ ID NO: 1883305
guaguaugauugccauuau

SEQ ID NO: 2184097 - RNA, 19 nt, Artificial Sequence
  Description of Artificial Sequence: Synthetic oligonucleotide
  Antisense strand to SEQ ID NO: 2184096
auaauggcaaucauacuac

SEQ ID NO: 2184098 - RNA, 19 nt, Artificial Sequence
  Description of Artificial Sequence: Synthetic oligonucleotide
  Sense strand starting at position 1460 of SEQ ID NO: 1883305
ccggaaugaguccgaagau

SEQ ID NO: 2184099 - RNA, 19 nt, Artificial Sequence
  Description of Artificial Sequence: Synthetic oligonucleotide
  Antisense strand to SEQ ID NO: 2184098
aucuucggacucauuccgg

SEQ ID NO: 2184100 - RNA, 19 nt, Artificial Sequence
  Description of Artificial Sequence: Synthetic oligonucleotide
  Sense strand starting at position 1967 of SEQ ID NO: 1883305
gucggaauucaggagccau

SEQ ID NO: 2184101 - RNA, 19 nt, Artificial Sequence
  Description of Artificial Sequence: Synthetic oligonucleotide
  Antisense strand to SEQ ID NO: 2184100
auggcuccugaauuccgac

SEQ ID NO: 2184102 - RNA, 19 nt, Artificial Sequence
  Description of Artificial Sequence: Synthetic oligonucleotide
  Sense strand starting at position 2169 of SEQ ID NO: 1883305
aaugguuuagagugaacaa

SEQ ID NO: 2184103 - RNA, 19 nt, Artificial Sequence
  Description of Artificial Sequence: Synthetic oligonucleotide
  Antisense strand to SEQ ID NO: 2184102
uuguucacucuaaaccauu

SEQ ID NO: 2184104 - RNA, 19 nt, Artificial Sequence
  Description of Artificial Sequence: Synthetic oligonucleotide
  Sense strand starting at position 2349 of SEQ ID NO: 1883305
uuugcacaucuguaagaug

SEQ ID NO: 2184105 - RNA, 19 nt, Artificial Sequence
  Description of Artificial Sequence: Synthetic oligonucleotide
  Antisense strand to SEQ ID NO: 2184104
caucuuacagaugugcaaa

SEQ ID NO: 2184106 - RNA, 19 nt, Artificial Sequence
  Description of Artificial Sequence: Synthetic oligonucleotide
  Sense strand starting at position 2380 of SEQ ID NO: 1883305
agaggaucacugugaagcu

SEQ ID NO: 2184107 - RNA, 19 nt, Artificial Sequence
  Description of Artificial Sequence: Synthetic oligonucleotide
  Antisense strand to SEQ ID NO: 2184106
agcuucacagugauccucu

SEQ ID NO: 2184108 - RNA, 19 nt, Artificial Sequence
  Description of Artificial Sequence: Synthetic oligonucleotide
  Sense strand starting at position 2459 of SEQ ID NO: 1883305
uucguugucguugucauau

SEQ ID NO: 2184109 - RNA, 19 nt, Artificial Sequence
  Description of Artificial Sequence: Synthetic oligonucleotide
  Antisense strand to SEQ ID NO: 2184108
auaugacaacgacaacgaa

SEQ ID NO: 2184110 - RNA, 19 nt, Artificial Sequence
  Description of Artificial Sequence: Synthetic oligonucleotide
  Sense strand starting at position 2597 of SEQ ID NO: 1883305
ggaaguauaucuccuacag

SEQ ID NO: 2184111 - RNA, 19 nt, Artificial Sequence
  Description of Artificial Sequence: Synthetic oligonucleotide
  Antisense strand to SEQ ID NO: 2184110
cuguaggagauauacuucc

SEQ ID NO: 2184112 - RNA, 19 nt, Artificial Sequence
  Description of Artificial Sequence: Synthetic oligonucleotide
  Sense strand starting at position 2899 of SEQ ID NO: 1883305
ucuugauguguguauuaug

SEQ ID NO: 2184113 - RNA, 19 nt, Artificial Sequence
  Description of Artificial Sequence: Synthetic oligonucleotide
  Antisense strand to SEQ ID NO: 2184112
cauaauacacacaucaaga

SEQ ID NO: 2184114 - RNA, 19 nt, Artificial Sequence
  Description of Artificial Sequence: Synthetic oligonucleotide
  Sense strand starting at position 2908 of SEQ ID NO: 1883305
guguauuauguuugcauuu

SEQ ID NO: 2184115 - RNA, 19 nt, Artificial Sequence
  Description of Artificial Sequence: Synthetic oligonucleotide
  Antisense strand to SEQ ID NO: 2184114
aaaugcaaacauaauacac

SEQ ID NO: 2184116 - RNA, 19 nt, Artificial Sequence
  Description of Artificial Sequence: Synthetic oligonucleotide
  Sense strand starting at position 2946 of SEQ ID NO: 1883305
caaugcugagugcaaagaa

SEQ ID NO: 2184117 - RNA, 19 nt, Artificial Sequence
  Description of Artificial Sequence: Synthetic oligonucleotide
  Antisense strand to SEQ ID NO: 2184116
uucuuugcacucagcauug

SEQ ID NO: 2184118 - RNA, 19 nt, Artificial Sequence
  Description of Artificial Sequence: Synthetic oligonucleotide
  Sense strand starting at position 2993 of SEQ ID NO: 1883305
gcauuuacagcuggcaauu

SEQ ID NO: 2184119 - RNA, 19 nt, Artificial Sequence
  Description of Artificial Sequence: Synthetic oligonucleotide
  Antisense strand to SEQ ID NO: 2184118
aauugccagcuguaaaugc

SEQ ID NO: 2184120 - RNA, 19 nt, Artificial Sequence
  Description of Artificial Sequence: Synthetic oligonucleotide
  Sense strand starting at position 3014 of SEQ ID NO: 1883305
uagaguuugccagguagag

SEQ ID NO: 2184121 - RNA, 19 nt, Artificial Sequence
  Description of Artificial Sequence: Synthetic oligonucleotide
  Antisense strand to SEQ ID NO: 2184120
cucuaccuggcaaacucua

SEQ ID NO: 2184122 - RNA, 19 nt, Artificial Sequence
  Description of Artificial Sequence: Synthetic oligonucleotide
  Sense strand starting at position 3016 of SEQ ID NO: 1883305
gaguuugccagguagagac

SEQ ID NO: 2184123 - RNA, 19 nt, Artificial Sequence
  Description of Artificial Sequence: Synthetic oligonucleotide
  Antisense strand to SEQ ID NO: 2184122
gucucuaccuggcaaacuc

SEQ ID NO: 2184124 - RNA, 19 nt, Artificial Sequence
  Description of Artificial Sequence: Synthetic oligonucleotide
  Sense strand starting at position 3098 of SEQ ID NO: 1883305
gaaacaucaguuuggcaau

SEQ ID NO: 2184125 - RNA, 19 nt, Artificial Sequence
  Description of Artificial Sequence: Synthetic oligonucleotide
  Antisense strand to SEQ ID NO: 2184124
auugccaaacugauguuuc

SEQ ID NO: 2184126 - RNA, 19 nt, Artificial Sequence
  Description of Artificial Sequence: Synthetic oligonucleotide
  Sense strand starting at position 3124 of SEQ ID NO: 1883305
gcuagauagaagggaucuu

SEQ ID NO: 2184127 - RNA, 19 nt, Artificial Sequence
  Description of Artificial Sequence: Synthetic oligonucleotide
  Antisense strand to SEQ ID NO: 2184126
aagaucccuucuaucuagc

SEQ ID NO: 2184128 - RNA, 19 nt, Artificial Sequence
  Description of Artificial Sequence: Synthetic oligonucleotide
  Sense strand starting at position 3147 of SEQ ID NO: 1883305
caguaagaaugagagauua

SEQ ID NO: 2184129 - RNA, 19 nt, Artificial Sequence
  Description of Artificial Sequence: Synthetic oligonucleotide
  Antisense strand to SEQ ID NO: 2184128
uaaucucucauucuuacug

SEQ ID NO: 2184130 - RNA, 19 nt, Artificial Sequence
  Description of Artificial Sequence: Synthetic oligonucleotide
  Sense strand starting at position 3241 of SEQ ID NO: 1883305
cccugaauauuuggauuuc

SEQ ID NO: 2184131 - RNA, 19 nt, Artificial Sequence
  Description of Artificial Sequence: Synthetic oligonucleotide
  Antisense strand to SEQ ID NO: 2184130
gaaauccaaauauucaggg

SEQ ID NO: 2184132 - RNA, 19 nt, Artificial Sequence
  Description of Artificial Sequence: Synthetic oligonucleotide
  Sense strand starting at position 3388 of SEQ ID NO: 1883305
gauuuauuacuguguggca

SEQ ID NO: 2184133 - RNA, 19 nt, Artificial Sequence
  Description of Artificial Sequence: Synthetic oligonucleotide
  Antisense strand to SEQ ID NO: 2184132
ugccacacaguaauaaauc

SEQ ID NO: 2184134 - RNA, 19 nt, Artificial Sequence
  Description of Artificial Sequence: Synthetic oligonucleotide
  Sense strand starting at position 3389 of SEQ ID NO: 1883305
auuuauuacuguguggcau

SEQ ID NO: 2184135 - RNA, 19 nt, Artificial Sequence
  Description of Artificial Sequence: Synthetic oligonucleotide
  Antisense strand to SEQ ID NO: 2184134
augccacacaguaauaaau

SEQ ID NO: 2184136 - RNA, 19 nt, Artificial Sequence
  Description of Artificial Sequence: Synthetic oligonucleotide
  Sense strand starting at position 3524 of SEQ ID NO: 1883305
gagcacugaugucugauua

SEQ ID NO: 2184137 - RNA, 19 nt, Artificial Sequence
  Description of Artificial Sequence: Synthetic oligonucleotide
  Antisense strand to SEQ ID NO: 2184136
uaaucagacaucagugcuc

SEQ ID NO: 2184138 - RNA, 19 nt, Artificial Sequence
  Description of Artificial Sequence: Synthetic oligonucleotide
  Sense strand starting at position 3528 of SEQ ID NO: 1883305
acugaugucugauuacuca

SEQ ID NO: 2184139 - RNA, 19 nt, Artificial Sequence
  Description of Artificial Sequence: Synthetic oligonucleotide
  Antisense strand to SEQ ID NO: 2184138
ugaguaaucagacaucagu

SEQ ID NO: 2184140 - RNA, 19 nt, Artificial Sequence
  Description of Artificial Sequence: Synthetic oligonucleotide
  Sense strand starting at position 3573 of SEQ ID NO: 1883305
caggcaaguuuagcaaauu

SEQ ID NO: 2184141 - RNA, 19 nt, Artificial Sequence
  Description of Artificial Sequence: Synthetic oligonucleotide
  Antisense strand to SEQ ID NO: 2184140
aauuugcuaaacuugccug

SEQ ID NO: 2184142 - RNA, 19 nt, Artificial Sequence
  Description of Artificial Sequence: Synthetic oligonucleotide
  Sense strand starting at position 3678 of SEQ ID NO: 1883305
gcagaaagauuaguuucua

SEQ ID NO: 2184143 - RNA, 19 nt, Artificial Sequence
  Description of Artificial Sequence: Synthetic oligonucleotide
  Antisense strand to SEQ ID NO: 2184142
uagaaacuaaucuuucugc

SEQ ID NO: 2184144 - RNA, 19 nt, Artificial Sequence
  Description of Artificial Sequence: Synthetic oligonucleotide
  Sense strand starting at position 3686 of SEQ ID NO: 1883305
auuaguuucuaagcugaca

SEQ ID NO: 2184145 - RNA, 19 nt, Artificial Sequence
  Description of Artificial Sequence: Synthetic oligonucleotide
  Antisense strand to SEQ ID NO: 2184144
ugucagcuuagaaacuaau

SEQ ID NO: 2184146 - RNA, 19 nt, Artificial Sequence
  Description of Artificial Sequence: Synthetic oligonucleotide
  Sense strand starting at position 3711 of SEQ ID NO: 1883305
ugaggucaggccuacuaua

SEQ ID NO: 2184147 - RNA, 19 nt, Artificial Sequence
  Description of Artificial Sequence: Synthetic oligonucleotide
  Antisense strand to SEQ ID NO: 2184146
uauaguaggccugaccuca

SEQ ID NO: 2184148 - RNA, 19 nt, Artificial Sequence
  Description of Artificial Sequence: Synthetic oligonucleotide
  Sense strand starting at position 3741 of SEQ ID NO: 1883305
cuugcagugaacuaggauu

SEQ ID NO: 2184149 - RNA, 19 nt, Artificial Sequence
  Description of Artificial Sequence: Synthetic oligonucleotide
  Antisense strand to SEQ ID NO: 2184148
aauccuaguucacugcaag

SEQ ID NO: 2184150 - RNA, 19 nt, Artificial Sequence
  Description of Artificial Sequence: Synthetic oligonucleotide
  Sense strand starting at position 3879 of SEQ ID NO: 1883305
cgcagaaaguucucaagag

SEQ ID NO: 2184151 - RNA, 19 nt, Artificial Sequence
  Description of Artificial Sequence: Synthetic oligonucleotide
  Antisense strand to SEQ ID NO: 2184150
cucuugagaacuuucugcg

SEQ ID NO: 2184152 - RNA, 19 nt, Artificial Sequence
  Description of Artificial Sequence: Synthetic oligonucleotide
  Sense strand starting at position 3915 of SEQ ID NO: 1883305
uuugacauguuggcucuaa

SEQ ID NO: 2184153 - RNA, 19 nt, Artificial Sequence
  Description of Artificial Sequence: Synthetic oligonucleotide
  Antisense strand to SEQ ID NO: 2184152
uuagagccaacaugucaaa

SEQ ID NO: 2184154 - RNA, 19 nt, Artificial Sequence
  Description of Artificial Sequence: Synthetic oligonucleotide
  Sense strand starting at position 3919 of SEQ ID NO: 1883305
acauguuggcucuaagcuu

SEQ ID NO: 2184155 - RNA, 19 nt, Artificial Sequence
  Description of Artificial Sequence: Synthetic oligonucleotide
  Antisense strand to SEQ ID NO: 2184154
aagcuuagagccaacaugu

SEQ ID NO: 2184156 - RNA, 19 nt, Artificial Sequence
  Description of Artificial Sequence: Synthetic oligonucleotide
  Sense strand starting at position 681 of SEQ ID NO: 1883306
cagaguaacugagacgauu

SEQ ID NO: 2184157 - RNA, 19 nt, Artificial Sequence
  Description of Artificial Sequence: Synthetic oligonucleotide
  Antisense strand to SEQ ID NO: 2184156
aaucgucucaguuacucug

SEQ ID NO: 2184158 - RNA, 19 nt, Artificial Sequence
  Description of Artificial Sequence: Synthetic oligonucleotide
  Sense strand starting at position 689 of SEQ ID NO: 1883306
cugagacgauugcaacuua

SEQ ID NO: 2184159 - RNA, 19 nt, Artificial Sequence
  Description of Artificial Sequence: Synthetic oligonucleotide
  Antisense strand to SEQ ID NO: 2184158
uaaguugcaaucgucucag

SEQ ID NO: 2184160 - RNA, 19 nt, Artificial Sequence
  Description of Artificial Sequence: Synthetic oligonucleotide
  Sense strand starting at position 717 of SEQ ID NO: 1883306
auguguaaaucaucuugaa

SEQ ID NO: 2184161 - RNA, 19 nt, Artificial Sequence
  Description of Artificial Sequence: Synthetic oligonucleotide
  Antisense strand to SEQ ID NO: 2184160
uucaagaugauuuacacau

SEQ ID NO: 2184162 - RNA, 19 nt, Artificial Sequence
  Description of Artificial Sequence: Synthetic oligonucleotide
  Sense strand starting at position 745 of SEQ ID NO: 1883306
ugagaaagaucacaugauu

SEQ ID NO: 2184163 - RNA, 19 nt, Artificial Sequence
  Description of Artificial Sequence: Synthetic oligonucleotide
  Antisense strand to SEQ ID NO: 2184162
aaucaugugaucuuucuca

SEQ ID NO: 2184164 - RNA, 19 nt, Artificial Sequence
  Description of Artificial Sequence: Synthetic oligonucleotide
  Sense strand starting at position 780 of SEQ ID NO: 1883306
uugcuugaggaauaaugca

SEQ ID NO: 2184165 - RNA, 19 nt, Artificial Sequence
  Description of Artificial Sequence: Synthetic oligonucleotide
  Antisense strand to SEQ ID NO: 2184164
ugcauuauuccucaagcaa

SEQ ID NO: 2184166 - RNA, 19 nt, Artificial Sequence
  Description of Artificial Sequence: Synthetic oligonucleotide
  Sense strand starting at position 1000 of SEQ ID NO: 1883306
aguggucucuacuacaaua

SEQ ID NO: 2184167 - RNA, 19 nt, Artificial Sequence
  Description of Artificial Sequence: Synthetic oligonucleotide
  Antisense strand to SEQ ID NO: 2184166
uauuguaguagagaccacu

SEQ ID NO: 2184168 - RNA, 19 nt, Artificial Sequence
  Description of Artificial Sequence: Synthetic oligonucleotide
  Sense strand starting at position 1029 of SEQ ID NO: 1883306
gcuaaugacccucacagua

SEQ ID NO: 2184169 - RNA, 19 nt, Artificial Sequence
  Description of Artificial Sequence: Synthetic oligonucleotide
  Antisense strand to SEQ ID NO: 2184168
uacugugagggucauuagc

SEQ ID NO: 2184170 - RNA, 19 nt, Artificial Sequence
  Description of Artificial Sequence: Synthetic oligonucleotide
  Sense strand starting at position 1106 of SEQ ID NO: 1883306
aacugccgcugucuuaaua

SEQ ID NO: 2184171 - RNA, 19 nt, Artificial Sequence
  Description of Artificial Sequence: Synthetic oligonucleotide
  Antisense strand to SEQ ID NO: 2184170
uauuaagacagcggcaguu

SEQ ID NO: 2184172 - RNA, 19 nt, Artificial Sequence
  Description of Artificial Sequence: Synthetic oligonucleotide
  Sense strand starting at position 1172 of SEQ ID NO: 1883306
ccgguaacacgcugauacu

SEQ ID NO: 2184173 - RNA, 19 nt, Artificial Sequence
  Description of Artificial Sequence: Synthetic oligonucleotide
  Antisense strand to SEQ ID NO: 2184172
aguaucagcguguuaccgg

SEQ ID NO: 2184174 - RNA, 19 nt, Artificial Sequence
  Description of Artificial Sequence: Synthetic oligonucleotide
  Sense strand starting at position 1173 of SEQ ID NO: 1883306
cgguaacacgcugauacuu

SEQ ID NO: 2184175 - RNA, 19 nt, Artificial Sequence
  Description of Artificial Sequence: Synthetic oligonucleotide
  Antisense strand to SEQ ID NO: 2184174
aaguaucagcguguuaccg

SEQ ID NO: 2184176 - RNA, 19 nt, Artificial Sequence
  Description of Artificial Sequence: Synthetic oligonucleotide
  Sense strand starting at position 1178 of SEQ ID NO: 1883306
acacgcugauacuucgaaa

SEQ ID NO: 2184177 - RNA, 19 nt, Artificial Sequence
  Description of Artificial Sequence: Synthetic oligonucleotide
  Antisense strand to SEQ ID NO: 2184176
uuucgaaguaucagcgugu

SEQ ID NO: 2184178 - RNA, 19 nt, Artificial Sequence
  Description of Artificial Sequence: Synthetic oligonucleotide
  Sense strand starting at position 1420 of SEQ ID NO: 1883306
ccggauugagcucagaaca

SEQ ID NO: 2184179 - RNA, 19 nt, Artificial Sequence
  Description of Artificial Sequence: Synthetic oligonucleotide
  Antisense strand to SEQ ID NO: 2184178
uguucugagcucaauccgg

SEQ ID NO: 2184180 - RNA, 19 nt, Artificial Sequence
  Description of Artificial Sequence: Synthetic oligonucleotide
  Sense strand starting at position 1454 of SEQ ID NO: 1883306
ggacucauucuacaagcuu

SEQ ID NO: 2184181 - RNA, 19 nt, Artificial Sequence
  Description of Artificial Sequence: Synthetic oligonucleotide
  Antisense strand to SEQ ID NO: 2184180
aagcuuguagaaugagucc

SEQ ID NO: 2184182 - RNA, 19 nt, Artificial Sequence
  Description of Artificial Sequence: Synthetic oligonucleotide
  Sense strand starting at position 1462 of SEQ ID NO: 1883306
ucuacaagcuucuucggaa

SEQ ID NO: 2184183 - RNA, 19 nt, Artificial Sequence
  Description of Artificial Sequence: Synthetic oligonucleotide
  Antisense strand to SEQ ID NO: 2184182
uuccgaagaagcuuguaga

SEQ ID NO: 2184184 - RNA, 19 nt, Artificial Sequence
  Description of Artificial Sequence: Synthetic oligonucleotide
  Sense strand starting at position 1544 of SEQ ID NO: 1883306
cugucaauguccucgauga

SEQ ID NO: 2184185 - RNA, 19 nt, Artificial Sequence
  Description of Artificial Sequence: Synthetic oligonucleotide
  Antisense strand to SEQ ID NO: 2184184
ucaucgaggacauugacag

SEQ ID NO: 2184186 - RNA, 19 nt, Artificial Sequence
  Description of Artificial Sequence: Synthetic oligonucleotide
  Sense strand starting at position 1545 of SEQ ID NO: 1883306
ugucaauguccucgaugag

SEQ ID NO: 2184187 - RNA, 19 nt, Artificial Sequence
  Description of Artificial Sequence: Synthetic oligonucleotide
  Antisense strand to SEQ ID NO: 2184186
cucaucgaggacauugaca

SEQ ID NO: 2184188 - RNA, 19 nt, Artificial Sequence
  Description of Artificial Sequence: Synthetic oligonucleotide
  Sense strand starting at position 1744 of SEQ ID NO: 1883306
gccggaagcuccuccauau

SEQ ID NO: 2184189 - RNA, 19 nt, Artificial Sequence
  Description of Artificial Sequence: Synthetic oligonucleotide
  Antisense strand to SEQ ID NO: 2184188
auauggaggagcuuccggc

SEQ ID NO: 2184190 - RNA, 19 nt, Artificial Sequence
  Description of Artificial Sequence: Synthetic oligonucleotide
  Sense strand starting at position 1845 of SEQ ID NO: 1883306
guuccuguuaaguagguaa

SEQ ID NO: 2184191 - RNA, 19 nt, Artificial Sequence
  Description of Artificial Sequence: Synthetic oligonucleotide
  Antisense strand to SEQ ID NO: 2184190
uuaccuacuuaacaggaac

SEQ ID NO: 2184192 - RNA, 19 nt, Artificial Sequence
  Description of Artificial Sequence: Synthetic oligonucleotide
  Sense strand starting at position 1847 of SEQ ID NO: 1883306
uccuguuaaguagguaaga

SEQ ID NO: 2184193 - RNA, 19 nt, Artificial Sequence
  Description of Artificial Sequence: Synthetic oligonucleotide
  Antisense strand to SEQ ID NO: 2184192
ucuuaccuacuuaacagga

SEQ ID NO: 2184194 - RNA, 19 nt, Artificial Sequence
  Description of Artificial Sequence: Synthetic oligonucleotide
  Sense strand starting at position 2637 of SEQ ID NO: 1883306
gaaagauccugcgcggacu

SEQ ID NO: 2184195 - RNA, 19 nt, Artificial Sequence
  Description of Artificial Sequence: Synthetic oligonucleotide
  Antisense strand to SEQ ID NO: 2184194
aguccgcgcaggaucuuuc

SEQ ID NO: 2184196 - RNA, 19 nt, Artificial Sequence
  Description of Artificial Sequence: Synthetic oligonucleotide
  Sense strand starting at position 2741 of SEQ ID NO: 1883306
caauuuauccugcguggcu

SEQ ID NO: 2184197 - RNA, 19 nt, Artificial Sequence
  Description of Artificial Sequence: Synthetic oligonucleotide
  Antisense strand to SEQ ID NO: 2184196
agccacgcaggauaaauug

SEQ ID NO: 2184198 - RNA, 19 nt, Artificial Sequence
  Description of Artificial Sequence: Synthetic oligonucleotide
  Sense strand starting at position 2878 of SEQ ID NO: 1883306
ccuaaugccuugccugaga

SEQ ID NO: 2184199 - RNA, 19 nt, Artificial Sequence
  Description of Artificial Sequence: Synthetic oligonucleotide
  Antisense strand to SEQ ID NO: 2184198
ucucaggcaaggcauuagg

SEQ ID NO: 2184200 - RNA, 19 nt, Artificial Sequence
  Description of Artificial Sequence: Synthetic oligonucleotide
  Sense strand starting at position 2887 of SEQ ID NO: 1883306
uugccugagaucgaaucau

SEQ ID NO: 2184201 - RNA, 19 nt, Artificial Sequence
  Description of Artificial Sequence: Synthetic oligonucleotide
  Antisense strand to SEQ ID NO: 2184200
augauucgaucucaggcaa

SEQ ID NO: 2184202 - RNA, 19 nt, Artificial Sequence
  Description of Artificial Sequence: Synthetic oligonucleotide
  Sense strand starting at position 2893 of SEQ ID NO: 1883306
gagaucgaaucaugaauaa

SEQ ID NO: 2184203 - RNA, 19 nt, Artificial Sequence
  Description of Artificial Sequence: Synthetic oligonucleotide
  Antisense strand to SEQ ID NO: 2184202
uuauucaugauucgaucuc

SEQ ID NO: 2184204 - RNA, 19 nt, Artificial Sequence
  Description of Artificial Sequence: Synthetic oligonucleotide
  Sense strand starting at position 2903 of SEQ ID NO: 1883306
caugaauaaucaguguugu

SEQ ID NO: 2184205 - RNA, 19 nt, Artificial Sequence
  Description of Artificial Sequence: Synthetic oligonucleotide
  Antisense strand to SEQ ID NO: 2184204
acaacacugauuauucaug

SEQ ID NO: 2184206 - RNA, 19 nt, Artificial Sequence
  Description of Artificial Sequence: Synthetic oligonucleotide
  Sense strand starting at position 2904 of SEQ ID NO: 1883306
augaauaaucaguguugua

SEQ ID NO: 2184207 - RNA, 19 nt, Artificial Sequence
  Description of Artificial Sequence: Synthetic oligonucleotide
  Antisense strand to SEQ ID NO: 2184206
uacaacacugauuauucau

SEQ ID NO: 2184208 - RNA, 19 nt, Artificial Sequence
  Description of Artificial Sequence: Synthetic oligonucleotide
  Sense strand starting at position 2925 of SEQ ID NO: 1883306
guaccuuuacgcggauuga

SEQ ID NO: 2184209 - RNA, 19 nt, Artificial Sequence
  Description of Artificial Sequence: Synthetic oligonucleotide
  Antisense strand to SEQ ID NO: 2184208
ucaauccgcguaaagguac

SEQ ID NO: 2184210 - RNA, 19 nt, Artificial Sequence
  Description of Artificial Sequence: Synthetic oligonucleotide
  Sense strand starting at position 3097 of SEQ ID NO: 1883306
auauacuucugcuuuguua

SEQ ID NO: 2184211 - RNA, 19 nt, Artificial Sequence
  Description of Artificial Sequence: Synthetic oligonucleotide
  Antisense strand to SEQ ID NO: 2184210
uaacaaagcagaaguauau

SEQ ID NO: 2184212 - RNA, 19 nt, Artificial Sequence
  Description of Artificial Sequence: Synthetic oligonucleotide
  Sense strand starting at position 3211 of SEQ ID NO: 1883306
gaaauucucguacauugcu

SEQ ID NO: 2184213 - RNA, 19 nt, Artificial Sequence
  Description of Artificial Sequence: Synthetic oligonucleotide
  Antisense strand to SEQ ID NO: 2184212
agcaauguacgagaauuuc

SEQ ID NO: 2184214 - RNA, 19 nt, Artificial Sequence
  Description of Artificial Sequence: Synthetic oligonucleotide
  Sense strand starting at position 3282 of SEQ ID NO: 1883306
gcauuagaauuagucuaug

SEQ ID NO: 2184215 - RNA, 19 nt, Artificial Sequence
  Description of Artificial Sequence: Synthetic oligonucleotide
  Antisense strand to SEQ ID NO: 2184214
cauagacuaauucuaaugc

SEQ ID NO: 2184216 - RNA, 19 nt, Artificial Sequence
  Description of Artificial Sequence: Synthetic oligonucleotide
  Sense strand starting at position 3287 of SEQ ID NO: 1883306
agaauuagucuaugaccca

SEQ ID NO: 2184217 - RNA, 19 nt, Artificial Sequence
  Description of Artificial Sequence: Synthetic oligonucleotide
  Antisense strand to SEQ ID NO: 2184216
ugggucauagacuaauucu

SEQ ID NO: 2184218 - RNA, 19 nt, Artificial Sequence
  Description of Artificial Sequence: Synthetic oligonucleotide
  Sense strand starting at position 3310 of SEQ ID NO: 1883306
gcccacuccuggcuauaua

SEQ ID NO: 2184219 - RNA, 19 nt, Artificial Sequence
  Description of Artificial Sequence: Synthetic oligonucleotide
  Antisense strand to SEQ ID NO: 2184218
uauauagccaggagugggc

SEQ ID NO: 2184220 - RNA, 19 nt, Artificial Sequence
  Description of Artificial Sequence: Synthetic oligonucleotide
  Sense strand starting at position 3318 of SEQ ID NO: 1883306
cuggcuauauacccaagaa

SEQ ID NO: 2184221 - RNA, 19 nt, Artificial Sequence
  Description of Artificial Sequence: Synthetic oligonucleotide
  Antisense strand to SEQ ID NO: 2184220
uucuuggguauauagccag

SEQ ID NO: 2184222 - RNA, 19 nt, Artificial Sequence
  Description of Artificial Sequence: Synthetic oligonucleotide
  Sense strand starting at position 3785 of SEQ ID NO: 1883306
ccugguucuuuauucgaau

SEQ ID NO: 2184223 - RNA, 19 nt, Artificial Sequence
  Description of Artificial Sequence: Synthetic oligonucleotide
  Antisense strand to SEQ ID NO: 2184222
auucgaauaaagaaccagg

SEQ ID NO: 2184224 - RNA, 19 nt, Artificial Sequence
  Description of Artificial Sequence: Synthetic oligonucleotide
  Sense strand starting at position 3786 of SEQ ID NO: 1883306
cugguucuuuauucgaaua

SEQ ID NO: 2184225 - RNA, 19 nt, Artificial Sequence
  Description of Artificial Sequence: Synthetic oligonucleotide
  Antisense strand to SEQ ID NO: 2184224
uauucgaauaaagaaccag

SEQ ID NO: 2184226 - RNA, 19 nt, Artificial Sequence
  Description of Artificial Sequence: Synthetic oligonucleotide
  Sense strand starting at position 3799 of SEQ ID NO: 1883306
cgaauacaggaauguugua

SEQ ID NO: 2184227 - RNA, 19 nt, Artificial Sequence
  Description of Artificial Sequence: Synthetic oligonucleotide
  Antisense strand to SEQ ID NO: 2184226
uacaacauuccuguauucg

SEQ ID NO: 2184228 - RNA, 19 nt, Artificial Sequence
  Description of Artificial Sequence: Synthetic oligonucleotide
  Sense strand starting at position 3804 of SEQ ID NO: 1883306
acaggaauguuguaaggac

SEQ ID NO: 2184229 - RNA, 19 nt, Artificial Sequence
  Description of Artificial Sequence: Synthetic oligonucleotide
  Antisense strand to SEQ ID NO: 2184228
guccuuacaacauuccugu

SEQ ID NO: 2184230 - RNA, 19 nt, Artificial Sequence
  Description of Artificial Sequence: Synthetic oligonucleotide
  Sense strand starting at position 3819 of SEQ ID NO: 1883306
ggacauaacgacugaugca

SEQ ID NO: 2184231 - RNA, 19 nt, Artificial Sequence
  Description of Artificial Sequence: Synthetic oligonucleotide
  Antisense strand to SEQ ID NO: 2184230
ugcaucagucguuaugucc

SEQ ID NO: 2184232 - RNA, 19 nt, Artificial Sequence
  Description of Artificial Sequence: Synthetic oligonucleotide
  Sense strand starting at position 3957 of SEQ ID NO: 1883306
ugagcuaagucagucagaa

SEQ ID NO: 2184233 - RNA, 19 nt, Artificial Sequence
  Description of Artificial Sequence: Synthetic oligonucleotide
  Antisense strand to SEQ ID NO: 2184232
uucugacugacuuagcuca

SEQ ID NO: 2184234 - RNA, 19 nt, Artificial Sequence
  Description of Artificial Sequence: Synthetic oligonucleotide
  Sense strand starting at position 3959 of SEQ ID NO: 1883306
agcuaagucagucagaaag

SEQ ID NO: 2184235 - RNA, 19 nt, Artificial Sequence
  Description of Artificial Sequence: Synthetic oligonucleotide
  Antisense strand to SEQ ID NO: 2184234
cuuucugacugacuuagcu

SEQ ID NO: 2184236 - RNA, 19 nt, Artificial Sequence
  Description of Artificial Sequence: Synthetic oligonucleotide
  Sense strand starting at position 3 of SEQ ID NO: 1883307
accagauucuuggcacuau

SEQ ID NO: 2184237 - RNA, 19 nt, Artificial Sequence
  Description of Artificial Sequence: Synthetic oligonucleotide
  Antisense strand to SEQ ID NO: 2184236
auagugccaagaaucuggu

SEQ ID NO: 2184238 - RNA, 19 nt, Artificial Sequence
  Description of Artificial Sequence: Synthetic oligonucleotide
  Sense strand starting at position 178 of SEQ ID NO: 1883307
guuuguccuguuggaauua

SEQ ID NO: 2184239 - RNA, 19 nt, Artificial Sequence
  Description of Artificial Sequence: Synthetic oligonucleotide
  Antisense strand to SEQ ID NO: 2184238
uaauuccaacaggacaaac

SEQ ID NO: 2184240 - RNA, 19 nt, Artificial Sequence
  Description of Artificial Sequence: Synthetic oligonucleotide
  Sense strand starting at position 208 of SEQ ID NO: 1883307
auauacuuguuacuggaaa

SEQ ID NO: 2184241 - RNA, 19 nt, Artificial Sequence
  Description of Artificial Sequence: Synthetic oligonucleotide
  Antisense strand to SEQ ID NO: 2184240
uuuccaguaacaaguauau

SEQ ID NO: 2184242 - RNA, 19 nt, Artificial Sequence
  Description of Artificial Sequence: Synthetic oligonucleotide
  Sense strand starting at position 365 of SEQ ID NO: 1883307
agcugaauauacuuauagu

SEQ ID NO: 2184243 - RNA, 19 nt, Artificial Sequence
  Description of Artificial Sequence: Synthetic oligonucleotide
  Antisense strand to SEQ ID NO: 2184242
acuauaaguauauucagcu

SEQ ID NO: 2184244 - RNA, 19 nt, Artificial Sequence
  Description of Artificial Sequence: Synthetic oligonucleotide
  Sense strand starting at position 531 of SEQ ID NO: 1883307
aaggcacugcugggaauau

SEQ ID NO: 2184245 - RNA, 19 nt, Artificial Sequence
  Description of Artificial Sequence: Synthetic oligonucleotide
  Antisense strand to SEQ ID NO: 2184244
auauucccagcagugccuu

SEQ ID NO: 2184246 - RNA, 19 nt, Artificial Sequence
  Description of Artificial Sequence: Synthetic oligonucleotide
  Sense strand starting at position 691 of SEQ ID NO: 1883307
ccuguaucuucugccuacu

SEQ ID NO: 2184247 - RNA, 19 nt, Artificial Sequence
  Description of Artificial Sequence: Synthetic oligonucleotide
  Antisense strand to SEQ ID NO: 2184246
aguaggcagaagauacagg

SEQ ID NO: 2184248 - RNA, 19 nt, Artificial Sequence
  Description of Artificial Sequence: Synthetic oligonucleotide
  Sense strand starting at position 735 of SEQ ID NO: 1883307
ugccuuaacuuccuggcaa

SEQ ID NO: 2184249 - RNA, 19 nt, Artificial Sequence
  Description of Artificial Sequence: Synthetic oligonucleotide
  Antisense strand to SEQ ID NO: 2184248
uugccaggaaguuaaggca

SEQ ID NO: 2184250 - RNA, 19 nt, Artificial Sequence
  Description of Artificial Sequence: Synthetic oligonucleotide
  Sense strand starting at position 895 of SEQ ID NO: 1883307
cugaucuaacaccguaaca

SEQ ID NO: 2184251 - RNA, 19 nt, Artificial Sequence
  Description of Artificial Sequence: Synthetic oligonucleotide
  Antisense strand to SEQ ID NO: 2184250
uguuacgguguuagaucag

SEQ ID NO: 2184252 - RNA, 19 nt, Artificial Sequence
  Description of Artificial Sequence: Synthetic oligonucleotide
  Sense strand starting at position 1105 of SEQ ID NO: 1883307
cagccuuggguuugauuaa

SEQ ID NO: 2184253 - RNA, 19 nt, Artificial Sequence
  Description of Artificial Sequence: Synthetic oligonucleotide
  Antisense strand to SEQ ID NO: 2184252
uuaaucaaacccaaggcug

SEQ ID NO: 2184254 - RNA, 19 nt, Artificial Sequence
  Description of Artificial Sequence: Synthetic oligonucleotide
  Sense strand starting at position 1157 of SEQ ID NO: 1883307
acacuuacugauugauugu

SEQ ID NO: 2184255 - RNA, 19 nt, Artificial Sequence
  Description of Artificial Sequence: Synthetic oligonucleotide
  Antisense strand to SEQ ID NO: 2184254
acaaucaaucaguaagugu

SEQ ID NO: 2184256 - RNA, 19 nt, Artificial Sequence
  Description of Artificial Sequence: Synthetic oligonucleotide
  Sense strand starting at position 1160 of SEQ ID NO: 1883307
cuuacugauugauuguaca

SEQ ID NO: 2184257 - RNA, 19 nt, Artificial Sequence
  Description of Artificial Sequence: Synthetic oligonucleotide
  Antisense strand to SEQ ID NO: 2184256
uguacaaucaaucaguaag

SEQ ID NO: 2184258 - RNA, 19 nt, Artificial Sequence
  Description of Artificial Sequence: Synthetic oligonucleotide
  Sense strand starting at position 1163 of SEQ ID NO: 1883307
acugauugauuguacagga

SEQ ID NO: 2184259 - RNA, 19 nt, Artificial Sequence
  Description of Artificial Sequence: Synthetic oligonucleotide
  Antisense strand to SEQ ID NO: 2184258
uccuguacaaucaaucagu

SEQ ID NO: 2184260 - RNA, 19 nt, Artificial Sequence
  Description of Artificial Sequence: Synthetic oligonucleotide
  Sense strand starting at position 1615 of SEQ ID NO: 1883307
ucauuaaaccagcguaucu

SEQ ID NO: 2184261 - RNA, 19 nt, Artificial Sequence
  Description of Artificial Sequence: Synthetic oligonucleotide
  Antisense strand to SEQ ID NO: 2184260
agauacgcugguuuaauga

SEQ ID NO: 2184262 - RNA, 19 nt, Artificial Sequence
  Description of Artificial Sequence: Synthetic oligonucleotide
  Sense strand starting at position 1617 of SEQ ID NO: 1883307
auuaaaccagcguaucuua

SEQ ID NO: 2184263 - RNA, 19 nt, Artificial Sequence
  Description of Artificial Sequence: Synthetic oligonucleotide
  Antisense strand to SEQ ID NO: 2184262
uaagauacgcugguuuaau

SEQ ID NO: 2184264 - RNA, 19 nt, Artificial Sequence
  Description of Artificial Sequence: Synthetic oligonucleotide
  Sense strand starting at position 1638 of SEQ ID NO: 1883307
augaaucuaucccaggauu

SEQ ID NO: 2184265 - RNA, 19 nt, Artificial Sequence
  Description of Artificial Sequence: Synthetic oligonucleotide
  Antisense strand to SEQ ID NO: 2184264
aauccugggauagauucau

SEQ ID NO: 2184266 - RNA, 19 nt, Artificial Sequence
  Description of Artificial Sequence: Synthetic oligonucleotide
  Sense strand starting at position 1739 of SEQ ID NO: 1883307
ggcuacuagcuuuauagac

SEQ ID NO: 2184267 - RNA, 19 nt, Artificial Sequence
  Description of Artificial Sequence: Synthetic oligonucleotide
  Antisense strand to SEQ ID NO: 2184266
gucuauaaagcuaguagcc

SEQ ID NO: 2184268 - RNA, 19 nt, Artificial Sequence
  Description of Artificial Sequence: Synthetic oligonucleotide
  Sense strand starting at position 2043 of SEQ ID NO: 1883307
cccagucacucauuugcau

SEQ ID NO: 2184269 - RNA, 19 nt, Artificial Sequence
  Description of Artificial Sequence: Synthetic oligonucleotide
  Antisense strand to SEQ ID NO: 2184268
augcaaaugagugacuggg

SEQ ID NO: 2184270 - RNA, 19 nt, Artificial Sequence
  Description of Artificial Sequence: Synthetic oligonucleotide
  Sense strand starting at position 2047 of SEQ ID NO: 1883307
gucacucauuugcaucaca

SEQ ID NO: 2184271 - RNA, 19 nt, Artificial Sequence
  Description of Artificial Sequence: Synthetic oligonucleotide
  Antisense strand to SEQ ID NO: 2184270
ugugaugcaaaugagugac

SEQ ID NO: 2184272 - RNA, 19 nt, Artificial Sequence
  Description of Artificial Sequence: Synthetic oligonucleotide
  Sense strand starting at position 2674 of SEQ ID NO: 1883307
guuaaugaguuauccaucu

SEQ ID NO: 2184273 - RNA, 19 nt, Artificial Sequence
  Description of Artificial Sequence: Synthetic oligonucleotide
  Antisense strand to SEQ ID NO: 2184272
agauggauaacucauuaac

SEQ ID NO: 2184274 - RNA, 19 nt, Artificial Sequence
  Description of Artificial Sequence: Synthetic oligonucleotide
  Sense strand starting at position 2761 of SEQ ID NO: 1883307
ucacaauccugagagguaa

SEQ ID NO: 2184275 - RNA, 19 nt, Artificial Sequence
  Description of Artificial Sequence: Synthetic oligonucleotide
  Antisense strand to SEQ ID NO: 2184274
uuaccucucaggauuguga

SEQ ID NO: 2184276 - RNA, 19 nt, Artificial Sequence
  Description of Artificial Sequence: Synthetic oligonucleotide
  Sense strand starting at position 2774 of SEQ ID NO: 1883307
agguaaucccauugagaca

SEQ ID NO: 2184277 - RNA, 19 nt, Artificial Sequence
  Description of Artificial Sequence: Synthetic oligonucleotide
  Antisense strand to SEQ ID NO: 2184276
ugucucaaugggauuaccu

SEQ ID NO: 2184278 - RNA, 19 nt, Artificial Sequence
  Description of Artificial Sequence: Synthetic oligonucleotide
  Sense strand starting at position 2978 of SEQ ID NO: 1883307
gaggacuuuccuggugauu

SEQ ID NO: 2184279 - RNA, 19 nt, Artificial Sequence
  Description of Artificial Sequence: Synthetic oligonucleotide
  Antisense strand to SEQ ID NO: 2184278
aaucaccaggaaaguccuc

SEQ ID NO: 2184280 - RNA, 19 nt, Artificial Sequence
  Description of Artificial Sequence: Synthetic oligonucleotide
  Sense strand starting at position 2980 of SEQ ID NO: 1883307
ggacuuuccuggugauuua

SEQ ID NO: 2184281 - RNA, 19 nt, Artificial Sequence
  Description of Artificial Sequence: Synthetic oligonucleotide
  Antisense strand to SEQ ID NO: 2184280
uaaaucaccaggaaagucc

SEQ ID NO: 2184282 - RNA, 19 nt, Artificial Sequence
  Description of Artificial Sequence: Synthetic oligonucleotide
  Sense strand starting at position 3055 of SEQ ID NO: 1883307
gguugugcugugucccaga

SEQ ID NO: 2184283 - RNA, 19 nt, Artificial Sequence
  Description of Artificial Sequence: Synthetic oligonucleotide
  Antisense strand to SEQ ID NO: 2184282
ucugggacacagcacaacc

SEQ ID NO: 2184284 - RNA, 19 nt, Artificial Sequence
  Description of Artificial Sequence: Synthetic oligonucleotide
  Sense strand starting at position 3060 of SEQ ID NO: 1883307
ugcugugucccagauuauu

SEQ ID NO: 2184285 - RNA, 19 nt, Artificial Sequence
  Description of Artificial Sequence: Synthetic oligonucleotide
  Antisense strand to SEQ ID NO: 2184284
aauaaucugggacacagca

SEQ ID NO: 2184286 - RNA, 19 nt, Artificial Sequence
  Description of Artificial Sequence: Synthetic oligonucleotide
  Sense strand starting at position 3162 of SEQ ID NO: 1883307
uuacgcuguccagcuguaa

SEQ ID NO: 2184287 - RNA, 19 nt, Artificial Sequence
  Description of Artificial Sequence: Synthetic oligonucleotide
  Antisense strand to SEQ ID NO: 2184286
uuacagcuggacagcguaa

SEQ ID NO: 2184288 - RNA, 19 nt, Artificial Sequence
  Description of Artificial Sequence: Synthetic oligonucleotide
  Sense strand starting at position 3163 of SEQ ID NO: 1883307
uacgcuguccagcuguaau

SEQ ID NO: 2184289 - RNA, 19 nt, Artificial Sequence
  Description of Artificial Sequence: Synthetic oligonucleotide
  Antisense strand to SEQ ID NO: 2184288
auuacagcuggacagcgua

SEQ ID NO: 2184290 - RNA, 19 nt, Artificial Sequence
  Description of Artificial Sequence: Synthetic oligonucleotide
  Sense strand starting at position 3166 of SEQ ID NO: 1883307
gcuguccagcuguaaucuu

SEQ ID NO: 2184291 - RNA, 19 nt, Artificial Sequence
  Description of Artificial Sequence: Synthetic oligonucleotide
  Antisense strand to SEQ ID NO: 2184290
aagauuacagcuggacagc

SEQ ID NO: 2184292 - RNA, 19 nt, Artificial Sequence
  Description of Artificial Sequence: Synthetic oligonucleotide
  Sense strand starting at position 3319 of SEQ ID NO: 1883307
uggagaugauugccgcuau

SEQ ID NO: 2184293 - RNA, 19 nt, Artificial Sequence
  Description of Artificial Sequence: Synthetic oligonucleotide
  Antisense strand to SEQ ID NO: 2184292
auagcggcaaucaucucca

SEQ ID NO: 2184294 - RNA, 19 nt, Artificial Sequence
  Description of Artificial Sequence: Synthetic oligonucleotide
  Sense strand starting at position 3533 of SEQ ID NO: 1883307
agucuugggccagaaggua

SEQ ID NO: 2184295 - RNA, 19 nt, Artificial Sequence
  Description of Artificial Sequence: Synthetic oligonucleotide
  Antisense strand to SEQ ID NO: 2184294
uaccuucuggcccaagacu

SEQ ID NO: 2184296 - RNA, 19 nt, Artificial Sequence
  Description of Artificial Sequence: Synthetic oligonucleotide
  Sense strand starting at position 3631 of SEQ ID NO: 1883307
agcugugcuacagagugau

SEQ ID NO: 2184297 - RNA, 19 nt, Artificial Sequence
  Description of Artificial Sequence: Synthetic oligonucleotide
  Antisense strand to SEQ ID NO: 2184296
aucacucuguagcacagcu

SEQ ID NO: 2184298 - RNA, 19 nt, Artificial Sequence
  Description of Artificial Sequence: Synthetic oligonucleotide
  Sense strand starting at position 3634 of SEQ ID NO: 1883307
ugugcuacagagugauuaa

SEQ ID NO: 2184299 - RNA, 19 nt, Artificial Sequence
  Description of Artificial Sequence: Synthetic oligonucleotide
  Antisense strand to SEQ ID NO: 2184298
uuaaucacucuguagcaca

SEQ ID NO: 2184300 - RNA, 19 nt, Artificial Sequence
  Description of Artificial Sequence: Synthetic oligonucleotide
  Sense strand starting at position 3635 of SEQ ID NO: 1883307
gugcuacagagugauuaau

SEQ ID NO: 2184301 - RNA, 19 nt, Artificial Sequence
  Description of Artificial Sequence: Synthetic oligonucleotide
  Antisense strand to SEQ ID NO: 2184300
auuaaucacucuguagcac

SEQ ID NO: 2184302 - RNA, 19 nt, Artificial Sequence
  Description of Artificial Sequence: Synthetic oligonucleotide
  Sense strand starting at position 3645 of SEQ ID NO: 1883307
gugauuaaugcccacugua

SEQ ID NO: 2184303 - RNA, 19 nt, Artificial Sequence
  Description of Artificial Sequence: Synthetic oligonucleotide
  Antisense strand to SEQ ID NO: 2184302
uacagugggcauuaaucac

SEQ ID NO: 2184304 - RNA, 19 nt, Artificial Sequence
  Description of Artificial Sequence: Synthetic oligonucleotide
  Sense strand starting at position 3648 of SEQ ID NO: 1883307
auuaaugcccacuguaaga

SEQ ID NO: 2184305 - RNA, 19 nt, Artificial Sequence
  Description of Artificial Sequence: Synthetic oligonucleotide
  Antisense strand to SEQ ID NO: 2184304
ucuuacagugggcauuaau

SEQ ID NO: 2184306 - RNA, 19 nt, Artificial Sequence
  Description of Artificial Sequence: Synthetic oligonucleotide
  Sense strand starting at position 3691 of SEQ ID NO: 1883307
acgggaaggcuucauagca

SEQ ID NO: 2184307 - RNA, 19 nt, Artificial Sequence
  Description of Artificial Sequence: Synthetic oligonucleotide
  Antisense strand to SEQ ID NO: 2184306
ugcuaugaagccuucccgu

SEQ ID NO: 2184308 - RNA, 19 nt, Artificial Sequence
  Description of Artificial Sequence: Synthetic oligonucleotide
  Sense strand starting at position 3698 of SEQ ID NO: 1883307
ggcuucauagcagaagagu

SEQ ID NO: 2184309 - RNA, 19 nt, Artificial Sequence
  Description of Artificial Sequence: Synthetic oligonucleotide
  Antisense strand to SEQ ID NO: 2184308
acucuucugcuaugaagcc

SEQ ID NO: 2184310 - RNA, 19 nt, Artificial Sequence
  Description of Artificial Sequence: Synthetic oligonucleotide
  Sense strand starting at position 3707 of SEQ ID NO: 1883307
gcagaagagugccuucuga

SEQ ID NO: 2184311 - RNA, 19 nt, Artificial Sequence
  Description of Artificial Sequence: Synthetic oligonucleotide
  Antisense strand to SEQ ID NO: 2184310
ucagaaggcacucuucugc

SEQ ID NO: 2184312 - RNA, 19 nt, Artificial Sequence
  Description of Artificial Sequence: Synthetic oligonucleotide
  Sense strand starting at position 3714 of SEQ ID NO: 1883307
agugccuucugagcaaagu

SEQ ID NO: 2184313 - RNA, 19 nt, Artificial Sequence
  Description of Artificial Sequence: Synthetic oligonucleotide
  Antisense strand to SEQ ID NO: 2184312
acuuugcucagaaggcacu

SEQ ID NO: 2184314 - RNA, 19 nt, Artificial Sequence
  Description of Artificial Sequence: Synthetic oligonucleotide
  Sense strand starting at position 3810 of SEQ ID NO: 1883307
acuccagucucagaauaga

SEQ ID NO: 2184315 - RNA, 19 nt, Artificial Sequence
  Description of Artificial Sequence: Synthetic oligonucleotide
  Antisense strand to SEQ ID NO: 2184314
ucuauucugagacuggagu

SEQ ID NO: 2184316 - RNA, 19 nt, Artificial Sequence
  Description of Artificial Sequence: Synthetic oligonucleotide
  Sense strand starting at position 3 of SEQ ID NO: 1883308
agguaugacguucagcauu

SEQ ID NO: 2184317 - RNA, 19 nt, Artificial Sequence
  Description of Artificial Sequence: Synthetic oligonucleotide
  Antisense strand to SEQ ID NO: 2184316
aaugcugaacgucauaccu

SEQ ID NO: 2184318 - RNA, 19 nt, Artificial Sequence
  Description of Artificial Sequence: Synthetic oligonucleotide
  Sense strand starting at position 30 of SEQ ID NO: 1883308
gagaauuauuucugcagga

SEQ ID NO: 2184319 - RNA, 19 nt, Artificial Sequence
  Description of Artificial Sequence: Synthetic oligonucleotide
  Antisense strand to SEQ ID NO: 2184318
uccugcagaaauaauucuc

SEQ ID NO: 2184320 - RNA, 19 nt, Artificial Sequence
  Description of Artificial Sequence: Synthetic oligonucleotide
  Sense strand starting at position 84 of SEQ ID NO: 1883308
cgcugucuagcacucuuua

SEQ ID NO: 2184321 - RNA, 19 nt, Artificial Sequence
  Description of Artificial Sequence: Synthetic oligonucleotide
  Antisense strand to SEQ ID NO: 2184320
uaaagagugcuagacagcg

SEQ ID NO: 2184322 - RNA, 19 nt, Artificial Sequence
  Description of Artificial Sequence: Synthetic oligonucleotide
  Sense strand starting at position 149 of SEQ ID NO: 1883308
cgcacuauauaauaaugaa

SEQ ID NO: 2184323 - RNA, 19 nt, Artificial Sequence
  Description of Artificial Sequence: Synthetic oligonucleotide
  Antisense strand to SEQ ID NO: 2184322
uucauuauuauauagugcg

SEQ ID NO: 2184324 - RNA, 19 nt, Artificial Sequence
  Description of Artificial Sequence: Synthetic oligonucleotide
  Sense strand starting at position 178 of SEQ ID NO: 1883308
guugucuaaucauucuuac

SEQ ID NO: 2184325 - RNA, 19 nt, Artificial Sequence
  Description of Artificial Sequence: Synthetic oligonucleotide
  Antisense strand to SEQ ID NO: 2184324
guaagaaugauuagacaac

SEQ ID NO: 2184326 - RNA, 19 nt, Artificial Sequence
  Description of Artificial Sequence: Synthetic oligonucleotide
  Sense strand starting at position 187 of SEQ ID NO: 1883308
ucauucuuaccuggaaaga

SEQ ID NO: 2184327 - RNA, 19 nt, Artificial Sequence
  Description of Artificial Sequence: Synthetic oligonucleotide
  Antisense strand to SEQ ID NO: 2184326
ucuuuccagguaagaauga

SEQ ID NO: 2184328 - RNA, 19 nt, Artificial Sequence
  Description of Artificial Sequence: Synthetic oligonucleotide
  Sense strand starting at position 322 of SEQ ID NO: 1883308
accuccuuucuuggugaca

SEQ ID NO: 2184329 - RNA, 19 nt, Artificial Sequence
  Description of Artificial Sequence: Synthetic oligonucleotide
  Antisense strand to SEQ ID NO: 2184328
ugucaccaagaaaggaggu

SEQ ID NO: 2184330 - RNA, 19 nt, Artificial Sequence
  Description of Artificial Sequence: Synthetic oligonucleotide
  Sense strand starting at position 362 of SEQ ID NO: 1883308
aggcuucuccaccgugagu

SEQ ID NO: 2184331 - RNA, 19 nt, Artificial Sequence
  Description of Artificial Sequence: Synthetic oligonucleotide
  Antisense strand to SEQ ID NO: 2184330
acucacgguggagaagccu

SEQ ID NO: 2184332 - RNA, 19 nt, Artificial Sequence
  Description of Artificial Sequence: Synthetic oligonucleotide
  Sense strand starting at position 430 of SEQ ID NO: 1883308
ggcaccuugagacgcaaua

SEQ ID NO: 2184333 - RNA, 19 nt, Artificial Sequence
  Description of Artificial Sequence: Synthetic oligonucleotide
  Antisense strand to SEQ ID NO: 2184332
uauugcgucucaaggugcc

SEQ ID NO: 2184334 - RNA, 19 nt, Artificial Sequence
  Description of Artificial Sequence: Synthetic oligonucleotide
  Sense strand starting at position 474 of SEQ ID NO: 1883308
ccgcgacucacagagagau

SEQ ID NO: 2184335 - RNA, 19 nt, Artificial Sequence
  Description of Artificial Sequence: Synthetic oligonucleotide
  Antisense strand to SEQ ID NO: 2184334
aucucucugugagucgcgg

SEQ ID NO: 2184336 - RNA, 19 nt, Artificial Sequence
  Description of Artificial Sequence: Synthetic oligonucleotide
  Sense strand starting at position 480 of SEQ ID NO: 1883308
cucacagagagauguaagu

SEQ ID NO: 2184337 - RNA, 19 nt, Artificial Sequence
  Description of Artificial Sequence: Synthetic oligonucleotide
  Antisense strand to SEQ ID NO: 2184336
acuuacaucucucugugag

SEQ ID NO: 2184338 - RNA, 19 nt, Artificial Sequence
  Description of Artificial Sequence: Synthetic oligonucleotide
  Sense strand starting at position 486 of SEQ ID NO: 1883308
gagagauguaagugcaggu

SEQ ID NO: 2184339 - RNA, 19 nt, Artificial Sequence
  Description of Artificial Sequence: Synthetic oligonucleotide
  Antisense strand to SEQ ID NO: 2184338
accugcacuuacaucucuc

SEQ ID NO: 2184340 - RNA, 19 nt, Artificial Sequence
  Description of Artificial Sequence: Synthetic oligonucleotide
  Sense strand starting at position 788 of SEQ ID NO: 1883308
cuggacgugugacaagaaa

SEQ ID NO: 2184341 - RNA, 19 nt, Artificial Sequence
  Description of Artificial Sequence: Synthetic oligonucleotide
  Antisense strand to SEQ ID NO: 2184340
uuucuugucacacguccag

SEQ ID NO: 2184342 - RNA, 19 nt, Artificial Sequence
  Description of Artificial Sequence: Synthetic oligonucleotide
  Sense strand starting at position 860 of SEQ ID NO: 1883308
ggauauauggaugguugau

SEQ ID NO: 2184343 - RNA, 19 nt, Artificial Sequence
  Description of Artificial Sequence: Synthetic oligonucleotide
  Antisense strand to SEQ ID NO: 2184342
aucaaccauccauauaucc

SEQ ID NO: 2184344 - RNA, 19 nt, Artificial Sequence
  Description of Artificial Sequence: Synthetic oligonucleotide
  Sense strand starting at position 871 of SEQ ID NO: 1883308
ugguugauggugggugaau

SEQ ID NO: 2184345 - RNA, 19 nt, Artificial Sequence
  Description of Artificial Sequence: Synthetic oligonucleotide
  Antisense strand to SEQ ID NO: 2184344
auucacccaccaucaacca

SEQ ID NO: 2184346 - RNA, 19 nt, Artificial Sequence
  Description of Artificial Sequence: Synthetic oligonucleotide
  Sense strand starting at position 872 of SEQ ID NO: 1883308
gguugauggugggugaaua

SEQ ID NO: 2184347 - RNA, 19 nt, Artificial Sequence
  Description of Artificial Sequence: Synthetic oligonucleotide
  Antisense strand to SEQ ID NO: 2184346
uauucacccaccaucaacc

SEQ ID NO: 2184348 - RNA, 19 nt, Artificial Sequence
  Description of Artificial Sequence: Synthetic oligonucleotide
  Sense strand starting at position 873 of SEQ ID NO: 1883308
guugauggugggugaauaa

SEQ ID NO: 2184349 - RNA, 19 nt, Artificial Sequence
  Description of Artificial Sequence: Synthetic oligonucleotide
  Antisense strand to SEQ ID NO: 2184348
uuauucacccaccaucaac

SEQ ID NO: 2184350 - RNA, 19 nt, Artificial Sequence
  Description of Artificial Sequence: Synthetic oligonucleotide
  Sense strand starting at position 882 of SEQ ID NO: 1883308
gggugaauaaauggugugu

SEQ ID NO: 2184351 - RNA, 19 nt, Artificial Sequence
  Description of Artificial Sequence: Synthetic oligonucleotide
  Antisense strand to SEQ ID NO: 2184350
acacaccauuuauucaccc

SEQ ID NO: 2184352 - RNA, 19 nt, Artificial Sequence
  Description of Artificial Sequence: Synthetic oligonucleotide
  Sense strand starting at position 886 of SEQ ID NO: 1883308
gaauaaaugguguguagau

SEQ ID NO: 2184353 - RNA, 19 nt, Artificial Sequence
  Description of Artificial Sequence: Synthetic oligonucleotide
  Antisense strand to SEQ ID NO: 2184352
aucuacacaccauuuauuc

SEQ ID NO: 2184354 - RNA, 19 nt, Artificial Sequence
  Description of Artificial Sequence: Synthetic oligonucleotide
  Sense strand starting at position 895 of SEQ ID NO: 1883308
guguguagaugggugaaca

SEQ ID NO: 2184355 - RNA, 19 nt, Artificial Sequence
  Description of Artificial Sequence: Synthetic oligonucleotide
  Antisense strand to SEQ ID NO: 2184354
uguucacccaucuacacac

SEQ ID NO: 2184356 - RNA, 19 nt, Artificial Sequence
  Description of Artificial Sequence: Synthetic oligonucleotide
  Sense strand starting at position 1606 of SEQ ID NO: 1883308
gguuuaggaagcuguggaa

SEQ ID NO: 2184357 - RNA, 19 nt, Artificial Sequence
  Description of Artificial Sequence: Synthetic oligonucleotide
  Antisense strand to SEQ ID NO: 2184356
uuccacagcuuccuaaacc

SEQ ID NO: 2184358 - RNA, 19 nt, Artificial Sequence
  Description of Artificial Sequence: Synthetic oligonucleotide
  Sense strand starting at position 1619 of SEQ ID NO: 1883308
guggaaugacuccaaacgu

SEQ ID NO: 2184359 - RNA, 19 nt, Artificial Sequence
  Description of Artificial Sequence: Synthetic oligonucleotide
  Antisense strand to SEQ ID NO: 2184358
acguuuggagucauuccac

SEQ ID NO: 2184360 - RNA, 19 nt, Artificial Sequence
  Description of Artificial Sequence: Synthetic oligonucleotide
  Sense strand starting at position 1820 of SEQ ID NO: 1883308
gucggauuccugugcuggu

SEQ ID NO: 2184361 - RNA, 19 nt, Artificial Sequence
  Description of Artificial Sequence: Synthetic oligonucleotide
  Antisense strand to SEQ ID NO: 2184360
accagcacaggaauccgac

SEQ ID NO: 2184362 - RNA, 19 nt, Artificial Sequence
  Description of Artificial Sequence: Synthetic oligonucleotide
  Sense strand starting at position 1898 of SEQ ID NO: 1883308
cguguguuuccacgguuga

SEQ ID NO: 2184363 - RNA, 19 nt, Artificial Sequence
  Description of Artificial Sequence: Synthetic oligonucleotide
  Antisense strand to SEQ ID NO: 2184362
ucaaccguggaaacacacg

SEQ ID NO: 2184364 - RNA, 19 nt, Artificial Sequence
  Description of Artificial Sequence: Synthetic oligonucleotide
  Sense strand starting at position 1899 of SEQ ID NO: 1883308
guguguuuccacgguugau

SEQ ID NO: 2184365 - RNA, 19 nt, Artificial Sequence
  Description of Artificial Sequence: Synthetic oligonucleotide
  Antisense strand to SEQ ID NO: 2184364
aucaaccguggaaacacac

SEQ ID NO: 2184366 - RNA, 19 nt, Artificial Sequence
  Description of Artificial Sequence: Synthetic oligonucleotide
  Sense strand starting at position 2161 of SEQ ID NO: 1883308
agaggcgucuuugcagaca

SEQ ID NO: 2184367 - RNA, 19 nt, Artificial Sequence
  Description of Artificial Sequence: Synthetic oligonucleotide
  Antisense strand to SEQ ID NO: 2184366
ugucugcaaagacgccucu

SEQ ID NO: 2184368 - RNA, 19 nt, Artificial Sequence
  Description of Artificial Sequence: Synthetic oligonucleotide
  Sense strand starting at position 2222 of SEQ ID NO: 1883308
caguuugauccaggucagu

SEQ ID NO: 2184369 - RNA, 19 nt, Artificial Sequence
  Description of Artificial Sequence: Synthetic oligonucleotide
  Antisense strand to SEQ ID NO: 2184368
acugaccuggaucaaacug

SEQ ID NO: 2184370 - RNA, 19 nt, Artificial Sequence
  Description of Artificial Sequence: Synthetic oligonucleotide
  Sense strand starting at position 2239 of SEQ ID NO: 1883308
gucugaguugcucagucag

SEQ ID NO: 2184371 - RNA, 19 nt, Artificial Sequence
  Description of Artificial Sequence: Synthetic oligonucleotide
  Antisense strand to SEQ ID NO: 2184370
cugacugagcaacucagac

SEQ ID NO: 2184372 - RNA, 19 nt, Artificial Sequence
  Description of Artificial Sequence: Synthetic oligonucleotide
  Sense strand starting at position 2303 of SEQ ID NO: 1883308
ggcuuccagucuuccuuua

SEQ ID NO: 2184373 - RNA, 19 nt, Artificial Sequence
  Description of Artificial Sequence: Synthetic oligonucleotide
  Antisense strand to SEQ ID NO: 2184372
uaaaggaagacuggaagcc

SEQ ID NO: 2184374 - RNA, 19 nt, Artificial Sequence
  Description of Artificial Sequence: Synthetic oligonucleotide
  Sense strand starting at position 2308 of SEQ ID NO: 1883308
ccagucuuccuuuaggauc

SEQ ID NO: 2184375 - RNA, 19 nt, Artificial Sequence
  Description of Artificial Sequence: Synthetic oligonucleotide
  Antisense strand to SEQ ID NO: 2184374
gauccuaaaggaagacugg

SEQ ID NO: 2184376 - RNA, 19 nt, Artificial Sequence
  Description of Artificial Sequence: Synthetic oligonucleotide
  Sense strand starting at position 2416 of SEQ ID NO: 1883308
agugaagucuacuuuccac

SEQ ID NO: 2184377 - RNA, 19 nt, Artificial Sequence
  Description of Artificial Sequence: Synthetic oligonucleotide
  Antisense strand to SEQ ID NO: 2184376
guggaaaguagacuucacu

SEQ ID NO: 2184378 - RNA, 19 nt, Artificial Sequence
  Description of Artificial Sequence: Synthetic oligonucleotide
  Sense strand starting at position 2433 of SEQ ID NO: 1883308
accugcuaccaucagaguu

SEQ ID NO: 2184379 - RNA, 19 nt, Artificial Sequence
  Description of Artificial Sequence: Synthetic oligonucleotide
  Antisense strand to SEQ ID NO: 2184378
aacucugaugguagcaggu

SEQ ID NO: 2184380 - RNA, 19 nt, Artificial Sequence
  Description of Artificial Sequence: Synthetic oligonucleotide
  Sense strand starting at position 2674 of SEQ ID NO: 1883308
cugggaugcuguucuguua

SEQ ID NO: 2184381 - RNA, 19 nt, Artificial Sequence
  Description of Artificial Sequence: Synthetic oligonucleotide
  Antisense strand to SEQ ID NO: 2184380
uaacagaacagcaucccag

SEQ ID NO: 2184382 - RNA, 19 nt, Artificial Sequence
  Description of Artificial Sequence: Synthetic oligonucleotide
  Sense strand starting at position 2677 of SEQ ID NO: 1883308
ggaugcuguucuguuagca

SEQ ID NO: 2184383 - RNA, 19 nt, Artificial Sequence
  Description of Artificial Sequence: Synthetic oligonucleotide
  Antisense strand to SEQ ID NO: 2184382
ugcuaacagaacagcaucc

SEQ ID NO: 2184384 - RNA, 19 nt, Artificial Sequence
  Description of Artificial Sequence: Synthetic oligonucleotide
  Sense strand starting at position 2752 of SEQ ID NO: 1883308
gugauauaugcacaucugu

SEQ ID NO: 2184385 - RNA, 19 nt, Artificial Sequence
  Description of Artificial Sequence: Synthetic oligonucleotide
  Antisense strand to SEQ ID NO: 2184384
acagaugugcauauaucac

SEQ ID NO: 2184386 - RNA, 19 nt, Artificial Sequence
  Description of Artificial Sequence: Synthetic oligonucleotide
  Sense strand starting at position 2868 of SEQ ID NO: 1883308
cuguuucuuccaggaaccu

SEQ ID NO: 2184387 - RNA, 19 nt, Artificial Sequence
  Description of Artificial Sequence: Synthetic oligonucleotide
  Antisense strand to SEQ ID NO: 2184386
agguuccuggaagaaacag

SEQ ID NO: 2184388 - RNA, 19 nt, Artificial Sequence
  Description of Artificial Sequence: Synthetic oligonucleotide
  Sense strand starting at position 2877 of SEQ ID NO: 1883308
ccaggaaccuccugauaug

SEQ ID NO: 2184389 - RNA, 19 nt, Artificial Sequence
  Description of Artificial Sequence: Synthetic oligonucleotide
  Antisense strand to SEQ ID NO: 2184388
cauaucaggagguuccugg

SEQ ID NO: 2184390 - RNA, 19 nt, Artificial Sequence
  Description of Artificial Sequence: Synthetic oligonucleotide
  Sense strand starting at position 2880 of SEQ ID NO: 1883308
ggaaccuccugauauguuu

SEQ ID NO: 2184391 - RNA, 19 nt, Artificial Sequence
  Description of Artificial Sequence: Synthetic oligonucleotide
  Antisense strand to SEQ ID NO: 2184390
aaacauaucaggagguucc

SEQ ID NO: 2184392 - RNA, 19 nt, Artificial Sequence
  Description of Artificial Sequence: Synthetic oligonucleotide
  Sense strand starting at position 3201 of SEQ ID NO: 1883308
uuacccagucuugguaauu

SEQ ID NO: 2184393 - RNA, 19 nt, Artificial Sequence
  Description of Artificial Sequence: Synthetic oligonucleotide
  Antisense strand to SEQ ID NO: 2184392
aauuaccaagacuggguaa

SEQ ID NO: 2184394 - RNA, 19 nt, Artificial Sequence
  Description of Artificial Sequence: Synthetic oligonucleotide
  Sense strand starting at position 3301 of SEQ ID NO: 1883308
uuaggcauuguuuaggauu

SEQ ID NO: 2184395 - RNA, 19 nt, Artificial Sequence
  Description of Artificial Sequence: Synthetic oligonucleotide
  Antisense strand to SEQ ID NO: 2184394
aauccuaaacaaugccuaa

SEQ ID NO: 2184396 - RNA, 19 nt, Artificial Sequence
  Description of Artificial Sequence: Synthetic oligonucleotide
  Sense strand starting at position 1 of SEQ ID NO: 1883309
aagacugugguccaaaucu

SEQ ID NO: 2184397 - RNA, 19 nt, Artificial Sequence
  Description of Artificial Sequence: Synthetic oligonucleotide
  Antisense strand to SEQ ID NO: 2184396
agauuuggaccacagucuu

SEQ ID NO: 2184398 - RNA, 19 nt, Artificial Sequence
  Description of Artificial Sequence: Synthetic oligonucleotide
  Sense strand starting at position 9 of SEQ ID NO: 1883309
gguccaaaucucuacagcu

SEQ ID NO: 2184399 - RNA, 19 nt, Artificial Sequence
  Description of Artificial Sequence: Synthetic oligonucleotide
  Antisense strand to SEQ ID NO: 2184398
agcuguagagauuuggacc

SEQ ID NO: 2184400 - RNA, 19 nt, Artificial Sequence
  Description of Artificial Sequence: Synthetic oligonucleotide
  Sense strand starting at position 42 of SEQ ID NO: 1883309
cugugugaccugggaggau

SEQ ID NO: 2184401 - RNA, 19 nt, Artificial Sequence
  Description of Artificial Sequence: Synthetic oligonucleotide
  Antisense strand to SEQ ID NO: 2184400
auccucccaggucacacag

SEQ ID NO: 2184402 - RNA, 19 nt, Artificial Sequence
  Description of Artificial Sequence: Synthetic oligonucleotide
  Sense strand starting at position 188 of SEQ ID NO: 1883309
gaagucuaccauugcuaga

SEQ ID NO: 2184403 - RNA, 19 nt, Artificial Sequence
  Description of Artificial Sequence: Synthetic oligonucleotide
  Antisense strand to SEQ ID NO: 2184402
ucuagcaaugguagacuuc

SEQ ID NO: 2184404 - RNA, 19 nt, Artificial Sequence
  Description of Artificial Sequence: Synthetic oligonucleotide
  Sense strand starting at position 190 of SEQ ID NO: 1883309
agucuaccauugcuagaca

SEQ ID NO: 2184405 - RNA, 19 nt, Artificial Sequence
  Description of Artificial Sequence: Synthetic oligonucleotide
  Antisense strand to SEQ ID NO: 2184404
ugucuagcaaugguagacu

SEQ ID NO: 2184406 - RNA, 19 nt, Artificial Sequence
  Description of Artificial Sequence: Synthetic oligonucleotide
  Sense strand starting at position 228 of SEQ ID NO: 1883309
uggaguuguagggaguaga

SEQ ID NO: 2184407 - RNA, 19 nt, Artificial Sequence
  Description of Artificial Sequence: Synthetic oligonucleotide
  Antisense strand to SEQ ID NO: 2184406
ucuacucccuacaacucca

SEQ ID NO: 2184408 - RNA, 19 nt, Artificial Sequence
  Description of Artificial Sequence: Synthetic oligonucleotide
  Sense strand starting at position 257 of SEQ ID NO: 1883309
caugcuuugcgugauaaac

SEQ ID NO: 2184409 - RNA, 19 nt, Artificial Sequence
  Description of Artificial Sequence: Synthetic oligonucleotide
  Antisense strand to SEQ ID NO: 2184408
guuuaucacgcaaagcaug

SEQ ID NO: 2184410 - RNA, 19 nt, Artificial Sequence
  Description of Artificial Sequence: Synthetic oligonucleotide
  Sense strand starting at position 266 of SEQ ID NO: 1883309
cgugauaaacaauguccau

SEQ ID NO: 2184411 - RNA, 19 nt, Artificial Sequence
  Description of Artificial Sequence: Synthetic oligonucleotide
  Antisense strand to SEQ ID NO: 2184410
auggacauuguuuaucacg

SEQ ID NO: 2184412 - RNA, 19 nt, Artificial Sequence
  Description of Artificial Sequence: Synthetic oligonucleotide
  Sense strand starting at position 334 of SEQ ID NO: 1883309
guuauuaguuccuuagauu

SEQ ID NO: 2184413 - RNA, 19 nt, Artificial Sequence
  Description of Artificial Sequence: Synthetic oligonucleotide
  Antisense strand to SEQ ID NO: 2184412
aaucuaaggaacuaauaac

SEQ ID NO: 2184414 - RNA, 19 nt, Artificial Sequence
  Description of Artificial Sequence: Synthetic oligonucleotide
  Sense strand starting at position 345 of SEQ ID NO: 1883309
cuuagauuauuugagguca

SEQ ID NO: 2184415 - RNA, 19 nt, Artificial Sequence
  Description of Artificial Sequence: Synthetic oligonucleotide
  Antisense strand to SEQ ID NO: 2184414
ugaccucaaauaaucuaag

SEQ ID NO: 2184416 - RNA, 19 nt, Artificial Sequence
  Description of Artificial Sequence: Synthetic oligonucleotide
  Sense strand starting at position 347 of SEQ ID NO: 1883309
uagauuauuugaggucaga

SEQ ID NO: 2184417 - RNA, 19 nt, Artificial Sequence
  Description of Artificial Sequence: Synthetic oligonucleotide
  Antisense strand to SEQ ID NO: 2184416
ucugaccucaaauaaucua

SEQ ID NO: 2184418 - RNA, 19 nt, Artificial Sequence
  Description of Artificial Sequence: Synthetic oligonucleotide
  Sense strand starting at position 426 of SEQ ID NO: 1883309
ccuugaauuucugagacuc

SEQ ID NO: 2184419 - RNA, 19 nt, Artificial Sequence
  Description of Artificial Sequence: Synthetic oligonucleotide
  Antisense strand to SEQ ID NO: 2184418
gagucucagaaauucaagg

SEQ ID NO: 2184420 - RNA, 19 nt, Artificial Sequence
  Description of Artificial Sequence: Synthetic oligonucleotide
  Sense strand starting at position 441 of SEQ ID NO: 1883309
acucucuagggaugauauu

SEQ ID NO: 2184421 - RNA, 19 nt, Artificial Sequence
  Description of Artificial Sequence: Synthetic oligonucleotide
  Antisense strand to SEQ ID NO: 2184420
aauaucaucccuagagagu

SEQ ID NO: 2184422 - RNA, 19 nt, Artificial Sequence
  Description of Artificial Sequence: Synthetic oligonucleotide
  Sense strand starting at position 452 of SEQ ID NO: 1883309
augauauugaagugacugu

SEQ ID NO: 2184423 - RNA, 19 nt, Artificial Sequence
  Description of Artificial Sequence: Synthetic oligonucleotide
  Antisense strand to SEQ ID NO: 2184422
acagucacuucaauaucau

SEQ ID NO: 2184424 - RNA, 19 nt, Artificial Sequence
  Description of Artificial Sequence: Synthetic oligonucleotide
  Sense strand starting at position 475 of SEQ ID NO: 1883309
aggacucaaugguccaaau

SEQ ID NO: 2184425 - RNA, 19 nt, Artificial Sequence
  Description of Artificial Sequence: Synthetic oligonucleotide
  Antisense strand to SEQ ID NO: 2184424
auuuggaccauugaguccu

SEQ ID NO: 2184426 - RNA, 19 nt, Artificial Sequence
  Description of Artificial Sequence: Synthetic oligonucleotide
  Sense strand starting at position 539 of SEQ ID NO: 1883309
cauggacacugggaauaua

SEQ ID NO: 2184427 - RNA, 19 nt, Artificial Sequence
  Description of Artificial Sequence: Synthetic oligonucleotide
  Antisense strand to SEQ ID NO: 2184426
uauauucccaguguccaug

SEQ ID NO: 2184428 - RNA, 19 nt, Artificial Sequence
  Description of Artificial Sequence: Synthetic oligonucleotide
  Sense strand starting at position 1103 of SEQ ID NO: 1883309
gaagaaucuuaugucugca

SEQ ID NO: 2184429 - RNA, 19 nt, Artificial Sequence
  Description of Artificial Sequence: Synthetic oligonucleotide
  Antisense strand to SEQ ID NO: 2184428
ugcagacauaagauucuuc

SEQ ID NO: 2184430 - RNA, 19 nt, Artificial Sequence
  Description of Artificial Sequence: Synthetic oligonucleotide
  Sense strand starting at position 1108 of SEQ ID NO: 1883309
aucuuaugucugcagccaa

SEQ ID NO: 2184431 - RNA, 19 nt, Artificial Sequence
  Description of Artificial Sequence: Synthetic oligonucleotide
  Antisense strand to SEQ ID NO: 2184430
uuggcugcagacauaagau

SEQ ID NO: 2184432 - RNA, 19 nt, Artificial Sequence
  Description of Artificial Sequence: Synthetic oligonucleotide
  Sense strand starting at position 1330 of SEQ ID NO: 1883309
gaaagaacagggugucuua

SEQ ID NO: 2184433 - RNA, 19 nt, Artificial Sequence
  Description of Artificial Sequence: Synthetic oligonucleotide
  Antisense strand to SEQ ID NO: 2184432
uaagacacccuguucuuuc

SEQ ID NO: 2184434 - RNA, 19 nt, Artificial Sequence
  Description of Artificial Sequence: Synthetic oligonucleotide
  Sense strand starting at position 1340 of SEQ ID NO: 1883309
ggugucuuauaguccagga

SEQ ID NO: 2184435 - RNA, 19 nt, Artificial Sequence
  Description of Artificial Sequence: Synthetic oligonucleotide
  Antisense strand to SEQ ID NO: 2184434
uccuggacuauaagacacc

SEQ ID NO: 2184436 - RNA, 19 nt, Artificial Sequence
  Description of Artificial Sequence: Synthetic oligonucleotide
  Sense strand starting at position 1342 of SEQ ID NO: 1883309
ugucuuauaguccaggaga

SEQ ID NO: 2184437 - RNA, 19 nt, Artificial Sequence
  Description of Artificial Sequence: Synthetic oligonucleotide
  Antisense strand to SEQ ID NO: 2184436
ucuccuggacuauaagaca

SEQ ID NO: 2184438 - RNA, 19 nt, Artificial Sequence
  Description of Artificial Sequence: Synthetic oligonucleotide
  Sense strand starting at position 1344 of SEQ ID NO: 1883309
ucuuauaguccaggagauc

SEQ ID NO: 2184439 - RNA, 19 nt, Artificial Sequence
  Description of Artificial Sequence: Synthetic oligonucleotide
  Antisense strand to SEQ ID NO: 2184438
gaucuccuggacuauaaga

SEQ ID NO: 2184440 - RNA, 19 nt, Artificial Sequence
  Description of Artificial Sequence: Synthetic oligonucleotide
  Sense strand starting at position 1379 of SEQ ID NO: 1883309
agagaaacguguccaucuu

SEQ ID NO: 2184441 - RNA, 19 nt, Artificial Sequence
  Description of Artificial Sequence: Synthetic oligonucleotide
  Antisense strand to SEQ ID NO: 2184440
aagauggacacguuucucu

SEQ ID NO: 2184442 - RNA, 19 nt, Artificial Sequence
  Description of Artificial Sequence: Synthetic oligonucleotide
  Sense strand starting at position 1511 of SEQ ID NO: 1883309
ugaugugggcagugagaau

SEQ ID NO: 2184443 - RNA, 19 nt, Artificial Sequence
  Description of Artificial Sequence: Synthetic oligonucleotide
  Antisense strand to SEQ ID NO: 2184442
auucucacugcccacauca

SEQ ID NO: 2184444 - RNA, 19 nt, Artificial Sequence
  Description of Artificial Sequence: Synthetic oligonucleotide
  Sense strand starting at position 1601 of SEQ ID NO: 1883309
ccuccuuuccagugcagaa

SEQ ID NO: 2184445 - RNA, 19 nt, Artificial Sequence
  Description of Artificial Sequence: Synthetic oligonucleotide
  Antisense strand to SEQ ID NO: 2184444
uucugcacuggaaaggagg

SEQ ID NO: 2184446 - RNA, 19 nt, Artificial Sequence
  Description of Artificial Sequence: Synthetic oligonucleotide
  Sense strand starting at position 1745 of SEQ ID NO: 1883309
agagaagccguuuaugcaa

SEQ ID NO: 2184447 - RNA, 19 nt, Artificial Sequence
  Description of Artificial Sequence: Synthetic oligonucleotide
  Antisense strand to SEQ ID NO: 2184446
uugcauaaacggcuucucu

SEQ ID NO: 2184448 - RNA, 19 nt, Artificial Sequence
  Description of Artificial Sequence: Synthetic oligonucleotide
  Sense strand starting at position 1767 of SEQ ID NO: 1883309
uucugcacucaagauagau

SEQ ID NO: 2184449 - RNA, 19 nt, Artificial Sequence
  Description of Artificial Sequence: Synthetic oligonucleotide
  Antisense strand to SEQ ID NO: 2184448
aucuaucuugagugcagaa

SEQ ID NO: 2184450 - RNA, 19 nt, Artificial Sequence
  Description of Artificial Sequence: Synthetic oligonucleotide
  Sense strand starting at position 1993 of SEQ ID NO: 1883309
ccacgagguuucucccaga

SEQ ID NO: 2184451 - RNA, 19 nt, Artificial Sequence
  Description of Artificial Sequence: Synthetic oligonucleotide
  Antisense strand to SEQ ID NO: 2184450
ucugggagaaaccucgugg

SEQ ID NO: 2184452 - RNA, 19 nt, Artificial Sequence
  Description of Artificial Sequence: Synthetic oligonucleotide
  Sense strand starting at position 2020 of SEQ ID NO: 1883309
cuguauuuguccuucugca

SEQ ID NO: 2184453 - RNA, 19 nt, Artificial Sequence
  Description of Artificial Sequence: Synthetic oligonucleotide
  Antisense strand to SEQ ID NO: 2184452
ugcagaaggacaaauacag

SEQ ID NO: 2184454 - RNA, 19 nt, Artificial Sequence
  Description of Artificial Sequence: Synthetic oligonucleotide
  Sense strand starting at position 2090 of SEQ ID NO: 1883309
gguucugaggauugauaca

SEQ ID NO: 2184455 - RNA, 19 nt, Artificial Sequence
  Description of Artificial Sequence: Synthetic oligonucleotide
  Antisense strand to SEQ ID NO: 2184454
uguaucaauccucagaacc

SEQ ID NO: 2184456 - RNA, 19 nt, Artificial Sequence
  Description of Artificial Sequence: Synthetic oligonucleotide
  Sense strand starting at position 2133 of SEQ ID NO: 1883309
uuuagaaagauucgcuaug

SEQ ID NO: 2184457 - RNA, 19 nt, Artificial Sequence
  Description of Artificial Sequence: Synthetic oligonucleotide
  Antisense strand to SEQ ID NO: 2184456
cauagcgaaucuuucuaaa

SEQ ID NO: 2184458 - RNA, 19 nt, Artificial Sequence
  Description of Artificial Sequence: Synthetic oligonucleotide
  Sense strand starting at position 2134 of SEQ ID NO: 1883309
uuagaaagauucgcuauga

SEQ ID NO: 2184459 - RNA, 19 nt, Artificial Sequence
  Description of Artificial Sequence: Synthetic oligonucleotide
  Antisense strand to SEQ ID NO: 2184458
ucauagcgaaucuuucuaa

SEQ ID NO: 2184460 - RNA, 19 nt, Artificial Sequence
  Description of Artificial Sequence: Synthetic oligonucleotide
  Sense strand starting at position 2135 of SEQ ID NO: 1883309
uagaaagauucgcuaugac

SEQ ID NO: 2184461 - RNA, 19 nt, Artificial Sequence
  Description of Artificial Sequence: Synthetic oligonucleotide
  Antisense strand to SEQ ID NO: 2184460
gucauagcgaaucuuucua

SEQ ID NO: 2184462 - RNA, 19 nt, Artificial Sequence
  Description of Artificial Sequence: Synthetic oligonucleotide
  Sense strand starting at position 2183 of SEQ ID NO: 1883309
caacuugucgcugccagua

SEQ ID NO: 2184463 - RNA, 19 nt, Artificial Sequence
  Description of Artificial Sequence: Synthetic oligonucleotide
  Antisense strand to SEQ ID NO: 2184462
uacuggcagcgacaaguug

SEQ ID NO: 2184464 - RNA, 19 nt, Artificial Sequence
  Description of Artificial Sequence: Synthetic oligonucleotide
  Sense strand starting at position 2490 of SEQ ID NO: 1883309
gccuaaagucaggagcuua

SEQ ID NO: 2184465 - RNA, 19 nt, Artificial Sequence
  Description of Artificial Sequence: Synthetic oligonucleotide
  Antisense strand to SEQ ID NO: 2184464
uaagcuccugacuuuaggc

SEQ ID NO: 2184466 - RNA, 19 nt, Artificial Sequence
  Description of Artificial Sequence: Synthetic oligonucleotide
  Sense strand starting at position 2970 of SEQ ID NO: 1883309
auaugccuuugaucaaguu

SEQ ID NO: 2184467 - RNA, 19 nt, Artificial Sequence
  Description of Artificial Sequence: Synthetic oligonucleotide
  Antisense strand to SEQ ID NO: 2184466
aacuugaucaaaggcauau

SEQ ID NO: 2184468 - RNA, 19 nt, Artificial Sequence
  Description of Artificial Sequence: Synthetic oligonucleotide
  Sense strand starting at position 3177 of SEQ ID NO: 1883309
gggccaagucucgagaguu

SEQ ID NO: 2184469 - RNA, 19 nt, Artificial Sequence
  Description of Artificial Sequence: Synthetic oligonucleotide
  Antisense strand to SEQ ID NO: 2184468
aacucucgagacuuggccc

SEQ ID NO: 2184470 - RNA, 19 nt, Artificial Sequence
  Description of Artificial Sequence: Synthetic oligonucleotide
  Sense strand starting at position 3185 of SEQ ID NO: 1883309
ucucgagaguuuccagaaa

SEQ ID NO: 2184471 - RNA, 19 nt, Artificial Sequence
  Description of Artificial Sequence: Synthetic oligonucleotide
  Antisense strand to SEQ ID NO: 2184470
uuucuggaaacucucgaga

SEQ ID NO: 2184472 - RNA, 19 nt, Artificial Sequence
  Description of Artificial Sequence: Synthetic oligonucleotide
  Sense strand starting at position 3275 of SEQ ID NO: 1883309
acauccuuuccgcaaggaa

SEQ ID NO: 2184473 - RNA, 19 nt, Artificial Sequence
  Description of Artificial Sequence: Synthetic oligonucleotide
  Antisense strand to SEQ ID NO: 2184472
uuccuugcggaaaggaugu

SEQ ID NO: 2184474 - RNA, 19 nt, Artificial Sequence
  Description of Artificial Sequence: Synthetic oligonucleotide
  Sense strand starting at position 3882 of SEQ ID NO: 1883309
aggcgaguucagugaaaua

SEQ ID NO: 2184475 - RNA, 19 nt, Artificial Sequence
  Description of Artificial Sequence: Synthetic oligonucleotide
  Antisense strand to SEQ ID NO: 2184474
uauuucacugaacucgccu

SEQ ID NO: 2184476 - RNA, 19 nt, Artificial Sequence
  Description of Artificial Sequence: Synthetic oligonucleotide
  Sense strand starting at position 146 of SEQ ID NO: 1883310
agcagagcuagaugaucua

SEQ ID NO: 2184477 - RNA, 19 nt, Artificial Sequence
  Description of Artificial Sequence: Synthetic oligonucleotide
  Antisense strand to SEQ ID NO: 2184476
uagaucaucuagcucugcu

SEQ ID NO: 2184478 - RNA, 19 nt, Artificial Sequence
  Description of Artificial Sequence: Synthetic oligonucleotide
  Sense strand starting at position 285 of SEQ ID NO: 1883310
cgaugaucauguguacaac

SEQ ID NO: 2184479 - RNA, 19 nt, Artificial Sequence
  Description of Artificial Sequence: Synthetic oligonucleotide
  Antisense strand to SEQ ID NO: 2184478
guuguacacaugaucaucg

SEQ ID NO: 2184480 - RNA, 19 nt, Artificial Sequence
  Description of Artificial Sequence: Synthetic oligonucleotide
  Sense strand starting at position 692 of SEQ ID NO: 1883310
ggagaaugcagaggugcua

SEQ ID NO: 2184481 - RNA, 19 nt, Artificial Sequence
  Description of Artificial Sequence: Synthetic oligonucleotide
  Antisense strand to SEQ ID NO: 2184480
uagcaccucugcauucucc

SEQ ID NO: 2184482 - RNA, 19 nt, Artificial Sequence
  Description of Artificial Sequence: Synthetic oligonucleotide
  Sense strand starting at position 741 of SEQ ID NO: 1883310
gaaguuacagguuagucau

SEQ ID NO: 2184483 - RNA, 19 nt, Artificial Sequence
  Description of Artificial Sequence: Synthetic oligonucleotide
  Antisense strand to SEQ ID NO: 2184482
augacuaaccuguaacuuc

SEQ ID NO: 2184484 - RNA, 19 nt, Artificial Sequence
  Description of Artificial Sequence: Synthetic oligonucleotide
  Sense strand starting at position 747 of SEQ ID NO: 1883310
acagguuagucauuguuga

SEQ ID NO: 2184485 - RNA, 19 nt, Artificial Sequence
  Description of Artificial Sequence: Synthetic oligonucleotide
  Antisense strand to SEQ ID NO: 2184484
ucaacaaugacuaaccugu

SEQ ID NO: 2184486 - RNA, 19 nt, Artificial Sequence
  Description of Artificial Sequence: Synthetic oligonucleotide
  Sense strand starting at position 850 of SEQ ID NO: 1883310
aggugugguuuaaagagga

SEQ ID NO: 2184487 - RNA, 19 nt, Artificial Sequence
  Description of Artificial Sequence: Synthetic oligonucleotide
  Antisense strand to SEQ ID NO: 2184486
uccucuuuaaaccacaccu

SEQ ID NO: 2184488 - RNA, 19 nt, Artificial Sequence
  Description of Artificial Sequence: Synthetic oligonucleotide
  Sense strand starting at position 877 of SEQ ID NO: 1883310
gaaggaaaccagugcuuuc

SEQ ID NO: 2184489 - RNA, 19 nt, Artificial Sequence
  Description of Artificial Sequence: Synthetic oligonucleotide
  Antisense strand to SEQ ID NO: 2184488
gaaagcacugguuuccuuc

SEQ ID NO: 2184490 - RNA, 19 nt, Artificial Sequence
  Description of Artificial Sequence: Synthetic oligonucleotide
  Sense strand starting at position 985 of SEQ ID NO: 1883310
cggacaagguuauacauuu

SEQ ID NO: 2184491 - RNA, 19 nt, Artificial Sequence
  Description of Artificial Sequence: Synthetic oligonucleotide
  Antisense strand to SEQ ID NO: 2184490
aaauguauaaccuuguccg

SEQ ID NO: 2184492 - RNA, 19 nt, Artificial Sequence
  Description of Artificial Sequence: Synthetic oligonucleotide
  Sense strand starting at position 1626 of SEQ ID NO: 1883310
cuuggcugugauuaucuga

SEQ ID NO: 2184493 - RNA, 19 nt, Artificial Sequence
  Description of Artificial Sequence: Synthetic oligonucleotide
  Antisense strand to SEQ ID NO: 2184492
ucagauaaucacagccaag

SEQ ID NO: 2184494 - RNA, 19 nt, Artificial Sequence
  Description of Artificial Sequence: Synthetic oligonucleotide
  Sense strand starting at position 1755 of SEQ ID NO: 1883310
ccuguacuuccagaaugca

SEQ ID NO: 2184495 - RNA, 19 nt, Artificial Sequence
  Description of Artificial Sequence: Synthetic oligonucleotide
  Antisense strand to SEQ ID NO: 2184494
ugcauucuggaaguacagg

SEQ ID NO: 2184496 - RNA, 19 nt, Artificial Sequence
  Description of Artificial Sequence: Synthetic oligonucleotide
  Sense strand starting at position 1989 of SEQ ID NO: 1883310
ugcagaggccuucagugau

SEQ ID NO: 2184497 - RNA, 19 nt, Artificial Sequence
  Description of Artificial Sequence: Synthetic oligonucleotide
  Antisense strand to SEQ ID NO: 2184496
aucacugaaggccucugca

SEQ ID NO: 2184498 - RNA, 19 nt, Artificial Sequence
  Description of Artificial Sequence: Synthetic oligonucleotide
  Sense strand starting at position 1992 of SEQ ID NO: 1883310
agaggccuucagugauaag

SEQ ID NO: 2184499 - RNA, 19 nt, Artificial Sequence
  Description of Artificial Sequence: Synthetic oligonucleotide
  Antisense strand to SEQ ID NO: 2184498
cuuaucacugaaggccucu

SEQ ID NO: 2184500 - RNA, 19 nt, Artificial Sequence
  Description of Artificial Sequence: Synthetic oligonucleotide
  Sense strand starting at position 2035 of SEQ ID NO: 1883310
ugcugauuucccuaucgug

SEQ ID NO: 2184501 - RNA, 19 nt, Artificial Sequence
  Description of Artificial Sequence: Synthetic oligonucleotide
  Antisense strand to SEQ ID NO: 2184500
cacgauagggaaaucagca

SEQ ID NO: 2184502 - RNA, 19 nt, Artificial Sequence
  Description of Artificial Sequence: Synthetic oligonucleotide
  Sense strand starting at position 2139 of SEQ ID NO: 1883310
gaaggucgauuccuaacuu

SEQ ID NO: 2184503 - RNA, 19 nt, Artificial Sequence
  Description of Artificial Sequence: Synthetic oligonucleotide
  Antisense strand to SEQ ID NO: 2184502
aaguuaggaaucgaccuuc

SEQ ID NO: 2184504 - RNA, 19 nt, Artificial Sequence
  Description of Artificial Sequence: Synthetic oligonucleotide
  Sense strand starting at position 2230 of SEQ ID NO: 1883310
uugucuuuccaggaagggu

SEQ ID NO: 2184505 - RNA, 19 nt, Artificial Sequence
  Description of Artificial Sequence: Synthetic oligonucleotide
  Antisense strand to SEQ ID NO: 2184504
acccuuccuggaaagacaa

SEQ ID NO: 2184506 - RNA, 19 nt, Artificial Sequence
  Description of Artificial Sequence: Synthetic oligonucleotide
  Sense strand starting at position 2239 of SEQ ID NO: 1883310
caggaagggugucuccuau

SEQ ID NO: 2184507 - RNA, 19 nt, Artificial Sequence
  Description of Artificial Sequence: Synthetic oligonucleotide
  Antisense strand to SEQ ID NO: 2184506
auaggagacacccuuccug

SEQ ID NO: 2184508 - RNA, 19 nt, Artificial Sequence
  Description of Artificial Sequence: Synthetic oligonucleotide
  Sense strand starting at position 2462 of SEQ ID NO: 1883310
cuguacuggacauguugaa

SEQ ID NO: 2184509 - RNA, 19 nt, Artificial Sequence
  Description of Artificial Sequence: Synthetic oligonucleotide
  Antisense strand to SEQ ID NO: 2184508
uucaacauguccaguacag

SEQ ID NO: 2184510 - RNA, 19 nt, Artificial Sequence
  Description of Artificial Sequence: Synthetic oligonucleotide
  Sense strand starting at position 2581 of SEQ ID NO: 1883310
guugccugaagaugacaaa

SEQ ID NO: 2184511 - RNA, 19 nt, Artificial Sequence
  Description of Artificial Sequence: Synthetic oligonucleotide
  Antisense strand to SEQ ID NO: 2184510
uuugucaucuucaggcaac

SEQ ID NO: 2184512 - RNA, 19 nt, Artificial Sequence
  Description of Artificial Sequence: Synthetic oligonucleotide
  Sense strand starting at position 2686 of SEQ ID NO: 1883310
aggcauuagggaugguuaa

SEQ ID NO: 2184513 - RNA, 19 nt, Artificial Sequence
  Description of Artificial Sequence: Synthetic oligonucleotide
  Antisense strand to SEQ ID NO: 2184512
uuaaccaucccuaaugccu

SEQ ID NO: 2184514 - RNA, 19 nt, Artificial Sequence
  Description of Artificial Sequence: Synthetic oligonucleotide
  Sense strand starting at position 2687 of SEQ ID NO: 1883310
ggcauuagggaugguuaag

SEQ ID NO: 2184515 - RNA, 19 nt, Artificial Sequence
  Description of Artificial Sequence: Synthetic oligonucleotide
  Antisense strand to SEQ ID NO: 2184514
cuuaaccaucccuaaugcc

SEQ ID NO: 2184516 - RNA, 19 nt, Artificial Sequence
  Description of Artificial Sequence: Synthetic oligonucleotide
  Sense strand starting at position 2760 of SEQ ID NO: 1883310
ggcgccucaccuguauauu

SEQ ID NO: 2184517 - RNA, 19 nt, Artificial Sequence
  Description of Artificial Sequence: Synthetic oligonucleotide
  Antisense strand to SEQ ID NO: 2184516
aauauacaggugaggcgcc

SEQ ID NO: 2184518 - RNA, 19 nt, Artificial Sequence
  Description of Artificial Sequence: Synthetic oligonucleotide
  Sense strand starting at position 2867 of SEQ ID NO: 1883310
guuuguucucagccucuuu

SEQ ID NO: 2184519 - RNA, 19 nt, Artificial Sequence
  Description of Artificial Sequence: Synthetic oligonucleotide
  Antisense strand to SEQ ID NO: 2184518
aaagaggcugagaacaaac

SEQ ID NO: 2184520 - RNA, 19 nt, Artificial Sequence
  Description of Artificial Sequence: Synthetic oligonucleotide
  Sense strand starting at position 2896 of SEQ ID NO: 1883310
ugcugagcagcuuaacaau

SEQ ID NO: 2184521 - RNA, 19 nt, Artificial Sequence
  Description of Artificial Sequence: Synthetic oligonucleotide
  Antisense strand to SEQ ID NO: 2184520
auuguuaagcugcucagca

SEQ ID NO: 2184522 - RNA, 19 nt, Artificial Sequence
  Description of Artificial Sequence: Synthetic oligonucleotide
  Sense strand starting at position 2905 of SEQ ID NO: 1883310
gcuuaacaaugucugaaca

SEQ ID NO: 2184523 - RNA, 19 nt, Artificial Sequence
  Description of Artificial Sequence: Synthetic oligonucleotide
  Antisense strand to SEQ ID NO: 2184522
uguucagacauuguuaagc

SEQ ID NO: 2184524 - RNA, 19 nt, Artificial Sequence
  Description of Artificial Sequence: Synthetic oligonucleotide
  Sense strand starting at position 2915 of SEQ ID NO: 1883310
gucugaacagccuaaauca

SEQ ID NO: 2184525 - RNA, 19 nt, Artificial Sequence
  Description of Artificial Sequence: Synthetic oligonucleotide
  Antisense strand to SEQ ID NO: 2184524
ugauuuaggcuguucagac

SEQ ID NO: 2184526 - RNA, 19 nt, Artificial Sequence
  Description of Artificial Sequence: Synthetic oligonucleotide
  Sense strand starting at position 2965 of SEQ ID NO: 1883310
gccuccuuuccuuaaagag

SEQ ID NO: 2184527 - RNA, 19 nt, Artificial Sequence
  Description of Artificial Sequence: Synthetic oligonucleotide
  Antisense strand to SEQ ID NO: 2184526
cucuuuaaggaaaggaggc

SEQ ID NO: 2184528 - RNA, 19 nt, Artificial Sequence
  Description of Artificial Sequence: Synthetic oligonucleotide
  Sense strand starting at position 3398 of SEQ ID NO: 1883310
ccacuaaaugcguggauaa

SEQ ID NO: 2184529 - RNA, 19 nt, Artificial Sequence
  Description of Artificial Sequence: Synthetic oligonucleotide
  Antisense strand to SEQ ID NO: 2184528
uuauccacgcauuuagugg

SEQ ID NO: 2184530 - RNA, 19 nt, Artificial Sequence
  Description of Artificial Sequence: Synthetic oligonucleotide
  Sense strand starting at position 3399 of SEQ ID NO: 1883310
cacuaaaugcguggauaag

SEQ ID NO: 2184531 - RNA, 19 nt, Artificial Sequence
  Description of Artificial Sequence: Synthetic oligonucleotide
  Antisense strand to SEQ ID NO: 2184530
cuuauccacgcauuuagug

SEQ ID NO: 2184532 - RNA, 19 nt, Artificial Sequence
  Description of Artificial Sequence: Synthetic oligonucleotide
  Sense strand starting at position 3400 of SEQ ID NO: 1883310
acuaaaugcguggauaaga

SEQ ID NO: 2184533 - RNA, 19 nt, Artificial Sequence
  Description of Artificial Sequence: Synthetic oligonucleotide
  Antisense strand to SEQ ID NO: 2184532
ucuuauccacgcauuuagu

SEQ ID NO: 2184534 - RNA, 19 nt, Artificial Sequence
  Description of Artificial Sequence: Synthetic oligonucleotide
  Sense strand starting at position 3446 of SEQ ID NO: 1883310
gggacugauagucaucagu

SEQ ID NO: 2184535 - RNA, 19 nt, Artificial Sequence
  Description of Artificial Sequence: Synthetic oligonucleotide
  Antisense strand to SEQ ID NO: 2184534
acugaugacuaucaguccc

SEQ ID NO: 2184536 - RNA, 19 nt, Artificial Sequence
  Description of Artificial Sequence: Synthetic oligonucleotide
  Sense strand starting at position 3448 of SEQ ID NO: 1883310
gacugauagucaucaguuc

SEQ ID NO: 2184537 - RNA, 19 nt, Artificial Sequence
  Description of Artificial Sequence: Synthetic oligonucleotide
  Antisense strand to SEQ ID NO: 2184536
gaacugaugacuaucaguc

SEQ ID NO: 2184538 - RNA, 19 nt, Artificial Sequence
  Description of Artificial Sequence: Synthetic oligonucleotide
  Sense strand starting at position 3487 of SEQ ID NO: 1883310
guggcuagcacucagaaga

SEQ ID NO: 2184539 - RNA, 19 nt, Artificial Sequence
  Description of Artificial Sequence: Synthetic oligonucleotide
  Antisense strand to SEQ ID NO: 2184538
ucuucugagugcuagccac

SEQ ID NO: 2184540 - RNA, 19 nt, Artificial Sequence
  Description of Artificial Sequence: Synthetic oligonucleotide
  Sense strand starting at position 3732 of SEQ ID NO: 1883310
cuaggaggacucugugagu

SEQ ID NO: 2184541 - RNA, 19 nt, Artificial Sequence
  Description of Artificial Sequence: Synthetic oligonucleotide
  Antisense strand to SEQ ID NO: 2184540
acucacagaguccuccuag

SEQ ID NO: 2184542 - RNA, 19 nt, Artificial Sequence
  Description of Artificial Sequence: Synthetic oligonucleotide
  Sense strand starting at position 3756 of SEQ ID NO: 1883310
uaugacaugugcuuagaac

SEQ ID NO: 2184543 - RNA, 19 nt, Artificial Sequence
  Description of Artificial Sequence: Synthetic oligonucleotide
  Antisense strand to SEQ ID NO: 2184542
guucuaagcacaugucaua

SEQ ID NO: 2184544 - RNA, 19 nt, Artificial Sequence
  Description of Artificial Sequence: Synthetic oligonucleotide
  Sense strand starting at position 3800 of SEQ ID NO: 1883310
cugucagcuaugggaucau

SEQ ID NO: 2184545 - RNA, 19 nt, Artificial Sequence
  Description of Artificial Sequence: Synthetic oligonucleotide
  Antisense strand to SEQ ID NO: 2184544
augaucccauagcugacag

SEQ ID NO: 2184546 - RNA, 19 nt, Artificial Sequence
  Description of Artificial Sequence: Synthetic oligonucleotide
  Sense strand starting at position 3829 of SEQ ID NO: 1883310
auuguuauuccguacaacc

SEQ ID NO: 2184547 - RNA, 19 nt, Artificial Sequence
  Description of Artificial Sequence: Synthetic oligonucleotide
  Antisense strand to SEQ ID NO: 2184546
gguuguacggaauaacaau

SEQ ID NO: 2184548 - RNA, 19 nt, Artificial Sequence
  Description of Artificial Sequence: Synthetic oligonucleotide
  Sense strand starting at position 3924 of SEQ ID NO: 1883310
cacuuugagccuuggacuu

SEQ ID NO: 2184549 - RNA, 19 nt, Artificial Sequence
  Description of Artificial Sequence: Synthetic oligonucleotide
  Antisense strand to SEQ ID NO: 2184548
aaguccaaggcucaaagug

SEQ ID NO: 2184550 - RNA, 19 nt, Artificial Sequence
  Description of Artificial Sequence: Synthetic oligonucleotide
  Sense strand starting at position 3946 of SEQ ID NO: 1883310
auccuaaaucacuggguca

SEQ ID NO: 2184551 - RNA, 19 nt, Artificial Sequence
  Description of Artificial Sequence: Synthetic oligonucleotide
  Antisense strand to SEQ ID NO: 2184550
ugacccagugauuuaggau

SEQ ID NO: 2184552 - RNA, 19 nt, Artificial Sequence
  Description of Artificial Sequence: Synthetic oligonucleotide
  Sense strand starting at position 3948 of SEQ ID NO: 1883310
ccuaaaucacugggucaaa

SEQ ID NO: 2184553 - RNA, 19 nt, Artificial Sequence
  Description of Artificial Sequence: Synthetic oligonucleotide
  Antisense strand to SEQ ID NO: 2184552
uuugacccagugauuuagg

SEQ ID NO: 2184554 - RNA, 19 nt, Artificial Sequence
  Description of Artificial Sequence: Synthetic oligonucleotide
  Sense strand starting at position 3949 of SEQ ID NO: 1883310
cuaaaucacugggucaaau

SEQ ID NO: 2184555 - RNA, 19 nt, Artificial Sequence
  Description of Artificial Sequence: Synthetic oligonucleotide
  Antisense strand to SEQ ID NO: 2184554
auuugacccagugauuuag

SEQ ID NO: 2184556 - RNA, 19 nt, Artificial Sequence
  Description of Artificial Sequence: Synthetic oligonucleotide
  Sense strand starting at position 148 of SEQ ID NO: 1883311
gagccucauccagaguaga

SEQ ID NO: 2184557 - RNA, 19 nt, Artificial Sequence
  Description of Artificial Sequence: Synthetic oligonucleotide
  Antisense strand to SEQ ID NO: 2184556
ucuacucuggaugaggcuc

SEQ ID NO: 2184558 - RNA, 19 nt, Artificial Sequence
  Description of Artificial Sequence: Synthetic oligonucleotide
  Sense strand starting at position 536 of SEQ ID NO: 1883311
gucacaugucuugggagag

SEQ ID NO: 2184559 - RNA, 19 nt, Artificial Sequence
  Description of Artificial Sequence: Synthetic oligonucleotide
  Antisense strand to SEQ ID NO: 2184558
cucucccaagacaugugac

SEQ ID NO: 2184560 - RNA, 19 nt, Artificial Sequence
  Description of Artificial Sequence: Synthetic oligonucleotide
  Sense strand starting at position 677 of SEQ ID NO: 1883311
ggacucuaauggucacuga

SEQ ID NO: 2184561 - RNA, 19 nt, Artificial Sequence
  Description of Artificial Sequence: Synthetic oligonucleotide
  Antisense strand to SEQ ID NO: 2184560
ucagugaccauuagagucc

SEQ ID NO: 2184562 - RNA, 19 nt, Artificial Sequence
  Description of Artificial Sequence: Synthetic oligonucleotide
  Sense strand starting at position 680 of SEQ ID NO: 1883311
cucuaauggucacugaaac

SEQ ID NO: 2184563 - RNA, 19 nt, Artificial Sequence
  Description of Artificial Sequence: Synthetic oligonucleotide
  Antisense strand to SEQ ID NO: 2184562
guuucagugaccauuagag

SEQ ID NO: 2184564 - RNA, 19 nt, Artificial Sequence
  Description of Artificial Sequence: Synthetic oligonucleotide
  Sense strand starting at position 731 of SEQ ID NO: 1883311
aagcuacugccauggagaa

SEQ ID NO: 2184565 - RNA, 19 nt, Artificial Sequence
  Description of Artificial Sequence: Synthetic oligonucleotide
  Antisense strand to SEQ ID NO: 2184564
uucuccauggcaguagcuu

SEQ ID NO: 2184566 - RNA, 19 nt, Artificial Sequence
  Description of Artificial Sequence: Synthetic oligonucleotide
  Sense strand starting at position 783 of SEQ ID NO: 1883311
cacauagaggcuugaugua

SEQ ID NO: 2184567 - RNA, 19 nt, Artificial Sequence
  Description of Artificial Sequence: Synthetic oligonucleotide
  Antisense strand to SEQ ID NO: 2184566
uacaucaagccucuaugug

SEQ ID NO: 2184568 - RNA, 19 nt, Artificial Sequence
  Description of Artificial Sequence: Synthetic oligonucleotide
  Sense strand starting at position 798 of SEQ ID NO: 1883311
uguacaauauguccaauga

SEQ ID NO: 2184569 - RNA, 19 nt, Artificial Sequence
  Description of Artificial Sequence: Synthetic oligonucleotide
  Antisense strand to SEQ ID NO: 2184568
ucauuggacauauuguaca

SEQ ID NO: 2184570 - RNA, 19 nt, Artificial Sequence
  Description of Artificial Sequence: Synthetic oligonucleotide
  Sense strand starting at position 947 of SEQ ID NO: 1883311
gucgacuuuccugaaauca

SEQ ID NO: 2184571 - RNA, 19 nt, Artificial Sequence
  Description of Artificial Sequence: Synthetic oligonucleotide
  Antisense strand to SEQ ID NO: 2184570
ugauuucaggaaagucgac

SEQ ID NO: 2184572 - RNA, 19 nt, Artificial Sequence
  Description of Artificial Sequence: Synthetic oligonucleotide
  Sense strand starting at position 959 of SEQ ID NO: 1883311
gaaaucaugcuguauugag

SEQ ID NO: 2184573 - RNA, 19 nt, Artificial Sequence
  Description of Artificial Sequence: Synthetic oligonucleotide
  Antisense strand to SEQ ID NO: 2184572
cucaauacagcaugauuuc

SEQ ID NO: 2184574 - RNA, 19 nt, Artificial Sequence
  Description of Artificial Sequence: Synthetic oligonucleotide
  Sense strand starting at position 1008 of SEQ ID NO: 1883311
gucagaaucucaucaauga

SEQ ID NO: 2184575 - RNA, 19 nt, Artificial Sequence
  Description of Artificial Sequence: Synthetic oligonucleotide
  Antisense strand to SEQ ID NO: 2184574
ucauugaugagauucugac

SEQ ID NO: 2184576 - RNA, 19 nt, Artificial Sequence
  Description of Artificial Sequence: Synthetic oligonucleotide
  Sense strand starting at position 1156 of SEQ ID NO: 1883311
gugacuguacuacaugauu

SEQ ID NO: 2184577 - RNA, 19 nt, Artificial Sequence
  Description of Artificial Sequence: Synthetic oligonucleotide
  Antisense strand to SEQ ID NO: 2184576
aaucauguaguacagucac

SEQ ID NO: 2184578 - RNA, 19 nt, Artificial Sequence
  Description of Artificial Sequence: Synthetic oligonucleotide
  Sense strand starting at position 1344 of SEQ ID NO: 1883311
cucacagagcucuaguuaa

SEQ ID NO: 2184579 - RNA, 19 nt, Artificial Sequence
  Description of Artificial Sequence: Synthetic oligonucleotide
  Antisense strand to SEQ ID NO: 2184578
uuaacuagagcucugugag

SEQ ID NO: 2184580 - RNA, 19 nt, Artificial Sequence
  Description of Artificial Sequence: Synthetic oligonucleotide
  Sense strand starting at position 1389 of SEQ ID NO: 1883311
cuuuaaugucuuuagacag

SEQ ID NO: 2184581 - RNA, 19 nt, Artificial Sequence
  Description of Artificial Sequence: Synthetic oligonucleotide
  Antisense strand to SEQ ID NO: 2184580
cugucuaaagacauuaaag

SEQ ID NO: 2184582 - RNA, 19 nt, Artificial Sequence
  Description of Artificial Sequence: Synthetic oligonucleotide
  Sense strand starting at position 1527 of SEQ ID NO: 1883311
guucuuaugcaggacauau

SEQ ID NO: 2184583 - RNA, 19 nt, Artificial Sequence
  Description of Artificial Sequence: Synthetic oligonucleotide
  Antisense strand to SEQ ID NO: 2184582
auauguccugcauaagaac

SEQ ID NO: 2184584 - RNA, 19 nt, Artificial Sequence
  Description of Artificial Sequence: Synthetic oligonucleotide
  Sense strand starting at position 1835 of SEQ ID NO: 1883311
uugauuaugucacuugaua

SEQ ID NO: 2184585 - RNA, 19 nt, Artificial Sequence
  Description of Artificial Sequence: Synthetic oligonucleotide
  Antisense strand to SEQ ID NO: 2184584
uaucaagugacauaaucaa

SEQ ID NO: 2184586 - RNA, 19 nt, Artificial Sequence
  Description of Artificial Sequence: Synthetic oligonucleotide
  Sense strand starting at position 1891 of SEQ ID NO: 1883311
uuuauacugccugggaaua

SEQ ID NO: 2184587 - RNA, 19 nt, Artificial Sequence
  Description of Artificial Sequence: Synthetic oligonucleotide
  Antisense strand to SEQ ID NO: 2184586
uauucccaggcaguauaaa

SEQ ID NO: 2184588 - RNA, 19 nt, Artificial Sequence
  Description of Artificial Sequence: Synthetic oligonucleotide
  Sense strand starting at position 2157 of SEQ ID NO: 1883311
cagcauggucagggauuga

SEQ ID NO: 2184589 - RNA, 19 nt, Artificial Sequence
  Description of Artificial Sequence: Synthetic oligonucleotide
  Antisense strand to SEQ ID NO: 2184588
ucaaucccugaccaugcug

SEQ ID NO: 2184590 - RNA, 19 nt, Artificial Sequence
  Description of Artificial Sequence: Synthetic oligonucleotide
  Sense strand starting at position 2233 of SEQ ID NO: 1883311
agagaugcauccguagaga

SEQ ID NO: 2184591 - RNA, 19 nt, Artificial Sequence
  Description of Artificial Sequence: Synthetic oligonucleotide
  Antisense strand to SEQ ID NO: 2184590
ucucuacggaugcaucucu

SEQ ID NO: 2184592 - RNA, 19 nt, Artificial Sequence
  Description of Artificial Sequence: Synthetic oligonucleotide
  Sense strand starting at position 2236 of SEQ ID NO: 1883311
gaugcauccguagagacau

SEQ ID NO: 2184593 - RNA, 19 nt, Artificial Sequence
  Description of Artificial Sequence: Synthetic oligonucleotide
  Antisense strand to SEQ ID NO: 2184592
augucucuacggaugcauc

SEQ ID NO: 2184594 - RNA, 19 nt, Artificial Sequence
  Description of Artificial Sequence: Synthetic oligonucleotide
  Sense strand starting at position 2350 of SEQ ID NO: 1883311
gaaaccauuucggagaauu

SEQ ID NO: 2184595 - RNA, 19 nt, Artificial Sequence
  Description of Artificial Sequence: Synthetic oligonucleotide
  Antisense strand to SEQ ID NO: 2184594
aauucuccgaaaugguuuc

SEQ ID NO: 2184596 - RNA, 19 nt, Artificial Sequence
  Description of Artificial Sequence: Synthetic oligonucleotide
  Sense strand starting at position 2407 of SEQ ID NO: 1883311
caguucuuucuggagcuaa

SEQ ID NO: 2184597 - RNA, 19 nt, Artificial Sequence
  Description of Artificial Sequence: Synthetic oligonucleotide
  Antisense strand to SEQ ID NO: 2184596
uuagcuccagaaagaacug

SEQ ID NO: 2184598 - RNA, 19 nt, Artificial Sequence
  Description of Artificial Sequence: Synthetic oligonucleotide
  Sense strand starting at position 2418 of SEQ ID NO: 1883311
ggagcuaacucagugaaca

SEQ ID NO: 2184599 - RNA, 19 nt, Artificial Sequence
  Description of Artificial Sequence: Synthetic oligonucleotide
  Antisense strand to SEQ ID NO: 2184598
uguucacugaguuagcucc

SEQ ID NO: 2184600 - RNA, 19 nt, Artificial Sequence
  Description of Artificial Sequence: Synthetic oligonucleotide
  Sense strand starting at position 2419 of SEQ ID NO: 1883311
gagcuaacucagugaacac

SEQ ID NO: 2184601 - RNA, 19 nt, Artificial Sequence
  Description of Artificial Sequence: Synthetic oligonucleotide
  Antisense strand to SEQ ID NO: 2184600
guguucacugaguuagcuc

SEQ ID NO: 2184602 - RNA, 19 nt, Artificial Sequence
  Description of Artificial Sequence: Synthetic oligonucleotide
  Sense strand starting at position 2772 of SEQ ID NO: 1883311
aucacugcuccuuaaagag

SEQ ID NO: 2184603 - RNA, 19 nt, Artificial Sequence
  Description of Artificial Sequence: Synthetic oligonucleotide
  Antisense strand to SEQ ID NO: 2184602
cucuuuaaggagcagugau

SEQ ID NO: 2184604 - RNA, 19 nt, Artificial Sequence
  Description of Artificial Sequence: Synthetic oligonucleotide
  Sense strand starting at position 2878 of SEQ ID NO: 1883311
ucccuaaaguuucugagga

SEQ ID NO: 2184605 - RNA, 19 nt, Artificial Sequence
  Description of Artificial Sequence: Synthetic oligonucleotide
  Antisense strand to SEQ ID NO: 2184604
uccucagaaacuuuaggga

SEQ ID NO: 2184606 - RNA, 19 nt, Artificial Sequence
  Description of Artificial Sequence: Synthetic oligonucleotide
  Sense strand starting at position 2950 of SEQ ID NO: 1883311
ugucaacaaguaugaaaug

SEQ ID NO: 2184607 - RNA, 19 nt, Artificial Sequence
  Description of Artificial Sequence: Synthetic oligonucleotide
  Antisense strand to SEQ ID NO: 2184606
cauuucauacuuguugaca

SEQ ID NO: 2184608 - RNA, 19 nt, Artificial Sequence
  Description of Artificial Sequence: Synthetic oligonucleotide
  Sense strand starting at position 3000 of SEQ ID NO: 1883311
uuuguuaaggaucagaugu

SEQ ID NO: 2184609 - RNA, 19 nt, Artificial Sequence
  Description of Artificial Sequence: Synthetic oligonucleotide
  Antisense strand to SEQ ID NO: 2184608
acaucugauccuuaacaaa

SEQ ID NO: 2184610 - RNA, 19 nt, Artificial Sequence
  Description of Artificial Sequence: Synthetic oligonucleotide
  Sense strand starting at position 3008 of SEQ ID NO: 1883311
ggaucagauguaggacagu

SEQ ID NO: 2184611 - RNA, 19 nt, Artificial Sequence
  Description of Artificial Sequence: Synthetic oligonucleotide
  Antisense strand to SEQ ID NO: 2184610
acuguccuacaucugaucc

SEQ ID NO: 2184612 - RNA, 19 nt, Artificial Sequence
  Description of Artificial Sequence: Synthetic oligonucleotide
  Sense strand starting at position 3250 of SEQ ID NO: 1883311
ccagaaaugucuguuaaca

SEQ ID NO: 2184613 - RNA, 19 nt, Artificial Sequence
  Description of Artificial Sequence: Synthetic oligonucleotide
  Antisense strand to SEQ ID NO: 2184612
uguuaacagacauuucugg

SEQ ID NO: 2184614 - RNA, 19 nt, Artificial Sequence
  Description of Artificial Sequence: Synthetic oligonucleotide
  Sense strand starting at position 3295 of SEQ ID NO: 1883311
cucccauguguagauaaau

SEQ ID NO: 2184615 - RNA, 19 nt, Artificial Sequence
  Description of Artificial Sequence: Synthetic oligonucleotide
  Antisense strand to SEQ ID NO: 2184614
auuuaucuacacaugggag

SEQ ID NO: 2184616 - RNA, 19 nt, Artificial Sequence
  Description of Artificial Sequence: Synthetic oligonucleotide
  Sense strand starting at position 3443 of SEQ ID NO: 1883311
caugguuuguauuuagguu

SEQ ID NO: 2184617 - RNA, 19 nt, Artificial Sequence
  Description of Artificial Sequence: Synthetic oligonucleotide
  Antisense strand to SEQ ID NO: 2184616
aaccuaaauacaaaccaug

SEQ ID NO: 2184618 - RNA, 19 nt, Artificial Sequence
  Description of Artificial Sequence: Synthetic oligonucleotide
  Sense strand starting at position 3665 of SEQ ID NO: 1883311
gcucaaucuagagacgaua

SEQ ID NO: 2184619 - RNA, 19 nt, Artificial Sequence
  Description of Artificial Sequence: Synthetic oligonucleotide
  Antisense strand to SEQ ID NO: 2184618
uaucgucucuagauugagc

SEQ ID NO: 2184620 - RNA, 19 nt, Artificial Sequence
  Description of Artificial Sequence: Synthetic oligonucleotide
  Sense strand starting at position 3731 of SEQ ID NO: 1883311
cagucaugcguugcaguua

SEQ ID NO: 2184621 - RNA, 19 nt, Artificial Sequence
  Description of Artificial Sequence: Synthetic oligonucleotide
  Antisense strand to SEQ ID NO: 2184620
uaacugcaacgcaugacug

SEQ ID NO: 2184622 - RNA, 19 nt, Artificial Sequence
  Description of Artificial Sequence: Synthetic oligonucleotide
  Sense strand starting at position 3832 of SEQ ID NO: 1883311
aucaguuguuaacuagaau

SEQ ID NO: 2184623 - RNA, 19 nt, Artificial Sequence
  Description of Artificial Sequence: Synthetic oligonucleotide
  Antisense strand to SEQ ID NO: 2184622
auucuaguuaacaacugau

SEQ ID NO: 2184624 - RNA, 19 nt, Artificial Sequence
  Description of Artificial Sequence: Synthetic oligonucleotide
  Sense strand starting at position 3835 of SEQ ID NO: 1883311
aguuguuaacuagaauguc

SEQ ID NO: 2184625 - RNA, 19 nt, Artificial Sequence
  Description of Artificial Sequence: Synthetic oligonucleotide
  Antisense strand to SEQ ID NO: 2184624
gacauucuaguuaacaacu

SEQ ID NO: 2184626 - RNA, 19 nt, Artificial Sequence
  Description of Artificial Sequence: Synthetic oligonucleotide
  Sense strand starting at position 3857 of SEQ ID NO: 1883311
ccauuuguguuugccugau

SEQ ID NO: 2184627 - RNA, 19 nt, Artificial Sequence
  Description of Artificial Sequence: Synthetic oligonucleotide
  Antisense strand to SEQ ID NO: 2184626
aucaggcaaacacaaaugg

SEQ ID NO: 2184628 - RNA, 19 nt, Artificial Sequence
  Description of Artificial Sequence: Synthetic oligonucleotide
  Sense strand starting at position 3859 of SEQ ID NO: 1883311
auuuguguuugccugauau

SEQ ID NO: 2184629 - RNA, 19 nt, Artificial Sequence
  Description of Artificial Sequence: Synthetic oligonucleotide
  Antisense strand to SEQ ID NO: 2184628
auaucaggcaaacacaaau

SEQ ID NO: 2184630 - RNA, 19 nt, Artificial Sequence
  Description of Artificial Sequence: Synthetic oligonucleotide
  Sense strand starting at position 3869 of SEQ ID NO: 1883311
gccugauauuuccuccuug

SEQ ID NO: 2184631 - RNA, 19 nt, Artificial Sequence
  Description of Artificial Sequence: Synthetic oligonucleotide
  Antisense strand to SEQ ID NO: 2184630
caaggaggaaauaucaggc

SEQ ID NO: 2184632 - RNA, 19 nt, Artificial Sequence
  Description of Artificial Sequence: Synthetic oligonucleotide
  Sense strand starting at position 3903 of SEQ ID NO: 1883311
aguucugucaaggauagca

SEQ ID NO: 2184633 - RNA, 19 nt, Artificial Sequence
  Description of Artificial Sequence: Synthetic oligonucleotide
  Antisense strand to SEQ ID NO: 2184632
ugcuauccuugacagaacu

SEQ ID NO: 2184634 - RNA, 19 nt, Artificial Sequence
  Description of Artificial Sequence: Synthetic oligonucleotide
  Sense strand starting at position 3962 of SEQ ID NO: 1883311
guacacugagccuagaaua

SEQ ID NO: 2184635 - RNA, 19 nt, Artificial Sequence
  Description of Artificial Sequence: Synthetic oligonucleotide
  Antisense strand to SEQ ID NO: 2184634
uauucuaggcucaguguac

SEQ ID NO: 2184636 - RNA, 19 nt, Artificial Sequence
  Description of Artificial Sequence: Synthetic oligonucleotide
  Sense strand starting at position 203 of SEQ ID NO: 1883312
ugcugucauacaugaggaa

SEQ ID NO: 2184637 - RNA, 19 nt, Artificial Sequence
  Description of Artificial Sequence: Synthetic oligonucleotide
  Antisense strand to SEQ ID NO: 2184636
uuccucauguaugacagca

SEQ ID NO: 2184638 - RNA, 19 nt, Artificial Sequence
  Description of Artificial Sequence: Synthetic oligonucleotide
  Sense strand starting at position 242 of SEQ ID NO: 1883312
ggaagaugacuuuguggca

SEQ ID NO: 2184639 - RNA, 19 nt, Artificial Sequence
  Description of Artificial Sequence: Synthetic oligonucleotide
  Antisense strand to SEQ ID NO: 2184638
ugccacaaagucaucuucc

SEQ ID NO: 2184640 - RNA, 19 nt, Artificial Sequence
  Description of Artificial Sequence: Synthetic oligonucleotide
  Sense strand starting at position 304 of SEQ ID NO: 1883312
acagguggaguuugaauaa

SEQ ID NO: 2184641 - RNA, 19 nt, Artificial Sequence
  Description of Artificial Sequence: Synthetic oligonucleotide
  Antisense strand to SEQ ID NO: 2184640
uuauucaaacuccaccugu

SEQ ID NO: 2184642 - RNA, 19 nt, Artificial Sequence
  Description of Artificial Sequence: Synthetic oligonucleotide
  Sense strand starting at position 435 of SEQ ID NO: 1883312
gaacuaucagcccagguua

SEQ ID NO: 2184643 - RNA, 19 nt, Artificial Sequence
  Description of Artificial Sequence: Synthetic oligonucleotide
  Antisense strand to SEQ ID NO: 2184642
uaaccugggcugauaguuc

SEQ ID NO: 2184644 - RNA, 19 nt, Artificial Sequence
  Description of Artificial Sequence: Synthetic oligonucleotide
  Sense strand starting at position 437 of SEQ ID NO: 1883312
acuaucagcccagguuaau

SEQ ID NO: 2184645 - RNA, 19 nt, Artificial Sequence
  Description of Artificial Sequence: Synthetic oligonucleotide
  Antisense strand to SEQ ID NO: 2184644
auuaaccugggcugauagu

SEQ ID NO: 2184646 - RNA, 19 nt, Artificial Sequence
  Description of Artificial Sequence: Synthetic oligonucleotide
  Sense strand starting at position 449 of SEQ ID NO: 1883312
gguuaaugucaaggauaca

SEQ ID NO: 2184647 - RNA, 19 nt, Artificial Sequence
  Description of Artificial Sequence: Synthetic oligonucleotide
  Antisense strand to SEQ ID NO: 2184646
uguauccuugacauuaacc

SEQ ID NO: 2184648 - RNA, 19 nt, Artificial Sequence
  Description of Artificial Sequence: Synthetic oligonucleotide
  Sense strand starting at position 647 of SEQ ID NO: 1883312
agaagugagaccuguuuac

SEQ ID NO: 2184649 - RNA, 19 nt, Artificial Sequence
  Description of Artificial Sequence: Synthetic oligonucleotide
  Antisense strand to SEQ ID NO: 2184648
guaaacaggucucacuucu

SEQ ID NO: 2184650 - RNA, 19 nt, Artificial Sequence
  Description of Artificial Sequence: Synthetic oligonucleotide
  Sense strand starting at position 651 of SEQ ID NO: 1883312
gugagaccuguuuaccaga

SEQ ID NO: 2184651 - RNA, 19 nt, Artificial Sequence
  Description of Artificial Sequence: Synthetic oligonucleotide
  Antisense strand to SEQ ID NO: 2184650
ucugguaaacaggucucac

SEQ ID NO: 2184652 - RNA, 19 nt, Artificial Sequence
  Description of Artificial Sequence: Synthetic oligonucleotide
  Sense strand starting at position 843 of SEQ ID NO: 1883312
ggacuuggccacuggaaga

SEQ ID NO: 2184653 - RNA, 19 nt, Artificial Sequence
  Description of Artificial Sequence: Synthetic oligonucleotide
  Antisense strand to SEQ ID NO: 2184652
ucuuccaguggccaagucc

SEQ ID NO: 2184654 - RNA, 19 nt, Artificial Sequence
  Description of Artificial Sequence: Synthetic oligonucleotide
  Sense strand starting at position 980 of SEQ ID NO: 1883312
uggaauggguccagggaga

SEQ ID NO: 2184655 - RNA, 19 nt, Artificial Sequence
  Description of Artificial Sequence: Synthetic oligonucleotide
  Antisense strand to SEQ ID NO: 2184654
ucucccuggacccauucca

SEQ ID NO: 2184656 - RNA, 19 nt, Artificial Sequence
  Description of Artificial Sequence: Synthetic oligonucleotide
  Sense strand starting at position 1020 of SEQ ID NO: 1883312
ucuucuuaugauugcaaga

SEQ ID NO: 2184657 - RNA, 19 nt, Artificial Sequence
  Description of Artificial Sequence: Synthetic oligonucleotide
  Antisense strand to SEQ ID NO: 2184656
ucuugcaaucauaagaaga

SEQ ID NO: 2184658 - RNA, 19 nt, Artificial Sequence
  Description of Artificial Sequence: Synthetic oligonucleotide
  Sense strand starting at position 1025 of SEQ ID NO: 1883312
uuaugauugcaagauuagu

SEQ ID NO: 2184659 - RNA, 19 nt, Artificial Sequence
  Description of Artificial Sequence: Synthetic oligonucleotide
  Antisense strand to SEQ ID NO: 2184658
acuaaucuugcaaucauaa

SEQ ID NO: 2184660 - RNA, 19 nt, Artificial Sequence
  Description of Artificial Sequence: Synthetic oligonucleotide
  Sense strand starting at position 1132 of SEQ ID NO: 1883312
uccaaaucacgugaucauc

SEQ ID NO: 2184661 - RNA, 19 nt, Artificial Sequence
  Description of Artificial Sequence: Synthetic oligonucleotide
  Antisense strand to SEQ ID NO: 2184660
gaugaucacgugauuugga

SEQ ID NO: 2184662 - RNA, 19 nt, Artificial Sequence
  Description of Artificial Sequence: Synthetic oligonucleotide
  Sense strand starting at position 1287 of SEQ ID NO: 1883312
agcguuacuauagaugaga

SEQ ID NO: 2184663 - RNA, 19 nt, Artificial Sequence
  Description of Artificial Sequence: Synthetic oligonucleotide
  Antisense strand to SEQ ID NO: 2184662
ucucaucuauaguaacgcu

SEQ ID NO: 2184664 - RNA, 19 nt, Artificial Sequence
  Description of Artificial Sequence: Synthetic oligonucleotide
  Sense strand starting at position 1289 of SEQ ID NO: 1883312
cguuacuauagaugagaag

SEQ ID NO: 2184665 - RNA, 19 nt, Artificial Sequence
  Description of Artificial Sequence: Synthetic oligonucleotide
  Antisense strand to SEQ ID NO: 2184664
cuucucaucuauaguaacg

SEQ ID NO: 2184666 - RNA, 19 nt, Artificial Sequence
  Description of Artificial Sequence: Synthetic oligonucleotide
  Sense strand starting at position 1390 of SEQ ID NO: 1883312
cgguguaaaccuuaccuga

SEQ ID NO: 2184667 - RNA, 19 nt, Artificial Sequence
  Description of Artificial Sequence: Synthetic oligonucleotide
  Antisense strand to SEQ ID NO: 2184666
ucagguaagguuuacaccg

SEQ ID NO: 2184668 - RNA, 19 nt, Artificial Sequence
  Description of Artificial Sequence: Synthetic oligonucleotide
  Sense strand starting at position 1392 of SEQ ID NO: 1883312
guguaaaccuuaccugaau

SEQ ID NO: 2184669 - RNA, 19 nt, Artificial Sequence
  Description of Artificial Sequence: Synthetic oligonucleotide
  Antisense strand to SEQ ID NO: 2184668
auucagguaagguuuacac

SEQ ID NO: 2184670 - RNA, 19 nt, Artificial Sequence
  Description of Artificial Sequence: Synthetic oligonucleotide
  Sense strand starting at position 1561 of SEQ ID NO: 1883312
ucagccuucugggcacaaa

SEQ ID NO: 2184671 - RNA, 19 nt, Artificial Sequence
  Description of Artificial Sequence: Synthetic oligonucleotide
  Antisense strand to SEQ ID NO: 2184670
uuugugcccagaaggcuga

SEQ ID NO: 2184672 - RNA, 19 nt, Artificial Sequence
  Description of Artificial Sequence: Synthetic oligonucleotide
  Sense strand starting at position 1873 of SEQ ID NO: 1883312
cgcaaacaucucgaaauga

SEQ ID NO: 2184673 - RNA, 19 nt, Artificial Sequence
  Description of Artificial Sequence: Synthetic oligonucleotide
  Antisense strand to SEQ ID NO: 2184672
ucauuucgagauguuugcg

SEQ ID NO: 2184674 - RNA, 19 nt, Artificial Sequence
  Description of Artificial Sequence: Synthetic oligonucleotide
  Sense strand starting at position 2150 of SEQ ID NO: 1883312
cacagaguccaguggagaa

SEQ ID NO: 2184675 - RNA, 19 nt, Artificial Sequence
  Description of Artificial Sequence: Synthetic oligonucleotide
  Antisense strand to SEQ ID NO: 2184674
uucuccacuggacucugug

SEQ ID NO: 2184676 - RNA, 19 nt, Artificial Sequence
  Description of Artificial Sequence: Synthetic oligonucleotide
  Sense strand starting at position 2208 of SEQ ID NO: 1883312
gaaagaagugccugaauaa

SEQ ID NO: 2184677 - RNA, 19 nt, Artificial Sequence
  Description of Artificial Sequence: Synthetic oligonucleotide
  Antisense strand to SEQ ID NO: 2184676
uuauucaggcacuucuuuc

SEQ ID NO: 2184678 - RNA, 19 nt, Artificial Sequence
  Description of Artificial Sequence: Synthetic oligonucleotide
  Sense strand starting at position 2576 of SEQ ID NO: 1883312
ggaggaucggcucauacau

SEQ ID NO: 2184679 - RNA, 19 nt, Artificial Sequence
  Description of Artificial Sequence: Synthetic oligonucleotide
  Antisense strand to SEQ ID NO: 2184678
auguaugagccgauccucc

SEQ ID NO: 2184680 - RNA, 19 nt, Artificial Sequence
  Description of Artificial Sequence: Synthetic oligonucleotide
  Sense strand starting at position 2611 of SEQ ID NO: 1883312
gucagaucugcccaacuua

SEQ ID NO: 2184681 - RNA, 19 nt, Artificial Sequence
  Description of Artificial Sequence: Synthetic oligonucleotide
  Antisense strand to SEQ ID NO: 2184680
uaaguugggcagaucugac

SEQ ID NO: 2184682 - RNA, 19 nt, Artificial Sequence
  Description of Artificial Sequence: Synthetic oligonucleotide
  Sense strand starting at position 2652 of SEQ ID NO: 1883312
uguaaucuugaagguccau

SEQ ID NO: 2184683 - RNA, 19 nt, Artificial Sequence
  Description of Artificial Sequence: Synthetic oligonucleotide
  Antisense strand to SEQ ID NO: 2184682
auggaccuucaagauuaca

SEQ ID NO: 2184684 - RNA, 19 nt, Artificial Sequence
  Description of Artificial Sequence: Synthetic oligonucleotide
  Sense strand starting at position 2716 of SEQ ID NO: 1883312
augagaaagccuugcagag

SEQ ID NO: 2184685 - RNA, 19 nt, Artificial Sequence
  Description of Artificial Sequence: Synthetic oligonucleotide
  Antisense strand to SEQ ID NO: 2184684
cucugcaaggcuuucucau

SEQ ID NO: 2184686 - RNA, 19 nt, Artificial Sequence
  Description of Artificial Sequence: Synthetic oligonucleotide
  Sense strand starting at position 2928 of SEQ ID NO: 1883312
uagcuuggccuuggagaua

SEQ ID NO: 2184687 - RNA, 19 nt, Artificial Sequence
  Description of Artificial Sequence: Synthetic oligonucleotide
  Antisense strand to SEQ ID NO: 2184686
uaucuccaaggccaagcua

SEQ ID NO: 2184688 - RNA, 19 nt, Artificial Sequence
  Description of Artificial Sequence: Synthetic oligonucleotide
  Sense strand starting at position 2939 of SEQ ID NO: 1883312
uggagauaccaaugcaaau

SEQ ID NO: 2184689 - RNA, 19 nt, Artificial Sequence
  Description of Artificial Sequence: Synthetic oligonucleotide
  Antisense strand to SEQ ID NO: 2184688
auuugcauugguaucucca

SEQ ID NO: 2184690 - RNA, 19 nt, Artificial Sequence
  Description of Artificial Sequence: Synthetic oligonucleotide
  Sense strand starting at position 2987 of SEQ ID NO: 1883312
gucugucuucuagaacuga

SEQ ID NO: 2184691 - RNA, 19 nt, Artificial Sequence
  Description of Artificial Sequence: Synthetic oligonucleotide
  Antisense strand to SEQ ID NO: 2184690
ucaguucuagaagacagac

SEQ ID NO: 2184692 - RNA, 19 nt, Artificial Sequence
  Description of Artificial Sequence: Synthetic oligonucleotide
  Sense strand starting at position 3005 of SEQ ID NO: 1883312
acuuacaggucaguaaaga

SEQ ID NO: 2184693 - RNA, 19 nt, Artificial Sequence
  Description of Artificial Sequence: Synthetic oligonucleotide
  Antisense strand to SEQ ID NO: 2184692
ucuuuacugaccuguaagu

SEQ ID NO: 2184694 - RNA, 19 nt, Artificial Sequence
  Description of Artificial Sequence: Synthetic oligonucleotide
  Sense strand starting at position 3041 of SEQ ID NO: 1883312
guguuaaguguguuuguga

SEQ ID NO: 2184695 - RNA, 19 nt, Artificial Sequence
  Description of Artificial Sequence: Synthetic oligonucleotide
  Antisense strand to SEQ ID NO: 2184694
ucacaaacacacuuaacac

SEQ ID NO: 2184696 - RNA, 19 nt, Artificial Sequence
  Description of Artificial Sequence: Synthetic oligonucleotide
  Sense strand starting at position 3048 of SEQ ID NO: 1883312
guguguuugugaaugcaga

SEQ ID NO: 2184697 - RNA, 19 nt, Artificial Sequence
  Description of Artificial Sequence: Synthetic oligonucleotide
  Antisense strand to SEQ ID NO: 2184696
ucugcauucacaaacacac

SEQ ID NO: 2184698 - RNA, 19 nt, Artificial Sequence
  Description of Artificial Sequence: Synthetic oligonucleotide
  Sense strand starting at position 3165 of SEQ ID NO: 1883312
cauuguuaagguugacuuu

SEQ ID NO: 2184699 - RNA, 19 nt, Artificial Sequence
  Description of Artificial Sequence: Synthetic oligonucleotide
  Antisense strand to SEQ ID NO: 2184698
aaagucaaccuuaacaaug

SEQ ID NO: 2184700 - RNA, 19 nt, Artificial Sequence
  Description of Artificial Sequence: Synthetic oligonucleotide
  Sense strand starting at position 3396 of SEQ ID NO: 1883312
uuuaaacagcuguauuagu

SEQ ID NO: 2184701 - RNA, 19 nt, Artificial Sequence
  Description of Artificial Sequence: Synthetic oligonucleotide
  Antisense strand to SEQ ID NO: 2184700
acuaauacagcuguuuaaa

SEQ ID NO: 2184702 - RNA, 19 nt, Artificial Sequence
  Description of Artificial Sequence: Synthetic oligonucleotide
  Sense strand starting at position 3405 of SEQ ID NO: 1883312
cuguauuaguguuccauuu

SEQ ID NO: 2184703 - RNA, 19 nt, Artificial Sequence
  Description of Artificial Sequence: Synthetic oligonucleotide
  Antisense strand to SEQ ID NO: 2184702
aaauggaacacuaauacag

SEQ ID NO: 2184704 - RNA, 19 nt, Artificial Sequence
  Description of Artificial Sequence: Synthetic oligonucleotide
  Sense strand starting at position 3620 of SEQ ID NO: 1883312
aauagcguccuuuacaaga

SEQ ID NO: 2184705 - RNA, 19 nt, Artificial Sequence
  Description of Artificial Sequence: Synthetic oligonucleotide
  Antisense strand to SEQ ID NO: 2184704
ucuuguaaaggacgcuauu

SEQ ID NO: 2184706 - RNA, 19 nt, Artificial Sequence
  Description of Artificial Sequence: Synthetic oligonucleotide
  Sense strand starting at position 3625 of SEQ ID NO: 1883312
cguccuuuacaagauaaug

SEQ ID NO: 2184707 - RNA, 19 nt, Artificial Sequence
  Description of Artificial Sequence: Synthetic oligonucleotide
  Antisense strand to SEQ ID NO: 2184706
cauuaucuuguaaaggacg

SEQ ID NO: 2184708 - RNA, 19 nt, Artificial Sequence
  Description of Artificial Sequence: Synthetic oligonucleotide
  Sense strand starting at position 3695 of SEQ ID NO: 1883312
uuuaguucucuuuagugag

SEQ ID NO: 2184709 - RNA, 19 nt, Artificial Sequence
  Description of Artificial Sequence: Synthetic oligonucleotide
  Antisense strand to SEQ ID NO: 2184708
cucacuaaagagaacuaaa

SEQ ID NO: 2184710 - RNA, 19 nt, Artificial Sequence
  Description of Artificial Sequence: Synthetic oligonucleotide
  Sense strand starting at position 3762 of SEQ ID NO: 1883312
cauucugguggccaagaaa

SEQ ID NO: 2184711 - RNA, 19 nt, Artificial Sequence
  Description of Artificial Sequence: Synthetic oligonucleotide
  Antisense strand to SEQ ID NO: 2184710
uuucuuggccaccagaaug

SEQ ID NO: 2184712 - RNA, 19 nt, Artificial Sequence
  Description of Artificial Sequence: Synthetic oligonucleotide
  Sense strand starting at position 3905 of SEQ ID NO: 1883312
ucuucuggacucugagaga

SEQ ID NO: 2184713 - RNA, 19 nt, Artificial Sequence
  Description of Artificial Sequence: Synthetic oligonucleotide
  Antisense strand to SEQ ID NO: 2184712
ucucucagaguccagaaga

SEQ ID NO: 2184714 - RNA, 19 nt, Artificial Sequence
  Description of Artificial Sequence: Synthetic oligonucleotide
  Sense strand starting at position 3951 of SEQ ID NO: 1883312
gcaaaucuccacugaagcu

SEQ ID NO: 2184715 - RNA, 19 nt, Artificial Sequence
  Description of Artificial Sequence: Synthetic oligonucleotide
  Antisense strand to SEQ ID NO: 2184714
agcuucaguggagauuugc

SEQ ID NO: 2184716 - RNA, 19 nt, Artificial Sequence
  Description of Artificial Sequence: Synthetic oligonucleotide
  Sense strand starting at position 454 of SEQ ID NO: 1883313
ccaacaaggugagcaauua

SEQ ID NO: 2184717 - RNA, 19 nt, Artificial Sequence
  Description of Artificial Sequence: Synthetic oligonucleotide
  Antisense strand to SEQ ID NO: 2184716
uaauugcucaccuuguugg

SEQ ID NO: 2184718 - RNA, 19 nt, Artificial Sequence
  Description of Artificial Sequence: Synthetic oligonucleotide
  Sense strand starting at position 476 of SEQ ID NO: 1883313
uccagagaguguccagauu

SEQ ID NO: 2184719 - RNA, 19 nt, Artificial Sequence
  Description of Artificial Sequence: Synthetic oligonucleotide
  Antisense strand to SEQ ID NO: 2184718
aaucuggacacucucugga

SEQ ID NO: 2184720 - RNA, 19 nt, Artificial Sequence
  Description of Artificial Sequence: Synthetic oligonucleotide
  Sense strand starting at position 921 of SEQ ID NO: 1883313
cccauauguuacuuauuag

SEQ ID NO: 2184721 - RNA, 19 nt, Artificial Sequence
  Description of Artificial Sequence: Synthetic oligonucleotide
  Antisense strand to SEQ ID NO: 2184720
cuaauaaguaacauauggg

SEQ ID NO: 2184722 - RNA, 19 nt, Artificial Sequence
  Description of Artificial Sequence: Synthetic oligonucleotide
  Sense strand starting at position 977 of SEQ ID NO: 1883313
agaucauaucgucaggagu

SEQ ID NO: 2184723 - RNA, 19 nt, Artificial Sequence
  Description of Artificial Sequence: Synthetic oligonucleotide
  Antisense strand to SEQ ID NO: 2184722
acuccugacgauaugaucu

SEQ ID NO: 2184724 - RNA, 19 nt, Artificial Sequence
  Description of Artificial Sequence: Synthetic oligonucleotide
  Sense strand starting at position 980 of SEQ ID NO: 1883313
ucauaucgucaggaguacu

SEQ ID NO: 2184725 - RNA, 19 nt, Artificial Sequence
  Description of Artificial Sequence: Synthetic oligonucleotide
  Antisense strand to SEQ ID NO: 2184724
aguacuccugacgauauga

SEQ ID NO: 2184726 - RNA, 19 nt, Artificial Sequence
  Description of Artificial Sequence: Synthetic oligonucleotide
  Sense strand starting at position 1127 of SEQ ID NO: 1883313
gggagcugauuacaaauuu

SEQ ID NO: 2184727 - RNA, 19 nt, Artificial Sequence
  Description of Artificial Sequence: Synthetic oligonucleotide
  Antisense strand to SEQ ID NO: 2184726
aaauuuguaaucagcuccc

SEQ ID NO: 2184728 - RNA, 19 nt, Artificial Sequence
  Description of Artificial Sequence: Synthetic oligonucleotide
  Sense strand starting at position 1273 of SEQ ID NO: 1883313
gugaaauuauuacuaguuc

SEQ ID NO: 2184729 - RNA, 19 nt, Artificial Sequence
  Description of Artificial Sequence: Synthetic oligonucleotide
  Antisense strand to SEQ ID NO: 2184728
gaacuaguaauaauuucac

SEQ ID NO: 2184730 - RNA, 19 nt, Artificial Sequence
  Description of Artificial Sequence: Synthetic oligonucleotide
  Sense strand starting at position 1319 of SEQ ID NO: 1883313
uuuggaugauaaguucuau

SEQ ID NO: 2184731 - RNA, 19 nt, Artificial Sequence
  Description of Artificial Sequence: Synthetic oligonucleotide
  Antisense strand to SEQ ID NO: 2184730
auagaacuuaucauccaaa

SEQ ID NO: 2184732 - RNA, 19 nt, Artificial Sequence
  Description of Artificial Sequence: Synthetic oligonucleotide
  Sense strand starting at position 1390 of SEQ ID NO: 1883313
gggaaauggcugcaacuuu

SEQ ID NO: 2184733 - RNA, 19 nt, Artificial Sequence
  Description of Artificial Sequence: Synthetic oligonucleotide
  Antisense strand to SEQ ID NO: 2184732
aaaguugcagccauuuccc

SEQ ID NO: 2184734 - RNA, 19 nt, Artificial Sequence
  Description of Artificial Sequence: Synthetic oligonucleotide
  Sense strand starting at position 1444 of SEQ ID NO: 1883313
agccauaccuacuugagaa

SEQ ID NO: 2184735 - RNA, 19 nt, Artificial Sequence
  Description of Artificial Sequence: Synthetic oligonucleotide
  Antisense strand to SEQ ID NO: 2184734
uucucaaguagguauggcu

SEQ ID NO: 2184736 - RNA, 19 nt, Artificial Sequence
  Description of Artificial Sequence: Synthetic oligonucleotide
  Sense strand starting at position 1477 of SEQ ID NO: 1883313
augagaugauguuugccaa

SEQ ID NO: 2184737 - RNA, 19 nt, Artificial Sequence
  Description of Artificial Sequence: Synthetic oligonucleotide
  Antisense strand to SEQ ID NO: 2184736
uuggcaaacaucaucucau

SEQ ID NO: 2184738 - RNA, 19 nt, Artificial Sequence
  Description of Artificial Sequence: Synthetic oligonucleotide
  Sense strand starting at position 1663 of SEQ ID NO: 1883313
cugggucagcaagacauua

SEQ ID NO: 2184739 - RNA, 19 nt, Artificial Sequence
  Description of Artificial Sequence: Synthetic oligonucleotide
  Antisense strand to SEQ ID NO: 2184738
uaaugucuugcugacccag

SEQ ID NO: 2184740 - RNA, 19 nt, Artificial Sequence
  Description of Artificial Sequence: Synthetic oligonucleotide
  Sense strand starting at position 1671 of SEQ ID NO: 1883313
gcaagacauuacuugggua

SEQ ID NO: 2184741 - RNA, 19 nt, Artificial Sequence
  Description of Artificial Sequence: Synthetic oligonucleotide
  Antisense strand to SEQ ID NO: 2184740
uacccaaguaaugucuugc

SEQ ID NO: 2184742 - RNA, 19 nt, Artificial Sequence
  Description of Artificial Sequence: Synthetic oligonucleotide
  Sense strand starting at position 1673 of SEQ ID NO: 1883313
aagacauuacuuggguagu

SEQ ID NO: 2184743 - RNA, 19 nt, Artificial Sequence
  Description of Artificial Sequence: Synthetic oligonucleotide
  Antisense strand to SEQ ID NO: 2184742
acuacccaaguaaugucuu

SEQ ID NO: 2184744 - RNA, 19 nt, Artificial Sequence
  Description of Artificial Sequence: Synthetic oligonucleotide
  Sense strand starting at position 1675 of SEQ ID NO: 1883313
gacauuacuuggguaguca

SEQ ID NO: 2184745 - RNA, 19 nt, Artificial Sequence
  Description of Artificial Sequence: Synthetic oligonucleotide
  Antisense strand to SEQ ID NO: 2184744
ugacuacccaaguaauguc

SEQ ID NO: 2184746 - RNA, 19 nt, Artificial Sequence
  Description of Artificial Sequence: Synthetic oligonucleotide
  Sense strand starting at position 1748 of SEQ ID NO: 1883313
agcucaauggccuagaaag

SEQ ID NO: 2184747 - RNA, 19 nt, Artificial Sequence
  Description of Artificial Sequence: Synthetic oligonucleotide
  Antisense strand to SEQ ID NO: 2184746
cuuucuaggccauugagcu

SEQ ID NO: 2184748 - RNA, 19 nt, Artificial Sequence
  Description of Artificial Sequence: Synthetic oligonucleotide
  Sense strand starting at position 1799 of SEQ ID NO: 1883313
uuucuauagcauuagguca

SEQ ID NO: 2184749 - RNA, 19 nt, Artificial Sequence
  Description of Artificial Sequence: Synthetic oligonucleotide
  Antisense strand to SEQ ID NO: 2184748
ugaccuaaugcuauagaaa

SEQ ID NO: 2184750 - RNA, 19 nt, Artificial Sequence
  Description of Artificial Sequence: Synthetic oligonucleotide
  Sense strand starting at position 2341 of SEQ ID NO: 1883313
uuuggaugacauugcauga

SEQ ID NO: 2184751 - RNA, 19 nt, Artificial Sequence
  Description of Artificial Sequence: Synthetic oligonucleotide
  Antisense strand to SEQ ID NO: 2184750
ucaugcaaugucauccaaa

SEQ ID NO: 2184752 - RNA, 19 nt, Artificial Sequence
  Description of Artificial Sequence: Synthetic oligonucleotide
  Sense strand starting at position 2346 of SEQ ID NO: 1883313
augacauugcaugaagcuu

SEQ ID NO: 2184753 - RNA, 19 nt, Artificial Sequence
  Description of Artificial Sequence: Synthetic oligonucleotide
  Antisense strand to SEQ ID NO: 2184752
aagcuucaugcaaugucau

SEQ ID NO: 2184754 - RNA, 19 nt, Artificial Sequence
  Description of Artificial Sequence: Synthetic oligonucleotide
  Sense strand starting at position 2368 of SEQ ID NO: 1883313
augugaauggauuguuuaa

SEQ ID NO: 2184755 - RNA, 19 nt, Artificial Sequence
  Description of Artificial Sequence: Synthetic oligonucleotide
  Antisense strand to SEQ ID NO: 2184754
uuaaacaauccauucacau

SEQ ID NO: 2184756 - RNA, 19 nt, Artificial Sequence
  Description of Artificial Sequence: Synthetic oligonucleotide
  Sense strand starting at position 2387 of SEQ ID NO: 1883313
aagucuaagguaugucaaa

SEQ ID NO: 2184757 - RNA, 19 nt, Artificial Sequence
  Description of Artificial Sequence: Synthetic oligonucleotide
  Antisense strand to SEQ ID NO: 2184756
uuugacauaccuuagacuu

SEQ ID NO: 2184758 - RNA, 19 nt, Artificial Sequence
  Description of Artificial Sequence: Synthetic oligonucleotide
  Sense strand starting at position 2482 of SEQ ID NO: 1883313
agugcuguucuagaaagac

SEQ ID NO: 2184759 - RNA, 19 nt, Artificial Sequence
  Description of Artificial Sequence: Synthetic oligonucleotide
  Antisense strand to SEQ ID NO: 2184758
gucuuucuagaacagcacu

SEQ ID NO: 2184760 - RNA, 19 nt, Artificial Sequence
  Description of Artificial Sequence: Synthetic oligonucleotide
  Sense strand starting at position 2541 of SEQ ID NO: 1883313
ccauaaguucucuaguaug

SEQ ID NO: 2184761 - RNA, 19 nt, Artificial Sequence
  Description of Artificial Sequence: Synthetic oligonucleotide
  Antisense strand to SEQ ID NO: 2184760
cauacuagagaacuuaugg

SEQ ID NO: 2184762 - RNA, 19 nt, Artificial Sequence
  Description of Artificial Sequence: Synthetic oligonucleotide
  Sense strand starting at position 2897 of SEQ ID NO: 1883313
acauaaaugucaucugguu

SEQ ID NO: 2184763 - RNA, 19 nt, Artificial Sequence
  Description of Artificial Sequence: Synthetic oligonucleotide
  Antisense strand to SEQ ID NO: 2184762
aaccagaugacauuuaugu

SEQ ID NO: 2184764 - RNA, 19 nt, Artificial Sequence
  Description of Artificial Sequence: Synthetic oligonucleotide
  Sense strand starting at position 2999 of SEQ ID NO: 1883313
gugucucuccuccagaaug

SEQ ID NO: 2184765 - RNA, 19 nt, Artificial Sequence
  Description of Artificial Sequence: Synthetic oligonucleotide
  Antisense strand to SEQ ID NO: 2184764
cauucuggaggagagacac

SEQ ID NO: 2184766 - RNA, 19 nt, Artificial Sequence
  Description of Artificial Sequence: Synthetic oligonucleotide
  Sense strand starting at position 3001 of SEQ ID NO: 1883313
gucucuccuccagaaugua

SEQ ID NO: 2184767 - RNA, 19 nt, Artificial Sequence
  Description of Artificial Sequence: Synthetic oligonucleotide
  Antisense strand to SEQ ID NO: 2184766
uacauucuggaggagagac

SEQ ID NO: 2184768 - RNA, 19 nt, Artificial Sequence
  Description of Artificial Sequence: Synthetic oligonucleotide
  Sense strand starting at position 3331 of SEQ ID NO: 1883313
auggcuuagaaaugaguca

SEQ ID NO: 2184769 - RNA, 19 nt, Artificial Sequence
  Description of Artificial Sequence: Synthetic oligonucleotide
  Antisense strand to SEQ ID NO: 2184768
ugacucauuucuaagccau

SEQ ID NO: 2184770 - RNA, 19 nt, Artificial Sequence
  Description of Artificial Sequence: Synthetic oligonucleotide
  Sense strand starting at position 3382 of SEQ ID NO: 1883313
agagaugacuuacucaguu

SEQ ID NO: 2184771 - RNA, 19 nt, Artificial Sequence
  Description of Artificial Sequence: Synthetic oligonucleotide
  Antisense strand to SEQ ID NO: 2184770
aacugaguaagucaucucu

SEQ ID NO: 2184772 - RNA, 19 nt, Artificial Sequence
  Description of Artificial Sequence: Synthetic oligonucleotide
  Sense strand starting at position 3582 of SEQ ID NO: 1883313
auagaagcuuccuccaaag

SEQ ID NO: 2184773 - RNA, 19 nt, Artificial Sequence
  Description of Artificial Sequence: Synthetic oligonucleotide
  Antisense strand to SEQ ID NO: 2184772
cuuuggaggaagcuucuau

SEQ ID NO: 2184774 - RNA, 19 nt, Artificial Sequence
  Description of Artificial Sequence: Synthetic oligonucleotide
  Sense strand starting at position 3584 of SEQ ID NO: 1883313
agaagcuuccuccaaagcu

SEQ ID NO: 2184775 - RNA, 19 nt, Artificial Sequence
  Description of Artificial Sequence: Synthetic oligonucleotide
  Antisense strand to SEQ ID NO: 2184774
agcuuuggaggaagcuucu

SEQ ID NO: 2184776 - RNA, 19 nt, Artificial Sequence
  Description of Artificial Sequence: Synthetic oligonucleotide
  Sense strand starting at position 3620 of SEQ ID NO: 1883313
ucuauauggaagugagcua

SEQ ID NO: 2184777 - RNA, 19 nt, Artificial Sequence
  Description of Artificial Sequence: Synthetic oligonucleotide
  Antisense strand to SEQ ID NO: 2184776
uagcucacuuccauauaga

SEQ ID NO: 2184778 - RNA, 19 nt, Artificial Sequence
  Description of Artificial Sequence: Synthetic oligonucleotide
  Sense strand starting at position 3641 of SEQ ID NO: 1883313
gcaggaauggguggaagua

SEQ ID NO: 2184779 - RNA, 19 nt, Artificial Sequence
  Description of Artificial Sequence: Synthetic oligonucleotide
  Antisense strand to SEQ ID NO: 2184778
uacuuccacccauuccugc

SEQ ID NO: 2184780 - RNA, 19 nt, Artificial Sequence
  Description of Artificial Sequence: Synthetic oligonucleotide
  Sense strand starting at position 3676 of SEQ ID NO: 1883313
aguaaauaucauggucaug

SEQ ID NO: 2184781 - RNA, 19 nt, Artificial Sequence
  Description of Artificial Sequence: Synthetic oligonucleotide
  Antisense strand to SEQ ID NO: 2184780
caugaccaugauauuuacu

SEQ ID NO: 2184782 - RNA, 19 nt, Artificial Sequence
  Description of Artificial Sequence: Synthetic oligonucleotide
  Sense strand starting at position 3747 of SEQ ID NO: 1883313
uucccagagauccgggauu

SEQ ID NO: 2184783 - RNA, 19 nt, Artificial Sequence
  Description of Artificial Sequence: Synthetic oligonucleotide
  Antisense strand to SEQ ID NO: 2184782
aaucccggaucucugggaa

SEQ ID NO: 2184784 - RNA, 19 nt, Artificial Sequence
  Description of Artificial Sequence: Synthetic oligonucleotide
  Sense strand starting at position 3749 of SEQ ID NO: 1883313
cccagagauccgggauuau

SEQ ID NO: 2184785 - RNA, 19 nt, Artificial Sequence
  Description of Artificial Sequence: Synthetic oligonucleotide
  Antisense strand to SEQ ID NO: 2184784
auaaucccggaucucuggg

SEQ ID NO: 2184786 - RNA, 19 nt, Artificial Sequence
  Description of Artificial Sequence: Synthetic oligonucleotide
  Sense strand starting at position 3793 of SEQ ID NO: 1883313
cugauccuagcauguauuu

SEQ ID NO: 2184787 - RNA, 19 nt, Artificial Sequence
  Description of Artificial Sequence: Synthetic oligonucleotide
  Antisense strand to SEQ ID NO: 2184786
aaauacaugcuaggaucag

SEQ ID NO: 2184788 - RNA, 19 nt, Artificial Sequence
  Description of Artificial Sequence: Synthetic oligonucleotide
  Sense strand starting at position 3891 of SEQ ID NO: 1883313
ugacuauaugagugauuga

SEQ ID NO: 2184789 - RNA, 19 nt, Artificial Sequence
  Description of Artificial Sequence: Synthetic oligonucleotide
  Antisense strand to SEQ ID NO: 2184788
ucaaucacucauauaguca

SEQ ID NO: 2184790 - RNA, 19 nt, Artificial Sequence
  Description of Artificial Sequence: Synthetic oligonucleotide
  Sense strand starting at position 3894 of SEQ ID NO: 1883313
cuauaugagugauugagug

SEQ ID NO: 2184791 - RNA, 19 nt, Artificial Sequence
  Description of Artificial Sequence: Synthetic oligonucleotide
  Antisense strand to SEQ ID NO: 2184790
cacucaaucacucauauag

SEQ ID NO: 2184792 - RNA, 19 nt, Artificial Sequence
  Description of Artificial Sequence: Synthetic oligonucleotide
  Sense strand starting at position 3898 of SEQ ID NO: 1883313
augagugauugagugaaua

SEQ ID NO: 2184793 - RNA, 19 nt, Artificial Sequence
  Description of Artificial Sequence: Synthetic oligonucleotide
  Antisense strand to SEQ ID NO: 2184792
uauucacucaaucacucau

SEQ ID NO: 2184794 - RNA, 19 nt, Artificial Sequence
  Description of Artificial Sequence: Synthetic oligonucleotide
  Sense strand starting at position 3956 of SEQ ID NO: 1883313
augugagucuaaucuuaaa

SEQ ID NO: 2184795 - RNA, 19 nt, Artificial Sequence
  Description of Artificial Sequence: Synthetic oligonucleotide
  Antisense strand to SEQ ID NO: 2184794
uuuaagauuagacucacau

SEQ ID NO: 2184796 - RNA, 19 nt, Artificial Sequence
  Description of Artificial Sequence: Synthetic oligonucleotide
  Sense strand starting at position 160 of SEQ ID NO: 1883314
aguggugacacuuggacaa

SEQ ID NO: 2184797 - RNA, 19 nt, Artificial Sequence
  Description of Artificial Sequence: Synthetic oligonucleotide
  Antisense strand to SEQ ID NO: 2184796
uuguccaagugucaccacu

SEQ ID NO: 2184798 - RNA, 19 nt, Artificial Sequence
  Description of Artificial Sequence: Synthetic oligonucleotide
  Sense strand starting at position 194 of SEQ ID NO: 1883314
cgauguucccagcaaagac

SEQ ID NO: 2184799 - RNA, 19 nt, Artificial Sequence
  Description of Artificial Sequence: Synthetic oligonucleotide
  Antisense strand to SEQ ID NO: 2184798
gucuuugcugggaacaucg

SEQ ID NO: 2184800 - RNA, 19 nt, Artificial Sequence
  Description of Artificial Sequence: Synthetic oligonucleotide
  Sense strand starting at position 635 of SEQ ID NO: 1883314
gaugacuguccacauguca

SEQ ID NO: 2184801 - RNA, 19 nt, Artificial Sequence
  Description of Artificial Sequence: Synthetic oligonucleotide
  Antisense strand to SEQ ID NO: 2184800
ugacauguggacagucauc

SEQ ID NO: 2184802 - RNA, 19 nt, Artificial Sequence
  Description of Artificial Sequence: Synthetic oligonucleotide
  Sense strand starting at position 691 of SEQ ID NO: 1883314
gccggaugcucuucuagaa

SEQ ID NO: 2184803 - RNA, 19 nt, Artificial Sequence
  Description of Artificial Sequence: Synthetic oligonucleotide
  Antisense strand to SEQ ID NO: 2184802
uucuagaagagcauccggc

SEQ ID NO: 2184804 - RNA, 19 nt, Artificial Sequence
  Description of Artificial Sequence: Synthetic oligonucleotide
  Sense strand starting at position 698 of SEQ ID NO: 1883314
gcucuucuagaaugaugau

SEQ ID NO: 2184805 - RNA, 19 nt, Artificial Sequence
  Description of Artificial Sequence: Synthetic oligonucleotide
  Antisense strand to SEQ ID NO: 2184804
aucaucauucuagaagagc

SEQ ID NO: 2184806 - RNA, 19 nt, Artificial Sequence
  Description of Artificial Sequence: Synthetic oligonucleotide
  Sense strand starting at position 1312 of SEQ ID NO: 1883314
ucgcuucuucuuugaggga

SEQ ID NO: 2184807 - RNA, 19 nt, Artificial Sequence
  Description of Artificial Sequence: Synthetic oligonucleotide
  Antisense strand to SEQ ID NO: 2184806
ucccucaaagaagaagcga

SEQ ID NO: 2184808 - RNA, 19 nt, Artificial Sequence
  Description of Artificial Sequence: Synthetic oligonucleotide
  Sense strand starting at position 1330 of SEQ ID NO: 1883314
aggcucuuccugugaggca

SEQ ID NO: 2184809 - RNA, 19 nt, Artificial Sequence
  Description of Artificial Sequence: Synthetic oligonucleotide
  Antisense strand to SEQ ID NO: 2184808
ugccucacaggaagagccu

SEQ ID NO: 2184810 - RNA, 19 nt, Artificial Sequence
  Description of Artificial Sequence: Synthetic oligonucleotide
  Sense strand starting at position 1464 of SEQ ID NO: 1883314
gcagcuucuccguguacuu

SEQ ID NO: 2184811 - RNA, 19 nt, Artificial Sequence
  Description of Artificial Sequence: Synthetic oligonucleotide
  Antisense strand to SEQ ID NO: 2184810
aaguacacggagaagcugc

SEQ ID NO: 2184812 - RNA, 19 nt, Artificial Sequence
  Description of Artificial Sequence: Synthetic oligonucleotide
  Sense strand starting at position 1491 of SEQ ID NO: 1883314
gggaauugcccaggcgaga

SEQ ID NO: 2184813 - RNA, 19 nt, Artificial Sequence
  Description of Artificial Sequence: Synthetic oligonucleotide
  Antisense strand to SEQ ID NO: 2184812
ucucgccugggcaauuccc

SEQ ID NO: 2184814 - RNA, 19 nt, Artificial Sequence
  Description of Artificial Sequence: Synthetic oligonucleotide
  Sense strand starting at position 1846 of SEQ ID NO: 1883314
agaugaccaucuugucgua

SEQ ID NO: 2184815 - RNA, 19 nt, Artificial Sequence
  Description of Artificial Sequence: Synthetic oligonucleotide
  Antisense strand to SEQ ID NO: 2184814
uacgacaagauggucaucu

SEQ ID NO: 2184816 - RNA, 19 nt, Artificial Sequence
  Description of Artificial Sequence: Synthetic oligonucleotide
  Sense strand starting at position 1851 of SEQ ID NO: 1883314
accaucuugucguaggaga

SEQ ID NO: 2184817 - RNA, 19 nt, Artificial Sequence
  Description of Artificial Sequence: Synthetic oligonucleotide
  Antisense strand to SEQ ID NO: 2184816
ucuccuacgacaagauggu

SEQ ID NO: 2184818 - RNA, 19 nt, Artificial Sequence
  Description of Artificial Sequence: Synthetic oligonucleotide
  Sense strand starting at position 1853 of SEQ ID NO: 1883314
caucuugucguaggagaug

SEQ ID NO: 2184819 - RNA, 19 nt, Artificial Sequence
  Description of Artificial Sequence: Synthetic oligonucleotide
  Antisense strand to SEQ ID NO: 2184818
caucuccuacgacaagaug

SEQ ID NO: 2184820 - RNA, 19 nt, Artificial Sequence
  Description of Artificial Sequence: Synthetic oligonucleotide
  Sense strand starting at position 2034 of SEQ ID NO: 1883314
uguugagagccacgccaua

SEQ ID NO: 2184821 - RNA, 19 nt, Artificial Sequence
  Description of Artificial Sequence: Synthetic oligonucleotide
  Antisense strand to SEQ ID NO: 2184820
uauggcguggcucucaaca

SEQ ID NO: 2184822 - RNA, 19 nt, Artificial Sequence
  Description of Artificial Sequence: Synthetic oligonucleotide
  Sense strand starting at position 2061 of SEQ ID NO: 1883314
cgcucugguucagguacaa

SEQ ID NO: 2184823 - RNA, 19 nt, Artificial Sequence
  Description of Artificial Sequence: Synthetic oligonucleotide
  Antisense strand to SEQ ID NO: 2184822
uuguaccugaaccagagcg

SEQ ID NO: 2184824 - RNA, 19 nt, Artificial Sequence
  Description of Artificial Sequence: Synthetic oligonucleotide
  Sense strand starting at position 2261 of SEQ ID NO: 1883314
gcaccuucugcgugauguu

SEQ ID NO: 2184825 - RNA, 19 nt, Artificial Sequence
  Description of Artificial Sequence: Synthetic oligonucleotide
  Antisense strand to SEQ ID NO: 2184824
aacaucacgcagaaggugc

SEQ ID NO: 2184826 - RNA, 19 nt, Artificial Sequence
  Description of Artificial Sequence: Synthetic oligonucleotide
  Sense strand starting at position 2270 of SEQ ID NO: 1883314
gcgugauguucagugagau

SEQ ID NO: 2184827 - RNA, 19 nt, Artificial Sequence
  Description of Artificial Sequence: Synthetic oligonucleotide
  Antisense strand to SEQ ID NO: 2184826
aucucacugaacaucacgc

SEQ ID NO: 2184828 - RNA, 19 nt, Artificial Sequence
  Description of Artificial Sequence: Synthetic oligonucleotide
  Sense strand starting at position 2271 of SEQ ID NO: 1883314
cgugauguucagugagaug

SEQ ID NO: 2184829 - RNA, 19 nt, Artificial Sequence
  Description of Artificial Sequence: Synthetic oligonucleotide
  Antisense strand to SEQ ID NO: 2184828
caucucacugaacaucacg

SEQ ID NO: 2184830 - RNA, 19 nt, Artificial Sequence
  Description of Artificial Sequence: Synthetic oligonucleotide
  Sense strand starting at position 2513 of SEQ ID NO: 1883314
aggucugguugggcucaaa

SEQ ID NO: 2184831 - RNA, 19 nt, Artificial Sequence
  Description of Artificial Sequence: Synthetic oligonucleotide
  Antisense strand to SEQ ID NO: 2184830
uuugagcccaaccagaccu

SEQ ID NO: 2184832 - RNA, 19 nt, Artificial Sequence
  Description of Artificial Sequence: Synthetic oligonucleotide
  Sense strand starting at position 2540 of SEQ ID NO: 1883314
ggaggguaggcucguagua

SEQ ID NO: 2184833 - RNA, 19 nt, Artificial Sequence
  Description of Artificial Sequence: Synthetic oligonucleotide
  Antisense strand to SEQ ID NO: 2184832
uacuacgagccuacccucc

SEQ ID NO: 2184834 - RNA, 19 nt, Artificial Sequence
  Description of Artificial Sequence: Synthetic oligonucleotide
  Sense strand starting at position 2885 of SEQ ID NO: 1883314
guguguacauucugcacaa

SEQ ID NO: 2184835 - RNA, 19 nt, Artificial Sequence
  Description of Artificial Sequence: Synthetic oligonucleotide
  Antisense strand to SEQ ID NO: 2184834
uugugcagaauguacacac

SEQ ID NO: 2184836 - RNA, 19 nt, Artificial Sequence
  Description of Artificial Sequence: Synthetic oligonucleotide
  Sense strand starting at position 2886 of SEQ ID NO: 1883314
uguguacauucugcacaaa

SEQ ID NO: 2184837 - RNA, 19 nt, Artificial Sequence
  Description of Artificial Sequence: Synthetic oligonucleotide
  Antisense strand to SEQ ID NO: 2184836
uuugugcagaauguacaca

SEQ ID NO: 2184838 - RNA, 19 nt, Artificial Sequence
  Description of Artificial Sequence: Synthetic oligonucleotide
  Sense strand starting at position 3330 of SEQ ID NO: 1883314
uggacaugacguugccaaa

SEQ ID NO: 2184839 - RNA, 19 nt, Artificial Sequence
  Description of Artificial Sequence: Synthetic oligonucleotide
  Antisense strand to SEQ ID NO: 2184838
uuuggcaacgucaugucca

SEQ ID NO: 2184840 - RNA, 19 nt, Artificial Sequence
  Description of Artificial Sequence: Synthetic oligonucleotide
  Sense strand starting at position 3333 of SEQ ID NO: 1883314
acaugacguugccaaagaa

SEQ ID NO: 2184841 - RNA, 19 nt, Artificial Sequence
  Description of Artificial Sequence: Synthetic oligonucleotide
  Antisense strand to SEQ ID NO: 2184840
uucuuuggcaacgucaugu

SEQ ID NO: 2184842 - RNA, 19 nt, Artificial Sequence
  Description of Artificial Sequence: Synthetic oligonucleotide
  Sense strand starting at position 3488 of SEQ ID NO: 1883314
ccugucauucuuggucaga

SEQ ID NO: 2184843 - RNA, 19 nt, Artificial Sequence
  Description of Artificial Sequence: Synthetic oligonucleotide
  Antisense strand to SEQ ID NO: 2184842
ucugaccaagaaugacagg

SEQ ID NO: 2184844 - RNA, 19 nt, Artificial Sequence
  Description of Artificial Sequence: Synthetic oligonucleotide
  Sense strand starting at position 3489 of SEQ ID NO: 1883314
cugucauucuuggucagag

SEQ ID NO: 2184845 - RNA, 19 nt, Artificial Sequence
  Description of Artificial Sequence: Synthetic oligonucleotide
  Antisense strand to SEQ ID NO: 2184844
cucugaccaagaaugacag

SEQ ID NO: 2184846 - RNA, 19 nt, Artificial Sequence
  Description of Artificial Sequence: Synthetic oligonucleotide
  Sense strand starting at position 3782 of SEQ ID NO: 1883314
gcaagcacucaggguuaga

SEQ ID NO: 2184847 - RNA, 19 nt, Artificial Sequence
  Description of Artificial Sequence: Synthetic oligonucleotide
  Antisense strand to SEQ ID NO: 2184846
ucuaacccugagugcuugc

SEQ ID NO: 2184848 - RNA, 19 nt, Artificial Sequence
  Description of Artificial Sequence: Synthetic oligonucleotide
  Sense strand starting at position 3908 of SEQ ID NO: 1883314
ggguaucuguagcuacuga

SEQ ID NO: 2184849 - RNA, 19 nt, Artificial Sequence
  Description of Artificial Sequence: Synthetic oligonucleotide
  Antisense strand to SEQ ID NO: 2184848
ucaguagcuacagauaccc

SEQ ID NO: 2184850 - RNA, 19 nt, Artificial Sequence
  Description of Artificial Sequence: Synthetic oligonucleotide
  Sense strand starting at position 3909 of SEQ ID NO: 1883314
gguaucuguagcuacugau

SEQ ID NO: 2184851 - RNA, 19 nt, Artificial Sequence
  Description of Artificial Sequence: Synthetic oligonucleotide
  Antisense strand to SEQ ID NO: 2184850
aucaguagcuacagauacc

SEQ ID NO: 2184852 - RNA, 19 nt, Artificial Sequence
  Description of Artificial Sequence: Synthetic oligonucleotide
  Sense strand starting at position 3928 of SEQ ID NO: 1883314
cugcgugccuguuagagaa

SEQ ID NO: 2184853 - RNA, 19 nt, Artificial Sequence
  Description of Artificial Sequence: Synthetic oligonucleotide
  Antisense strand to SEQ ID NO: 2184852
uucucuaacaggcacgcag

SEQ ID NO: 2184854 - RNA, 19 nt, Artificial Sequence
  Description of Artificial Sequence: Synthetic oligonucleotide
  Sense strand starting at position 3930 of SEQ ID NO: 1883314
gcgugccuguuagagaaga

SEQ ID NO: 2184855 - RNA, 19 nt, Artificial Sequence
  Description of Artificial Sequence: Synthetic oligonucleotide
  Antisense strand to SEQ ID NO: 2184854
ucuucucuaacaggcacgc

SEQ ID NO: 2184856 - RNA, 19 nt, Artificial Sequence
  Description of Artificial Sequence: Synthetic oligonucleotide
  Sense strand starting at position 8 of SEQ ID NO: 1883315
aggcuuaaaccaugccuaa

SEQ ID NO: 2184857 - RNA, 19 nt, Artificial Sequence
  Description of Artificial Sequence: Synthetic oligonucleotide
  Antisense strand to SEQ ID NO: 2184856
uuaggcaugguuuaagccu

SEQ ID NO: 2184858 - RNA, 19 nt, Artificial Sequence
  Description of Artificial Sequence: Synthetic oligonucleotide
  Sense strand starting at position 237 of SEQ ID NO: 1883315
gagagaagcuguucucccu

SEQ ID NO: 2184859 - RNA, 19 nt, Artificial Sequence
  Description of Artificial Sequence: Synthetic oligonucleotide
  Antisense strand to SEQ ID NO: 2184858
agggagaacagcuucucuc

SEQ ID NO: 2184860 - RNA, 19 nt, Artificial Sequence
  Description of Artificial Sequence: Synthetic oligonucleotide
  Sense strand starting at position 382 of SEQ ID NO: 1883315
agagaagguucuggaagua

SEQ ID NO: 2184861 - RNA, 19 nt, Artificial Sequence
  Description of Artificial Sequence: Synthetic oligonucleotide
  Antisense strand to SEQ ID NO: 2184860
uacuuccagaaccuucucu

SEQ ID NO: 2184862 - RNA, 19 nt, Artificial Sequence
  Description of Artificial Sequence: Synthetic oligonucleotide
  Sense strand starting at position 391 of SEQ ID NO: 1883315
ucuggaaguaucuagguga

SEQ ID NO: 2184863 - RNA, 19 nt, Artificial Sequence
  Description of Artificial Sequence: Synthetic oligonucleotide
  Antisense strand to SEQ ID NO: 2184862
ucaccuagauacuuccaga

SEQ ID NO: 2184864 - RNA, 19 nt, Artificial Sequence
  Description of Artificial Sequence: Synthetic oligonucleotide
  Sense strand starting at position 394 of SEQ ID NO: 1883315
ggaaguaucuaggugaggu

SEQ ID NO: 2184865 - RNA, 19 nt, Artificial Sequence
  Description of Artificial Sequence: Synthetic oligonucleotide
  Antisense strand to SEQ ID NO: 2184864
accucaccuagauacuucc

SEQ ID NO: 2184866 - RNA, 19 nt, Artificial Sequence
  Description of Artificial Sequence: Synthetic oligonucleotide
  Sense strand starting at position 395 of SEQ ID NO: 1883315
gaaguaucuaggugaggug

SEQ ID NO: 2184867 - RNA, 19 nt, Artificial Sequence
  Description of Artificial Sequence: Synthetic oligonucleotide
  Antisense strand to SEQ ID NO: 2184866
caccucaccuagauacuuc

SEQ ID NO: 2184868 - RNA, 19 nt, Artificial Sequence
  Description of Artificial Sequence: Synthetic oligonucleotide
  Sense strand starting at position 446 of SEQ ID NO: 1883315
cugcuuuaggagggcaaau

SEQ ID NO: 2184869 - RNA, 19 nt, Artificial Sequence
  Description of Artificial Sequence: Synthetic oligonucleotide
  Antisense strand to SEQ ID NO: 2184868
auuugcccuccuaaagcag

SEQ ID NO: 2184870 - RNA, 19 nt, Artificial Sequence
  Description of Artificial Sequence: Synthetic oligonucleotide
  Sense strand starting at position 464 of SEQ ID NO: 1883315
ugaagagccuaagaguuaa

SEQ ID NO: 2184871 - RNA, 19 nt, Artificial Sequence
  Description of Artificial Sequence: Synthetic oligonucleotide
  Antisense strand to SEQ ID NO: 2184870
uuaacucuuaggcucuuca

SEQ ID NO: 2184872 - RNA, 19 nt, Artificial Sequence
  Description of Artificial Sequence: Synthetic oligonucleotide
  Sense strand starting at position 617 of SEQ ID NO: 1883315
agaaguccucaguaagcuu

SEQ ID NO: 2184873 - RNA, 19 nt, Artificial Sequence
  Description of Artificial Sequence: Synthetic oligonucleotide
  Antisense strand to SEQ ID NO: 2184872
aagcuuacugaggacuucu

SEQ ID NO: 2184874 - RNA, 19 nt, Artificial Sequence
  Description of Artificial Sequence: Synthetic oligonucleotide
  Sense strand starting at position 644 of SEQ ID NO: 1883315
acucuuagggcuugauuau

SEQ ID NO: 2184875 - RNA, 19 nt, Artificial Sequence
  Description of Artificial Sequence: Synthetic oligonucleotide
  Antisense strand to SEQ ID NO: 2184874
auaaucaagcccuaagagu

SEQ ID NO: 2184876 - RNA, 19 nt, Artificial Sequence
  Description of Artificial Sequence: Synthetic oligonucleotide
  Sense strand starting at position 645 of SEQ ID NO: 1883315
cucuuagggcuugauuauu

SEQ ID NO: 2184877 - RNA, 19 nt, Artificial Sequence
  Description of Artificial Sequence: Synthetic oligonucleotide
  Antisense strand to SEQ ID NO: 2184876
aauaaucaagcccuaagag

SEQ ID NO: 2184878 - RNA, 19 nt, Artificial Sequence
  Description of Artificial Sequence: Synthetic oligonucleotide
  Sense strand starting at position 654 of SEQ ID NO: 1883315
cuugauuauugugucagga

SEQ ID NO: 2184879 - RNA, 19 nt, Artificial Sequence
  Description of Artificial Sequence: Synthetic oligonucleotide
  Antisense strand to SEQ ID NO: 2184878
uccugacacaauaaucaag

SEQ ID NO: 2184880 - RNA, 19 nt, Artificial Sequence
  Description of Artificial Sequence: Synthetic oligonucleotide
  Sense strand starting at position 656 of SEQ ID NO: 1883315
ugauuauugugucaggaau

SEQ ID NO: 2184881 - RNA, 19 nt, Artificial Sequence
  Description of Artificial Sequence: Synthetic oligonucleotide
  Antisense strand to SEQ ID NO: 2184880
auuccugacacaauaauca

SEQ ID NO: 2184882 - RNA, 19 nt, Artificial Sequence
  Description of Artificial Sequence: Synthetic oligonucleotide
  Sense strand starting at position 754 of SEQ ID NO: 1883315
gcaggcuuccugggcagaa

SEQ ID NO: 2184883 - RNA, 19 nt, Artificial Sequence
  Description of Artificial Sequence: Synthetic oligonucleotide
  Antisense strand to SEQ ID NO: 2184882
uucugcccaggaagccugc

SEQ ID NO: 2184884 - RNA, 19 nt, Artificial Sequence
  Description of Artificial Sequence: Synthetic oligonucleotide
  Sense strand starting at position 846 of SEQ ID NO: 1883315
ccuggaaauuaaugagcuu

SEQ ID NO: 2184885 - RNA, 19 nt, Artificial Sequence
  Description of Artificial Sequence: Synthetic oligonucleotide
  Antisense strand to SEQ ID NO: 2184884
aagcucauuaauuuccagg

SEQ ID NO: 2184886 - RNA, 19 nt, Artificial Sequence
  Description of Artificial Sequence: Synthetic oligonucleotide
  Sense strand starting at position 852 of SEQ ID NO: 1883315
aauuaaugagcuuaggucu

SEQ ID NO: 2184887 - RNA, 19 nt, Artificial Sequence
  Description of Artificial Sequence: Synthetic oligonucleotide
  Antisense strand to SEQ ID NO: 2184886
agaccuaagcucauuaauu

SEQ ID NO: 2184888 - RNA, 19 nt, Artificial Sequence
  Description of Artificial Sequence: Synthetic oligonucleotide
  Sense strand starting at position 885 of SEQ ID NO: 1883315
cagcuuggugguuaauaca

SEQ ID NO: 2184889 - RNA, 19 nt, Artificial Sequence
  Description of Artificial Sequence: Synthetic oligonucleotide
  Antisense strand to SEQ ID NO: 2184888
uguauuaaccaccaagcug

SEQ ID NO: 2184890 - RNA, 19 nt, Artificial Sequence
  Description of Artificial Sequence: Synthetic oligonucleotide
  Sense strand starting at position 972 of SEQ ID NO: 1883315
gggucuagugaugggagga

SEQ ID NO: 2184891 - RNA, 19 nt, Artificial Sequence
  Description of Artificial Sequence: Synthetic oligonucleotide
  Antisense strand to SEQ ID NO: 2184890
uccucccaucacuagaccc

SEQ ID NO: 2184892 - RNA, 19 nt, Artificial Sequence
  Description of Artificial Sequence: Synthetic oligonucleotide
  Sense strand starting at position 973 of SEQ ID NO: 1883315
ggucuagugaugggaggaa

SEQ ID NO: 2184893 - RNA, 19 nt, Artificial Sequence
  Description of Artificial Sequence: Synthetic oligonucleotide
  Antisense strand to SEQ ID NO: 2184892
uuccucccaucacuagacc

SEQ ID NO: 2184894 - RNA, 19 nt, Artificial Sequence
  Description of Artificial Sequence: Synthetic oligonucleotide
  Sense strand starting at position 991 of SEQ ID NO: 1883315
aggccugauuugggaagca

SEQ ID NO: 2184895 - RNA, 19 nt, Artificial Sequence
  Description of Artificial Sequence: Synthetic oligonucleotide
  Antisense strand to SEQ ID NO: 2184894
ugcuucccaaaucaggccu

SEQ ID NO: 2184896 - RNA, 19 nt, Artificial Sequence
  Description of Artificial Sequence: Synthetic oligonucleotide
  Sense strand starting at position 1189 of SEQ ID NO: 1883315
cuggaucucugccugaaac

SEQ ID NO: 2184897 - RNA, 19 nt, Artificial Sequence
  Description of Artificial Sequence: Synthetic oligonucleotide
  Antisense strand to SEQ ID NO: 2184896
guuucaggcagagauccag

SEQ ID NO: 2184898 - RNA, 19 nt, Artificial Sequence
  Description of Artificial Sequence: Synthetic oligonucleotide
  Sense strand starting at position 1190 of SEQ ID NO: 1883315
uggaucucugccugaaacu

SEQ ID NO: 2184899 - RNA, 19 nt, Artificial Sequence
  Description of Artificial Sequence: Synthetic oligonucleotide
  Antisense strand to SEQ ID NO: 2184898
aguuucaggcagagaucca

SEQ ID NO: 2184900 - RNA, 19 nt, Artificial Sequence
  Description of Artificial Sequence: Synthetic oligonucleotide
  Sense strand starting at position 1269 of SEQ ID NO: 1883315
uccgauagagcuugugaac

SEQ ID NO: 2184901 - RNA, 19 nt, Artificial Sequence
  Description of Artificial Sequence: Synthetic oligonucleotide
  Antisense strand to SEQ ID NO: 2184900
guucacaagcucuaucgga

SEQ ID NO: 2184902 - RNA, 19 nt, Artificial Sequence
  Description of Artificial Sequence: Synthetic oligonucleotide
  Sense strand starting at position 1301 of SEQ ID NO: 1883315
gcuccuucuuguccacaua

SEQ ID NO: 2184903 - RNA, 19 nt, Artificial Sequence
  Description of Artificial Sequence: Synthetic oligonucleotide
  Antisense strand to SEQ ID NO: 2184902
uauguggacaagaaggagc

SEQ ID NO: 2184904 - RNA, 19 nt, Artificial Sequence
  Description of Artificial Sequence: Synthetic oligonucleotide
  Sense strand starting at position 1435 of SEQ ID NO: 1883315
acaauauauccgcagucca

SEQ ID NO: 2184905 - RNA, 19 nt, Artificial Sequence
  Description of Artificial Sequence: Synthetic oligonucleotide
  Antisense strand to SEQ ID NO: 2184904
uggacugcggauauauugu

SEQ ID NO: 2184906 - RNA, 19 nt, Artificial Sequence
  Description of Artificial Sequence: Synthetic oligonucleotide
  Sense strand starting at position 1471 of SEQ ID NO: 1883315
ccagucucuggaugccaaa

SEQ ID NO: 2184907 - RNA, 19 nt, Artificial Sequence
  Description of Artificial Sequence: Synthetic oligonucleotide
  Antisense strand to SEQ ID NO: 2184906
uuuggcauccagagacugg

SEQ ID NO: 2184908 - RNA, 19 nt, Artificial Sequence
  Description of Artificial Sequence: Synthetic oligonucleotide
  Sense strand starting at position 1474 of SEQ ID NO: 1883315
gucucuggaugccaaauua

SEQ ID NO: 2184909 - RNA, 19 nt, Artificial Sequence
  Description of Artificial Sequence: Synthetic oligonucleotide
  Antisense strand to SEQ ID NO: 2184908
uaauuuggcauccagagac

SEQ ID NO: 2184910 - RNA, 19 nt, Artificial Sequence
  Description of Artificial Sequence: Synthetic oligonucleotide
  Sense strand starting at position 1554 of SEQ ID NO: 1883315
gguguugacccacauacaa

SEQ ID NO: 2184911 - RNA, 19 nt, Artificial Sequence
  Description of Artificial Sequence: Synthetic oligonucleotide
  Antisense strand to SEQ ID NO: 2184910
uuguaugugggucaacacc

SEQ ID NO: 2184912 - RNA, 19 nt, Artificial Sequence
  Description of Artificial Sequence: Synthetic oligonucleotide
  Sense strand starting at position 1707 of SEQ ID NO: 1883315
cccugagucuguuugcauc

SEQ ID NO: 2184913 - RNA, 19 nt, Artificial Sequence
  Description of Artificial Sequence: Synthetic oligonucleotide
  Antisense strand to SEQ ID NO: 2184912
gaugcaaacagacucaggg

SEQ ID NO: 2184914 - RNA, 19 nt, Artificial Sequence
  Description of Artificial Sequence: Synthetic oligonucleotide
  Sense strand starting at position 1943 of SEQ ID NO: 1883315
gccuuaauuguauggacau

SEQ ID NO: 2184915 - RNA, 19 nt, Artificial Sequence
  Description of Artificial Sequence: Synthetic oligonucleotide
  Antisense strand to SEQ ID NO: 2184914
auguccauacaauuaaggc

SEQ ID NO: 2184916 - RNA, 19 nt, Artificial Sequence
  Description of Artificial Sequence: Synthetic oligonucleotide
  Sense strand starting at position 1944 of SEQ ID NO: 1883315
ccuuaauuguauggacauu

SEQ ID NO: 2184917 - RNA, 19 nt, Artificial Sequence
  Description of Artificial Sequence: Synthetic oligonucleotide
  Antisense strand to SEQ ID NO: 2184916
aauguccauacaauuaagg

SEQ ID NO: 2184918 - RNA, 19 nt, Artificial Sequence
  Description of Artificial Sequence: Synthetic oligonucleotide
  Sense strand starting at position 2476 of SEQ ID NO: 1883315
cucugcuucgcccaggaaa

SEQ ID NO: 2184919 - RNA, 19 nt, Artificial Sequence
  Description of Artificial Sequence: Synthetic oligonucleotide
  Antisense strand to SEQ ID NO: 2184918
uuuccugggcgaagcagag

SEQ ID NO: 2184920 - RNA, 19 nt, Artificial Sequence
  Description of Artificial Sequence: Synthetic oligonucleotide
  Sense strand starting at position 2844 of SEQ ID NO: 1883315
ccucaucagcuuugucaag

SEQ ID NO: 2184921 - RNA, 19 nt, Artificial Sequence
  Description of Artificial Sequence: Synthetic oligonucleotide
  Antisense strand to SEQ ID NO: 2184920
cuugacaaagcugaugagg

SEQ ID NO: 2184922 - RNA, 19 nt, Artificial Sequence
  Description of Artificial Sequence: Synthetic oligonucleotide
  Sense strand starting at position 2858 of SEQ ID NO: 1883315
ucaagucuugcauacgcua

SEQ ID NO: 2184923 - RNA, 19 nt, Artificial Sequence
  Description of Artificial Sequence: Synthetic oligonucleotide
  Antisense strand to SEQ ID NO: 2184922
uagcguaugcaagacuuga

SEQ ID NO: 2184924 - RNA, 19 nt, Artificial Sequence
  Description of Artificial Sequence: Synthetic oligonucleotide
  Sense strand starting at position 2881 of SEQ ID NO: 1883315
gcuaaugaccuagauagcu

SEQ ID NO: 2184925 - RNA, 19 nt, Artificial Sequence
  Description of Artificial Sequence: Synthetic oligonucleotide
  Antisense strand to SEQ ID NO: 2184924
agcuaucuaggucauuagc

SEQ ID NO: 2184926 - RNA, 19 nt, Artificial Sequence
  Description of Artificial Sequence: Synthetic oligonucleotide
  Sense strand starting at position 3050 of SEQ ID NO: 1883315
cgggcuuuaccagguaaag

SEQ ID NO: 2184927 - RNA, 19 nt, Artificial Sequence
  Description of Artificial Sequence: Synthetic oligonucleotide
  Antisense strand to SEQ ID NO: 2184926
cuuuaccugguaaagcccg

SEQ ID NO: 2184928 - RNA, 19 nt, Artificial Sequence
  Description of Artificial Sequence: Synthetic oligonucleotide
  Sense strand starting at position 3087 of SEQ ID NO: 1883315
aggucacucguguauaaug

SEQ ID NO: 2184929 - RNA, 19 nt, Artificial Sequence
  Description of Artificial Sequence: Synthetic oligonucleotide
  Antisense strand to SEQ ID NO: 2184928
cauuauacacgagugaccu

SEQ ID NO: 2184930 - RNA, 19 nt, Artificial Sequence
  Description of Artificial Sequence: Synthetic oligonucleotide
  Sense strand starting at position 3261 of SEQ ID NO: 1883315
ugugcacggacaugucaau

SEQ ID NO: 2184931 - RNA, 19 nt, Artificial Sequence
  Description of Artificial Sequence: Synthetic oligonucleotide
  Antisense strand to SEQ ID NO: 2184930
auugacauguccgugcaca

SEQ ID NO: 2184932 - RNA, 19 nt, Artificial Sequence
  Description of Artificial Sequence: Synthetic oligonucleotide
  Sense strand starting at position 3316 of SEQ ID NO: 1883315
cccgaauucucauucccag

SEQ ID NO: 2184933 - RNA, 19 nt, Artificial Sequence
  Description of Artificial Sequence: Synthetic oligonucleotide
  Antisense strand to SEQ ID NO: 2184932
cugggaaugagaauucggg

SEQ ID NO: 2184934 - RNA, 19 nt, Artificial Sequence
  Description of Artificial Sequence: Synthetic oligonucleotide
  Sense strand starting at position 3631 of SEQ ID NO: 1883315
cuacguagacacugugaaa

SEQ ID NO: 2184935 - RNA, 19 nt, Artificial Sequence
  Description of Artificial Sequence: Synthetic oligonucleotide
  Antisense strand to SEQ ID NO: 2184934
uuucacagugucuacguag

SEQ ID NO: 2184936 - RNA, 19 nt, Artificial Sequence
  Description of Artificial Sequence: Synthetic oligonucleotide
  Sense strand starting at position 29 of SEQ ID NO: 1883316
acccuuuauguuugugaau

SEQ ID NO: 2184937 - RNA, 19 nt, Artificial Sequence
  Description of Artificial Sequence: Synthetic oligonucleotide
  Antisense strand to SEQ ID NO: 2184936
auucacaaacauaaagggu

SEQ ID NO: 2184938 - RNA, 19 nt, Artificial Sequence
  Description of Artificial Sequence: Synthetic oligonucleotide
  Sense strand starting at position 30 of SEQ ID NO: 1883316
cccuuuauguuugugaauu

SEQ ID NO: 2184939 - RNA, 19 nt, Artificial Sequence
  Description of Artificial Sequence: Synthetic oligonucleotide
  Antisense strand to SEQ ID NO: 2184938
aauucacaaacauaaaggg

SEQ ID NO: 2184940 - RNA, 19 nt, Artificial Sequence
  Description of Artificial Sequence: Synthetic oligonucleotide
  Sense strand starting at position 346 of SEQ ID NO: 1883316
ucgcgugagcuaugaggau

SEQ ID NO: 2184941 - RNA, 19 nt, Artificial Sequence
  Description of Artificial Sequence: Synthetic oligonucleotide
  Antisense strand to SEQ ID NO: 2184940
auccucauagcucacgcga

SEQ ID NO: 2184942 - RNA, 19 nt, Artificial Sequence
  Description of Artificial Sequence: Synthetic oligonucleotide
  Sense strand starting at position 634 of SEQ ID NO: 1883316
ucccuuuggugaccaagua

SEQ ID NO: 2184943 - RNA, 19 nt, Artificial Sequence
  Description of Artificial Sequence: Synthetic oligonucleotide
  Antisense strand to SEQ ID NO: 2184942
uacuuggucaccaaaggga

SEQ ID NO: 2184944 - RNA, 19 nt, Artificial Sequence
  Description of Artificial Sequence: Synthetic oligonucleotide
  Sense strand starting at position 635 of SEQ ID NO: 1883316
cccuuuggugaccaaguaa

SEQ ID NO: 2184945 - RNA, 19 nt, Artificial Sequence
  Description of Artificial Sequence: Synthetic oligonucleotide
  Antisense strand to SEQ ID NO: 2184944
uuacuuggucaccaaaggg

SEQ ID NO: 2184946 - RNA, 19 nt, Artificial Sequence
  Description of Artificial Sequence: Synthetic oligonucleotide
  Sense strand starting at position 668 of SEQ ID NO: 1883316
ggcugaggaccuuauguuu

SEQ ID NO: 2184947 - RNA, 19 nt, Artificial Sequence
  Description of Artificial Sequence: Synthetic oligonucleotide
  Antisense strand to SEQ ID NO: 2184946
aaacauaagguccucagcc

SEQ ID NO: 2184948 - RNA, 19 nt, Artificial Sequence
  Description of Artificial Sequence: Synthetic oligonucleotide
  Sense strand starting at position 756 of SEQ ID NO: 1883316
cuugcaauccugcgauuua

SEQ ID NO: 2184949 - RNA, 19 nt, Artificial Sequence
  Description of Artificial Sequence: Synthetic oligonucleotide
  Antisense strand to SEQ ID NO: 2184948
uaaaucgcaggauugcaag

SEQ ID NO: 2184950 - RNA, 19 nt, Artificial Sequence
  Description of Artificial Sequence: Synthetic oligonucleotide
  Sense strand starting at position 757 of SEQ ID NO: 1883316
uugcaauccugcgauuuag

SEQ ID NO: 2184951 - RNA, 19 nt, Artificial Sequence
  Description of Artificial Sequence: Synthetic oligonucleotide
  Antisense strand to SEQ ID NO: 2184950
cuaaaucgcaggauugcaa

SEQ ID NO: 2184952 - RNA, 19 nt, Artificial Sequence
  Description of Artificial Sequence: Synthetic oligonucleotide
  Sense strand starting at position 832 of SEQ ID NO: 1883316
ugugcauuccuacgugaag

SEQ ID NO: 2184953 - RNA, 19 nt, Artificial Sequence
  Description of Artificial Sequence: Synthetic oligonucleotide
  Antisense strand to SEQ ID NO: 2184952
cuucacguaggaaugcaca

SEQ ID NO: 2184954 - RNA, 19 nt, Artificial Sequence
  Description of Artificial Sequence: Synthetic oligonucleotide
  Sense strand starting at position 833 of SEQ ID NO: 1883316
gugcauuccuacgugaaga

SEQ ID NO: 2184955 - RNA, 19 nt, Artificial Sequence
  Description of Artificial Sequence: Synthetic oligonucleotide
  Antisense strand to SEQ ID NO: 2184954
ucuucacguaggaaugcac

SEQ ID NO: 2184956 - RNA, 19 nt, Artificial Sequence
  Description of Artificial Sequence: Synthetic oligonucleotide
  Sense strand starting at position 834 of SEQ ID NO: 1883316
ugcauuccuacgugaagac

SEQ ID NO: 2184957 - RNA, 19 nt, Artificial Sequence
  Description of Artificial Sequence: Synthetic oligonucleotide
  Antisense strand to SEQ ID NO: 2184956
gucuucacguaggaaugca

SEQ ID NO: 2184958 - RNA, 19 nt, Artificial Sequence
  Description of Artificial Sequence: Synthetic oligonucleotide
  Sense strand starting at position 1011 of SEQ ID NO: 1883316
uuuccaguuugauuacgga

SEQ ID NO: 2184959 - RNA, 19 nt, Artificial Sequence
  Description of Artificial Sequence: Synthetic oligonucleotide
  Antisense strand to SEQ ID NO: 2184958
uccguaaucaaacuggaaa

SEQ ID NO: 2184960 - RNA, 19 nt, Artificial Sequence
  Description of Artificial Sequence: Synthetic oligonucleotide
  Sense strand starting at position 1259 of SEQ ID NO: 1883316
uuuaccgaguccuucuaaa

SEQ ID NO: 2184961 - RNA, 19 nt, Artificial Sequence
  Description of Artificial Sequence: Synthetic oligonucleotide
  Antisense strand to SEQ ID NO: 2184960
uuuagaaggacucgguaaa

SEQ ID NO: 2184962 - RNA, 19 nt, Artificial Sequence
  Description of Artificial Sequence: Synthetic oligonucleotide
  Sense strand starting at position 1350 of SEQ ID NO: 1883316
gagaguuaucuuggcgucu

SEQ ID NO: 2184963 - RNA, 19 nt, Artificial Sequence
  Description of Artificial Sequence: Synthetic oligonucleotide
  Antisense strand to SEQ ID NO: 2184962
agacgccaagauaacucuc

SEQ ID NO: 2184964 - RNA, 19 nt, Artificial Sequence
  Description of Artificial Sequence: Synthetic oligonucleotide
  Sense strand starting at position 1351 of SEQ ID NO: 1883316
agaguuaucuuggcgucuu

SEQ ID NO: 2184965 - RNA, 19 nt, Artificial Sequence
  Description of Artificial Sequence: Synthetic oligonucleotide
  Antisense strand to SEQ ID NO: 2184964
aagacgccaagauaacucu

SEQ ID NO: 2184966 - RNA, 19 nt, Artificial Sequence
  Description of Artificial Sequence: Synthetic oligonucleotide
  Sense strand starting at position 1365 of SEQ ID NO: 1883316
gucuuaaagccaggcauga

SEQ ID NO: 2184967 - RNA, 19 nt, Artificial Sequence
  Description of Artificial Sequence: Synthetic oligonucleotide
  Antisense strand to SEQ ID NO: 2184966
ucaugccuggcuuuaagac

SEQ ID NO: 2184968 - RNA, 19 nt, Artificial Sequence
  Description of Artificial Sequence: Synthetic oligonucleotide
  Sense strand starting at position 1378 of SEQ ID NO: 1883316
gcaugaacgccucgagauu

SEQ ID NO: 2184969 - RNA, 19 nt, Artificial Sequence
  Description of Artificial Sequence: Synthetic oligonucleotide
  Antisense strand to SEQ ID NO: 2184968
aaucucgaggcguucaugc

SEQ ID NO: 2184970 - RNA, 19 nt, Artificial Sequence
  Description of Artificial Sequence: Synthetic oligonucleotide
  Sense strand starting at position 1387 of SEQ ID NO: 1883316
ccucgagauugggaagaaa

SEQ ID NO: 2184971 - RNA, 19 nt, Artificial Sequence
  Description of Artificial Sequence: Synthetic oligonucleotide
  Antisense strand to SEQ ID NO: 2184970
uuucuucccaaucucgagg

SEQ ID NO: 2184972 - RNA, 19 nt, Artificial Sequence
  Description of Artificial Sequence: Synthetic oligonucleotide
  Sense strand starting at position 1433 of SEQ ID NO: 1883316
cggcaaguguucuucagau

SEQ ID NO: 2184973 - RNA, 19 nt, Artificial Sequence
  Description of Artificial Sequence: Synthetic oligonucleotide
  Antisense strand to SEQ ID NO: 2184972
aucugaagaacacuugccg

SEQ ID NO: 2184974 - RNA, 19 nt, Artificial Sequence
  Description of Artificial Sequence: Synthetic oligonucleotide
  Sense strand starting at position 1659 of SEQ ID NO: 1883316
gacagcugucaaugaagcu

SEQ ID NO: 2184975 - RNA, 19 nt, Artificial Sequence
  Description of Artificial Sequence: Synthetic oligonucleotide
  Antisense strand to SEQ ID NO: 2184974
agcuucauugacagcuguc

SEQ ID NO: 2184976 - RNA, 19 nt, Artificial Sequence
  Description of Artificial Sequence: Synthetic oligonucleotide
  Sense strand starting at position 1694 of SEQ ID NO: 1883316
cggagauuugccugcggau

SEQ ID NO: 2184977 - RNA, 19 nt, Artificial Sequence
  Description of Artificial Sequence: Synthetic oligonucleotide
  Antisense strand to SEQ ID NO: 2184976
auccgcaggcaaaucuccg

SEQ ID NO: 2184978 - RNA, 19 nt, Artificial Sequence
  Description of Artificial Sequence: Synthetic oligonucleotide
  Sense strand starting at position 1707 of SEQ ID NO: 1883316
gcggauuuccgcggcugua

SEQ ID NO: 2184979 - RNA, 19 nt, Artificial Sequence
  Description of Artificial Sequence: Synthetic oligonucleotide
  Antisense strand to SEQ ID NO: 2184978
uacagccgcggaaauccgc

SEQ ID NO: 2184980 - RNA, 19 nt, Artificial Sequence
  Description of Artificial Sequence: Synthetic oligonucleotide
  Sense strand starting at position 1863 of SEQ ID NO: 1883316
ccuuucugacccugagaug

SEQ ID NO: 2184981 - RNA, 19 nt, Artificial Sequence
  Description of Artificial Sequence: Synthetic oligonucleotide
  Antisense strand to SEQ ID NO: 2184980
caucucagggucagaaagg

SEQ ID NO: 2184982 - RNA, 19 nt, Artificial Sequence
  Description of Artificial Sequence: Synthetic oligonucleotide
  Sense strand starting at position 1989 of SEQ ID NO: 1883316
cucuaaucuugauccggaa

SEQ ID NO: 2184983 - RNA, 19 nt, Artificial Sequence
  Description of Artificial Sequence: Synthetic oligonucleotide
  Antisense strand to SEQ ID NO: 2184982
uuccggaucaagauuagag

SEQ ID NO: 2184984 - RNA, 19 nt, Artificial Sequence
  Description of Artificial Sequence: Synthetic oligonucleotide
  Sense strand starting at position 2136 of SEQ ID NO: 1883316
gccagagccgcuguuaauu

SEQ ID NO: 2184985 - RNA, 19 nt, Artificial Sequence
  Description of Artificial Sequence: Synthetic oligonucleotide
  Antisense strand to SEQ ID NO: 2184984
aauuaacagcggcucuggc

SEQ ID NO: 2184986 - RNA, 19 nt, Artificial Sequence
  Description of Artificial Sequence: Synthetic oligonucleotide
  Sense strand starting at position 2154 of SEQ ID NO: 1883316
uagucuguuccguggaagu

SEQ ID NO: 2184987 - RNA, 19 nt, Artificial Sequence
  Description of Artificial Sequence: Synthetic oligonucleotide
  Antisense strand to SEQ ID NO: 2184986
acuuccacggaacagacua

SEQ ID NO: 2184988 - RNA, 19 nt, Artificial Sequence
  Description of Artificial Sequence: Synthetic oligonucleotide
  Sense strand starting at position 2156 of SEQ ID NO: 1883316
gucuguuccguggaagugu

SEQ ID NO: 2184989 - RNA, 19 nt, Artificial Sequence
  Description of Artificial Sequence: Synthetic oligonucleotide
  Antisense strand to SEQ ID NO: 2184988
acacuuccacggaacagac

SEQ ID NO: 2184990 - RNA, 19 nt, Artificial Sequence
  Description of Artificial Sequence: Synthetic oligonucleotide
  Sense strand starting at position 2180 of SEQ ID NO: 1883316
gugcgugugccugcguaua

SEQ ID NO: 2184991 - RNA, 19 nt, Artificial Sequence
  Description of Artificial Sequence: Synthetic oligonucleotide
  Antisense strand to SEQ ID NO: 2184990
uauacgcaggcacacgcac

SEQ ID NO: 2184992 - RNA, 19 nt, Artificial Sequence
  Description of Artificial Sequence: Synthetic oligonucleotide
  Sense strand starting at position 2192 of SEQ ID NO: 1883316
gcguauacauaugcauaua

SEQ ID NO: 2184993 - RNA, 19 nt, Artificial Sequence
  Description of Artificial Sequence: Synthetic oligonucleotide
  Antisense strand to SEQ ID NO: 2184992
uauaugcauauguauacgc

SEQ ID NO: 2184994 - RNA, 19 nt, Artificial Sequence
  Description of Artificial Sequence: Synthetic oligonucleotide
  Sense strand starting at position 2277 of SEQ ID NO: 1883316
cggcguggauccaaguuaa

SEQ ID NO: 2184995 - RNA, 19 nt, Artificial Sequence
  Description of Artificial Sequence: Synthetic oligonucleotide
  Antisense strand to SEQ ID NO: 2184994
uuaacuuggauccacgccg

SEQ ID NO: 2184996 - RNA, 19 nt, Artificial Sequence
  Description of Artificial Sequence: Synthetic oligonucleotide
  Sense strand starting at position 3173 of SEQ ID NO: 1883316
ggagcaugcgagggauaca

SEQ ID NO: 2184997 - RNA, 19 nt, Artificial Sequence
  Description of Artificial Sequence: Synthetic oligonucleotide
  Antisense strand to SEQ ID NO: 2184996
uguaucccucgcaugcucc

SEQ ID NO: 2184998 - RNA, 19 nt, Artificial Sequence
  Description of Artificial Sequence: Synthetic oligonucleotide
  Sense strand starting at position 3588 of SEQ ID NO: 1883316
cgaaacgaucgaugagaga

SEQ ID NO: 2184999 - RNA, 19 nt, Artificial Sequence
  Description of Artificial Sequence: Synthetic oligonucleotide
  Antisense strand to SEQ ID NO: 2184998
ucucucaucgaucguuucg

SEQ ID NO: 2185000 - RNA, 19 nt, Artificial Sequence
  Description of Artificial Sequence: Synthetic oligonucleotide
  Sense strand starting at position 3814 of SEQ ID NO: 1883316
cucgcuugcugauccagaa

SEQ ID NO: 2185001 - RNA, 19 nt, Artificial Sequence
  Description of Artificial Sequence: Synthetic oligonucleotide
  Antisense strand to SEQ ID NO: 2185000
uucuggaucagcaagcgag

SEQ ID NO: 2185002 - RNA, 19 nt, Artificial Sequence
  Description of Artificial Sequence: Synthetic oligonucleotide
  Sense strand starting at position 3818 of SEQ ID NO: 1883316
cuugcugauccagaauuag

SEQ ID NO: 2185003 - RNA, 19 nt, Artificial Sequence
  Description of Artificial Sequence: Synthetic oligonucleotide
  Antisense strand to SEQ ID NO: 2185002
cuaauucuggaucagcaag

SEQ ID NO: 2185004 - RNA, 19 nt, Artificial Sequence
  Description of Artificial Sequence: Synthetic oligonucleotide
  Sense strand starting at position 3824 of SEQ ID NO: 1883316
gauccagaauuagggauua

SEQ ID NO: 2185005 - RNA, 19 nt, Artificial Sequence
  Description of Artificial Sequence: Synthetic oligonucleotide
  Antisense strand to SEQ ID NO: 2185004
uaaucccuaauucuggauc

SEQ ID NO: 2185006 - RNA, 19 nt, Artificial Sequence
  Description of Artificial Sequence: Synthetic oligonucleotide
  Sense strand starting at position 3837 of SEQ ID NO: 1883316
ggauuaauggcucgcucca

SEQ ID NO: 2185007 - RNA, 19 nt, Artificial Sequence
  Description of Artificial Sequence: Synthetic oligonucleotide
  Antisense strand to SEQ ID NO: 2185006
uggagcgagccauuaaucc

SEQ ID NO: 2185008 - RNA, 19 nt, Artificial Sequence
  Description of Artificial Sequence: Synthetic oligonucleotide
  Sense strand starting at position 3922 of SEQ ID NO: 1883316
gacagauguuggcucccaa

SEQ ID NO: 2185009 - RNA, 19 nt, Artificial Sequence
  Description of Artificial Sequence: Synthetic oligonucleotide
  Antisense strand to SEQ ID NO: 2185008
uugggagccaacaucuguc

SEQ ID NO: 2185010 - RNA, 19 nt, Artificial Sequence
  Description of Artificial Sequence: Synthetic oligonucleotide
  Sense strand starting at position 3952 of SEQ ID NO: 1883316
gcucgcuguguccuugaaa

SEQ ID NO: 2185011 - RNA, 19 nt, Artificial Sequence
  Description of Artificial Sequence: Synthetic oligonucleotide
  Antisense strand to SEQ ID NO: 2185010
uuucaaggacacagcgagc

SEQ ID NO: 2185012 - RNA, 19 nt, Artificial Sequence
  Description of Artificial Sequence: Synthetic oligonucleotide
  Sense strand starting at position 3953 of SEQ ID NO: 1883316
cucgcuguguccuugaaac

SEQ ID NO: 2185013 - RNA, 19 nt, Artificial Sequence
  Description of Artificial Sequence: Synthetic oligonucleotide
  Antisense strand to SEQ ID NO: 2185012
guuucaaggacacagcgag

SEQ ID NO: 2185014 - RNA, 19 nt, Artificial Sequence
  Description of Artificial Sequence: Synthetic oligonucleotide
  Sense strand starting at position 3955 of SEQ ID NO: 1883316
cgcuguguccuugaaacca

SEQ ID NO: 2185015 - RNA, 19 nt, Artificial Sequence
  Description of Artificial Sequence: Synthetic oligonucleotide
  Antisense strand to SEQ ID NO: 2185014
ugguuucaaggacacagcg

SEQ ID NO: 2185016 - RNA, 19 nt, Artificial Sequence
  Description of Artificial Sequence: Synthetic oligonucleotide
  Sense strand starting at position 125 of SEQ ID NO: 1883317
agacauagacauuguugua

SEQ ID NO: 2185017 - RNA, 19 nt, Artificial Sequence
  Description of Artificial Sequence: Synthetic oligonucleotide
  Antisense strand to SEQ ID NO: 2185016
uacaacaaugucuaugucu

SEQ ID NO: 2185018 - RNA, 19 nt, Artificial Sequence
  Description of Artificial Sequence: Synthetic oligonucleotide
  Sense strand starting at position 170 of SEQ ID NO: 1883317
ugguuuaacaagugcagaa

SEQ ID NO: 2185019 - RNA, 19 nt, Artificial Sequence
  Description of Artificial Sequence: Synthetic oligonucleotide
  Antisense strand to SEQ ID NO: 2185018
uucugcacuuguuaaacca

SEQ ID NO: 2185020 - RNA, 19 nt, Artificial Sequence
  Description of Artificial Sequence: Synthetic oligonucleotide
  Sense strand starting at position 308 of SEQ ID NO: 1883317
acacgcuaagagcauuaaa

SEQ ID NO: 2185021 - RNA, 19 nt, Artificial Sequence
  Description of Artificial Sequence: Synthetic oligonucleotide
  Antisense strand to SEQ ID NO: 2185020
uuuaaugcucuuagcgugu

SEQ ID NO: 2185022 - RNA, 19 nt, Artificial Sequence
  Description of Artificial Sequence: Synthetic oligonucleotide
  Sense strand starting at position 311 of SEQ ID NO: 1883317
cgcuaagagcauuaaacua

SEQ ID NO: 2185023 - RNA, 19 nt, Artificial Sequence
  Description of Artificial Sequence: Synthetic oligonucleotide
  Antisense strand to SEQ ID NO: 2185022
uaguuuaaugcucuuagcg

SEQ ID NO: 2185024 - RNA, 19 nt, Artificial Sequence
  Description of Artificial Sequence: Synthetic oligonucleotide
  Sense strand starting at position 380 of SEQ ID NO: 1883317
guggcuaagaugcggaaua

SEQ ID NO: 2185025 - RNA, 19 nt, Artificial Sequence
  Description of Artificial Sequence: Synthetic oligonucleotide
  Antisense strand to SEQ ID NO: 2185024
uauuccgcaucuuagccac

SEQ ID NO: 2185026 - RNA, 19 nt, Artificial Sequence
  Description of Artificial Sequence: Synthetic oligonucleotide
  Sense strand starting at position 382 of SEQ ID NO: 1883317
ggcuaagaugcggaauaau

SEQ ID NO: 2185027 - RNA, 19 nt, Artificial Sequence
  Description of Artificial Sequence: Synthetic oligonucleotide
  Antisense strand to SEQ ID NO: 2185026
auuauuccgcaucuuagcc

SEQ ID NO: 2185028 - RNA, 19 nt, Artificial Sequence
  Description of Artificial Sequence: Synthetic oligonucleotide
  Sense strand starting at position 453 of SEQ ID NO: 1883317
ccggcagaguaacauuuaa

SEQ ID NO: 2185029 - RNA, 19 nt, Artificial Sequence
  Description of Artificial Sequence: Synthetic oligonucleotide
  Antisense strand to SEQ ID NO: 2185028
uuaaauguuacucugccgg

SEQ ID NO: 2185030 - RNA, 19 nt, Artificial Sequence
  Description of Artificial Sequence: Synthetic oligonucleotide
  Sense strand starting at position 536 of SEQ ID NO: 1883317
aacguaauuguccuucguu

SEQ ID NO: 2185031 - RNA, 19 nt, Artificial Sequence
  Description of Artificial Sequence: Synthetic oligonucleotide
  Antisense strand to SEQ ID NO: 2185030
aacgaaggacaauuacguu

SEQ ID NO: 2185032 - RNA, 19 nt, Artificial Sequence
  Description of Artificial Sequence: Synthetic oligonucleotide
  Sense strand starting at position 655 of SEQ ID NO: 1883317
gcuguugaucuuuggagga

SEQ ID NO: 2185033 - RNA, 19 nt, Artificial Sequence
  Description of Artificial Sequence: Synthetic oligonucleotide
  Antisense strand to SEQ ID NO: 2185032
uccuccaaagaucaacagc

SEQ ID NO: 2185034 - RNA, 19 nt, Artificial Sequence
  Description of Artificial Sequence: Synthetic oligonucleotide
  Sense strand starting at position 683 of SEQ ID NO: 1883317
gcacaaaccggucauaucu

SEQ ID NO: 2185035 - RNA, 19 nt, Artificial Sequence
  Description of Artificial Sequence: Synthetic oligonucleotide
  Antisense strand to SEQ ID NO: 2185034
agauaugaccgguuugugc

SEQ ID NO: 2185036 - RNA, 19 nt, Artificial Sequence
  Description of Artificial Sequence: Synthetic oligonucleotide
  Sense strand starting at position 694 of SEQ ID NO: 1883317
ucauaucugugcuuugaua

SEQ ID NO: 2185037 - RNA, 19 nt, Artificial Sequence
  Description of Artificial Sequence: Synthetic oligonucleotide
  Antisense strand to SEQ ID NO: 2185036
uaucaaagcacagauauga

SEQ ID NO: 2185038 - RNA, 19 nt, Artificial Sequence
  Description of Artificial Sequence: Synthetic oligonucleotide
  Sense strand starting at position 696 of SEQ ID NO: 1883317
auaucugugcuuugauaca

SEQ ID NO: 2185039 - RNA, 19 nt, Artificial Sequence
  Description of Artificial Sequence: Synthetic oligonucleotide
  Antisense strand to SEQ ID NO: 2185038
uguaucaaagcacagauau

SEQ ID NO: 2185040 - RNA, 19 nt, Artificial Sequence
  Description of Artificial Sequence: Synthetic oligonucleotide
  Sense strand starting at position 817 of SEQ ID NO: 1883317
cgagaaggcuacuuucuca

SEQ ID NO: 2185041 - RNA, 19 nt, Artificial Sequence
  Description of Artificial Sequence: Synthetic oligonucleotide
  Antisense strand to SEQ ID NO: 2185040
ugagaaaguagccuucucg

SEQ ID NO: 2185042 - RNA, 19 nt, Artificial Sequence
  Description of Artificial Sequence: Synthetic oligonucleotide
  Sense strand starting at position 1090 of SEQ ID NO: 1883317
ucccauauuugagauggag

SEQ ID NO: 2185043 - RNA, 19 nt, Artificial Sequence
  Description of Artificial Sequence: Synthetic oligonucleotide
  Antisense strand to SEQ ID NO: 2185042
cuccaucucaaauauggga

SEQ ID NO: 2185044 - RNA, 19 nt, Artificial Sequence
  Description of Artificial Sequence: Synthetic oligonucleotide
  Sense strand starting at position 1314 of SEQ ID NO: 1883317
uagggaucucugugaccug

SEQ ID NO: 2185045 - RNA, 19 nt, Artificial Sequence
  Description of Artificial Sequence: Synthetic oligonucleotide
  Antisense strand to SEQ ID NO: 2185044
caggucacagagaucccua

SEQ ID NO: 2185046 - RNA, 19 nt, Artificial Sequence
  Description of Artificial Sequence: Synthetic oligonucleotide
  Sense strand starting at position 1535 of SEQ ID NO: 1883317
aaguguaagcuucgaagaa

SEQ ID NO: 2185047 - RNA, 19 nt, Artificial Sequence
  Description of Artificial Sequence: Synthetic oligonucleotide
  Antisense strand to SEQ ID NO: 2185046
uucuucgaagcuuacacuu

SEQ ID NO: 2185048 - RNA, 19 nt, Artificial Sequence
  Description of Artificial Sequence: Synthetic oligonucleotide
  Sense strand starting at position 2126 of SEQ ID NO: 1883317
ccugcaucccaaugaguua

SEQ ID NO: 2185049 - RNA, 19 nt, Artificial Sequence
  Description of Artificial Sequence: Synthetic oligonucleotide
  Antisense strand to SEQ ID NO: 2185048
uaacucauugggaugcagg

SEQ ID NO: 2185050 - RNA, 19 nt, Artificial Sequence
  Description of Artificial Sequence: Synthetic oligonucleotide
  Sense strand starting at position 2129 of SEQ ID NO: 1883317
gcaucccaaugaguuaaau

SEQ ID NO: 2185051 - RNA, 19 nt, Artificial Sequence
  Description of Artificial Sequence: Synthetic oligonucleotide
  Antisense strand to SEQ ID NO: 2185050
auuuaacucauugggaugc

SEQ ID NO: 2185052 - RNA, 19 nt, Artificial Sequence
  Description of Artificial Sequence: Synthetic oligonucleotide
  Sense strand starting at position 2138 of SEQ ID NO: 1883317
ugaguuaaaucagucacuu

SEQ ID NO: 2185053 - RNA, 19 nt, Artificial Sequence
  Description of Artificial Sequence: Synthetic oligonucleotide
  Antisense strand to SEQ ID NO: 2185052
aagugacugauuuaacuca

SEQ ID NO: 2185054 - RNA, 19 nt, Artificial Sequence
  Description of Artificial Sequence: Synthetic oligonucleotide
  Sense strand starting at position 2150 of SEQ ID NO: 1883317
gucacuuacuucucaugca

SEQ ID NO: 2185055 - RNA, 19 nt, Artificial Sequence
  Description of Artificial Sequence: Synthetic oligonucleotide
  Antisense strand to SEQ ID NO: 2185054
ugcaugagaaguaagugac

SEQ ID NO: 2185056 - RNA, 19 nt, Artificial Sequence
  Description of Artificial Sequence: Synthetic oligonucleotide
  Sense strand starting at position 2212 of SEQ ID NO: 1883317
gcauuuagcugccuccaau

SEQ ID NO: 2185057 - RNA, 19 nt, Artificial Sequence
  Description of Artificial Sequence: Synthetic oligonucleotide
  Antisense strand to SEQ ID NO: 2185056
auuggaggcagcuaaaugc

SEQ ID NO: 2185058 - RNA, 19 nt, Artificial Sequence
  Description of Artificial Sequence: Synthetic oligonucleotide
  Sense strand starting at position 2370 of SEQ ID NO: 1883317
uguucuuaucaagggccua

SEQ ID NO: 2185059 - RNA, 19 nt, Artificial Sequence
  Description of Artificial Sequence: Synthetic oligonucleotide
  Antisense strand to SEQ ID NO: 2185058
uaggcccuugauaagaaca

SEQ ID NO: 2185060 - RNA, 19 nt, Artificial Sequence
  Description of Artificial Sequence: Synthetic oligonucleotide
  Sense strand starting at position 3058 of SEQ ID NO: 1883317
gccacugcuagggagaaau

SEQ ID NO: 2185061 - RNA, 19 nt, Artificial Sequence
  Description of Artificial Sequence: Synthetic oligonucleotide
  Antisense strand to SEQ ID NO: 2185060
auuucucccuagcaguggc

SEQ ID NO: 2185062 - RNA, 19 nt, Artificial Sequence
  Description of Artificial Sequence: Synthetic oligonucleotide
  Sense strand starting at position 3068 of SEQ ID NO: 1883317
gggagaaauuugggaauau

SEQ ID NO: 2185063 - RNA, 19 nt, Artificial Sequence
  Description of Artificial Sequence: Synthetic oligonucleotide
  Antisense strand to SEQ ID NO: 2185062
auauucccaaauuucuccc

SEQ ID NO: 2185064 - RNA, 19 nt, Artificial Sequence
  Description of Artificial Sequence: Synthetic oligonucleotide
  Sense strand starting at position 3087 of SEQ ID NO: 1883317
uuucuuguuccggagagac

SEQ ID NO: 2185065 - RNA, 19 nt, Artificial Sequence
  Description of Artificial Sequence: Synthetic oligonucleotide
  Antisense strand to SEQ ID NO: 2185064
gucucuccggaacaagaaa

SEQ ID NO: 2185066 - RNA, 19 nt, Artificial Sequence
  Description of Artificial Sequence: Synthetic oligonucleotide
  Sense strand starting at position 3099 of SEQ ID NO: 1883317
gagagacgcuugucuggaa

SEQ ID NO: 2185067 - RNA, 19 nt, Artificial Sequence
  Description of Artificial Sequence: Synthetic oligonucleotide
  Antisense strand to SEQ ID NO: 2185066
uuccagacaagcgucucuc

SEQ ID NO: 2185068 - RNA, 19 nt, Artificial Sequence
  Description of Artificial Sequence: Synthetic oligonucleotide
  Sense strand starting at position 3103 of SEQ ID NO: 1883317
gacgcuugucuggaagauc

SEQ ID NO: 2185069 - RNA, 19 nt, Artificial Sequence
  Description of Artificial Sequence: Synthetic oligonucleotide
  Antisense strand to SEQ ID NO: 2185068
gaucuuccagacaagcguc

SEQ ID NO: 2185070 - RNA, 19 nt, Artificial Sequence
  Description of Artificial Sequence: Synthetic oligonucleotide
  Sense strand starting at position 3106 of SEQ ID NO: 1883317
gcuugucuggaagaucaug

SEQ ID NO: 2185071 - RNA, 19 nt, Artificial Sequence
  Description of Artificial Sequence: Synthetic oligonucleotide
  Antisense strand to SEQ ID NO: 2185070
caugaucuuccagacaagc

SEQ ID NO: 2185072 - RNA, 19 nt, Artificial Sequence
  Description of Artificial Sequence: Synthetic oligonucleotide
  Sense strand starting at position 3114 of SEQ ID NO: 1883317
ggaagaucaugagauguaa

SEQ ID NO: 2185073 - RNA, 19 nt, Artificial Sequence
  Description of Artificial Sequence: Synthetic oligonucleotide
  Antisense strand to SEQ ID NO: 2185072
uuacaucucaugaucuucc

SEQ ID NO: 2185074 - RNA, 19 nt, Artificial Sequence
  Description of Artificial Sequence: Synthetic oligonucleotide
  Sense strand starting at position 3136 of SEQ ID NO: 1883317
caugaauaucucgguuauc

SEQ ID NO: 2185075 - RNA, 19 nt, Artificial Sequence
  Description of Artificial Sequence: Synthetic oligonucleotide
  Antisense strand to SEQ ID NO: 2185074
gauaaccgagauauucaug

SEQ ID NO: 2185076 - RNA, 19 nt, Artificial Sequence
  Description of Artificial Sequence: Synthetic oligonucleotide
  Sense strand starting at position 3137 of SEQ ID NO: 1883317
augaauaucucgguuaucu

SEQ ID NO: 2185077 - RNA, 19 nt, Artificial Sequence
  Description of Artificial Sequence: Synthetic oligonucleotide
  Antisense strand to SEQ ID NO: 2185076
agauaaccgagauauucau

SEQ ID NO: 2185078 - RNA, 19 nt, Artificial Sequence
  Description of Artificial Sequence: Synthetic oligonucleotide
  Sense strand starting at position 3145 of SEQ ID NO: 1883317
cucgguuaucuuuguauuu

SEQ ID NO: 2185079 - RNA, 19 nt, Artificial Sequence
  Description of Artificial Sequence: Synthetic oligonucleotide
  Antisense strand to SEQ ID NO: 2185078
aaauacaaagauaaccgag

SEQ ID NO: 2185080 - RNA, 19 nt, Artificial Sequence
  Description of Artificial Sequence: Synthetic oligonucleotide
  Sense strand starting at position 3168 of SEQ ID NO: 1883317
caguaagauuccguuaagu

SEQ ID NO: 2185081 - RNA, 19 nt, Artificial Sequence
  Description of Artificial Sequence: Synthetic oligonucleotide
  Antisense strand to SEQ ID NO: 2185080
acuuaacggaaucuuacug

SEQ ID NO: 2185082 - RNA, 19 nt, Artificial Sequence
  Description of Artificial Sequence: Synthetic oligonucleotide
  Sense strand starting at position 3170 of SEQ ID NO: 1883317
guaagauuccguuaagucg

SEQ ID NO: 2185083 - RNA, 19 nt, Artificial Sequence
  Description of Artificial Sequence: Synthetic oligonucleotide
  Antisense strand to SEQ ID NO: 2185082
cgacuuaacggaaucuuac

SEQ ID NO: 2185084 - RNA, 19 nt, Artificial Sequence
  Description of Artificial Sequence: Synthetic oligonucleotide
  Sense strand starting at position 3473 of SEQ ID NO: 1883317
ccugacaucugcuugaaau

SEQ ID NO: 2185085 - RNA, 19 nt, Artificial Sequence
  Description of Artificial Sequence: Synthetic oligonucleotide
  Antisense strand to SEQ ID NO: 2185084
auuucaagcagaugucagg

SEQ ID NO: 2185086 - RNA, 19 nt, Artificial Sequence
  Description of Artificial Sequence: Synthetic oligonucleotide
  Sense strand starting at position 3474 of SEQ ID NO: 1883317
cugacaucugcuugaaaua

SEQ ID NO: 2185087 - RNA, 19 nt, Artificial Sequence
  Description of Artificial Sequence: Synthetic oligonucleotide
  Antisense strand to SEQ ID NO: 2185086
uauuucaagcagaugucag

SEQ ID NO: 2185088 - RNA, 19 nt, Artificial Sequence
  Description of Artificial Sequence: Synthetic oligonucleotide
  Sense strand starting at position 3475 of SEQ ID NO: 1883317
ugacaucugcuugaaauau

SEQ ID NO: 2185089 - RNA, 19 nt, Artificial Sequence
  Description of Artificial Sequence: Synthetic oligonucleotide
  Antisense strand to SEQ ID NO: 2185088
auauuucaagcagauguca

SEQ ID NO: 2185090 - RNA, 19 nt, Artificial Sequence
  Description of Artificial Sequence: Synthetic oligonucleotide
  Sense strand starting at position 3790 of SEQ ID NO: 1883317
ccaguuuauugaccuggga

SEQ ID NO: 2185091 - RNA, 19 nt, Artificial Sequence
  Description of Artificial Sequence: Synthetic oligonucleotide
  Antisense strand to SEQ ID NO: 2185090
ucccaggucaauaaacugg

SEQ ID NO: 2185092 - RNA, 19 nt, Artificial Sequence
  Description of Artificial Sequence: Synthetic oligonucleotide
  Sense strand starting at position 3792 of SEQ ID NO: 1883317
aguuuauugaccugggaug

SEQ ID NO: 2185093 - RNA, 19 nt, Artificial Sequence
  Description of Artificial Sequence: Synthetic oligonucleotide
  Antisense strand to SEQ ID NO: 2185092
caucccaggucaauaaacu

SEQ ID NO: 2185094 - RNA, 19 nt, Artificial Sequence
  Description of Artificial Sequence: Synthetic oligonucleotide
  Sense strand starting at position 3817 of SEQ ID NO: 1883317
ugcuaaagaucgucaacga

SEQ ID NO: 2185095 - RNA, 19 nt, Artificial Sequence
  Description of Artificial Sequence: Synthetic oligonucleotide
  Antisense strand to SEQ ID NO: 2185094
ucguugacgaucuuuagca

SEQ ID NO: 2185096 - RNA, 19 nt, Artificial Sequence
  Description of Artificial Sequence: Synthetic oligonucleotide
  Sense strand starting at position 41 of SEQ ID NO: 1883319
ccuuucugacccugagaug

SEQ ID NO: 2185097 - RNA, 19 nt, Artificial Sequence
  Description of Artificial Sequence: Synthetic oligonucleotide
  Antisense strand to SEQ ID NO: 2185096
caucucagggucagaaagg

SEQ ID NO: 2185098 - RNA, 19 nt, Artificial Sequence
  Description of Artificial Sequence: Synthetic oligonucleotide
  Sense strand starting at position 167 of SEQ ID NO: 1883319
cucuaaucuugauccggaa

SEQ ID NO: 2185099 - RNA, 19 nt, Artificial Sequence
  Description of Artificial Sequence: Synthetic oligonucleotide
  Antisense strand to SEQ ID NO: 2185098
uuccggaucaagauuagag

SEQ ID NO: 2185100 - RNA, 19 nt, Artificial Sequence
  Description of Artificial Sequence: Synthetic oligonucleotide
  Sense strand starting at position 314 of SEQ ID NO: 1883319
gccagagccgcuguuaauu

SEQ ID NO: 2185101 - RNA, 19 nt, Artificial Sequence
  Description of Artificial Sequence: Synthetic oligonucleotide
  Antisense strand to SEQ ID NO: 2185100
aauuaacagcggcucuggc

SEQ ID NO: 2185102 - RNA, 19 nt, Artificial Sequence
  Description of Artificial Sequence: Synthetic oligonucleotide
  Sense strand starting at position 358 of SEQ ID NO: 1883319
gugcgugugccugcguaua

SEQ ID NO: 2185103 - RNA, 19 nt, Artificial Sequence
  Description of Artificial Sequence: Synthetic oligonucleotide
  Antisense strand to SEQ ID NO: 2185102
uauacgcaggcacacgcac

SEQ ID NO: 2185104 - RNA, 19 nt, Artificial Sequence
  Description of Artificial Sequence: Synthetic oligonucleotide
  Sense strand starting at position 370 of SEQ ID NO: 1883319
gcguauacauaugcauaua

SEQ ID NO: 2185105 - RNA, 19 nt, Artificial Sequence
  Description of Artificial Sequence: Synthetic oligonucleotide
  Antisense strand to SEQ ID NO: 2185104
uauaugcauauguauacgc

SEQ ID NO: 2185106 - RNA, 19 nt, Artificial Sequence
  Description of Artificial Sequence: Synthetic oligonucleotide
  Sense strand starting at position 1351 of SEQ ID NO: 1883319
ggagcaugcgagggauaca

SEQ ID NO: 2185107 - RNA, 19 nt, Artificial Sequence
  Description of Artificial Sequence: Synthetic oligonucleotide
  Antisense strand to SEQ ID NO: 2185106
uguaucccucgcaugcucc

SEQ ID NO: 2185108 - RNA, 19 nt, Artificial Sequence
  Description of Artificial Sequence: Synthetic oligonucleotide
  Sense strand starting at position 1766 of SEQ ID NO: 1883319
cgaaacgaucgaugagaga

SEQ ID NO: 2185109 - RNA, 19 nt, Artificial Sequence
  Description of Artificial Sequence: Synthetic oligonucleotide
  Antisense strand to SEQ ID NO: 2185108
ucucucaucgaucguuucg

SEQ ID NO: 2185110 - RNA, 19 nt, Artificial Sequence
  Description of Artificial Sequence: Synthetic oligonucleotide
  Sense strand starting at position 1992 of SEQ ID NO: 1883319
cucgcuugcugauccagaa

SEQ ID NO: 2185111 - RNA, 19 nt, Artificial Sequence
  Description of Artificial Sequence: Synthetic oligonucleotide
  Antisense strand to SEQ ID NO: 2185110
uucuggaucagcaagcgag

SEQ ID NO: 2185112 - RNA, 19 nt, Artificial Sequence
  Description of Artificial Sequence: Synthetic oligonucleotide
  Sense strand starting at position 1996 of SEQ ID NO: 1883319
cuugcugauccagaauuag

SEQ ID NO: 2185113 - RNA, 19 nt, Artificial Sequence
  Description of Artificial Sequence: Synthetic oligonucleotide
  Antisense strand to SEQ ID NO: 2185112
cuaauucuggaucagcaag

SEQ ID NO: 2185114 - RNA, 19 nt, Artificial Sequence
  Description of Artificial Sequence: Synthetic oligonucleotide
  Sense strand starting at position 2002 of SEQ ID NO: 1883319
gauccagaauuagggauua

SEQ ID NO: 2185115 - RNA, 19 nt, Artificial Sequence
  Description of Artificial Sequence: Synthetic oligonucleotide
  Antisense strand to SEQ ID NO: 2185114
uaaucccuaauucuggauc

SEQ ID NO: 2185116 - RNA, 19 nt, Artificial Sequence
  Description of Artificial Sequence: Synthetic oligonucleotide
  Sense strand starting at position 2015 of SEQ ID NO: 1883319
ggauuaauggcucgcucca

SEQ ID NO: 2185117 - RNA, 19 nt, Artificial Sequence
  Description of Artificial Sequence: Synthetic oligonucleotide
  Antisense strand to SEQ ID NO: 2185116
uggagcgagccauuaaucc

SEQ ID NO: 2185118 - RNA, 19 nt, Artificial Sequence
  Description of Artificial Sequence: Synthetic oligonucleotide
  Sense strand starting at position 2100 of SEQ ID NO: 1883319
gacagauguuggcucccaa

SEQ ID NO: 2185119 - RNA, 19 nt, Artificial Sequence
  Description of Artificial Sequence: Synthetic oligonucleotide
  Antisense strand to SEQ ID NO: 2185118
uugggagccaacaucuguc

SEQ ID NO: 2185120 - RNA, 19 nt, Artificial Sequence
  Description of Artificial Sequence: Synthetic oligonucleotide
  Sense strand starting at position 2130 of SEQ ID NO: 1883319
gcucgcuguguccuugaaa

SEQ ID NO: 2185121 - RNA, 19 nt, Artificial Sequence
  Description of Artificial Sequence: Synthetic oligonucleotide
  Antisense strand to SEQ ID NO: 2185120
uuucaaggacacagcgagc

SEQ ID NO: 2185122 - RNA, 19 nt, Artificial Sequence
  Description of Artificial Sequence: Synthetic oligonucleotide
  Sense strand starting at position 2133 of SEQ ID NO: 1883319
cgcuguguccuugaaacca

SEQ ID NO: 2185123 - RNA, 19 nt, Artificial Sequence
  Description of Artificial Sequence: Synthetic oligonucleotide
  Antisense strand to SEQ ID NO: 2185122
ugguuucaaggacacagcg

SEQ ID NO: 2185124 - RNA, 19 nt, Artificial Sequence
  Description of Artificial Sequence: Synthetic oligonucleotide
  Sense strand starting at position 2404 of SEQ ID NO: 1883319
gucgacaccuuaucuagau

SEQ ID NO: 2185125 - RNA, 19 nt, Artificial Sequence
  Description of Artificial Sequence: Synthetic oligonucleotide
  Antisense strand to SEQ ID NO: 2185124
aucuagauaaggugucgac

SEQ ID NO: 2185126 - RNA, 19 nt, Artificial Sequence
  Description of Artificial Sequence: Synthetic oligonucleotide
  Sense strand starting at position 2630 of SEQ ID NO: 1883319
uguuuaaucuuaucacgaa

SEQ ID NO: 2185127 - RNA, 19 nt, Artificial Sequence
  Description of Artificial Sequence: Synthetic oligonucleotide
  Antisense strand to SEQ ID NO: 2185126
uucgugauaagauuaaaca

SEQ ID NO: 2185128 - RNA, 19 nt, Artificial Sequence
  Description of Artificial Sequence: Synthetic oligonucleotide
  Sense strand starting at position 2637 of SEQ ID NO: 1883319
ucuuaucacgaaugccauu

SEQ ID NO: 2185129 - RNA, 19 nt, Artificial Sequence
  Description of Artificial Sequence: Synthetic oligonucleotide
  Antisense strand to SEQ ID NO: 2185128
aauggcauucgugauaaga

SEQ ID NO: 2185130 - RNA, 19 nt, Artificial Sequence
  Description of Artificial Sequence: Synthetic oligonucleotide
  Sense strand starting at position 2647 of SEQ ID NO: 1883319
aaugccauuccggacgaau

SEQ ID NO: 2185131 - RNA, 19 nt, Artificial Sequence
  Description of Artificial Sequence: Synthetic oligonucleotide
  Antisense strand to SEQ ID NO: 2185130
auucguccggaauggcauu

SEQ ID NO: 2185132 - RNA, 19 nt, Artificial Sequence
  Description of Artificial Sequence: Synthetic oligonucleotide
  Sense strand starting at position 2649 of SEQ ID NO: 1883319
ugccauuccggacgaaugu

SEQ ID NO: 2185133 - RNA, 19 nt, Artificial Sequence
  Description of Artificial Sequence: Synthetic oligonucleotide
  Antisense strand to SEQ ID NO: 2185132
acauucguccggaauggca

SEQ ID NO: 2185134 - RNA, 19 nt, Artificial Sequence
  Description of Artificial Sequence: Synthetic oligonucleotide
  Sense strand starting at position 2810 of SEQ ID NO: 1883319
cuuugaauacguugucuaa

SEQ ID NO: 2185135 - RNA, 19 nt, Artificial Sequence
  Description of Artificial Sequence: Synthetic oligonucleotide
  Antisense strand to SEQ ID NO: 2185134
uuagacaacguauucaaag

SEQ ID NO: 2185136 - RNA, 19 nt, Artificial Sequence
  Description of Artificial Sequence: Synthetic oligonucleotide
  Sense strand starting at position 2921 of SEQ ID NO: 1883319
auagccaaaucugaugaau

SEQ ID NO: 2185137 - RNA, 19 nt, Artificial Sequence
  Description of Artificial Sequence: Synthetic oligonucleotide
  Antisense strand to SEQ ID NO: 2185136
auucaucagauuuggcuau

SEQ ID NO: 2185138 - RNA, 19 nt, Artificial Sequence
  Description of Artificial Sequence: Synthetic oligonucleotide
  Sense strand starting at position 3071 of SEQ ID NO: 1883319
gccuuuacaggucacacua

SEQ ID NO: 2185139 - RNA, 19 nt, Artificial Sequence
  Description of Artificial Sequence: Synthetic oligonucleotide
  Antisense strand to SEQ ID NO: 2185138
uagugugaccuguaaaggc

SEQ ID NO: 2185140 - RNA, 19 nt, Artificial Sequence
  Description of Artificial Sequence: Synthetic oligonucleotide
  Sense strand starting at position 3090 of SEQ ID NO: 1883319
aagucagguuaugaaauaa

SEQ ID NO: 2185141 - RNA, 19 nt, Artificial Sequence
  Description of Artificial Sequence: Synthetic oligonucleotide
  Antisense strand to SEQ ID NO: 2185140
uuauuucauaaccugacuu

SEQ ID NO: 2185142 - RNA, 19 nt, Artificial Sequence
  Description of Artificial Sequence: Synthetic oligonucleotide
  Sense strand starting at position 3276 of SEQ ID NO: 1883319
ccaauccugugucccaaau

SEQ ID NO: 2185143 - RNA, 19 nt, Artificial Sequence
  Description of Artificial Sequence: Synthetic oligonucleotide
  Antisense strand to SEQ ID NO: 2185142
auuugggacacaggauugg

SEQ ID NO: 2185144 - RNA, 19 nt, Artificial Sequence
  Description of Artificial Sequence: Synthetic oligonucleotide
  Sense strand starting at position 3316 of SEQ ID NO: 1883319
aucugugacuuucuuggaa

SEQ ID NO: 2185145 - RNA, 19 nt, Artificial Sequence
  Description of Artificial Sequence: Synthetic oligonucleotide
  Antisense strand to SEQ ID NO: 2185144
uuccaagaaagucacagau

SEQ ID NO: 2185146 - RNA, 19 nt, Artificial Sequence
  Description of Artificial Sequence: Synthetic oligonucleotide
  Sense strand starting at position 3354 of SEQ ID NO: 1883319
acaacauugcacugucagu

SEQ ID NO: 2185147 - RNA, 19 nt, Artificial Sequence
  Description of Artificial Sequence: Synthetic oligonucleotide
  Antisense strand to SEQ ID NO: 2185146
acugacagugcaauguugu

SEQ ID NO: 2185148 - RNA, 19 nt, Artificial Sequence
  Description of Artificial Sequence: Synthetic oligonucleotide
  Sense strand starting at position 3359 of SEQ ID NO: 1883319
auugcacugucaguuauag

SEQ ID NO: 2185149 - RNA, 19 nt, Artificial Sequence
  Description of Artificial Sequence: Synthetic oligonucleotide
  Antisense strand to SEQ ID NO: 2185148
cuauaacugacagugcaau

SEQ ID NO: 2185150 - RNA, 19 nt, Artificial Sequence
  Description of Artificial Sequence: Synthetic oligonucleotide
  Sense strand starting at position 3361 of SEQ ID NO: 1883319
ugcacugucaguuauagag

SEQ ID NO: 2185151 - RNA, 19 nt, Artificial Sequence
  Description of Artificial Sequence: Synthetic oligonucleotide
  Antisense strand to SEQ ID NO: 2185150
cucuauaacugacagugca

SEQ ID NO: 2185152 - RNA, 19 nt, Artificial Sequence
  Description of Artificial Sequence: Synthetic oligonucleotide
  Sense strand starting at position 3365 of SEQ ID NO: 1883319
cugucaguuauagaguaca

SEQ ID NO: 2185153 - RNA, 19 nt, Artificial Sequence
  Description of Artificial Sequence: Synthetic oligonucleotide
  Antisense strand to SEQ ID NO: 2185152
uguacucuauaacugacag

SEQ ID NO: 2185154 - RNA, 19 nt, Artificial Sequence
  Description of Artificial Sequence: Synthetic oligonucleotide
  Sense strand starting at position 3401 of SEQ ID NO: 1883319
gaaggaauagccggauuau

SEQ ID NO: 2185155 - RNA, 19 nt, Artificial Sequence
  Description of Artificial Sequence: Synthetic oligonucleotide
  Antisense strand to SEQ ID NO: 2185154
auaauccggcuauuccuuc

SEQ ID NO: 2185156 - RNA, 19 nt, Artificial Sequence
  Description of Artificial Sequence: Synthetic oligonucleotide
  Sense strand starting at position 3410 of SEQ ID NO: 1883319
gccggauuauaucuccauu

SEQ ID NO: 2185157 - RNA, 19 nt, Artificial Sequence
  Description of Artificial Sequence: Synthetic oligonucleotide
  Antisense strand to SEQ ID NO: 2185156
aauggagauauaauccggc

SEQ ID NO: 2185158 - RNA, 19 nt, Artificial Sequence
  Description of Artificial Sequence: Synthetic oligonucleotide
  Sense strand starting at position 3443 of SEQ ID NO: 1883319
cuaucaaaguggcauuuaa

SEQ ID NO: 2185159 - RNA, 19 nt, Artificial Sequence
  Description of Artificial Sequence: Synthetic oligonucleotide
  Antisense strand to SEQ ID NO: 2185158
uuaaaugccacuuugauag

SEQ ID NO: 2185160 - RNA, 19 nt, Artificial Sequence
  Description of Artificial Sequence: Synthetic oligonucleotide
  Sense strand starting at position 3649 of SEQ ID NO: 1883319
aaaggugggcuuuaucuua

SEQ ID NO: 2185161 - RNA, 19 nt, Artificial Sequence
  Description of Artificial Sequence: Synthetic oligonucleotide
  Antisense strand to SEQ ID NO: 2185160
uaagauaaagcccaccuuu

SEQ ID NO: 2185162 - RNA, 19 nt, Artificial Sequence
  Description of Artificial Sequence: Synthetic oligonucleotide
  Sense strand starting at position 3734 of SEQ ID NO: 1883319
cuuugaaacuugguagaau

SEQ ID NO: 2185163 - RNA, 19 nt, Artificial Sequence
  Description of Artificial Sequence: Synthetic oligonucleotide
  Antisense strand to SEQ ID NO: 2185162
auucuaccaaguuucaaag

SEQ ID NO: 2185164 - RNA, 19 nt, Artificial Sequence
  Description of Artificial Sequence: Synthetic oligonucleotide
  Sense strand starting at position 3735 of SEQ ID NO: 1883319
uuugaaacuugguagaaua

SEQ ID NO: 2185165 - RNA, 19 nt, Artificial Sequence
  Description of Artificial Sequence: Synthetic oligonucleotide
  Antisense strand to SEQ ID NO: 2185164
uauucuaccaaguuucaaa

SEQ ID NO: 2185166 - RNA, 19 nt, Artificial Sequence
  Description of Artificial Sequence: Synthetic oligonucleotide
  Sense strand starting at position 3743 of SEQ ID NO: 1883319
uugguagaauaaguuugaa

SEQ ID NO: 2185167 - RNA, 19 nt, Artificial Sequence
  Description of Artificial Sequence: Synthetic oligonucleotide
  Antisense strand to SEQ ID NO: 2185166
uucaaacuuauucuaccaa

SEQ ID NO: 2185168 - RNA, 19 nt, Artificial Sequence
  Description of Artificial Sequence: Synthetic oligonucleotide
  Sense strand starting at position 3746 of SEQ ID NO: 1883319
guagaauaaguuugaaaug

SEQ ID NO: 2185169 - RNA, 19 nt, Artificial Sequence
  Description of Artificial Sequence: Synthetic oligonucleotide
  Antisense strand to SEQ ID NO: 2185168
cauuucaaacuuauucuac

SEQ ID NO: 2185170 - RNA, 19 nt, Artificial Sequence
  Description of Artificial Sequence: Synthetic oligonucleotide
  Sense strand starting at position 3818 of SEQ ID NO: 1883319
ucuaacaugcuuugaaugu

SEQ ID NO: 2185171 - RNA, 19 nt, Artificial Sequence
  Description of Artificial Sequence: Synthetic oligonucleotide
  Antisense strand to SEQ ID NO: 2185170
acauucaaagcauguuaga

SEQ ID NO: 2185172 - RNA, 19 nt, Artificial Sequence
  Description of Artificial Sequence: Synthetic oligonucleotide
  Sense strand starting at position 3822 of SEQ ID NO: 1883319
acaugcuuugaauguaaac

SEQ ID NO: 2185173 - RNA, 19 nt, Artificial Sequence
  Description of Artificial Sequence: Synthetic oligonucleotide
  Antisense strand to SEQ ID NO: 2185172
guuuacauucaaagcaugu

SEQ ID NO: 2185174 - RNA, 19 nt, Artificial Sequence
  Description of Artificial Sequence: Synthetic oligonucleotide
  Sense strand starting at position 3892 of SEQ ID NO: 1883319
aauauuaguucgcugucca

SEQ ID NO: 2185175 - RNA, 19 nt, Artificial Sequence
  Description of Artificial Sequence: Synthetic oligonucleotide
  Antisense strand to SEQ ID NO: 2185174
uggacagcgaacuaauauu

SEQ ID NO: 2185176 - RNA, 19 nt, Artificial Sequence
  Description of Artificial Sequence: Synthetic oligonucleotide
  Sense strand starting at position 22 of SEQ ID NO: 1883318
ggaaaugcuauaggcuuua

SEQ ID NO: 2185177 - RNA, 19 nt, Artificial Sequence
  Description of Artificial Sequence: Synthetic oligonucleotide
  Antisense strand to SEQ ID NO: 2185176
uaaagccuauagcauuucc

SEQ ID NO: 2185178 - RNA, 19 nt, Artificial Sequence
  Description of Artificial Sequence: Synthetic oligonucleotide
  Sense strand starting at position 103 of SEQ ID NO: 1883318
ggaagcagauaguuugcau

SEQ ID NO: 2185179 - RNA, 19 nt, Artificial Sequence
  Description of Artificial Sequence: Synthetic oligonucleotide
  Antisense strand to SEQ ID NO: 2185178
augcaaacuaucugcuucc

SEQ ID NO: 2185180 - RNA, 19 nt, Artificial Sequence
  Description of Artificial Sequence: Synthetic oligonucleotide
  Sense strand starting at position 235 of SEQ ID NO: 1883318
agacauagacauuguugua

SEQ ID NO: 2185181 - RNA, 19 nt, Artificial Sequence
  Description of Artificial Sequence: Synthetic oligonucleotide
  Antisense strand to SEQ ID NO: 2185180
uacaacaaugucuaugucu

SEQ ID NO: 2185182 - RNA, 19 nt, Artificial Sequence
  Description of Artificial Sequence: Synthetic oligonucleotide
  Sense strand starting at position 280 of SEQ ID NO: 1883318
ugguuuaacaagugcagaa

SEQ ID NO: 2185183 - RNA, 19 nt, Artificial Sequence
  Description of Artificial Sequence: Synthetic oligonucleotide
  Antisense strand to SEQ ID NO: 2185182
uucugcacuuguuaaacca

SEQ ID NO: 2185184 - RNA, 19 nt, Artificial Sequence
  Description of Artificial Sequence: Synthetic oligonucleotide
  Sense strand starting at position 418 of SEQ ID NO: 1883318
acacgcuaagagcauuaaa

SEQ ID NO: 2185185 - RNA, 19 nt, Artificial Sequence
  Description of Artificial Sequence: Synthetic oligonucleotide
  Antisense strand to SEQ ID NO: 2185184
uuuaaugcucuuagcgugu

SEQ ID NO: 2185186 - RNA, 19 nt, Artificial Sequence
  Description of Artificial Sequence: Synthetic oligonucleotide
  Sense strand starting at position 421 of SEQ ID NO: 1883318
cgcuaagagcauuaaacua

SEQ ID NO: 2185187 - RNA, 19 nt, Artificial Sequence
  Description of Artificial Sequence: Synthetic oligonucleotide
  Antisense strand to SEQ ID NO: 2185186
uaguuuaaugcucuuagcg

SEQ ID NO: 2185188 - RNA, 19 nt, Artificial Sequence
  Description of Artificial Sequence: Synthetic oligonucleotide
  Sense strand starting at position 490 of SEQ ID NO: 1883318
guggcuaagaugcggaaua

SEQ ID NO: 2185189 - RNA, 19 nt, Artificial Sequence
  Description of Artificial Sequence: Synthetic oligonucleotide
  Antisense strand to SEQ ID NO: 2185188
uauuccgcaucuuagccac

SEQ ID NO: 2185190 - RNA, 19 nt, Artificial Sequence
  Description of Artificial Sequence: Synthetic oligonucleotide
  Sense strand starting at position 492 of SEQ ID NO: 1883318
ggcuaagaugcggaauaau

SEQ ID NO: 2185191 - RNA, 19 nt, Artificial Sequence
  Description of Artificial Sequence: Synthetic oligonucleotide
  Antisense strand to SEQ ID NO: 2185190
auuauuccgcaucuuagcc

SEQ ID NO: 2185192 - RNA, 19 nt, Artificial Sequence
  Description of Artificial Sequence: Synthetic oligonucleotide
  Sense strand starting at position 646 of SEQ ID NO: 1883318
aacguaauuguccuucguu

SEQ ID NO: 2185193 - RNA, 19 nt, Artificial Sequence
  Description of Artificial Sequence: Synthetic oligonucleotide
  Antisense strand to SEQ ID NO: 2185192
aacgaaggacaauuacguu

SEQ ID NO: 2185194 - RNA, 19 nt, Artificial Sequence
  Description of Artificial Sequence: Synthetic oligonucleotide
  Sense strand starting at position 765 of SEQ ID NO: 1883318
gcuguugaucuuuggagga

SEQ ID NO: 2185195 - RNA, 19 nt, Artificial Sequence
  Description of Artificial Sequence: Synthetic oligonucleotide
  Antisense strand to SEQ ID NO: 2185194
uccuccaaagaucaacagc

SEQ ID NO: 2185196 - RNA, 19 nt, Artificial Sequence
  Description of Artificial Sequence: Synthetic oligonucleotide
  Sense strand starting at position 793 of SEQ ID NO: 1883318
gcacaaaccggucauaucu

SEQ ID NO: 2185197 - RNA, 19 nt, Artificial Sequence
  Description of Artificial Sequence: Synthetic oligonucleotide
  Antisense strand to SEQ ID NO: 2185196
agauaugaccgguuugugc

SEQ ID NO: 2185198 - RNA, 19 nt, Artificial Sequence
  Description of Artificial Sequence: Synthetic oligonucleotide
  Sense strand starting at position 804 of SEQ ID NO: 1883318
ucauaucugugcuuugaua

SEQ ID NO: 2185199 - RNA, 19 nt, Artificial Sequence
  Description of Artificial Sequence: Synthetic oligonucleotide
  Antisense strand to SEQ ID NO: 2185198
uaucaaagcacagauauga

SEQ ID NO: 2185200 - RNA, 19 nt, Artificial Sequence
  Description of Artificial Sequence: Synthetic oligonucleotide
  Sense strand starting at position 806 of SEQ ID NO: 1883318
auaucugugcuuugauaca

SEQ ID NO: 2185201 - RNA, 19 nt, Artificial Sequence
  Description of Artificial Sequence: Synthetic oligonucleotide
  Antisense strand to SEQ ID NO: 2185200
uguaucaaagcacagauau

SEQ ID NO: 2185202 - RNA, 19 nt, Artificial Sequence
  Description of Artificial Sequence: Synthetic oligonucleotide
  Sense strand starting at position 927 of SEQ ID NO: 1883318
cgagaaggcuacuuucuca

SEQ ID NO: 2185203 - RNA, 19 nt, Artificial Sequence
  Description of Artificial Sequence: Synthetic oligonucleotide
  Antisense strand to SEQ ID NO: 2185202
ugagaaaguagccuucucg

SEQ ID NO: 2185204 - RNA, 19 nt, Artificial Sequence
  Description of Artificial Sequence: Synthetic oligonucleotide
  Sense strand starting at position 1200 of SEQ ID NO: 1883318
ucccauauuugagauggag

SEQ ID NO: 2185205 - RNA, 19 nt, Artificial Sequence
  Description of Artificial Sequence: Synthetic oligonucleotide
  Antisense strand to SEQ ID NO: 2185204
cuccaucucaaauauggga

SEQ ID NO: 2185206 - RNA, 19 nt, Artificial Sequence
  Description of Artificial Sequence: Synthetic oligonucleotide
  Sense strand starting at position 1424 of SEQ ID NO: 1883318
uagggaucucugugaccug

SEQ ID NO: 2185207 - RNA, 19 nt, Artificial Sequence
  Description of Artificial Sequence: Synthetic oligonucleotide
  Antisense strand to SEQ ID NO: 2185206
caggucacagagaucccua

SEQ ID NO: 2185208 - RNA, 19 nt, Artificial Sequence
  Description of Artificial Sequence: Synthetic oligonucleotide
  Sense strand starting at position 1645 of SEQ ID NO: 1883318
aaguguaagcuucgaagaa

SEQ ID NO: 2185209 - RNA, 19 nt, Artificial Sequence
  Description of Artificial Sequence: Synthetic oligonucleotide
  Antisense strand to SEQ ID NO: 2185208
uucuucgaagcuuacacuu

SEQ ID NO: 2185210 - RNA, 19 nt, Artificial Sequence
  Description of Artificial Sequence: Synthetic oligonucleotide
  Sense strand starting at position 2236 of SEQ ID NO: 1883318
ccugcaucccaaugaguua

SEQ ID NO: 2185211 - RNA, 19 nt, Artificial Sequence
  Description of Artificial Sequence: Synthetic oligonucleotide
  Antisense strand to SEQ ID NO: 2185210
uaacucauugggaugcagg

SEQ ID NO: 2185212 - RNA, 19 nt, Artificial Sequence
  Description of Artificial Sequence: Synthetic oligonucleotide
  Sense strand starting at position 2239 of SEQ ID NO: 1883318
gcaucccaaugaguuaaau

SEQ ID NO: 2185213 - RNA, 19 nt, Artificial Sequence
  Description of Artificial Sequence: Synthetic oligonucleotide
  Antisense strand to SEQ ID NO: 2185212
auuuaacucauugggaugc

SEQ ID NO: 2185214 - RNA, 19 nt, Artificial Sequence
  Description of Artificial Sequence: Synthetic oligonucleotide
  Sense strand starting at position 2248 of SEQ ID NO: 1883318
ugaguuaaaucagucacuu

SEQ ID NO: 2185215 - RNA, 19 nt, Artificial Sequence
  Description of Artificial Sequence: Synthetic oligonucleotide
  Antisense strand to SEQ ID NO: 2185214
aagugacugauuuaacuca

SEQ ID NO: 2185216 - RNA, 19 nt, Artificial Sequence
  Description of Artificial Sequence: Synthetic oligonucleotide
  Sense strand starting at position 2322 of SEQ ID NO: 1883318
gcauuuagcugccuccaau

SEQ ID NO: 2185217 - RNA, 19 nt, Artificial Sequence
  Description of Artificial Sequence: Synthetic oligonucleotide
  Antisense strand to SEQ ID NO: 2185216
auuggaggcagcuaaaugc

SEQ ID NO: 2185218 - RNA, 19 nt, Artificial Sequence
  Description of Artificial Sequence: Synthetic oligonucleotide
  Sense strand starting at position 2480 of SEQ ID NO: 1883318
uguucuuaucaagggccua

SEQ ID NO: 2185219 - RNA, 19 nt, Artificial Sequence
  Description of Artificial Sequence: Synthetic oligonucleotide
  Antisense strand to SEQ ID NO: 2185218
uaggcccuugauaagaaca

SEQ ID NO: 2185220 - RNA, 19 nt, Artificial Sequence
  Description of Artificial Sequence: Synthetic oligonucleotide
  Sense strand starting at position 3168 of SEQ ID NO: 1883318
gccacugcuagggagaaau

SEQ ID NO: 2185221 - RNA, 19 nt, Artificial Sequence
  Description of Artificial Sequence: Synthetic oligonucleotide
  Antisense strand to SEQ ID NO: 2185220
auuucucccuagcaguggc

SEQ ID NO: 2185222 - RNA, 19 nt, Artificial Sequence
  Description of Artificial Sequence: Synthetic oligonucleotide
  Sense strand starting at position 3178 of SEQ ID NO: 1883318
gggagaaauuugggaauau

SEQ ID NO: 2185223 - RNA, 19 nt, Artificial Sequence
  Description of Artificial Sequence: Synthetic oligonucleotide
  Antisense strand to SEQ ID NO: 2185222
auauucccaaauuucuccc

SEQ ID NO: 2185224 - RNA, 19 nt, Artificial Sequence
  Description of Artificial Sequence: Synthetic oligonucleotide
  Sense strand starting at position 3197 of SEQ ID NO: 1883318
uuucuuguuccggagagac

SEQ ID NO: 2185225 - RNA, 19 nt, Artificial Sequence
  Description of Artificial Sequence: Synthetic oligonucleotide
  Antisense strand to SEQ ID NO: 2185224
gucucuccggaacaagaaa

SEQ ID NO: 2185226 - RNA, 19 nt, Artificial Sequence
  Description of Artificial Sequence: Synthetic oligonucleotide
  Sense strand starting at position 3209 of SEQ ID NO: 1883318
gagagacgcuugucuggaa

SEQ ID NO: 2185227 - RNA, 19 nt, Artificial Sequence
  Description of Artificial Sequence: Synthetic oligonucleotide
  Antisense strand to SEQ ID NO: 2185226
uuccagacaagcgucucuc

SEQ ID NO: 2185228 - RNA, 19 nt, Artificial Sequence
  Description of Artificial Sequence: Synthetic oligonucleotide
  Sense strand starting at position 3213 of SEQ ID NO: 1883318
gacgcuugucuggaagauc

SEQ ID NO: 2185229 - RNA, 19 nt, Artificial Sequence
  Description of Artificial Sequence: Synthetic oligonucleotide
  Antisense strand to SEQ ID NO: 2185228
gaucuuccagacaagcguc

SEQ ID NO: 2185230 - RNA, 19 nt, Artificial Sequence
  Description of Artificial Sequence: Synthetic oligonucleotide
  Sense strand starting at position 3216 of SEQ ID NO: 1883318
gcuugucuggaagaucaug

SEQ ID NO: 2185231 - RNA, 19 nt, Artificial Sequence
  Description of Artificial Sequence: Synthetic oligonucleotide
  Antisense strand to SEQ ID NO: 2185230
caugaucuuccagacaagc

SEQ ID NO: 2185232 - RNA, 19 nt, Artificial Sequence
  Description of Artificial Sequence: Synthetic oligonucleotide
  Sense strand starting at position 3224 of SEQ ID NO: 1883318
ggaagaucaugagauguaa

SEQ ID NO: 2185233 - RNA, 19 nt, Artificial Sequence
  Description of Artificial Sequence: Synthetic oligonucleotide
  Antisense strand to SEQ ID NO: 2185232
uuacaucucaugaucuucc

SEQ ID NO: 2185234 - RNA, 19 nt, Artificial Sequence
  Description of Artificial Sequence: Synthetic oligonucleotide
  Sense strand starting at position 3246 of SEQ ID NO: 1883318
caugaauaucucgguuauc

SEQ ID NO: 2185235 - RNA, 19 nt, Artificial Sequence
  Description of Artificial Sequence: Synthetic oligonucleotide
  Antisense strand to SEQ ID NO: 2185234
gauaaccgagauauucaug

SEQ ID NO: 2185236 - RNA, 19 nt, Artificial Sequence
  Description of Artificial Sequence: Synthetic oligonucleotide
  Sense strand starting at position 3247 of SEQ ID NO: 1883318
augaauaucucgguuaucu

SEQ ID NO: 2185237 - RNA, 19 nt, Artificial Sequence
  Description of Artificial Sequence: Synthetic oligonucleotide
  Antisense strand to SEQ ID NO: 2185236
agauaaccgagauauucau

SEQ ID NO: 2185238 - RNA, 19 nt, Artificial Sequence
  Description of Artificial Sequence: Synthetic oligonucleotide
  Sense strand starting at position 3255 of SEQ ID NO: 1883318
cucgguuaucuuuguauuu

SEQ ID NO: 2185239 - RNA, 19 nt, Artificial Sequence
  Description of Artificial Sequence: Synthetic oligonucleotide
  Antisense strand to SEQ ID NO: 2185238
aaauacaaagauaaccgag

SEQ ID NO: 2185240 - RNA, 19 nt, Artificial Sequence
  Description of Artificial Sequence: Synthetic oligonucleotide
  Sense strand starting at position 3278 of SEQ ID NO: 1883318
caguaagauuccguuaagu

SEQ ID NO: 2185241 - RNA, 19 nt, Artificial Sequence
  Description of Artificial Sequence: Synthetic oligonucleotide
  Antisense strand to SEQ ID NO: 2185240
acuuaacggaaucuuacug

SEQ ID NO: 2185242 - RNA, 19 nt, Artificial Sequence
  Description of Artificial Sequence: Synthetic oligonucleotide
  Sense strand starting at position 3280 of SEQ ID NO: 1883318
guaagauuccguuaagucg

SEQ ID NO: 2185243 - RNA, 19 nt, Artificial Sequence
  Description of Artificial Sequence: Synthetic oligonucleotide
  Antisense strand to SEQ ID NO: 2185242
cgacuuaacggaaucuuac

SEQ ID NO: 2185244 - RNA, 19 nt, Artificial Sequence
  Description of Artificial Sequence: Synthetic oligonucleotide
  Sense strand starting at position 3583 of SEQ ID NO: 1883318
ccugacaucugcuugaaau

SEQ ID NO: 2185245 - RNA, 19 nt, Artificial Sequence
  Description of Artificial Sequence: Synthetic oligonucleotide
  Antisense strand to SEQ ID NO: 2185244
auuucaagcagaugucagg

SEQ ID NO: 2185246 - RNA, 19 nt, Artificial Sequence
  Description of Artificial Sequence: Synthetic oligonucleotide
  Sense strand starting at position 3584 of SEQ ID NO: 1883318
cugacaucugcuugaaaua

SEQ ID NO: 2185247 - RNA, 19 nt, Artificial Sequence
  Description of Artificial Sequence: Synthetic oligonucleotide
  Antisense strand to SEQ ID NO: 2185246
uauuucaagcagaugucag

SEQ ID NO: 2185248 - RNA, 19 nt, Artificial Sequence
  Description of Artificial Sequence: Synthetic oligonucleotide
  Sense strand starting at position 3585 of SEQ ID NO: 1883318
ugacaucugcuugaaauau

SEQ ID NO: 2185249 - RNA, 19 nt, Artificial Sequence
  Description of Artificial Sequence: Synthetic oligonucleotide
  Antisense strand to SEQ ID NO: 2185248
auauuucaagcagauguca

SEQ ID NO: 2185250 - RNA, 19 nt, Artificial Sequence
  Description of Artificial Sequence: Synthetic oligonucleotide
  Sense strand starting at position 3900 of SEQ ID NO: 1883318
ccaguuuauugaccuggga

SEQ ID NO: 2185251 - RNA, 19 nt, Artificial Sequence
  Description of Artificial Sequence: Synthetic oligonucleotide
  Antisense strand to SEQ ID NO: 2185250
ucccaggucaauaaacugg

SEQ ID NO: 2185252 - RNA, 19 nt, Artificial Sequence
  Description of Artificial Sequence: Synthetic oligonucleotide
  Sense strand starting at position 3902 of SEQ ID NO: 1883318
aguuuauugaccugggaug

SEQ ID NO: 2185253 - RNA, 19 nt, Artificial Sequence
  Description of Artificial Sequence: Synthetic oligonucleotide
  Antisense strand to SEQ ID NO: 2185252
caucccaggucaauaaacu

SEQ ID NO: 2185254 - RNA, 19 nt, Artificial Sequence
  Description of Artificial Sequence: Synthetic oligonucleotide
  Sense strand starting at position 3927 of SEQ ID NO: 1883318
ugcuaaagaucgucaacga

SEQ ID NO: 2185255 - RNA, 19 nt, Artificial Sequence
  Description of Artificial Sequence: Synthetic oligonucleotide
  Antisense strand to SEQ ID NO: 2185254
ucguugacgaucuuuagca

SEQ ID NO: 2185256 - RNA, 19 nt, Artificial Sequence
  Description of Artificial Sequence: Synthetic oligonucleotide
  Sense strand starting at position 47 of SEQ ID NO: 1883320
ccuuucugacccugagaug

SEQ ID NO: 2185257 - RNA, 19 nt, Artificial Sequence
  Description of Artificial Sequence: Synthetic oligonucleotide
  Antisense strand to SEQ ID NO: 2185256
caucucagggucagaaagg

SEQ ID NO: 2185258 - RNA, 19 nt, Artificial Sequence
  Description of Artificial Sequence: Synthetic oligonucleotide
  Sense strand starting at position 173 of SEQ ID NO: 1883320
cucuaaucuugauccggaa

SEQ ID NO: 2185259 - RNA, 19 nt, Artificial Sequence
  Description of Artificial Sequence: Synthetic oligonucleotide
  Antisense strand to SEQ ID NO: 2185258
uuccggaucaagauuagag

SEQ ID NO: 2185260 - RNA, 19 nt, Artificial Sequence
  Description of Artificial Sequence: Synthetic oligonucleotide
  Sense strand starting at position 320 of SEQ ID NO: 1883320
gccagagccgcuguuaauu

SEQ ID NO: 2185261 - RNA, 19 nt, Artificial Sequence
  Description of Artificial Sequence: Synthetic oligonucleotide
  Antisense strand to SEQ ID NO: 2185260
aauuaacagcggcucuggc

SEQ ID NO: 2185262 - RNA, 19 nt, Artificial Sequence
  Description of Artificial Sequence: Synthetic oligonucleotide
  Sense strand starting at position 364 of SEQ ID NO: 1883320
gugcgugugccugcguaua

SEQ ID NO: 2185263 - RNA, 19 nt, Artificial Sequence
  Description of Artificial Sequence: Synthetic oligonucleotide
  Antisense strand to SEQ ID NO: 2185262
uauacgcaggcacacgcac

SEQ ID NO: 2185264 - RNA, 19 nt, Artificial Sequence
  Description of Artificial Sequence: Synthetic oligonucleotide
  Sense strand starting at position 376 of SEQ ID NO: 1883320
gcguauacauaugcauaua

SEQ ID NO: 2185265 - RNA, 19 nt, Artificial Sequence
  Description of Artificial Sequence: Synthetic oligonucleotide
  Antisense strand to SEQ ID NO: 2185264
uauaugcauauguauacgc

SEQ ID NO: 2185266 - RNA, 19 nt, Artificial Sequence
  Description of Artificial Sequence: Synthetic oligonucleotide
  Sense strand starting at position 1357 of SEQ ID NO: 1883320
ggagcaugcgagggauaca

SEQ ID NO: 2185267 - RNA, 19 nt, Artificial Sequence
  Description of Artificial Sequence: Synthetic oligonucleotide
  Antisense strand to SEQ ID NO: 2185266
uguaucccucgcaugcucc

SEQ ID NO: 2185268 - RNA, 19 nt, Artificial Sequence
  Description of Artificial Sequence: Synthetic oligonucleotide
  Sense strand starting at position 1772 of SEQ ID NO: 1883320
cgaaacgaucgaugagaga

SEQ ID NO: 2185269 - RNA, 19 nt, Artificial Sequence
  Description of Artificial Sequence: Synthetic oligonucleotide
  Antisense strand to SEQ ID NO: 2185268
ucucucaucgaucguuucg

SEQ ID NO: 2185270 - RNA, 19 nt, Artificial Sequence
  Description of Artificial Sequence: Synthetic oligonucleotide
  Sense strand starting at position 1998 of SEQ ID NO: 1883320
cucgcuugcugauccagaa

SEQ ID NO: 2185271 - RNA, 19 nt, Artificial Sequence
  Description of Artificial Sequence: Synthetic oligonucleotide
  Antisense strand to SEQ ID NO: 2185270
uucuggaucagcaagcgag

SEQ ID NO: 2185272 - RNA, 19 nt, Artificial Sequence
  Description of Artificial Sequence: Synthetic oligonucleotide
  Sense strand starting at position 2002 of SEQ ID NO: 1883320
cuugcugauccagaauuag

SEQ ID NO: 2185273 - RNA, 19 nt, Artificial Sequence
  Description of Artificial Sequence: Synthetic oligonucleotide
  Antisense strand to SEQ ID NO: 2185272
cuaauucuggaucagcaag

SEQ ID NO: 2185274 - RNA, 19 nt, Artificial Sequence
  Description of Artificial Sequence: Synthetic oligonucleotide
  Sense strand starting at position 2008 of SEQ ID NO: 1883320
gauccagaauuagggauua

SEQ ID NO: 2185275 - RNA, 19 nt, Artificial Sequence
  Description of Artificial Sequence: Synthetic oligonucleotide
  Antisense strand to SEQ ID NO: 2185274
uaaucccuaauucuggauc

SEQ ID NO: 2185276 - RNA, 19 nt, Artificial Sequence
  Description of Artificial Sequence: Synthetic oligonucleotide
  Sense strand starting at position 2021 of SEQ ID NO: 1883320
ggauuaauggcucgcucca

SEQ ID NO: 2185277 - RNA, 19 nt, Artificial Sequence
  Description of Artificial Sequence: Synthetic oligonucleotide
  Antisense strand to SEQ ID NO: 2185276
uggagcgagccauuaaucc

SEQ ID NO: 2185278 - RNA, 19 nt, Artificial Sequence
  Description of Artificial Sequence: Synthetic oligonucleotide
  Sense strand starting at position 2106 of SEQ ID NO: 1883320
gacagauguuggcucccaa

SEQ ID NO: 2185279 - RNA, 19 nt, Artificial Sequence
  Description of Artificial Sequence: Synthetic oligonucleotide
  Antisense strand to SEQ ID NO: 2185278
uugggagccaacaucuguc

SEQ ID NO: 2185280 - RNA, 19 nt, Artificial Sequence
  Description of Artificial Sequence: Synthetic oligonucleotide
  Sense strand starting at position 2136 of SEQ ID NO: 1883320
gcucgcuguguccuugaaa

SEQ ID NO: 2185281 - RNA, 19 nt, Artificial Sequence
  Description of Artificial Sequence: Synthetic oligonucleotide
  Antisense strand to SEQ ID NO: 2185280
uuucaaggacacagcgagc

SEQ ID NO: 2185282 - RNA, 19 nt, Artificial Sequence
  Description of Artificial Sequence: Synthetic oligonucleotide
  Sense strand starting at position 2139 of SEQ ID NO: 1883320
cgcuguguccuugaaacca

SEQ ID NO: 2185283 - RNA, 19 nt, Artificial Sequence
  Description of Artificial Sequence: Synthetic oligonucleotide
  Antisense strand to SEQ ID NO: 2185282
ugguuucaaggacacagcg

SEQ ID NO: 2185284 - RNA, 19 nt, Artificial Sequence
  Description of Artificial Sequence: Synthetic oligonucleotide
  Sense strand starting at position 2410 of SEQ ID NO: 1883320
gucgacaccuuaucuagau

SEQ ID NO: 2185285 - RNA, 19 nt, Artificial Sequence
  Description of Artificial Sequence: Synthetic oligonucleotide
  Antisense strand to SEQ ID NO: 2185284
aucuagauaaggugucgac

SEQ ID NO: 2185286 - RNA, 19 nt, Artificial Sequence
  Description of Artificial Sequence: Synthetic oligonucleotide
  Sense strand starting at position 2636 of SEQ ID NO: 1883320
uguuuaaucuuaucacgaa

SEQ ID NO: 2185287 - RNA, 19 nt, Artificial Sequence
  Description of Artificial Sequence: Synthetic oligonucleotide
  Antisense strand to SEQ ID NO: 2185286
uucgugauaagauuaaaca

SEQ ID NO: 2185288 - RNA, 19 nt, Artificial Sequence
  Description of Artificial Sequence: Synthetic oligonucleotide
  Sense strand starting at position 2643 of SEQ ID NO: 1883320
ucuuaucacgaaugccauu

SEQ ID NO: 2185289 - RNA, 19 nt, Artificial Sequence
  Description of Artificial Sequence: Synthetic oligonucleotide
  Antisense strand to SEQ ID NO: 2185288
aauggcauucgugauaaga

SEQ ID NO: 2185290 - RNA, 19 nt, Artificial Sequence
  Description of Artificial Sequence: Synthetic oligonucleotide
  Sense strand starting at position 2653 of SEQ ID NO: 1883320
aaugccauuccggacgaau

SEQ ID NO: 2185291 - RNA, 19 nt, Artificial Sequence
  Description of Artificial Sequence: Synthetic oligonucleotide
  Antisense strand to SEQ ID NO: 2185290
auucguccggaauggcauu

SEQ ID NO: 2185292 - RNA, 19 nt, Artificial Sequence
  Description of Artificial Sequence: Synthetic oligonucleotide
  Sense strand starting at position 2655 of SEQ ID NO: 1883320
ugccauuccggacgaaugu

SEQ ID NO: 2185293 - RNA, 19 nt, Artificial Sequence
  Description of Artificial Sequence: Synthetic oligonucleotide
  Antisense strand to SEQ ID NO: 2185292
acauucguccggaauggca

SEQ ID NO: 2185294 - RNA, 19 nt, Artificial Sequence
  Description of Artificial Sequence: Synthetic oligonucleotide
  Sense strand starting at position 2816 of SEQ ID NO: 1883320
cuuugaauacguugucuaa

SEQ ID NO: 2185295 - RNA, 19 nt, Artificial Sequence
  Description of Artificial Sequence: Synthetic oligonucleotide
  Antisense strand to SEQ ID NO: 2185294
uuagacaacguauucaaag

SEQ ID NO: 2185296 - RNA, 19 nt, Artificial Sequence
  Description of Artificial Sequence: Synthetic oligonucleotide
  Sense strand starting at position 2927 of SEQ ID NO: 1883320
auagccaaaucugaugaau

SEQ ID NO: 2185297 - RNA, 19 nt, Artificial Sequence
  Description of Artificial Sequence: Synthetic oligonucleotide
  Antisense strand to SEQ ID NO: 2185296
auucaucagauuuggcuau

SEQ ID NO: 2185298 - RNA, 19 nt, Artificial Sequence
  Description of Artificial Sequence: Synthetic oligonucleotide
  Sense strand starting at position 3077 of SEQ ID NO: 1883320
gccuuuacaggucacacua

SEQ ID NO: 2185299 - RNA, 19 nt, Artificial Sequence
  Description of Artificial Sequence: Synthetic oligonucleotide
  Antisense strand to SEQ ID NO: 2185298
uagugugaccuguaaaggc

SEQ ID NO: 2185300 - RNA, 19 nt, Artificial Sequence
  Description of Artificial Sequence: Synthetic oligonucleotide
  Sense strand starting at position 3096 of SEQ ID NO: 1883320
aagucagguuaugaaauaa

SEQ ID NO: 2185301 - RNA, 19 nt, Artificial Sequence
  Description of Artificial Sequence: Synthetic oligonucleotide
  Antisense strand to SEQ ID NO: 2185300
uuauuucauaaccugacuu

SEQ ID NO: 2185302 - RNA, 19 nt, Artificial Sequence
  Description of Artificial Sequence: Synthetic oligonucleotide
  Sense strand starting at position 3282 of SEQ ID NO: 1883320
ccaauccugugucccaaau

SEQ ID NO: 2185303 - RNA, 19 nt, Artificial Sequence
  Description of Artificial Sequence: Synthetic oligonucleotide
  Antisense strand to SEQ ID NO: 2185302
auuugggacacaggauugg

SEQ ID NO: 2185304 - RNA, 19 nt, Artificial Sequence
  Description of Artificial Sequence: Synthetic oligonucleotide
  Sense strand starting at position 3322 of SEQ ID NO: 1883320
aucugugacuuucuuggaa

SEQ ID NO: 2185305 - RNA, 19 nt, Artificial Sequence
  Description of Artificial Sequence: Synthetic oligonucleotide
  Antisense strand to SEQ ID NO: 2185304
uuccaagaaagucacagau

SEQ ID NO: 2185306 - RNA, 19 nt, Artificial Sequence
  Description of Artificial Sequence: Synthetic oligonucleotide
  Sense strand starting at position 3360 of SEQ ID NO: 1883320
acaacauugcacugucagu

SEQ ID NO: 2185307 - RNA, 19 nt, Artificial Sequence
  Description of Artificial Sequence: Synthetic oligonucleotide
  Antisense strand to SEQ ID NO: 2185306
acugacagugcaauguugu

SEQ ID NO: 2185308 - RNA, 19 nt, Artificial Sequence
  Description of Artificial Sequence: Synthetic oligonucleotide
  Sense strand starting at position 3365 of SEQ ID NO: 1883320
auugcacugucaguuauag

SEQ ID NO: 2185309 - RNA, 19 nt, Artificial Sequence
  Description of Artificial Sequence: Synthetic oligonucleotide
  Antisense strand to SEQ ID NO: 2185308
cuauaacugacagugcaau

SEQ ID NO: 2185310 - RNA, 19 nt, Artificial Sequence
  Description of Artificial Sequence: Synthetic oligonucleotide
  Sense strand starting at position 3367 of SEQ ID NO: 1883320
ugcacugucaguuauagag

SEQ ID NO: 2185311 - RNA, 19 nt, Artificial Sequence
  Description of Artificial Sequence: Synthetic oligonucleotide
  Antisense strand to SEQ ID NO: 2185310
cucuauaacugacagugca

SEQ ID NO: 2185312 - RNA, 19 nt, Artificial Sequence
  Description of Artificial Sequence: Synthetic oligonucleotide
  Sense strand starting at position 3371 of SEQ ID NO: 1883320
cugucaguuauagaguaca

SEQ ID NO: 2185313 - RNA, 19 nt, Artificial Sequence
  Description of Artificial Sequence: Synthetic oligonucleotide
  Antisense strand to SEQ ID NO: 2185312
uguacucuauaacugacag

SEQ ID NO: 2185314 - RNA, 19 nt, Artificial Sequence
  Description of Artificial Sequence: Synthetic oligonucleotide
  Sense strand starting at position 3407 of SEQ ID NO: 1883320
gaaggaauagccggauuau

SEQ ID NO: 2185315 - RNA, 19 nt, Artificial Sequence
  Description of Artificial Sequence: Synthetic oligonucleotide
  Antisense strand to SEQ ID NO: 2185314
auaauccggcuauuccuuc

SEQ ID NO: 2185316 - RNA, 19 nt, Artificial Sequence
  Description of Artificial Sequence: Synthetic oligonucleotide
  Sense strand starting at position 3416 of SEQ ID NO: 1883320
gccggauuauaucuccauu

SEQ ID NO: 2185317 - RNA, 19 nt, Artificial Sequence
  Description of Artificial Sequence: Synthetic oligonucleotide
  Antisense strand to SEQ ID NO: 2185316
aauggagauauaauccggc

SEQ ID NO: 2185318 - RNA, 19 nt, Artificial Sequence
  Description of Artificial Sequence: Synthetic oligonucleotide
  Sense strand starting at position 3449 of SEQ ID NO: 1883320
cuaucaaaguggcauuuaa

SEQ ID NO: 2185319 - RNA, 19 nt, Artificial Sequence
  Description of Artificial Sequence: Synthetic oligonucleotide
  Antisense strand to SEQ ID NO: 2185318
uuaaaugccacuuugauag

SEQ ID NO: 2185320 - RNA, 19 nt, Artificial Sequence
  Description of Artificial Sequence: Synthetic oligonucleotide
  Sense strand starting at position 3655 of SEQ ID NO: 1883320
aaaggugggcuuuaucuua

SEQ ID NO: 2185321 - RNA, 19 nt, Artificial Sequence
  Description of Artificial Sequence: Synthetic oligonucleotide
  Antisense strand to SEQ ID NO: 2185320
uaagauaaagcccaccuuu

SEQ ID NO: 2185322 - RNA, 19 nt, Artificial Sequence
  Description of Artificial Sequence: Synthetic oligonucleotide
  Sense strand starting at position 3740 of SEQ ID NO: 1883320
cuuugaaacuugguagaau

SEQ ID NO: 2185323 - RNA, 19 nt, Artificial Sequence
  Description of Artificial Sequence: Synthetic oligonucleotide
  Antisense strand to SEQ ID NO: 2185322
auucuaccaaguuucaaag

SEQ ID NO: 2185324 - RNA, 19 nt, Artificial Sequence
  Description of Artificial Sequence: Synthetic oligonucleotide
  Sense strand starting at position 3741 of SEQ ID NO: 1883320
uuugaaacuugguagaaua

SEQ ID NO: 2185325 - RNA, 19 nt, Artificial Sequence
  Description of Artificial Sequence: Synthetic oligonucleotide
  Antisense strand to SEQ ID NO: 2185324
uauucuaccaaguuucaaa

SEQ ID NO: 2185326 - RNA, 19 nt, Artificial Sequence
  Description of Artificial Sequence: Synthetic oligonucleotide
  Sense strand starting at position 3749 of SEQ ID NO: 1883320
uugguagaauaaguuugaa

SEQ ID NO: 2185327 - RNA, 19 nt, Artificial Sequence
  Description of Artificial Sequence: Synthetic oligonucleotide
  Antisense strand to SEQ ID NO: 2185326
uucaaacuuauucuaccaa

SEQ ID NO: 2185328 - RNA, 19 nt, Artificial Sequence
  Description of Artificial Sequence: Synthetic oligonucleotide
  Sense strand starting at position 3752 of SEQ ID NO: 1883320
guagaauaaguuugaaaug

SEQ ID NO: 2185329 - RNA, 19 nt, Artificial Sequence
  Description of Artificial Sequence: Synthetic oligonucleotide
  Antisense strand to SEQ ID NO: 2185328
cauuucaaacuuauucuac

SEQ ID NO: 2185330 - RNA, 19 nt, Artificial Sequence
  Description of Artificial Sequence: Synthetic oligonucleotide
  Sense strand starting at position 3824 of SEQ ID NO: 1883320
ucuaacaugcuuugaaugu

SEQ ID NO: 2185331 - RNA, 19 nt, Artificial Sequence
  Description of Artificial Sequence: Synthetic oligonucleotide
  Antisense strand to SEQ ID NO: 2185330
acauucaaagcauguuaga

SEQ ID NO: 2185332 - RNA, 19 nt, Artificial Sequence
  Description of Artificial Sequence: Synthetic oligonucleotide
  Sense strand starting at position 3828 of SEQ ID NO: 1883320
acaugcuuugaauguaaac

SEQ ID NO: 2185333 - RNA, 19 nt, Artificial Sequence
  Description of Artificial Sequence: Synthetic oligonucleotide
  Antisense strand to SEQ ID NO: 2185332
guuuacauucaaagcaugu

SEQ ID NO: 2185334 - RNA, 19 nt, Artificial Sequence
  Description of Artificial Sequence: Synthetic oligonucleotide
  Sense strand starting at position 3898 of SEQ ID NO: 1883320
aauauuaguucgcugucca

SEQ ID NO: 2185335 - RNA, 19 nt, Artificial Sequence
  Description of Artificial Sequence: Synthetic oligonucleotide
  Antisense strand to SEQ ID NO: 2185334
uggacagcgaacuaauauu

SEQ ID NO: 2185336 - RNA, 19 nt, Artificial Sequence
  Description of Artificial Sequence: Synthetic oligonucleotide
  Sense strand starting at position 121 of SEQ ID NO: 1883321
ggcaaacuacugcagagau

SEQ ID NO: 2185337 - RNA, 19 nt, Artificial Sequence
  Description of Artificial Sequence: Synthetic oligonucleotide
  Antisense strand to SEQ ID NO: 2185336
aucucugcaguaguuugcc

SEQ ID NO: 2185338 - RNA, 19 nt, Artificial Sequence
  Description of Artificial Sequence: Synthetic oligonucleotide
  Sense strand starting at position 144 of SEQ ID NO: 1883321
acaagauggacuuguacga

SEQ ID NO: 2185339 - RNA, 19 nt, Artificial Sequence
  Description of Artificial Sequence: Synthetic oligonucleotide
  Antisense strand to SEQ ID NO: 2185338
ucguacaaguccaucuugu

SEQ ID NO: 2185340 - RNA, 19 nt, Artificial Sequence
  Description of Artificial Sequence: Synthetic oligonucleotide
  Sense strand starting at position 167 of SEQ ID NO: 1883321
agauaaugaugacaaacua

SEQ ID NO: 2185341 - RNA, 19 nt, Artificial Sequence
  Description of Artificial Sequence: Synthetic oligonucleotide
  Antisense strand to SEQ ID NO: 2185340
uaguuugucaucauuaucu

SEQ ID NO: 2185342 - RNA, 19 nt, Artificial Sequence
  Description of Artificial Sequence: Synthetic oligonucleotide
  Sense strand starting at position 278 of SEQ ID NO: 1883321
uugaaucauuugggacaga

SEQ ID NO: 2185343 - RNA, 19 nt, Artificial Sequence
  Description of Artificial Sequence: Synthetic oligonucleotide
  Antisense strand to SEQ ID NO: 2185342
ucugucccaaaugauucaa

SEQ ID NO: 2185344 - RNA, 19 nt, Artificial Sequence
  Description of Artificial Sequence: Synthetic oligonucleotide
  Sense strand starting at position 413 of SEQ ID NO: 1883321
aaaucaguugagugcauga

SEQ ID NO: 2185345 - RNA, 19 nt, Artificial Sequence
  Description of Artificial Sequence: Synthetic oligonucleotide
  Antisense strand to SEQ ID NO: 2185344
ucaugcacucaacugauuu

SEQ ID NO: 2185346 - RNA, 19 nt, Artificial Sequence
  Description of Artificial Sequence: Synthetic oligonucleotide
  Sense strand starting at position 418 of SEQ ID NO: 1883321
aguugagugcaugaugaaa

SEQ ID NO: 2185347 - RNA, 19 nt, Artificial Sequence
  Description of Artificial Sequence: Synthetic oligonucleotide
  Antisense strand to SEQ ID NO: 2185346
uuucaucaugcacucaacu

SEQ ID NO: 2185348 - RNA, 19 nt, Artificial Sequence
  Description of Artificial Sequence: Synthetic oligonucleotide
  Sense strand starting at position 1040 of SEQ ID NO: 1883321
agaguaucaagugauugcu

SEQ ID NO: 2185349 - RNA, 19 nt, Artificial Sequence
  Description of Artificial Sequence: Synthetic oligonucleotide
  Antisense strand to SEQ ID NO: 2185348
agcaaucacuugauacucu

SEQ ID NO: 2185350 - RNA, 19 nt, Artificial Sequence
  Description of Artificial Sequence: Synthetic oligonucleotide
  Sense strand starting at position 1048 of SEQ ID NO: 1883321
aagugauugcuguacaaug

SEQ ID NO: 2185351 - RNA, 19 nt, Artificial Sequence
  Description of Artificial Sequence: Synthetic oligonucleotide
  Antisense strand to SEQ ID NO: 2185350
cauuguacagcaaucacuu

SEQ ID NO: 2185352 - RNA, 19 nt, Artificial Sequence
  Description of Artificial Sequence: Synthetic oligonucleotide
  Sense strand starting at position 1050 of SEQ ID NO: 1883321
gugauugcuguacaaugaa

SEQ ID NO: 2185353 - RNA, 19 nt, Artificial Sequence
  Description of Artificial Sequence: Synthetic oligonucleotide
  Antisense strand to SEQ ID NO: 2185352
uucauuguacagcaaucac

SEQ ID NO: 2185354 - RNA, 19 nt, Artificial Sequence
  Description of Artificial Sequence: Synthetic oligonucleotide
  Sense strand starting at position 1155 of SEQ ID NO: 1883321
agugaagguaacuguauga

SEQ ID NO: 2185355 - RNA, 19 nt, Artificial Sequence
  Description of Artificial Sequence: Synthetic oligonucleotide
  Antisense strand to SEQ ID NO: 2185354
ucauacaguuaccuucacu

SEQ ID NO: 2185356 - RNA, 19 nt, Artificial Sequence
  Description of Artificial Sequence: Synthetic oligonucleotide
  Sense strand starting at position 1168 of SEQ ID NO: 1883321
guaugaacccuaugaauau

SEQ ID NO: 2185357 - RNA, 19 nt, Artificial Sequence
  Description of Artificial Sequence: Synthetic oligonucleotide
  Antisense strand to SEQ ID NO: 2185356
auauucauaggguucauac

SEQ ID NO: 2185358 - RNA, 19 nt, Artificial Sequence
  Description of Artificial Sequence: Synthetic oligonucleotide
  Sense strand starting at position 2200 of SEQ ID NO: 1883321
gaauguugaucauugcuga

SEQ ID NO: 2185359 - RNA, 19 nt, Artificial Sequence
  Description of Artificial Sequence: Synthetic oligonucleotide
  Antisense strand to SEQ ID NO: 2185358
ucagcaaugaucaacauuc

SEQ ID NO: 2185360 - RNA, 19 nt, Artificial Sequence
  Description of Artificial Sequence: Synthetic oligonucleotide
  Sense strand starting at position 2201 of SEQ ID NO: 1883321
aauguugaucauugcugaa

SEQ ID NO: 2185361 - RNA, 19 nt, Artificial Sequence
  Description of Artificial Sequence: Synthetic oligonucleotide
  Antisense strand to SEQ ID NO: 2185360
uucagcaaugaucaacauu

SEQ ID NO: 2185362 - RNA, 19 nt, Artificial Sequence
  Description of Artificial Sequence: Synthetic oligonucleotide
  Sense strand starting at position 2205 of SEQ ID NO: 1883321
uugaucauugcugaagcuu

SEQ ID NO: 2185363 - RNA, 19 nt, Artificial Sequence
  Description of Artificial Sequence: Synthetic oligonucleotide
  Antisense strand to SEQ ID NO: 2185362
aagcuucagcaaugaucaa

SEQ ID NO: 2185364 - RNA, 19 nt, Artificial Sequence
  Description of Artificial Sequence: Synthetic oligonucleotide
  Sense strand starting at position 2211 of SEQ ID NO: 1883321
auugcugaagcuuagugaa

SEQ ID NO: 2185365 - RNA, 19 nt, Artificial Sequence
  Description of Artificial Sequence: Synthetic oligonucleotide
  Antisense strand to SEQ ID NO: 2185364
uucacuaagcuucagcaau

SEQ ID NO: 2185366 - RNA, 19 nt, Artificial Sequence
  Description of Artificial Sequence: Synthetic oligonucleotide
  Sense strand starting at position 2218 of SEQ ID NO: 1883321
aagcuuagugaagguauau

SEQ ID NO: 2185367 - RNA, 19 nt, Artificial Sequence
  Description of Artificial Sequence: Synthetic oligonucleotide
  Antisense strand to SEQ ID NO: 2185366
auauaccuucacuaagcuu

SEQ ID NO: 2185368 - RNA, 19 nt, Artificial Sequence
  Description of Artificial Sequence: Synthetic oligonucleotide
  Sense strand starting at position 2496 of SEQ ID NO: 1883321
aaaggugauguuugacauu

SEQ ID NO: 2185369 - RNA, 19 nt, Artificial Sequence
  Description of Artificial Sequence: Synthetic oligonucleotide
  Antisense strand to SEQ ID NO: 2185368
aaugucaaacaucaccuuu

SEQ ID NO: 2185370 - RNA, 19 nt, Artificial Sequence
  Description of Artificial Sequence: Synthetic oligonucleotide
  Sense strand starting at position 2599 of SEQ ID NO: 1883321
auaagaaagcaauggcuua

SEQ ID NO: 2185371 - RNA, 19 nt, Artificial Sequence
  Description of Artificial Sequence: Synthetic oligonucleotide
  Antisense strand to SEQ ID NO: 2185370
uaagccauugcuuucuuau

SEQ ID NO: 2185372 - RNA, 19 nt, Artificial Sequence
  Description of Artificial Sequence: Synthetic oligonucleotide
  Sense strand starting at position 2604 of SEQ ID NO: 1883321
aaagcaauggcuuagaagu

SEQ ID NO: 2185373 - RNA, 19 nt, Artificial Sequence
  Description of Artificial Sequence: Synthetic oligonucleotide
  Antisense strand to SEQ ID NO: 2185372
acuucuaagccauugcuuu

SEQ ID NO: 2185374 - RNA, 19 nt, Artificial Sequence
  Description of Artificial Sequence: Synthetic oligonucleotide
  Sense strand starting at position 2611 of SEQ ID NO: 1883321
uggcuuagaaguuaagagu

SEQ ID NO: 2185375 - RNA, 19 nt, Artificial Sequence
  Description of Artificial Sequence: Synthetic oligonucleotide
  Antisense strand to SEQ ID NO: 2185374
acucuuaacuucuaagcca

SEQ ID NO: 2185376 - RNA, 19 nt, Artificial Sequence
  Description of Artificial Sequence: Synthetic oligonucleotide
  Sense strand starting at position 2642 of SEQ ID NO: 1883321
gucagaauacuugguacua

SEQ ID NO: 2185377 - RNA, 19 nt, Artificial Sequence
  Description of Artificial Sequence: Synthetic oligonucleotide
  Antisense strand to SEQ ID NO: 2185376
uaguaccaaguauucugac

SEQ ID NO: 2185378 - RNA, 19 nt, Artificial Sequence
  Description of Artificial Sequence: Synthetic oligonucleotide
  Sense strand starting at position 2643 of SEQ ID NO: 1883321
ucagaauacuugguacuaa

SEQ ID NO: 2185379 - RNA, 19 nt, Artificial Sequence
  Description of Artificial Sequence: Synthetic oligonucleotide
  Antisense strand to SEQ ID NO: 2185378
uuaguaccaaguauucuga

SEQ ID NO: 2185380 - RNA, 19 nt, Artificial Sequence
  Description of Artificial Sequence: Synthetic oligonucleotide
  Sense strand starting at position 2683 of SEQ ID NO: 1883321
aauggauggcguuaggaaa

SEQ ID NO: 2185381 - RNA, 19 nt, Artificial Sequence
  Description of Artificial Sequence: Synthetic oligonucleotide
  Antisense strand to SEQ ID NO: 2185380
uuuccuaacgccauccauu

SEQ ID NO: 2185382 - RNA, 19 nt, Artificial Sequence
  Description of Artificial Sequence: Synthetic oligonucleotide
  Sense strand starting at position 2760 of SEQ ID NO: 1883321
cucuuaggauugucuagaa

SEQ ID NO: 2185383 - RNA, 19 nt, Artificial Sequence
  Description of Artificial Sequence: Synthetic oligonucleotide
  Antisense strand to SEQ ID NO: 2185382
uucuagacaauccuaagag

SEQ ID NO: 2185384 - RNA, 19 nt, Artificial Sequence
  Description of Artificial Sequence: Synthetic oligonucleotide
  Sense strand starting at position 2834 of SEQ ID NO: 1883321
cgaaacgucagguauaaua

SEQ ID NO: 2185385 - RNA, 19 nt, Artificial Sequence
  Description of Artificial Sequence: Synthetic oligonucleotide
  Antisense strand to SEQ ID NO: 2185384
uauuauaccugacguuucg

SEQ ID NO: 2185386 - RNA, 19 nt, Artificial Sequence
  Description of Artificial Sequence: Synthetic oligonucleotide
  Sense strand starting at position 2852 of SEQ ID NO: 1883321
agauaaugguguuucagag

SEQ ID NO: 2185387 - RNA, 19 nt, Artificial Sequence
  Description of Artificial Sequence: Synthetic oligonucleotide
  Antisense strand to SEQ ID NO: 2185386
cucugaaacaccauuaucu

SEQ ID NO: 2185388 - RNA, 19 nt, Artificial Sequence
  Description of Artificial Sequence: Synthetic oligonucleotide
  Sense strand starting at position 2882 of SEQ ID NO: 1883321
uuggccuuucuggaaacaa

SEQ ID NO: 2185389 - RNA, 19 nt, Artificial Sequence
  Description of Artificial Sequence: Synthetic oligonucleotide
  Antisense strand to SEQ ID NO: 2185388
uuguuuccagaaaggccaa

SEQ ID NO: 2185390 - RNA, 19 nt, Artificial Sequence
  Description of Artificial Sequence: Synthetic oligonucleotide
  Sense strand starting at position 3142 of SEQ ID NO: 1883321
acacgagaacccugcugau

SEQ ID NO: 2185391 - RNA, 19 nt, Artificial Sequence
  Description of Artificial Sequence: Synthetic oligonucleotide
  Antisense strand to SEQ ID NO: 2185390
aucagcaggguucucgugu

SEQ ID NO: 2185392 - RNA, 19 nt, Artificial Sequence
  Description of Artificial Sequence: Synthetic oligonucleotide
  Sense strand starting at position 3247 of SEQ ID NO: 1883321
guaacaaagccugaauagu

SEQ ID NO: 2185393 - RNA, 19 nt, Artificial Sequence
  Description of Artificial Sequence: Synthetic oligonucleotide
  Antisense strand to SEQ ID NO: 2185392
acuauucaggcuuuguuac

SEQ ID NO: 2185394 - RNA, 19 nt, Artificial Sequence
  Description of Artificial Sequence: Synthetic oligonucleotide
  Sense strand starting at position 3423 of SEQ ID NO: 1883321
gcugcugcugaauagagaa

SEQ ID NO: 2185395 - RNA, 19 nt, Artificial Sequence
  Description of Artificial Sequence: Synthetic oligonucleotide
  Antisense strand to SEQ ID NO: 2185394
uucucuauucagcagcagc

SEQ ID NO: 2185396 - RNA, 19 nt, Artificial Sequence
  Description of Artificial Sequence: Synthetic oligonucleotide
  Sense strand starting at position 3437 of SEQ ID NO: 1883321
gagaaauaaugagcucugu

SEQ ID NO: 2185397 - RNA, 19 nt, Artificial Sequence
  Description of Artificial Sequence: Synthetic oligonucleotide
  Antisense strand to SEQ ID NO: 2185396
acagagcucauuauuucuc

SEQ ID NO: 2185398 - RNA, 19 nt, Artificial Sequence
  Description of Artificial Sequence: Synthetic oligonucleotide
  Sense strand starting at position 3490 of SEQ ID NO: 1883321
aggagaacuuagcucguga

SEQ ID NO: 2185399 - RNA, 19 nt, Artificial Sequence
  Description of Artificial Sequence: Synthetic oligonucleotide
  Antisense strand to SEQ ID NO: 2185398
ucacgagcuaaguucuccu

SEQ ID NO: 2185400 - RNA, 19 nt, Artificial Sequence
  Description of Artificial Sequence: Synthetic oligonucleotide
  Sense strand starting at position 3587 of SEQ ID NO: 1883321
uaagguaauggaugacagu

SEQ ID NO: 2185401 - RNA, 19 nt, Artificial Sequence
  Description of Artificial Sequence: Synthetic oligonucleotide
  Antisense strand to SEQ ID NO: 2185400
acugucauccauuaccuua

SEQ ID NO: 2185402 - RNA, 19 nt, Artificial Sequence
  Description of Artificial Sequence: Synthetic oligonucleotide
  Sense strand starting at position 3593 of SEQ ID NO: 1883321
aauggaugacagugagcaa

SEQ ID NO: 2185403 - RNA, 19 nt, Artificial Sequence
  Description of Artificial Sequence: Synthetic oligonucleotide
  Antisense strand to SEQ ID NO: 2185402
uugcucacugucauccauu

SEQ ID NO: 2185404 - RNA, 19 nt, Artificial Sequence
  Description of Artificial Sequence: Synthetic oligonucleotide
  Sense strand starting at position 3681 of SEQ ID NO: 1883321
aauggaauuugugauuaca

SEQ ID NO: 2185405 - RNA, 19 nt, Artificial Sequence
  Description of Artificial Sequence: Synthetic oligonucleotide
  Antisense strand to SEQ ID NO: 2185404
uguaaucacaaauuccauu

SEQ ID NO: 2185406 - RNA, 19 nt, Artificial Sequence
  Description of Artificial Sequence: Synthetic oligonucleotide
  Sense strand starting at position 3771 of SEQ ID NO: 1883321
ggagcuacauagucuuaac

SEQ ID NO: 2185407 - RNA, 19 nt, Artificial Sequence
  Description of Artificial Sequence: Synthetic oligonucleotide
  Antisense strand to SEQ ID NO: 2185406
guuaagacuauguagcucc

SEQ ID NO: 2185408 - RNA, 19 nt, Artificial Sequence
  Description of Artificial Sequence: Synthetic oligonucleotide
  Sense strand starting at position 3810 of SEQ ID NO: 1883321
uuucuaggguucucuggaa

SEQ ID NO: 2185409 - RNA, 19 nt, Artificial Sequence
  Description of Artificial Sequence: Synthetic oligonucleotide
  Antisense strand to SEQ ID NO: 2185408
uuccagagaacccuagaaa

SEQ ID NO: 2185410 - RNA, 19 nt, Artificial Sequence
  Description of Artificial Sequence: Synthetic oligonucleotide
  Sense strand starting at position 3845 of SEQ ID NO: 1883321
gcacauucuugacccuuga

SEQ ID NO: 2185411 - RNA, 19 nt, Artificial Sequence
  Description of Artificial Sequence: Synthetic oligonucleotide
  Antisense strand to SEQ ID NO: 2185410
ucaagggucaagaaugugc

SEQ ID NO: 2185412 - RNA, 19 nt, Artificial Sequence
  Description of Artificial Sequence: Synthetic oligonucleotide
  Sense strand starting at position 3849 of SEQ ID NO: 1883321
auucuugacccuugauaga

SEQ ID NO: 2185413 - RNA, 19 nt, Artificial Sequence
  Description of Artificial Sequence: Synthetic oligonucleotide
  Antisense strand to SEQ ID NO: 2185412
ucuaucaagggucaagaau

SEQ ID NO: 2185414 - RNA, 19 nt, Artificial Sequence
  Description of Artificial Sequence: Synthetic oligonucleotide
  Sense strand starting at position 3907 of SEQ ID NO: 1883321
agguguucccagcaccaau

SEQ ID NO: 2185415 - RNA, 19 nt, Artificial Sequence
  Description of Artificial Sequence: Synthetic oligonucleotide
  Antisense strand to SEQ ID NO: 2185414
auuggugcugggaacaccu

SEQ ID NO: 2185416 - RNA, 19 nt, Artificial Sequence
  Description of Artificial Sequence: Synthetic oligonucleotide
  Sense strand starting at position 19 of SEQ ID NO: 1883322
gucaucuauuaggcucauu

SEQ ID NO: 2185417 - RNA, 19 nt, Artificial Sequence
  Description of Artificial Sequence: Synthetic oligonucleotide
  Antisense strand to SEQ ID NO: 2185416
aaugagccuaauagaugac

SEQ ID NO: 2185418 - RNA, 19 nt, Artificial Sequence
  Description of Artificial Sequence: Synthetic oligonucleotide
  Sense strand starting at position 247 of SEQ ID NO: 1883322
cccugacuucuauagggca

SEQ ID NO: 2185419 - RNA, 19 nt, Artificial Sequence
  Description of Artificial Sequence: Synthetic oligonucleotide
  Antisense strand to SEQ ID NO: 2185418
ugcccuauagaagucaggg

SEQ ID NO: 2185420 - RNA, 19 nt, Artificial Sequence
  Description of Artificial Sequence: Synthetic oligonucleotide
  Sense strand starting at position 321 of SEQ ID NO: 1883322
ccuagauggucucccaaag

SEQ ID NO: 2185421 - RNA, 19 nt, Artificial Sequence
  Description of Artificial Sequence: Synthetic oligonucleotide
  Antisense strand to SEQ ID NO: 2185420
cuuugggagaccaucuagg

SEQ ID NO: 2185422 - RNA, 19 nt, Artificial Sequence
  Description of Artificial Sequence: Synthetic oligonucleotide
  Sense strand starting at position 397 of SEQ ID NO: 1883322
gucaaucuucuagaugcuu

SEQ ID NO: 2185423 - RNA, 19 nt, Artificial Sequence
  Description of Artificial Sequence: Synthetic oligonucleotide
  Antisense strand to SEQ ID NO: 2185422
aagcaucuagaagauugac

SEQ ID NO: 2185424 - RNA, 19 nt, Artificial Sequence
  Description of Artificial Sequence: Synthetic oligonucleotide
  Sense strand starting at position 418 of SEQ ID NO: 1883322
cauucugauggauguggaa

SEQ ID NO: 2185425 - RNA, 19 nt, Artificial Sequence
  Description of Artificial Sequence: Synthetic oligonucleotide
  Antisense strand to SEQ ID NO: 2185424
uuccacauccaucagaaug

SEQ ID NO: 2185426 - RNA, 19 nt, Artificial Sequence
  Description of Artificial Sequence: Synthetic oligonucleotide
  Sense strand starting at position 522 of SEQ ID NO: 1883322
ggaguugccuguucagaug

SEQ ID NO: 2185427 - RNA, 19 nt, Artificial Sequence
  Description of Artificial Sequence: Synthetic oligonucleotide
  Antisense strand to SEQ ID NO: 2185426
caucugaacaggcaacucc

SEQ ID NO: 2185428 - RNA, 19 nt, Artificial Sequence
  Description of Artificial Sequence: Synthetic oligonucleotide
  Sense strand starting at position 568 of SEQ ID NO: 1883322
accuuauugguuuguagau

SEQ ID NO: 2185429 - RNA, 19 nt, Artificial Sequence
  Description of Artificial Sequence: Synthetic oligonucleotide
  Antisense strand to SEQ ID NO: 2185428
aucuacaaaccaauaaggu

SEQ ID NO: 2185430 - RNA, 19 nt, Artificial Sequence
  Description of Artificial Sequence: Synthetic oligonucleotide
  Sense strand starting at position 569 of SEQ ID NO: 1883322
ccuuauugguuuguagaua

SEQ ID NO: 2185431 - RNA, 19 nt, Artificial Sequence
  Description of Artificial Sequence: Synthetic oligonucleotide
  Antisense strand to SEQ ID NO: 2185430
uaucuacaaaccaauaagg

SEQ ID NO: 2185432 - RNA, 19 nt, Artificial Sequence
  Description of Artificial Sequence: Synthetic oligonucleotide
  Sense strand starting at position 577 of SEQ ID NO: 1883322
guuuguagauacucuuuau

SEQ ID NO: 2185433 - RNA, 19 nt, Artificial Sequence
  Description of Artificial Sequence: Synthetic oligonucleotide
  Antisense strand to SEQ ID NO: 2185432
auaaagaguaucuacaaac

SEQ ID NO: 2185434 - RNA, 19 nt, Artificial Sequence
  Description of Artificial Sequence: Synthetic oligonucleotide
  Sense strand starting at position 792 of SEQ ID NO: 1883322
gugcuuuaauugguuaaac

SEQ ID NO: 2185435 - RNA, 19 nt, Artificial Sequence
  Description of Artificial Sequence: Synthetic oligonucleotide
  Antisense strand to SEQ ID NO: 2185434
guuuaaccaauuaaagcac

SEQ ID NO: 2185436 - RNA, 19 nt, Artificial Sequence
  Description of Artificial Sequence: Synthetic oligonucleotide
  Sense strand starting at position 794 of SEQ ID NO: 1883322
gcuuuaauugguuaaacgu

SEQ ID NO: 2185437 - RNA, 19 nt, Artificial Sequence
  Description of Artificial Sequence: Synthetic oligonucleotide
  Antisense strand to SEQ ID NO: 2185436
acguuuaaccaauuaaagc

SEQ ID NO: 2185438 - RNA, 19 nt, Artificial Sequence
  Description of Artificial Sequence: Synthetic oligonucleotide
  Sense strand starting at position 884 of SEQ ID NO: 1883322
cucacacuugggcauuaaa

SEQ ID NO: 2185439 - RNA, 19 nt, Artificial Sequence
  Description of Artificial Sequence: Synthetic oligonucleotide
  Antisense strand to SEQ ID NO: 2185438
uuuaaugcccaagugugag

SEQ ID NO: 2185440 - RNA, 19 nt, Artificial Sequence
  Description of Artificial Sequence: Synthetic oligonucleotide
  Sense strand starting at position 997 of SEQ ID NO: 1883322
uagguuaagccagaaauuc

SEQ ID NO: 2185441 - RNA, 19 nt, Artificial Sequence
  Description of Artificial Sequence: Synthetic oligonucleotide
  Antisense strand to SEQ ID NO: 2185440
gaauuucuggcuuaaccua

SEQ ID NO: 2185442 - RNA, 19 nt, Artificial Sequence
  Description of Artificial Sequence: Synthetic oligonucleotide
  Sense strand starting at position 1310 of SEQ ID NO: 1883322
ggcagugaacagcauaaau

SEQ ID NO: 2185443 - RNA, 19 nt, Artificial Sequence
  Description of Artificial Sequence: Synthetic oligonucleotide
  Antisense strand to SEQ ID NO: 2185442
auuuaugcuguucacugcc

SEQ ID NO: 2185444 - RNA, 19 nt, Artificial Sequence
  Description of Artificial Sequence: Synthetic oligonucleotide
  Sense strand starting at position 1403 of SEQ ID NO: 1883322
ccguuuccuccugcguaaa

SEQ ID NO: 2185445 - RNA, 19 nt, Artificial Sequence
  Description of Artificial Sequence: Synthetic oligonucleotide
  Antisense strand to SEQ ID NO: 2185444
uuuacgcaggaggaaacgg

SEQ ID NO: 2185446 - RNA, 19 nt, Artificial Sequence
  Description of Artificial Sequence: Synthetic oligonucleotide
  Sense strand starting at position 1451 of SEQ ID NO: 1883322
uccuucgaggacugaguua

SEQ ID NO: 2185447 - RNA, 19 nt, Artificial Sequence
  Description of Artificial Sequence: Synthetic oligonucleotide
  Antisense strand to SEQ ID NO: 2185446
uaacucaguccucgaagga

SEQ ID NO: 2185448 - RNA, 19 nt, Artificial Sequence
  Description of Artificial Sequence: Synthetic oligonucleotide
  Sense strand starting at position 1570 of SEQ ID NO: 1883322
gugauugguguugagguaa

SEQ ID NO: 2185449 - RNA, 19 nt, Artificial Sequence
  Description of Artificial Sequence: Synthetic oligonucleotide
  Antisense strand to SEQ ID NO: 2185448
uuaccucaacaccaaucac

SEQ ID NO: 2185450 - RNA, 19 nt, Artificial Sequence
  Description of Artificial Sequence: Synthetic oligonucleotide
  Sense strand starting at position 1669 of SEQ ID NO: 1883322
gugucaggacauugguaga

SEQ ID NO: 2185451 - RNA, 19 nt, Artificial Sequence
  Description of Artificial Sequence: Synthetic oligonucleotide
  Antisense strand to SEQ ID NO: 2185450
ucuaccaauguccugacac

SEQ ID NO: 2185452 - RNA, 19 nt, Artificial Sequence
  Description of Artificial Sequence: Synthetic oligonucleotide
  Sense strand starting at position 1800 of SEQ ID NO: 1883322
cuggguucgaucugaguca

SEQ ID NO: 2185453 - RNA, 19 nt, Artificial Sequence
  Description of Artificial Sequence: Synthetic oligonucleotide
  Antisense strand to SEQ ID NO: 2185452
ugacucagaucgaacccag

SEQ ID NO: 2185454 - RNA, 19 nt, Artificial Sequence
  Description of Artificial Sequence: Synthetic oligonucleotide
  Sense strand starting at position 2026 of SEQ ID NO: 1883322
auugaaauguaccuacguu

SEQ ID NO: 2185455 - RNA, 19 nt, Artificial Sequence
  Description of Artificial Sequence: Synthetic oligonucleotide
  Antisense strand to SEQ ID NO: 2185454
aacguagguacauuucaau

SEQ ID NO: 2185456 - RNA, 19 nt, Artificial Sequence
  Description of Artificial Sequence: Synthetic oligonucleotide
  Sense strand starting at position 2041 of SEQ ID NO: 1883322
cguuuagcuggugcucaau

SEQ ID NO: 2185457 - RNA, 19 nt, Artificial Sequence
  Description of Artificial Sequence: Synthetic oligonucleotide
  Antisense strand to SEQ ID NO: 2185456
auugagcaccagcuaaacg

SEQ ID NO: 2185458 - RNA, 19 nt, Artificial Sequence
  Description of Artificial Sequence: Synthetic oligonucleotide
  Sense strand starting at position 2047 of SEQ ID NO: 1883322
gcuggugcucaauaucuuu

SEQ ID NO: 2185459 - RNA, 19 nt, Artificial Sequence
  Description of Artificial Sequence: Synthetic oligonucleotide
  Antisense strand to SEQ ID NO: 2185458
aaagauauugagcaccagc

SEQ ID NO: 2185460 - RNA, 19 nt, Artificial Sequence
  Description of Artificial Sequence: Synthetic oligonucleotide
  Sense strand starting at position 2123 of SEQ ID NO: 1883322
gucuguggucugcuaaggu

SEQ ID NO: 2185461 - RNA, 19 nt, Artificial Sequence
  Description of Artificial Sequence: Synthetic oligonucleotide
  Antisense strand to SEQ ID NO: 2185460
accuuagcagaccacagac

SEQ ID NO: 2185462 - RNA, 19 nt, Artificial Sequence
  Description of Artificial Sequence: Synthetic oligonucleotide
  Sense strand starting at position 2411 of SEQ ID NO: 1883322
ggaagagucuguagcagga

SEQ ID NO: 2185463 - RNA, 19 nt, Artificial Sequence
  Description of Artificial Sequence: Synthetic oligonucleotide
  Antisense strand to SEQ ID NO: 2185462
uccugcuacagacucuucc

SEQ ID NO: 2185464 - RNA, 19 nt, Artificial Sequence
  Description of Artificial Sequence: Synthetic oligonucleotide
  Sense strand starting at position 2432 of SEQ ID NO: 1883322
cggagugauggaugccaau

SEQ ID NO: 2185465 - RNA, 19 nt, Artificial Sequence
  Description of Artificial Sequence: Synthetic oligonucleotide
  Antisense strand to SEQ ID NO: 2185464
auuggcauccaucacuccg

SEQ ID NO: 2185466 - RNA, 19 nt, Artificial Sequence
  Description of Artificial Sequence: Synthetic oligonucleotide
  Sense strand starting at position 2683 of SEQ ID NO: 1883322
ugcugaugugcuggaauca

SEQ ID NO: 2185467 - RNA, 19 nt, Artificial Sequence
  Description of Artificial Sequence: Synthetic oligonucleotide
  Antisense strand to SEQ ID NO: 2185466
ugauuccagcacaucagca

SEQ ID NO: 2185468 - RNA, 19 nt, Artificial Sequence
  Description of Artificial Sequence: Synthetic oligonucleotide
  Sense strand starting at position 2684 of SEQ ID NO: 1883322
gcugaugugcuggaaucau

SEQ ID NO: 2185469 - RNA, 19 nt, Artificial Sequence
  Description of Artificial Sequence: Synthetic oligonucleotide
  Antisense strand to SEQ ID NO: 2185468
augauuccagcacaucagc

SEQ ID NO: 2185470 - RNA, 19 nt, Artificial Sequence
  Description of Artificial Sequence: Synthetic oligonucleotide
  Sense strand starting at position 3123 of SEQ ID NO: 1883322
uugaaucauccuggcugga

SEQ ID NO: 2185471 - RNA, 19 nt, Artificial Sequence
  Description of Artificial Sequence: Synthetic oligonucleotide
  Antisense strand to SEQ ID NO: 2185470
uccagccaggaugauucaa

SEQ ID NO: 2185472 - RNA, 19 nt, Artificial Sequence
  Description of Artificial Sequence: Synthetic oligonucleotide
  Sense strand starting at position 3178 of SEQ ID NO: 1883322
acagauuucuccuaauugg

SEQ ID NO: 2185473 - RNA, 19 nt, Artificial Sequence
  Description of Artificial Sequence: Synthetic oligonucleotide
  Antisense strand to SEQ ID NO: 2185472
ccaauuaggagaaaucugu

SEQ ID NO: 2185474 - RNA, 19 nt, Artificial Sequence
  Description of Artificial Sequence: Synthetic oligonucleotide
  Sense strand starting at position 3192 of SEQ ID NO: 1883322
auuggcuucugagcuuaga

SEQ ID NO: 2185475 - RNA, 19 nt, Artificial Sequence
  Description of Artificial Sequence: Synthetic oligonucleotide
  Antisense strand to SEQ ID NO: 2185474
ucuaagcucagaagccaau

SEQ ID NO: 2185476 - RNA, 19 nt, Artificial Sequence
  Description of Artificial Sequence: Synthetic oligonucleotide
  Sense strand starting at position 3483 of SEQ ID NO: 1883322
guccuuacgccaugaccaa

SEQ ID NO: 2185477 - RNA, 19 nt, Artificial Sequence
  Description of Artificial Sequence: Synthetic oligonucleotide
  Antisense strand to SEQ ID NO: 2185476
uuggucauggcguaaggac

SEQ ID NO: 2185478 - RNA, 19 nt, Artificial Sequence
  Description of Artificial Sequence: Synthetic oligonucleotide
  Sense strand starting at position 3542 of SEQ ID NO: 1883322
ugggcugaucgugagaugu

SEQ ID NO: 2185479 - RNA, 19 nt, Artificial Sequence
  Description of Artificial Sequence: Synthetic oligonucleotide
  Antisense strand to SEQ ID NO: 2185478
acaucucacgaucagccca

SEQ ID NO: 2185480 - RNA, 19 nt, Artificial Sequence
  Description of Artificial Sequence: Synthetic oligonucleotide
  Sense strand starting at position 3550 of SEQ ID NO: 1883322
ucgugagauguuucucggu

SEQ ID NO: 2185481 - RNA, 19 nt, Artificial Sequence
  Description of Artificial Sequence: Synthetic oligonucleotide
  Antisense strand to SEQ ID NO: 2185480
accgagaaacaucucacga

SEQ ID NO: 2185482 - RNA, 19 nt, Artificial Sequence
  Description of Artificial Sequence: Synthetic oligonucleotide
  Sense strand starting at position 3580 of SEQ ID NO: 1883322
gauccuugaccuugacgua

SEQ ID NO: 2185483 - RNA, 19 nt, Artificial Sequence
  Description of Artificial Sequence: Synthetic oligonucleotide
  Antisense strand to SEQ ID NO: 2185482
uacgucaaggucaaggauc

SEQ ID NO: 2185484 - RNA, 19 nt, Artificial Sequence
  Description of Artificial Sequence: Synthetic oligonucleotide
  Sense strand starting at position 3587 of SEQ ID NO: 1883322
gaccuugacguagguaaau

SEQ ID NO: 2185485 - RNA, 19 nt, Artificial Sequence
  Description of Artificial Sequence: Synthetic oligonucleotide
  Antisense strand to SEQ ID NO: 2185484
auuuaccuacgucaagguc

SEQ ID NO: 2185486 - RNA, 19 nt, Artificial Sequence
  Description of Artificial Sequence: Synthetic oligonucleotide
  Sense strand starting at position 3589 of SEQ ID NO: 1883322
ccuugacguagguaaauga

SEQ ID NO: 2185487 - RNA, 19 nt, Artificial Sequence
  Description of Artificial Sequence: Synthetic oligonucleotide
  Antisense strand to SEQ ID NO: 2185486
ucauuuaccuacgucaagg

SEQ ID NO: 2185488 - RNA, 19 nt, Artificial Sequence
  Description of Artificial Sequence: Synthetic oligonucleotide
  Sense strand starting at position 3874 of SEQ ID NO: 1883322
ccaggcuguacugagacau

SEQ ID NO: 2185489 - RNA, 19 nt, Artificial Sequence
  Description of Artificial Sequence: Synthetic oligonucleotide
  Antisense strand to SEQ ID NO: 2185488
augucucaguacagccugg

SEQ ID NO: 2185490 - RNA, 19 nt, Artificial Sequence
  Description of Artificial Sequence: Synthetic oligonucleotide
  Sense strand starting at position 3878 of SEQ ID NO: 1883322
gcuguacugagacaugcuu

SEQ ID NO: 2185491 - RNA, 19 nt, Artificial Sequence
  Description of Artificial Sequence: Synthetic oligonucleotide
  Antisense strand to SEQ ID NO: 2185490
aagcaugucucaguacagc

SEQ ID NO: 2185492 - RNA, 19 nt, Artificial Sequence
  Description of Artificial Sequence: Synthetic oligonucleotide
  Sense strand starting at position 3892 of SEQ ID NO: 1883322
ugcuuucuggcagagcaua

SEQ ID NO: 2185493 - RNA, 19 nt, Artificial Sequence
  Description of Artificial Sequence: Synthetic oligonucleotide
  Antisense strand to SEQ ID NO: 2185492
uaugcucugccagaaagca

SEQ ID NO: 2185494 - RNA, 19 nt, Artificial Sequence
  Description of Artificial Sequence: Synthetic oligonucleotide
  Sense strand starting at position 3934 of SEQ ID NO: 1883322
cgagguuuccauggugaag

SEQ ID NO: 2185495 - RNA, 19 nt, Artificial Sequence
  Description of Artificial Sequence: Synthetic oligonucleotide
  Antisense strand to SEQ ID NO: 2185494
cuucaccauggaaaccucg

SEQ ID NO: 2185496 - RNA, 19 nt, Artificial Sequence
  Description of Artificial Sequence: Synthetic oligonucleotide
  Sense strand starting at position 959 of SEQ ID NO: 1883323
gccugugagccaggugaaa

SEQ ID NO: 2185497 - RNA, 19 nt, Artificial Sequence
  Description of Artificial Sequence: Synthetic oligonucleotide
  Antisense strand to SEQ ID NO: 2185496
uuucaccuggcucacaggc

SEQ ID NO: 2185498 - RNA, 19 nt, Artificial Sequence
  Description of Artificial Sequence: Synthetic oligonucleotide
  Sense strand starting at position 961 of SEQ ID NO: 1883323
cugugagccaggugaaaca

SEQ ID NO: 2185499 - RNA, 19 nt, Artificial Sequence
  Description of Artificial Sequence: Synthetic oligonucleotide
  Antisense strand to SEQ ID NO: 2185498
uguuucaccuggcucacag

SEQ ID NO: 2185500 - RNA, 19 nt, Artificial Sequence
  Description of Artificial Sequence: Synthetic oligonucleotide
  Sense strand starting at position 1504 of SEQ ID NO: 1883323
gacgcccagcuuugaaauu

SEQ ID NO: 2185501 - RNA, 19 nt, Artificial Sequence
  Description of Artificial Sequence: Synthetic oligonucleotide
  Antisense strand to SEQ ID NO: 2185500
aauuucaaagcugggcguc

SEQ ID NO: 2185502 - RNA, 19 nt, Artificial Sequence
  Description of Artificial Sequence: Synthetic oligonucleotide
  Sense strand starting at position 1658 of SEQ ID NO: 1883323
ucagaauggucugggugga

SEQ ID NO: 2185503 - RNA, 19 nt, Artificial Sequence
  Description of Artificial Sequence: Synthetic oligonucleotide
  Antisense strand to SEQ ID NO: 2185502
uccacccagaccauucuga

SEQ ID NO: 2185504 - RNA, 19 nt, Artificial Sequence
  Description of Artificial Sequence: Synthetic oligonucleotide
  Sense strand starting at position 1705 of SEQ ID NO: 1883323
ggcucaaggucugggugaa

SEQ ID NO: 2185505 - RNA, 19 nt, Artificial Sequence
  Description of Artificial Sequence: Synthetic oligonucleotide
  Antisense strand to SEQ ID NO: 2185504
uucacccagaccuugagcc

SEQ ID NO: 2185506 - RNA, 19 nt, Artificial Sequence
  Description of Artificial Sequence: Synthetic oligonucleotide
  Sense strand starting at position 1706 of SEQ ID NO: 1883323
gcucaaggucugggugaau

SEQ ID NO: 2185507 - RNA, 19 nt, Artificial Sequence
  Description of Artificial Sequence: Synthetic oligonucleotide
  Antisense strand to SEQ ID NO: 2185506
auucacccagaccuugagc

SEQ ID NO: 2185508 - RNA, 19 nt, Artificial Sequence
  Description of Artificial Sequence: Synthetic oligonucleotide
  Sense strand starting at position 1900 of SEQ ID NO: 1883323
ccuguacuccuggauguga

SEQ ID NO: 2185509 - RNA, 19 nt, Artificial Sequence
  Description of Artificial Sequence: Synthetic oligonucleotide
  Antisense strand to SEQ ID NO: 2185508
ucacauccaggaguacagg

SEQ ID NO: 2185510 - RNA, 19 nt, Artificial Sequence
  Description of Artificial Sequence: Synthetic oligonucleotide
  Sense strand starting at position 1902 of SEQ ID NO: 1883323
uguacuccuggaugugauu

SEQ ID NO: 2185511 - RNA, 19 nt, Artificial Sequence
  Description of Artificial Sequence: Synthetic oligonucleotide
  Antisense strand to SEQ ID NO: 2185510
aaucacauccaggaguaca

SEQ ID NO: 2185512 - RNA, 19 nt, Artificial Sequence
  Description of Artificial Sequence: Synthetic oligonucleotide
  Sense strand starting at position 1919 of SEQ ID NO: 1883323
uuugcuaauuagggucaau

SEQ ID NO: 2185513 - RNA, 19 nt, Artificial Sequence
  Description of Artificial Sequence: Synthetic oligonucleotide
  Antisense strand to SEQ ID NO: 2185512
auugacccuaauuagcaaa

SEQ ID NO: 2185514 - RNA, 19 nt, Artificial Sequence
  Description of Artificial Sequence: Synthetic oligonucleotide
  Sense strand starting at position 1994 of SEQ ID NO: 1883323
ugucccaaacauugguaaa

SEQ ID NO: 2185515 - RNA, 19 nt, Artificial Sequence
  Description of Artificial Sequence: Synthetic oligonucleotide
  Antisense strand to SEQ ID NO: 2185514
uuuaccaauguuugggaca

SEQ ID NO: 2185516 - RNA, 19 nt, Artificial Sequence
  Description of Artificial Sequence: Synthetic oligonucleotide
  Sense strand starting at position 2023 of SEQ ID NO: 1883323
uguuguuuaucugagauuc

SEQ ID NO: 2185517 - RNA, 19 nt, Artificial Sequence
  Description of Artificial Sequence: Synthetic oligonucleotide
  Antisense strand to SEQ ID NO: 2185516
gaaucucagauaaacaaca

SEQ ID NO: 2185518 - RNA, 19 nt, Artificial Sequence
  Description of Artificial Sequence: Synthetic oligonucleotide
  Sense strand starting at position 2129 of SEQ ID NO: 1883323
caaaucugugucggacaca

SEQ ID NO: 2185519 - RNA, 19 nt, Artificial Sequence
  Description of Artificial Sequence: Synthetic oligonucleotide
  Antisense strand to SEQ ID NO: 2185518
uguguccgacacagauuug

SEQ ID NO: 2185520 - RNA, 19 nt, Artificial Sequence
  Description of Artificial Sequence: Synthetic oligonucleotide
  Sense strand starting at position 2172 of SEQ ID NO: 1883323
gguuguaccuggugacuca

SEQ ID NO: 2185521 - RNA, 19 nt, Artificial Sequence
  Description of Artificial Sequence: Synthetic oligonucleotide
  Antisense strand to SEQ ID NO: 2185520
ugagucaccagguacaacc

SEQ ID NO: 2185522 - RNA, 19 nt, Artificial Sequence
  Description of Artificial Sequence: Synthetic oligonucleotide
  Sense strand starting at position 2179 of SEQ ID NO: 1883323
ccuggugacucaggacauu

SEQ ID NO: 2185523 - RNA, 19 nt, Artificial Sequence
  Description of Artificial Sequence: Synthetic oligonucleotide
  Antisense strand to SEQ ID NO: 2185522
aauguccugagucaccagg

SEQ ID NO: 2185524 - RNA, 19 nt, Artificial Sequence
  Description of Artificial Sequence: Synthetic oligonucleotide
  Sense strand starting at position 2470 of SEQ ID NO: 1883323
cuucccugguucugggaaa

SEQ ID NO: 2185525 - RNA, 19 nt, Artificial Sequence
  Description of Artificial Sequence: Synthetic oligonucleotide
  Antisense strand to SEQ ID NO: 2185524
uuucccagaaccagggaag

SEQ ID NO: 2185526 - RNA, 19 nt, Artificial Sequence
  Description of Artificial Sequence: Synthetic oligonucleotide
  Sense strand starting at position 2660 of SEQ ID NO: 1883323
gagggagccuuuggagaaa

SEQ ID NO: 2185527 - RNA, 19 nt, Artificial Sequence
  Description of Artificial Sequence: Synthetic oligonucleotide
  Antisense strand to SEQ ID NO: 2185526
uuucuccaaaggcucccuc

SEQ ID NO: 2185528 - RNA, 19 nt, Artificial Sequence
  Description of Artificial Sequence: Synthetic oligonucleotide
  Sense strand starting at position 2663 of SEQ ID NO: 1883323
ggagccuuuggagaaaugu

SEQ ID NO: 2185529 - RNA, 19 nt, Artificial Sequence
  Description of Artificial Sequence: Synthetic oligonucleotide
  Antisense strand to SEQ ID NO: 2185528
acauuucuccaaaggcucc

SEQ ID NO: 2185530 - RNA, 19 nt, Artificial Sequence
  Description of Artificial Sequence: Synthetic oligonucleotide
  Sense strand starting at position 2673 of SEQ ID NO: 1883323
gagaaauguugccugacgu

SEQ ID NO: 2185531 - RNA, 19 nt, Artificial Sequence
  Description of Artificial Sequence: Synthetic oligonucleotide
  Antisense strand to SEQ ID NO: 2185530
acgucaggcaacauuucuc

SEQ ID NO: 2185532 - RNA, 19 nt, Artificial Sequence
  Description of Artificial Sequence: Synthetic oligonucleotide
  Sense strand starting at position 2674 of SEQ ID NO: 1883323
agaaauguugccugacguc

SEQ ID NO: 2185533 - RNA, 19 nt, Artificial Sequence
  Description of Artificial Sequence: Synthetic oligonucleotide
  Antisense strand to SEQ ID NO: 2185532
gacgucaggcaacauuucu

SEQ ID NO: 2185534 - RNA, 19 nt, Artificial Sequence
  Description of Artificial Sequence: Synthetic oligonucleotide
  Sense strand starting at position 3137 of SEQ ID NO: 1883323
ggacuuccgccuuguaaug

SEQ ID NO: 2185535 - RNA, 19 nt, Artificial Sequence
  Description of Artificial Sequence: Synthetic oligonucleotide
  Antisense strand to SEQ ID NO: 2185534
cauuacaaggcggaagucc

SEQ ID NO: 2185536 - RNA, 19 nt, Artificial Sequence
  Description of Artificial Sequence: Synthetic oligonucleotide
  Sense strand starting at position 3147 of SEQ ID NO: 1883323
cuuguaaugacaugucgcu

SEQ ID NO: 2185537 - RNA, 19 nt, Artificial Sequence
  Description of Artificial Sequence: Synthetic oligonucleotide
  Antisense strand to SEQ ID NO: 2185536
agcgacaugucauuacaag

SEQ ID NO: 2185538 - RNA, 19 nt, Artificial Sequence
  Description of Artificial Sequence: Synthetic oligonucleotide
  Sense strand starting at position 3152 of SEQ ID NO: 1883323
aaugacaugucgcugauuu

SEQ ID NO: 2185539 - RNA, 19 nt, Artificial Sequence
  Description of Artificial Sequence: Synthetic oligonucleotide
  Antisense strand to SEQ ID NO: 2185538
aaaucagcgacaugucauu

SEQ ID NO: 2185540 - RNA, 19 nt, Artificial Sequence
  Description of Artificial Sequence: Synthetic oligonucleotide
  Sense strand starting at position 3153 of SEQ ID NO: 1883323
augacaugucgcugauuua

SEQ ID NO: 2185541 - RNA, 19 nt, Artificial Sequence
  Description of Artificial Sequence: Synthetic oligonucleotide
  Antisense strand to SEQ ID NO: 2185540
uaaaucagcgacaugucau

SEQ ID NO: 2185542 - RNA, 19 nt, Artificial Sequence
  Description of Artificial Sequence: Synthetic oligonucleotide
  Sense strand starting at position 3189 of SEQ ID NO: 1883323
ccagcucugguuugugcaa

SEQ ID NO: 2185543 - RNA, 19 nt, Artificial Sequence
  Description of Artificial Sequence: Synthetic oligonucleotide
  Antisense strand to SEQ ID NO: 2185542
uugcacaaaccagagcugg

SEQ ID NO: 2185544 - RNA, 19 nt, Artificial Sequence
  Description of Artificial Sequence: Synthetic oligonucleotide
  Sense strand starting at position 3206 of SEQ ID NO: 1883323
aagucuggugcguucuuau

SEQ ID NO: 2185545 - RNA, 19 nt, Artificial Sequence
  Description of Artificial Sequence: Synthetic oligonucleotide
  Antisense strand to SEQ ID NO: 2185544
auaagaacgcaccagacuu

SEQ ID NO: 2185546 - RNA, 19 nt, Artificial Sequence
  Description of Artificial Sequence: Synthetic oligonucleotide
  Sense strand starting at position 3217 of SEQ ID NO: 1883323
guucuuaucucccuuguau

SEQ ID NO: 2185547 - RNA, 19 nt, Artificial Sequence
  Description of Artificial Sequence: Synthetic oligonucleotide
  Antisense strand to SEQ ID NO: 2185546
auacaagggagauaagaac

SEQ ID NO: 2185548 - RNA, 19 nt, Artificial Sequence
  Description of Artificial Sequence: Synthetic oligonucleotide
  Sense strand starting at position 3260 of SEQ ID NO: 1883323
cugguauguugagacaucu

SEQ ID NO: 2185549 - RNA, 19 nt, Artificial Sequence
  Description of Artificial Sequence: Synthetic oligonucleotide
  Antisense strand to SEQ ID NO: 2185548
agaugucucaacauaccag

SEQ ID NO: 2185550 - RNA, 19 nt, Artificial Sequence
  Description of Artificial Sequence: Synthetic oligonucleotide
  Sense strand starting at position 3266 of SEQ ID NO: 1883323
uguugagacaucuggagcu

SEQ ID NO: 2185551 - RNA, 19 nt, Artificial Sequence
  Description of Artificial Sequence: Synthetic oligonucleotide
  Antisense strand to SEQ ID NO: 2185550
agcuccagaugucucaaca

SEQ ID NO: 2185552 - RNA, 19 nt, Artificial Sequence
  Description of Artificial Sequence: Synthetic oligonucleotide
  Sense strand starting at position 3704 of SEQ ID NO: 1883323
ggagcauccuaaucacaaa

SEQ ID NO: 2185553 - RNA, 19 nt, Artificial Sequence
  Description of Artificial Sequence: Synthetic oligonucleotide
  Antisense strand to SEQ ID NO: 2185552
uuugugauuaggaugcucc

SEQ ID NO: 2185554 - RNA, 19 nt, Artificial Sequence
  Description of Artificial Sequence: Synthetic oligonucleotide
  Sense strand starting at position 3972 of SEQ ID NO: 1883323
cugugugucucucaaguag

SEQ ID NO: 2185555 - RNA, 19 nt, Artificial Sequence
  Description of Artificial Sequence: Synthetic oligonucleotide
  Antisense strand to SEQ ID NO: 2185554
cuacuugagagacacacag

SEQ ID NO: 2185556 - RNA, 19 nt, Artificial Sequence
  Description of Artificial Sequence: Synthetic oligonucleotide
  Sense strand starting at position 3976 of SEQ ID NO: 1883323
gugucucucaaguagaagu

SEQ ID NO: 2185557 - RNA, 19 nt, Artificial Sequence
  Description of Artificial Sequence: Synthetic oligonucleotide
  Antisense strand to SEQ ID NO: 2185556
acuucuacuugagagacac

SEQ ID NO: 2185558 - RNA, 19 nt, Artificial Sequence
  Description of Artificial Sequence: Synthetic oligonucleotide
  Sense strand starting at position 2 of SEQ ID NO: 1883324
agaaauggcuuuguaucga

SEQ ID NO: 2185559 - RNA, 19 nt, Artificial Sequence
  Description of Artificial Sequence: Synthetic oligonucleotide
  Antisense strand to SEQ ID NO: 2185558
ucgauacaaagccauuucu

SEQ ID NO: 2185560 - RNA, 19 nt, Artificial Sequence
  Description of Artificial Sequence: Synthetic oligonucleotide
  Sense strand starting at position 115 of SEQ ID NO: 1883324
gccuuuaaauaaguaugau

SEQ ID NO: 2185561 - RNA, 19 nt, Artificial Sequence
  Description of Artificial Sequence: Synthetic oligonucleotide
  Antisense strand to SEQ ID NO: 2185560
aucauacuuauuuaaaggc

SEQ ID NO: 2185562 - RNA, 19 nt, Artificial Sequence
  Description of Artificial Sequence: Synthetic oligonucleotide
  Sense strand starting at position 453 of SEQ ID NO: 1883324
acuguaaucuuaguagagu

SEQ ID NO: 2185563 - RNA, 19 nt, Artificial Sequence
  Description of Artificial Sequence: Synthetic oligonucleotide
  Antisense strand to SEQ ID NO: 2185562
acucuacuaagauuacagu

SEQ ID NO: 2185564 - RNA, 19 nt, Artificial Sequence
  Description of Artificial Sequence: Synthetic oligonucleotide
  Sense strand starting at position 456 of SEQ ID NO: 1883324
guaaucuuaguagaguaaa

SEQ ID NO: 2185565 - RNA, 19 nt, Artificial Sequence
  Description of Artificial Sequence: Synthetic oligonucleotide
  Antisense strand to SEQ ID NO: 2185564
uuuacucuacuaagauuac

SEQ ID NO: 2185566 - RNA, 19 nt, Artificial Sequence
  Description of Artificial Sequence: Synthetic oligonucleotide
  Sense strand starting at position 511 of SEQ ID NO: 1883324
gcaucuuccuguuugauuu

SEQ ID NO: 2185567 - RNA, 19 nt, Artificial Sequence
  Description of Artificial Sequence: Synthetic oligonucleotide
  Antisense strand to SEQ ID NO: 2185566
aaaucaaacaggaagaugc

SEQ ID NO: 2185568 - RNA, 19 nt, Artificial Sequence
  Description of Artificial Sequence: Synthetic oligonucleotide
  Sense strand starting at position 534 of SEQ ID NO: 1883324
gacgauacaugaguugcaa

SEQ ID NO: 2185569 - RNA, 19 nt, Artificial Sequence
  Description of Artificial Sequence: Synthetic oligonucleotide
  Antisense strand to SEQ ID NO: 2185568
uugcaacucauguaucguc

SEQ ID NO: 2185570 - RNA, 19 nt, Artificial Sequence
  Description of Artificial Sequence: Synthetic oligonucleotide
  Sense strand starting at position 536 of SEQ ID NO: 1883324
cgauacaugaguugcaaua

SEQ ID NO: 2185571 - RNA, 19 nt, Artificial Sequence
  Description of Artificial Sequence: Synthetic oligonucleotide
  Antisense strand to SEQ ID NO: 2185570
uauugcaacucauguaucg

SEQ ID NO: 2185572 - RNA, 19 nt, Artificial Sequence
  Description of Artificial Sequence: Synthetic oligonucleotide
  Sense strand starting at position 569 of SEQ ID NO: 1883324
caacuaagugaaugaguua

SEQ ID NO: 2185573 - RNA, 19 nt, Artificial Sequence
  Description of Artificial Sequence: Synthetic oligonucleotide
  Antisense strand to SEQ ID NO: 2185572
uaacucauucacuuaguug

SEQ ID NO: 2185574 - RNA, 19 nt, Artificial Sequence
  Description of Artificial Sequence: Synthetic oligonucleotide
  Sense strand starting at position 651 of SEQ ID NO: 1883324
guuccaugaaaugggucau

SEQ ID NO: 2185575 - RNA, 19 nt, Artificial Sequence
  Description of Artificial Sequence: Synthetic oligonucleotide
  Antisense strand to SEQ ID NO: 2185574
augacccauuucauggaac

SEQ ID NO: 2185576 - RNA, 19 nt, Artificial Sequence
  Description of Artificial Sequence: Synthetic oligonucleotide
  Sense strand starting at position 661 of SEQ ID NO: 1883324
augggucauuucuaauaaa

SEQ ID NO: 2185577 - RNA, 19 nt, Artificial Sequence
  Description of Artificial Sequence: Synthetic oligonucleotide
  Antisense strand to SEQ ID NO: 2185576
uuuauuagaaaugacccau

SEQ ID NO: 2185578 - RNA, 19 nt, Artificial Sequence
  Description of Artificial Sequence: Synthetic oligonucleotide
  Sense strand starting at position 775 of SEQ ID NO: 1883324
gugacuugucugagcgagu

SEQ ID NO: 2185579 - RNA, 19 nt, Artificial Sequence
  Description of Artificial Sequence: Synthetic oligonucleotide
  Antisense strand to SEQ ID NO: 2185578
acucgcucagacaagucac

SEQ ID NO: 2185580 - RNA, 19 nt, Artificial Sequence
  Description of Artificial Sequence: Synthetic oligonucleotide
  Sense strand starting at position 790 of SEQ ID NO: 1883324
gaguaauggccagagugag

SEQ ID NO: 2185581 - RNA, 19 nt, Artificial Sequence
  Description of Artificial Sequence: Synthetic oligonucleotide
  Antisense strand to SEQ ID NO: 2185580
cucacucuggccauuacuc

SEQ ID NO: 2185582 - RNA, 19 nt, Artificial Sequence
  Description of Artificial Sequence: Synthetic oligonucleotide
  Sense strand starting at position 870 of SEQ ID NO: 1883324
uuggaaagcuagcugauaa

SEQ ID NO: 2185583 - RNA, 19 nt, Artificial Sequence
  Description of Artificial Sequence: Synthetic oligonucleotide
  Antisense strand to SEQ ID NO: 2185582
uuaucagcuagcuuuccaa

SEQ ID NO: 2185584 - RNA, 19 nt, Artificial Sequence
  Description of Artificial Sequence: Synthetic oligonucleotide
  Sense strand starting at position 1171 of SEQ ID NO: 1883324
cccggcauccauuagauua

SEQ ID NO: 2185585 - RNA, 19 nt, Artificial Sequence
  Description of Artificial Sequence: Synthetic oligonucleotide
  Antisense strand to SEQ ID NO: 2185584
uaaucuaauggaugccggg

SEQ ID NO: 2185586 - RNA, 19 nt, Artificial Sequence
  Description of Artificial Sequence: Synthetic oligonucleotide
  Sense strand starting at position 1192 of SEQ ID NO: 1883324
gcagauuacagaggcuuau

SEQ ID NO: 2185587 - RNA, 19 nt, Artificial Sequence
  Description of Artificial Sequence: Synthetic oligonucleotide
  Antisense strand to SEQ ID NO: 2185586
auaagccucuguaaucugc

SEQ ID NO: 2185588 - RNA, 19 nt, Artificial Sequence
  Description of Artificial Sequence: Synthetic oligonucleotide
  Sense strand starting at position 1320 of SEQ ID NO: 1883324
ccgaaaguuacaggucacu

SEQ ID NO: 2185589 - RNA, 19 nt, Artificial Sequence
  Description of Artificial Sequence: Synthetic oligonucleotide
  Antisense strand to SEQ ID NO: 2185588
agugaccuguaacuuucgg

SEQ ID NO: 2185590 - RNA, 19 nt, Artificial Sequence
  Description of Artificial Sequence: Synthetic oligonucleotide
  Sense strand starting at position 1553 of SEQ ID NO: 1883324
aagaaaguuccaugugaga

SEQ ID NO: 2185591 - RNA, 19 nt, Artificial Sequence
  Description of Artificial Sequence: Synthetic oligonucleotide
  Antisense strand to SEQ ID NO: 2185590
ucucacauggaacuuucuu

SEQ ID NO: 2185592 - RNA, 19 nt, Artificial Sequence
  Description of Artificial Sequence: Synthetic oligonucleotide
  Sense strand starting at position 1555 of SEQ ID NO: 1883324
gaaaguuccaugugagaga

SEQ ID NO: 2185593 - RNA, 19 nt, Artificial Sequence
  Description of Artificial Sequence: Synthetic oligonucleotide
  Antisense strand to SEQ ID NO: 2185592
ucucucacauggaacuuuc

SEQ ID NO: 2185594 - RNA, 19 nt, Artificial Sequence
  Description of Artificial Sequence: Synthetic oligonucleotide
  Sense strand starting at position 1707 of SEQ ID NO: 1883324
ggcuccuggcccuaaauga

SEQ ID NO: 2185595 - RNA, 19 nt, Artificial Sequence
  Description of Artificial Sequence: Synthetic oligonucleotide
  Antisense strand to SEQ ID NO: 2185594
ucauuuagggccaggagcc

SEQ ID NO: 2185596 - RNA, 19 nt, Artificial Sequence
  Description of Artificial Sequence: Synthetic oligonucleotide
  Sense strand starting at position 1865 of SEQ ID NO: 1883324
cuggcauaucaagguagaa

SEQ ID NO: 2185597 - RNA, 19 nt, Artificial Sequence
  Description of Artificial Sequence: Synthetic oligonucleotide
  Antisense strand to SEQ ID NO: 2185596
uucuaccuugauaugccag

SEQ ID NO: 2185598 - RNA, 19 nt, Artificial Sequence
  Description of Artificial Sequence: Synthetic oligonucleotide
  Sense strand starting at position 1970 of SEQ ID NO: 1883324
uguaauaaguagguuucua

SEQ ID NO: 2185599 - RNA, 19 nt, Artificial Sequence
  Description of Artificial Sequence: Synthetic oligonucleotide
  Antisense strand to SEQ ID NO: 2185598
uagaaaccuacuuauuaca

SEQ ID NO: 2185600 - RNA, 19 nt, Artificial Sequence
  Description of Artificial Sequence: Synthetic oligonucleotide
  Sense strand starting at position 1974 of SEQ ID NO: 1883324
auaaguagguuucuaauuc

SEQ ID NO: 2185601 - RNA, 19 nt, Artificial Sequence
  Description of Artificial Sequence: Synthetic oligonucleotide
  Antisense strand to SEQ ID NO: 2185600
gaauuagaaaccuacuuau

SEQ ID NO: 2185602 - RNA, 19 nt, Artificial Sequence
  Description of Artificial Sequence: Synthetic oligonucleotide
  Sense strand starting at position 1991 of SEQ ID NO: 1883324
ucaugauacuguucuacag

SEQ ID NO: 2185603 - RNA, 19 nt, Artificial Sequence
  Description of Artificial Sequence: Synthetic oligonucleotide
  Antisense strand to SEQ ID NO: 2185602
cuguagaacaguaucauga

SEQ ID NO: 2185604 - RNA, 19 nt, Artificial Sequence
  Description of Artificial Sequence: Synthetic oligonucleotide
  Sense strand starting at position 2024 of SEQ ID NO: 1883324
ugguucuauuagguuaaau

SEQ ID NO: 2185605 - RNA, 19 nt, Artificial Sequence
  Description of Artificial Sequence: Synthetic oligonucleotide
  Antisense strand to SEQ ID NO: 2185604
auuuaaccuaauagaacca

SEQ ID NO: 2185606 - RNA, 19 nt, Artificial Sequence
  Description of Artificial Sequence: Synthetic oligonucleotide
  Sense strand starting at position 2026 of SEQ ID NO: 1883324
guucuauuagguuaaauug

SEQ ID NO: 2185607 - RNA, 19 nt, Artificial Sequence
  Description of Artificial Sequence: Synthetic oligonucleotide
  Antisense strand to SEQ ID NO: 2185606
caauuuaaccuaauagaac

SEQ ID NO: 2185608 - RNA, 19 nt, Artificial Sequence
  Description of Artificial Sequence: Synthetic oligonucleotide
  Sense strand starting at position 2149 of SEQ ID NO: 1883324
uaggaauucucacccaggu

SEQ ID NO: 2185609 - RNA, 19 nt, Artificial Sequence
  Description of Artificial Sequence: Synthetic oligonucleotide
  Antisense strand to SEQ ID NO: 2185608
accugggugagaauuccua

SEQ ID NO: 2185610 - RNA, 19 nt, Artificial Sequence
  Description of Artificial Sequence: Synthetic oligonucleotide
  Sense strand starting at position 2185 of SEQ ID NO: 1883324
ccgacuuggcaaugacuau

SEQ ID NO: 2185611 - RNA, 19 nt, Artificial Sequence
  Description of Artificial Sequence: Synthetic oligonucleotide
  Antisense strand to SEQ ID NO: 2185610
auagucauugccaagucgg

SEQ ID NO: 2185612 - RNA, 19 nt, Artificial Sequence
  Description of Artificial Sequence: Synthetic oligonucleotide
  Sense strand starting at position 2191 of SEQ ID NO: 1883324
uggcaaugacuauggaaug

SEQ ID NO: 2185613 - RNA, 19 nt, Artificial Sequence
  Description of Artificial Sequence: Synthetic oligonucleotide
  Antisense strand to SEQ ID NO: 2185612
cauuccauagucauugcca

SEQ ID NO: 2185614 - RNA, 19 nt, Artificial Sequence
  Description of Artificial Sequence: Synthetic oligonucleotide
  Sense strand starting at position 2212 of SEQ ID NO: 1883324
uacgcugugaaauggagaa

SEQ ID NO: 2185615 - RNA, 19 nt, Artificial Sequence
  Description of Artificial Sequence: Synthetic oligonucleotide
  Antisense strand to SEQ ID NO: 2185614
uucuccauuucacagcgua

SEQ ID NO: 2185616 - RNA, 19 nt, Artificial Sequence
  Description of Artificial Sequence: Synthetic oligonucleotide
  Sense strand starting at position 2214 of SEQ ID NO: 1883324
cgcugugaaauggagaaau

SEQ ID NO: 2185617 - RNA, 19 nt, Artificial Sequence
  Description of Artificial Sequence: Synthetic oligonucleotide
  Antisense strand to SEQ ID NO: 2185616
auuucuccauuucacagcg

SEQ ID NO: 2185618 - RNA, 19 nt, Artificial Sequence
  Description of Artificial Sequence: Synthetic oligonucleotide
  Sense strand starting at position 2224 of SEQ ID NO: 1883324
uggagaaauuacguggaau

SEQ ID NO: 2185619 - RNA, 19 nt, Artificial Sequence
  Description of Artificial Sequence: Synthetic oligonucleotide
  Antisense strand to SEQ ID NO: 2185618
auuccacguaauuucucca

SEQ ID NO: 2185620 - RNA, 19 nt, Artificial Sequence
  Description of Artificial Sequence: Synthetic oligonucleotide
  Sense strand starting at position 2256 of SEQ ID NO: 1883324
gggagugugcuuuaucaca

SEQ ID NO: 2185621 - RNA, 19 nt, Artificial Sequence
  Description of Artificial Sequence: Synthetic oligonucleotide
  Antisense strand to SEQ ID NO: 2185620
ugugauaaagcacacuccc

SEQ ID NO: 2185622 - RNA, 19 nt, Artificial Sequence
  Description of Artificial Sequence: Synthetic oligonucleotide
  Sense strand starting at position 2303 of SEQ ID NO: 1883324
ucuaaccuggcguauuaaa

SEQ ID NO: 2185623 - RNA, 19 nt, Artificial Sequence
  Description of Artificial Sequence: Synthetic oligonucleotide
  Antisense strand to SEQ ID NO: 2185622
uuuaauacgccagguuaga

SEQ ID NO: 2185624 - RNA, 19 nt, Artificial Sequence
  Description of Artificial Sequence: Synthetic oligonucleotide
  Sense strand starting at position 2595 of SEQ ID NO: 1883324
gucggagcuguccauaaag

SEQ ID NO: 2185625 - RNA, 19 nt, Artificial Sequence
  Description of Artificial Sequence: Synthetic oligonucleotide
  Antisense strand to SEQ ID NO: 2185624
cuuuauggacagcuccgac

SEQ ID NO: 2185626 - RNA, 19 nt, Artificial Sequence
  Description of Artificial Sequence: Synthetic oligonucleotide
  Sense strand starting at position 2623 of SEQ ID NO: 1883324
gcuauuggcccagagcuaa

SEQ ID NO: 2185627 - RNA, 19 nt, Artificial Sequence
  Description of Artificial Sequence: Synthetic oligonucleotide
  Antisense strand to SEQ ID NO: 2185626
uuagcucugggccaauagc

SEQ ID NO: 2185628 - RNA, 19 nt, Artificial Sequence
  Description of Artificial Sequence: Synthetic oligonucleotide
  Sense strand starting at position 2893 of SEQ ID NO: 1883324
ggagcccuaucauuaauga

SEQ ID NO: 2185629 - RNA, 19 nt, Artificial Sequence
  Description of Artificial Sequence: Synthetic oligonucleotide
  Antisense strand to SEQ ID NO: 2185628
ucauuaaugauagggcucc

SEQ ID NO: 2185630 - RNA, 19 nt, Artificial Sequence
  Description of Artificial Sequence: Synthetic oligonucleotide
  Sense strand starting at position 3422 of SEQ ID NO: 1883324
aaagaugaggcaugagguu

SEQ ID NO: 2185631 - RNA, 19 nt, Artificial Sequence
  Description of Artificial Sequence: Synthetic oligonucleotide
  Antisense strand to SEQ ID NO: 2185630
aaccucaugccucaucuuu

SEQ ID NO: 2185632 - RNA, 19 nt, Artificial Sequence
  Description of Artificial Sequence: Synthetic oligonucleotide
  Sense strand starting at position 3808 of SEQ ID NO: 1883324
ugacgauuaggugacgcau

SEQ ID NO: 2185633 - RNA, 19 nt, Artificial Sequence
  Description of Artificial Sequence: Synthetic oligonucleotide
  Antisense strand to SEQ ID NO: 2185632
augcgucaccuaaucguca

SEQ ID NO: 2185634 - RNA, 19 nt, Artificial Sequence
  Description of Artificial Sequence: Synthetic oligonucleotide
  Sense strand starting at position 3916 of SEQ ID NO: 1883324
aagacauccgagugguaac

SEQ ID NO: 2185635 - RNA, 19 nt, Artificial Sequence
  Description of Artificial Sequence: Synthetic oligonucleotide
  Antisense strand to SEQ ID NO: 2185634
guuaccacucggaugucuu

SEQ ID NO: 2185636 - RNA, 19 nt, Artificial Sequence
  Description of Artificial Sequence: Synthetic oligonucleotide
  Sense strand starting at position 3970 of SEQ ID NO: 1883324
agguccuugccugaaaggu

SEQ ID NO: 2185637 - RNA, 19 nt, Artificial Sequence
  Description of Artificial Sequence: Synthetic oligonucleotide
  Antisense strand to SEQ ID NO: 2185636
accuuucaggcaaggaccu

SEQ ID NO: 2185638 - RNA, 19 nt, Artificial Sequence
  Description of Artificial Sequence: Synthetic oligonucleotide
  Sense strand starting at position 116 of SEQ ID NO: 1883325
augagauaaagcugauguu

SEQ ID NO: 2185639 - RNA, 19 nt, Artificial Sequence
  Description of Artificial Sequence: Synthetic oligonucleotide
  Antisense strand to SEQ ID NO: 2185638
aacaucagcuuuaucucau

SEQ ID NO: 2185640 - RNA, 19 nt, Artificial Sequence
  Description of Artificial Sequence: Synthetic oligonucleotide
  Sense strand starting at position 151 of SEQ ID NO: 1883325
guaccaacaccuuagucaa

SEQ ID NO: 2185641 - RNA, 19 nt, Artificial Sequence
  Description of Artificial Sequence: Synthetic oligonucleotide
  Antisense strand to SEQ ID NO: 2185640
uugacuaagguguugguac

SEQ ID NO: 2185642 - RNA, 19 nt, Artificial Sequence
  Description of Artificial Sequence: Synthetic oligonucleotide
  Sense strand starting at position 171 of SEQ ID NO: 1883325
aagaguacuguugggacau

SEQ ID NO: 2185643 - RNA, 19 nt, Artificial Sequence
  Description of Artificial Sequence: Synthetic oligonucleotide
  Antisense strand to SEQ ID NO: 2185642
augucccaacaguacucuu

SEQ ID NO: 2185644 - RNA, 19 nt, Artificial Sequence
  Description of Artificial Sequence: Synthetic oligonucleotide
  Sense strand starting at position 248 of SEQ ID NO: 1883325
cugucauaguaccuaacaa

SEQ ID NO: 2185645 - RNA, 19 nt, Artificial Sequence
  Description of Artificial Sequence: Synthetic oligonucleotide
  Antisense strand to SEQ ID NO: 2185644
uuguuagguacuaugacag

SEQ ID NO: 2185646 - RNA, 19 nt, Artificial Sequence
  Description of Artificial Sequence: Synthetic oligonucleotide
  Sense strand starting at position 627 of SEQ ID NO: 1883325
aauauuuggugcgcucuua

SEQ ID NO: 2185647 - RNA, 19 nt, Artificial Sequence
  Description of Artificial Sequence: Synthetic oligonucleotide
  Antisense strand to SEQ ID NO: 2185646
uaagagcgcaccaaauauu

SEQ ID NO: 2185648 - RNA, 19 nt, Artificial Sequence
  Description of Artificial Sequence: Synthetic oligonucleotide
  Sense strand starting at position 631 of SEQ ID NO: 1883325
uuuggugcgcucuuauaac

SEQ ID NO: 2185649 - RNA, 19 nt, Artificial Sequence
  Description of Artificial Sequence: Synthetic oligonucleotide
  Antisense strand to SEQ ID NO: 2185648
guuauaagagcgcaccaaa

SEQ ID NO: 2185650 - RNA, 19 nt, Artificial Sequence
  Description of Artificial Sequence: Synthetic oligonucleotide
  Sense strand starting at position 676 of SEQ ID NO: 1883325
uagaguacgcauuauaaga

SEQ ID NO: 2185651 - RNA, 19 nt, Artificial Sequence
  Description of Artificial Sequence: Synthetic oligonucleotide
  Antisense strand to SEQ ID NO: 2185650
ucuuauaaugcguacucua

SEQ ID NO: 2185652 - RNA, 19 nt, Artificial Sequence
  Description of Artificial Sequence: Synthetic oligonucleotide
  Sense strand starting at position 714 of SEQ ID NO: 1883325
uugaaaguauuccuauuga

SEQ ID NO: 2185653 - RNA, 19 nt, Artificial Sequence
  Description of Artificial Sequence: Synthetic oligonucleotide
  Antisense strand to SEQ ID NO: 2185652
ucaauaggaauacuuucaa

SEQ ID NO: 2185654 - RNA, 19 nt, Artificial Sequence
  Description of Artificial Sequence: Synthetic oligonucleotide
  Sense strand starting at position 888 of SEQ ID NO: 1883325
cuaugaguuugcccaacau

SEQ ID NO: 2185655 - RNA, 19 nt, Artificial Sequence
  Description of Artificial Sequence: Synthetic oligonucleotide
  Antisense strand to SEQ ID NO: 2185654
auguugggcaaacucauag

SEQ ID NO: 2185656 - RNA, 19 nt, Artificial Sequence
  Description of Artificial Sequence: Synthetic oligonucleotide
  Sense strand starting at position 1266 of SEQ ID NO: 1883325
acgcauacacuccaguuaa

SEQ ID NO: 2185657 - RNA, 19 nt, Artificial Sequence
  Description of Artificial Sequence: Synthetic oligonucleotide
  Antisense strand to SEQ ID NO: 2185656
uuaacuggaguguaugcgu

SEQ ID NO: 2185658 - RNA, 19 nt, Artificial Sequence
  Description of Artificial Sequence: Synthetic oligonucleotide
  Sense strand starting at position 1349 of SEQ ID NO: 1883325
gaauucuuucgaggucaag

SEQ ID NO: 2185659 - RNA, 19 nt, Artificial Sequence
  Description of Artificial Sequence: Synthetic oligonucleotide
  Antisense strand to SEQ ID NO: 2185658
cuugaccucgaaagaauuc

SEQ ID NO: 2185660 - RNA, 19 nt, Artificial Sequence
  Description of Artificial Sequence: Synthetic oligonucleotide
  Sense strand starting at position 1500 of SEQ ID NO: 1883325
guuauugugauacacuguu

SEQ ID NO: 2185661 - RNA, 19 nt, Artificial Sequence
  Description of Artificial Sequence: Synthetic oligonucleotide
  Antisense strand to SEQ ID NO: 2185660
aacaguguaucacaauaac

SEQ ID NO: 2185662 - RNA, 19 nt, Artificial Sequence
  Description of Artificial Sequence: Synthetic oligonucleotide
  Sense strand starting at position 1582 of SEQ ID NO: 1883325
ccuauuugguagccuaauu

SEQ ID NO: 2185663 - RNA, 19 nt, Artificial Sequence
  Description of Artificial Sequence: Synthetic oligonucleotide
  Antisense strand to SEQ ID NO: 2185662
aauuaggcuaccaaauagg

SEQ ID NO: 2185664 - RNA, 19 nt, Artificial Sequence
  Description of Artificial Sequence: Synthetic oligonucleotide
  Sense strand starting at position 1655 of SEQ ID NO: 1883325
augaaugaaugcucaacua

SEQ ID NO: 2185665 - RNA, 19 nt, Artificial Sequence
  Description of Artificial Sequence: Synthetic oligonucleotide
  Antisense strand to SEQ ID NO: 2185664
uaguugagcauucauucau

SEQ ID NO: 2185666 - RNA, 19 nt, Artificial Sequence
  Description of Artificial Sequence: Synthetic oligonucleotide
  Sense strand starting at position 1679 of SEQ ID NO: 1883325
gcuaguaguauauaagaag

SEQ ID NO: 2185667 - RNA, 19 nt, Artificial Sequence
  Description of Artificial Sequence: Synthetic oligonucleotide
  Antisense strand to SEQ ID NO: 2185666
cuucuuauauacuacuagc

SEQ ID NO: 2185668 - RNA, 19 nt, Artificial Sequence
  Description of Artificial Sequence: Synthetic oligonucleotide
  Sense strand starting at position 1793 of SEQ ID NO: 1883325
uggagcauuccuuaguauu

SEQ ID NO: 2185669 - RNA, 19 nt, Artificial Sequence
  Description of Artificial Sequence: Synthetic oligonucleotide
  Antisense strand to SEQ ID NO: 2185668
aauacuaaggaaugcucca

SEQ ID NO: 2185670 - RNA, 19 nt, Artificial Sequence
  Description of Artificial Sequence: Synthetic oligonucleotide
  Sense strand starting at position 1855 of SEQ ID NO: 1883325
ugacucuuccuguaucuag

SEQ ID NO: 2185671 - RNA, 19 nt, Artificial Sequence
  Description of Artificial Sequence: Synthetic oligonucleotide
  Antisense strand to SEQ ID NO: 2185670
cuagauacaggaagaguca

SEQ ID NO: 2185672 - RNA, 19 nt, Artificial Sequence
  Description of Artificial Sequence: Synthetic oligonucleotide
  Sense strand starting at position 2047 of SEQ ID NO: 1883325
acuguaggugcucaacagu

SEQ ID NO: 2185673 - RNA, 19 nt, Artificial Sequence
  Description of Artificial Sequence: Synthetic oligonucleotide
  Antisense strand to SEQ ID NO: 2185672
acuguugagcaccuacagu

SEQ ID NO: 2185674 - RNA, 19 nt, Artificial Sequence
  Description of Artificial Sequence: Synthetic oligonucleotide
  Sense strand starting at position 2057 of SEQ ID NO: 1883325
cucaacaguguuuaucgaa

SEQ ID NO: 2185675 - RNA, 19 nt, Artificial Sequence
  Description of Artificial Sequence: Synthetic oligonucleotide
  Antisense strand to SEQ ID NO: 2185674
uucgauaaacacuguugag

SEQ ID NO: 2185676 - RNA, 19 nt, Artificial Sequence
  Description of Artificial Sequence: Synthetic oligonucleotide
  Sense strand starting at position 2065 of SEQ ID NO: 1883325
uguuuaucgaacugaauug

SEQ ID NO: 2185677 - RNA, 19 nt, Artificial Sequence
  Description of Artificial Sequence: Synthetic oligonucleotide
  Antisense strand to SEQ ID NO: 2185676
caauucaguucgauaaaca

SEQ ID NO: 2185678 - RNA, 19 nt, Artificial Sequence
  Description of Artificial Sequence: Synthetic oligonucleotide
  Sense strand starting at position 2066 of SEQ ID NO: 1883325
guuuaucgaacugaauuga

SEQ ID NO: 2185679 - RNA, 19 nt, Artificial Sequence
  Description of Artificial Sequence: Synthetic oligonucleotide
  Antisense strand to SEQ ID NO: 2185678
ucaauucaguucgauaaac

SEQ ID NO: 2185680 - RNA, 19 nt, Artificial Sequence
  Description of Artificial Sequence: Synthetic oligonucleotide
  Sense strand starting at position 2191 of SEQ ID NO: 1883325
gacccagugcgugaaagaa

SEQ ID NO: 2185681 - RNA, 19 nt, Artificial Sequence
  Description of Artificial Sequence: Synthetic oligonucleotide
  Antisense strand to SEQ ID NO: 2185680
uucuuucacgcacuggguc

SEQ ID NO: 2185682 - RNA, 19 nt, Artificial Sequence
  Description of Artificial Sequence: Synthetic oligonucleotide
  Sense strand starting at position 2248 of SEQ ID NO: 1883325
gaggcauucugggcugaca

SEQ ID NO: 2185683 - RNA, 19 nt, Artificial Sequence
  Description of Artificial Sequence: Synthetic oligonucleotide
  Antisense strand to SEQ ID NO: 2185682
ugucagcccagaaugccuc

SEQ ID NO: 2185684 - RNA, 19 nt, Artificial Sequence
  Description of Artificial Sequence: Synthetic oligonucleotide
  Sense strand starting at position 2347 of SEQ ID NO: 1883325
uguggaagccuuuacccaa

SEQ ID NO: 2185685 - RNA, 19 nt, Artificial Sequence
  Description of Artificial Sequence: Synthetic oligonucleotide
  Antisense strand to SEQ ID NO: 2185684
uuggguaaaggcuuccaca

SEQ ID NO: 2185686 - RNA, 19 nt, Artificial Sequence
  Description of Artificial Sequence: Synthetic oligonucleotide
  Sense strand starting at position 2451 of SEQ ID NO: 1883325
cuggucaugccagacagau

SEQ ID NO: 2185687 - RNA, 19 nt, Artificial Sequence
  Description of Artificial Sequence: Synthetic oligonucleotide
  Antisense strand to SEQ ID NO: 2185686
aucugucuggcaugaccag

SEQ ID NO: 2185688 - RNA, 19 nt, Artificial Sequence
  Description of Artificial Sequence: Synthetic oligonucleotide
  Sense strand starting at position 2608 of SEQ ID NO: 1883325
gcuugcuuucuggauaaac

SEQ ID NO: 2185689 - RNA, 19 nt, Artificial Sequence
  Description of Artificial Sequence: Synthetic oligonucleotide
  Antisense strand to SEQ ID NO: 2185688
guuuauccagaaagcaagc

SEQ ID NO: 2185690 - RNA, 19 nt, Artificial Sequence
  Description of Artificial Sequence: Synthetic oligonucleotide
  Sense strand starting at position 2610 of SEQ ID NO: 1883325
uugcuuucuggauaaacau

SEQ ID NO: 2185691 - RNA, 19 nt, Artificial Sequence
  Description of Artificial Sequence: Synthetic oligonucleotide
  Antisense strand to SEQ ID NO: 2185690
auguuuauccagaaagcaa

SEQ ID NO: 2185692 - RNA, 19 nt, Artificial Sequence
  Description of Artificial Sequence: Synthetic oligonucleotide
  Sense strand starting at position 2824 of SEQ ID NO: 1883325
auggcaagucaaugaggua

SEQ ID NO: 2185693 - RNA, 19 nt, Artificial Sequence
  Description of Artificial Sequence: Synthetic oligonucleotide
  Antisense strand to SEQ ID NO: 2185692
uaccucauugacuugccau

SEQ ID NO: 2185694 - RNA, 19 nt, Artificial Sequence
  Description of Artificial Sequence: Synthetic oligonucleotide
  Sense strand starting at position 2864 of SEQ ID NO: 1883325
gggugauagaacugguauc

SEQ ID NO: 2185695 - RNA, 19 nt, Artificial Sequence
  Description of Artificial Sequence: Synthetic oligonucleotide
  Antisense strand to SEQ ID NO: 2185694
gauaccaguucuaucaccc

SEQ ID NO: 2185696 - RNA, 19 nt, Artificial Sequence
  Description of Artificial Sequence: Synthetic oligonucleotide
  Sense strand starting at position 2865 of SEQ ID NO: 1883325
ggugauagaacugguauca

SEQ ID NO: 2185697 - RNA, 19 nt, Artificial Sequence
  Description of Artificial Sequence: Synthetic oligonucleotide
  Antisense strand to SEQ ID NO: 2185696
ugauaccaguucuaucacc

SEQ ID NO: 2185698 - RNA, 19 nt, Artificial Sequence
  Description of Artificial Sequence: Synthetic oligonucleotide
  Sense strand starting at position 2962 of SEQ ID NO: 1883325
ugcaauaaagcauguccaa

SEQ ID NO: 2185699 - RNA, 19 nt, Artificial Sequence
  Description of Artificial Sequence: Synthetic oligonucleotide
  Antisense strand to SEQ ID NO: 2185698
uuggacaugcuuuauugca

SEQ ID NO: 2185700 - RNA, 19 nt, Artificial Sequence
  Description of Artificial Sequence: Synthetic oligonucleotide
  Sense strand starting at position 3001 of SEQ ID NO: 1883325
agaauaggcaguuaaguua

SEQ ID NO: 2185701 - RNA, 19 nt, Artificial Sequence
  Description of Artificial Sequence: Synthetic oligonucleotide
  Antisense strand to SEQ ID NO: 2185700
uaacuuaacugccuauucu

SEQ ID NO: 2185702 - RNA, 19 nt, Artificial Sequence
  Description of Artificial Sequence: Synthetic oligonucleotide
  Sense strand starting at position 3075 of SEQ ID NO: 1883325
uaaggaagcuguuuagaau

SEQ ID NO: 2185703 - RNA, 19 nt, Artificial Sequence
  Description of Artificial Sequence: Synthetic oligonucleotide
  Antisense strand to SEQ ID NO: 2185702
auucuaaacagcuuccuua

SEQ ID NO: 2185704 - RNA, 19 nt, Artificial Sequence
  Description of Artificial Sequence: Synthetic oligonucleotide
  Sense strand starting at position 3084 of SEQ ID NO: 1883325
uguuuagaauuacccugaa

SEQ ID NO: 2185705 - RNA, 19 nt, Artificial Sequence
  Description of Artificial Sequence: Synthetic oligonucleotide
  Antisense strand to SEQ ID NO: 2185704
uucaggguaauucuaaaca

SEQ ID NO: 2185706 - RNA, 19 nt, Artificial Sequence
  Description of Artificial Sequence: Synthetic oligonucleotide
  Sense strand starting at position 3122 of SEQ ID NO: 1883325
agaguaggguuguucuaug

SEQ ID NO: 2185707 - RNA, 19 nt, Artificial Sequence
  Description of Artificial Sequence: Synthetic oligonucleotide
  Antisense strand to SEQ ID NO: 2185706
cauagaacaacccuacucu

SEQ ID NO: 2185708 - RNA, 19 nt, Artificial Sequence
  Description of Artificial Sequence: Synthetic oligonucleotide
  Sense strand starting at position 3235 of SEQ ID NO: 1883325
uguaauaaccagugauacc

SEQ ID NO: 2185709 - RNA, 19 nt, Artificial Sequence
  Description of Artificial Sequence: Synthetic oligonucleotide
  Antisense strand to SEQ ID NO: 2185708
gguaucacugguuauuaca

SEQ ID NO: 2185710 - RNA, 19 nt, Artificial Sequence
  Description of Artificial Sequence: Synthetic oligonucleotide
  Sense strand starting at position 3399 of SEQ ID NO: 1883325
ggucuuaauucuucuuuga

SEQ ID NO: 2185711 - RNA, 19 nt, Artificial Sequence
  Description of Artificial Sequence: Synthetic oligonucleotide
  Antisense strand to SEQ ID NO: 2185710
ucaaagaagaauuaagacc

SEQ ID NO: 2185712 - RNA, 19 nt, Artificial Sequence
  Description of Artificial Sequence: Synthetic oligonucleotide
  Sense strand starting at position 3450 of SEQ ID NO: 1883325
gguugaacagcuugaacau

SEQ ID NO: 2185713 - RNA, 19 nt, Artificial Sequence
  Description of Artificial Sequence: Synthetic oligonucleotide
  Antisense strand to SEQ ID NO: 2185712
auguucaagcuguucaacc

SEQ ID NO: 2185714 - RNA, 19 nt, Artificial Sequence
  Description of Artificial Sequence: Synthetic oligonucleotide
  Sense strand starting at position 3671 of SEQ ID NO: 1883325
guuauauuacaguaucuug

SEQ ID NO: 2185715 - RNA, 19 nt, Artificial Sequence
  Description of Artificial Sequence: Synthetic oligonucleotide
  Antisense strand to SEQ ID NO: 2185714
caagauacuguaauauaac

SEQ ID NO: 2185716 - RNA, 19 nt, Artificial Sequence
  Description of Artificial Sequence: Synthetic oligonucleotide
  Sense strand starting at position 3679 of SEQ ID NO: 1883325
acaguaucuuguuuauuac

SEQ ID NO: 2185717 - RNA, 19 nt, Artificial Sequence
  Description of Artificial Sequence: Synthetic oligonucleotide
  Antisense strand to SEQ ID NO: 2185716
guaauaaacaagauacugu

SEQ ID NO: 2185718 - RNA, 19 nt, Artificial Sequence
  Description of Artificial Sequence: Synthetic oligonucleotide
  Sense strand starting at position 34 of SEQ ID NO: 1883326
gagcaucuggacuggaauu

SEQ ID NO: 2185719 - RNA, 19 nt, Artificial Sequence
  Description of Artificial Sequence: Synthetic oligonucleotide
  Antisense strand to SEQ ID NO: 2185718
aauuccaguccagaugcuc

SEQ ID NO: 2185720 - RNA, 19 nt, Artificial Sequence
  Description of Artificial Sequence: Synthetic oligonucleotide
  Sense strand starting at position 407 of SEQ ID NO: 1883326
ggcagauguggccauuaga

SEQ ID NO: 2185721 - RNA, 19 nt, Artificial Sequence
  Description of Artificial Sequence: Synthetic oligonucleotide
  Antisense strand to SEQ ID NO: 2185720
ucuaauggccacaucugcc

SEQ ID NO: 2185722 - RNA, 19 nt, Artificial Sequence
  Description of Artificial Sequence: Synthetic oligonucleotide
  Sense strand starting at position 498 of SEQ ID NO: 1883326
auauuuagaucagauggua

SEQ ID NO: 2185723 - RNA, 19 nt, Artificial Sequence
  Description of Artificial Sequence: Synthetic oligonucleotide
  Antisense strand to SEQ ID NO: 2185722
uaccaucugaucuaaauau

SEQ ID NO: 2185724 - RNA, 19 nt, Artificial Sequence
  Description of Artificial Sequence: Synthetic oligonucleotide
  Sense strand starting at position 595 of SEQ ID NO: 1883326
gcaucacaggcuuagaaug

SEQ ID NO: 2185725 - RNA, 19 nt, Artificial Sequence
  Description of Artificial Sequence: Synthetic oligonucleotide
  Antisense strand to SEQ ID NO: 2185724
cauucuaagccugugaugc

SEQ ID NO: 2185726 - RNA, 19 nt, Artificial Sequence
  Description of Artificial Sequence: Synthetic oligonucleotide
  Sense strand starting at position 602 of SEQ ID NO: 1883326
aggcuuagaauguaguuau

SEQ ID NO: 2185727 - RNA, 19 nt, Artificial Sequence
  Description of Artificial Sequence: Synthetic oligonucleotide
  Antisense strand to SEQ ID NO: 2185726
auaacuacauucuaagccu

SEQ ID NO: 2185728 - RNA, 19 nt, Artificial Sequence
  Description of Artificial Sequence: Synthetic oligonucleotide
  Sense strand starting at position 678 of SEQ ID NO: 1883326
aauagugggaugugaugaa

SEQ ID NO: 2185729 - RNA, 19 nt, Artificial Sequence
  Description of Artificial Sequence: Synthetic oligonucleotide
  Antisense strand to SEQ ID NO: 2185728
uucaucacaucccacuauu

SEQ ID NO: 2185730 - RNA, 19 nt, Artificial Sequence
  Description of Artificial Sequence: Synthetic oligonucleotide
  Sense strand starting at position 690 of SEQ ID NO: 1883326
ugaugaaauucugugguac

SEQ ID NO: 2185731 - RNA, 19 nt, Artificial Sequence
  Description of Artificial Sequence: Synthetic oligonucleotide
  Antisense strand to SEQ ID NO: 2185730
guaccacagaauuucauca

SEQ ID NO: 2185732 - RNA, 19 nt, Artificial Sequence
  Description of Artificial Sequence: Synthetic oligonucleotide
  Sense strand starting at position 888 of SEQ ID NO: 1883326
cuguccaguccauauacua

SEQ ID NO: 2185733 - RNA, 19 nt, Artificial Sequence
  Description of Artificial Sequence: Synthetic oligonucleotide
  Antisense strand to SEQ ID NO: 2185732
uaguauauggacuggacag

SEQ ID NO: 2185734 - RNA, 19 nt, Artificial Sequence
  Description of Artificial Sequence: Synthetic oligonucleotide
  Sense strand starting at position 971 of SEQ ID NO: 1883326
uuuacaauugguuaagcau

SEQ ID NO: 2185735 - RNA, 19 nt, Artificial Sequence
  Description of Artificial Sequence: Synthetic oligonucleotide
  Antisense strand to SEQ ID NO: 2185734
augcuuaaccaauuguaaa

SEQ ID NO: 2185736 - RNA, 19 nt, Artificial Sequence
  Description of Artificial Sequence: Synthetic oligonucleotide
  Sense strand starting at position 1001 of SEQ ID NO: 1883326
ucugcacaucuuuaagaag

SEQ ID NO: 2185737 - RNA, 19 nt, Artificial Sequence
  Description of Artificial Sequence: Synthetic oligonucleotide
  Antisense strand to SEQ ID NO: 2185736
cuucuuaaagaugugcaga

SEQ ID NO: 2185738 - RNA, 19 nt, Artificial Sequence
  Description of Artificial Sequence: Synthetic oligonucleotide
  Sense strand starting at position 1196 of SEQ ID NO: 1883326
ucgcuauagaaaggacuua

SEQ ID NO: 2185739 - RNA, 19 nt, Artificial Sequence
  Description of Artificial Sequence: Synthetic oligonucleotide
  Antisense strand to SEQ ID NO: 2185738
uaaguccuuucuauagcga

SEQ ID NO: 2185740 - RNA, 19 nt, Artificial Sequence
  Description of Artificial Sequence: Synthetic oligonucleotide
  Sense strand starting at position 1232 of SEQ ID NO: 1883326
ggaagugaacgcuaauuaa

SEQ ID NO: 2185741 - RNA, 19 nt, Artificial Sequence
  Description of Artificial Sequence: Synthetic oligonucleotide
  Antisense strand to SEQ ID NO: 2185740
uuaauuagcguucacuucc

SEQ ID NO: 2185742 - RNA, 19 nt, Artificial Sequence
  Description of Artificial Sequence: Synthetic oligonucleotide
  Sense strand starting at position 1309 of SEQ ID NO: 1883326
uuguaaauuuaugagggau

SEQ ID NO: 2185743 - RNA, 19 nt, Artificial Sequence
  Description of Artificial Sequence: Synthetic oligonucleotide
  Antisense strand to SEQ ID NO: 2185742
aucccucauaaauuuacaa

SEQ ID NO: 2185744 - RNA, 19 nt, Artificial Sequence
  Description of Artificial Sequence: Synthetic oligonucleotide
  Sense strand starting at position 1436 of SEQ ID NO: 1883326
ucaagucuguguuuauuua

SEQ ID NO: 2185745 - RNA, 19 nt, Artificial Sequence
  Description of Artificial Sequence: Synthetic oligonucleotide
  Antisense strand to SEQ ID NO: 2185744
uaaauaaacacagacuuga

SEQ ID NO: 2185746 - RNA, 19 nt, Artificial Sequence
  Description of Artificial Sequence: Synthetic oligonucleotide
  Sense strand starting at position 1517 of SEQ ID NO: 1883326
ugugaaaugacuuggaggu

SEQ ID NO: 2185747 - RNA, 19 nt, Artificial Sequence
  Description of Artificial Sequence: Synthetic oligonucleotide
  Antisense strand to SEQ ID NO: 2185746
accuccaagucauuucaca

SEQ ID NO: 2185748 - RNA, 19 nt, Artificial Sequence
  Description of Artificial Sequence: Synthetic oligonucleotide
  Sense strand starting at position 1518 of SEQ ID NO: 1883326
gugaaaugacuuggagguu

SEQ ID NO: 2185749 - RNA, 19 nt, Artificial Sequence
  Description of Artificial Sequence: Synthetic oligonucleotide
  Antisense strand to SEQ ID NO: 2185748
aaccuccaagucauuucac

SEQ ID NO: 2185750 - RNA, 19 nt, Artificial Sequence
  Description of Artificial Sequence: Synthetic oligonucleotide
  Sense strand starting at position 1629 of SEQ ID NO: 1883326
aguuaacacaugugaugga

SEQ ID NO: 2185751 - RNA, 19 nt, Artificial Sequence
  Description of Artificial Sequence: Synthetic oligonucleotide
  Antisense strand to SEQ ID NO: 2185750
uccaucacauguguuaacu

SEQ ID NO: 2185752 - RNA, 19 nt, Artificial Sequence
  Description of Artificial Sequence: Synthetic oligonucleotide
  Sense strand starting at position 1633 of SEQ ID NO: 1883326
aacacaugugauggaguga

SEQ ID NO: 2185753 - RNA, 19 nt, Artificial Sequence
  Description of Artificial Sequence: Synthetic oligonucleotide
  Antisense strand to SEQ ID NO: 2185752
ucacuccaucacauguguu

SEQ ID NO: 2185754 - RNA, 19 nt, Artificial Sequence
  Description of Artificial Sequence: Synthetic oligonucleotide
  Sense strand starting at position 1749 of SEQ ID NO: 1883326
aaugauaucuuaguuguag

SEQ ID NO: 2185755 - RNA, 19 nt, Artificial Sequence
  Description of Artificial Sequence: Synthetic oligonucleotide
  Antisense strand to SEQ ID NO: 2185754
cuacaacuaagauaucauu

SEQ ID NO: 2185756 - RNA, 19 nt, Artificial Sequence
  Description of Artificial Sequence: Synthetic oligonucleotide
  Sense strand starting at position 1825 of SEQ ID NO: 1883326
ucugauuucugcuugcuau

SEQ ID NO: 2185757 - RNA, 19 nt, Artificial Sequence
  Description of Artificial Sequence: Synthetic oligonucleotide
  Antisense strand to SEQ ID NO: 2185756
auagcaagcagaaaucaga

SEQ ID NO: 2185758 - RNA, 19 nt, Artificial Sequence
  Description of Artificial Sequence: Synthetic oligonucleotide
  Sense strand starting at position 1826 of SEQ ID NO: 1883326
cugauuucugcuugcuauc

SEQ ID NO: 2185759 - RNA, 19 nt, Artificial Sequence
  Description of Artificial Sequence: Synthetic oligonucleotide
  Antisense strand to SEQ ID NO: 2185758
gauagcaagcagaaaucag

SEQ ID NO: 2185760 - RNA, 19 nt, Artificial Sequence
  Description of Artificial Sequence: Synthetic oligonucleotide
  Sense strand starting at position 2326 of SEQ ID NO: 1883326
gagaaaggguuaguacauc

SEQ ID NO: 2185761 - RNA, 19 nt, Artificial Sequence
  Description of Artificial Sequence: Synthetic oligonucleotide
  Antisense strand to SEQ ID NO: 2185760
gauguacuaacccuuucuc

SEQ ID NO: 2185762 - RNA, 19 nt, Artificial Sequence
  Description of Artificial Sequence: Synthetic oligonucleotide
  Sense strand starting at position 2332 of SEQ ID NO: 1883326
ggguuaguacaucaacuuu

SEQ ID NO: 2185763 - RNA, 19 nt, Artificial Sequence
  Description of Artificial Sequence: Synthetic oligonucleotide
  Antisense strand to SEQ ID NO: 2185762
aaaguugauguacuaaccc

SEQ ID NO: 2185764 - RNA, 19 nt, Artificial Sequence
  Description of Artificial Sequence: Synthetic oligonucleotide
  Sense strand starting at position 2753 of SEQ ID NO: 1883326
aguuaacuucuggacaugu

SEQ ID NO: 2185765 - RNA, 19 nt, Artificial Sequence
  Description of Artificial Sequence: Synthetic oligonucleotide
  Antisense strand to SEQ ID NO: 2185764
acauguccagaaguuaacu

SEQ ID NO: 2185766 - RNA, 19 nt, Artificial Sequence
  Description of Artificial Sequence: Synthetic oligonucleotide
  Sense strand starting at position 2755 of SEQ ID NO: 1883326
uuaacuucuggacauguuu

SEQ ID NO: 2185767 - RNA, 19 nt, Artificial Sequence
  Description of Artificial Sequence: Synthetic oligonucleotide
  Antisense strand to SEQ ID NO: 2185766
aaacauguccagaaguuaa

SEQ ID NO: 2185768 - RNA, 19 nt, Artificial Sequence
  Description of Artificial Sequence: Synthetic oligonucleotide
  Sense strand starting at position 2821 of SEQ ID NO: 1883326
auaguuugugaagauugca

SEQ ID NO: 2185769 - RNA, 19 nt, Artificial Sequence
  Description of Artificial Sequence: Synthetic oligonucleotide
  Antisense strand to SEQ ID NO: 2185768
ugcaaucuucacaaacuau

SEQ ID NO: 2185770 - RNA, 19 nt, Artificial Sequence
  Description of Artificial Sequence: Synthetic oligonucleotide
  Sense strand starting at position 2829 of SEQ ID NO: 1883326
ugaagauugcaauguuaaa

SEQ ID NO: 2185771 - RNA, 19 nt, Artificial Sequence
  Description of Artificial Sequence: Synthetic oligonucleotide
  Antisense strand to SEQ ID NO: 2185770
uuuaacauugcaaucuuca

SEQ ID NO: 2185772 - RNA, 19 nt, Artificial Sequence
  Description of Artificial Sequence: Synthetic oligonucleotide
  Sense strand starting at position 2913 of SEQ ID NO: 1883326
augaaauguuuaucaaguc

SEQ ID NO: 2185773 - RNA, 19 nt, Artificial Sequence
  Description of Artificial Sequence: Synthetic oligonucleotide
  Antisense strand to SEQ ID NO: 2185772
gacuugauaaacauuucau

SEQ ID NO: 2185774 - RNA, 19 nt, Artificial Sequence
  Description of Artificial Sequence: Synthetic oligonucleotide
  Sense strand starting at position 2938 of SEQ ID NO: 1883326
gauaaaccauuugggagau

SEQ ID NO: 2185775 - RNA, 19 nt, Artificial Sequence
  Description of Artificial Sequence: Synthetic oligonucleotide
  Antisense strand to SEQ ID NO: 2185774
aucucccaaaugguuuauc

SEQ ID NO: 2185776 - RNA, 19 nt, Artificial Sequence
  Description of Artificial Sequence: Synthetic oligonucleotide
  Sense strand starting at position 3113 of SEQ ID NO: 1883326
cagagaggccuguaggcau

SEQ ID NO: 2185777 - RNA, 19 nt, Artificial Sequence
  Description of Artificial Sequence: Synthetic oligonucleotide
  Antisense strand to SEQ ID NO: 2185776
augccuacaggccucucug

SEQ ID NO: 2185778 - RNA, 19 nt, Artificial Sequence
  Description of Artificial Sequence: Synthetic oligonucleotide
  Sense strand starting at position 3217 of SEQ ID NO: 1883326
cuccuauggccagaugacu

SEQ ID NO: 2185779 - RNA, 19 nt, Artificial Sequence
  Description of Artificial Sequence: Synthetic oligonucleotide
  Antisense strand to SEQ ID NO: 2185778
agucaucuggccauaggag

SEQ ID NO: 2185780 - RNA, 19 nt, Artificial Sequence
  Description of Artificial Sequence: Synthetic oligonucleotide
  Sense strand starting at position 3321 of SEQ ID NO: 1883326
auggauguuagugaggcaa

SEQ ID NO: 2185781 - RNA, 19 nt, Artificial Sequence
  Description of Artificial Sequence: Synthetic oligonucleotide
  Antisense strand to SEQ ID NO: 2185780
uugccucacuaacauccau

SEQ ID NO: 2185782 - RNA, 19 nt, Artificial Sequence
  Description of Artificial Sequence: Synthetic oligonucleotide
  Sense strand starting at position 3368 of SEQ ID NO: 1883326
uggucacuuccucaagaug

SEQ ID NO: 2185783 - RNA, 19 nt, Artificial Sequence
  Description of Artificial Sequence: Synthetic oligonucleotide
  Antisense strand to SEQ ID NO: 2185782
caucuugaggaagugacca

SEQ ID NO: 2185784 - RNA, 19 nt, Artificial Sequence
  Description of Artificial Sequence: Synthetic oligonucleotide
  Sense strand starting at position 3384 of SEQ ID NO: 1883326
augcacugucccgaaggaa

SEQ ID NO: 2185785 - RNA, 19 nt, Artificial Sequence
  Description of Artificial Sequence: Synthetic oligonucleotide
  Antisense strand to SEQ ID NO: 2185784
uuccuucgggacagugcau

SEQ ID NO: 2185786 - RNA, 19 nt, Artificial Sequence
  Description of Artificial Sequence: Synthetic oligonucleotide
  Sense strand starting at position 3431 of SEQ ID NO: 1883326
ucucauugccaagaaguau

SEQ ID NO: 2185787 - RNA, 19 nt, Artificial Sequence
  Description of Artificial Sequence: Synthetic oligonucleotide
  Antisense strand to SEQ ID NO: 2185786
auacuucuuggcaaugaga

SEQ ID NO: 2185788 - RNA, 19 nt, Artificial Sequence
  Description of Artificial Sequence: Synthetic oligonucleotide
  Sense strand starting at position 3594 of SEQ ID NO: 1883326
auagauauauguuucccau

SEQ ID NO: 2185789 - RNA, 19 nt, Artificial Sequence
  Description of Artificial Sequence: Synthetic oligonucleotide
  Antisense strand to SEQ ID NO: 2185788
augggaaacauauaucuau

SEQ ID NO: 2185790 - RNA, 19 nt, Artificial Sequence
  Description of Artificial Sequence: Synthetic oligonucleotide
  Sense strand starting at position 3596 of SEQ ID NO: 1883326
agauauauguuucccauua

SEQ ID NO: 2185791 - RNA, 19 nt, Artificial Sequence
  Description of Artificial Sequence: Synthetic oligonucleotide
  Antisense strand to SEQ ID NO: 2185790
uaaugggaaacauauaucu

SEQ ID NO: 2185792 - RNA, 19 nt, Artificial Sequence
  Description of Artificial Sequence: Synthetic oligonucleotide
  Sense strand starting at position 3810 of SEQ ID NO: 1883326
cuaccugauggguaucauu

SEQ ID NO: 2185793 - RNA, 19 nt, Artificial Sequence
  Description of Artificial Sequence: Synthetic oligonucleotide
  Antisense strand to SEQ ID NO: 2185792
aaugauacccaucagguag

SEQ ID NO: 2185794 - RNA, 19 nt, Artificial Sequence
  Description of Artificial Sequence: Synthetic oligonucleotide
  Sense strand starting at position 3880 of SEQ ID NO: 1883326
uuuauaaggcuguauuaac

SEQ ID NO: 2185795 - RNA, 19 nt, Artificial Sequence
  Description of Artificial Sequence: Synthetic oligonucleotide
  Antisense strand to SEQ ID NO: 2185794
guuaauacagccuuauaaa

SEQ ID NO: 2185796 - RNA, 19 nt, Artificial Sequence
  Description of Artificial Sequence: Synthetic oligonucleotide
  Sense strand starting at position 3916 of SEQ ID NO: 1883326
uagacucauggugguauga

SEQ ID NO: 2185797 - RNA, 19 nt, Artificial Sequence
  Description of Artificial Sequence: Synthetic oligonucleotide
  Antisense strand to SEQ ID NO: 2185796
ucauaccaccaugagucua

SEQ ID NO: 2185798 - RNA, 19 nt, Artificial Sequence
  Description of Artificial Sequence: Synthetic oligonucleotide
  Sense strand starting at position 19 of SEQ ID NO: 1883327
agaaauguauuagcacaua

SEQ ID NO: 2185799 - RNA, 19 nt, Artificial Sequence
  Description of Artificial Sequence: Synthetic oligonucleotide
  Antisense strand to SEQ ID NO: 2185798
uaugugcuaauacauuucu

SEQ ID NO: 2185800 - RNA, 19 nt, Artificial Sequence
  Description of Artificial Sequence: Synthetic oligonucleotide
  Sense strand starting at position 141 of SEQ ID NO: 1883327
cuguuauuacuaggaggua

SEQ ID NO: 2185801 - RNA, 19 nt, Artificial Sequence
  Description of Artificial Sequence: Synthetic oligonucleotide
  Antisense strand to SEQ ID NO: 2185800
uaccuccuaguaauaacag

SEQ ID NO: 2185802 - RNA, 19 nt, Artificial Sequence
  Description of Artificial Sequence: Synthetic oligonucleotide
  Sense strand starting at position 268 of SEQ ID NO: 1883327
gcauuauguggaggagaug

SEQ ID NO: 2185803 - RNA, 19 nt, Artificial Sequence
  Description of Artificial Sequence: Synthetic oligonucleotide
  Antisense strand to SEQ ID NO: 2185802
caucuccuccacauaaugc

SEQ ID NO: 2185804 - RNA, 19 nt, Artificial Sequence
  Description of Artificial Sequence: Synthetic oligonucleotide
  Sense strand starting at position 280 of SEQ ID NO: 1883327
ggagauguuagagggccua

SEQ ID NO: 2185805 - RNA, 19 nt, Artificial Sequence
  Description of Artificial Sequence: Synthetic oligonucleotide
  Antisense strand to SEQ ID NO: 2185804
uaggcccucuaacaucucc

SEQ ID NO: 2185806 - RNA, 19 nt, Artificial Sequence
  Description of Artificial Sequence: Synthetic oligonucleotide
  Sense strand starting at position 293 of SEQ ID NO: 1883327
ggccuaguggaacaaucuu

SEQ ID NO: 2185807 - RNA, 19 nt, Artificial Sequence
  Description of Artificial Sequence: Synthetic oligonucleotide
  Antisense strand to SEQ ID NO: 2185806
aagauuguuccacuaggcc

SEQ ID NO: 2185808 - RNA, 19 nt, Artificial Sequence
  Description of Artificial Sequence: Synthetic oligonucleotide
  Sense strand starting at position 409 of SEQ ID NO: 1883327
auuggacuaucuucugaau

SEQ ID NO: 2185809 - RNA, 19 nt, Artificial Sequence
  Description of Artificial Sequence: Synthetic oligonucleotide
  Antisense strand to SEQ ID NO: 2185808
auucagaagauaguccaau

SEQ ID NO: 2185810 - RNA, 19 nt, Artificial Sequence
  Description of Artificial Sequence: Synthetic oligonucleotide
  Sense strand starting at position 704 of SEQ ID NO: 1883327
agaaauggauuucaggagu

SEQ ID NO: 2185811 - RNA, 19 nt, Artificial Sequence
  Description of Artificial Sequence: Synthetic oligonucleotide
  Antisense strand to SEQ ID NO: 2185810
acuccugaaauccauuucu

SEQ ID NO: 2185812 - RNA, 19 nt, Artificial Sequence
  Description of Artificial Sequence: Synthetic oligonucleotide
  Sense strand starting at position 865 of SEQ ID NO: 1883327
ucagauucuuuaguacaga

SEQ ID NO: 2185813 - RNA, 19 nt, Artificial Sequence
  Description of Artificial Sequence: Synthetic oligonucleotide
  Antisense strand to SEQ ID NO: 2185812
ucuguacuaaagaaucuga

SEQ ID NO: 2185814 - RNA, 19 nt, Artificial Sequence
  Description of Artificial Sequence: Synthetic oligonucleotide
  Sense strand starting at position 922 of SEQ ID NO: 1883327
cugcauaagguagauguua

SEQ ID NO: 2185815 - RNA, 19 nt, Artificial Sequence
  Description of Artificial Sequence: Synthetic oligonucleotide
  Antisense strand to SEQ ID NO: 2185814
uaacaucuaccuuaugcag

SEQ ID NO: 2185816 - RNA, 19 nt, Artificial Sequence
  Description of Artificial Sequence: Synthetic oligonucleotide
  Sense strand starting at position 982 of SEQ ID NO: 1883327
uguaguauuaaacaugguu

SEQ ID NO: 2185817 - RNA, 19 nt, Artificial Sequence
  Description of Artificial Sequence: Synthetic oligonucleotide
  Antisense strand to SEQ ID NO: 2185816
aaccauguuuaauacuaca

SEQ ID NO: 2185818 - RNA, 19 nt, Artificial Sequence
  Description of Artificial Sequence: Synthetic oligonucleotide
  Sense strand starting at position 1592 of SEQ ID NO: 1883327
agaaauaaaguuugccuuu

SEQ ID NO: 2185819 - RNA, 19 nt, Artificial Sequence
  Description of Artificial Sequence: Synthetic oligonucleotide
  Antisense strand to SEQ ID NO: 2185818
aaaggcaaacuuuauuucu

SEQ ID NO: 2185820 - RNA, 19 nt, Artificial Sequence
  Description of Artificial Sequence: Synthetic oligonucleotide
  Sense strand starting at position 1653 of SEQ ID NO: 1883327
ucaggacuaguuugguuaa

SEQ ID NO: 2185821 - RNA, 19 nt, Artificial Sequence
  Description of Artificial Sequence: Synthetic oligonucleotide
  Antisense strand to SEQ ID NO: 2185820
uuaaccaaacuaguccuga

SEQ ID NO: 2185822 - RNA, 19 nt, Artificial Sequence
  Description of Artificial Sequence: Synthetic oligonucleotide
  Sense strand starting at position 1655 of SEQ ID NO: 1883327
aggacuaguuugguuaaau

SEQ ID NO: 2185823 - RNA, 19 nt, Artificial Sequence
  Description of Artificial Sequence: Synthetic oligonucleotide
  Antisense strand to SEQ ID NO: 2185822
auuuaaccaaacuaguccu

SEQ ID NO: 2185824 - RNA, 19 nt, Artificial Sequence
  Description of Artificial Sequence: Synthetic oligonucleotide
  Sense strand starting at position 1656 of SEQ ID NO: 1883327
ggacuaguuugguuaaauu

SEQ ID NO: 2185825 - RNA, 19 nt, Artificial Sequence
  Description of Artificial Sequence: Synthetic oligonucleotide
  Antisense strand to SEQ ID NO: 2185824
aauuuaaccaaacuagucc

SEQ ID NO: 2185826 - RNA, 19 nt, Artificial Sequence
  Description of Artificial Sequence: Synthetic oligonucleotide
  Sense strand starting at position 1749 of SEQ ID NO: 1883327
gguagaagacuuuguaaac

SEQ ID NO: 2185827 - RNA, 19 nt, Artificial Sequence
  Description of Artificial Sequence: Synthetic oligonucleotide
  Antisense strand to SEQ ID NO: 2185826
guuuacaaagucuucuacc

SEQ ID NO: 2185828 - RNA, 19 nt, Artificial Sequence
  Description of Artificial Sequence: Synthetic oligonucleotide
  Sense strand starting at position 1750 of SEQ ID NO: 1883327
guagaagacuuuguaaacu

SEQ ID NO: 2185829 - RNA, 19 nt, Artificial Sequence
  Description of Artificial Sequence: Synthetic oligonucleotide
  Antisense strand to SEQ ID NO: 2185828
aguuuacaaagucuucuac

SEQ ID NO: 2185830 - RNA, 19 nt, Artificial Sequence
  Description of Artificial Sequence: Synthetic oligonucleotide
  Sense strand starting at position 1794 of SEQ ID NO: 1883327
agaagacucuuugcuggaa

SEQ ID NO: 2185831 - RNA, 19 nt, Artificial Sequence
  Description of Artificial Sequence: Synthetic oligonucleotide
  Antisense strand to SEQ ID NO: 2185830
uuccagcaaagagucuucu

SEQ ID NO: 2185832 - RNA, 19 nt, Artificial Sequence
  Description of Artificial Sequence: Synthetic oligonucleotide
  Sense strand starting at position 1798 of SEQ ID NO: 1883327
gacucuuugcuggaaguua

SEQ ID NO: 2185833 - RNA, 19 nt, Artificial Sequence
  Description of Artificial Sequence: Synthetic oligonucleotide
  Antisense strand to SEQ ID NO: 2185832
uaacuuccagcaaagaguc

SEQ ID NO: 2185834 - RNA, 19 nt, Artificial Sequence
  Description of Artificial Sequence: Synthetic oligonucleotide
  Sense strand starting at position 1835 of SEQ ID NO: 1883327
cccagugugcaauagauua

SEQ ID NO: 2185835 - RNA, 19 nt, Artificial Sequence
  Description of Artificial Sequence: Synthetic oligonucleotide
  Antisense strand to SEQ ID NO: 2185834
uaaucuauugcacacuggg

SEQ ID NO: 2185836 - RNA, 19 nt, Artificial Sequence
  Description of Artificial Sequence: Synthetic oligonucleotide
  Sense strand starting at position 2034 of SEQ ID NO: 1883327
ccaacuaaguuugucugaa

SEQ ID NO: 2185837 - RNA, 19 nt, Artificial Sequence
  Description of Artificial Sequence: Synthetic oligonucleotide
  Antisense strand to SEQ ID NO: 2185836
uucagacaaacuuaguugg

SEQ ID NO: 2185838 - RNA, 19 nt, Artificial Sequence
  Description of Artificial Sequence: Synthetic oligonucleotide
  Sense strand starting at position 2035 of SEQ ID NO: 1883327
caacuaaguuugucugaag

SEQ ID NO: 2185839 - RNA, 19 nt, Artificial Sequence
  Description of Artificial Sequence: Synthetic oligonucleotide
  Antisense strand to SEQ ID NO: 2185838
cuucagacaaacuuaguug

SEQ ID NO: 2185840 - RNA, 19 nt, Artificial Sequence
  Description of Artificial Sequence: Synthetic oligonucleotide
  Sense strand starting at position 2120 of SEQ ID NO: 1883327
gguaauauagucuaaccuc

SEQ ID NO: 2185841 - RNA, 19 nt, Artificial Sequence
  Description of Artificial Sequence: Synthetic oligonucleotide
  Antisense strand to SEQ ID NO: 2185840
gagguuagacuauauuacc

SEQ ID NO: 2185842 - RNA, 19 nt, Artificial Sequence
  Description of Artificial Sequence: Synthetic oligonucleotide
  Sense strand starting at position 2189 of SEQ ID NO: 1883327
uggccuguuauggguauuu

SEQ ID NO: 2185843 - RNA, 19 nt, Artificial Sequence
  Description of Artificial Sequence: Synthetic oligonucleotide
  Antisense strand to SEQ ID NO: 2185842
aaauacccauaacaggcca

SEQ ID NO: 2185844 - RNA, 19 nt, Artificial Sequence
  Description of Artificial Sequence: Synthetic oligonucleotide
  Sense strand starting at position 2191 of SEQ ID NO: 1883327
gccuguuauggguauuucu

SEQ ID NO: 2185845 - RNA, 19 nt, Artificial Sequence
  Description of Artificial Sequence: Synthetic oligonucleotide
  Antisense strand to SEQ ID NO: 2185844
agaaauacccauaacaggc

SEQ ID NO: 2185846 - RNA, 19 nt, Artificial Sequence
  Description of Artificial Sequence: Synthetic oligonucleotide
  Sense strand starting at position 2219 of SEQ ID NO: 1883327
gacuguacuccuugggaca

SEQ ID NO: 2185847 - RNA, 19 nt, Artificial Sequence
  Description of Artificial Sequence: Synthetic oligonucleotide
  Antisense strand to SEQ ID NO: 2185846
ugucccaaggaguacaguc

SEQ ID NO: 2185848 - RNA, 19 nt, Artificial Sequence
  Description of Artificial Sequence: Synthetic oligonucleotide
  Sense strand starting at position 2220 of SEQ ID NO: 1883327
acuguacuccuugggacaa

SEQ ID NO: 2185849 - RNA, 19 nt, Artificial Sequence
  Description of Artificial Sequence: Synthetic oligonucleotide
  Antisense strand to SEQ ID NO: 2185848
uugucccaaggaguacagu

SEQ ID NO: 2185850 - RNA, 19 nt, Artificial Sequence
  Description of Artificial Sequence: Synthetic oligonucleotide
  Sense strand starting at position 2402 of SEQ ID NO: 1883327
guccucuaucccuagauca

SEQ ID NO: 2185851 - RNA, 19 nt, Artificial Sequence
  Description of Artificial Sequence: Synthetic oligonucleotide
  Antisense strand to SEQ ID NO: 2185850
ugaucuagggauagaggac

SEQ ID NO: 2185852 - RNA, 19 nt, Artificial Sequence
  Description of Artificial Sequence: Synthetic oligonucleotide
  Sense strand starting at position 2665 of SEQ ID NO: 1883327
ugauaagaaguuuguagua

SEQ ID NO: 2185853 - RNA, 19 nt, Artificial Sequence
  Description of Artificial Sequence: Synthetic oligonucleotide
  Antisense strand to SEQ ID NO: 2185852
uacuacaaacuucuuauca

SEQ ID NO: 2185854 - RNA, 19 nt, Artificial Sequence
  Description of Artificial Sequence: Synthetic oligonucleotide
  Sense strand starting at position 2698 of SEQ ID NO: 1883327
uuuagauuacugggacuua

SEQ ID NO: 2185855 - RNA, 19 nt, Artificial Sequence
  Description of Artificial Sequence: Synthetic oligonucleotide
  Antisense strand to SEQ ID NO: 2185854
uaagucccaguaaucuaaa

SEQ ID NO: 2185856 - RNA, 19 nt, Artificial Sequence
  Description of Artificial Sequence: Synthetic oligonucleotide
  Sense strand starting at position 2876 of SEQ ID NO: 1883327
cauuuacauuguguaguca

SEQ ID NO: 2185857 - RNA, 19 nt, Artificial Sequence
  Description of Artificial Sequence: Synthetic oligonucleotide
  Antisense strand to SEQ ID NO: 2185856
ugacuacacaauguaaaug

SEQ ID NO: 2185858 - RNA, 19 nt, Artificial Sequence
  Description of Artificial Sequence: Synthetic oligonucleotide
  Sense strand starting at position 3033 of SEQ ID NO: 1883327
aagucaagguguuugaaca

SEQ ID NO: 2185859 - RNA, 19 nt, Artificial Sequence
  Description of Artificial Sequence: Synthetic oligonucleotide
  Antisense strand to SEQ ID NO: 2185858
uguucaaacaccuugacuu

SEQ ID NO: 2185860 - RNA, 19 nt, Artificial Sequence
  Description of Artificial Sequence: Synthetic oligonucleotide
  Sense strand starting at position 3156 of SEQ ID NO: 1883327
uguagaagucaggaugcua

SEQ ID NO: 2185861 - RNA, 19 nt, Artificial Sequence
  Description of Artificial Sequence: Synthetic oligonucleotide
  Antisense strand to SEQ ID NO: 2185860
uagcauccugacuucuaca

SEQ ID NO: 2185862 - RNA, 19 nt, Artificial Sequence
  Description of Artificial Sequence: Synthetic oligonucleotide
  Sense strand starting at position 3164 of SEQ ID NO: 1883327
ucaggaugcuaauuauaaa

SEQ ID NO: 2185863 - RNA, 19 nt, Artificial Sequence
  Description of Artificial Sequence: Synthetic oligonucleotide
  Antisense strand to SEQ ID NO: 2185862
uuuauaauuagcauccuga

SEQ ID NO: 2185864 - RNA, 19 nt, Artificial Sequence
  Description of Artificial Sequence: Synthetic oligonucleotide
  Sense strand starting at position 3243 of SEQ ID NO: 1883327
guuggacuguccuuaaaua

SEQ ID NO: 2185865 - RNA, 19 nt, Artificial Sequence
  Description of Artificial Sequence: Synthetic oligonucleotide
  Antisense strand to SEQ ID NO: 2185864
uauuuaaggacaguccaac

SEQ ID NO: 2185866 - RNA, 19 nt, Artificial Sequence
  Description of Artificial Sequence: Synthetic oligonucleotide
  Sense strand starting at position 3334 of SEQ ID NO: 1883327
guggcaugacuauaacuaa

SEQ ID NO: 2185867 - RNA, 19 nt, Artificial Sequence
  Description of Artificial Sequence: Synthetic oligonucleotide
  Antisense strand to SEQ ID NO: 2185866
uuaguuauagucaugccac

SEQ ID NO: 2185868 - RNA, 19 nt, Artificial Sequence
  Description of Artificial Sequence: Synthetic oligonucleotide
  Sense strand starting at position 3375 of SEQ ID NO: 1883327
ugacuuuaaguacaaguca

SEQ ID NO: 2185869 - RNA, 19 nt, Artificial Sequence
  Description of Artificial Sequence: Synthetic oligonucleotide
  Antisense strand to SEQ ID NO: 2185868
ugacuuguacuuaaaguca

SEQ ID NO: 2185870 - RNA, 19 nt, Artificial Sequence
  Description of Artificial Sequence: Synthetic oligonucleotide
  Sense strand starting at position 3445 of SEQ ID NO: 1883327
uuagcauucuuacuagaag

SEQ ID NO: 2185871 - RNA, 19 nt, Artificial Sequence
  Description of Artificial Sequence: Synthetic oligonucleotide
  Antisense strand to SEQ ID NO: 2185870
cuucuaguaagaaugcuaa

SEQ ID NO: 2185872 - RNA, 19 nt, Artificial Sequence
  Description of Artificial Sequence: Synthetic oligonucleotide
  Sense strand starting at position 3448 of SEQ ID NO: 1883327
gcauucuuacuagaaguaa

SEQ ID NO: 2185873 - RNA, 19 nt, Artificial Sequence
  Description of Artificial Sequence: Synthetic oligonucleotide
  Antisense strand to SEQ ID NO: 2185872
uuacuucuaguaagaaugc

SEQ ID NO: 2185874 - RNA, 19 nt, Artificial Sequence
  Description of Artificial Sequence: Synthetic oligonucleotide
  Sense strand starting at position 3928 of SEQ ID NO: 1883327
ccagaccuggauugucauu

SEQ ID NO: 2185875 - RNA, 19 nt, Artificial Sequence
  Description of Artificial Sequence: Synthetic oligonucleotide
  Antisense strand to SEQ ID NO: 2185874
aaugacaauccaggucugg

SEQ ID NO: 2185876 - RNA, 19 nt, Artificial Sequence
  Description of Artificial Sequence: Synthetic oligonucleotide
  Sense strand starting at position 3933 of SEQ ID NO: 1883327
ccuggauugucauuacauu

SEQ ID NO: 2185877 - RNA, 19 nt, Artificial Sequence
  Description of Artificial Sequence: Synthetic oligonucleotide
  Antisense strand to SEQ ID NO: 2185876
aauguaaugacaauccagg

SEQ ID NO: 2185878 - RNA, 19 nt, Artificial Sequence
  Description of Artificial Sequence: Synthetic oligonucleotide
  Sense strand starting at position 145 of SEQ ID NO: 1883328
acacuagaauuaggaauuu

SEQ ID NO: 2185879 - RNA, 19 nt, Artificial Sequence
  Description of Artificial Sequence: Synthetic oligonucleotide
  Antisense strand to SEQ ID NO: 2185878
aaauuccuaauucuagugu

SEQ ID NO: 2185880 - RNA, 19 nt, Artificial Sequence
  Description of Artificial Sequence: Synthetic oligonucleotide
  Sense strand starting at position 194 of SEQ ID NO: 1883328
caugcauaugcugaguauu

SEQ ID NO: 2185881 - RNA, 19 nt, Artificial Sequence
  Description of Artificial Sequence: Synthetic oligonucleotide
  Antisense strand to SEQ ID NO: 2185880
aauacucagcauaugcaug

SEQ ID NO: 2185882 - RNA, 19 nt, Artificial Sequence
  Description of Artificial Sequence: Synthetic oligonucleotide
  Sense strand starting at position 358 of SEQ ID NO: 1883328
ugcaauauguuucucaaag

SEQ ID NO: 2185883 - RNA, 19 nt, Artificial Sequence
  Description of Artificial Sequence: Synthetic oligonucleotide
  Antisense strand to SEQ ID NO: 2185882
cuuugagaaacauauugca

SEQ ID NO: 2185884 - RNA, 19 nt, Artificial Sequence
  Description of Artificial Sequence: Synthetic oligonucleotide
  Sense strand starting at position 424 of SEQ ID NO: 1883328
acauguggagcucacuaaa

SEQ ID NO: 2185885 - RNA, 19 nt, Artificial Sequence
  Description of Artificial Sequence: Synthetic oligonucleotide
  Antisense strand to SEQ ID NO: 2185884
uuuagugagcuccacaugu

SEQ ID NO: 2185886 - RNA, 19 nt, Artificial Sequence
  Description of Artificial Sequence: Synthetic oligonucleotide
  Sense strand starting at position 771 of SEQ ID NO: 1883328
acagaauguggauguauca

SEQ ID NO: 2185887 - RNA, 19 nt, Artificial Sequence
  Description of Artificial Sequence: Synthetic oligonucleotide
  Antisense strand to SEQ ID NO: 2185886
ugauacauccacauucugu

SEQ ID NO: 2185888 - RNA, 19 nt, Artificial Sequence
  Description of Artificial Sequence: Synthetic oligonucleotide
  Sense strand starting at position 1179 of SEQ ID NO: 1883328
uggcaucaucuuuauugca

SEQ ID NO: 2185889 - RNA, 19 nt, Artificial Sequence
  Description of Artificial Sequence: Synthetic oligonucleotide
  Antisense strand to SEQ ID NO: 2185888
ugcaauaaagaugaugcca

SEQ ID NO: 2185890 - RNA, 19 nt, Artificial Sequence
  Description of Artificial Sequence: Synthetic oligonucleotide
  Sense strand starting at position 1419 of SEQ ID NO: 1883328
cuccaaaucccguagcaaa

SEQ ID NO: 2185891 - RNA, 19 nt, Artificial Sequence
  Description of Artificial Sequence: Synthetic oligonucleotide
  Antisense strand to SEQ ID NO: 2185890
uuugcuacgggauuuggag

SEQ ID NO: 2185892 - RNA, 19 nt, Artificial Sequence
  Description of Artificial Sequence: Synthetic oligonucleotide
  Sense strand starting at position 1576 of SEQ ID NO: 1883328
auguuagugcuauagcaaa

SEQ ID NO: 2185893 - RNA, 19 nt, Artificial Sequence
  Description of Artificial Sequence: Synthetic oligonucleotide
  Antisense strand to SEQ ID NO: 2185892
uuugcuauagcacuaacau

SEQ ID NO: 2185894 - RNA, 19 nt, Artificial Sequence
  Description of Artificial Sequence: Synthetic oligonucleotide
  Sense strand starting at position 1893 of SEQ ID NO: 1883328
caauguuaauugguugaca

SEQ ID NO: 2185895 - RNA, 19 nt, Artificial Sequence
  Description of Artificial Sequence: Synthetic oligonucleotide
  Antisense strand to SEQ ID NO: 2185894
ugucaaccaauuaacauug

SEQ ID NO: 2185896 - RNA, 19 nt, Artificial Sequence
  Description of Artificial Sequence: Synthetic oligonucleotide
  Sense strand starting at position 1894 of SEQ ID NO: 1883328
aauguuaauugguugacau

SEQ ID NO: 2185897 - RNA, 19 nt, Artificial Sequence
  Description of Artificial Sequence: Synthetic oligonucleotide
  Antisense strand to SEQ ID NO: 2185896
augucaaccaauuaacauu

SEQ ID NO: 2185898 - RNA, 19 nt, Artificial Sequence
  Description of Artificial Sequence: Synthetic oligonucleotide
  Sense strand starting at position 1895 of SEQ ID NO: 1883328
auguuaauugguugacauu

SEQ ID NO: 2185899 - RNA, 19 nt, Artificial Sequence
  Description of Artificial Sequence: Synthetic oligonucleotide
  Antisense strand to SEQ ID NO: 2185898
aaugucaaccaauuaacau

SEQ ID NO: 2185900 - RNA, 19 nt, Artificial Sequence
  Description of Artificial Sequence: Synthetic oligonucleotide
  Sense strand starting at position 1896 of SEQ ID NO: 1883328
uguuaauugguugacauuc

SEQ ID NO: 2185901 - RNA, 19 nt, Artificial Sequence
  Description of Artificial Sequence: Synthetic oligonucleotide
  Antisense strand to SEQ ID NO: 2185900
gaaugucaaccaauuaaca

SEQ ID NO: 2185902 - RNA, 19 nt, Artificial Sequence
  Description of Artificial Sequence: Synthetic oligonucleotide
  Sense strand starting at position 1988 of SEQ ID NO: 1883328
acugaaacuugguuuaaag

SEQ ID NO: 2185903 - RNA, 19 nt, Artificial Sequence
  Description of Artificial Sequence: Synthetic oligonucleotide
  Antisense strand to SEQ ID NO: 2185902
cuuuaaaccaaguuucagu

SEQ ID NO: 2185904 - RNA, 19 nt, Artificial Sequence
  Description of Artificial Sequence: Synthetic oligonucleotide
  Sense strand starting at position 1990 of SEQ ID NO: 1883328
ugaaacuugguuuaaagca

SEQ ID NO: 2185905 - RNA, 19 nt, Artificial Sequence
  Description of Artificial Sequence: Synthetic oligonucleotide
  Antisense strand to SEQ ID NO: 2185904
ugcuuuaaaccaaguuuca

SEQ ID NO: 2185906 - RNA, 19 nt, Artificial Sequence
  Description of Artificial Sequence: Synthetic oligonucleotide
  Sense strand starting at position 1997 of SEQ ID NO: 1883328
ugguuuaaagcaggacuua

SEQ ID NO: 2185907 - RNA, 19 nt, Artificial Sequence
  Description of Artificial Sequence: Synthetic oligonucleotide
  Antisense strand to SEQ ID NO: 2185906
uaaguccugcuuuaaacca

SEQ ID NO: 2185908 - RNA, 19 nt, Artificial Sequence
  Description of Artificial Sequence: Synthetic oligonucleotide
  Sense strand starting at position 2017 of SEQ ID NO: 1883328
acucuuuacuaaguuugua

SEQ ID NO: 2185909 - RNA, 19 nt, Artificial Sequence
  Description of Artificial Sequence: Synthetic oligonucleotide
  Antisense strand to SEQ ID NO: 2185908
uacaaacuuaguaaagagu

SEQ ID NO: 2185910 - RNA, 19 nt, Artificial Sequence
  Description of Artificial Sequence: Synthetic oligonucleotide
  Sense strand starting at position 2044 of SEQ ID NO: 1883328
uacguaagacucuguugaa

SEQ ID NO: 2185911 - RNA, 19 nt, Artificial Sequence
  Description of Artificial Sequence: Synthetic oligonucleotide
  Antisense strand to SEQ ID NO: 2185910
uucaacagagucuuacgua

SEQ ID NO: 2185912 - RNA, 19 nt, Artificial Sequence
  Description of Artificial Sequence: Synthetic oligonucleotide
  Sense strand starting at position 2045 of SEQ ID NO: 1883328
acguaagacucuguugaaa

SEQ ID NO: 2185913 - RNA, 19 nt, Artificial Sequence
  Description of Artificial Sequence: Synthetic oligonucleotide
  Antisense strand to SEQ ID NO: 2185912
uuucaacagagucuuacgu

SEQ ID NO: 2185914 - RNA, 19 nt, Artificial Sequence
  Description of Artificial Sequence: Synthetic oligonucleotide
  Sense strand starting at position 2096 of SEQ ID NO: 1883328
gcaagacucaaucggaaag

SEQ ID NO: 2185915 - RNA, 19 nt, Artificial Sequence
  Description of Artificial Sequence: Synthetic oligonucleotide
  Antisense strand to SEQ ID NO: 2185914
cuuuccgauugagucuugc

SEQ ID NO: 2185916 - RNA, 19 nt, Artificial Sequence
  Description of Artificial Sequence: Synthetic oligonucleotide
  Sense strand starting at position 2112 of SEQ ID NO: 1883328
aagauauccugagagaaag

SEQ ID NO: 2185917 - RNA, 19 nt, Artificial Sequence
  Description of Artificial Sequence: Synthetic oligonucleotide
  Antisense strand to SEQ ID NO: 2185916
cuuucucucaggauaucuu

SEQ ID NO: 2185918 - RNA, 19 nt, Artificial Sequence
  Description of Artificial Sequence: Synthetic oligonucleotide
  Sense strand starting at position 2360 of SEQ ID NO: 1883328
uguaguguuccauaucuaa

SEQ ID NO: 2185919 - RNA, 19 nt, Artificial Sequence
  Description of Artificial Sequence: Synthetic oligonucleotide
  Antisense strand to SEQ ID NO: 2185918
uuagauauggaacacuaca

SEQ ID NO: 2185920 - RNA, 19 nt, Artificial Sequence
  Description of Artificial Sequence: Synthetic oligonucleotide
  Sense strand starting at position 2363 of SEQ ID NO: 1883328
aguguuccauaucuaaaug

SEQ ID NO: 2185921 - RNA, 19 nt, Artificial Sequence
  Description of Artificial Sequence: Synthetic oligonucleotide
  Antisense strand to SEQ ID NO: 2185920
cauuuagauauggaacacu

SEQ ID NO: 2185922 - RNA, 19 nt, Artificial Sequence
  Description of Artificial Sequence: Synthetic oligonucleotide
  Sense strand starting at position 2373 of SEQ ID NO: 1883328
aucuaaauguagcugauua

SEQ ID NO: 2185923 - RNA, 19 nt, Artificial Sequence
  Description of Artificial Sequence: Synthetic oligonucleotide
  Antisense strand to SEQ ID NO: 2185922
uaaucagcuacauuuagau

SEQ ID NO: 2185924 - RNA, 19 nt, Artificial Sequence
  Description of Artificial Sequence: Synthetic oligonucleotide
  Sense strand starting at position 2375 of SEQ ID NO: 1883328
cuaaauguagcugauuauc

SEQ ID NO: 2185925 - RNA, 19 nt, Artificial Sequence
  Description of Artificial Sequence: Synthetic oligonucleotide
  Antisense strand to SEQ ID NO: 2185924
gauaaucagcuacauuuag

SEQ ID NO: 2185926 - RNA, 19 nt, Artificial Sequence
  Description of Artificial Sequence: Synthetic oligonucleotide
  Sense strand starting at position 2446 of SEQ ID NO: 1883328
cuuacuugaugaccaguau

SEQ ID NO: 2185927 - RNA, 19 nt, Artificial Sequence
  Description of Artificial Sequence: Synthetic oligonucleotide
  Antisense strand to SEQ ID NO: 2185926
auacuggucaucaaguaag

SEQ ID NO: 2185928 - RNA, 19 nt, Artificial Sequence
  Description of Artificial Sequence: Synthetic oligonucleotide
  Sense strand starting at position 2489 of SEQ ID NO: 1883328
gaagauuccuccuuuaggu

SEQ ID NO: 2185929 - RNA, 19 nt, Artificial Sequence
  Description of Artificial Sequence: Synthetic oligonucleotide
  Antisense strand to SEQ ID NO: 2185928
accuaaaggaggaaucuuc

SEQ ID NO: 2185930 - RNA, 19 nt, Artificial Sequence
  Description of Artificial Sequence: Synthetic oligonucleotide
  Sense strand starting at position 2491 of SEQ ID NO: 1883328
agauuccuccuuuagguaa

SEQ ID NO: 2185931 - RNA, 19 nt, Artificial Sequence
  Description of Artificial Sequence: Synthetic oligonucleotide
  Antisense strand to SEQ ID NO: 2185930
uuaccuaaaggaggaaucu

SEQ ID NO: 2185932 - RNA, 19 nt, Artificial Sequence
  Description of Artificial Sequence: Synthetic oligonucleotide
  Sense strand starting at position 2528 of SEQ ID NO: 1883328
cugugaggagcuuagucau

SEQ ID NO: 2185933 - RNA, 19 nt, Artificial Sequence
  Description of Artificial Sequence: Synthetic oligonucleotide
  Antisense strand to SEQ ID NO: 2185932
augacuaagcuccucacag

SEQ ID NO: 2185934 - RNA, 19 nt, Artificial Sequence
  Description of Artificial Sequence: Synthetic oligonucleotide
  Sense strand starting at position 2666 of SEQ ID NO: 1883328
ucauuaaggugucucaaag

SEQ ID NO: 2185935 - RNA, 19 nt, Artificial Sequence
  Description of Artificial Sequence: Synthetic oligonucleotide
  Antisense strand to SEQ ID NO: 2185934
cuuugagacaccuuaauga

SEQ ID NO: 2185936 - RNA, 19 nt, Artificial Sequence
  Description of Artificial Sequence: Synthetic oligonucleotide
  Sense strand starting at position 2672 of SEQ ID NO: 1883328
aggugucucaaagaaaugu

SEQ ID NO: 2185937 - RNA, 19 nt, Artificial Sequence
  Description of Artificial Sequence: Synthetic oligonucleotide
  Antisense strand to SEQ ID NO: 2185936
acauuucuuugagacaccu

SEQ ID NO: 2185938 - RNA, 19 nt, Artificial Sequence
  Description of Artificial Sequence: Synthetic oligonucleotide
  Sense strand starting at position 2941 of SEQ ID NO: 1883328
aagcauugguucucaagau

SEQ ID NO: 2185939 - RNA, 19 nt, Artificial Sequence
  Description of Artificial Sequence: Synthetic oligonucleotide
  Antisense strand to SEQ ID NO: 2185938
aucuugagaaccaaugcuu

SEQ ID NO: 2185940 - RNA, 19 nt, Artificial Sequence
  Description of Artificial Sequence: Synthetic oligonucleotide
  Sense strand starting at position 3216 of SEQ ID NO: 1883328
uguauuaauugggcauaau

SEQ ID NO: 2185941 - RNA, 19 nt, Artificial Sequence
  Description of Artificial Sequence: Synthetic oligonucleotide
  Antisense strand to SEQ ID NO: 2185940
auuaugcccaauuaauaca

SEQ ID NO: 2185942 - RNA, 19 nt, Artificial Sequence
  Description of Artificial Sequence: Synthetic oligonucleotide
  Sense strand starting at position 3217 of SEQ ID NO: 1883328
guauuaauugggcauaaua

SEQ ID NO: 2185943 - RNA, 19 nt, Artificial Sequence
  Description of Artificial Sequence: Synthetic oligonucleotide
  Antisense strand to SEQ ID NO: 2185942
uauuaugcccaauuaauac

SEQ ID NO: 2185944 - RNA, 19 nt, Artificial Sequence
  Description of Artificial Sequence: Synthetic oligonucleotide
  Sense strand starting at position 3254 of SEQ ID NO: 1883328
uaagaugagcucugugauu

SEQ ID NO: 2185945 - RNA, 19 nt, Artificial Sequence
  Description of Artificial Sequence: Synthetic oligonucleotide
  Antisense strand to SEQ ID NO: 2185944
aaucacagagcucaucuua

SEQ ID NO: 2185946 - RNA, 19 nt, Artificial Sequence
  Description of Artificial Sequence: Synthetic oligonucleotide
  Sense strand starting at position 3438 of SEQ ID NO: 1883328
gcugauauugaacagcaau

SEQ ID NO: 2185947 - RNA, 19 nt, Artificial Sequence
  Description of Artificial Sequence: Synthetic oligonucleotide
  Antisense strand to SEQ ID NO: 2185946
auugcuguucaauaucagc

SEQ ID NO: 2185948 - RNA, 19 nt, Artificial Sequence
  Description of Artificial Sequence: Synthetic oligonucleotide
  Sense strand starting at position 3508 of SEQ ID NO: 1883328
gucaaauuacuaggaaguu

SEQ ID NO: 2185949 - RNA, 19 nt, Artificial Sequence
  Description of Artificial Sequence: Synthetic oligonucleotide
  Antisense strand to SEQ ID NO: 2185948
aacuuccuaguaauuugac

SEQ ID NO: 2185950 - RNA, 19 nt, Artificial Sequence
  Description of Artificial Sequence: Synthetic oligonucleotide
  Sense strand starting at position 3603 of SEQ ID NO: 1883328
caaaguguggcagagacua

SEQ ID NO: 2185951 - RNA, 19 nt, Artificial Sequence
  Description of Artificial Sequence: Synthetic oligonucleotide
  Antisense strand to SEQ ID NO: 2185950
uagucucugccacacuuug

SEQ ID NO: 2185952 - RNA, 19 nt, Artificial Sequence
  Description of Artificial Sequence: Synthetic oligonucleotide
  Sense strand starting at position 3611 of SEQ ID NO: 1883328
ggcagagacuaucugaaac

SEQ ID NO: 2185953 - RNA, 19 nt, Artificial Sequence
  Description of Artificial Sequence: Synthetic oligonucleotide
  Antisense strand to SEQ ID NO: 2185952
guuucagauagucucugcc

SEQ ID NO: 2185954 - RNA, 19 nt, Artificial Sequence
  Description of Artificial Sequence: Synthetic oligonucleotide
  Sense strand starting at position 3712 of SEQ ID NO: 1883328
gcaaauaaugcacauugau

SEQ ID NO: 2185955 - RNA, 19 nt, Artificial Sequence
  Description of Artificial Sequence: Synthetic oligonucleotide
  Antisense strand to SEQ ID NO: 2185954
aucaaugugcauuauuugc

SEQ ID NO: 2185956 - RNA, 19 nt, Artificial Sequence
  Description of Artificial Sequence: Synthetic oligonucleotide
  Sense strand starting at position 3862 of SEQ ID NO: 1883328
ggaacugagguguggagau

SEQ ID NO: 2185957 - RNA, 19 nt, Artificial Sequence
  Description of Artificial Sequence: Synthetic oligonucleotide
  Antisense strand to SEQ ID NO: 2185956
aucuccacaccucaguucc

SEQ ID NO: 2185958 - RNA, 19 nt, Artificial Sequence
  Description of Artificial Sequence: Synthetic oligonucleotide
  Sense strand starting at position 155 of SEQ ID NO: 1883329
guagcaucuagggauaacu

SEQ ID NO: 2185959 - RNA, 19 nt, Artificial Sequence
  Description of Artificial Sequence: Synthetic oligonucleotide
  Antisense strand to SEQ ID NO: 2185958
aguuaucccuagaugcuac

SEQ ID NO: 2185960 - RNA, 19 nt, Artificial Sequence
  Description of Artificial Sequence: Synthetic oligonucleotide
  Sense strand starting at position 235 of SEQ ID NO: 1883329
uagguuuggccuuaucauu

SEQ ID NO: 2185961 - RNA, 19 nt, Artificial Sequence
  Description of Artificial Sequence: Synthetic oligonucleotide
  Antisense strand to SEQ ID NO: 2185960
aaugauaaggccaaaccua

SEQ ID NO: 2185962 - RNA, 19 nt, Artificial Sequence
  Description of Artificial Sequence: Synthetic oligonucleotide
  Sense strand starting at position 346 of SEQ ID NO: 1883329
agugucaccuggucaaaca

SEQ ID NO: 2185963 - RNA, 19 nt, Artificial Sequence
  Description of Artificial Sequence: Synthetic oligonucleotide
  Antisense strand to SEQ ID NO: 2185962
uguuugaccaggugacacu

SEQ ID NO: 2185964 - RNA, 19 nt, Artificial Sequence
  Description of Artificial Sequence: Synthetic oligonucleotide
  Sense strand starting at position 347 of SEQ ID NO: 1883329
gugucaccuggucaaacaa

SEQ ID NO: 2185965 - RNA, 19 nt, Artificial Sequence
  Description of Artificial Sequence: Synthetic oligonucleotide
  Antisense strand to SEQ ID NO: 2185964
uuguuugaccaggugacac

SEQ ID NO: 2185966 - RNA, 19 nt, Artificial Sequence
  Description of Artificial Sequence: Synthetic oligonucleotide
  Sense strand starting at position 398 of SEQ ID NO: 1883329
cuaccuuuggcagggaaga

SEQ ID NO: 2185967 - RNA, 19 nt, Artificial Sequence
  Description of Artificial Sequence: Synthetic oligonucleotide
  Antisense strand to SEQ ID NO: 2185966
ucuucccugccaaagguag

SEQ ID NO: 2185968 - RNA, 19 nt, Artificial Sequence
  Description of Artificial Sequence: Synthetic oligonucleotide
  Sense strand starting at position 418 of SEQ ID NO: 1883329
uucugagcucagcaauaac

SEQ ID NO: 2185969 - RNA, 19 nt, Artificial Sequence
  Description of Artificial Sequence: Synthetic oligonucleotide
  Antisense strand to SEQ ID NO: 2185968
guuauugcugagcucagaa

SEQ ID NO: 2185970 - RNA, 19 nt, Artificial Sequence
  Description of Artificial Sequence: Synthetic oligonucleotide
  Sense strand starting at position 421 of SEQ ID NO: 1883329
ugagcucagcaauaacuau

SEQ ID NO: 2185971 - RNA, 19 nt, Artificial Sequence
  Description of Artificial Sequence: Synthetic oligonucleotide
  Antisense strand to SEQ ID NO: 2185970
auaguuauugcugagcuca

SEQ ID NO: 2185972 - RNA, 19 nt, Artificial Sequence
  Description of Artificial Sequence: Synthetic oligonucleotide
  Sense strand starting at position 536 of SEQ ID NO: 1883329
ggaugcuugaugcaugcua

SEQ ID NO: 2185973 - RNA, 19 nt, Artificial Sequence
  Description of Artificial Sequence: Synthetic oligonucleotide
  Antisense strand to SEQ ID NO: 2185972
uagcaugcaucaagcaucc

SEQ ID NO: 2185974 - RNA, 19 nt, Artificial Sequence
  Description of Artificial Sequence: Synthetic oligonucleotide
  Sense strand starting at position 725 of SEQ ID NO: 1883329
gucauuugcucaucuggau

SEQ ID NO: 2185975 - RNA, 19 nt, Artificial Sequence
  Description of Artificial Sequence: Synthetic oligonucleotide
  Antisense strand to SEQ ID NO: 2185974
auccagaugagcaaaugac

SEQ ID NO: 2185976 - RNA, 19 nt, Artificial Sequence
  Description of Artificial Sequence: Synthetic oligonucleotide
  Sense strand starting at position 934 of SEQ ID NO: 1883329
uggcaagaccuuuaucuuu

SEQ ID NO: 2185977 - RNA, 19 nt, Artificial Sequence
  Description of Artificial Sequence: Synthetic oligonucleotide
  Antisense strand to SEQ ID NO: 2185976
aaagauaaaggucuugcca

SEQ ID NO: 2185978 - RNA, 19 nt, Artificial Sequence
  Description of Artificial Sequence: Synthetic oligonucleotide
  Sense strand starting at position 1080 of SEQ ID NO: 1883329
cugaaagacuaacagaaau

SEQ ID NO: 2185979 - RNA, 19 nt, Artificial Sequence
  Description of Artificial Sequence: Synthetic oligonucleotide
  Antisense strand to SEQ ID NO: 2185978
auuucuguuagucuuucag

SEQ ID NO: 2185980 - RNA, 19 nt, Artificial Sequence
  Description of Artificial Sequence: Synthetic oligonucleotide
  Sense strand starting at position 1168 of SEQ ID NO: 1883329
gagugucaucugugagaaa

SEQ ID NO: 2185981 - RNA, 19 nt, Artificial Sequence
  Description of Artificial Sequence: Synthetic oligonucleotide
  Antisense strand to SEQ ID NO: 2185980
uuucucacagaugacacuc

SEQ ID NO: 2185982 - RNA, 19 nt, Artificial Sequence
  Description of Artificial Sequence: Synthetic oligonucleotide
  Sense strand starting at position 1369 of SEQ ID NO: 1883329
gcuugacgucuugcaguuu

SEQ ID NO: 2185983 - RNA, 19 nt, Artificial Sequence
  Description of Artificial Sequence: Synthetic oligonucleotide
  Antisense strand to SEQ ID NO: 2185982
aaacugcaagacgucaagc

SEQ ID NO: 2185984 - RNA, 19 nt, Artificial Sequence
  Description of Artificial Sequence: Synthetic oligonucleotide
  Sense strand starting at position 1397 of SEQ ID NO: 1883329
gagaguucugauuaggagc

SEQ ID NO: 2185985 - RNA, 19 nt, Artificial Sequence
  Description of Artificial Sequence: Synthetic oligonucleotide
  Antisense strand to SEQ ID NO: 2185984
gcuccuaaucagaacucuc

SEQ ID NO: 2185986 - RNA, 19 nt, Artificial Sequence
  Description of Artificial Sequence: Synthetic oligonucleotide
  Sense strand starting at position 1404 of SEQ ID NO: 1883329
cugauuaggagcuguaaua

SEQ ID NO: 2185987 - RNA, 19 nt, Artificial Sequence
  Description of Artificial Sequence: Synthetic oligonucleotide
  Antisense strand to SEQ ID NO: 2185986
uauuacagcuccuaaucag

SEQ ID NO: 2185988 - RNA, 19 nt, Artificial Sequence
  Description of Artificial Sequence: Synthetic oligonucleotide
  Sense strand starting at position 1508 of SEQ ID NO: 1883329
agcugaaauuucuagauug

SEQ ID NO: 2185989 - RNA, 19 nt, Artificial Sequence
  Description of Artificial Sequence: Synthetic oligonucleotide
  Antisense strand to SEQ ID NO: 2185988
caaucuagaaauuucagcu

SEQ ID NO: 2185990 - RNA, 19 nt, Artificial Sequence
  Description of Artificial Sequence: Synthetic oligonucleotide
  Sense strand starting at position 1534 of SEQ ID NO: 1883329
cugggugguagugaugaaa

SEQ ID NO: 2185991 - RNA, 19 nt, Artificial Sequence
  Description of Artificial Sequence: Synthetic oligonucleotide
  Antisense strand to SEQ ID NO: 2185990
uuucaucacuaccacccag

SEQ ID NO: 2185992 - RNA, 19 nt, Artificial Sequence
  Description of Artificial Sequence: Synthetic oligonucleotide
  Sense strand starting at position 1537 of SEQ ID NO: 1883329
ggugguagugaugaaauua

SEQ ID NO: 2185993 - RNA, 19 nt, Artificial Sequence
  Description of Artificial Sequence: Synthetic oligonucleotide
  Antisense strand to SEQ ID NO: 2185992
uaauuucaucacuaccacc

SEQ ID NO: 2185994 - RNA, 19 nt, Artificial Sequence
  Description of Artificial Sequence: Synthetic oligonucleotide
  Sense strand starting at position 1597 of SEQ ID NO: 1883329
ucuccugaauuguugggau

SEQ ID NO: 2185995 - RNA, 19 nt, Artificial Sequence
  Description of Artificial Sequence: Synthetic oligonucleotide
  Antisense strand to SEQ ID NO: 2185994
aucccaacaauucaggaga

SEQ ID NO: 2185996 - RNA, 19 nt, Artificial Sequence
  Description of Artificial Sequence: Synthetic oligonucleotide
  Sense strand starting at position 1599 of SEQ ID NO: 1883329
uccugaauuguugggaugu

SEQ ID NO: 2185997 - RNA, 19 nt, Artificial Sequence
  Description of Artificial Sequence: Synthetic oligonucleotide
  Antisense strand to SEQ ID NO: 2185996
acaucccaacaauucagga

SEQ ID NO: 2185998 - RNA, 19 nt, Artificial Sequence
  Description of Artificial Sequence: Synthetic oligonucleotide
  Sense strand starting at position 1892 of SEQ ID NO: 1883329
gggacagaauuauaucaag

SEQ ID NO: 2185999 - RNA, 19 nt, Artificial Sequence
  Description of Artificial Sequence: Synthetic oligonucleotide
  Antisense strand to SEQ ID NO: 2185998
cuugauauaauucuguccc

SEQ ID NO: 2186000 - RNA, 19 nt, Artificial Sequence
  Description of Artificial Sequence: Synthetic oligonucleotide
  Sense strand starting at position 1906 of SEQ ID NO: 1883329
ucaagaggaugucugugaa

SEQ ID NO: 2186001 - RNA, 19 nt, Artificial Sequence
  Description of Artificial Sequence: Synthetic oligonucleotide
  Antisense strand to SEQ ID NO: 2186000
uucacagacauccucuuga

SEQ ID NO: 2186002 - RNA, 19 nt, Artificial Sequence
  Description of Artificial Sequence: Synthetic oligonucleotide
  Sense strand starting at position 1909 of SEQ ID NO: 1883329
agaggaugucugugaauag

SEQ ID NO: 2186003 - RNA, 19 nt, Artificial Sequence
  Description of Artificial Sequence: Synthetic oligonucleotide
  Antisense strand to SEQ ID NO: 2186002
cuauucacagacauccucu

SEQ ID NO: 2186004 - RNA, 19 nt, Artificial Sequence
  Description of Artificial Sequence: Synthetic oligonucleotide
  Sense strand starting at position 2037 of SEQ ID NO: 1883329
acauaaauguugccaguca

SEQ ID NO: 2186005 - RNA, 19 nt, Artificial Sequence
  Description of Artificial Sequence: Synthetic oligonucleotide
  Antisense strand to SEQ ID NO: 2186004
ugacuggcaacauuuaugu

SEQ ID NO: 2186006 - RNA, 19 nt, Artificial Sequence
  Description of Artificial Sequence: Synthetic oligonucleotide
  Sense strand starting at position 2093 of SEQ ID NO: 1883329
gaacaauagcugugacauc

SEQ ID NO: 2186007 - RNA, 19 nt, Artificial Sequence
  Description of Artificial Sequence: Synthetic oligonucleotide
  Antisense strand to SEQ ID NO: 2186006
gaugucacagcuauuguuc

SEQ ID NO: 2186008 - RNA, 19 nt, Artificial Sequence
  Description of Artificial Sequence: Synthetic oligonucleotide
  Sense strand starting at position 2221 of SEQ ID NO: 1883329
uuaucuugguaaguaugaa

SEQ ID NO: 2186009 - RNA, 19 nt, Artificial Sequence
  Description of Artificial Sequence: Synthetic oligonucleotide
  Antisense strand to SEQ ID NO: 2186008
uucauacuuaccaagauaa

SEQ ID NO: 2186010 - RNA, 19 nt, Artificial Sequence
  Description of Artificial Sequence: Synthetic oligonucleotide
  Sense strand starting at position 2353 of SEQ ID NO: 1883329
cccuaaugaucagugacca

SEQ ID NO: 2186011 - RNA, 19 nt, Artificial Sequence
  Description of Artificial Sequence: Synthetic oligonucleotide
  Antisense strand to SEQ ID NO: 2186010
uggucacugaucauuaggg

SEQ ID NO: 2186012 - RNA, 19 nt, Artificial Sequence
  Description of Artificial Sequence: Synthetic oligonucleotide
  Sense strand starting at position 2354 of SEQ ID NO: 1883329
ccuaaugaucagugaccau

SEQ ID NO: 2186013 - RNA, 19 nt, Artificial Sequence
  Description of Artificial Sequence: Synthetic oligonucleotide
  Antisense strand to SEQ ID NO: 2186012
auggucacugaucauuagg

SEQ ID NO: 2186014 - RNA, 19 nt, Artificial Sequence
  Description of Artificial Sequence: Synthetic oligonucleotide
  Sense strand starting at position 2435 of SEQ ID NO: 1883329
agcguuaauuuaguugaca

SEQ ID NO: 2186015 - RNA, 19 nt, Artificial Sequence
  Description of Artificial Sequence: Synthetic oligonucleotide
  Antisense strand to SEQ ID NO: 2186014
ugucaacuaaauuaacgcu

SEQ ID NO: 2186016 - RNA, 19 nt, Artificial Sequence
  Description of Artificial Sequence: Synthetic oligonucleotide
  Sense strand starting at position 2436 of SEQ ID NO: 1883329
gcguuaauuuaguugacaa

SEQ ID NO: 2186017 - RNA, 19 nt, Artificial Sequence
  Description of Artificial Sequence: Synthetic oligonucleotide
  Antisense strand to SEQ ID NO: 2186016
uugucaacuaaauuaacgc

SEQ ID NO: 2186018 - RNA, 19 nt, Artificial Sequence
  Description of Artificial Sequence: Synthetic oligonucleotide
  Sense strand starting at position 2443 of SEQ ID NO: 1883329
uuuaguugacaaugaauag

SEQ ID NO: 2186019 - RNA, 19 nt, Artificial Sequence
  Description of Artificial Sequence: Synthetic oligonucleotide
  Antisense strand to SEQ ID NO: 2186018
cuauucauugucaacuaaa

SEQ ID NO: 2186020 - RNA, 19 nt, Artificial Sequence
  Description of Artificial Sequence: Synthetic oligonucleotide
  Sense strand starting at position 2452 of SEQ ID NO: 1883329
caaugaauagaguggguuu

SEQ ID NO: 2186021 - RNA, 19 nt, Artificial Sequence
  Description of Artificial Sequence: Synthetic oligonucleotide
  Antisense strand to SEQ ID NO: 2186020
aaacccacucuauucauug

SEQ ID NO: 2186022 - RNA, 19 nt, Artificial Sequence
  Description of Artificial Sequence: Synthetic oligonucleotide
  Sense strand starting at position 2535 of SEQ ID NO: 1883329
agguuagggauguacaguu

SEQ ID NO: 2186023 - RNA, 19 nt, Artificial Sequence
  Description of Artificial Sequence: Synthetic oligonucleotide
  Antisense strand to SEQ ID NO: 2186022
aacuguacaucccuaaccu

SEQ ID NO: 2186024 - RNA, 19 nt, Artificial Sequence
  Description of Artificial Sequence: Synthetic oligonucleotide
  Sense strand starting at position 3125 of SEQ ID NO: 1883329
cacagugauuuaugaaaug

SEQ ID NO: 2186025 - RNA, 19 nt, Artificial Sequence
  Description of Artificial Sequence: Synthetic oligonucleotide
  Antisense strand to SEQ ID NO: 2186024
cauuucauaaaucacugug

SEQ ID NO: 2186026 - RNA, 19 nt, Artificial Sequence
  Description of Artificial Sequence: Synthetic oligonucleotide
  Sense strand starting at position 3236 of SEQ ID NO: 1883329
cugagagacuauuaauuuc

SEQ ID NO: 2186027 - RNA, 19 nt, Artificial Sequence
  Description of Artificial Sequence: Synthetic oligonucleotide
  Antisense strand to SEQ ID NO: 2186026
gaaauuaauagucucucag

SEQ ID NO: 2186028 - RNA, 19 nt, Artificial Sequence
  Description of Artificial Sequence: Synthetic oligonucleotide
  Sense strand starting at position 3414 of SEQ ID NO: 1883329
acauguggucucuauggau

SEQ ID NO: 2186029 - RNA, 19 nt, Artificial Sequence
  Description of Artificial Sequence: Synthetic oligonucleotide
  Antisense strand to SEQ ID NO: 2186028
auccauagagaccacaugu

SEQ ID NO: 2186030 - RNA, 19 nt, Artificial Sequence
  Description of Artificial Sequence: Synthetic oligonucleotide
  Sense strand starting at position 3418 of SEQ ID NO: 1883329
guggucucuauggauacaa

SEQ ID NO: 2186031 - RNA, 19 nt, Artificial Sequence
  Description of Artificial Sequence: Synthetic oligonucleotide
  Antisense strand to SEQ ID NO: 2186030
uuguauccauagagaccac

SEQ ID NO: 2186032 - RNA, 19 nt, Artificial Sequence
  Description of Artificial Sequence: Synthetic oligonucleotide
  Sense strand starting at position 3578 of SEQ ID NO: 1883329
ggcacaugauacuugacua

SEQ ID NO: 2186033 - RNA, 19 nt, Artificial Sequence
  Description of Artificial Sequence: Synthetic oligonucleotide
  Antisense strand to SEQ ID NO: 2186032
uagucaaguaucaugugcc

SEQ ID NO: 2186034 - RNA, 19 nt, Artificial Sequence
  Description of Artificial Sequence: Synthetic oligonucleotide
  Sense strand starting at position 3793 of SEQ ID NO: 1883329
augcuaugacuuuguauaa

SEQ ID NO: 2186035 - RNA, 19 nt, Artificial Sequence
  Description of Artificial Sequence: Synthetic oligonucleotide
  Antisense strand to SEQ ID NO: 2186034
uuauacaaagucauagcau

SEQ ID NO: 2186036 - RNA, 19 nt, Artificial Sequence
  Description of Artificial Sequence: Synthetic oligonucleotide
  Sense strand starting at position 3794 of SEQ ID NO: 1883329
ugcuaugacuuuguauaau

SEQ ID NO: 2186037 - RNA, 19 nt, Artificial Sequence
  Description of Artificial Sequence: Synthetic oligonucleotide
  Antisense strand to SEQ ID NO: 2186036
auuauacaaagucauagca

SEQ ID NO: 2186038 - RNA, 19 nt, Artificial Sequence
  Description of Artificial Sequence: Synthetic oligonucleotide
  Sense strand starting at position 87 of SEQ ID NO: 1883330
uccaauguaugaguuauau

SEQ ID NO: 2186039 - RNA, 19 nt, Artificial Sequence
  Description of Artificial Sequence: Synthetic oligonucleotide
  Antisense strand to SEQ ID NO: 2186038
auauaacucauacauugga

SEQ ID NO: 2186040 - RNA, 19 nt, Artificial Sequence
  Description of Artificial Sequence: Synthetic oligonucleotide
  Sense strand starting at position 438 of SEQ ID NO: 1883330
uguguuccagaaggaagau

SEQ ID NO: 2186041 - RNA, 19 nt, Artificial Sequence
  Description of Artificial Sequence: Synthetic oligonucleotide
  Antisense strand to SEQ ID NO: 2186040
aucuuccuucuggaacaca

SEQ ID NO: 2186042 - RNA, 19 nt, Artificial Sequence
  Description of Artificial Sequence: Synthetic oligonucleotide
  Sense strand starting at position 538 of SEQ ID NO: 1883330
aguggagcucucuaaagca

SEQ ID NO: 2186043 - RNA, 19 nt, Artificial Sequence
  Description of Artificial Sequence: Synthetic oligonucleotide
  Antisense strand to SEQ ID NO: 2186042
ugcuuuagagagcuccacu

SEQ ID NO: 2186044 - RNA, 19 nt, Artificial Sequence
  Description of Artificial Sequence: Synthetic oligonucleotide
  Sense strand starting at position 575 of SEQ ID NO: 1883330
gucuucuugccaggauuua

SEQ ID NO: 2186045 - RNA, 19 nt, Artificial Sequence
  Description of Artificial Sequence: Synthetic oligonucleotide
  Antisense strand to SEQ ID NO: 2186044
uaaauccuggcaagaagac

SEQ ID NO: 2186046 - RNA, 19 nt, Artificial Sequence
  Description of Artificial Sequence: Synthetic oligonucleotide
  Sense strand starting at position 767 of SEQ ID NO: 1883330
uuauuuagcuuucugagcu

SEQ ID NO: 2186047 - RNA, 19 nt, Artificial Sequence
  Description of Artificial Sequence: Synthetic oligonucleotide
  Antisense strand to SEQ ID NO: 2186046
agcucagaaagcuaaauaa

SEQ ID NO: 2186048 - RNA, 19 nt, Artificial Sequence
  Description of Artificial Sequence: Synthetic oligonucleotide
  Sense strand starting at position 811 of SEQ ID NO: 1883330
gccucaauuguugaaauug

SEQ ID NO: 2186049 - RNA, 19 nt, Artificial Sequence
  Description of Artificial Sequence: Synthetic oligonucleotide
  Antisense strand to SEQ ID NO: 2186048
caauuucaacaauugaggc

SEQ ID NO: 2186050 - RNA, 19 nt, Artificial Sequence
  Description of Artificial Sequence: Synthetic oligonucleotide
  Sense strand starting at position 821 of SEQ ID NO: 1883330
uugaaauuguuacuuagga

SEQ ID NO: 2186051 - RNA, 19 nt, Artificial Sequence
  Description of Artificial Sequence: Synthetic oligonucleotide
  Antisense strand to SEQ ID NO: 2186050
uccuaaguaacaauuucaa

SEQ ID NO: 2186052 - RNA, 19 nt, Artificial Sequence
  Description of Artificial Sequence: Synthetic oligonucleotide
  Sense strand starting at position 872 of SEQ ID NO: 1883330
cauaaacagggauguuagu

SEQ ID NO: 2186053 - RNA, 19 nt, Artificial Sequence
  Description of Artificial Sequence: Synthetic oligonucleotide
  Antisense strand to SEQ ID NO: 2186052
acuaacaucccuguuuaug

SEQ ID NO: 2186054 - RNA, 19 nt, Artificial Sequence
  Description of Artificial Sequence: Synthetic oligonucleotide
  Sense strand starting at position 895 of SEQ ID NO: 1883330
aaccacuuuguaggaguua

SEQ ID NO: 2186055 - RNA, 19 nt, Artificial Sequence
  Description of Artificial Sequence: Synthetic oligonucleotide
  Antisense strand to SEQ ID NO: 2186054
uaacuccuacaaagugguu

SEQ ID NO: 2186056 - RNA, 19 nt, Artificial Sequence
  Description of Artificial Sequence: Synthetic oligonucleotide
  Sense strand starting at position 914 of SEQ ID NO: 1883330
gugagagacgaugagucau

SEQ ID NO: 2186057 - RNA, 19 nt, Artificial Sequence
  Description of Artificial Sequence: Synthetic oligonucleotide
  Antisense strand to SEQ ID NO: 2186056
augacucaucgucucucac

SEQ ID NO: 2186058 - RNA, 19 nt, Artificial Sequence
  Description of Artificial Sequence: Synthetic oligonucleotide
  Sense strand starting at position 1001 of SEQ ID NO: 1883330
gggauaugccagugaauaa

SEQ ID NO: 2186059 - RNA, 19 nt, Artificial Sequence
  Description of Artificial Sequence: Synthetic oligonucleotide
  Antisense strand to SEQ ID NO: 2186058
uuauucacuggcauauccc

SEQ ID NO: 2186060 - RNA, 19 nt, Artificial Sequence
  Description of Artificial Sequence: Synthetic oligonucleotide
  Sense strand starting at position 1150 of SEQ ID NO: 1883330
gggaguggugagugaagaa

SEQ ID NO: 2186061 - RNA, 19 nt, Artificial Sequence
  Description of Artificial Sequence: Synthetic oligonucleotide
  Antisense strand to SEQ ID NO: 2186060
uucuucacucaccacuccc

SEQ ID NO: 2186062 - RNA, 19 nt, Artificial Sequence
  Description of Artificial Sequence: Synthetic oligonucleotide
  Sense strand starting at position 1162 of SEQ ID NO: 1883330
ugaagaacucucugaagcu

SEQ ID NO: 2186063 - RNA, 19 nt, Artificial Sequence
  Description of Artificial Sequence: Synthetic oligonucleotide
  Antisense strand to SEQ ID NO: 2186062
agcuucagagaguucuuca

SEQ ID NO: 2186064 - RNA, 19 nt, Artificial Sequence
  Description of Artificial Sequence: Synthetic oligonucleotide
  Sense strand starting at position 1180 of SEQ ID NO: 1883330
ugugauacuuaagcagaga

SEQ ID NO: 2186065 - RNA, 19 nt, Artificial Sequence
  Description of Artificial Sequence: Synthetic oligonucleotide
  Antisense strand to SEQ ID NO: 2186064
ucucugcuuaaguaucaca

SEQ ID NO: 2186066 - RNA, 19 nt, Artificial Sequence
  Description of Artificial Sequence: Synthetic oligonucleotide
  Sense strand starting at position 1205 of SEQ ID NO: 1883330
agaaaugagcuuuguacac

SEQ ID NO: 2186067 - RNA, 19 nt, Artificial Sequence
  Description of Artificial Sequence: Synthetic oligonucleotide
  Antisense strand to SEQ ID NO: 2186066
guguacaaagcucauuucu

SEQ ID NO: 2186068 - RNA, 19 nt, Artificial Sequence
  Description of Artificial Sequence: Synthetic oligonucleotide
  Sense strand starting at position 1276 of SEQ ID NO: 1883330
ggguaagaauaagcuuaga

SEQ ID NO: 2186069 - RNA, 19 nt, Artificial Sequence
  Description of Artificial Sequence: Synthetic oligonucleotide
  Antisense strand to SEQ ID NO: 2186068
ucuaagcuuauucuuaccc

SEQ ID NO: 2186070 - RNA, 19 nt, Artificial Sequence
  Description of Artificial Sequence: Synthetic oligonucleotide
  Sense strand starting at position 1435 of SEQ ID NO: 1883330
uggacuccagcugaauauu

SEQ ID NO: 2186071 - RNA, 19 nt, Artificial Sequence
  Description of Artificial Sequence: Synthetic oligonucleotide
  Antisense strand to SEQ ID NO: 2186070
aauauucagcuggagucca

SEQ ID NO: 2186072 - RNA, 19 nt, Artificial Sequence
  Description of Artificial Sequence: Synthetic oligonucleotide
  Sense strand starting at position 1469 of SEQ ID NO: 1883330
agaggugacaguuaaagcu

SEQ ID NO: 2186073 - RNA, 19 nt, Artificial Sequence
  Description of Artificial Sequence: Synthetic oligonucleotide
  Antisense strand to SEQ ID NO: 2186072
agcuuuaacugucaccucu

SEQ ID NO: 2186074 - RNA, 19 nt, Artificial Sequence
  Description of Artificial Sequence: Synthetic oligonucleotide
  Sense strand starting at position 1530 of SEQ ID NO: 1883330
aaucaaauuugagaggagu

SEQ ID NO: 2186075 - RNA, 19 nt, Artificial Sequence
  Description of Artificial Sequence: Synthetic oligonucleotide
  Antisense strand to SEQ ID NO: 2186074
acuccucucaaauuugauu

SEQ ID NO: 2186076 - RNA, 19 nt, Artificial Sequence
  Description of Artificial Sequence: Synthetic oligonucleotide
  Sense strand starting at position 1562 of SEQ ID NO: 1883330
gauagugaacauggcaaga

SEQ ID NO: 2186077 - RNA, 19 nt, Artificial Sequence
  Description of Artificial Sequence: Synthetic oligonucleotide
  Antisense strand to SEQ ID NO: 2186076
ucuugccauguucacuauc

SEQ ID NO: 2186078 - RNA, 19 nt, Artificial Sequence
  Description of Artificial Sequence: Synthetic oligonucleotide
  Sense strand starting at position 1587 of SEQ ID NO: 1883330
aacgaugaagccuggaaau

SEQ ID NO: 2186079 - RNA, 19 nt, Artificial Sequence
  Description of Artificial Sequence: Synthetic oligonucleotide
  Antisense strand to SEQ ID NO: 2186078
auuuccaggcuucaucguu

SEQ ID NO: 2186080 - RNA, 19 nt, Artificial Sequence
  Description of Artificial Sequence: Synthetic oligonucleotide
  Sense strand starting at position 1600 of SEQ ID NO: 1883330
ggaaauaagugauccuuuc

SEQ ID NO: 2186081 - RNA, 19 nt, Artificial Sequence
  Description of Artificial Sequence: Synthetic oligonucleotide
  Antisense strand to SEQ ID NO: 2186080
gaaaggaucacuuauuucc

SEQ ID NO: 2186082 - RNA, 19 nt, Artificial Sequence
  Description of Artificial Sequence: Synthetic oligonucleotide
  Sense strand starting at position 1630 of SEQ ID NO: 1883330
aguguacaggaggguuaaa

SEQ ID NO: 2186083 - RNA, 19 nt, Artificial Sequence
  Description of Artificial Sequence: Synthetic oligonucleotide
  Antisense strand to SEQ ID NO: 2186082
uuuaacccuccuguacacu

SEQ ID NO: 2186084 - RNA, 19 nt, Artificial Sequence
  Description of Artificial Sequence: Synthetic oligonucleotide
  Sense strand starting at position 1693 of SEQ ID NO: 1883330
uggcuuugaugagcaggaa

SEQ ID NO: 2186085 - RNA, 19 nt, Artificial Sequence
  Description of Artificial Sequence: Synthetic oligonucleotide
  Antisense strand to SEQ ID NO: 2186084
uuccugcucaucaaagcca

SEQ ID NO: 2186086 - RNA, 19 nt, Artificial Sequence
  Description of Artificial Sequence: Synthetic oligonucleotide
  Sense strand starting at position 1741 of SEQ ID NO: 1883330
cuaugcacuggugagagua

SEQ ID NO: 2186087 - RNA, 19 nt, Artificial Sequence
  Description of Artificial Sequence: Synthetic oligonucleotide
  Antisense strand to SEQ ID NO: 2186086
uacucucaccagugcauag

SEQ ID NO: 2186088 - RNA, 19 nt, Artificial Sequence
  Description of Artificial Sequence: Synthetic oligonucleotide
  Sense strand starting at position 1796 of SEQ ID NO: 1883330
ccuugagaaauguguuaga

SEQ ID NO: 2186089 - RNA, 19 nt, Artificial Sequence
  Description of Artificial Sequence: Synthetic oligonucleotide
  Antisense strand to SEQ ID NO: 2186088
ucuaacacauuucucaagg

SEQ ID NO: 2186090 - RNA, 19 nt, Artificial Sequence
  Description of Artificial Sequence: Synthetic oligonucleotide
  Sense strand starting at position 1821 of SEQ ID NO: 1883330
ugaggagauucugcaaauu

SEQ ID NO: 2186091 - RNA, 19 nt, Artificial Sequence
  Description of Artificial Sequence: Synthetic oligonucleotide
  Antisense strand to SEQ ID NO: 2186090
aauuugcagaaucuccuca

SEQ ID NO: 2186092 - RNA, 19 nt, Artificial Sequence
  Description of Artificial Sequence: Synthetic oligonucleotide
  Sense strand starting at position 2136 of SEQ ID NO: 1883330
uggcaaauuuaggaagaaa

SEQ ID NO: 2186093 - RNA, 19 nt, Artificial Sequence
  Description of Artificial Sequence: Synthetic oligonucleotide
  Antisense strand to SEQ ID NO: 2186092
uuucuuccuaaauuugcca

SEQ ID NO: 2186094 - RNA, 19 nt, Artificial Sequence
  Description of Artificial Sequence: Synthetic oligonucleotide
  Sense strand starting at position 2253 of SEQ ID NO: 1883330
accuguaaaggcuaccaua

SEQ ID NO: 2186095 - RNA, 19 nt, Artificial Sequence
  Description of Artificial Sequence: Synthetic oligonucleotide
  Antisense strand to SEQ ID NO: 2186094
uaugguagccuuuacaggu

SEQ ID NO: 2186096 - RNA, 19 nt, Artificial Sequence
  Description of Artificial Sequence: Synthetic oligonucleotide
  Sense strand starting at position 2462 of SEQ ID NO: 1883330
uggacucaacauugugaau

SEQ ID NO: 2186097 - RNA, 19 nt, Artificial Sequence
  Description of Artificial Sequence: Synthetic oligonucleotide
  Antisense strand to SEQ ID NO: 2186096
auucacaauguugagucca

SEQ ID NO: 2186098 - RNA, 19 nt, Artificial Sequence
  Description of Artificial Sequence: Synthetic oligonucleotide
  Sense strand starting at position 2953 of SEQ ID NO: 1883330
ggauuuauaucccagaacu

SEQ ID NO: 2186099 - RNA, 19 nt, Artificial Sequence
  Description of Artificial Sequence: Synthetic oligonucleotide
  Antisense strand to SEQ ID NO: 2186098
aguucugggauauaaaucc

SEQ ID NO: 2186100 - RNA, 19 nt, Artificial Sequence
  Description of Artificial Sequence: Synthetic oligonucleotide
  Sense strand starting at position 3096 of SEQ ID NO: 1883330
guaugugagcuugaccuaa

SEQ ID NO: 2186101 - RNA, 19 nt, Artificial Sequence
  Description of Artificial Sequence: Synthetic oligonucleotide
  Antisense strand to SEQ ID NO: 2186100
uuaggucaagcucacauac

SEQ ID NO: 2186102 - RNA, 19 nt, Artificial Sequence
  Description of Artificial Sequence: Synthetic oligonucleotide
  Sense strand starting at position 3131 of SEQ ID NO: 1883330
aacugaguccagcaagagu

SEQ ID NO: 2186103 - RNA, 19 nt, Artificial Sequence
  Description of Artificial Sequence: Synthetic oligonucleotide
  Antisense strand to SEQ ID NO: 2186102
acucuugcuggacucaguu

SEQ ID NO: 2186104 - RNA, 19 nt, Artificial Sequence
  Description of Artificial Sequence: Synthetic oligonucleotide
  Sense strand starting at position 3145 of SEQ ID NO: 1883330
agaguaaugggaugucacu

SEQ ID NO: 2186105 - RNA, 19 nt, Artificial Sequence
  Description of Artificial Sequence: Synthetic oligonucleotide
  Antisense strand to SEQ ID NO: 2186104
agugacaucccauuacucu

SEQ ID NO: 2186106 - RNA, 19 nt, Artificial Sequence
  Description of Artificial Sequence: Synthetic oligonucleotide
  Sense strand starting at position 3336 of SEQ ID NO: 1883330
cugcccuggguccauaaau

SEQ ID NO: 2186107 - RNA, 19 nt, Artificial Sequence
  Description of Artificial Sequence: Synthetic oligonucleotide
  Antisense strand to SEQ ID NO: 2186106
auuuauggacccagggcag

SEQ ID NO: 2186108 - RNA, 19 nt, Artificial Sequence
  Description of Artificial Sequence: Synthetic oligonucleotide
  Sense strand starting at position 3373 of SEQ ID NO: 1883330
gaagauccuucccuguuga

SEQ ID NO: 2186109 - RNA, 19 nt, Artificial Sequence
  Description of Artificial Sequence: Synthetic oligonucleotide
  Antisense strand to SEQ ID NO: 2186108
ucaacagggaaggaucuuc

SEQ ID NO: 2186110 - RNA, 19 nt, Artificial Sequence
  Description of Artificial Sequence: Synthetic oligonucleotide
  Sense strand starting at position 3477 of SEQ ID NO: 1883330
cagaaacugugagcaaaua

SEQ ID NO: 2186111 - RNA, 19 nt, Artificial Sequence
  Description of Artificial Sequence: Synthetic oligonucleotide
  Antisense strand to SEQ ID NO: 2186110
uauuugcucacaguuucug

SEQ ID NO: 2186112 - RNA, 19 nt, Artificial Sequence
  Description of Artificial Sequence: Synthetic oligonucleotide
  Sense strand starting at position 3620 of SEQ ID NO: 1883330
uggaucauuuaaugggaua

SEQ ID NO: 2186113 - RNA, 19 nt, Artificial Sequence
  Description of Artificial Sequence: Synthetic oligonucleotide
  Antisense strand to SEQ ID NO: 2186112
uaucccauuaaaugaucca

SEQ ID NO: 2186114 - RNA, 19 nt, Artificial Sequence
  Description of Artificial Sequence: Synthetic oligonucleotide
  Sense strand starting at position 3849 of SEQ ID NO: 1883330
auuauaccucgugagaacu

SEQ ID NO: 2186115 - RNA, 19 nt, Artificial Sequence
  Description of Artificial Sequence: Synthetic oligonucleotide
  Antisense strand to SEQ ID NO: 2186114
aguucucacgagguauaau

SEQ ID NO: 2186116 - RNA, 19 nt, Artificial Sequence
  Description of Artificial Sequence: Synthetic oligonucleotide
  Sense strand starting at position 3894 of SEQ ID NO: 1883330
gacggcuuccaugauccaa

SEQ ID NO: 2186117 - RNA, 19 nt, Artificial Sequence
  Description of Artificial Sequence: Synthetic oligonucleotide
  Antisense strand to SEQ ID NO: 2186116
uuggaucauggaagccguc

SEQ ID NO: 2186118 - RNA, 19 nt, Artificial Sequence
  Description of Artificial Sequence: Synthetic oligonucleotide
  Sense strand starting at position 13 of SEQ ID NO: 1883331
guuugcaaagccuaaucau

SEQ ID NO: 2186119 - RNA, 19 nt, Artificial Sequence
  Description of Artificial Sequence: Synthetic oligonucleotide
  Antisense strand to SEQ ID NO: 2186118
augauuaggcuuugcaaac

SEQ ID NO: 2186120 - RNA, 19 nt, Artificial Sequence
  Description of Artificial Sequence: Synthetic oligonucleotide
  Sense strand starting at position 33 of SEQ ID NO: 1883331
acaugaggcccuugaucua

SEQ ID NO: 2186121 - RNA, 19 nt, Artificial Sequence
  Description of Artificial Sequence: Synthetic oligonucleotide
  Antisense strand to SEQ ID NO: 2186120
uagaucaagggccucaugu

SEQ ID NO: 2186122 - RNA, 19 nt, Artificial Sequence
  Description of Artificial Sequence: Synthetic oligonucleotide
  Sense strand starting at position 76 of SEQ ID NO: 1883331
ggugggaucgcuggaagga

SEQ ID NO: 2186123 - RNA, 19 nt, Artificial Sequence
  Description of Artificial Sequence: Synthetic oligonucleotide
  Antisense strand to SEQ ID NO: 2186122
uccuuccagcgaucccacc

SEQ ID NO: 2186124 - RNA, 19 nt, Artificial Sequence
  Description of Artificial Sequence: Synthetic oligonucleotide
  Sense strand starting at position 309 of SEQ ID NO: 1883331
gaggaaaugcucugcuauu

SEQ ID NO: 2186125 - RNA, 19 nt, Artificial Sequence
  Description of Artificial Sequence: Synthetic oligonucleotide
  Antisense strand to SEQ ID NO: 2186124
aauagcagagcauuuccuc

SEQ ID NO: 2186126 - RNA, 19 nt, Artificial Sequence
  Description of Artificial Sequence: Synthetic oligonucleotide
  Sense strand starting at position 310 of SEQ ID NO: 1883331
aggaaaugcucugcuauuc

SEQ ID NO: 2186127 - RNA, 19 nt, Artificial Sequence
  Description of Artificial Sequence: Synthetic oligonucleotide
  Antisense strand to SEQ ID NO: 2186126
gaauagcagagcauuuccu

SEQ ID NO: 2186128 - RNA, 19 nt, Artificial Sequence
  Description of Artificial Sequence: Synthetic oligonucleotide
  Sense strand starting at position 438 of SEQ ID NO: 1883331
uuugguugguguucaggaa

SEQ ID NO: 2186129 - RNA, 19 nt, Artificial Sequence
  Description of Artificial Sequence: Synthetic oligonucleotide
  Antisense strand to SEQ ID NO: 2186128
uuccugaacaccaaccaaa

SEQ ID NO: 2186130 - RNA, 19 nt, Artificial Sequence
  Description of Artificial Sequence: Synthetic oligonucleotide
  Sense strand starting at position 442 of SEQ ID NO: 1883331
guugguguucaggaaggga

SEQ ID NO: 2186131 - RNA, 19 nt, Artificial Sequence
  Description of Artificial Sequence: Synthetic oligonucleotide
  Antisense strand to SEQ ID NO: 2186130
ucccuuccugaacaccaac

SEQ ID NO: 2186132 - RNA, 19 nt, Artificial Sequence
  Description of Artificial Sequence: Synthetic oligonucleotide
  Sense strand starting at position 461 of SEQ ID NO: 1883331
agugcagagagguggaaau

SEQ ID NO: 2186133 - RNA, 19 nt, Artificial Sequence
  Description of Artificial Sequence: Synthetic oligonucleotide
  Antisense strand to SEQ ID NO: 2186132
auuuccaccucucugcacu

SEQ ID NO: 2186134 - RNA, 19 nt, Artificial Sequence
  Description of Artificial Sequence: Synthetic oligonucleotide
  Sense strand starting at position 472 of SEQ ID NO: 1883331
guggaaaucucagccacag

SEQ ID NO: 2186135 - RNA, 19 nt, Artificial Sequence
  Description of Artificial Sequence: Synthetic oligonucleotide
  Antisense strand to SEQ ID NO: 2186134
cuguggcugagauuuccac

SEQ ID NO: 2186136 - RNA, 19 nt, Artificial Sequence
  Description of Artificial Sequence: Synthetic oligonucleotide
  Sense strand starting at position 474 of SEQ ID NO: 1883331
ggaaaucucagccacaggu

SEQ ID NO: 2186137 - RNA, 19 nt, Artificial Sequence
  Description of Artificial Sequence: Synthetic oligonucleotide
  Antisense strand to SEQ ID NO: 2186136
accuguggcugagauuucc

SEQ ID NO: 2186138 - RNA, 19 nt, Artificial Sequence
  Description of Artificial Sequence: Synthetic oligonucleotide
  Sense strand starting at position 527 of SEQ ID NO: 1883331
ccaauuaagcaugagagca

SEQ ID NO: 2186139 - RNA, 19 nt, Artificial Sequence
  Description of Artificial Sequence: Synthetic oligonucleotide
  Antisense strand to SEQ ID NO: 2186138
ugcucucaugcuuaauugg

SEQ ID NO: 2186140 - RNA, 19 nt, Artificial Sequence
  Description of Artificial Sequence: Synthetic oligonucleotide
  Sense strand starting at position 562 of SEQ ID NO: 1883331
cgcacaagucaguaacgaa

SEQ ID NO: 2186141 - RNA, 19 nt, Artificial Sequence
  Description of Artificial Sequence: Synthetic oligonucleotide
  Antisense strand to SEQ ID NO: 2186140
uucguuacugacuugugcg

SEQ ID NO: 2186142 - RNA, 19 nt, Artificial Sequence
  Description of Artificial Sequence: Synthetic oligonucleotide
  Sense strand starting at position 580 of SEQ ID NO: 1883331
aaaggacucccaggugauc

SEQ ID NO: 2186143 - RNA, 19 nt, Artificial Sequence
  Description of Artificial Sequence: Synthetic oligonucleotide
  Antisense strand to SEQ ID NO: 2186142
gaucaccugggaguccuuu

SEQ ID NO: 2186144 - RNA, 19 nt, Artificial Sequence
  Description of Artificial Sequence: Synthetic oligonucleotide
  Sense strand starting at position 582 of SEQ ID NO: 1883331
aggacucccaggugaucuu

SEQ ID NO: 2186145 - RNA, 19 nt, Artificial Sequence
  Description of Artificial Sequence: Synthetic oligonucleotide
  Antisense strand to SEQ ID NO: 2186144
aagaucaccugggaguccu

SEQ ID NO: 2186146 - RNA, 19 nt, Artificial Sequence
  Description of Artificial Sequence: Synthetic oligonucleotide
  Sense strand starting at position 591 of SEQ ID NO: 1883331
aggugaucuuaagucacau

SEQ ID NO: 2186147 - RNA, 19 nt, Artificial Sequence
  Description of Artificial Sequence: Synthetic oligonucleotide
  Antisense strand to SEQ ID NO: 2186146
augugacuuaagaucaccu

SEQ ID NO: 2186148 - RNA, 19 nt, Artificial Sequence
  Description of Artificial Sequence: Synthetic oligonucleotide
  Sense strand starting at position 657 of SEQ ID NO: 1883331
ugagacuaaucagcuggaa

SEQ ID NO: 2186149 - RNA, 19 nt, Artificial Sequence
  Description of Artificial Sequence: Synthetic oligonucleotide
  Antisense strand to SEQ ID NO: 2186148
uuccagcugauuagucuca

SEQ ID NO: 2186150 - RNA, 19 nt, Artificial Sequence
  Description of Artificial Sequence: Synthetic oligonucleotide
  Sense strand starting at position 928 of SEQ ID NO: 1883331
gcacaaugccauuaucaug

SEQ ID NO: 2186151 - RNA, 19 nt, Artificial Sequence
  Description of Artificial Sequence: Synthetic oligonucleotide
  Antisense strand to SEQ ID NO: 2186150
caugauaauggcauugugc

SEQ ID NO: 2186152 - RNA, 19 nt, Artificial Sequence
  Description of Artificial Sequence: Synthetic oligonucleotide
  Sense strand starting at position 1058 of SEQ ID NO: 1883331
aggacaucagguugggauu

SEQ ID NO: 2186153 - RNA, 19 nt, Artificial Sequence
  Description of Artificial Sequence: Synthetic oligonucleotide
  Antisense strand to SEQ ID NO: 2186152
aaucccaaccugauguccu

SEQ ID NO: 2186154 - RNA, 19 nt, Artificial Sequence
  Description of Artificial Sequence: Synthetic oligonucleotide
  Sense strand starting at position 1284 of SEQ ID NO: 1883331
agguguuagaaugagccau

SEQ ID NO: 2186155 - RNA, 19 nt, Artificial Sequence
  Description of Artificial Sequence: Synthetic oligonucleotide
  Antisense strand to SEQ ID NO: 2186154
auggcucauucuaacaccu

SEQ ID NO: 2186156 - RNA, 19 nt, Artificial Sequence
  Description of Artificial Sequence: Synthetic oligonucleotide
  Sense strand starting at position 1288 of SEQ ID NO: 1883331
guuagaaugagccauggca

SEQ ID NO: 2186157 - RNA, 19 nt, Artificial Sequence
  Description of Artificial Sequence: Synthetic oligonucleotide
  Antisense strand to SEQ ID NO: 2186156
ugccauggcucauucuaac

SEQ ID NO: 2186158 - RNA, 19 nt, Artificial Sequence
  Description of Artificial Sequence: Synthetic oligonucleotide
  Sense strand starting at position 1290 of SEQ ID NO: 1883331
uagaaugagccauggcagu

SEQ ID NO: 2186159 - RNA, 19 nt, Artificial Sequence
  Description of Artificial Sequence: Synthetic oligonucleotide
  Antisense strand to SEQ ID NO: 2186158
acugccauggcucauucua

SEQ ID NO: 2186160 - RNA, 19 nt, Artificial Sequence
  Description of Artificial Sequence: Synthetic oligonucleotide
  Sense strand starting at position 1537 of SEQ ID NO: 1883331
ccucaucuugcugagaaug

SEQ ID NO: 2186161 - RNA, 19 nt, Artificial Sequence
  Description of Artificial Sequence: Synthetic oligonucleotide
  Antisense strand to SEQ ID NO: 2186160
cauucucagcaagaugagg

SEQ ID NO: 2186162 - RNA, 19 nt, Artificial Sequence
  Description of Artificial Sequence: Synthetic oligonucleotide
  Sense strand starting at position 1891 of SEQ ID NO: 1883331
gacgcuucuccagaaguug

SEQ ID NO: 2186163 - RNA, 19 nt, Artificial Sequence
  Description of Artificial Sequence: Synthetic oligonucleotide
  Antisense strand to SEQ ID NO: 2186162
caacuucuggagaagcguc

SEQ ID NO: 2186164 - RNA, 19 nt, Artificial Sequence
  Description of Artificial Sequence: Synthetic oligonucleotide
  Sense strand starting at position 2079 of SEQ ID NO: 1883331
agguauuuguccucacucu

SEQ ID NO: 2186165 - RNA, 19 nt, Artificial Sequence
  Description of Artificial Sequence: Synthetic oligonucleotide
  Antisense strand to SEQ ID NO: 2186164
agagugaggacaaauaccu

SEQ ID NO: 2186166 - RNA, 19 nt, Artificial Sequence
  Description of Artificial Sequence: Synthetic oligonucleotide
  Sense strand starting at position 2126 of SEQ ID NO: 1883331
gggacuuucucauccagca

SEQ ID NO: 2186167 - RNA, 19 nt, Artificial Sequence
  Description of Artificial Sequence: Synthetic oligonucleotide
  Antisense strand to SEQ ID NO: 2186166
ugcuggaugagaaaguccc

SEQ ID NO: 2186168 - RNA, 19 nt, Artificial Sequence
  Description of Artificial Sequence: Synthetic oligonucleotide
  Sense strand starting at position 2281 of SEQ ID NO: 1883331
cucugucuuggagagaucu

SEQ ID NO: 2186169 - RNA, 19 nt, Artificial Sequence
  Description of Artificial Sequence: Synthetic oligonucleotide
  Antisense strand to SEQ ID NO: 2186168
agaucucuccaagacagag

SEQ ID NO: 2186170 - RNA, 19 nt, Artificial Sequence
  Description of Artificial Sequence: Synthetic oligonucleotide
  Sense strand starting at position 2356 of SEQ ID NO: 1883331
guuccaagccaucauagga

SEQ ID NO: 2186171 - RNA, 19 nt, Artificial Sequence
  Description of Artificial Sequence: Synthetic oligonucleotide
  Antisense strand to SEQ ID NO: 2186170
uccuaugauggcuuggaac

SEQ ID NO: 2186172 - RNA, 19 nt, Artificial Sequence
  Description of Artificial Sequence: Synthetic oligonucleotide
  Sense strand starting at position 2371 of SEQ ID NO: 1883331
aggaacuugugagcugaga

SEQ ID NO: 2186173 - RNA, 19 nt, Artificial Sequence
  Description of Artificial Sequence: Synthetic oligonucleotide
  Antisense strand to SEQ ID NO: 2186172
ucucagcucacaaguuccu

SEQ ID NO: 2186174 - RNA, 19 nt, Artificial Sequence
  Description of Artificial Sequence: Synthetic oligonucleotide
  Sense strand starting at position 2382 of SEQ ID NO: 1883331
agcugagaaacauggucaa

SEQ ID NO: 2186175 - RNA, 19 nt, Artificial Sequence
  Description of Artificial Sequence: Synthetic oligonucleotide
  Antisense strand to SEQ ID NO: 2186174
uugaccauguuucucagcu

SEQ ID NO: 2186176 - RNA, 19 nt, Artificial Sequence
  Description of Artificial Sequence: Synthetic oligonucleotide
  Sense strand starting at position 2385 of SEQ ID NO: 1883331
ugagaaacauggucaacuc

SEQ ID NO: 2186177 - RNA, 19 nt, Artificial Sequence
  Description of Artificial Sequence: Synthetic oligonucleotide
  Antisense strand to SEQ ID NO: 2186176
gaguugaccauguuucuca

SEQ ID NO: 2186178 - RNA, 19 nt, Artificial Sequence
  Description of Artificial Sequence: Synthetic oligonucleotide
  Sense strand starting at position 2474 of SEQ ID NO: 1883331
aucuaagggcucuguuaca

SEQ ID NO: 2186179 - RNA, 19 nt, Artificial Sequence
  Description of Artificial Sequence: Synthetic oligonucleotide
  Antisense strand to SEQ ID NO: 2186178
uguaacagagcccuuagau

SEQ ID NO: 2186180 - RNA, 19 nt, Artificial Sequence
  Description of Artificial Sequence: Synthetic oligonucleotide
  Sense strand starting at position 2515 of SEQ ID NO: 1883331
guagaugcccaaugacacu

SEQ ID NO: 2186181 - RNA, 19 nt, Artificial Sequence
  Description of Artificial Sequence: Synthetic oligonucleotide
  Antisense strand to SEQ ID NO: 2186180
agugucauugggcaucuac

SEQ ID NO: 2186182 - RNA, 19 nt, Artificial Sequence
  Description of Artificial Sequence: Synthetic oligonucleotide
  Sense strand starting at position 2540 of SEQ ID NO: 1883331
caugaaaguguauaccagu

SEQ ID NO: 2186183 - RNA, 19 nt, Artificial Sequence
  Description of Artificial Sequence: Synthetic oligonucleotide
  Antisense strand to SEQ ID NO: 2186182
acugguauacacuuucaug

SEQ ID NO: 2186184 - RNA, 19 nt, Artificial Sequence
  Description of Artificial Sequence: Synthetic oligonucleotide
  Sense strand starting at position 2546 of SEQ ID NO: 1883331
aguguauaccaguauaaag

SEQ ID NO: 2186185 - RNA, 19 nt, Artificial Sequence
  Description of Artificial Sequence: Synthetic oligonucleotide
  Antisense strand to SEQ ID NO: 2186184
cuuuauacugguauacacu

SEQ ID NO: 2186186 - RNA, 19 nt, Artificial Sequence
  Description of Artificial Sequence: Synthetic oligonucleotide
  Sense strand starting at position 2809 of SEQ ID NO: 1883331
gguuuaugcgaagauuaau

SEQ ID NO: 2186187 - RNA, 19 nt, Artificial Sequence
  Description of Artificial Sequence: Synthetic oligonucleotide
  Antisense strand to SEQ ID NO: 2186186
auuaaucuucgcauaaacc

SEQ ID NO: 2186188 - RNA, 19 nt, Artificial Sequence
  Description of Artificial Sequence: Synthetic oligonucleotide
  Sense strand starting at position 2884 of SEQ ID NO: 1883331
cccaucugugcagaguuaa

SEQ ID NO: 2186189 - RNA, 19 nt, Artificial Sequence
  Description of Artificial Sequence: Synthetic oligonucleotide
  Antisense strand to SEQ ID NO: 2186188
uuaacucugcacagauggg

SEQ ID NO: 2186190 - RNA, 19 nt, Artificial Sequence
  Description of Artificial Sequence: Synthetic oligonucleotide
  Sense strand starting at position 3156 of SEQ ID NO: 1883331
cuaccaccucuuggguaaa

SEQ ID NO: 2186191 - RNA, 19 nt, Artificial Sequence
  Description of Artificial Sequence: Synthetic oligonucleotide
  Antisense strand to SEQ ID NO: 2186190
uuuacccaagaggugguag

SEQ ID NO: 2186192 - RNA, 19 nt, Artificial Sequence
  Description of Artificial Sequence: Synthetic oligonucleotide
  Sense strand starting at position 3159 of SEQ ID NO: 1883331
ccaccucuuggguaaagua

SEQ ID NO: 2186193 - RNA, 19 nt, Artificial Sequence
  Description of Artificial Sequence: Synthetic oligonucleotide
  Antisense strand to SEQ ID NO: 2186192
uacuuuacccaagaggugg

SEQ ID NO: 2186194 - RNA, 19 nt, Artificial Sequence
  Description of Artificial Sequence: Synthetic oligonucleotide
  Sense strand starting at position 3894 of SEQ ID NO: 1883331
cuaugugaucuggauuauc

SEQ ID NO: 2186195 - RNA, 19 nt, Artificial Sequence
  Description of Artificial Sequence: Synthetic oligonucleotide
  Antisense strand to SEQ ID NO: 2186194
gauaauccagaucacauag

SEQ ID NO: 2186196 - RNA, 19 nt, Artificial Sequence
  Description of Artificial Sequence: Synthetic oligonucleotide
  Sense strand starting at position 3920 of SEQ ID NO: 1883331
uuauuuccuugguauagaa

SEQ ID NO: 2186197 - RNA, 19 nt, Artificial Sequence
  Description of Artificial Sequence: Synthetic oligonucleotide
  Antisense strand to SEQ ID NO: 2186196
uucuauaccaaggaaauaa

SEQ ID NO: 2186198 - RNA, 19 nt, Artificial Sequence
  Description of Artificial Sequence: Synthetic oligonucleotide
  Sense strand starting at position 609 of SEQ ID NO: 1883332
ccuguuuagugggcacaga

SEQ ID NO: 2186199 - RNA, 19 nt, Artificial Sequence
  Description of Artificial Sequence: Synthetic oligonucleotide
  Antisense strand to SEQ ID NO: 2186198
ucugugcccacuaaacagg

SEQ ID NO: 2186200 - RNA, 19 nt, Artificial Sequence
  Description of Artificial Sequence: Synthetic oligonucleotide
  Sense strand starting at position 635 of SEQ ID NO: 1883332
gcucauguccuggaaauac

SEQ ID NO: 2186201 - RNA, 19 nt, Artificial Sequence
  Description of Artificial Sequence: Synthetic oligonucleotide
  Antisense strand to SEQ ID NO: 2186200
guauuuccaggacaugagc

SEQ ID NO: 2186202 - RNA, 19 nt, Artificial Sequence
  Description of Artificial Sequence: Synthetic oligonucleotide
  Sense strand starting at position 726 of SEQ ID NO: 1883332
ggagaugugucccuccuac

SEQ ID NO: 2186203 - RNA, 19 nt, Artificial Sequence
  Description of Artificial Sequence: Synthetic oligonucleotide
  Antisense strand to SEQ ID NO: 2186202
guaggagggacacaucucc

SEQ ID NO: 2186204 - RNA, 19 nt, Artificial Sequence
  Description of Artificial Sequence: Synthetic oligonucleotide
  Sense strand starting at position 893 of SEQ ID NO: 1883332
cuuguuuagggcugagauc

SEQ ID NO: 2186205 - RNA, 19 nt, Artificial Sequence
  Description of Artificial Sequence: Synthetic oligonucleotide
  Antisense strand to SEQ ID NO: 2186204
gaucucagcccuaaacaag

SEQ ID NO: 2186206 - RNA, 19 nt, Artificial Sequence
  Description of Artificial Sequence: Synthetic oligonucleotide
  Sense strand starting at position 1051 of SEQ ID NO: 1883332
ugguuuccaccucaucauu

SEQ ID NO: 2186207 - RNA, 19 nt, Artificial Sequence
  Description of Artificial Sequence: Synthetic oligonucleotide
  Antisense strand to SEQ ID NO: 2186206
aaugaugagguggaaacca

SEQ ID NO: 2186208 - RNA, 19 nt, Artificial Sequence
  Description of Artificial Sequence: Synthetic oligonucleotide
  Sense strand starting at position 1088 of SEQ ID NO: 1883332
agaaauuaaucuucgcaua

SEQ ID NO: 2186209 - RNA, 19 nt, Artificial Sequence
  Description of Artificial Sequence: Synthetic oligonucleotide
  Antisense strand to SEQ ID NO: 2186208
uaugcgaagauuaauuucu

SEQ ID NO: 2186210 - RNA, 19 nt, Artificial Sequence
  Description of Artificial Sequence: Synthetic oligonucleotide
  Sense strand starting at position 1381 of SEQ ID NO: 1883332
uuacaagugucauugggca

SEQ ID NO: 2186211 - RNA, 19 nt, Artificial Sequence
  Description of Artificial Sequence: Synthetic oligonucleotide
  Antisense strand to SEQ ID NO: 2186210
ugcccaaugacacuuguaa

SEQ ID NO: 2186212 - RNA, 19 nt, Artificial Sequence
  Description of Artificial Sequence: Synthetic oligonucleotide
  Sense strand starting at position 1385 of SEQ ID NO: 1883332
aagugucauugggcaucua

SEQ ID NO: 2186213 - RNA, 19 nt, Artificial Sequence
  Description of Artificial Sequence: Synthetic oligonucleotide
  Antisense strand to SEQ ID NO: 2186212
uagaugcccaaugacacuu

SEQ ID NO: 2186214 - RNA, 19 nt, Artificial Sequence
  Description of Artificial Sequence: Synthetic oligonucleotide
  Sense strand starting at position 1415 of SEQ ID NO: 1883332
cuuaguuacccuuguaaca

SEQ ID NO: 2186215 - RNA, 19 nt, Artificial Sequence
  Description of Artificial Sequence: Synthetic oligonucleotide
  Antisense strand to SEQ ID NO: 2186214
uguuacaaggguaacuaag

SEQ ID NO: 2186216 - RNA, 19 nt, Artificial Sequence
  Description of Artificial Sequence: Synthetic oligonucleotide
  Sense strand starting at position 1462 of SEQ ID NO: 1883332
gacugacacugagauuugu

SEQ ID NO: 2186217 - RNA, 19 nt, Artificial Sequence
  Description of Artificial Sequence: Synthetic oligonucleotide
  Antisense strand to SEQ ID NO: 2186216
acaaaucucagugucaguc

SEQ ID NO: 2186218 - RNA, 19 nt, Artificial Sequence
  Description of Artificial Sequence: Synthetic oligonucleotide
  Sense strand starting at position 1512 of SEQ ID NO: 1883332
aguagaguugaccauguuu

SEQ ID NO: 2186219 - RNA, 19 nt, Artificial Sequence
  Description of Artificial Sequence: Synthetic oligonucleotide
  Antisense strand to SEQ ID NO: 2186218
aaacauggucaacucuacu

SEQ ID NO: 2186220 - RNA, 19 nt, Artificial Sequence
  Description of Artificial Sequence: Synthetic oligonucleotide
  Sense strand starting at position 1514 of SEQ ID NO: 1883332
uagaguugaccauguuucu

SEQ ID NO: 2186221 - RNA, 19 nt, Artificial Sequence
  Description of Artificial Sequence: Synthetic oligonucleotide
  Antisense strand to SEQ ID NO: 2186220
agaaacauggucaacucua

SEQ ID NO: 2186222 - RNA, 19 nt, Artificial Sequence
  Description of Artificial Sequence: Synthetic oligonucleotide
  Sense strand starting at position 1535 of SEQ ID NO: 1883332
gcucacaaguuccuaugau

SEQ ID NO: 2186223 - RNA, 19 nt, Artificial Sequence
  Description of Artificial Sequence: Synthetic oligonucleotide
  Antisense strand to SEQ ID NO: 2186222
aucauaggaacuugugagc

SEQ ID NO: 2186224 - RNA, 19 nt, Artificial Sequence
  Description of Artificial Sequence: Synthetic oligonucleotide
  Sense strand starting at position 1544 of SEQ ID NO: 1883332
uuccuaugauggcuuggaa

SEQ ID NO: 2186225 - RNA, 19 nt, Artificial Sequence
  Description of Artificial Sequence: Synthetic oligonucleotide
  Antisense strand to SEQ ID NO: 2186224
uuccaagccaucauaggaa

SEQ ID NO: 2186226 - RNA, 19 nt, Artificial Sequence
  Description of Artificial Sequence: Synthetic oligonucleotide
  Sense strand starting at position 1795 of SEQ ID NO: 1883332
aaguucuaucauugaagga

SEQ ID NO: 2186227 - RNA, 19 nt, Artificial Sequence
  Description of Artificial Sequence: Synthetic oligonucleotide
  Antisense strand to SEQ ID NO: 2186226
uccuucaaugauagaacuu

SEQ ID NO: 2186228 - RNA, 19 nt, Artificial Sequence
  Description of Artificial Sequence: Synthetic oligonucleotide
  Sense strand starting at position 2266 of SEQ ID NO: 1883332
guguuucugcgcuuccuga

SEQ ID NO: 2186229 - RNA, 19 nt, Artificial Sequence
  Description of Artificial Sequence: Synthetic oligonucleotide
  Antisense strand to SEQ ID NO: 2186228
ucaggaagcgcagaaacac

SEQ ID NO: 2186230 - RNA, 19 nt, Artificial Sequence
  Description of Artificial Sequence: Synthetic oligonucleotide
  Sense strand starting at position 2361 of SEQ ID NO: 1883332
ucgcauucucagcaagaug

SEQ ID NO: 2186231 - RNA, 19 nt, Artificial Sequence
  Description of Artificial Sequence: Synthetic oligonucleotide
  Antisense strand to SEQ ID NO: 2186230
caucuugcugagaaugcga

SEQ ID NO: 2186232 - RNA, 19 nt, Artificial Sequence
  Description of Artificial Sequence: Synthetic oligonucleotide
  Sense strand starting at position 2707 of SEQ ID NO: 1883332
aggacaugucgaggacaga

SEQ ID NO: 2186233 - RNA, 19 nt, Artificial Sequence
  Description of Artificial Sequence: Synthetic oligonucleotide
  Antisense strand to SEQ ID NO: 2186232
ucuguccucgacauguccu

SEQ ID NO: 2186234 - RNA, 19 nt, Artificial Sequence
  Description of Artificial Sequence: Synthetic oligonucleotide
  Sense strand starting at position 2779 of SEQ ID NO: 1883332
gagcucucuccagagggua

SEQ ID NO: 2186235 - RNA, 19 nt, Artificial Sequence
  Description of Artificial Sequence: Synthetic oligonucleotide
  Antisense strand to SEQ ID NO: 2186234
uacccucuggagagagcuc

SEQ ID NO: 2186236 - RNA, 19 nt, Artificial Sequence
  Description of Artificial Sequence: Synthetic oligonucleotide
  Sense strand starting at position 3099 of SEQ ID NO: 1883332
gaacaagguuggcuaugau

SEQ ID NO: 2186237 - RNA, 19 nt, Artificial Sequence
  Description of Artificial Sequence: Synthetic oligonucleotide
  Antisense strand to SEQ ID NO: 2186236
aucauagccaaccuuguuc

SEQ ID NO: 2186238 - RNA, 19 nt, Artificial Sequence
  Description of Artificial Sequence: Synthetic oligonucleotide
  Sense strand starting at position 3111 of SEQ ID NO: 1883332
cuaugauuugaucguuguu

SEQ ID NO: 2186239 - RNA, 19 nt, Artificial Sequence
  Description of Artificial Sequence: Synthetic oligonucleotide
  Antisense strand to SEQ ID NO: 2186238
aacaacgaucaaaucauag

SEQ ID NO: 2186240 - RNA, 19 nt, Artificial Sequence
  Description of Artificial Sequence: Synthetic oligonucleotide
  Sense strand starting at position 3114 of SEQ ID NO: 1883332
ugauuugaucguuguugag

SEQ ID NO: 2186241 - RNA, 19 nt, Artificial Sequence
  Description of Artificial Sequence: Synthetic oligonucleotide
  Antisense strand to SEQ ID NO: 2186240
cucaacaacgaucaaauca

SEQ ID NO: 2186242 - RNA, 19 nt, Artificial Sequence
  Description of Artificial Sequence: Synthetic oligonucleotide
  Sense strand starting at position 3153 of SEQ ID NO: 1883332
gaguucguucuagaauuau

SEQ ID NO: 2186243 - RNA, 19 nt, Artificial Sequence
  Description of Artificial Sequence: Synthetic oligonucleotide
  Antisense strand to SEQ ID NO: 2186242
auaauucuagaacgaacuc

SEQ ID NO: 2186244 - RNA, 19 nt, Artificial Sequence
  Description of Artificial Sequence: Synthetic oligonucleotide
  Sense strand starting at position 3371 of SEQ ID NO: 1883332
gugugcucucaugcuuaau

SEQ ID NO: 2186245 - RNA, 19 nt, Artificial Sequence
  Description of Artificial Sequence: Synthetic oligonucleotide
  Antisense strand to SEQ ID NO: 2186244
auuaagcaugagagcacac

SEQ ID NO: 2186246 - RNA, 19 nt, Artificial Sequence
  Description of Artificial Sequence: Synthetic oligonucleotide
  Sense strand starting at position 3377 of SEQ ID NO: 1883332
ucucaugcuuaauuggauu

SEQ ID NO: 2186247 - RNA, 19 nt, Artificial Sequence
  Description of Artificial Sequence: Synthetic oligonucleotide
  Antisense strand to SEQ ID NO: 2186246
aauccaauuaagcaugaga

SEQ ID NO: 2186248 - RNA, 19 nt, Artificial Sequence
  Description of Artificial Sequence: Synthetic oligonucleotide
  Sense strand starting at position 3383 of SEQ ID NO: 1883332
gcuuaauuggauuggucuu

SEQ ID NO: 2186249 - RNA, 19 nt, Artificial Sequence
  Description of Artificial Sequence: Synthetic oligonucleotide
  Antisense strand to SEQ ID NO: 2186248
aagaccaauccaauuaagc

SEQ ID NO: 2186250 - RNA, 19 nt, Artificial Sequence
  Description of Artificial Sequence: Synthetic oligonucleotide
  Sense strand starting at position 3385 of SEQ ID NO: 1883332
uuaauuggauuggucuuua

SEQ ID NO: 2186251 - RNA, 19 nt, Artificial Sequence
  Description of Artificial Sequence: Synthetic oligonucleotide
  Antisense strand to SEQ ID NO: 2186250
uaaagaccaauccaauuaa

SEQ ID NO: 2186252 - RNA, 19 nt, Artificial Sequence
  Description of Artificial Sequence: Synthetic oligonucleotide
  Sense strand starting at position 3389 of SEQ ID NO: 1883332
uuggauuggucuuuaaucu

SEQ ID NO: 2186253 - RNA, 19 nt, Artificial Sequence
  Description of Artificial Sequence: Synthetic oligonucleotide
  Antisense strand to SEQ ID NO: 2186252
agauuaaagaccaauccaa

SEQ ID NO: 2186254 - RNA, 19 nt, Artificial Sequence
  Description of Artificial Sequence: Synthetic oligonucleotide
  Sense strand starting at position 3390 of SEQ ID NO: 1883332
uggauuggucuuuaaucug

SEQ ID NO: 2186255 - RNA, 19 nt, Artificial Sequence
  Description of Artificial Sequence: Synthetic oligonucleotide
  Antisense strand to SEQ ID NO: 2186254
cagauuaaagaccaaucca

SEQ ID NO: 2186256 - RNA, 19 nt, Artificial Sequence
  Description of Artificial Sequence: Synthetic oligonucleotide
  Sense strand starting at position 3424 of SEQ ID NO: 1883332
uugaccuguggcugagauu

SEQ ID NO: 2186257 - RNA, 19 nt, Artificial Sequence
  Description of Artificial Sequence: Synthetic oligonucleotide
  Antisense strand to SEQ ID NO: 2186256
aaucucagccacaggucaa

SEQ ID NO: 2186258 - RNA, 19 nt, Artificial Sequence
  Description of Artificial Sequence: Synthetic oligonucleotide
  Sense strand starting at position 3527 of SEQ ID NO: 1883332
uccaauguccuaugucuaa

SEQ ID NO: 2186259 - RNA, 19 nt, Artificial Sequence
  Description of Artificial Sequence: Synthetic oligonucleotide
  Antisense strand to SEQ ID NO: 2186258
uuagacauaggacauugga

SEQ ID NO: 2186260 - RNA, 19 nt, Artificial Sequence
  Description of Artificial Sequence: Synthetic oligonucleotide
  Sense strand starting at position 3587 of SEQ ID NO: 1883332
cuaugaauagcagagcauu

SEQ ID NO: 2186261 - RNA, 19 nt, Artificial Sequence
  Description of Artificial Sequence: Synthetic oligonucleotide
  Antisense strand to SEQ ID NO: 2186260
aaugcucugcuauucauag

SEQ ID NO: 2186262 - RNA, 19 nt, Artificial Sequence
  Description of Artificial Sequence: Synthetic oligonucleotide
  Sense strand starting at position 3676 of SEQ ID NO: 1883332
uccacuuagucaccaaguu

SEQ ID NO: 2186263 - RNA, 19 nt, Artificial Sequence
  Description of Artificial Sequence: Synthetic oligonucleotide
  Antisense strand to SEQ ID NO: 2186262
aacuuggugacuaagugga

SEQ ID NO: 2186264 - RNA, 19 nt, Artificial Sequence
  Description of Artificial Sequence: Synthetic oligonucleotide
  Sense strand starting at position 3685 of SEQ ID NO: 1883332
ucaccaaguucuguggauu

SEQ ID NO: 2186265 - RNA, 19 nt, Artificial Sequence
  Description of Artificial Sequence: Synthetic oligonucleotide
  Antisense strand to SEQ ID NO: 2186264
aauccacagaacuugguga

SEQ ID NO: 2186266 - RNA, 19 nt, Artificial Sequence
  Description of Artificial Sequence: Synthetic oligonucleotide
  Sense strand starting at position 3686 of SEQ ID NO: 1883332
caccaaguucuguggauuc

SEQ ID NO: 2186267 - RNA, 19 nt, Artificial Sequence
  Description of Artificial Sequence: Synthetic oligonucleotide
  Antisense strand to SEQ ID NO: 2186266
gaauccacagaacuuggug

SEQ ID NO: 2186268 - RNA, 19 nt, Artificial Sequence
  Description of Artificial Sequence: Synthetic oligonucleotide
  Sense strand starting at position 3870 of SEQ ID NO: 1883332
gaucaagggccucauguua

SEQ ID NO: 2186269 - RNA, 19 nt, Artificial Sequence
  Description of Artificial Sequence: Synthetic oligonucleotide
  Antisense strand to SEQ ID NO: 2186268
uaacaugaggcccuugauc

SEQ ID NO: 2186270 - RNA, 19 nt, Artificial Sequence
  Description of Artificial Sequence: Synthetic oligonucleotide
  Sense strand starting at position 3881 of SEQ ID NO: 1883332
ucauguuaugauuaggcuu

SEQ ID NO: 2186271 - RNA, 19 nt, Artificial Sequence
  Description of Artificial Sequence: Synthetic oligonucleotide
  Antisense strand to SEQ ID NO: 2186270
aagccuaaucauaacauga

SEQ ID NO: 2186272 - RNA, 19 nt, Artificial Sequence
  Description of Artificial Sequence: Synthetic oligonucleotide
  Sense strand starting at position 3888 of SEQ ID NO: 1883332
augauuaggcuuugcaaac

SEQ ID NO: 2186273 - RNA, 19 nt, Artificial Sequence
  Description of Artificial Sequence: Synthetic oligonucleotide
  Antisense strand to SEQ ID NO: 2186272
guuugcaaagccuaaucau

SEQ ID NO: 2186274 - RNA, 19 nt, Artificial Sequence
  Description of Artificial Sequence: Synthetic oligonucleotide
  Sense strand starting at position 3889 of SEQ ID NO: 1883332
ugauuaggcuuugcaaacu

SEQ ID NO: 2186275 - RNA, 19 nt, Artificial Sequence
  Description of Artificial Sequence: Synthetic oligonucleotide
  Antisense strand to SEQ ID NO: 2186274
aguuugcaaagccuaauca

SEQ ID NO: 2186276 - RNA, 19 nt, Artificial Sequence
  Description of Artificial Sequence: Synthetic oligonucleotide
  Sense strand starting at position 3953 of SEQ ID NO: 1883332
caggaaugauuaucaggca

SEQ ID NO: 2186277 - RNA, 19 nt, Artificial Sequence
  Description of Artificial Sequence: Synthetic oligonucleotide
  Antisense strand to SEQ ID NO: 2186276
ugccugauaaucauuccug

SEQ ID NO: 2186278 - RNA, 19 nt, Artificial Sequence
  Description of Artificial Sequence: Synthetic oligonucleotide
  Sense strand starting at position 90 of SEQ ID NO: 1883333
accugugcugaagggauua

SEQ ID NO: 2186279 - RNA, 19 nt, Artificial Sequence
  Description of Artificial Sequence: Synthetic oligonucleotide
  Antisense strand to SEQ ID NO: 2186278
uaaucccuucagcacaggu

SEQ ID NO: 2186280 - RNA, 19 nt, Artificial Sequence
  Description of Artificial Sequence: Synthetic oligonucleotide
  Sense strand starting at position 192 of SEQ ID NO: 1883333
cucugcgugaugccauauu

SEQ ID NO: 2186281 - RNA, 19 nt, Artificial Sequence
  Description of Artificial Sequence: Synthetic oligonucleotide
  Antisense strand to SEQ ID NO: 2186280
aauauggcaucacgcagag

SEQ ID NO: 2186282 - RNA, 19 nt, Artificial Sequence
  Description of Artificial Sequence: Synthetic oligonucleotide
  Sense strand starting at position 304 of SEQ ID NO: 1883333
ugccuucacggugagaaau

SEQ ID NO: 2186283 - RNA, 19 nt, Artificial Sequence
  Description of Artificial Sequence: Synthetic oligonucleotide
  Antisense strand to SEQ ID NO: 2186282
auuucucaccgugaaggca

SEQ ID NO: 2186284 - RNA, 19 nt, Artificial Sequence
  Description of Artificial Sequence: Synthetic oligonucleotide
  Sense strand starting at position 351 of SEQ ID NO: 1883333
uucguuauucuagaaacau

SEQ ID NO: 2186285 - RNA, 19 nt, Artificial Sequence
  Description of Artificial Sequence: Synthetic oligonucleotide
  Antisense strand to SEQ ID NO: 2186284
auguuucuagaauaacgaa

SEQ ID NO: 2186286 - RNA, 19 nt, Artificial Sequence
  Description of Artificial Sequence: Synthetic oligonucleotide
  Sense strand starting at position 928 of SEQ ID NO: 1883333
agaugaguaaggugauuac

SEQ ID NO: 2186287 - RNA, 19 nt, Artificial Sequence
  Description of Artificial Sequence: Synthetic oligonucleotide
  Antisense strand to SEQ ID NO: 2186286
guaaucaccuuacucaucu

SEQ ID NO: 2186288 - RNA, 19 nt, Artificial Sequence
  Description of Artificial Sequence: Synthetic oligonucleotide
  Sense strand starting at position 996 of SEQ ID NO: 1883333
agaguuagccgcuaaagga

SEQ ID NO: 2186289 - RNA, 19 nt, Artificial Sequence
  Description of Artificial Sequence: Synthetic oligonucleotide
  Antisense strand to SEQ ID NO: 2186288
uccuuuagcggcuaacucu

SEQ ID NO: 2186290 - RNA, 19 nt, Artificial Sequence
  Description of Artificial Sequence: Synthetic oligonucleotide
  Sense strand starting at position 1266 of SEQ ID NO: 1883333
cugggaugcugacugaauu

SEQ ID NO: 2186291 - RNA, 19 nt, Artificial Sequence
  Description of Artificial Sequence: Synthetic oligonucleotide
  Antisense strand to SEQ ID NO: 2186290
aauucagucagcaucccag

SEQ ID NO: 2186292 - RNA, 19 nt, Artificial Sequence
  Description of Artificial Sequence: Synthetic oligonucleotide
  Sense strand starting at position 1267 of SEQ ID NO: 1883333
ugggaugcugacugaauua

SEQ ID NO: 2186293 - RNA, 19 nt, Artificial Sequence
  Description of Artificial Sequence: Synthetic oligonucleotide
  Antisense strand to SEQ ID NO: 2186292
uaauucagucagcauccca

SEQ ID NO: 2186294 - RNA, 19 nt, Artificial Sequence
  Description of Artificial Sequence: Synthetic oligonucleotide
  Sense strand starting at position 1325 of SEQ ID NO: 1883333
aggugugaugaugguauca

SEQ ID NO: 2186295 - RNA, 19 nt, Artificial Sequence
  Description of Artificial Sequence: Synthetic oligonucleotide
  Antisense strand to SEQ ID NO: 2186294
ugauaccaucaucacaccu

SEQ ID NO: 2186296 - RNA, 19 nt, Artificial Sequence
  Description of Artificial Sequence: Synthetic oligonucleotide
  Sense strand starting at position 1335 of SEQ ID NO: 1883333
augguaucaugguuauaua

SEQ ID NO: 2186297 - RNA, 19 nt, Artificial Sequence
  Description of Artificial Sequence: Synthetic oligonucleotide
  Antisense strand to SEQ ID NO: 2186296
uauauaaccaugauaccau

SEQ ID NO: 2186298 - RNA, 19 nt, Artificial Sequence
  Description of Artificial Sequence: Synthetic oligonucleotide
  Sense strand starting at position 1336 of SEQ ID NO: 1883333
ugguaucaugguuauauau

SEQ ID NO: 2186299 - RNA, 19 nt, Artificial Sequence
  Description of Artificial Sequence: Synthetic oligonucleotide
  Antisense strand to SEQ ID NO: 2186298
auauauaaccaugauacca

SEQ ID NO: 2186300 - RNA, 19 nt, Artificial Sequence
  Description of Artificial Sequence: Synthetic oligonucleotide
  Sense strand starting at position 1482 of SEQ ID NO: 1883333
agucccaguuuauuagaga

SEQ ID NO: 2186301 - RNA, 19 nt, Artificial Sequence
  Description of Artificial Sequence: Synthetic oligonucleotide
  Antisense strand to SEQ ID NO: 2186300
ucucuaauaaacugggacu

SEQ ID NO: 2186302 - RNA, 19 nt, Artificial Sequence
  Description of Artificial Sequence: Synthetic oligonucleotide
  Sense strand starting at position 1526 of SEQ ID NO: 1883333
aguuacaugacuuguggaa

SEQ ID NO: 2186303 - RNA, 19 nt, Artificial Sequence
  Description of Artificial Sequence: Synthetic oligonucleotide
  Antisense strand to SEQ ID NO: 2186302
uuccacaagucauguaacu

SEQ ID NO: 2186304 - RNA, 19 nt, Artificial Sequence
  Description of Artificial Sequence: Synthetic oligonucleotide
  Sense strand starting at position 1591 of SEQ ID NO: 1883333
ugaaacaagcuuugcaaua

SEQ ID NO: 2186305 - RNA, 19 nt, Artificial Sequence
  Description of Artificial Sequence: Synthetic oligonucleotide
  Antisense strand to SEQ ID NO: 2186304
uauugcaaagcuuguuuca

SEQ ID NO: 2186306 - RNA, 19 nt, Artificial Sequence
  Description of Artificial Sequence: Synthetic oligonucleotide
  Sense strand starting at position 1635 of SEQ ID NO: 1883333
uggguacauggagguuuau

SEQ ID NO: 2186307 - RNA, 19 nt, Artificial Sequence
  Description of Artificial Sequence: Synthetic oligonucleotide
  Antisense strand to SEQ ID NO: 2186306
auaaaccuccauguaccca

SEQ ID NO: 2186308 - RNA, 19 nt, Artificial Sequence
  Description of Artificial Sequence: Synthetic oligonucleotide
  Sense strand starting at position 1739 of SEQ ID NO: 1883333
agcucucuccaguaagggu

SEQ ID NO: 2186309 - RNA, 19 nt, Artificial Sequence
  Description of Artificial Sequence: Synthetic oligonucleotide
  Antisense strand to SEQ ID NO: 2186308
acccuuacuggagagagcu

SEQ ID NO: 2186310 - RNA, 19 nt, Artificial Sequence
  Description of Artificial Sequence: Synthetic oligonucleotide
  Sense strand starting at position 1752 of SEQ ID NO: 1883333
aaggguuuaccucagaguc

SEQ ID NO: 2186311 - RNA, 19 nt, Artificial Sequence
  Description of Artificial Sequence: Synthetic oligonucleotide
  Antisense strand to SEQ ID NO: 2186310
gacucugagguaaacccuu

SEQ ID NO: 2186312 - RNA, 19 nt, Artificial Sequence
  Description of Artificial Sequence: Synthetic oligonucleotide
  Sense strand starting at position 1784 of SEQ ID NO: 1883333
ugucuuuaagaguauacag

SEQ ID NO: 2186313 - RNA, 19 nt, Artificial Sequence
  Description of Artificial Sequence: Synthetic oligonucleotide
  Antisense strand to SEQ ID NO: 2186312
cuguauacucuuaaagaca

SEQ ID NO: 2186314 - RNA, 19 nt, Artificial Sequence
  Description of Artificial Sequence: Synthetic oligonucleotide
  Sense strand starting at position 1786 of SEQ ID NO: 1883333
ucuuuaagaguauacagua

SEQ ID NO: 2186315 - RNA, 19 nt, Artificial Sequence
  Description of Artificial Sequence: Synthetic oligonucleotide
  Antisense strand to SEQ ID NO: 2186314
uacuguauacucuuaaaga

SEQ ID NO: 2186316 - RNA, 19 nt, Artificial Sequence
  Description of Artificial Sequence: Synthetic oligonucleotide
  Sense strand starting at position 1849 of SEQ ID NO: 1883333
gggaguaaguguccuaaau

SEQ ID NO: 2186317 - RNA, 19 nt, Artificial Sequence
  Description of Artificial Sequence: Synthetic oligonucleotide
  Antisense strand to SEQ ID NO: 2186316
auuuaggacacuuacuccc

SEQ ID NO: 2186318 - RNA, 19 nt, Artificial Sequence
  Description of Artificial Sequence: Synthetic oligonucleotide
  Sense strand starting at position 1872 of SEQ ID NO: 1883333
ugugcuaucagggaacaca

SEQ ID NO: 2186319 - RNA, 19 nt, Artificial Sequence
  Description of Artificial Sequence: Synthetic oligonucleotide
  Antisense strand to SEQ ID NO: 2186318
uguguucccugauagcaca

SEQ ID NO: 2186320 - RNA, 19 nt, Artificial Sequence
  Description of Artificial Sequence: Synthetic oligonucleotide
  Sense strand starting at position 2023 of SEQ ID NO: 1883333
gagagaaagccuugaauuc

SEQ ID NO: 2186321 - RNA, 19 nt, Artificial Sequence
  Description of Artificial Sequence: Synthetic oligonucleotide
  Antisense strand to SEQ ID NO: 2186320
gaauucaaggcuuucucuc

SEQ ID NO: 2186322 - RNA, 19 nt, Artificial Sequence
  Description of Artificial Sequence: Synthetic oligonucleotide
  Sense strand starting at position 2061 of SEQ ID NO: 1883333
ucaguagauagugggaaau

SEQ ID NO: 2186323 - RNA, 19 nt, Artificial Sequence
  Description of Artificial Sequence: Synthetic oligonucleotide
  Antisense strand to SEQ ID NO: 2186322
auuucccacuaucuacuga

SEQ ID NO: 2186324 - RNA, 19 nt, Artificial Sequence
  Description of Artificial Sequence: Synthetic oligonucleotide
  Sense strand starting at position 2084 of SEQ ID NO: 1883333
aaaggcuuugaguggaaga

SEQ ID NO: 2186325 - RNA, 19 nt, Artificial Sequence
  Description of Artificial Sequence: Synthetic oligonucleotide
  Antisense strand to SEQ ID NO: 2186324
ucuuccacucaaagccuuu

SEQ ID NO: 2186326 - RNA, 19 nt, Artificial Sequence
  Description of Artificial Sequence: Synthetic oligonucleotide
  Sense strand starting at position 2085 of SEQ ID NO: 1883333
aaggcuuugaguggaagaa

SEQ ID NO: 2186327 - RNA, 19 nt, Artificial Sequence
  Description of Artificial Sequence: Synthetic oligonucleotide
  Antisense strand to SEQ ID NO: 2186326
uucuuccacucaaagccuu

SEQ ID NO: 2186328 - RNA, 19 nt, Artificial Sequence
  Description of Artificial Sequence: Synthetic oligonucleotide
  Sense strand starting at position 2212 of SEQ ID NO: 1883333
gcaaaugucuaggugaaag

SEQ ID NO: 2186329 - RNA, 19 nt, Artificial Sequence
  Description of Artificial Sequence: Synthetic oligonucleotide
  Antisense strand to SEQ ID NO: 2186328
cuuucaccuagacauuugc

SEQ ID NO: 2186330 - RNA, 19 nt, Artificial Sequence
  Description of Artificial Sequence: Synthetic oligonucleotide
  Sense strand starting at position 2400 of SEQ ID NO: 1883333
auaacagaguuagcuaaua

SEQ ID NO: 2186331 - RNA, 19 nt, Artificial Sequence
  Description of Artificial Sequence: Synthetic oligonucleotide
  Antisense strand to SEQ ID NO: 2186330
uauuagcuaacucuguuau

SEQ ID NO: 2186332 - RNA, 19 nt, Artificial Sequence
  Description of Artificial Sequence: Synthetic oligonucleotide
  Sense strand starting at position 2568 of SEQ ID NO: 1883333
gugauucuuggagguaauc

SEQ ID NO: 2186333 - RNA, 19 nt, Artificial Sequence
  Description of Artificial Sequence: Synthetic oligonucleotide
  Antisense strand to SEQ ID NO: 2186332
gauuaccuccaagaaucac

SEQ ID NO: 2186334 - RNA, 19 nt, Artificial Sequence
  Description of Artificial Sequence: Synthetic oligonucleotide
  Sense strand starting at position 2570 of SEQ ID NO: 1883333
gauucuuggagguaaucgu

SEQ ID NO: 2186335 - RNA, 19 nt, Artificial Sequence
  Description of Artificial Sequence: Synthetic oligonucleotide
  Antisense strand to SEQ ID NO: 2186334
acgauuaccuccaagaauc

SEQ ID NO: 2186336 - RNA, 19 nt, Artificial Sequence
  Description of Artificial Sequence: Synthetic oligonucleotide
  Sense strand starting at position 2578 of SEQ ID NO: 1883333
gagguaaucguuuaaugag

SEQ ID NO: 2186337 - RNA, 19 nt, Artificial Sequence
  Description of Artificial Sequence: Synthetic oligonucleotide
  Antisense strand to SEQ ID NO: 2186336
cucauuaaacgauuaccuc

SEQ ID NO: 2186338 - RNA, 19 nt, Artificial Sequence
  Description of Artificial Sequence: Synthetic oligonucleotide
  Sense strand starting at position 2718 of SEQ ID NO: 1883333
gugaccaguuucccaaacu

SEQ ID NO: 2186339 - RNA, 19 nt, Artificial Sequence
  Description of Artificial Sequence: Synthetic oligonucleotide
  Antisense strand to SEQ ID NO: 2186338
aguuugggaaacuggucac

SEQ ID NO: 2186340 - RNA, 19 nt, Artificial Sequence
  Description of Artificial Sequence: Synthetic oligonucleotide
  Sense strand starting at position 2868 of SEQ ID NO: 1883333
cugcgagcugcuucuccaa

SEQ ID NO: 2186341 - RNA, 19 nt, Artificial Sequence
  Description of Artificial Sequence: Synthetic oligonucleotide
  Antisense strand to SEQ ID NO: 2186340
uuggagaagcagcucgcag

SEQ ID NO: 2186342 - RNA, 19 nt, Artificial Sequence
  Description of Artificial Sequence: Synthetic oligonucleotide
  Sense strand starting at position 2959 of SEQ ID NO: 1883333
auuggugccauggaauauu

SEQ ID NO: 2186343 - RNA, 19 nt, Artificial Sequence
  Description of Artificial Sequence: Synthetic oligonucleotide
  Antisense strand to SEQ ID NO: 2186342
aauauuccauggcaccaau

SEQ ID NO: 2186344 - RNA, 19 nt, Artificial Sequence
  Description of Artificial Sequence: Synthetic oligonucleotide
  Sense strand starting at position 2969 of SEQ ID NO: 1883333
uggaauauuagcuggcaca

SEQ ID NO: 2186345 - RNA, 19 nt, Artificial Sequence
  Description of Artificial Sequence: Synthetic oligonucleotide
  Antisense strand to SEQ ID NO: 2186344
ugugccagcuaauauucca

SEQ ID NO: 2186346 - RNA, 19 nt, Artificial Sequence
  Description of Artificial Sequence: Synthetic oligonucleotide
  Sense strand starting at position 2970 of SEQ ID NO: 1883333
ggaauauuagcuggcacau

SEQ ID NO: 2186347 - RNA, 19 nt, Artificial Sequence
  Description of Artificial Sequence: Synthetic oligonucleotide
  Antisense strand to SEQ ID NO: 2186346
augugccagcuaauauucc

SEQ ID NO: 2186348 - RNA, 19 nt, Artificial Sequence
  Description of Artificial Sequence: Synthetic oligonucleotide
  Sense strand starting at position 3037 of SEQ ID NO: 1883333
gggaauguccaccaugcau

SEQ ID NO: 2186349 - RNA, 19 nt, Artificial Sequence
  Description of Artificial Sequence: Synthetic oligonucleotide
  Antisense strand to SEQ ID NO: 2186348
augcaugguggacauuccc

SEQ ID NO: 2186350 - RNA, 19 nt, Artificial Sequence
  Description of Artificial Sequence: Synthetic oligonucleotide
  Sense strand starting at position 3318 of SEQ ID NO: 1883333
cccuucuuguuccuggaaa

SEQ ID NO: 2186351 - RNA, 19 nt, Artificial Sequence
  Description of Artificial Sequence: Synthetic oligonucleotide
  Antisense strand to SEQ ID NO: 2186350
uuuccaggaacaagaaggg

SEQ ID NO: 2186352 - RNA, 19 nt, Artificial Sequence
  Description of Artificial Sequence: Synthetic oligonucleotide
  Sense strand starting at position 3636 of SEQ ID NO: 1883333
caaaguuuacuggguuuga

SEQ ID NO: 2186353 - RNA, 19 nt, Artificial Sequence
  Description of Artificial Sequence: Synthetic oligonucleotide
  Antisense strand to SEQ ID NO: 2186352
ucaaacccaguaaacuuug

SEQ ID NO: 2186354 - RNA, 19 nt, Artificial Sequence
  Description of Artificial Sequence: Synthetic oligonucleotide
  Sense strand starting at position 3640 of SEQ ID NO: 1883333
guuuacuggguuugaggaa

SEQ ID NO: 2186355 - RNA, 19 nt, Artificial Sequence
  Description of Artificial Sequence: Synthetic oligonucleotide
  Antisense strand to SEQ ID NO: 2186354
uuccucaaacccaguaaac

SEQ ID NO: 2186356 - RNA, 19 nt, Artificial Sequence
  Description of Artificial Sequence: Synthetic oligonucleotide
  Sense strand starting at position 3754 of SEQ ID NO: 1883333
cagccaugaggaugaaauc

SEQ ID NO: 2186357 - RNA, 19 nt, Artificial Sequence
  Description of Artificial Sequence: Synthetic oligonucleotide
  Antisense strand to SEQ ID NO: 2186356
gauuucauccucauggcug

SEQ ID NO: 2186358 - RNA, 19 nt, Artificial Sequence
  Description of Artificial Sequence: Synthetic oligonucleotide
  Sense strand starting at position 82 of SEQ ID NO: 1883334
gggaacaaugccgagugaa

SEQ ID NO: 2186359 - RNA, 19 nt, Artificial Sequence
  Description of Artificial Sequence: Synthetic oligonucleotide
  Antisense strand to SEQ ID NO: 2186358
uucacucggcauuguuccc

SEQ ID NO: 2186360 - RNA, 19 nt, Artificial Sequence
  Description of Artificial Sequence: Synthetic oligonucleotide
  Sense strand starting at position 183 of SEQ ID NO: 1883334
cagauuaguggugggagga

SEQ ID NO: 2186361 - RNA, 19 nt, Artificial Sequence
  Description of Artificial Sequence: Synthetic oligonucleotide
  Antisense strand to SEQ ID NO: 2186360
uccucccaccacuaaucug

SEQ ID NO: 2186362 - RNA, 19 nt, Artificial Sequence
  Description of Artificial Sequence: Synthetic oligonucleotide
  Sense strand starting at position 247 of SEQ ID NO: 1883334
ccuuguggugauggaaacu

SEQ ID NO: 2186363 - RNA, 19 nt, Artificial Sequence
  Description of Artificial Sequence: Synthetic oligonucleotide
  Antisense strand to SEQ ID NO: 2186362
aguuuccaucaccacaagg

SEQ ID NO: 2186364 - RNA, 19 nt, Artificial Sequence
  Description of Artificial Sequence: Synthetic oligonucleotide
  Sense strand starting at position 256 of SEQ ID NO: 1883334
gauggaaacuucuuguauc

SEQ ID NO: 2186365 - RNA, 19 nt, Artificial Sequence
  Description of Artificial Sequence: Synthetic oligonucleotide
  Antisense strand to SEQ ID NO: 2186364
gauacaagaaguuuccauc

SEQ ID NO: 2186366 - RNA, 19 nt, Artificial Sequence
  Description of Artificial Sequence: Synthetic oligonucleotide
  Sense strand starting at position 270 of SEQ ID NO: 1883334
guaucuuaacuguaccaau

SEQ ID NO: 2186367 - RNA, 19 nt, Artificial Sequence
  Description of Artificial Sequence: Synthetic oligonucleotide
  Antisense strand to SEQ ID NO: 2186366
auugguacaguuaagauac

SEQ ID NO: 2186368 - RNA, 19 nt, Artificial Sequence
  Description of Artificial Sequence: Synthetic oligonucleotide
  Sense strand starting at position 291 of SEQ ID NO: 1883334
caauauucugguggcaaga

SEQ ID NO: 2186369 - RNA, 19 nt, Artificial Sequence
  Description of Artificial Sequence: Synthetic oligonucleotide
  Antisense strand to SEQ ID NO: 2186368
ucuugccaccagaauauug

SEQ ID NO: 2186370 - RNA, 19 nt, Artificial Sequence
  Description of Artificial Sequence: Synthetic oligonucleotide
  Sense strand starting at position 463 of SEQ ID NO: 1883334
augcaagggcuggaucaua

SEQ ID NO: 2186371 - RNA, 19 nt, Artificial Sequence
  Description of Artificial Sequence: Synthetic oligonucleotide
  Antisense strand to SEQ ID NO: 2186370
uaugauccagcccuugcau

SEQ ID NO: 2186372 - RNA, 19 nt, Artificial Sequence
  Description of Artificial Sequence: Synthetic oligonucleotide
  Sense strand starting at position 614 of SEQ ID NO: 1883334
caguuaucccaggacggga

SEQ ID NO: 2186373 - RNA, 19 nt, Artificial Sequence
  Description of Artificial Sequence: Synthetic oligonucleotide
  Antisense strand to SEQ ID NO: 2186372
ucccguccugggauaacug

SEQ ID NO: 2186374 - RNA, 19 nt, Artificial Sequence
  Description of Artificial Sequence: Synthetic oligonucleotide
  Sense strand starting at position 631 of SEQ ID NO: 1883334
gaaaucuaucccgggaaua

SEQ ID NO: 2186375 - RNA, 19 nt, Artificial Sequence
  Description of Artificial Sequence: Synthetic oligonucleotide
  Antisense strand to SEQ ID NO: 2186374
uauucccgggauagauuuc

SEQ ID NO: 2186376 - RNA, 19 nt, Artificial Sequence
  Description of Artificial Sequence: Synthetic oligonucleotide
  Sense strand starting at position 785 of SEQ ID NO: 1883334
uggagaacuacgcagucuu

SEQ ID NO: 2186377 - RNA, 19 nt, Artificial Sequence
  Description of Artificial Sequence: Synthetic oligonucleotide
  Antisense strand to SEQ ID NO: 2186376
aagacugcguaguucucca

SEQ ID NO: 2186378 - RNA, 19 nt, Artificial Sequence
  Description of Artificial Sequence: Synthetic oligonucleotide
  Sense strand starting at position 796 of SEQ ID NO: 1883334
gcagucuuugaugucgcaa

SEQ ID NO: 2186379 - RNA, 19 nt, Artificial Sequence
  Description of Artificial Sequence: Synthetic oligonucleotide
  Antisense strand to SEQ ID NO: 2186378
uugcgacaucaaagacugc

SEQ ID NO: 2186380 - RNA, 19 nt, Artificial Sequence
  Description of Artificial Sequence: Synthetic oligonucleotide
  Sense strand starting at position 1143 of SEQ ID NO: 1883334
agagaaaccucgucucaaa

SEQ ID NO: 2186381 - RNA, 19 nt, Artificial Sequence
  Description of Artificial Sequence: Synthetic oligonucleotide
  Antisense strand to SEQ ID NO: 2186380
uuugagacgagguuucucu

SEQ ID NO: 2186382 - RNA, 19 nt, Artificial Sequence
  Description of Artificial Sequence: Synthetic oligonucleotide
  Sense strand starting at position 1192 of SEQ ID NO: 1883334
aggacacgaaauugugaua

SEQ ID NO: 2186383 - RNA, 19 nt, Artificial Sequence
  Description of Artificial Sequence: Synthetic oligonucleotide
  Antisense strand to SEQ ID NO: 2186382
uaucacaauuucguguccu

SEQ ID NO: 2186384 - RNA, 19 nt, Artificial Sequence
  Description of Artificial Sequence: Synthetic oligonucleotide
  Sense strand starting at position 1208 of SEQ ID NO: 1883334
auacgacaacucugugaag

SEQ ID NO: 2186385 - RNA, 19 nt, Artificial Sequence
  Description of Artificial Sequence: Synthetic oligonucleotide
  Antisense strand to SEQ ID NO: 2186384
cuucacagaguugucguau

SEQ ID NO: 2186386 - RNA, 19 nt, Artificial Sequence
  Description of Artificial Sequence: Synthetic oligonucleotide
  Sense strand starting at position 1209 of SEQ ID NO: 1883334
uacgacaacucugugaaga

SEQ ID NO: 2186387 - RNA, 19 nt, Artificial Sequence
  Description of Artificial Sequence: Synthetic oligonucleotide
  Antisense strand to SEQ ID NO: 2186386
ucuucacagaguugucgua

SEQ ID NO: 2186388 - RNA, 19 nt, Artificial Sequence
  Description of Artificial Sequence: Synthetic oligonucleotide
  Sense strand starting at position 1210 of SEQ ID NO: 1883334
acgacaacucugugaagac

SEQ ID NO: 2186389 - RNA, 19 nt, Artificial Sequence
  Description of Artificial Sequence: Synthetic oligonucleotide
  Antisense strand to SEQ ID NO: 2186388
gucuucacagaguugucgu

SEQ ID NO: 2186390 - RNA, 19 nt, Artificial Sequence
  Description of Artificial Sequence: Synthetic oligonucleotide
  Sense strand starting at position 1622 of SEQ ID NO: 1883334
gucgcugcccggagguaau

SEQ ID NO: 2186391 - RNA, 19 nt, Artificial Sequence
  Description of Artificial Sequence: Synthetic oligonucleotide
  Antisense strand to SEQ ID NO: 2186390
auuaccuccgggcagcgac

SEQ ID NO: 2186392 - RNA, 19 nt, Artificial Sequence
  Description of Artificial Sequence: Synthetic oligonucleotide
  Sense strand starting at position 1705 of SEQ ID NO: 1883334
cucuuaaguccaggucuca

SEQ ID NO: 2186393 - RNA, 19 nt, Artificial Sequence
  Description of Artificial Sequence: Synthetic oligonucleotide
  Antisense strand to SEQ ID NO: 2186392
ugagaccuggacuuaagag

SEQ ID NO: 2186394 - RNA, 19 nt, Artificial Sequence
  Description of Artificial Sequence: Synthetic oligonucleotide
  Sense strand starting at position 1792 of SEQ ID NO: 1883334
cgaggcgaauccucacauu

SEQ ID NO: 2186395 - RNA, 19 nt, Artificial Sequence
  Description of Artificial Sequence: Synthetic oligonucleotide
  Antisense strand to SEQ ID NO: 2186394
aaugugaggauucgccucg

SEQ ID NO: 2186396 - RNA, 19 nt, Artificial Sequence
  Description of Artificial Sequence: Synthetic oligonucleotide
  Sense strand starting at position 2636 of SEQ ID NO: 1883334
aauguuuguguaggaccua

SEQ ID NO: 2186397 - RNA, 19 nt, Artificial Sequence
  Description of Artificial Sequence: Synthetic oligonucleotide
  Antisense strand to SEQ ID NO: 2186396
uagguccuacacaaacauu

SEQ ID NO: 2186398 - RNA, 19 nt, Artificial Sequence
  Description of Artificial Sequence: Synthetic oligonucleotide
  Sense strand starting at position 2697 of SEQ ID NO: 1883334
cuuuaaauucuagggaguc

SEQ ID NO: 2186399 - RNA, 19 nt, Artificial Sequence
  Description of Artificial Sequence: Synthetic oligonucleotide
  Antisense strand to SEQ ID NO: 2186398
gacucccuagaauuuaaag

SEQ ID NO: 2186400 - RNA, 19 nt, Artificial Sequence
  Description of Artificial Sequence: Synthetic oligonucleotide
  Sense strand starting at position 2739 of SEQ ID NO: 1883334
cugaguacaagauguugaa

SEQ ID NO: 2186401 - RNA, 19 nt, Artificial Sequence
  Description of Artificial Sequence: Synthetic oligonucleotide
  Antisense strand to SEQ ID NO: 2186400
uucaacaucuuguacucag

SEQ ID NO: 2186402 - RNA, 19 nt, Artificial Sequence
  Description of Artificial Sequence: Synthetic oligonucleotide
  Sense strand starting at position 2781 of SEQ ID NO: 1883334
ggcagagaauccuaauaag

SEQ ID NO: 2186403 - RNA, 19 nt, Artificial Sequence
  Description of Artificial Sequence: Synthetic oligonucleotide
  Antisense strand to SEQ ID NO: 2186402
cuuauuaggauucucugcc

SEQ ID NO: 2186404 - RNA, 19 nt, Artificial Sequence
  Description of Artificial Sequence: Synthetic oligonucleotide
  Sense strand starting at position 2784 of SEQ ID NO: 1883334
agagaauccuaauaaguua

SEQ ID NO: 2186405 - RNA, 19 nt, Artificial Sequence
  Description of Artificial Sequence: Synthetic oligonucleotide
  Antisense strand to SEQ ID NO: 2186404
uaacuuauuaggauucucu

SEQ ID NO: 2186406 - RNA, 19 nt, Artificial Sequence
  Description of Artificial Sequence: Synthetic oligonucleotide
  Sense strand starting at position 2841 of SEQ ID NO: 1883334
uuuauuguguguuuggaca

SEQ ID NO: 2186407 - RNA, 19 nt, Artificial Sequence
  Description of Artificial Sequence: Synthetic oligonucleotide
  Antisense strand to SEQ ID NO: 2186406
uguccaaacacacaauaaa

SEQ ID NO: 2186408 - RNA, 19 nt, Artificial Sequence
  Description of Artificial Sequence: Synthetic oligonucleotide
  Sense strand starting at position 2880 of SEQ ID NO: 1883334
gccagacaggcauaaacuu

SEQ ID NO: 2186409 - RNA, 19 nt, Artificial Sequence
  Description of Artificial Sequence: Synthetic oligonucleotide
  Antisense strand to SEQ ID NO: 2186408
aaguuuaugccugucuggc

SEQ ID NO: 2186410 - RNA, 19 nt, Artificial Sequence
  Description of Artificial Sequence: Synthetic oligonucleotide
  Sense strand starting at position 2946 of SEQ ID NO: 1883334
uuaucuagaguaugaugaa

SEQ ID NO: 2186411 - RNA, 19 nt, Artificial Sequence
  Description of Artificial Sequence: Synthetic oligonucleotide
  Antisense strand to SEQ ID NO: 2186410
uucaucauacucuagauaa

SEQ ID NO: 2186412 - RNA, 19 nt, Artificial Sequence
  Description of Artificial Sequence: Synthetic oligonucleotide
  Sense strand starting at position 2962 of SEQ ID NO: 1883334
gaauccuagguauggcauu

SEQ ID NO: 2186413 - RNA, 19 nt, Artificial Sequence
  Description of Artificial Sequence: Synthetic oligonucleotide
  Antisense strand to SEQ ID NO: 2186412
aaugccauaccuaggauuc

SEQ ID NO: 2186414 - RNA, 19 nt, Artificial Sequence
  Description of Artificial Sequence: Synthetic oligonucleotide
  Sense strand starting at position 3003 of SEQ ID NO: 1883334
uguguauaugacuguggau

SEQ ID NO: 2186415 - RNA, 19 nt, Artificial Sequence
  Description of Artificial Sequence: Synthetic oligonucleotide
  Antisense strand to SEQ ID NO: 2186414
auccacagucauauacaca

SEQ ID NO: 2186416 - RNA, 19 nt, Artificial Sequence
  Description of Artificial Sequence: Synthetic oligonucleotide
  Sense strand starting at position 3005 of SEQ ID NO: 1883334
uguauaugacuguggaugu

SEQ ID NO: 2186417 - RNA, 19 nt, Artificial Sequence
  Description of Artificial Sequence: Synthetic oligonucleotide
  Antisense strand to SEQ ID NO: 2186416
acauccacagucauauaca

SEQ ID NO: 2186418 - RNA, 19 nt, Artificial Sequence
  Description of Artificial Sequence: Synthetic oligonucleotide
  Sense strand starting at position 3423 of SEQ ID NO: 1883334
aagggaaucucuuucuguc

SEQ ID NO: 2186419 - RNA, 19 nt, Artificial Sequence
  Description of Artificial Sequence: Synthetic oligonucleotide
  Antisense strand to SEQ ID NO: 2186418
gacagaaagagauucccuu

SEQ ID NO: 2186420 - RNA, 19 nt, Artificial Sequence
  Description of Artificial Sequence: Synthetic oligonucleotide
  Sense strand starting at position 3719 of SEQ ID NO: 1883334
accuaacuuugccuuggaa

SEQ ID NO: 2186421 - RNA, 19 nt, Artificial Sequence
  Description of Artificial Sequence: Synthetic oligonucleotide
  Antisense strand to SEQ ID NO: 2186420
uuccaaggcaaaguuaggu

SEQ ID NO: 2186422 - RNA, 19 nt, Artificial Sequence
  Description of Artificial Sequence: Synthetic oligonucleotide
  Sense strand starting at position 3750 of SEQ ID NO: 1883334
aguccauagucaccugauu

SEQ ID NO: 2186423 - RNA, 19 nt, Artificial Sequence
  Description of Artificial Sequence: Synthetic oligonucleotide
  Antisense strand to SEQ ID NO: 2186422
aaucaggugacuauggacu

SEQ ID NO: 2186424 - RNA, 19 nt, Artificial Sequence
  Description of Artificial Sequence: Synthetic oligonucleotide
  Sense strand starting at position 3755 of SEQ ID NO: 1883334
auagucaccugauugaaag

SEQ ID NO: 2186425 - RNA, 19 nt, Artificial Sequence
  Description of Artificial Sequence: Synthetic oligonucleotide
  Antisense strand to SEQ ID NO: 2186424
cuuucaaucaggugacuau

SEQ ID NO: 2186426 - RNA, 19 nt, Artificial Sequence
  Description of Artificial Sequence: Synthetic oligonucleotide
  Sense strand starting at position 3756 of SEQ ID NO: 1883334
uagucaccugauugaaagu

SEQ ID NO: 2186427 - RNA, 19 nt, Artificial Sequence
  Description of Artificial Sequence: Synthetic oligonucleotide
  Antisense strand to SEQ ID NO: 2186426
acuuucaaucaggugacua

SEQ ID NO: 2186428 - RNA, 19 nt, Artificial Sequence
  Description of Artificial Sequence: Synthetic oligonucleotide
  Sense strand starting at position 3766 of SEQ ID NO: 1883334
auugaaaguguuggcagau

SEQ ID NO: 2186429 - RNA, 19 nt, Artificial Sequence
  Description of Artificial Sequence: Synthetic oligonucleotide
  Antisense strand to SEQ ID NO: 2186428
aucugccaacacuuucaau

SEQ ID NO: 2186430 - RNA, 19 nt, Artificial Sequence
  Description of Artificial Sequence: Synthetic oligonucleotide
  Sense strand starting at position 3767 of SEQ ID NO: 1883334
uugaaaguguuggcagauc

SEQ ID NO: 2186431 - RNA, 19 nt, Artificial Sequence
  Description of Artificial Sequence: Synthetic oligonucleotide
  Antisense strand to SEQ ID NO: 2186430
gaucugccaacacuuucaa

SEQ ID NO: 2186432 - RNA, 19 nt, Artificial Sequence
  Description of Artificial Sequence: Synthetic oligonucleotide
  Sense strand starting at position 3832 of SEQ ID NO: 1883334
gauacugacuggucucuau

SEQ ID NO: 2186433 - RNA, 19 nt, Artificial Sequence
  Description of Artificial Sequence: Synthetic oligonucleotide
  Antisense strand to SEQ ID NO: 2186432
auagagaccagucaguauc

SEQ ID NO: 2186434 - RNA, 19 nt, Artificial Sequence
  Description of Artificial Sequence: Synthetic oligonucleotide
  Sense strand starting at position 3836 of SEQ ID NO: 1883334
cugacuggucucuauagca

SEQ ID NO: 2186435 - RNA, 19 nt, Artificial Sequence
  Description of Artificial Sequence: Synthetic oligonucleotide
  Antisense strand to SEQ ID NO: 2186434
ugcuauagagaccagucag

SEQ ID NO: 2186436 - RNA, 19 nt, Artificial Sequence
  Description of Artificial Sequence: Synthetic oligonucleotide
  Sense strand starting at position 3898 of SEQ ID NO: 1883334
agaagucccagaggaucuu

SEQ ID NO: 2186437 - RNA, 19 nt, Artificial Sequence
  Description of Artificial Sequence: Synthetic oligonucleotide
  Antisense strand to SEQ ID NO: 2186436
aagauccucugggacuucu

SEQ ID NO: 2186438 - RNA, 19 nt, Artificial Sequence
  Description of Artificial Sequence: Synthetic oligonucleotide
  Sense strand starting at position 148 of SEQ ID NO: 1883335
gugaauaaguuacuucuca

SEQ ID NO: 2186439 - RNA, 19 nt, Artificial Sequence
  Description of Artificial Sequence: Synthetic oligonucleotide
  Antisense strand to SEQ ID NO: 2186438
ugagaaguaacuuauucac

SEQ ID NO: 2186440 - RNA, 19 nt, Artificial Sequence
  Description of Artificial Sequence: Synthetic oligonucleotide
  Sense strand starting at position 167 of SEQ ID NO: 1883335
acuauaaacugggauaaua

SEQ ID NO: 2186441 - RNA, 19 nt, Artificial Sequence
  Description of Artificial Sequence: Synthetic oligonucleotide
  Antisense strand to SEQ ID NO: 2186440
uauuaucccaguuuauagu

SEQ ID NO: 2186442 - RNA, 19 nt, Artificial Sequence
  Description of Artificial Sequence: Synthetic oligonucleotide
  Sense strand starting at position 313 of SEQ ID NO: 1883335
acaacucugguuugacauu

SEQ ID NO: 2186443 - RNA, 19 nt, Artificial Sequence
  Description of Artificial Sequence: Synthetic oligonucleotide
  Antisense strand to SEQ ID NO: 2186442
aaugucaaaccagaguugu

SEQ ID NO: 2186444 - RNA, 19 nt, Artificial Sequence
  Description of Artificial Sequence: Synthetic oligonucleotide
  Sense strand starting at position 396 of SEQ ID NO: 1883335
aagcguuucuuagaauuug

SEQ ID NO: 2186445 - RNA, 19 nt, Artificial Sequence
  Description of Artificial Sequence: Synthetic oligonucleotide
  Antisense strand to SEQ ID NO: 2186444
caaauucuaagaaacgcuu

SEQ ID NO: 2186446 - RNA, 19 nt, Artificial Sequence
  Description of Artificial Sequence: Synthetic oligonucleotide
  Sense strand starting at position 448 of SEQ ID NO: 1883335
uuguaauucugacuugugu

SEQ ID NO: 2186447 - RNA, 19 nt, Artificial Sequence
  Description of Artificial Sequence: Synthetic oligonucleotide
  Antisense strand to SEQ ID NO: 2186446
acacaagucagaauuacaa

SEQ ID NO: 2186448 - RNA, 19 nt, Artificial Sequence
  Description of Artificial Sequence: Synthetic oligonucleotide
  Sense strand starting at position 450 of SEQ ID NO: 1883335
guaauucugacuuguguau

SEQ ID NO: 2186449 - RNA, 19 nt, Artificial Sequence
  Description of Artificial Sequence: Synthetic oligonucleotide
  Antisense strand to SEQ ID NO: 2186448
auacacaagucagaauuac

SEQ ID NO: 2186450 - RNA, 19 nt, Artificial Sequence
  Description of Artificial Sequence: Synthetic oligonucleotide
  Sense strand starting at position 526 of SEQ ID NO: 1883335
guuaacuuauuugaagauc

SEQ ID NO: 2186451 - RNA, 19 nt, Artificial Sequence
  Description of Artificial Sequence: Synthetic oligonucleotide
  Antisense strand to SEQ ID NO: 2186450
gaucuucaaauaaguuaac

SEQ ID NO: 2186452 - RNA, 19 nt, Artificial Sequence
  Description of Artificial Sequence: Synthetic oligonucleotide
  Sense strand starting at position 538 of SEQ ID NO: 1883335
gaagaucagauauggcgua

SEQ ID NO: 2186453 - RNA, 19 nt, Artificial Sequence
  Description of Artificial Sequence: Synthetic oligonucleotide
  Antisense strand to SEQ ID NO: 2186452
uacgccauaucugaucuuc

SEQ ID NO: 2186454 - RNA, 19 nt, Artificial Sequence
  Description of Artificial Sequence: Synthetic oligonucleotide
  Sense strand starting at position 550 of SEQ ID NO: 1883335
uggcguauguccucaucaa

SEQ ID NO: 2186455 - RNA, 19 nt, Artificial Sequence
  Description of Artificial Sequence: Synthetic oligonucleotide
  Antisense strand to SEQ ID NO: 2186454
uugaugaggacauacgcca

SEQ ID NO: 2186456 - RNA, 19 nt, Artificial Sequence
  Description of Artificial Sequence: Synthetic oligonucleotide
  Sense strand starting at position 551 of SEQ ID NO: 1883335
ggcguauguccucaucaau

SEQ ID NO: 2186457 - RNA, 19 nt, Artificial Sequence
  Description of Artificial Sequence: Synthetic oligonucleotide
  Antisense strand to SEQ ID NO: 2186456
auugaugaggacauacgcc

SEQ ID NO: 2186458 - RNA, 19 nt, Artificial Sequence
  Description of Artificial Sequence: Synthetic oligonucleotide
  Sense strand starting at position 585 of SEQ ID NO: 1883335
auuaguugccuccgacauu

SEQ ID NO: 2186459 - RNA, 19 nt, Artificial Sequence
  Description of Artificial Sequence: Synthetic oligonucleotide
  Antisense strand to SEQ ID NO: 2186458
aaugucggaggcaacuaau

SEQ ID NO: 2186460 - RNA, 19 nt, Artificial Sequence
  Description of Artificial Sequence: Synthetic oligonucleotide
  Sense strand starting at position 811 of SEQ ID NO: 1883335
cccagaaacucuucgcaca

SEQ ID NO: 2186461 - RNA, 19 nt, Artificial Sequence
  Description of Artificial Sequence: Synthetic oligonucleotide
  Antisense strand to SEQ ID NO: 2186460
ugugcgaagaguuucuggg

SEQ ID NO: 2186462 - RNA, 19 nt, Artificial Sequence
  Description of Artificial Sequence: Synthetic oligonucleotide
  Sense strand starting at position 812 of SEQ ID NO: 1883335
ccagaaacucuucgcacaa

SEQ ID NO: 2186463 - RNA, 19 nt, Artificial Sequence
  Description of Artificial Sequence: Synthetic oligonucleotide
  Antisense strand to SEQ ID NO: 2186462
uugugcgaagaguuucugg

SEQ ID NO: 2186464 - RNA, 19 nt, Artificial Sequence
  Description of Artificial Sequence: Synthetic oligonucleotide
  Sense strand starting at position 893 of SEQ ID NO: 1883335
ggguuucccucuuacaaau

SEQ ID NO: 2186465 - RNA, 19 nt, Artificial Sequence
  Description of Artificial Sequence: Synthetic oligonucleotide
  Antisense strand to SEQ ID NO: 2186464
auuuguaagagggaaaccc

SEQ ID NO: 2186466 - RNA, 19 nt, Artificial Sequence
  Description of Artificial Sequence: Synthetic oligonucleotide
  Sense strand starting at position 1164 of SEQ ID NO: 1883335
uuuccacgcgucugugaaa

SEQ ID NO: 2186467 - RNA, 19 nt, Artificial Sequence
  Description of Artificial Sequence: Synthetic oligonucleotide
  Antisense strand to SEQ ID NO: 2186466
uuucacagacgcguggaaa

SEQ ID NO: 2186468 - RNA, 19 nt, Artificial Sequence
  Description of Artificial Sequence: Synthetic oligonucleotide
  Sense strand starting at position 1165 of SEQ ID NO: 1883335
uuccacgcgucugugaaau

SEQ ID NO: 2186469 - RNA, 19 nt, Artificial Sequence
  Description of Artificial Sequence: Synthetic oligonucleotide
  Antisense strand to SEQ ID NO: 2186468
auuucacagacgcguggaa

SEQ ID NO: 2186470 - RNA, 19 nt, Artificial Sequence
  Description of Artificial Sequence: Synthetic oligonucleotide
  Sense strand starting at position 1319 of SEQ ID NO: 1883335
ccgaguucggcggaagguu

SEQ ID NO: 2186471 - RNA, 19 nt, Artificial Sequence
  Description of Artificial Sequence: Synthetic oligonucleotide
  Antisense strand to SEQ ID NO: 2186470
aaccuuccgccgaacucgg

SEQ ID NO: 2186472 - RNA, 19 nt, Artificial Sequence
  Description of Artificial Sequence: Synthetic oligonucleotide
  Sense strand starting at position 1516 of SEQ ID NO: 1883335
gguaacagccuuuguagau

SEQ ID NO: 2186473 - RNA, 19 nt, Artificial Sequence
  Description of Artificial Sequence: Synthetic oligonucleotide
  Antisense strand to SEQ ID NO: 2186472
aucuacaaaggcuguuacc

SEQ ID NO: 2186474 - RNA, 19 nt, Artificial Sequence
  Description of Artificial Sequence: Synthetic oligonucleotide
  Sense strand starting at position 1517 of SEQ ID NO: 1883335
guaacagccuuuguagauc

SEQ ID NO: 2186475 - RNA, 19 nt, Artificial Sequence
  Description of Artificial Sequence: Synthetic oligonucleotide
  Antisense strand to SEQ ID NO: 2186474
gaucuacaaaggcuguuac

SEQ ID NO: 2186476 - RNA, 19 nt, Artificial Sequence
  Description of Artificial Sequence: Synthetic oligonucleotide
  Sense strand starting at position 1525 of SEQ ID NO: 1883335
cuuuguagaucucagaaug

SEQ ID NO: 2186477 - RNA, 19 nt, Artificial Sequence
  Description of Artificial Sequence: Synthetic oligonucleotide
  Antisense strand to SEQ ID NO: 2186476
cauucugagaucuacaaag

SEQ ID NO: 2186478 - RNA, 19 nt, Artificial Sequence
  Description of Artificial Sequence: Synthetic oligonucleotide
  Sense strand starting at position 1548 of SEQ ID NO: 1883335
agaaucauuuguuaccgaa

SEQ ID NO: 2186479 - RNA, 19 nt, Artificial Sequence
  Description of Artificial Sequence: Synthetic oligonucleotide
  Antisense strand to SEQ ID NO: 2186478
uucgguaacaaaugauucu

SEQ ID NO: 2186480 - RNA, 19 nt, Artificial Sequence
  Description of Artificial Sequence: Synthetic oligonucleotide
  Sense strand starting at position 1551 of SEQ ID NO: 1883335
aucauuuguuaccgaacaa

SEQ ID NO: 2186481 - RNA, 19 nt, Artificial Sequence
  Description of Artificial Sequence: Synthetic oligonucleotide
  Antisense strand to SEQ ID NO: 2186480
uuguucgguaacaaaugau

SEQ ID NO: 2186482 - RNA, 19 nt, Artificial Sequence
  Description of Artificial Sequence: Synthetic oligonucleotide
  Sense strand starting at position 2178 of SEQ ID NO: 1883335
gcgcaaaggugauucucuu

SEQ ID NO: 2186483 - RNA, 19 nt, Artificial Sequence
  Description of Artificial Sequence: Synthetic oligonucleotide
  Antisense strand to SEQ ID NO: 2186482
aagagaaucaccuuugcgc

SEQ ID NO: 2186484 - RNA, 19 nt, Artificial Sequence
  Description of Artificial Sequence: Synthetic oligonucleotide
  Sense strand starting at position 2182 of SEQ ID NO: 1883335
aaaggugauucucuugcga

SEQ ID NO: 2186485 - RNA, 19 nt, Artificial Sequence
  Description of Artificial Sequence: Synthetic oligonucleotide
  Antisense strand to SEQ ID NO: 2186484
ucgcaagagaaucaccuuu

SEQ ID NO: 2186486 - RNA, 19 nt, Artificial Sequence
  Description of Artificial Sequence: Synthetic oligonucleotide
  Sense strand starting at position 2196 of SEQ ID NO: 1883335
ugcgagggucuuugagagu

SEQ ID NO: 2186487 - RNA, 19 nt, Artificial Sequence
  Description of Artificial Sequence: Synthetic oligonucleotide
  Antisense strand to SEQ ID NO: 2186486
acucucaaagacccucgca

SEQ ID NO: 2186488 - RNA, 19 nt, Artificial Sequence
  Description of Artificial Sequence: Synthetic oligonucleotide
  Sense strand starting at position 2218 of SEQ ID NO: 1883335
gguguuagccaauagcgua

SEQ ID NO: 2186489 - RNA, 19 nt, Artificial Sequence
  Description of Artificial Sequence: Synthetic oligonucleotide
  Antisense strand to SEQ ID NO: 2186488
uacgcuauuggcuaacacc

SEQ ID NO: 2186490 - RNA, 19 nt, Artificial Sequence
  Description of Artificial Sequence: Synthetic oligonucleotide
  Sense strand starting at position 2223 of SEQ ID NO: 1883335
uagccaauagcguaagaua

SEQ ID NO: 2186491 - RNA, 19 nt, Artificial Sequence
  Description of Artificial Sequence: Synthetic oligonucleotide
  Antisense strand to SEQ ID NO: 2186490
uaucuuacgcuauuggcua

SEQ ID NO: 2186492 - RNA, 19 nt, Artificial Sequence
  Description of Artificial Sequence: Synthetic oligonucleotide
  Sense strand starting at position 2257 of SEQ ID NO: 1883335
uuuccagugcggugaauau

SEQ ID NO: 2186493 - RNA, 19 nt, Artificial Sequence
  Description of Artificial Sequence: Synthetic oligonucleotide
  Antisense strand to SEQ ID NO: 2186492
auauucaccgcacuggaaa

SEQ ID NO: 2186494 - RNA, 19 nt, Artificial Sequence
  Description of Artificial Sequence: Synthetic oligonucleotide
  Sense strand starting at position 2266 of SEQ ID NO: 1883335
cggugaauauuugcguuua

SEQ ID NO: 2186495 - RNA, 19 nt, Artificial Sequence
  Description of Artificial Sequence: Synthetic oligonucleotide
  Antisense strand to SEQ ID NO: 2186494
uaaacgcaaauauucaccg

SEQ ID NO: 2186496 - RNA, 19 nt, Artificial Sequence
  Description of Artificial Sequence: Synthetic oligonucleotide
  Sense strand starting at position 2276 of SEQ ID NO: 1883335
uugcguuuagcuuuauucu

SEQ ID NO: 2186497 - RNA, 19 nt, Artificial Sequence
  Description of Artificial Sequence: Synthetic oligonucleotide
  Antisense strand to SEQ ID NO: 2186496
agaauaaagcuaaacgcaa

SEQ ID NO: 2186498 - RNA, 19 nt, Artificial Sequence
  Description of Artificial Sequence: Synthetic oligonucleotide
  Sense strand starting at position 2277 of SEQ ID NO: 1883335
ugcguuuagcuuuauucuu

SEQ ID NO: 2186499 - RNA, 19 nt, Artificial Sequence
  Description of Artificial Sequence: Synthetic oligonucleotide
  Antisense strand to SEQ ID NO: 2186498
aagaauaaagcuaaacgca

SEQ ID NO: 2186500 - RNA, 19 nt, Artificial Sequence
  Description of Artificial Sequence: Synthetic oligonucleotide
  Sense strand starting at position 2314 of SEQ ID NO: 1883335
aaagcugucguggugcaau

SEQ ID NO: 2186501 - RNA, 19 nt, Artificial Sequence
  Description of Artificial Sequence: Synthetic oligonucleotide
  Antisense strand to SEQ ID NO: 2186500
auugcaccacgacagcuuu

SEQ ID NO: 2186502 - RNA, 19 nt, Artificial Sequence
  Description of Artificial Sequence: Synthetic oligonucleotide
  Sense strand starting at position 2363 of SEQ ID NO: 1883335
auggcucuauagggaugaa

SEQ ID NO: 2186503 - RNA, 19 nt, Artificial Sequence
  Description of Artificial Sequence: Synthetic oligonucleotide
  Antisense strand to SEQ ID NO: 2186502
uucaucccuauagagccau

SEQ ID NO: 2186504 - RNA, 19 nt, Artificial Sequence
  Description of Artificial Sequence: Synthetic oligonucleotide
  Sense strand starting at position 2366 of SEQ ID NO: 1883335
gcucuauagggaugaaagu

SEQ ID NO: 2186505 - RNA, 19 nt, Artificial Sequence
  Description of Artificial Sequence: Synthetic oligonucleotide
  Antisense strand to SEQ ID NO: 2186504
acuuucaucccuauagagc

SEQ ID NO: 2186506 - RNA, 19 nt, Artificial Sequence
  Description of Artificial Sequence: Synthetic oligonucleotide
  Sense strand starting at position 2448 of SEQ ID NO: 1883335
uauagagggucuucuguuu

SEQ ID NO: 2186507 - RNA, 19 nt, Artificial Sequence
  Description of Artificial Sequence: Synthetic oligonucleotide
  Antisense strand to SEQ ID NO: 2186506
aaacagaagacccucuaua

SEQ ID NO: 2186508 - RNA, 19 nt, Artificial Sequence
  Description of Artificial Sequence: Synthetic oligonucleotide
  Sense strand starting at position 2454 of SEQ ID NO: 1883335
gggucuucuguuugcuaca

SEQ ID NO: 2186509 - RNA, 19 nt, Artificial Sequence
  Description of Artificial Sequence: Synthetic oligonucleotide
  Antisense strand to SEQ ID NO: 2186508
uguagcaaacagaagaccc

SEQ ID NO: 2186510 - RNA, 19 nt, Artificial Sequence
  Description of Artificial Sequence: Synthetic oligonucleotide
  Sense strand starting at position 2471 of SEQ ID NO: 1883335
cacguugggcucuggauau

SEQ ID NO: 2186511 - RNA, 19 nt, Artificial Sequence
  Description of Artificial Sequence: Synthetic oligonucleotide
  Antisense strand to SEQ ID NO: 2186510
auauccagagcccaacgug

SEQ ID NO: 2186512 - RNA, 19 nt, Artificial Sequence
  Description of Artificial Sequence: Synthetic oligonucleotide
  Sense strand starting at position 2533 of SEQ ID NO: 1883335
ucaguauugcuugggagga

SEQ ID NO: 2186513 - RNA, 19 nt, Artificial Sequence
  Description of Artificial Sequence: Synthetic oligonucleotide
  Antisense strand to SEQ ID NO: 2186512
uccucccaagcaauacuga

SEQ ID NO: 2186514 - RNA, 19 nt, Artificial Sequence
  Description of Artificial Sequence: Synthetic oligonucleotide
  Sense strand starting at position 2535 of SEQ ID NO: 1883335
aguauugcuugggaggaau

SEQ ID NO: 2186515 - RNA, 19 nt, Artificial Sequence
  Description of Artificial Sequence: Synthetic oligonucleotide
  Antisense strand to SEQ ID NO: 2186514
auuccucccaagcaauacu

SEQ ID NO: 2186516 - RNA, 19 nt, Artificial Sequence
  Description of Artificial Sequence: Synthetic oligonucleotide
  Sense strand starting at position 2579 of SEQ ID NO: 1883335
uuacuuguaccacgaagaa

SEQ ID NO: 2186517 - RNA, 19 nt, Artificial Sequence
  Description of Artificial Sequence: Synthetic oligonucleotide
  Antisense strand to SEQ ID NO: 2186516
uucuucgugguacaaguaa

SEQ ID NO: 2186518 - RNA, 19 nt, Artificial Sequence
  Description of Artificial Sequence: Synthetic oligonucleotide
  Sense strand starting at position 32 of SEQ ID NO: 1883336
cugugcaaccuugaacaga

SEQ ID NO: 2186519 - RNA, 19 nt, Artificial Sequence
  Description of Artificial Sequence: Synthetic oligonucleotide
  Antisense strand to SEQ ID NO: 2186518
ucuguucaagguugcacag

SEQ ID NO: 2186520 - RNA, 19 nt, Artificial Sequence
  Description of Artificial Sequence: Synthetic oligonucleotide
  Sense strand starting at position 60 of SEQ ID NO: 1883336
acccuagucucaguuuauc

SEQ ID NO: 2186521 - RNA, 19 nt, Artificial Sequence
  Description of Artificial Sequence: Synthetic oligonucleotide
  Antisense strand to SEQ ID NO: 2186520
gauaaacugagacuagggu

SEQ ID NO: 2186522 - RNA, 19 nt, Artificial Sequence
  Description of Artificial Sequence: Synthetic oligonucleotide
  Sense strand starting at position 66 of SEQ ID NO: 1883336
gucucaguuuauccagacu

SEQ ID NO: 2186523 - RNA, 19 nt, Artificial Sequence
  Description of Artificial Sequence: Synthetic oligonucleotide
  Antisense strand to SEQ ID NO: 2186522
agucuggauaaacugagac

SEQ ID NO: 2186524 - RNA, 19 nt, Artificial Sequence
  Description of Artificial Sequence: Synthetic oligonucleotide
  Sense strand starting at position 69 of SEQ ID NO: 1883336
ucaguuuauccagacugca

SEQ ID NO: 2186525 - RNA, 19 nt, Artificial Sequence
  Description of Artificial Sequence: Synthetic oligonucleotide
  Antisense strand to SEQ ID NO: 2186524
ugcagucuggauaaacuga

SEQ ID NO: 2186526 - RNA, 19 nt, Artificial Sequence
  Description of Artificial Sequence: Synthetic oligonucleotide
  Sense strand starting at position 107 of SEQ ID NO: 1883336
cauggcugugcguuugaua

SEQ ID NO: 2186527 - RNA, 19 nt, Artificial Sequence
  Description of Artificial Sequence: Synthetic oligonucleotide
  Antisense strand to SEQ ID NO: 2186526
uaucaaacgcacagccaug

SEQ ID NO: 2186528 - RNA, 19 nt, Artificial Sequence
  Description of Artificial Sequence: Synthetic oligonucleotide
  Sense strand starting at position 291 of SEQ ID NO: 1883336
ugcugauggguuggaaauu

SEQ ID NO: 2186529 - RNA, 19 nt, Artificial Sequence
  Description of Artificial Sequence: Synthetic oligonucleotide
  Antisense strand to SEQ ID NO: 2186528
aauuuccaacccaucagca

SEQ ID NO: 2186530 - RNA, 19 nt, Artificial Sequence
  Description of Artificial Sequence: Synthetic oligonucleotide
  Sense strand starting at position 440 of SEQ ID NO: 1883336
gcgcuuucucccuugaugu

SEQ ID NO: 2186531 - RNA, 19 nt, Artificial Sequence
  Description of Artificial Sequence: Synthetic oligonucleotide
  Antisense strand to SEQ ID NO: 2186530
acaucaagggagaaagcgc

SEQ ID NO: 2186532 - RNA, 19 nt, Artificial Sequence
  Description of Artificial Sequence: Synthetic oligonucleotide
  Sense strand starting at position 609 of SEQ ID NO: 1883336
augccaguucucgacagga

SEQ ID NO: 2186533 - RNA, 19 nt, Artificial Sequence
  Description of Artificial Sequence: Synthetic oligonucleotide
  Antisense strand to SEQ ID NO: 2186532
uccugucgagaacuggcau

SEQ ID NO: 2186534 - RNA, 19 nt, Artificial Sequence
  Description of Artificial Sequence: Synthetic oligonucleotide
  Sense strand starting at position 611 of SEQ ID NO: 1883336
gccaguucucgacaggaag

SEQ ID NO: 2186535 - RNA, 19 nt, Artificial Sequence
  Description of Artificial Sequence: Synthetic oligonucleotide
  Antisense strand to SEQ ID NO: 2186534
cuuccugucgagaacuggc

SEQ ID NO: 2186536 - RNA, 19 nt, Artificial Sequence
  Description of Artificial Sequence: Synthetic oligonucleotide
  Sense strand starting at position 859 of SEQ ID NO: 1883336
gaggucuuggcagagauac

SEQ ID NO: 2186537 - RNA, 19 nt, Artificial Sequence
  Description of Artificial Sequence: Synthetic oligonucleotide
  Antisense strand to SEQ ID NO: 2186536
guaucucugccaagaccuc

SEQ ID NO: 2186538 - RNA, 19 nt, Artificial Sequence
  Description of Artificial Sequence: Synthetic oligonucleotide
  Sense strand starting at position 1232 of SEQ ID NO: 1883336
ggcacuuucugagcaaaca

SEQ ID NO: 2186539 - RNA, 19 nt, Artificial Sequence
  Description of Artificial Sequence: Synthetic oligonucleotide
  Antisense strand to SEQ ID NO: 2186538
uguuugcucagaaagugcc

SEQ ID NO: 2186540 - RNA, 19 nt, Artificial Sequence
  Description of Artificial Sequence: Synthetic oligonucleotide
  Sense strand starting at position 1253 of SEQ ID NO: 1883336
acugaaaggucagcaguaa

SEQ ID NO: 2186541 - RNA, 19 nt, Artificial Sequence
  Description of Artificial Sequence: Synthetic oligonucleotide
  Antisense strand to SEQ ID NO: 2186540
uuacugcugaccuuucagu

SEQ ID NO: 2186542 - RNA, 19 nt, Artificial Sequence
  Description of Artificial Sequence: Synthetic oligonucleotide
  Sense strand starting at position 1344 of SEQ ID NO: 1883336
gucggaugacuucaccaga

SEQ ID NO: 2186543 - RNA, 19 nt, Artificial Sequence
  Description of Artificial Sequence: Synthetic oligonucleotide
  Antisense strand to SEQ ID NO: 2186542
ucuggugaagucauccgac

SEQ ID NO: 2186544 - RNA, 19 nt, Artificial Sequence
  Description of Artificial Sequence: Synthetic oligonucleotide
  Sense strand starting at position 1570 of SEQ ID NO: 1883336
uggcuuucucacuguagga

SEQ ID NO: 2186545 - RNA, 19 nt, Artificial Sequence
  Description of Artificial Sequence: Synthetic oligonucleotide
  Antisense strand to SEQ ID NO: 2186544
uccuacagugagaaagcca

SEQ ID NO: 2186546 - RNA, 19 nt, Artificial Sequence
  Description of Artificial Sequence: Synthetic oligonucleotide
  Sense strand starting at position 1572 of SEQ ID NO: 1883336
gcuuucucacuguaggacu

SEQ ID NO: 2186547 - RNA, 19 nt, Artificial Sequence
  Description of Artificial Sequence: Synthetic oligonucleotide
  Antisense strand to SEQ ID NO: 2186546
aguccuacagugagaaagc

SEQ ID NO: 2186548 - RNA, 19 nt, Artificial Sequence
  Description of Artificial Sequence: Synthetic oligonucleotide
  Sense strand starting at position 1589 of SEQ ID NO: 1883336
cucaguuugcaugggaaac

SEQ ID NO: 2186549 - RNA, 19 nt, Artificial Sequence
  Description of Artificial Sequence: Synthetic oligonucleotide
  Antisense strand to SEQ ID NO: 2186548
guuucccaugcaaacugag

SEQ ID NO: 2186550 - RNA, 19 nt, Artificial Sequence
  Description of Artificial Sequence: Synthetic oligonucleotide
  Sense strand starting at position 1901 of SEQ ID NO: 1883336
uagacauacgagugauaua

SEQ ID NO: 2186551 - RNA, 19 nt, Artificial Sequence
  Description of Artificial Sequence: Synthetic oligonucleotide
  Antisense strand to SEQ ID NO: 2186550
uauaucacucguaugucua

SEQ ID NO: 2186552 - RNA, 19 nt, Artificial Sequence
  Description of Artificial Sequence: Synthetic oligonucleotide
  Sense strand starting at position 2179 of SEQ ID NO: 1883336
aaugucuugccaugaugac

SEQ ID NO: 2186553 - RNA, 19 nt, Artificial Sequence
  Description of Artificial Sequence: Synthetic oligonucleotide
  Antisense strand to SEQ ID NO: 2186552
gucaucauggcaagacauu

SEQ ID NO: 2186554 - RNA, 19 nt, Artificial Sequence
  Description of Artificial Sequence: Synthetic oligonucleotide
  Sense strand starting at position 2180 of SEQ ID NO: 1883336
augucuugccaugaugaca

SEQ ID NO: 2186555 - RNA, 19 nt, Artificial Sequence
  Description of Artificial Sequence: Synthetic oligonucleotide
  Antisense strand to SEQ ID NO: 2186554
ugucaucauggcaagacau

SEQ ID NO: 2186556 - RNA, 19 nt, Artificial Sequence
  Description of Artificial Sequence: Synthetic oligonucleotide
  Sense strand starting at position 2286 of SEQ ID NO: 1883336
caauguagacuuugaugaa

SEQ ID NO: 2186557 - RNA, 19 nt, Artificial Sequence
  Description of Artificial Sequence: Synthetic oligonucleotide
  Antisense strand to SEQ ID NO: 2186556
uucaucaaagucuacauug

SEQ ID NO: 2186558 - RNA, 19 nt, Artificial Sequence
  Description of Artificial Sequence: Synthetic oligonucleotide
  Sense strand starting at position 2508 of SEQ ID NO: 1883336
uugagugacuuccucuacu

SEQ ID NO: 2186559 - RNA, 19 nt, Artificial Sequence
  Description of Artificial Sequence: Synthetic oligonucleotide
  Antisense strand to SEQ ID NO: 2186558
aguagaggaagucacucaa

SEQ ID NO: 2186560 - RNA, 19 nt, Artificial Sequence
  Description of Artificial Sequence: Synthetic oligonucleotide
  Sense strand starting at position 2620 of SEQ ID NO: 1883336
ccaugcauuugccuauuga

SEQ ID NO: 2186561 - RNA, 19 nt, Artificial Sequence
  Description of Artificial Sequence: Synthetic oligonucleotide
  Antisense strand to SEQ ID NO: 2186560
ucaauaggcaaaugcaugg

SEQ ID NO: 2186562 - RNA, 19 nt, Artificial Sequence
  Description of Artificial Sequence: Synthetic oligonucleotide
  Sense strand starting at position 2628 of SEQ ID NO: 1883336
uugccuauugaugaacauu

SEQ ID NO: 2186563 - RNA, 19 nt, Artificial Sequence
  Description of Artificial Sequence: Synthetic oligonucleotide
  Antisense strand to SEQ ID NO: 2186562
aauguucaucaauaggcaa

SEQ ID NO: 2186564 - RNA, 19 nt, Artificial Sequence
  Description of Artificial Sequence: Synthetic oligonucleotide
  Sense strand starting at position 2664 of SEQ ID NO: 1883336
uuugcuauucuggacaaug

SEQ ID NO: 2186565 - RNA, 19 nt, Artificial Sequence
  Description of Artificial Sequence: Synthetic oligonucleotide
  Antisense strand to SEQ ID NO: 2186564
cauuguccagaauagcaaa

SEQ ID NO: 2186566 - RNA, 19 nt, Artificial Sequence
  Description of Artificial Sequence: Synthetic oligonucleotide
  Sense strand starting at position 2686 of SEQ ID NO: 1883336
uugugaauaguauguacaa

SEQ ID NO: 2186567 - RNA, 19 nt, Artificial Sequence
  Description of Artificial Sequence: Synthetic oligonucleotide
  Antisense strand to SEQ ID NO: 2186566
uuguacauacuauucacaa

SEQ ID NO: 2186568 - RNA, 19 nt, Artificial Sequence
  Description of Artificial Sequence: Synthetic oligonucleotide
  Sense strand starting at position 2687 of SEQ ID NO: 1883336
ugugaauaguauguacaaa

SEQ ID NO: 2186569 - RNA, 19 nt, Artificial Sequence
  Description of Artificial Sequence: Synthetic oligonucleotide
  Antisense strand to SEQ ID NO: 2186568
uuuguacauacuauucaca

SEQ ID NO: 2186570 - RNA, 19 nt, Artificial Sequence
  Description of Artificial Sequence: Synthetic oligonucleotide
  Sense strand starting at position 2762 of SEQ ID NO: 1883336
gcuggaucauagguuaagu

SEQ ID NO: 2186571 - RNA, 19 nt, Artificial Sequence
  Description of Artificial Sequence: Synthetic oligonucleotide
  Antisense strand to SEQ ID NO: 2186570
acuuaaccuaugauccagc

SEQ ID NO: 2186572 - RNA, 19 nt, Artificial Sequence
  Description of Artificial Sequence: Synthetic oligonucleotide
  Sense strand starting at position 2773 of SEQ ID NO: 1883336
gguuaaguauguguucaga

SEQ ID NO: 2186573 - RNA, 19 nt, Artificial Sequence
  Description of Artificial Sequence: Synthetic oligonucleotide
  Antisense strand to SEQ ID NO: 2186572
ucugaacacauacuuaacc

SEQ ID NO: 2186574 - RNA, 19 nt, Artificial Sequence
  Description of Artificial Sequence: Synthetic oligonucleotide
  Sense strand starting at position 2787 of SEQ ID NO: 1883336
ucagauuuauaggaaauca

SEQ ID NO: 2186575 - RNA, 19 nt, Artificial Sequence
  Description of Artificial Sequence: Synthetic oligonucleotide
  Antisense strand to SEQ ID NO: 2186574
ugauuuccuauaaaucuga

SEQ ID NO: 2186576 - RNA, 19 nt, Artificial Sequence
  Description of Artificial Sequence: Synthetic oligonucleotide
  Sense strand starting at position 2845 of SEQ ID NO: 1883336
accauuaaugcaugagagu

SEQ ID NO: 2186577 - RNA, 19 nt, Artificial Sequence
  Description of Artificial Sequence: Synthetic oligonucleotide
  Antisense strand to SEQ ID NO: 2186576
acucucaugcauuaauggu

SEQ ID NO: 2186578 - RNA, 19 nt, Artificial Sequence
  Description of Artificial Sequence: Synthetic oligonucleotide
  Sense strand starting at position 2846 of SEQ ID NO: 1883336
ccauuaaugcaugagaguu

SEQ ID NO: 2186579 - RNA, 19 nt, Artificial Sequence
  Description of Artificial Sequence: Synthetic oligonucleotide
  Antisense strand to SEQ ID NO: 2186578
aacucucaugcauuaaugg

SEQ ID NO: 2186580 - RNA, 19 nt, Artificial Sequence
  Description of Artificial Sequence: Synthetic oligonucleotide
  Sense strand starting at position 2927 of SEQ ID NO: 1883336
gugguaucucagagugguu

SEQ ID NO: 2186581 - RNA, 19 nt, Artificial Sequence
  Description of Artificial Sequence: Synthetic oligonucleotide
  Antisense strand to SEQ ID NO: 2186580
aaccacucugagauaccac

SEQ ID NO: 2186582 - RNA, 19 nt, Artificial Sequence
  Description of Artificial Sequence: Synthetic oligonucleotide
  Sense strand starting at position 3363 of SEQ ID NO: 1883336
cuuauugagauguaugagu

SEQ ID NO: 2186583 - RNA, 19 nt, Artificial Sequence
  Description of Artificial Sequence: Synthetic oligonucleotide
  Antisense strand to SEQ ID NO: 2186582
acucauacaucucaauaag

SEQ ID NO: 2186584 - RNA, 19 nt, Artificial Sequence
  Description of Artificial Sequence: Synthetic oligonucleotide
  Sense strand starting at position 3365 of SEQ ID NO: 1883336
uauugagauguaugaguuc

SEQ ID NO: 2186585 - RNA, 19 nt, Artificial Sequence
  Description of Artificial Sequence: Synthetic oligonucleotide
  Antisense strand to SEQ ID NO: 2186584
gaacucauacaucucaaua

SEQ ID NO: 2186586 - RNA, 19 nt, Artificial Sequence
  Description of Artificial Sequence: Synthetic oligonucleotide
  Sense strand starting at position 3368 of SEQ ID NO: 1883336
ugagauguaugaguucuuu

SEQ ID NO: 2186587 - RNA, 19 nt, Artificial Sequence
  Description of Artificial Sequence: Synthetic oligonucleotide
  Antisense strand to SEQ ID NO: 2186586
aaagaacucauacaucuca

SEQ ID NO: 2186588 - RNA, 19 nt, Artificial Sequence
  Description of Artificial Sequence: Synthetic oligonucleotide
  Sense strand starting at position 3635 of SEQ ID NO: 1883336
agguuugugguccauauca

SEQ ID NO: 2186589 - RNA, 19 nt, Artificial Sequence
  Description of Artificial Sequence: Synthetic oligonucleotide
  Antisense strand to SEQ ID NO: 2186588
ugauauggaccacaaaccu

SEQ ID NO: 2186590 - RNA, 19 nt, Artificial Sequence
  Description of Artificial Sequence: Synthetic oligonucleotide
  Sense strand starting at position 3637 of SEQ ID NO: 1883336
guuugugguccauaucaga

SEQ ID NO: 2186591 - RNA, 19 nt, Artificial Sequence
  Description of Artificial Sequence: Synthetic oligonucleotide
  Antisense strand to SEQ ID NO: 2186590
ucugauauggaccacaaac

SEQ ID NO: 2186592 - RNA, 19 nt, Artificial Sequence
  Description of Artificial Sequence: Synthetic oligonucleotide
  Sense strand starting at position 3728 of SEQ ID NO: 1883336
cuuugaaaucauugguguc

SEQ ID NO: 2186593 - RNA, 19 nt, Artificial Sequence
  Description of Artificial Sequence: Synthetic oligonucleotide
  Antisense strand to SEQ ID NO: 2186592
gacaccaaugauuucaaag

SEQ ID NO: 2186594 - RNA, 19 nt, Artificial Sequence
  Description of Artificial Sequence: Synthetic oligonucleotide
  Sense strand starting at position 3730 of SEQ ID NO: 1883336
uugaaaucauuggugucuu

SEQ ID NO: 2186595 - RNA, 19 nt, Artificial Sequence
  Description of Artificial Sequence: Synthetic oligonucleotide
  Antisense strand to SEQ ID NO: 2186594
aagacaccaaugauuucaa

SEQ ID NO: 2186596 - RNA, 19 nt, Artificial Sequence
  Description of Artificial Sequence: Synthetic oligonucleotide
  Sense strand starting at position 3786 of SEQ ID NO: 1883336
ucuggaucucaaugugguu

SEQ ID NO: 2186597 - RNA, 19 nt, Artificial Sequence
  Description of Artificial Sequence: Synthetic oligonucleotide
  Antisense strand to SEQ ID NO: 2186596
aaccacauugagauccaga

SEQ ID NO: 2186598 - RNA, 19 nt, Artificial Sequence
  Description of Artificial Sequence: Synthetic oligonucleotide
  Sense strand starting at position 42 of SEQ ID NO: 1883337
acucuaaagcagcaguaau

SEQ ID NO: 2186599 - RNA, 19 nt, Artificial Sequence
  Description of Artificial Sequence: Synthetic oligonucleotide
  Antisense strand to SEQ ID NO: 2186598
auuacugcugcuuuagagu

SEQ ID NO: 2186600 - RNA, 19 nt, Artificial Sequence
  Description of Artificial Sequence: Synthetic oligonucleotide
  Sense strand starting at position 553 of SEQ ID NO: 1883337
agacaugcagcucaaauua

SEQ ID NO: 2186601 - RNA, 19 nt, Artificial Sequence
  Description of Artificial Sequence: Synthetic oligonucleotide
  Antisense strand to SEQ ID NO: 2186600
uaauuugagcugcaugucu

SEQ ID NO: 2186602 - RNA, 19 nt, Artificial Sequence
  Description of Artificial Sequence: Synthetic oligonucleotide
  Sense strand starting at position 895 of SEQ ID NO: 1883337
guauaugaaugaccaugua

SEQ ID NO: 2186603 - RNA, 19 nt, Artificial Sequence
  Description of Artificial Sequence: Synthetic oligonucleotide
  Antisense strand to SEQ ID NO: 2186602
uacauggucauucauauac

SEQ ID NO: 2186604 - RNA, 19 nt, Artificial Sequence
  Description of Artificial Sequence: Synthetic oligonucleotide
  Sense strand starting at position 1067 of SEQ ID NO: 1883337
gaaacugugaagugguaca

SEQ ID NO: 2186605 - RNA, 19 nt, Artificial Sequence
  Description of Artificial Sequence: Synthetic oligonucleotide
  Antisense strand to SEQ ID NO: 2186604
uguaccacuucacaguuuc

SEQ ID NO: 2186606 - RNA, 19 nt, Artificial Sequence
  Description of Artificial Sequence: Synthetic oligonucleotide
  Sense strand starting at position 1226 of SEQ ID NO: 1883337
cagcauuguccagaauagc

SEQ ID NO: 2186607 - RNA, 19 nt, Artificial Sequence
  Description of Artificial Sequence: Synthetic oligonucleotide
  Antisense strand to SEQ ID NO: 2186606
gcuauucuggacaaugcug

SEQ ID NO: 2186608 - RNA, 19 nt, Artificial Sequence
  Description of Artificial Sequence: Synthetic oligonucleotide
  Sense strand starting at position 1404 of SEQ ID NO: 1883337
aagaguacagacuguauua

SEQ ID NO: 2186609 - RNA, 19 nt, Artificial Sequence
  Description of Artificial Sequence: Synthetic oligonucleotide
  Antisense strand to SEQ ID NO: 2186608
uaauacagucuguacucuu

SEQ ID NO: 2186610 - RNA, 19 nt, Artificial Sequence
  Description of Artificial Sequence: Synthetic oligonucleotide
  Sense strand starting at position 1406 of SEQ ID NO: 1883337
gaguacagacuguauuauu

SEQ ID NO: 2186611 - RNA, 19 nt, Artificial Sequence
  Description of Artificial Sequence: Synthetic oligonucleotide
  Antisense strand to SEQ ID NO: 2186610
aauaauacagucuguacuc

SEQ ID NO: 2186612 - RNA, 19 nt, Artificial Sequence
  Description of Artificial Sequence: Synthetic oligonucleotide
  Sense strand starting at position 1417 of SEQ ID NO: 1883337
guauuauuccauugagaug

SEQ ID NO: 2186613 - RNA, 19 nt, Artificial Sequence
  Description of Artificial Sequence: Synthetic oligonucleotide
  Antisense strand to SEQ ID NO: 2186612
caucucaauggaauaauac

SEQ ID NO: 2186614 - RNA, 19 nt, Artificial Sequence
  Description of Artificial Sequence: Synthetic oligonucleotide
  Sense strand starting at position 1428 of SEQ ID NO: 1883337
uugagaugauguucuagaa

SEQ ID NO: 2186615 - RNA, 19 nt, Artificial Sequence
  Description of Artificial Sequence: Synthetic oligonucleotide
  Antisense strand to SEQ ID NO: 2186614
uucuagaacaucaucucaa

SEQ ID NO: 2186616 - RNA, 19 nt, Artificial Sequence
  Description of Artificial Sequence: Synthetic oligonucleotide
  Sense strand starting at position 1472 of SEQ ID NO: 1883337
gaaaucagguaagugguua

SEQ ID NO: 2186617 - RNA, 19 nt, Artificial Sequence
  Description of Artificial Sequence: Synthetic oligonucleotide
  Antisense strand to SEQ ID NO: 2186616
uaaccacuuaccugauuuc

SEQ ID NO: 2186618 - RNA, 19 nt, Artificial Sequence
  Description of Artificial Sequence: Synthetic oligonucleotide
  Sense strand starting at position 1480 of SEQ ID NO: 1883337
guaagugguuaccugggau

SEQ ID NO: 2186619 - RNA, 19 nt, Artificial Sequence
  Description of Artificial Sequence: Synthetic oligonucleotide
  Antisense strand to SEQ ID NO: 2186618
aucccagguaaccacuuac

SEQ ID NO: 2186620 - RNA, 19 nt, Artificial Sequence
  Description of Artificial Sequence: Synthetic oligonucleotide
  Sense strand starting at position 1574 of SEQ ID NO: 1883337
uuaacaguuacugagugua

SEQ ID NO: 2186621 - RNA, 19 nt, Artificial Sequence
  Description of Artificial Sequence: Synthetic oligonucleotide
  Antisense strand to SEQ ID NO: 2186620
uacacucaguaacuguuaa

SEQ ID NO: 2186622 - RNA, 19 nt, Artificial Sequence
  Description of Artificial Sequence: Synthetic oligonucleotide
  Sense strand starting at position 1576 of SEQ ID NO: 1883337
aacaguuacugaguguaua

SEQ ID NO: 2186623 - RNA, 19 nt, Artificial Sequence
  Description of Artificial Sequence: Synthetic oligonucleotide
  Antisense strand to SEQ ID NO: 2186622
uauacacucaguaacuguu

SEQ ID NO: 2186624 - RNA, 19 nt, Artificial Sequence
  Description of Artificial Sequence: Synthetic oligonucleotide
  Sense strand starting at position 1577 of SEQ ID NO: 1883337
acaguuacugaguguauau

SEQ ID NO: 2186625 - RNA, 19 nt, Artificial Sequence
  Description of Artificial Sequence: Synthetic oligonucleotide
  Antisense strand to SEQ ID NO: 2186624
auauacacucaguaacugu

SEQ ID NO: 2186626 - RNA, 19 nt, Artificial Sequence
  Description of Artificial Sequence: Synthetic oligonucleotide
  Sense strand starting at position 1579 of SEQ ID NO: 1883337
aguuacugaguguauauau

SEQ ID NO: 2186627 - RNA, 19 nt, Artificial Sequence
  Description of Artificial Sequence: Synthetic oligonucleotide
  Antisense strand to SEQ ID NO: 2186626
auauauacacucaguaacu

SEQ ID NO: 2186628 - RNA, 19 nt, Artificial Sequence
  Description of Artificial Sequence: Synthetic oligonucleotide
  Sense strand starting at position 1710 of SEQ ID NO: 1883337
aggugucaucauggcaaga

SEQ ID NO: 2186629 - RNA, 19 nt, Artificial Sequence
  Description of Artificial Sequence: Synthetic oligonucleotide
  Antisense strand to SEQ ID NO: 2186628
ucuugccaugaugacaccu

SEQ ID NO: 2186630 - RNA, 19 nt, Artificial Sequence
  Description of Artificial Sequence: Synthetic oligonucleotide
  Sense strand starting at position 1896 of SEQ ID NO: 1883337
gugugaucauagccaauag

SEQ ID NO: 2186631 - RNA, 19 nt, Artificial Sequence
  Description of Artificial Sequence: Synthetic oligonucleotide
  Antisense strand to SEQ ID NO: 2186630
cuauuggcuaugaucacac

SEQ ID NO: 2186632 - RNA, 19 nt, Artificial Sequence
  Description of Artificial Sequence: Synthetic oligonucleotide
  Sense strand starting at position 1977 of SEQ ID NO: 1883337
cugugcacccucuauuaua

SEQ ID NO: 2186633 - RNA, 19 nt, Artificial Sequence
  Description of Artificial Sequence: Synthetic oligonucleotide
  Antisense strand to SEQ ID NO: 2186632
uauaauagagggugcacag

SEQ ID NO: 2186634 - RNA, 19 nt, Artificial Sequence
  Description of Artificial Sequence: Synthetic oligonucleotide
  Sense strand starting at position 1987 of SEQ ID NO: 1883337
ucuauuauaucacucguau

SEQ ID NO: 2186635 - RNA, 19 nt, Artificial Sequence
  Description of Artificial Sequence: Synthetic oligonucleotide
  Antisense strand to SEQ ID NO: 2186634
auacgagugauauaauaga

SEQ ID NO: 2186636 - RNA, 19 nt, Artificial Sequence
  Description of Artificial Sequence: Synthetic oligonucleotide
  Sense strand starting at position 2111 of SEQ ID NO: 1883337
agggauguucagugcuaaa

SEQ ID NO: 2186637 - RNA, 19 nt, Artificial Sequence
  Description of Artificial Sequence: Synthetic oligonucleotide
  Antisense strand to SEQ ID NO: 2186636
uuuagcacugaacaucccu

SEQ ID NO: 2186638 - RNA, 19 nt, Artificial Sequence
  Description of Artificial Sequence: Synthetic oligonucleotide
  Sense strand starting at position 2158 of SEQ ID NO: 1883337
ugggucaccuuaucugaga

SEQ ID NO: 2186639 - RNA, 19 nt, Artificial Sequence
  Description of Artificial Sequence: Synthetic oligonucleotide
  Antisense strand to SEQ ID NO: 2186638
ucucagauaaggugaccca

SEQ ID NO: 2186640 - RNA, 19 nt, Artificial Sequence
  Description of Artificial Sequence: Synthetic oligonucleotide
  Sense strand starting at position 2220 of SEQ ID NO: 1883337
cuaucaggugggugaugua

SEQ ID NO: 2186641 - RNA, 19 nt, Artificial Sequence
  Description of Artificial Sequence: Synthetic oligonucleotide
  Antisense strand to SEQ ID NO: 2186640
uacaucacccaccugauag

SEQ ID NO: 2186642 - RNA, 19 nt, Artificial Sequence
  Description of Artificial Sequence: Synthetic oligonucleotide
  Sense strand starting at position 2233 of SEQ ID NO: 1883337
gauguaugcucaguaaaug

SEQ ID NO: 2186643 - RNA, 19 nt, Artificial Sequence
  Description of Artificial Sequence: Synthetic oligonucleotide
  Antisense strand to SEQ ID NO: 2186642
cauuuacugagcauacauc

SEQ ID NO: 2186644 - RNA, 19 nt, Artificial Sequence
  Description of Artificial Sequence: Synthetic oligonucleotide
  Sense strand starting at position 2234 of SEQ ID NO: 1883337
auguaugcucaguaaaugu

SEQ ID NO: 2186645 - RNA, 19 nt, Artificial Sequence
  Description of Artificial Sequence: Synthetic oligonucleotide
  Antisense strand to SEQ ID NO: 2186644
acauuuacugagcauacau

SEQ ID NO: 2186646 - RNA, 19 nt, Artificial Sequence
  Description of Artificial Sequence: Synthetic oligonucleotide
  Sense strand starting at position 2241 of SEQ ID NO: 1883337
cucaguaaauguuuccuga

SEQ ID NO: 2186647 - RNA, 19 nt, Artificial Sequence
  Description of Artificial Sequence: Synthetic oligonucleotide
  Antisense strand to SEQ ID NO: 2186646
ucaggaaacauuuacugag

SEQ ID NO: 2186648 - RNA, 19 nt, Artificial Sequence
  Description of Artificial Sequence: Synthetic oligonucleotide
  Sense strand starting at position 2244 of SEQ ID NO: 1883337
aguaaauguuuccugaaag

SEQ ID NO: 2186649 - RNA, 19 nt, Artificial Sequence
  Description of Artificial Sequence: Synthetic oligonucleotide
  Antisense strand to SEQ ID NO: 2186648
cuuucaggaaacauuuacu

SEQ ID NO: 2186650 - RNA, 19 nt, Artificial Sequence
  Description of Artificial Sequence: Synthetic oligonucleotide
  Sense strand starting at position 2264 of SEQ ID NO: 1883337
cuagaauaugugugaguag

SEQ ID NO: 2186651 - RNA, 19 nt, Artificial Sequence
  Description of Artificial Sequence: Synthetic oligonucleotide
  Antisense strand to SEQ ID NO: 2186650
cuacucacacauauucuag

SEQ ID NO: 2186652 - RNA, 19 nt, Artificial Sequence
  Description of Artificial Sequence: Synthetic oligonucleotide
  Sense strand starting at position 2267 of SEQ ID NO: 1883337
gaauaugugugaguaggac

SEQ ID NO: 2186653 - RNA, 19 nt, Artificial Sequence
  Description of Artificial Sequence: Synthetic oligonucleotide
  Antisense strand to SEQ ID NO: 2186652
guccuacucacacauauuc

SEQ ID NO: 2186654 - RNA, 19 nt, Artificial Sequence
  Description of Artificial Sequence: Synthetic oligonucleotide
  Sense strand starting at position 2288 of SEQ ID NO: 1883337
uugaaauucuccuuugguu

SEQ ID NO: 2186655 - RNA, 19 nt, Artificial Sequence
  Description of Artificial Sequence: Synthetic oligonucleotide
  Antisense strand to SEQ ID NO: 2186654
aaccaaaggagaauuucaa

SEQ ID NO: 2186656 - RNA, 19 nt, Artificial Sequence
  Description of Artificial Sequence: Synthetic oligonucleotide
  Sense strand starting at position 2319 of SEQ ID NO: 1883337
ugaguccuacagugagaaa

SEQ ID NO: 2186657 - RNA, 19 nt, Artificial Sequence
  Description of Artificial Sequence: Synthetic oligonucleotide
  Antisense strand to SEQ ID NO: 2186656
uuucucacuguaggacuca

SEQ ID NO: 2186658 - RNA, 19 nt, Artificial Sequence
  Description of Artificial Sequence: Synthetic oligonucleotide
  Sense strand starting at position 2418 of SEQ ID NO: 1883337
auugguguucuggaaagca

SEQ ID NO: 2186659 - RNA, 19 nt, Artificial Sequence
  Description of Artificial Sequence: Synthetic oligonucleotide
  Antisense strand to SEQ ID NO: 2186658
ugcuuuccagaacaccaau

SEQ ID NO: 2186660 - RNA, 19 nt, Artificial Sequence
  Description of Artificial Sequence: Synthetic oligonucleotide
  Sense strand starting at position 2543 of SEQ ID NO: 1883337
ucuucuucuggugaaguca

SEQ ID NO: 2186661 - RNA, 19 nt, Artificial Sequence
  Description of Artificial Sequence: Synthetic oligonucleotide
  Antisense strand to SEQ ID NO: 2186660
ugacuucaccagaagaaga

SEQ ID NO: 2186662 - RNA, 19 nt, Artificial Sequence
  Description of Artificial Sequence: Synthetic oligonucleotide
  Sense strand starting at position 2895 of SEQ ID NO: 1883337
ggcuuuaaacaaugccaca

SEQ ID NO: 2186663 - RNA, 19 nt, Artificial Sequence
  Description of Artificial Sequence: Synthetic oligonucleotide
  Antisense strand to SEQ ID NO: 2186662
uguggcauuguuuaaagcc

SEQ ID NO: 2186664 - RNA, 19 nt, Artificial Sequence
  Description of Artificial Sequence: Synthetic oligonucleotide
  Sense strand starting at position 3069 of SEQ ID NO: 1883337
gccgaaucgccucauuucu

SEQ ID NO: 2186665 - RNA, 19 nt, Artificial Sequence
  Description of Artificial Sequence: Synthetic oligonucleotide
  Antisense strand to SEQ ID NO: 2186664
agaaaugaggcgauucggc

SEQ ID NO: 2186666 - RNA, 19 nt, Artificial Sequence
  Description of Artificial Sequence: Synthetic oligonucleotide
  Sense strand starting at position 3120 of SEQ ID NO: 1883337
uggguaagcucuuugaccu

SEQ ID NO: 2186667 - RNA, 19 nt, Artificial Sequence
  Description of Artificial Sequence: Synthetic oligonucleotide
  Antisense strand to SEQ ID NO: 2186666
aggucaaagagcuuaccca

SEQ ID NO: 2186668 - RNA, 19 nt, Artificial Sequence
  Description of Artificial Sequence: Synthetic oligonucleotide
  Sense strand starting at position 3121 of SEQ ID NO: 1883337
ggguaagcucuuugaccug

SEQ ID NO: 2186669 - RNA, 19 nt, Artificial Sequence
  Description of Artificial Sequence: Synthetic oligonucleotide
  Antisense strand to SEQ ID NO: 2186668
caggucaaagagcuuaccc

SEQ ID NO: 2186670 - RNA, 19 nt, Artificial Sequence
  Description of Artificial Sequence: Synthetic oligonucleotide
  Sense strand starting at position 3279 of SEQ ID NO: 1883337
ggccuuccugucgagaacu

SEQ ID NO: 2186671 - RNA, 19 nt, Artificial Sequence
  Description of Artificial Sequence: Synthetic oligonucleotide
  Antisense strand to SEQ ID NO: 2186670
aguucucgacaggaaggcc

SEQ ID NO: 2186672 - RNA, 19 nt, Artificial Sequence
  Description of Artificial Sequence: Synthetic oligonucleotide
  Sense strand starting at position 3927 of SEQ ID NO: 1883337
gaaagaaucuccuaggagg

SEQ ID NO: 2186673 - RNA, 19 nt, Artificial Sequence
  Description of Artificial Sequence: Synthetic oligonucleotide
  Antisense strand to SEQ ID NO: 2186672
ccuccuaggagauucuuuc

SEQ ID NO: 2186674 - RNA, 19 nt, Artificial Sequence
  Description of Artificial Sequence: Synthetic oligonucleotide
  Sense strand starting at position 3929 of SEQ ID NO: 1883337
aagaaucuccuaggagguu

SEQ ID NO: 2186675 - RNA, 19 nt, Artificial Sequence
  Description of Artificial Sequence: Synthetic oligonucleotide
  Antisense strand to SEQ ID NO: 2186674
aaccuccuaggagauucuu

SEQ ID NO: 2186676 - RNA, 19 nt, Artificial Sequence
  Description of Artificial Sequence: Synthetic oligonucleotide
  Sense strand starting at position 3953 of SEQ ID NO: 1883337
ggguucauucuuggacaga

SEQ ID NO: 2186677 - RNA, 19 nt, Artificial Sequence
  Description of Artificial Sequence: Synthetic oligonucleotide
  Antisense strand to SEQ ID NO: 2186676
ucuguccaagaaugaaccc

SEQ ID NO: 2186678 - RNA, 19 nt, Artificial Sequence
  Description of Artificial Sequence: Synthetic oligonucleotide
  Sense strand starting at position 55 of SEQ ID NO: 1883338
ucaaucaguagguguaaga

SEQ ID NO: 2186679 - RNA, 19 nt, Artificial Sequence
  Description of Artificial Sequence: Synthetic oligonucleotide
  Antisense strand to SEQ ID NO: 2186678
ucuuacaccuacugauuga

SEQ ID NO: 2186680 - RNA, 19 nt, Artificial Sequence
  Description of Artificial Sequence: Synthetic oligonucleotide
  Sense strand starting at position 81 of SEQ ID NO: 1883338
ugguuuggucuggaaagau

SEQ ID NO: 2186681 - RNA, 19 nt, Artificial Sequence
  Description of Artificial Sequence: Synthetic oligonucleotide
  Antisense strand to SEQ ID NO: 2186680
aucuuuccagaccaaacca

SEQ ID NO: 2186682 - RNA, 19 nt, Artificial Sequence
  Description of Artificial Sequence: Synthetic oligonucleotide
  Sense strand starting at position 370 of SEQ ID NO: 1883338
gucuuacaggugugaacaa

SEQ ID NO: 2186683 - RNA, 19 nt, Artificial Sequence
  Description of Artificial Sequence: Synthetic oligonucleotide
  Antisense strand to SEQ ID NO: 2186682
uuguucacaccuguaagac

SEQ ID NO: 2186684 - RNA, 19 nt, Artificial Sequence
  Description of Artificial Sequence: Synthetic oligonucleotide
  Sense strand starting at position 430 of SEQ ID NO: 1883338
gcgggauucccugaugcag

SEQ ID NO: 2186685 - RNA, 19 nt, Artificial Sequence
  Description of Artificial Sequence: Synthetic oligonucleotide
  Antisense strand to SEQ ID NO: 2186684
cugcaucagggaaucccgc

SEQ ID NO: 2186686 - RNA, 19 nt, Artificial Sequence
  Description of Artificial Sequence: Synthetic oligonucleotide
  Sense strand starting at position 637 of SEQ ID NO: 1883338
cagucuuucuggccaugaa

SEQ ID NO: 2186687 - RNA, 19 nt, Artificial Sequence
  Description of Artificial Sequence: Synthetic oligonucleotide
  Antisense strand to SEQ ID NO: 2186686
uucauggccagaaagacug

SEQ ID NO: 2186688 - RNA, 19 nt, Artificial Sequence
  Description of Artificial Sequence: Synthetic oligonucleotide
  Sense strand starting at position 638 of SEQ ID NO: 1883338
agucuuucuggccaugaaa

SEQ ID NO: 2186689 - RNA, 19 nt, Artificial Sequence
  Description of Artificial Sequence: Synthetic oligonucleotide
  Antisense strand to SEQ ID NO: 2186688
uuucauggccagaaagacu

SEQ ID NO: 2186690 - RNA, 19 nt, Artificial Sequence
  Description of Artificial Sequence: Synthetic oligonucleotide
  Sense strand starting at position 640 of SEQ ID NO: 1883338
ucuuucuggccaugaaacu

SEQ ID NO: 2186691 - RNA, 19 nt, Artificial Sequence
  Description of Artificial Sequence: Synthetic oligonucleotide
  Antisense strand to SEQ ID NO: 2186690
aguuucauggccagaaaga

SEQ ID NO: 2186692 - RNA, 19 nt, Artificial Sequence
  Description of Artificial Sequence: Synthetic oligonucleotide
  Sense strand starting at position 641 of SEQ ID NO: 1883338
cuuucuggccaugaaacuu

SEQ ID NO: 2186693 - RNA, 19 nt, Artificial Sequence
  Description of Artificial Sequence: Synthetic oligonucleotide
  Antisense strand to SEQ ID NO: 2186692
aaguuucauggccagaaag

SEQ ID NO: 2186694 - RNA, 19 nt, Artificial Sequence
  Description of Artificial Sequence: Synthetic oligonucleotide
  Sense strand starting at position 784 of SEQ ID NO: 1883338
gaaggucucuguguuaaug

SEQ ID NO: 2186695 - RNA, 19 nt, Artificial Sequence
  Description of Artificial Sequence: Synthetic oligonucleotide
  Antisense strand to SEQ ID NO: 2186694
cauuaacacagagaccuuc

SEQ ID NO: 2186696 - RNA, 19 nt, Artificial Sequence
  Description of Artificial Sequence: Synthetic oligonucleotide
  Sense strand starting at position 842 of SEQ ID NO: 1883338
uacaaugaggcguaucaga

SEQ ID NO: 2186697 - RNA, 19 nt, Artificial Sequence
  Description of Artificial Sequence: Synthetic oligonucleotide
  Antisense strand to SEQ ID NO: 2186696
ucugauacgccucauugua

SEQ ID NO: 2186698 - RNA, 19 nt, Artificial Sequence
  Description of Artificial Sequence: Synthetic oligonucleotide
  Sense strand starting at position 905 of SEQ ID NO: 1883338
ggaauccucuuggccaaga

SEQ ID NO: 2186699 - RNA, 19 nt, Artificial Sequence
  Description of Artificial Sequence: Synthetic oligonucleotide
  Antisense strand to SEQ ID NO: 2186698
ucuuggccaagaggauucc

SEQ ID NO: 2186700 - RNA, 19 nt, Artificial Sequence
  Description of Artificial Sequence: Synthetic oligonucleotide
  Sense strand starting at position 907 of SEQ ID NO: 1883338
aauccucuuggccaagagu

SEQ ID NO: 2186701 - RNA, 19 nt, Artificial Sequence
  Description of Artificial Sequence: Synthetic oligonucleotide
  Antisense strand to SEQ ID NO: 2186700
acucuuggccaagaggauu

SEQ ID NO: 2186702 - RNA, 19 nt, Artificial Sequence
  Description of Artificial Sequence: Synthetic oligonucleotide
  Sense strand starting at position 1075 of SEQ ID NO: 1883338
gggaaugacuguucuaguu

SEQ ID NO: 2186703 - RNA, 19 nt, Artificial Sequence
  Description of Artificial Sequence: Synthetic oligonucleotide
  Antisense strand to SEQ ID NO: 2186702
aacuagaacagucauuccc

SEQ ID NO: 2186704 - RNA, 19 nt, Artificial Sequence
  Description of Artificial Sequence: Synthetic oligonucleotide
  Sense strand starting at position 1201 of SEQ ID NO: 1883338
cuacuaaagugauugucca

SEQ ID NO: 2186705 - RNA, 19 nt, Artificial Sequence
  Description of Artificial Sequence: Synthetic oligonucleotide
  Antisense strand to SEQ ID NO: 2186704
uggacaaucacuuuaguag

SEQ ID NO: 2186706 - RNA, 19 nt, Artificial Sequence
  Description of Artificial Sequence: Synthetic oligonucleotide
  Sense strand starting at position 1820 of SEQ ID NO: 1883338
aggccugaccauuacuuaa

SEQ ID NO: 2186707 - RNA, 19 nt, Artificial Sequence
  Description of Artificial Sequence: Synthetic oligonucleotide
  Antisense strand to SEQ ID NO: 2186706
uuaaguaauggucaggccu

SEQ ID NO: 2186708 - RNA, 19 nt, Artificial Sequence
  Description of Artificial Sequence: Synthetic oligonucleotide
  Sense strand starting at position 1996 of SEQ ID NO: 1883338
ugauguuuaucugcagaag

SEQ ID NO: 2186709 - RNA, 19 nt, Artificial Sequence
  Description of Artificial Sequence: Synthetic oligonucleotide
  Antisense strand to SEQ ID NO: 2186708
cuucugcagauaaacauca

SEQ ID NO: 2186710 - RNA, 19 nt, Artificial Sequence
  Description of Artificial Sequence: Synthetic oligonucleotide
  Sense strand starting at position 1997 of SEQ ID NO: 1883338
gauguuuaucugcagaagc

SEQ ID NO: 2186711 - RNA, 19 nt, Artificial Sequence
  Description of Artificial Sequence: Synthetic oligonucleotide
  Antisense strand to SEQ ID NO: 2186710
gcuucugcagauaaacauc

SEQ ID NO: 2186712 - RNA, 19 nt, Artificial Sequence
  Description of Artificial Sequence: Synthetic oligonucleotide
  Sense strand starting at position 2022 of SEQ ID NO: 1883338
ucuugugaccuccagagua

SEQ ID NO: 2186713 - RNA, 19 nt, Artificial Sequence
  Description of Artificial Sequence: Synthetic oligonucleotide
  Antisense strand to SEQ ID NO: 2186712
uacucuggaggucacaaga

SEQ ID NO: 2186714 - RNA, 19 nt, Artificial Sequence
  Description of Artificial Sequence: Synthetic oligonucleotide
  Sense strand starting at position 2024 of SEQ ID NO: 1883338
uugugaccuccagaguaau

SEQ ID NO: 2186715 - RNA, 19 nt, Artificial Sequence
  Description of Artificial Sequence: Synthetic oligonucleotide
  Antisense strand to SEQ ID NO: 2186714
auuacucuggaggucacaa

SEQ ID NO: 2186716 - RNA, 19 nt, Artificial Sequence
  Description of Artificial Sequence: Synthetic oligonucleotide
  Sense strand starting at position 2377 of SEQ ID NO: 1883338
aggacugaaucugcacaga

SEQ ID NO: 2186717 - RNA, 19 nt, Artificial Sequence
  Description of Artificial Sequence: Synthetic oligonucleotide
  Antisense strand to SEQ ID NO: 2186716
ucugugcagauucaguccu

SEQ ID NO: 2186718 - RNA, 19 nt, Artificial Sequence
  Description of Artificial Sequence: Synthetic oligonucleotide
  Sense strand starting at position 2529 of SEQ ID NO: 1883338
agaucaguggaucguuaag

SEQ ID NO: 2186719 - RNA, 19 nt, Artificial Sequence
  Description of Artificial Sequence: Synthetic oligonucleotide
  Antisense strand to SEQ ID NO: 2186718
cuuaacgauccacugaucu

SEQ ID NO: 2186720 - RNA, 19 nt, Artificial Sequence
  Description of Artificial Sequence: Synthetic oligonucleotide
  Sense strand starting at position 2531 of SEQ ID NO: 1883338
aucaguggaucguuaagac

SEQ ID NO: 2186721 - RNA, 19 nt, Artificial Sequence
  Description of Artificial Sequence: Synthetic oligonucleotide
  Antisense strand to SEQ ID NO: 2186720
gucuuaacgauccacugau

SEQ ID NO: 2186722 - RNA, 19 nt, Artificial Sequence
  Description of Artificial Sequence: Synthetic oligonucleotide
  Sense strand starting at position 2540 of SEQ ID NO: 1883338
ucguuaagacccgaaguca

SEQ ID NO: 2186723 - RNA, 19 nt, Artificial Sequence
  Description of Artificial Sequence: Synthetic oligonucleotide
  Antisense strand to SEQ ID NO: 2186722
ugacuucgggucuuaacga

SEQ ID NO: 2186724 - RNA, 19 nt, Artificial Sequence
  Description of Artificial Sequence: Synthetic oligonucleotide
  Sense strand starting at position 2591 of SEQ ID NO: 1883338
aaacuugccuguuugagac

SEQ ID NO: 2186725 - RNA, 19 nt, Artificial Sequence
  Description of Artificial Sequence: Synthetic oligonucleotide
  Antisense strand to SEQ ID NO: 2186724
gucucaaacaggcaaguuu

SEQ ID NO: 2186726 - RNA, 19 nt, Artificial Sequence
  Description of Artificial Sequence: Synthetic oligonucleotide
  Sense strand starting at position 2597 of SEQ ID NO: 1883338
gccuguuugagacauguaa

SEQ ID NO: 2186727 - RNA, 19 nt, Artificial Sequence
  Description of Artificial Sequence: Synthetic oligonucleotide
  Antisense strand to SEQ ID NO: 2186726
uuacaugucucaaacaggc

SEQ ID NO: 2186728 - RNA, 19 nt, Artificial Sequence
  Description of Artificial Sequence: Synthetic oligonucleotide
  Sense strand starting at position 2681 of SEQ ID NO: 1883338
gagagugccuuaucgggaa

SEQ ID NO: 2186729 - RNA, 19 nt, Artificial Sequence
  Description of Artificial Sequence: Synthetic oligonucleotide
  Antisense strand to SEQ ID NO: 2186728
uucccgauaaggcacucuc

SEQ ID NO: 2186730 - RNA, 19 nt, Artificial Sequence
  Description of Artificial Sequence: Synthetic oligonucleotide
  Sense strand starting at position 2683 of SEQ ID NO: 1883338
gagugccuuaucgggaaga

SEQ ID NO: 2186731 - RNA, 19 nt, Artificial Sequence
  Description of Artificial Sequence: Synthetic oligonucleotide
  Antisense strand to SEQ ID NO: 2186730
ucuucccgauaaggcacuc

SEQ ID NO: 2186732 - RNA, 19 nt, Artificial Sequence
  Description of Artificial Sequence: Synthetic oligonucleotide
  Sense strand starting at position 2685 of SEQ ID NO: 1883338
gugccuuaucgggaagaac

SEQ ID NO: 2186733 - RNA, 19 nt, Artificial Sequence
  Description of Artificial Sequence: Synthetic oligonucleotide
  Antisense strand to SEQ ID NO: 2186732
guucuucccgauaaggcac

SEQ ID NO: 2186734 - RNA, 19 nt, Artificial Sequence
  Description of Artificial Sequence: Synthetic oligonucleotide
  Sense strand starting at position 2829 of SEQ ID NO: 1883338
gcguauuuccgaggaaauu

SEQ ID NO: 2186735 - RNA, 19 nt, Artificial Sequence
  Description of Artificial Sequence: Synthetic oligonucleotide
  Antisense strand to SEQ ID NO: 2186734
aauuuccucggaaauacgc

SEQ ID NO: 2186736 - RNA, 19 nt, Artificial Sequence
  Description of Artificial Sequence: Synthetic oligonucleotide
  Sense strand starting at position 2840 of SEQ ID NO: 1883338
aggaaauuacacugcauug

SEQ ID NO: 2186737 - RNA, 19 nt, Artificial Sequence
  Description of Artificial Sequence: Synthetic oligonucleotide
  Antisense strand to SEQ ID NO: 2186736
caaugcaguguaauuuccu

SEQ ID NO: 2186738 - RNA, 19 nt, Artificial Sequence
  Description of Artificial Sequence: Synthetic oligonucleotide
  Sense strand starting at position 2962 of SEQ ID NO: 1883338
gcaaauagcuauguaacca

SEQ ID NO: 2186739 - RNA, 19 nt, Artificial Sequence
  Description of Artificial Sequence: Synthetic oligonucleotide
  Antisense strand to SEQ ID NO: 2186738
ugguuacauagcuauuugc

SEQ ID NO: 2186740 - RNA, 19 nt, Artificial Sequence
  Description of Artificial Sequence: Synthetic oligonucleotide
  Sense strand starting at position 3042 of SEQ ID NO: 1883338
cccauucccucauugggaa

SEQ ID NO: 2186741 - RNA, 19 nt, Artificial Sequence
  Description of Artificial Sequence: Synthetic oligonucleotide
  Antisense strand to SEQ ID NO: 2186740
uucccaaugagggaauggg

SEQ ID NO: 2186742 - RNA, 19 nt, Artificial Sequence
  Description of Artificial Sequence: Synthetic oligonucleotide
  Sense strand starting at position 3043 of SEQ ID NO: 1883338
ccauucccucauugggaaa

SEQ ID NO: 2186743 - RNA, 19 nt, Artificial Sequence
  Description of Artificial Sequence: Synthetic oligonucleotide
  Antisense strand to SEQ ID NO: 2186742
uuucccaaugagggaaugg

SEQ ID NO: 2186744 - RNA, 19 nt, Artificial Sequence
  Description of Artificial Sequence: Synthetic oligonucleotide
  Sense strand starting at position 3050 of SEQ ID NO: 1883338
cucauugggaaauguguuu

SEQ ID NO: 2186745 - RNA, 19 nt, Artificial Sequence
  Description of Artificial Sequence: Synthetic oligonucleotide
  Antisense strand to SEQ ID NO: 2186744
aaacacauuucccaaugag

SEQ ID NO: 2186746 - RNA, 19 nt, Artificial Sequence
  Description of Artificial Sequence: Synthetic oligonucleotide
  Sense strand starting at position 3330 of SEQ ID NO: 1883338
uuagguaacugauuagucu

SEQ ID NO: 2186747 - RNA, 19 nt, Artificial Sequence
  Description of Artificial Sequence: Synthetic oligonucleotide
  Antisense strand to SEQ ID NO: 2186746
agacuaaucaguuaccuaa

SEQ ID NO: 2186748 - RNA, 19 nt, Artificial Sequence
  Description of Artificial Sequence: Synthetic oligonucleotide
  Sense strand starting at position 3331 of SEQ ID NO: 1883338
uagguaacugauuagucua

SEQ ID NO: 2186749 - RNA, 19 nt, Artificial Sequence
  Description of Artificial Sequence: Synthetic oligonucleotide
  Antisense strand to SEQ ID NO: 2186748
uagacuaaucaguuaccua

SEQ ID NO: 2186750 - RNA, 19 nt, Artificial Sequence
  Description of Artificial Sequence: Synthetic oligonucleotide
  Sense strand starting at position 3334 of SEQ ID NO: 1883338
guaacugauuagucuauca

SEQ ID NO: 2186751 - RNA, 19 nt, Artificial Sequence
  Description of Artificial Sequence: Synthetic oligonucleotide
  Antisense strand to SEQ ID NO: 2186750
ugauagacuaaucaguuac

SEQ ID NO: 2186752 - RNA, 19 nt, Artificial Sequence
  Description of Artificial Sequence: Synthetic oligonucleotide
  Sense strand starting at position 3351 of SEQ ID NO: 1883338
cacaguugucugugacaag

SEQ ID NO: 2186753 - RNA, 19 nt, Artificial Sequence
  Description of Artificial Sequence: Synthetic oligonucleotide
  Antisense strand to SEQ ID NO: 2186752
cuugucacagacaacugug

SEQ ID NO: 2186754 - RNA, 19 nt, Artificial Sequence
  Description of Artificial Sequence: Synthetic oligonucleotide
  Sense strand starting at position 3463 of SEQ ID NO: 1883338
aagggcuucugguccaaca

SEQ ID NO: 2186755 - RNA, 19 nt, Artificial Sequence
  Description of Artificial Sequence: Synthetic oligonucleotide
  Antisense strand to SEQ ID NO: 2186754
uguuggaccagaagcccuu

SEQ ID NO: 2186756 - RNA, 19 nt, Artificial Sequence
  Description of Artificial Sequence: Synthetic oligonucleotide
  Sense strand starting at position 3684 of SEQ ID NO: 1883338
ugucuccauuuagaagaaa

SEQ ID NO: 2186757 - RNA, 19 nt, Artificial Sequence
  Description of Artificial Sequence: Synthetic oligonucleotide
  Antisense strand to SEQ ID NO: 2186756
uuucuucuaaauggagaca

SEQ ID NO: 2186758 - RNA, 19 nt, Artificial Sequence
  Description of Artificial Sequence: Synthetic oligonucleotide
  Sense strand starting at position 92 of SEQ ID NO: 1883339
ugaguucucuugguacaaa

SEQ ID NO: 2186759 - RNA, 19 nt, Artificial Sequence
  Description of Artificial Sequence: Synthetic oligonucleotide
  Antisense strand to SEQ ID NO: 2186758
uuuguaccaagagaacuca

SEQ ID NO: 2186760 - RNA, 19 nt, Artificial Sequence
  Description of Artificial Sequence: Synthetic oligonucleotide
  Sense strand starting at position 137 of SEQ ID NO: 1883339
guuuacugagucuauauaa

SEQ ID NO: 2186761 - RNA, 19 nt, Artificial Sequence
  Description of Artificial Sequence: Synthetic oligonucleotide
  Antisense strand to SEQ ID NO: 2186760
uuauauagacucaguaaac

SEQ ID NO: 2186762 - RNA, 19 nt, Artificial Sequence
  Description of Artificial Sequence: Synthetic oligonucleotide
  Sense strand starting at position 277 of SEQ ID NO: 1883339
ccagguacugggcaucaua

SEQ ID NO: 2186763 - RNA, 19 nt, Artificial Sequence
  Description of Artificial Sequence: Synthetic oligonucleotide
  Antisense strand to SEQ ID NO: 2186762
uaugaugcccaguaccugg

SEQ ID NO: 2186764 - RNA, 19 nt, Artificial Sequence
  Description of Artificial Sequence: Synthetic oligonucleotide
  Sense strand starting at position 444 of SEQ ID NO: 1883339
uccauuaacuugcuuagga

SEQ ID NO: 2186765 - RNA, 19 nt, Artificial Sequence
  Description of Artificial Sequence: Synthetic oligonucleotide
  Antisense strand to SEQ ID NO: 2186764
uccuaagcaaguuaaugga

SEQ ID NO: 2186766 - RNA, 19 nt, Artificial Sequence
  Description of Artificial Sequence: Synthetic oligonucleotide
  Sense strand starting at position 710 of SEQ ID NO: 1883339
uguauauuauguccaaaca

SEQ ID NO: 2186767 - RNA, 19 nt, Artificial Sequence
  Description of Artificial Sequence: Synthetic oligonucleotide
  Antisense strand to SEQ ID NO: 2186766
uguuuggacauaauauaca

SEQ ID NO: 2186768 - RNA, 19 nt, Artificial Sequence
  Description of Artificial Sequence: Synthetic oligonucleotide
  Sense strand starting at position 711 of SEQ ID NO: 1883339
guauauuauguccaaacau

SEQ ID NO: 2186769 - RNA, 19 nt, Artificial Sequence
  Description of Artificial Sequence: Synthetic oligonucleotide
  Antisense strand to SEQ ID NO: 2186768
auguuuggacauaauauac

SEQ ID NO: 2186770 - RNA, 19 nt, Artificial Sequence
  Description of Artificial Sequence: Synthetic oligonucleotide
  Sense strand starting at position 773 of SEQ ID NO: 1883339
guuauagcucaauauaguu

SEQ ID NO: 2186771 - RNA, 19 nt, Artificial Sequence
  Description of Artificial Sequence: Synthetic oligonucleotide
  Antisense strand to SEQ ID NO: 2186770
aacuauauugagcuauaac

SEQ ID NO: 2186772 - RNA, 19 nt, Artificial Sequence
  Description of Artificial Sequence: Synthetic oligonucleotide
  Sense strand starting at position 1136 of SEQ ID NO: 1883339
gcaauaguugcagaaagag

SEQ ID NO: 2186773 - RNA, 19 nt, Artificial Sequence
  Description of Artificial Sequence: Synthetic oligonucleotide
  Antisense strand to SEQ ID NO: 2186772
cucuuucugcaacuauugc

SEQ ID NO: 2186774 - RNA, 19 nt, Artificial Sequence
  Description of Artificial Sequence: Synthetic oligonucleotide
  Sense strand starting at position 1155 of SEQ ID NO: 1883339
aaagaacucuggucagauc

SEQ ID NO: 2186775 - RNA, 19 nt, Artificial Sequence
  Description of Artificial Sequence: Synthetic oligonucleotide
  Antisense strand to SEQ ID NO: 2186774
gaucugaccagaguucuuu

SEQ ID NO: 2186776 - RNA, 19 nt, Artificial Sequence
  Description of Artificial Sequence: Synthetic oligonucleotide
  Sense strand starting at position 1258 of SEQ ID NO: 1883339
gggccagucgaguaauaga

SEQ ID NO: 2186777 - RNA, 19 nt, Artificial Sequence
  Description of Artificial Sequence: Synthetic oligonucleotide
  Antisense strand to SEQ ID NO: 2186776
ucuauuacucgacuggccc

SEQ ID NO: 2186778 - RNA, 19 nt, Artificial Sequence
  Description of Artificial Sequence: Synthetic oligonucleotide
  Sense strand starting at position 1294 of SEQ ID NO: 1883339
ugaggaagccuaugugaaa

SEQ ID NO: 2186779 - RNA, 19 nt, Artificial Sequence
  Description of Artificial Sequence: Synthetic oligonucleotide
  Antisense strand to SEQ ID NO: 2186778
uuucacauaggcuuccuca

SEQ ID NO: 2186780 - RNA, 19 nt, Artificial Sequence
  Description of Artificial Sequence: Synthetic oligonucleotide
  Sense strand starting at position 1295 of SEQ ID NO: 1883339
gaggaagccuaugugaaag

SEQ ID NO: 2186781 - RNA, 19 nt, Artificial Sequence
  Description of Artificial Sequence: Synthetic oligonucleotide
  Antisense strand to SEQ ID NO: 2186780
cuuucacauaggcuuccuc

SEQ ID NO: 2186782 - RNA, 19 nt, Artificial Sequence
  Description of Artificial Sequence: Synthetic oligonucleotide
  Sense strand starting at position 1365 of SEQ ID NO: 1883339
aaugguacucugugggaac

SEQ ID NO: 2186783 - RNA, 19 nt, Artificial Sequence
  Description of Artificial Sequence: Synthetic oligonucleotide
  Antisense strand to SEQ ID NO: 2186782
guucccacagaguaccauu

SEQ ID NO: 2186784 - RNA, 19 nt, Artificial Sequence
  Description of Artificial Sequence: Synthetic oligonucleotide
  Sense strand starting at position 1367 of SEQ ID NO: 1883339
ugguacucugugggaacau

SEQ ID NO: 2186785 - RNA, 19 nt, Artificial Sequence
  Description of Artificial Sequence: Synthetic oligonucleotide
  Antisense strand to SEQ ID NO: 2186784
auguucccacagaguacca

SEQ ID NO: 2186786 - RNA, 19 nt, Artificial Sequence
  Description of Artificial Sequence: Synthetic oligonucleotide
  Sense strand starting at position 1578 of SEQ ID NO: 1883339
ugagaauacugccuuauac

SEQ ID NO: 2186787 - RNA, 19 nt, Artificial Sequence
  Description of Artificial Sequence: Synthetic oligonucleotide
  Antisense strand to SEQ ID NO: 2186786
guauaaggcaguauucuca

SEQ ID NO: 2186788 - RNA, 19 nt, Artificial Sequence
  Description of Artificial Sequence: Synthetic oligonucleotide
  Sense strand starting at position 1672 of SEQ ID NO: 1883339
aggagaagaugugcuauca

SEQ ID NO: 2186789 - RNA, 19 nt, Artificial Sequence
  Description of Artificial Sequence: Synthetic oligonucleotide
  Antisense strand to SEQ ID NO: 2186788
ugauagcacaucuucuccu

SEQ ID NO: 2186790 - RNA, 19 nt, Artificial Sequence
  Description of Artificial Sequence: Synthetic oligonucleotide
  Sense strand starting at position 1685 of SEQ ID NO: 1883339
cuaucagcccaaugagaaa

SEQ ID NO: 2186791 - RNA, 19 nt, Artificial Sequence
  Description of Artificial Sequence: Synthetic oligonucleotide
  Antisense strand to SEQ ID NO: 2186790
uuucucauugggcugauag

SEQ ID NO: 2186792 - RNA, 19 nt, Artificial Sequence
  Description of Artificial Sequence: Synthetic oligonucleotide
  Sense strand starting at position 1717 of SEQ ID NO: 1883339
ccaguugaacucugagaga

SEQ ID NO: 2186793 - RNA, 19 nt, Artificial Sequence
  Description of Artificial Sequence: Synthetic oligonucleotide
  Antisense strand to SEQ ID NO: 2186792
ucucucagaguucaacugg

SEQ ID NO: 2186794 - RNA, 19 nt, Artificial Sequence
  Description of Artificial Sequence: Synthetic oligonucleotide
  Sense strand starting at position 1803 of SEQ ID NO: 1883339
uguguuucuggucaagaua

SEQ ID NO: 2186795 - RNA, 19 nt, Artificial Sequence
  Description of Artificial Sequence: Synthetic oligonucleotide
  Antisense strand to SEQ ID NO: 2186794
uaucuugaccagaaacaca

SEQ ID NO: 2186796 - RNA, 19 nt, Artificial Sequence
  Description of Artificial Sequence: Synthetic oligonucleotide
  Sense strand starting at position 2080 of SEQ ID NO: 1883339
gucccacugaguugagaug

SEQ ID NO: 2186797 - RNA, 19 nt, Artificial Sequence
  Description of Artificial Sequence: Synthetic oligonucleotide
  Antisense strand to SEQ ID NO: 2186796
caucucaacucagugggac

SEQ ID NO: 2186798 - RNA, 19 nt, Artificial Sequence
  Description of Artificial Sequence: Synthetic oligonucleotide
  Sense strand starting at position 2191 of SEQ ID NO: 1883339
ucuacagaguccuccuuga

SEQ ID NO: 2186799 - RNA, 19 nt, Artificial Sequence
  Description of Artificial Sequence: Synthetic oligonucleotide
  Antisense strand to SEQ ID NO: 2186798
ucaaggaggacucuguaga

SEQ ID NO: 2186800 - RNA, 19 nt, Artificial Sequence
  Description of Artificial Sequence: Synthetic oligonucleotide
  Sense strand starting at position 2247 of SEQ ID NO: 1883339
gacuuuaugagaugagggu

SEQ ID NO: 2186801 - RNA, 19 nt, Artificial Sequence
  Description of Artificial Sequence: Synthetic oligonucleotide
  Antisense strand to SEQ ID NO: 2186800
acccucaucucauaaaguc

SEQ ID NO: 2186802 - RNA, 19 nt, Artificial Sequence
  Description of Artificial Sequence: Synthetic oligonucleotide
  Sense strand starting at position 2490 of SEQ ID NO: 1883339
auuguauaccacugugaaa

SEQ ID NO: 2186803 - RNA, 19 nt, Artificial Sequence
  Description of Artificial Sequence: Synthetic oligonucleotide
  Antisense strand to SEQ ID NO: 2186802
uuucacagugguauacaau

SEQ ID NO: 2186804 - RNA, 19 nt, Artificial Sequence
  Description of Artificial Sequence: Synthetic oligonucleotide
  Sense strand starting at position 2633 of SEQ ID NO: 1883339
cugguuuauccucauuaug

SEQ ID NO: 2186805 - RNA, 19 nt, Artificial Sequence
  Description of Artificial Sequence: Synthetic oligonucleotide
  Antisense strand to SEQ ID NO: 2186804
cauaaugaggauaaaccag

SEQ ID NO: 2186806 - RNA, 19 nt, Artificial Sequence
  Description of Artificial Sequence: Synthetic oligonucleotide
  Sense strand starting at position 2636 of SEQ ID NO: 1883339
guuuauccucauuauguaa

SEQ ID NO: 2186807 - RNA, 19 nt, Artificial Sequence
  Description of Artificial Sequence: Synthetic oligonucleotide
  Antisense strand to SEQ ID NO: 2186806
uuacauaaugaggauaaac

SEQ ID NO: 2186808 - RNA, 19 nt, Artificial Sequence
  Description of Artificial Sequence: Synthetic oligonucleotide
  Sense strand starting at position 2650 of SEQ ID NO: 1883339
uguaaaguaguuugcauuu

SEQ ID NO: 2186809 - RNA, 19 nt, Artificial Sequence
  Description of Artificial Sequence: Synthetic oligonucleotide
  Antisense strand to SEQ ID NO: 2186808
aaaugcaaacuacuuuaca

SEQ ID NO: 2186810 - RNA, 19 nt, Artificial Sequence
  Description of Artificial Sequence: Synthetic oligonucleotide
  Sense strand starting at position 2798 of SEQ ID NO: 1883339
ucucuaguacugcagagaa

SEQ ID NO: 2186811 - RNA, 19 nt, Artificial Sequence
  Description of Artificial Sequence: Synthetic oligonucleotide
  Antisense strand to SEQ ID NO: 2186810
uucucugcaguacuagaga

SEQ ID NO: 2186812 - RNA, 19 nt, Artificial Sequence
  Description of Artificial Sequence: Synthetic oligonucleotide
  Sense strand starting at position 2800 of SEQ ID NO: 1883339
ucuaguacugcagagaaug

SEQ ID NO: 2186813 - RNA, 19 nt, Artificial Sequence
  Description of Artificial Sequence: Synthetic oligonucleotide
  Antisense strand to SEQ ID NO: 2186812
cauucucugcaguacuaga

SEQ ID NO: 2186814 - RNA, 19 nt, Artificial Sequence
  Description of Artificial Sequence: Synthetic oligonucleotide
  Sense strand starting at position 2854 of SEQ ID NO: 1883339
ugagugugcgggucuguaa

SEQ ID NO: 2186815 - RNA, 19 nt, Artificial Sequence
  Description of Artificial Sequence: Synthetic oligonucleotide
  Antisense strand to SEQ ID NO: 2186814
uuacagacccgcacacuca

SEQ ID NO: 2186816 - RNA, 19 nt, Artificial Sequence
  Description of Artificial Sequence: Synthetic oligonucleotide
  Sense strand starting at position 2899 of SEQ ID NO: 1883339
ggagcauucuacuuccuca

SEQ ID NO: 2186817 - RNA, 19 nt, Artificial Sequence
  Description of Artificial Sequence: Synthetic oligonucleotide
  Antisense strand to SEQ ID NO: 2186816
ugaggaaguagaaugcucc

SEQ ID NO: 2186818 - RNA, 19 nt, Artificial Sequence
  Description of Artificial Sequence: Synthetic oligonucleotide
  Sense strand starting at position 2933 of SEQ ID NO: 1883339
gauauaacaugugcagaaa

SEQ ID NO: 2186819 - RNA, 19 nt, Artificial Sequence
  Description of Artificial Sequence: Synthetic oligonucleotide
  Antisense strand to SEQ ID NO: 2186818
uuucugcacauguuauauc

SEQ ID NO: 2186820 - RNA, 19 nt, Artificial Sequence
  Description of Artificial Sequence: Synthetic oligonucleotide
  Sense strand starting at position 2985 of SEQ ID NO: 1883339
cguggcuauccagaaacaa

SEQ ID NO: 2186821 - RNA, 19 nt, Artificial Sequence
  Description of Artificial Sequence: Synthetic oligonucleotide
  Antisense strand to SEQ ID NO: 2186820
uuguuucuggauagccacg

SEQ ID NO: 2186822 - RNA, 19 nt, Artificial Sequence
  Description of Artificial Sequence: Synthetic oligonucleotide
  Sense strand starting at position 3147 of SEQ ID NO: 1883339
uggaacacuccagguaaau

SEQ ID NO: 2186823 - RNA, 19 nt, Artificial Sequence
  Description of Artificial Sequence: Synthetic oligonucleotide
  Antisense strand to SEQ ID NO: 2186822
auuuaccuggaguguucca

SEQ ID NO: 2186824 - RNA, 19 nt, Artificial Sequence
  Description of Artificial Sequence: Synthetic oligonucleotide
  Sense strand starting at position 3159 of SEQ ID NO: 1883339
gguaaauaauaguuacuca

SEQ ID NO: 2186825 - RNA, 19 nt, Artificial Sequence
  Description of Artificial Sequence: Synthetic oligonucleotide
  Antisense strand to SEQ ID NO: 2186824
ugaguaacuauuauuuacc

SEQ ID NO: 2186826 - RNA, 19 nt, Artificial Sequence
  Description of Artificial Sequence: Synthetic oligonucleotide
  Sense strand starting at position 3210 of SEQ ID NO: 1883339
gcugucucugacuguauuu

SEQ ID NO: 2186827 - RNA, 19 nt, Artificial Sequence
  Description of Artificial Sequence: Synthetic oligonucleotide
  Antisense strand to SEQ ID NO: 2186826
aaauacagucagagacagc

SEQ ID NO: 2186828 - RNA, 19 nt, Artificial Sequence
  Description of Artificial Sequence: Synthetic oligonucleotide
  Sense strand starting at position 3673 of SEQ ID NO: 1883339
acugguuaagaaugauucu

SEQ ID NO: 2186829 - RNA, 19 nt, Artificial Sequence
  Description of Artificial Sequence: Synthetic oligonucleotide
  Antisense strand to SEQ ID NO: 2186828
agaaucauucuuaaccagu

SEQ ID NO: 2186830 - RNA, 19 nt, Artificial Sequence
  Description of Artificial Sequence: Synthetic oligonucleotide
  Sense strand starting at position 3682 of SEQ ID NO: 1883339
gaaugauucugaguuugca

SEQ ID NO: 2186831 - RNA, 19 nt, Artificial Sequence
  Description of Artificial Sequence: Synthetic oligonucleotide
  Antisense strand to SEQ ID NO: 2186830
ugcaaacucagaaucauuc

SEQ ID NO: 2186832 - RNA, 19 nt, Artificial Sequence
  Description of Artificial Sequence: Synthetic oligonucleotide
  Sense strand starting at position 3686 of SEQ ID NO: 1883339
gauucugaguuugcacaga

SEQ ID NO: 2186833 - RNA, 19 nt, Artificial Sequence
  Description of Artificial Sequence: Synthetic oligonucleotide
  Antisense strand to SEQ ID NO: 2186832
ucugugcaaacucagaauc

SEQ ID NO: 2186834 - RNA, 19 nt, Artificial Sequence
  Description of Artificial Sequence: Synthetic oligonucleotide
  Sense strand starting at position 3691 of SEQ ID NO: 1883339
ugaguuugcacagagauug

SEQ ID NO: 2186835 - RNA, 19 nt, Artificial Sequence
  Description of Artificial Sequence: Synthetic oligonucleotide
  Antisense strand to SEQ ID NO: 2186834
caaucucugugcaaacuca

SEQ ID NO: 2186836 - RNA, 19 nt, Artificial Sequence
  Description of Artificial Sequence: Synthetic oligonucleotide
  Sense strand starting at position 3733 of SEQ ID NO: 1883339
cugucauaggcaggagaua

SEQ ID NO: 2186837 - RNA, 19 nt, Artificial Sequence
  Description of Artificial Sequence: Synthetic oligonucleotide
  Antisense strand to SEQ ID NO: 2186836
uaucuccugccuaugacag

SEQ ID NO: 2186838 - RNA, 19 nt, Artificial Sequence
  Description of Artificial Sequence: Synthetic oligonucleotide
  Sense strand starting at position 13 of SEQ ID NO: 1883340
accaaaguguugguuauag

SEQ ID NO: 2186839 - RNA, 19 nt, Artificial Sequence
  Description of Artificial Sequence: Synthetic oligonucleotide
  Antisense strand to SEQ ID NO: 2186838
cuauaaccaacacuuuggu

SEQ ID NO: 2186840 - RNA, 19 nt, Artificial Sequence
  Description of Artificial Sequence: Synthetic oligonucleotide
  Sense strand starting at position 15 of SEQ ID NO: 1883340
caaaguguugguuauagua

SEQ ID NO: 2186841 - RNA, 19 nt, Artificial Sequence
  Description of Artificial Sequence: Synthetic oligonucleotide
  Antisense strand to SEQ ID NO: 2186840
uacuauaaccaacacuuug

SEQ ID NO: 2186842 - RNA, 19 nt, Artificial Sequence
  Description of Artificial Sequence: Synthetic oligonucleotide
  Sense strand starting at position 44 of SEQ ID NO: 1883340
gaguuuccugugcagaucu

SEQ ID NO: 2186843 - RNA, 19 nt, Artificial Sequence
  Description of Artificial Sequence: Synthetic oligonucleotide
  Antisense strand to SEQ ID NO: 2186842
agaucugcacaggaaacuc

SEQ ID NO: 2186844 - RNA, 19 nt, Artificial Sequence
  Description of Artificial Sequence: Synthetic oligonucleotide
  Sense strand starting at position 46 of SEQ ID NO: 1883340
guuuccugugcagaucuga

SEQ ID NO: 2186845 - RNA, 19 nt, Artificial Sequence
  Description of Artificial Sequence: Synthetic oligonucleotide
  Antisense strand to SEQ ID NO: 2186844
ucagaucugcacaggaaac

SEQ ID NO: 2186846 - RNA, 19 nt, Artificial Sequence
  Description of Artificial Sequence: Synthetic oligonucleotide
  Sense strand starting at position 99 of SEQ ID NO: 1883340
gaauaauggcaaugucagu

SEQ ID NO: 2186847 - RNA, 19 nt, Artificial Sequence
  Description of Artificial Sequence: Synthetic oligonucleotide
  Antisense strand to SEQ ID NO: 2186846
acugacauugccauuauuc

SEQ ID NO: 2186848 - RNA, 19 nt, Artificial Sequence
  Description of Artificial Sequence: Synthetic oligonucleotide
  Sense strand starting at position 121 of SEQ ID NO: 1883340
gaauaaggguugcuacuaa

SEQ ID NO: 2186849 - RNA, 19 nt, Artificial Sequence
  Description of Artificial Sequence: Synthetic oligonucleotide
  Antisense strand to SEQ ID NO: 2186848
uuaguagcaacccuuauuc

SEQ ID NO: 2186850 - RNA, 19 nt, Artificial Sequence
  Description of Artificial Sequence: Synthetic oligonucleotide
  Sense strand starting at position 155 of SEQ ID NO: 1883340
gaggucauuugauauggau

SEQ ID NO: 2186851 - RNA, 19 nt, Artificial Sequence
  Description of Artificial Sequence: Synthetic oligonucleotide
  Antisense strand to SEQ ID NO: 2186850
auccauaucaaaugaccuc

SEQ ID NO: 2186852 - RNA, 19 nt, Artificial Sequence
  Description of Artificial Sequence: Synthetic oligonucleotide
  Sense strand starting at position 481 of SEQ ID NO: 1883340
gauguuggauucuuacuac

SEQ ID NO: 2186853 - RNA, 19 nt, Artificial Sequence
  Description of Artificial Sequence: Synthetic oligonucleotide
  Antisense strand to SEQ ID NO: 2186852
guaguaagaauccaacauc

SEQ ID NO: 2186854 - RNA, 19 nt, Artificial Sequence
  Description of Artificial Sequence: Synthetic oligonucleotide
  Sense strand starting at position 484 of SEQ ID NO: 1883340
guuggauucuuacuacucu

SEQ ID NO: 2186855 - RNA, 19 nt, Artificial Sequence
  Description of Artificial Sequence: Synthetic oligonucleotide
  Antisense strand to SEQ ID NO: 2186854
agaguaguaagaauccaac

SEQ ID NO: 2186856 - RNA, 19 nt, Artificial Sequence
  Description of Artificial Sequence: Synthetic oligonucleotide
  Sense strand starting at position 684 of SEQ ID NO: 1883340
uuuagauucuuuguagaga

SEQ ID NO: 2186857 - RNA, 19 nt, Artificial Sequence
  Description of Artificial Sequence: Synthetic oligonucleotide
  Antisense strand to SEQ ID NO: 2186856
ucucuacaaagaaucuaaa

SEQ ID NO: 2186858 - RNA, 19 nt, Artificial Sequence
  Description of Artificial Sequence: Synthetic oligonucleotide
  Sense strand starting at position 829 of SEQ ID NO: 1883340
agaagucuaguauguacuu

SEQ ID NO: 2186859 - RNA, 19 nt, Artificial Sequence
  Description of Artificial Sequence: Synthetic oligonucleotide
  Antisense strand to SEQ ID NO: 2186858
aaguacauacuagacuucu

SEQ ID NO: 2186860 - RNA, 19 nt, Artificial Sequence
  Description of Artificial Sequence: Synthetic oligonucleotide
  Sense strand starting at position 905 of SEQ ID NO: 1883340
gggucucuauguccacaaa

SEQ ID NO: 2186861 - RNA, 19 nt, Artificial Sequence
  Description of Artificial Sequence: Synthetic oligonucleotide
  Antisense strand to SEQ ID NO: 2186860
uuuguggacauagagaccc

SEQ ID NO: 2186862 - RNA, 19 nt, Artificial Sequence
  Description of Artificial Sequence: Synthetic oligonucleotide
  Sense strand starting at position 908 of SEQ ID NO: 1883340
ucucuauguccacaaagua

SEQ ID NO: 2186863 - RNA, 19 nt, Artificial Sequence
  Description of Artificial Sequence: Synthetic oligonucleotide
  Antisense strand to SEQ ID NO: 2186862
uacuuuguggacauagaga

SEQ ID NO: 2186864 - RNA, 19 nt, Artificial Sequence
  Description of Artificial Sequence: Synthetic oligonucleotide
  Sense strand starting at position 1093 of SEQ ID NO: 1883340
ccuggacaugucgauaaua

SEQ ID NO: 2186865 - RNA, 19 nt, Artificial Sequence
  Description of Artificial Sequence: Synthetic oligonucleotide
  Antisense strand to SEQ ID NO: 2186864
uauuaucgacauguccagg

SEQ ID NO: 2186866 - RNA, 19 nt, Artificial Sequence
  Description of Artificial Sequence: Synthetic oligonucleotide
  Sense strand starting at position 1095 of SEQ ID NO: 1883340
uggacaugucgauaauauc

SEQ ID NO: 2186867 - RNA, 19 nt, Artificial Sequence
  Description of Artificial Sequence: Synthetic oligonucleotide
  Antisense strand to SEQ ID NO: 2186866
gauauuaucgacaugucca

SEQ ID NO: 2186868 - RNA, 19 nt, Artificial Sequence
  Description of Artificial Sequence: Synthetic oligonucleotide
  Sense strand starting at position 1157 of SEQ ID NO: 1883340
cuuagcaagcuauauaugu

SEQ ID NO: 2186869 - RNA, 19 nt, Artificial Sequence
  Description of Artificial Sequence: Synthetic oligonucleotide
  Antisense strand to SEQ ID NO: 2186868
acauauauagcuugcuaag

SEQ ID NO: 2186870 - RNA, 19 nt, Artificial Sequence
  Description of Artificial Sequence: Synthetic oligonucleotide
  Sense strand starting at position 1233 of SEQ ID NO: 1883340
gaaugaggcaugcagaguu

SEQ ID NO: 2186871 - RNA, 19 nt, Artificial Sequence
  Description of Artificial Sequence: Synthetic oligonucleotide
  Antisense strand to SEQ ID NO: 2186870
aacucugcaugccucauuc

SEQ ID NO: 2186872 - RNA, 19 nt, Artificial Sequence
  Description of Artificial Sequence: Synthetic oligonucleotide
  Sense strand starting at position 1544 of SEQ ID NO: 1883340
agucuccucuaguuuauuu

SEQ ID NO: 2186873 - RNA, 19 nt, Artificial Sequence
  Description of Artificial Sequence: Synthetic oligonucleotide
  Antisense strand to SEQ ID NO: 2186872
aaauaaacuagaggagacu

SEQ ID NO: 2186874 - RNA, 19 nt, Artificial Sequence
  Description of Artificial Sequence: Synthetic oligonucleotide
  Sense strand starting at position 1552 of SEQ ID NO: 1883340
cuaguuuauuuagagaaca

SEQ ID NO: 2186875 - RNA, 19 nt, Artificial Sequence
  Description of Artificial Sequence: Synthetic oligonucleotide
  Antisense strand to SEQ ID NO: 2186874
uguucucuaaauaaacuag

SEQ ID NO: 2186876 - RNA, 19 nt, Artificial Sequence
  Description of Artificial Sequence: Synthetic oligonucleotide
  Sense strand starting at position 1608 of SEQ ID NO: 1883340
ggaccaguuuggguauaua

SEQ ID NO: 2186877 - RNA, 19 nt, Artificial Sequence
  Description of Artificial Sequence: Synthetic oligonucleotide
  Antisense strand to SEQ ID NO: 2186876
uauauacccaaacuggucc

SEQ ID NO: 2186878 - RNA, 19 nt, Artificial Sequence
  Description of Artificial Sequence: Synthetic oligonucleotide
  Sense strand starting at position 1672 of SEQ ID NO: 1883340
gaaccugacuggcuaguaa

SEQ ID NO: 2186879 - RNA, 19 nt, Artificial Sequence
  Description of Artificial Sequence: Synthetic oligonucleotide
  Antisense strand to SEQ ID NO: 2186878
uuacuagccagucagguuc

SEQ ID NO: 2186880 - RNA, 19 nt, Artificial Sequence
  Description of Artificial Sequence: Synthetic oligonucleotide
  Sense strand starting at position 1687 of SEQ ID NO: 1883340
guaagaaguuauguguaau

SEQ ID NO: 2186881 - RNA, 19 nt, Artificial Sequence
  Description of Artificial Sequence: Synthetic oligonucleotide
  Antisense strand to SEQ ID NO: 2186880
auuacacauaacuucuuac

SEQ ID NO: 2186882 - RNA, 19 nt, Artificial Sequence
  Description of Artificial Sequence: Synthetic oligonucleotide
  Sense strand starting at position 1714 of SEQ ID NO: 1883340
gucaacuuauuggugaaca

SEQ ID NO: 2186883 - RNA, 19 nt, Artificial Sequence
  Description of Artificial Sequence: Synthetic oligonucleotide
  Antisense strand to SEQ ID NO: 2186882
uguucaccaauaaguugac

SEQ ID NO: 2186884 - RNA, 19 nt, Artificial Sequence
  Description of Artificial Sequence: Synthetic oligonucleotide
  Sense strand starting at position 1737 of SEQ ID NO: 1883340
ggaagauaagugcaaugcu

SEQ ID NO: 2186885 - RNA, 19 nt, Artificial Sequence
  Description of Artificial Sequence: Synthetic oligonucleotide
  Antisense strand to SEQ ID NO: 2186884
agcauugcacuuaucuucc

SEQ ID NO: 2186886 - RNA, 19 nt, Artificial Sequence
  Description of Artificial Sequence: Synthetic oligonucleotide
  Sense strand starting at position 1740 of SEQ ID NO: 1883340
agauaagugcaaugcucua

SEQ ID NO: 2186887 - RNA, 19 nt, Artificial Sequence
  Description of Artificial Sequence: Synthetic oligonucleotide
  Antisense strand to SEQ ID NO: 2186886
uagagcauugcacuuaucu

SEQ ID NO: 2186888 - RNA, 19 nt, Artificial Sequence
  Description of Artificial Sequence: Synthetic oligonucleotide
  Sense strand starting at position 1806 of SEQ ID NO: 1883340
gauguauggauguaaguca

SEQ ID NO: 2186889 - RNA, 19 nt, Artificial Sequence
  Description of Artificial Sequence: Synthetic oligonucleotide
  Antisense strand to SEQ ID NO: 2186888
ugacuuacauccauacauc

SEQ ID NO: 2186890 - RNA, 19 nt, Artificial Sequence
  Description of Artificial Sequence: Synthetic oligonucleotide
  Sense strand starting at position 1834 of SEQ ID NO: 1883340
ccucgaagauaucuuguuu

SEQ ID NO: 2186891 - RNA, 19 nt, Artificial Sequence
  Description of Artificial Sequence: Synthetic oligonucleotide
  Antisense strand to SEQ ID NO: 2186890
aaacaagauaucuucgagg

SEQ ID NO: 2186892 - RNA, 19 nt, Artificial Sequence
  Description of Artificial Sequence: Synthetic oligonucleotide
  Sense strand starting at position 1939 of SEQ ID NO: 1883340
gggaaugacuuggaugaaa

SEQ ID NO: 2186893 - RNA, 19 nt, Artificial Sequence
  Description of Artificial Sequence: Synthetic oligonucleotide
  Antisense strand to SEQ ID NO: 2186892
uuucauccaagucauuccc

SEQ ID NO: 2186894 - RNA, 19 nt, Artificial Sequence
  Description of Artificial Sequence: Synthetic oligonucleotide
  Sense strand starting at position 2052 of SEQ ID NO: 1883340
acaucuacgcuacagagau

SEQ ID NO: 2186895 - RNA, 19 nt, Artificial Sequence
  Description of Artificial Sequence: Synthetic oligonucleotide
  Antisense strand to SEQ ID NO: 2186894
aucucuguagcguagaugu

SEQ ID NO: 2186896 - RNA, 19 nt, Artificial Sequence
  Description of Artificial Sequence: Synthetic oligonucleotide
  Sense strand starting at position 2136 of SEQ ID NO: 1883340
aaacaugaugggcguuaau

SEQ ID NO: 2186897 - RNA, 19 nt, Artificial Sequence
  Description of Artificial Sequence: Synthetic oligonucleotide
  Antisense strand to SEQ ID NO: 2186896
auuaacgcccaucauguuu

SEQ ID NO: 2186898 - RNA, 19 nt, Artificial Sequence
  Description of Artificial Sequence: Synthetic oligonucleotide
  Sense strand starting at position 3358 of SEQ ID NO: 1883340
ccuguucgucuggacugaa

SEQ ID NO: 2186899 - RNA, 19 nt, Artificial Sequence
  Description of Artificial Sequence: Synthetic oligonucleotide
  Antisense strand to SEQ ID NO: 2186898
uucaguccagacgaacagg

SEQ ID NO: 2186900 - RNA, 19 nt, Artificial Sequence
  Description of Artificial Sequence: Synthetic oligonucleotide
  Sense strand starting at position 3768 of SEQ ID NO: 1883340
gucggcuccguguugugau

SEQ ID NO: 2186901 - RNA, 19 nt, Artificial Sequence
  Description of Artificial Sequence: Synthetic oligonucleotide
  Antisense strand to SEQ ID NO: 2186900
aucacaacacggagccgac

SEQ ID NO: 2186902 - RNA, 19 nt, Artificial Sequence
  Description of Artificial Sequence: Synthetic oligonucleotide
  Sense strand starting at position 3775 of SEQ ID NO: 1883340
ccguguugugaugacagga

SEQ ID NO: 2186903 - RNA, 19 nt, Artificial Sequence
  Description of Artificial Sequence: Synthetic oligonucleotide
  Antisense strand to SEQ ID NO: 2186902
uccugucaucacaacacgg

SEQ ID NO: 2186904 - RNA, 19 nt, Artificial Sequence
  Description of Artificial Sequence: Synthetic oligonucleotide
  Sense strand starting at position 3818 of SEQ ID NO: 1883340
gacgaauugguagguauuc

SEQ ID NO: 2186905 - RNA, 19 nt, Artificial Sequence
  Description of Artificial Sequence: Synthetic oligonucleotide
  Antisense strand to SEQ ID NO: 2186904
gaauaccuaccaauucguc

SEQ ID NO: 2186906 - RNA, 19 nt, Artificial Sequence
  Description of Artificial Sequence: Synthetic oligonucleotide
  Sense strand starting at position 3819 of SEQ ID NO: 1883340
acgaauugguagguauuca

SEQ ID NO: 2186907 - RNA, 19 nt, Artificial Sequence
  Description of Artificial Sequence: Synthetic oligonucleotide
  Antisense strand to SEQ ID NO: 2186906
ugaauaccuaccaauucgu

SEQ ID NO: 2186908 - RNA, 19 nt, Artificial Sequence
  Description of Artificial Sequence: Synthetic oligonucleotide
  Sense strand starting at position 3864 of SEQ ID NO: 1883340
gaaggauggugacagauuu

SEQ ID NO: 2186909 - RNA, 19 nt, Artificial Sequence
  Description of Artificial Sequence: Synthetic oligonucleotide
  Antisense strand to SEQ ID NO: 2186908
aaaucugucaccauccuuc

SEQ ID NO: 2186910 - RNA, 19 nt, Artificial Sequence
  Description of Artificial Sequence: Synthetic oligonucleotide
  Sense strand starting at position 3954 of SEQ ID NO: 1883340
gcgucuuggauugagauag

SEQ ID NO: 2186911 - RNA, 19 nt, Artificial Sequence
  Description of Artificial Sequence: Synthetic oligonucleotide
  Antisense strand to SEQ ID NO: 2186910
cuaucucaauccaagacgc

SEQ ID NO: 2186912 - RNA, 19 nt, Artificial Sequence
  Description of Artificial Sequence: Synthetic oligonucleotide
  Sense strand starting at position 3958 of SEQ ID NO: 1883340
cuuggauugagauagcuuu

SEQ ID NO: 2186913 - RNA, 19 nt, Artificial Sequence
  Description of Artificial Sequence: Synthetic oligonucleotide
  Antisense strand to SEQ ID NO: 2186912
aaagcuaucucaauccaag

SEQ ID NO: 2186914 - RNA, 19 nt, Artificial Sequence
  Description of Artificial Sequence: Synthetic oligonucleotide
  Sense strand starting at position 3964 of SEQ ID NO: 1883340
uugagauagcuuugauguc

SEQ ID NO: 2186915 - RNA, 19 nt, Artificial Sequence
  Description of Artificial Sequence: Synthetic oligonucleotide
  Antisense strand to SEQ ID NO: 2186914
gacaucaaagcuaucucaa

SEQ ID NO: 2186916 - RNA, 19 nt, Artificial Sequence
  Description of Artificial Sequence: Synthetic oligonucleotide
  Sense strand starting at position 3980 of SEQ ID NO: 1883340
gucuuugugagugcaguuu

SEQ ID NO: 2186917 - RNA, 19 nt, Artificial Sequence
  Description of Artificial Sequence: Synthetic oligonucleotide
  Antisense strand to SEQ ID NO: 2186916
aaacugcacucacaaagac

SEQ ID NO: 2186918 - RNA, 19 nt, Artificial Sequence
  Description of Artificial Sequence: Synthetic oligonucleotide
  Sense strand starting at position 33 of SEQ ID NO: 1883341
aauaaugaguuguugaaga

SEQ ID NO: 2186919 - RNA, 19 nt, Artificial Sequence
  Description of Artificial Sequence: Synthetic oligonucleotide
  Antisense strand to SEQ ID NO: 2186918
ucuucaacaacucauuauu

SEQ ID NO: 2186920 - RNA, 19 nt, Artificial Sequence
  Description of Artificial Sequence: Synthetic oligonucleotide
  Sense strand starting at position 237 of SEQ ID NO: 1883341
uagucuaaugcuggagaug

SEQ ID NO: 2186921 - RNA, 19 nt, Artificial Sequence
  Description of Artificial Sequence: Synthetic oligonucleotide
  Antisense strand to SEQ ID NO: 2186920
caucuccagcauuagacua

SEQ ID NO: 2186922 - RNA, 19 nt, Artificial Sequence
  Description of Artificial Sequence: Synthetic oligonucleotide
  Sense strand starting at position 238 of SEQ ID NO: 1883341
agucuaaugcuggagaugu

SEQ ID NO: 2186923 - RNA, 19 nt, Artificial Sequence
  Description of Artificial Sequence: Synthetic oligonucleotide
  Antisense strand to SEQ ID NO: 2186922
acaucuccagcauuagacu

SEQ ID NO: 2186924 - RNA, 19 nt, Artificial Sequence
  Description of Artificial Sequence: Synthetic oligonucleotide
  Sense strand starting at position 240 of SEQ ID NO: 1883341
ucuaaugcuggagauguuu

SEQ ID NO: 2186925 - RNA, 19 nt, Artificial Sequence
  Description of Artificial Sequence: Synthetic oligonucleotide
  Antisense strand to SEQ ID NO: 2186924
aaacaucuccagcauuaga

SEQ ID NO: 2186926 - RNA, 19 nt, Artificial Sequence
  Description of Artificial Sequence: Synthetic oligonucleotide
  Sense strand starting at position 246 of SEQ ID NO: 1883341
gcuggagauguuuggacuu

SEQ ID NO: 2186927 - RNA, 19 nt, Artificial Sequence
  Description of Artificial Sequence: Synthetic oligonucleotide
  Antisense strand to SEQ ID NO: 2186926
aaguccaaacaucuccagc

SEQ ID NO: 2186928 - RNA, 19 nt, Artificial Sequence
  Description of Artificial Sequence: Synthetic oligonucleotide
  Sense strand starting at position 268 of SEQ ID NO: 1883341
agcgaauacuuuccaggga

SEQ ID NO: 2186929 - RNA, 19 nt, Artificial Sequence
  Description of Artificial Sequence: Synthetic oligonucleotide
  Antisense strand to SEQ ID NO: 2186928
ucccuggaaaguauucgcu

SEQ ID NO: 2186930 - RNA, 19 nt, Artificial Sequence
  Description of Artificial Sequence: Synthetic oligonucleotide
  Sense strand starting at position 395 of SEQ ID NO: 1883341
gagugaugauagcugagau

SEQ ID NO: 2186931 - RNA, 19 nt, Artificial Sequence
  Description of Artificial Sequence: Synthetic oligonucleotide
  Antisense strand to SEQ ID NO: 2186930
aucucagcuaucaucacuc

SEQ ID NO: 2186932 - RNA, 19 nt, Artificial Sequence
  Description of Artificial Sequence: Synthetic oligonucleotide
  Sense strand starting at position 396 of SEQ ID NO: 1883341
agugaugauagcugagauu

SEQ ID NO: 2186933 - RNA, 19 nt, Artificial Sequence
  Description of Artificial Sequence: Synthetic oligonucleotide
  Antisense strand to SEQ ID NO: 2186932
aaucucagcuaucaucacu

SEQ ID NO: 2186934 - RNA, 19 nt, Artificial Sequence
  Description of Artificial Sequence: Synthetic oligonucleotide
  Sense strand starting at position 431 of SEQ ID NO: 1883341
agaaguguauuugacauaa

SEQ ID NO: 2186935 - RNA, 19 nt, Artificial Sequence
  Description of Artificial Sequence: Synthetic oligonucleotide
  Antisense strand to SEQ ID NO: 2186934
uuaugucaaauacacuucu

SEQ ID NO: 2186936 - RNA, 19 nt, Artificial Sequence
  Description of Artificial Sequence: Synthetic oligonucleotide
  Sense strand starting at position 433 of SEQ ID NO: 1883341
aaguguauuugacauaaga

SEQ ID NO: 2186937 - RNA, 19 nt, Artificial Sequence
  Description of Artificial Sequence: Synthetic oligonucleotide
  Antisense strand to SEQ ID NO: 2186936
ucuuaugucaaauacacuu

SEQ ID NO: 2186938 - RNA, 19 nt, Artificial Sequence
  Description of Artificial Sequence: Synthetic oligonucleotide
  Sense strand starting at position 569 of SEQ ID NO: 1883341
acuguuggucccuaaacuu

SEQ ID NO: 2186939 - RNA, 19 nt, Artificial Sequence
  Description of Artificial Sequence: Synthetic oligonucleotide
  Antisense strand to SEQ ID NO: 2186938
aaguuuagggaccaacagu

SEQ ID NO: 2186940 - RNA, 19 nt, Artificial Sequence
  Description of Artificial Sequence: Synthetic oligonucleotide
  Sense strand starting at position 615 of SEQ ID NO: 1883341
gaggcaaugcuuuaagacu

SEQ ID NO: 2186941 - RNA, 19 nt, Artificial Sequence
  Description of Artificial Sequence: Synthetic oligonucleotide
  Antisense strand to SEQ ID NO: 2186940
agucuuaaagcauugccuc

SEQ ID NO: 2186942 - RNA, 19 nt, Artificial Sequence
  Description of Artificial Sequence: Synthetic oligonucleotide
  Sense strand starting at position 641 of SEQ ID NO: 1883341
ccaagucagcuccagaaau

SEQ ID NO: 2186943 - RNA, 19 nt, Artificial Sequence
  Description of Artificial Sequence: Synthetic oligonucleotide
  Antisense strand to SEQ ID NO: 2186942
auuucuggagcugacuugg

SEQ ID NO: 2186944 - RNA, 19 nt, Artificial Sequence
  Description of Artificial Sequence: Synthetic oligonucleotide
  Sense strand starting at position 732 of SEQ ID NO: 1883341
acuauauugccuuauguuc

SEQ ID NO: 2186945 - RNA, 19 nt, Artificial Sequence
  Description of Artificial Sequence: Synthetic oligonucleotide
  Antisense strand to SEQ ID NO: 2186944
gaacauaaggcaauauagu

SEQ ID NO: 2186946 - RNA, 19 nt, Artificial Sequence
  Description of Artificial Sequence: Synthetic oligonucleotide
  Sense strand starting at position 863 of SEQ ID NO: 1883341
guugauauauggcuacaga

SEQ ID NO: 2186947 - RNA, 19 nt, Artificial Sequence
  Description of Artificial Sequence: Synthetic oligonucleotide
  Antisense strand to SEQ ID NO: 2186946
ucuguagccauauaucaac

SEQ ID NO: 2186948 - RNA, 19 nt, Artificial Sequence
  Description of Artificial Sequence: Synthetic oligonucleotide
  Sense strand starting at position 913 of SEQ ID NO: 1883341
aguaaacuguaacucaaga

SEQ ID NO: 2186949 - RNA, 19 nt, Artificial Sequence
  Description of Artificial Sequence: Synthetic oligonucleotide
  Antisense strand to SEQ ID NO: 2186948
ucuugaguuacaguuuacu

SEQ ID NO: 2186950 - RNA, 19 nt, Artificial Sequence
  Description of Artificial Sequence: Synthetic oligonucleotide
  Sense strand starting at position 1316 of SEQ ID NO: 1883341
aucaaagucuuuccuggau

SEQ ID NO: 2186951 - RNA, 19 nt, Artificial Sequence
  Description of Artificial Sequence: Synthetic oligonucleotide
  Antisense strand to SEQ ID NO: 2186950
auccaggaaagacuuugau

SEQ ID NO: 2186952 - RNA, 19 nt, Artificial Sequence
  Description of Artificial Sequence: Synthetic oligonucleotide
  Sense strand starting at position 1353 of SEQ ID NO: 1883341
agaaucuccucgucuaaac

SEQ ID NO: 2186953 - RNA, 19 nt, Artificial Sequence
  Description of Artificial Sequence: Synthetic oligonucleotide
  Antisense strand to SEQ ID NO: 2186952
guuuagacgaggagauucu

SEQ ID NO: 2186954 - RNA, 19 nt, Artificial Sequence
  Description of Artificial Sequence: Synthetic oligonucleotide
  Sense strand starting at position 1511 of SEQ ID NO: 1883341
ucugcuucugaggauacau

SEQ ID NO: 2186955 - RNA, 19 nt, Artificial Sequence
  Description of Artificial Sequence: Synthetic oligonucleotide
  Antisense strand to SEQ ID NO: 2186954
auguauccucagaagcaga

SEQ ID NO: 2186956 - RNA, 19 nt, Artificial Sequence
  Description of Artificial Sequence: Synthetic oligonucleotide
  Sense strand starting at position 2057 of SEQ ID NO: 1883341
auacacauugcagguuaaa

SEQ ID NO: 2186957 - RNA, 19 nt, Artificial Sequence
  Description of Artificial Sequence: Synthetic oligonucleotide
  Antisense strand to SEQ ID NO: 2186956
uuuaaccugcaauguguau

SEQ ID NO: 2186958 - RNA, 19 nt, Artificial Sequence
  Description of Artificial Sequence: Synthetic oligonucleotide
  Sense strand starting at position 2101 of SEQ ID NO: 1883341
ugcuuuguccuuuaaagaa

SEQ ID NO: 2186959 - RNA, 19 nt, Artificial Sequence
  Description of Artificial Sequence: Synthetic oligonucleotide
  Antisense strand to SEQ ID NO: 2186958
uucuuuaaaggacaaagca

SEQ ID NO: 2186960 - RNA, 19 nt, Artificial Sequence
  Description of Artificial Sequence: Synthetic oligonucleotide
  Sense strand starting at position 2161 of SEQ ID NO: 1883341
gaaugacaacgcugagaaa

SEQ ID NO: 2186961 - RNA, 19 nt, Artificial Sequence
  Description of Artificial Sequence: Synthetic oligonucleotide
  Antisense strand to SEQ ID NO: 2186960
uuucucagcguugucauuc

SEQ ID NO: 2186962 - RNA, 19 nt, Artificial Sequence
  Description of Artificial Sequence: Synthetic oligonucleotide
  Sense strand starting at position 2183 of SEQ ID NO: 1883341
guauuacauggguaccaua

SEQ ID NO: 2186963 - RNA, 19 nt, Artificial Sequence
  Description of Artificial Sequence: Synthetic oligonucleotide
  Antisense strand to SEQ ID NO: 2186962
uaugguacccauguaauac

SEQ ID NO: 2186964 - RNA, 19 nt, Artificial Sequence
  Description of Artificial Sequence: Synthetic oligonucleotide
  Sense strand starting at position 2221 of SEQ ID NO: 1883341
uagugaaacgcuugggaaa

SEQ ID NO: 2186965 - RNA, 19 nt, Artificial Sequence
  Description of Artificial Sequence: Synthetic oligonucleotide
  Antisense strand to SEQ ID NO: 2186964
uuucccaagcguuucacua

SEQ ID NO: 2186966 - RNA, 19 nt, Artificial Sequence
  Description of Artificial Sequence: Synthetic oligonucleotide
  Sense strand starting at position 2435 of SEQ ID NO: 1883341
gccuauaucaaaggucgaa

SEQ ID NO: 2186967 - RNA, 19 nt, Artificial Sequence
  Description of Artificial Sequence: Synthetic oligonucleotide
  Antisense strand to SEQ ID NO: 2186966
uucgaccuuugauauaggc

SEQ ID NO: 2186968 - RNA, 19 nt, Artificial Sequence
  Description of Artificial Sequence: Synthetic oligonucleotide
  Sense strand starting at position 2438 of SEQ ID NO: 1883341
uauaucaaaggucgaaauu

SEQ ID NO: 2186969 - RNA, 19 nt, Artificial Sequence
  Description of Artificial Sequence: Synthetic oligonucleotide
  Antisense strand to SEQ ID NO: 2186968
aauuucgaccuuugauaua

SEQ ID NO: 2186970 - RNA, 19 nt, Artificial Sequence
  Description of Artificial Sequence: Synthetic oligonucleotide
  Sense strand starting at position 2490 of SEQ ID NO: 1883341
aucaguuucuaugugauua

SEQ ID NO: 2186971 - RNA, 19 nt, Artificial Sequence
  Description of Artificial Sequence: Synthetic oligonucleotide
  Antisense strand to SEQ ID NO: 2186970
uaaucacauagaaacugau

SEQ ID NO: 2186972 - RNA, 19 nt, Artificial Sequence
  Description of Artificial Sequence: Synthetic oligonucleotide
  Sense strand starting at position 2732 of SEQ ID NO: 1883341
gacacagaguugguguuaa

SEQ ID NO: 2186973 - RNA, 19 nt, Artificial Sequence
  Description of Artificial Sequence: Synthetic oligonucleotide
  Antisense strand to SEQ ID NO: 2186972
uuaacaccaacucuguguc

SEQ ID NO: 2186974 - RNA, 19 nt, Artificial Sequence
  Description of Artificial Sequence: Synthetic oligonucleotide
  Sense strand starting at position 2742 of SEQ ID NO: 1883341
ugguguuaacaacauuaua

SEQ ID NO: 2186975 - RNA, 19 nt, Artificial Sequence
  Description of Artificial Sequence: Synthetic oligonucleotide
  Antisense strand to SEQ ID NO: 2186974
uauaauguuguuaacacca

SEQ ID NO: 2186976 - RNA, 19 nt, Artificial Sequence
  Description of Artificial Sequence: Synthetic oligonucleotide
  Sense strand starting at position 3074 of SEQ ID NO: 1883341
auagucaucguagauauga

SEQ ID NO: 2186977 - RNA, 19 nt, Artificial Sequence
  Description of Artificial Sequence: Synthetic oligonucleotide
  Antisense strand to SEQ ID NO: 2186976
ucauaucuacgaugacuau

SEQ ID NO: 2186978 - RNA, 19 nt, Artificial Sequence
  Description of Artificial Sequence: Synthetic oligonucleotide
  Sense strand starting at position 3076 of SEQ ID NO: 1883341
agucaucguagauaugauu

SEQ ID NO: 2186979 - RNA, 19 nt, Artificial Sequence
  Description of Artificial Sequence: Synthetic oligonucleotide
  Antisense strand to SEQ ID NO: 2186978
aaucauaucuacgaugacu

SEQ ID NO: 2186980 - RNA, 19 nt, Artificial Sequence
  Description of Artificial Sequence: Synthetic oligonucleotide
  Sense strand starting at position 3082 of SEQ ID NO: 1883341
cguagauaugauuauugca

SEQ ID NO: 2186981 - RNA, 19 nt, Artificial Sequence
  Description of Artificial Sequence: Synthetic oligonucleotide
  Antisense strand to SEQ ID NO: 2186980
ugcaauaaucauaucuacg

SEQ ID NO: 2186982 - RNA, 19 nt, Artificial Sequence
  Description of Artificial Sequence: Synthetic oligonucleotide
  Sense strand starting at position 3136 of SEQ ID NO: 1883341
uuugguguuaaacaguaga

SEQ ID NO: 2186983 - RNA, 19 nt, Artificial Sequence
  Description of Artificial Sequence: Synthetic oligonucleotide
  Antisense strand to SEQ ID NO: 2186982
ucuacuguuuaacaccaaa

SEQ ID NO: 2186984 - RNA, 19 nt, Artificial Sequence
  Description of Artificial Sequence: Synthetic oligonucleotide
  Sense strand starting at position 3171 of SEQ ID NO: 1883341
ugguccuucugauuucuuu

SEQ ID NO: 2186985 - RNA, 19 nt, Artificial Sequence
  Description of Artificial Sequence: Synthetic oligonucleotide
  Antisense strand to SEQ ID NO: 2186984
aaagaaaucagaaggacca

SEQ ID NO: 2186986 - RNA, 19 nt, Artificial Sequence
  Description of Artificial Sequence: Synthetic oligonucleotide
  Sense strand starting at position 3225 of SEQ ID NO: 1883341
aggaauuaguuugcuauua

SEQ ID NO: 2186987 - RNA, 19 nt, Artificial Sequence
  Description of Artificial Sequence: Synthetic oligonucleotide
  Antisense strand to SEQ ID NO: 2186986
uaauagcaaacuaauuccu

SEQ ID NO: 2186988 - RNA, 19 nt, Artificial Sequence
  Description of Artificial Sequence: Synthetic oligonucleotide
  Sense strand starting at position 3226 of SEQ ID NO: 1883341
ggaauuaguuugcuauuau

SEQ ID NO: 2186989 - RNA, 19 nt, Artificial Sequence
  Description of Artificial Sequence: Synthetic oligonucleotide
  Antisense strand to SEQ ID NO: 2186988
auaauagcaaacuaauucc

SEQ ID NO: 2186990 - RNA, 19 nt, Artificial Sequence
  Description of Artificial Sequence: Synthetic oligonucleotide
  Sense strand starting at position 3382 of SEQ ID NO: 1883341
agagauaugucagcauguc

SEQ ID NO: 2186991 - RNA, 19 nt, Artificial Sequence
  Description of Artificial Sequence: Synthetic oligonucleotide
  Antisense strand to SEQ ID NO: 2186990
gacaugcugacauaucucu

SEQ ID NO: 2186992 - RNA, 19 nt, Artificial Sequence
  Description of Artificial Sequence: Synthetic oligonucleotide
  Sense strand starting at position 3437 of SEQ ID NO: 1883341
auggccucucuugggaaau

SEQ ID NO: 2186993 - RNA, 19 nt, Artificial Sequence
  Description of Artificial Sequence: Synthetic oligonucleotide
  Antisense strand to SEQ ID NO: 2186992
auuucccaagagaggccau

SEQ ID NO: 2186994 - RNA, 19 nt, Artificial Sequence
  Description of Artificial Sequence: Synthetic oligonucleotide
  Sense strand starting at position 3849 of SEQ ID NO: 1883341
auucuugaucuggguauca

SEQ ID NO: 2186995 - RNA, 19 nt, Artificial Sequence
  Description of Artificial Sequence: Synthetic oligonucleotide
  Antisense strand to SEQ ID NO: 2186994
ugauacccagaucaagaau

SEQ ID NO: 2186996 - RNA, 19 nt, Artificial Sequence
  Description of Artificial Sequence: Synthetic oligonucleotide
  Sense strand starting at position 3965 of SEQ ID NO: 1883341
uccauacuugcaggauaga

SEQ ID NO: 2186997 - RNA, 19 nt, Artificial Sequence
  Description of Artificial Sequence: Synthetic oligonucleotide
  Antisense strand to SEQ ID NO: 2186996
ucuauccugcaaguaugga

SEQ ID NO: 2186998 - RNA, 19 nt, Artificial Sequence
  Description of Artificial Sequence: Synthetic oligonucleotide
  Sense strand starting at position 223 of SEQ ID NO: 1883342
agccucuaucuguacggaa

SEQ ID NO: 2186999 - RNA, 19 nt, Artificial Sequence
  Description of Artificial Sequence: Synthetic oligonucleotide
  Antisense strand to SEQ ID NO: 2186998
uuccguacagauagaggcu

SEQ ID NO: 2187000 - RNA, 19 nt, Artificial Sequence
  Description of Artificial Sequence: Synthetic oligonucleotide
  Sense strand starting at position 227 of SEQ ID NO: 1883342
ucuaucuguacggaaugua

SEQ ID NO: 2187001 - RNA, 19 nt, Artificial Sequence
  Description of Artificial Sequence: Synthetic oligonucleotide
  Antisense strand to SEQ ID NO: 2187000
uacauuccguacagauaga

SEQ ID NO: 2187002 - RNA, 19 nt, Artificial Sequence
  Description of Artificial Sequence: Synthetic oligonucleotide
  Sense strand starting at position 252 of SEQ ID NO: 1883342
accacugcucuagagaacu

SEQ ID NO: 2187003 - RNA, 19 nt, Artificial Sequence
  Description of Artificial Sequence: Synthetic oligonucleotide
  Antisense strand to SEQ ID NO: 2187002
aguucucuagagcaguggu

SEQ ID NO: 2187004 - RNA, 19 nt, Artificial Sequence
  Description of Artificial Sequence: Synthetic oligonucleotide
  Sense strand starting at position 265 of SEQ ID NO: 1883342
agaacucaugauugcaaag

SEQ ID NO: 2187005 - RNA, 19 nt, Artificial Sequence
  Description of Artificial Sequence: Synthetic oligonucleotide
  Antisense strand to SEQ ID NO: 2187004
cuuugcaaucaugaguucu

SEQ ID NO: 2187006 - RNA, 19 nt, Artificial Sequence
  Description of Artificial Sequence: Synthetic oligonucleotide
  Sense strand starting at position 478 of SEQ ID NO: 1883342
cgaaaucugucucuuaaau

SEQ ID NO: 2187007 - RNA, 19 nt, Artificial Sequence
  Description of Artificial Sequence: Synthetic oligonucleotide
  Antisense strand to SEQ ID NO: 2187006
auuuaagagacagauuucg

SEQ ID NO: 2187008 - RNA, 19 nt, Artificial Sequence
  Description of Artificial Sequence: Synthetic oligonucleotide
  Sense strand starting at position 532 of SEQ ID NO: 1883342
ucaugaagcucucugagau

SEQ ID NO: 2187009 - RNA, 19 nt, Artificial Sequence
  Description of Artificial Sequence: Synthetic oligonucleotide
  Antisense strand to SEQ ID NO: 2187008
aucucagagagcuucauga

SEQ ID NO: 2187010 - RNA, 19 nt, Artificial Sequence
  Description of Artificial Sequence: Synthetic oligonucleotide
  Sense strand starting at position 582 of SEQ ID NO: 1883342
auacaauagucaguaagac

SEQ ID NO: 2187011 - RNA, 19 nt, Artificial Sequence
  Description of Artificial Sequence: Synthetic oligonucleotide
  Antisense strand to SEQ ID NO: 2187010
gucuuacugacuauuguau

SEQ ID NO: 2187012 - RNA, 19 nt, Artificial Sequence
  Description of Artificial Sequence: Synthetic oligonucleotide
  Sense strand starting at position 693 of SEQ ID NO: 1883342
ugacgucccagagaguauu

SEQ ID NO: 2187013 - RNA, 19 nt, Artificial Sequence
  Description of Artificial Sequence: Synthetic oligonucleotide
  Antisense strand to SEQ ID NO: 2187012
aauacucucugggacguca

SEQ ID NO: 2187014 - RNA, 19 nt, Artificial Sequence
  Description of Artificial Sequence: Synthetic oligonucleotide
  Sense strand starting at position 696 of SEQ ID NO: 1883342
cgucccagagaguauuauu

SEQ ID NO: 2187015 - RNA, 19 nt, Artificial Sequence
  Description of Artificial Sequence: Synthetic oligonucleotide
  Antisense strand to SEQ ID NO: 2187014
aauaauacucucugggacg

SEQ ID NO: 2187016 - RNA, 19 nt, Artificial Sequence
  Description of Artificial Sequence: Synthetic oligonucleotide
  Sense strand starting at position 802 of SEQ ID NO: 1883342
gacuuagcagugcaauauu

SEQ ID NO: 2187017 - RNA, 19 nt, Artificial Sequence
  Description of Artificial Sequence: Synthetic oligonucleotide
  Antisense strand to SEQ ID NO: 2187016
aauauugcacugcuaaguc

SEQ ID NO: 2187018 - RNA, 19 nt, Artificial Sequence
  Description of Artificial Sequence: Synthetic oligonucleotide
  Sense strand starting at position 867 of SEQ ID NO: 1883342
ugaguucugguucagaggu

SEQ ID NO: 2187019 - RNA, 19 nt, Artificial Sequence
  Description of Artificial Sequence: Synthetic oligonucleotide
  Antisense strand to SEQ ID NO: 2187018
accucugaaccagaacuca

SEQ ID NO: 2187020 - RNA, 19 nt, Artificial Sequence
  Description of Artificial Sequence: Synthetic oligonucleotide
  Sense strand starting at position 905 of SEQ ID NO: 1883342
gucuuuauggaucaauggu

SEQ ID NO: 2187021 - RNA, 19 nt, Artificial Sequence
  Description of Artificial Sequence: Synthetic oligonucleotide
  Antisense strand to SEQ ID NO: 2187020
accauugauccauaaagac

SEQ ID NO: 2187022 - RNA, 19 nt, Artificial Sequence
  Description of Artificial Sequence: Synthetic oligonucleotide
  Sense strand starting at position 950 of SEQ ID NO: 1883342
ggaugauaguugcuacaaa

SEQ ID NO: 2187023 - RNA, 19 nt, Artificial Sequence
  Description of Artificial Sequence: Synthetic oligonucleotide
  Antisense strand to SEQ ID NO: 2187022
uuuguagcaacuaucaucc

SEQ ID NO: 2187024 - RNA, 19 nt, Artificial Sequence
  Description of Artificial Sequence: Synthetic oligonucleotide
  Sense strand starting at position 983 of SEQ ID NO: 1883342
guaguuaggguguagauga

SEQ ID NO: 2187025 - RNA, 19 nt, Artificial Sequence
  Description of Artificial Sequence: Synthetic oligonucleotide
  Antisense strand to SEQ ID NO: 2187024
ucaucuacacccuaacuac

SEQ ID NO: 2187026 - RNA, 19 nt, Artificial Sequence
  Description of Artificial Sequence: Synthetic oligonucleotide
  Sense strand starting at position 1109 of SEQ ID NO: 1883342
auauaaagccaguauguca

SEQ ID NO: 2187027 - RNA, 19 nt, Artificial Sequence
  Description of Artificial Sequence: Synthetic oligonucleotide
  Antisense strand to SEQ ID NO: 2187026
ugacauacuggcuuuauau

SEQ ID NO: 2187028 - RNA, 19 nt, Artificial Sequence
  Description of Artificial Sequence: Synthetic oligonucleotide
  Sense strand starting at position 1270 of SEQ ID NO: 1883342
auagaagaguagucucaga

SEQ ID NO: 2187029 - RNA, 19 nt, Artificial Sequence
  Description of Artificial Sequence: Synthetic oligonucleotide
  Antisense strand to SEQ ID NO: 2187028
ucugagacuacucuucuau

SEQ ID NO: 2187030 - RNA, 19 nt, Artificial Sequence
  Description of Artificial Sequence: Synthetic oligonucleotide
  Sense strand starting at position 1376 of SEQ ID NO: 1883342
ggucgugcucugucucaua

SEQ ID NO: 2187031 - RNA, 19 nt, Artificial Sequence
  Description of Artificial Sequence: Synthetic oligonucleotide
  Antisense strand to SEQ ID NO: 2187030
uaugagacagagcacgacc

SEQ ID NO: 2187032 - RNA, 19 nt, Artificial Sequence
  Description of Artificial Sequence: Synthetic oligonucleotide
  Sense strand starting at position 1632 of SEQ ID NO: 1883342
gcacucaaagaugguuaaa

SEQ ID NO: 2187033 - RNA, 19 nt, Artificial Sequence
  Description of Artificial Sequence: Synthetic oligonucleotide
  Antisense strand to SEQ ID NO: 2187032
uuuaaccaucuuugagugc

SEQ ID NO: 2187034 - RNA, 19 nt, Artificial Sequence
  Description of Artificial Sequence: Synthetic oligonucleotide
  Sense strand starting at position 1874 of SEQ ID NO: 1883342
aaugacaggcucugguaaa

SEQ ID NO: 2187035 - RNA, 19 nt, Artificial Sequence
  Description of Artificial Sequence: Synthetic oligonucleotide
  Antisense strand to SEQ ID NO: 2187034
uuuaccagagccugucauu

SEQ ID NO: 2187036 - RNA, 19 nt, Artificial Sequence
  Description of Artificial Sequence: Synthetic oligonucleotide
  Sense strand starting at position 1907 of SEQ ID NO: 1883342
aauuauaagcgucagugau

SEQ ID NO: 2187037 - RNA, 19 nt, Artificial Sequence
  Description of Artificial Sequence: Synthetic oligonucleotide
  Antisense strand to SEQ ID NO: 2187036
aucacugacgcuuauaauu

SEQ ID NO: 2187038 - RNA, 19 nt, Artificial Sequence
  Description of Artificial Sequence: Synthetic oligonucleotide
  Sense strand starting at position 1911 of SEQ ID NO: 1883342
auaagcgucagugaugaaa

SEQ ID NO: 2187039 - RNA, 19 nt, Artificial Sequence
  Description of Artificial Sequence: Synthetic oligonucleotide
  Antisense strand to SEQ ID NO: 2187038
uuucaucacugacgcuuau

SEQ ID NO: 2187040 - RNA, 19 nt, Artificial Sequence
  Description of Artificial Sequence: Synthetic oligonucleotide
  Sense strand starting at position 2020 of SEQ ID NO: 1883342
caaggaacuuuacugugau

SEQ ID NO: 2187041 - RNA, 19 nt, Artificial Sequence
  Description of Artificial Sequence: Synthetic oligonucleotide
  Antisense strand to SEQ ID NO: 2187040
aucacaguaaaguuccuug

SEQ ID NO: 2187042 - RNA, 19 nt, Artificial Sequence
  Description of Artificial Sequence: Synthetic oligonucleotide
  Sense strand starting at position 2023 of SEQ ID NO: 1883342
ggaacuuuacugugauaau

SEQ ID NO: 2187043 - RNA, 19 nt, Artificial Sequence
  Description of Artificial Sequence: Synthetic oligonucleotide
  Antisense strand to SEQ ID NO: 2187042
auuaucacaguaaaguucc

SEQ ID NO: 2187044 - RNA, 19 nt, Artificial Sequence
  Description of Artificial Sequence: Synthetic oligonucleotide
  Sense strand starting at position 2083 of SEQ ID NO: 1883342
gaauuauuauaagaagagg

SEQ ID NO: 2187045 - RNA, 19 nt, Artificial Sequence
  Description of Artificial Sequence: Synthetic oligonucleotide
  Antisense strand to SEQ ID NO: 2187044
ccucuucuuauaauaauuc

SEQ ID NO: 2187046 - RNA, 19 nt, Artificial Sequence
  Description of Artificial Sequence: Synthetic oligonucleotide
  Sense strand starting at position 2193 of SEQ ID NO: 1883342
uagacauuccgaggaccaa

SEQ ID NO: 2187047 - RNA, 19 nt, Artificial Sequence
  Description of Artificial Sequence: Synthetic oligonucleotide
  Antisense strand to SEQ ID NO: 2187046
uugguccucggaaugucua

SEQ ID NO: 2187048 - RNA, 19 nt, Artificial Sequence
  Description of Artificial Sequence: Synthetic oligonucleotide
  Sense strand starting at position 2582 of SEQ ID NO: 1883342
agccaaauggcauagugau

SEQ ID NO: 2187049 - RNA, 19 nt, Artificial Sequence
  Description of Artificial Sequence: Synthetic oligonucleotide
  Antisense strand to SEQ ID NO: 2187048
aucacuaugccauuuggcu

SEQ ID NO: 2187050 - RNA, 19 nt, Artificial Sequence
  Description of Artificial Sequence: Synthetic oligonucleotide
  Sense strand starting at position 2595 of SEQ ID NO: 1883342
agugauaaagcucaaaguc

SEQ ID NO: 2187051 - RNA, 19 nt, Artificial Sequence
  Description of Artificial Sequence: Synthetic oligonucleotide
  Antisense strand to SEQ ID NO: 2187050
gacuuugagcuuuaucacu

SEQ ID NO: 2187052 - RNA, 19 nt, Artificial Sequence
  Description of Artificial Sequence: Synthetic oligonucleotide
  Sense strand starting at position 2735 of SEQ ID NO: 1883342
augaguuaauguuugugaa

SEQ ID NO: 2187053 - RNA, 19 nt, Artificial Sequence
  Description of Artificial Sequence: Synthetic oligonucleotide
  Antisense strand to SEQ ID NO: 2187052
uucacaaacauuaacucau

SEQ ID NO: 2187054 - RNA, 19 nt, Artificial Sequence
  Description of Artificial Sequence: Synthetic oligonucleotide
  Sense strand starting at position 3094 of SEQ ID NO: 1883342
agguuaucuuaggcacaag

SEQ ID NO: 2187055 - RNA, 19 nt, Artificial Sequence
  Description of Artificial Sequence: Synthetic oligonucleotide
  Antisense strand to SEQ ID NO: 2187054
cuugugccuaagauaaccu

SEQ ID NO: 2187056 - RNA, 19 nt, Artificial Sequence
  Description of Artificial Sequence: Synthetic oligonucleotide
  Sense strand starting at position 3095 of SEQ ID NO: 1883342
gguuaucuuaggcacaaga

SEQ ID NO: 2187057 - RNA, 19 nt, Artificial Sequence
  Description of Artificial Sequence: Synthetic oligonucleotide
  Antisense strand to SEQ ID NO: 2187056
ucuugugccuaagauaacc

SEQ ID NO: 2187058 - RNA, 19 nt, Artificial Sequence
  Description of Artificial Sequence: Synthetic oligonucleotide
  Sense strand starting at position 3250 of SEQ ID NO: 1883342
cuuagauggguuggaaguu

SEQ ID NO: 2187059 - RNA, 19 nt, Artificial Sequence
  Description of Artificial Sequence: Synthetic oligonucleotide
  Antisense strand to SEQ ID NO: 2187058
aacuuccaacccaucuaag

SEQ ID NO: 2187060 - RNA, 19 nt, Artificial Sequence
  Description of Artificial Sequence: Synthetic oligonucleotide
  Sense strand starting at position 3362 of SEQ ID NO: 1883342
uuguuaagccugcagaaau

SEQ ID NO: 2187061 - RNA, 19 nt, Artificial Sequence
  Description of Artificial Sequence: Synthetic oligonucleotide
  Antisense strand to SEQ ID NO: 2187060
auuucugcaggcuuaacaa

SEQ ID NO: 2187062 - RNA, 19 nt, Artificial Sequence
  Description of Artificial Sequence: Synthetic oligonucleotide
  Sense strand starting at position 3382 of SEQ ID NO: 1883342
aagagaaucuauguucuag

SEQ ID NO: 2187063 - RNA, 19 nt, Artificial Sequence
  Description of Artificial Sequence: Synthetic oligonucleotide
  Antisense strand to SEQ ID NO: 2187062
cuagaacauagauucucuu

SEQ ID NO: 2187064 - RNA, 19 nt, Artificial Sequence
  Description of Artificial Sequence: Synthetic oligonucleotide
  Sense strand starting at position 3384 of SEQ ID NO: 1883342
gagaaucuauguucuaguc

SEQ ID NO: 2187065 - RNA, 19 nt, Artificial Sequence
  Description of Artificial Sequence: Synthetic oligonucleotide
  Antisense strand to SEQ ID NO: 2187064
gacuagaacauagauucuc

SEQ ID NO: 2187066 - RNA, 19 nt, Artificial Sequence
  Description of Artificial Sequence: Synthetic oligonucleotide
  Sense strand starting at position 3469 of SEQ ID NO: 1883342
uucucaucacagugguaag

SEQ ID NO: 2187067 - RNA, 19 nt, Artificial Sequence
  Description of Artificial Sequence: Synthetic oligonucleotide
  Antisense strand to SEQ ID NO: 2187066
cuuaccacugugaugagaa

SEQ ID NO: 2187068 - RNA, 19 nt, Artificial Sequence
  Description of Artificial Sequence: Synthetic oligonucleotide
  Sense strand starting at position 3537 of SEQ ID NO: 1883342
uguaccaaucccuggaaca

SEQ ID NO: 2187069 - RNA, 19 nt, Artificial Sequence
  Description of Artificial Sequence: Synthetic oligonucleotide
  Antisense strand to SEQ ID NO: 2187068
uguuccagggauugguaca

SEQ ID NO: 2187070 - RNA, 19 nt, Artificial Sequence
  Description of Artificial Sequence: Synthetic oligonucleotide
  Sense strand starting at position 3719 of SEQ ID NO: 1883342
gcacguuucuaauuuguaa

SEQ ID NO: 2187071 - RNA, 19 nt, Artificial Sequence
  Description of Artificial Sequence: Synthetic oligonucleotide
  Antisense strand to SEQ ID NO: 2187070
uuacaaauuagaaacgugc

SEQ ID NO: 2187072 - RNA, 19 nt, Artificial Sequence
  Description of Artificial Sequence: Synthetic oligonucleotide
  Sense strand starting at position 3722 of SEQ ID NO: 1883342
cguuucuaauuuguaacau

SEQ ID NO: 2187073 - RNA, 19 nt, Artificial Sequence
  Description of Artificial Sequence: Synthetic oligonucleotide
  Antisense strand to SEQ ID NO: 2187072
auguuacaaauuagaaacg

SEQ ID NO: 2187074 - RNA, 19 nt, Artificial Sequence
  Description of Artificial Sequence: Synthetic oligonucleotide
  Sense strand starting at position 3807 of SEQ ID NO: 1883342
aguucucauccauauugag

SEQ ID NO: 2187075 - RNA, 19 nt, Artificial Sequence
  Description of Artificial Sequence: Synthetic oligonucleotide
  Antisense strand to SEQ ID NO: 2187074
cucaauauggaugagaacu

SEQ ID NO: 2187076 - RNA, 19 nt, Artificial Sequence
  Description of Artificial Sequence: Synthetic oligonucleotide
  Sense strand starting at position 3943 of SEQ ID NO: 1883342
uguaucuuggcucaaauac

SEQ ID NO: 2187077 - RNA, 19 nt, Artificial Sequence
  Description of Artificial Sequence: Synthetic oligonucleotide
  Antisense strand to SEQ ID NO: 2187076
guauuugagccaagauaca

SEQ ID NO: 2187078 - RNA, 19 nt, Artificial Sequence
  Description of Artificial Sequence: Synthetic oligonucleotide
  Sense strand starting at position 214 of SEQ ID NO: 1883343
gcauuucuuaccggacgga

SEQ ID NO: 2187079 - RNA, 19 nt, Artificial Sequence
  Description of Artificial Sequence: Synthetic oligonucleotide
  Antisense strand to SEQ ID NO: 2187078
uccguccgguaagaaaugc

SEQ ID NO: 2187080 - RNA, 19 nt, Artificial Sequence
  Description of Artificial Sequence: Synthetic oligonucleotide
  Sense strand starting at position 241 of SEQ ID NO: 1883343
gguugauacaguuggagga

SEQ ID NO: 2187081 - RNA, 19 nt, Artificial Sequence
  Description of Artificial Sequence: Synthetic oligonucleotide
  Antisense strand to SEQ ID NO: 2187080
uccuccaacuguaucaacc

SEQ ID NO: 2187082 - RNA, 19 nt, Artificial Sequence
  Description of Artificial Sequence: Synthetic oligonucleotide
  Sense strand starting at position 349 of SEQ ID NO: 1883343
ugugcuuugccagcauacu

SEQ ID NO: 2187083 - RNA, 19 nt, Artificial Sequence
  Description of Artificial Sequence: Synthetic oligonucleotide
  Antisense strand to SEQ ID NO: 2187082
aguaugcuggcaaagcaca

SEQ ID NO: 2187084 - RNA, 19 nt, Artificial Sequence
  Description of Artificial Sequence: Synthetic oligonucleotide
  Sense strand starting at position 384 of SEQ ID NO: 1883343
cagggauugguacaggcau

SEQ ID NO: 2187085 - RNA, 19 nt, Artificial Sequence
  Description of Artificial Sequence: Synthetic oligonucleotide
  Antisense strand to SEQ ID NO: 2187084
augccuguaccaaucccug

SEQ ID NO: 2187086 - RNA, 19 nt, Artificial Sequence
  Description of Artificial Sequence: Synthetic oligonucleotide
  Sense strand starting at position 461 of SEQ ID NO: 1883343
gagaaugugcuccaaguua

SEQ ID NO: 2187087 - RNA, 19 nt, Artificial Sequence
  Description of Artificial Sequence: Synthetic oligonucleotide
  Antisense strand to SEQ ID NO: 2187086
uaacuuggagcacauucuc

SEQ ID NO: 2187088 - RNA, 19 nt, Artificial Sequence
  Description of Artificial Sequence: Synthetic oligonucleotide
  Sense strand starting at position 551 of SEQ ID NO: 1883343
uuuauuucugcaggcuuaa

SEQ ID NO: 2187089 - RNA, 19 nt, Artificial Sequence
  Description of Artificial Sequence: Synthetic oligonucleotide
  Antisense strand to SEQ ID NO: 2187088
uuaagccugcagaaauaaa

SEQ ID NO: 2187090 - RNA, 19 nt, Artificial Sequence
  Description of Artificial Sequence: Synthetic oligonucleotide
  Sense strand starting at position 626 of SEQ ID NO: 1883343
acacgugauagguacuuaa

SEQ ID NO: 2187091 - RNA, 19 nt, Artificial Sequence
  Description of Artificial Sequence: Synthetic oligonucleotide
  Antisense strand to SEQ ID NO: 2187090
uuaaguaccuaucacgugu

SEQ ID NO: 2187092 - RNA, 19 nt, Artificial Sequence
  Description of Artificial Sequence: Synthetic oligonucleotide
  Sense strand starting at position 642 of SEQ ID NO: 1883343
uaacaauagugguugaaua

SEQ ID NO: 2187093 - RNA, 19 nt, Artificial Sequence
  Description of Artificial Sequence: Synthetic oligonucleotide
  Antisense strand to SEQ ID NO: 2187092
uauucaaccacuauuguua

SEQ ID NO: 2187094 - RNA, 19 nt, Artificial Sequence
  Description of Artificial Sequence: Synthetic oligonucleotide
  Sense strand starting at position 643 of SEQ ID NO: 1883343
aacaauagugguugaauaa

SEQ ID NO: 2187095 - RNA, 19 nt, Artificial Sequence
  Description of Artificial Sequence: Synthetic oligonucleotide
  Antisense strand to SEQ ID NO: 2187094
uuauucaaccacuauuguu

SEQ ID NO: 2187096 - RNA, 19 nt, Artificial Sequence
  Description of Artificial Sequence: Synthetic oligonucleotide
  Sense strand starting at position 652 of SEQ ID NO: 1883343
gguugaauaaguugaacuu

SEQ ID NO: 2187097 - RNA, 19 nt, Artificial Sequence
  Description of Artificial Sequence: Synthetic oligonucleotide
  Antisense strand to SEQ ID NO: 2187096
aaguucaacuuauucaacc

SEQ ID NO: 2187098 - RNA, 19 nt, Artificial Sequence
  Description of Artificial Sequence: Synthetic oligonucleotide
  Sense strand starting at position 696 of SEQ ID NO: 1883343
uuacauuucugcccuguuu

SEQ ID NO: 2187099 - RNA, 19 nt, Artificial Sequence
  Description of Artificial Sequence: Synthetic oligonucleotide
  Antisense strand to SEQ ID NO: 2187098
aaacagggcagaaauguaa

SEQ ID NO: 2187100 - RNA, 19 nt, Artificial Sequence
  Description of Artificial Sequence: Synthetic oligonucleotide
  Sense strand starting at position 737 of SEQ ID NO: 1883343
agccgauggaauuaguaga

SEQ ID NO: 2187101 - RNA, 19 nt, Artificial Sequence
  Description of Artificial Sequence: Synthetic oligonucleotide
  Antisense strand to SEQ ID NO: 2187100
ucuacuaauuccaucggcu

SEQ ID NO: 2187102 - RNA, 19 nt, Artificial Sequence
  Description of Artificial Sequence: Synthetic oligonucleotide
  Sense strand starting at position 948 of SEQ ID NO: 1883343
gucuuucuagaauaggguu

SEQ ID NO: 2187103 - RNA, 19 nt, Artificial Sequence
  Description of Artificial Sequence: Synthetic oligonucleotide
  Antisense strand to SEQ ID NO: 2187102
aacccuauucuagaaagac

SEQ ID NO: 2187104 - RNA, 19 nt, Artificial Sequence
  Description of Artificial Sequence: Synthetic oligonucleotide
  Sense strand starting at position 1161 of SEQ ID NO: 1883343
ggauauuggcauuagguau

SEQ ID NO: 2187105 - RNA, 19 nt, Artificial Sequence
  Description of Artificial Sequence: Synthetic oligonucleotide
  Antisense strand to SEQ ID NO: 2187104
auaccuaaugccaauaucc

SEQ ID NO: 2187106 - RNA, 19 nt, Artificial Sequence
  Description of Artificial Sequence: Synthetic oligonucleotide
  Sense strand starting at position 1343 of SEQ ID NO: 1883343
ccauuuggcucucuguuga

SEQ ID NO: 2187107 - RNA, 19 nt, Artificial Sequence
  Description of Artificial Sequence: Synthetic oligonucleotide
  Antisense strand to SEQ ID NO: 2187106
ucaacagagagccaaaugg

SEQ ID NO: 2187108 - RNA, 19 nt, Artificial Sequence
  Description of Artificial Sequence: Synthetic oligonucleotide
  Sense strand starting at position 1357 of SEQ ID NO: 1883343
guugauaaaccugauuagu

SEQ ID NO: 2187109 - RNA, 19 nt, Artificial Sequence
  Description of Artificial Sequence: Synthetic oligonucleotide
  Antisense strand to SEQ ID NO: 2187108
acuaaucagguuuaucaac

SEQ ID NO: 2187110 - RNA, 19 nt, Artificial Sequence
  Description of Artificial Sequence: Synthetic oligonucleotide
  Sense strand starting at position 1359 of SEQ ID NO: 1883343
ugauaaaccugauuagucu

SEQ ID NO: 2187111 - RNA, 19 nt, Artificial Sequence
  Description of Artificial Sequence: Synthetic oligonucleotide
  Antisense strand to SEQ ID NO: 2187110
agacuaaucagguuuauca

SEQ ID NO: 2187112 - RNA, 19 nt, Artificial Sequence
  Description of Artificial Sequence: Synthetic oligonucleotide
  Sense strand starting at position 1418 of SEQ ID NO: 1883343
guacuuugucuugugcagu

SEQ ID NO: 2187113 - RNA, 19 nt, Artificial Sequence
  Description of Artificial Sequence: Synthetic oligonucleotide
  Antisense strand to SEQ ID NO: 2187112
acugcacaagacaaaguac

SEQ ID NO: 2187114 - RNA, 19 nt, Artificial Sequence
  Description of Artificial Sequence: Synthetic oligonucleotide
  Sense strand starting at position 1495 of SEQ ID NO: 1883343
ggcauacuugguuaaugga

SEQ ID NO: 2187115 - RNA, 19 nt, Artificial Sequence
  Description of Artificial Sequence: Synthetic oligonucleotide
  Antisense strand to SEQ ID NO: 2187114
uccauuaaccaaguaugcc

SEQ ID NO: 2187116 - RNA, 19 nt, Artificial Sequence
  Description of Artificial Sequence: Synthetic oligonucleotide
  Sense strand starting at position 1612 of SEQ ID NO: 1883343
ugaguauauggcuaaauua

SEQ ID NO: 2187117 - RNA, 19 nt, Artificial Sequence
  Description of Artificial Sequence: Synthetic oligonucleotide
  Antisense strand to SEQ ID NO: 2187116
uaauuuagccauauacuca

SEQ ID NO: 2187118 - RNA, 19 nt, Artificial Sequence
  Description of Artificial Sequence: Synthetic oligonucleotide
  Sense strand starting at position 2047 of SEQ ID NO: 1883343
cagagccugucauuuguuu

SEQ ID NO: 2187119 - RNA, 19 nt, Artificial Sequence
  Description of Artificial Sequence: Synthetic oligonucleotide
  Antisense strand to SEQ ID NO: 2187118
aaacaaaugacaggcucug

SEQ ID NO: 2187120 - RNA, 19 nt, Artificial Sequence
  Description of Artificial Sequence: Synthetic oligonucleotide
  Sense strand starting at position 2175 of SEQ ID NO: 1883343
cugaaucauguauagucau

SEQ ID NO: 2187121 - RNA, 19 nt, Artificial Sequence
  Description of Artificial Sequence: Synthetic oligonucleotide
  Antisense strand to SEQ ID NO: 2187120
augacuauacaugauucag

SEQ ID NO: 2187122 - RNA, 19 nt, Artificial Sequence
  Description of Artificial Sequence: Synthetic oligonucleotide
  Sense strand starting at position 2412 of SEQ ID NO: 1883343
uggugugcuguagucuuau

SEQ ID NO: 2187123 - RNA, 19 nt, Artificial Sequence
  Description of Artificial Sequence: Synthetic oligonucleotide
  Antisense strand to SEQ ID NO: 2187122
auaagacuacagcacacca

SEQ ID NO: 2187124 - RNA, 19 nt, Artificial Sequence
  Description of Artificial Sequence: Synthetic oligonucleotide
  Sense strand starting at position 2471 of SEQ ID NO: 1883343
uuaaaugagucauccuuga

SEQ ID NO: 2187125 - RNA, 19 nt, Artificial Sequence
  Description of Artificial Sequence: Synthetic oligonucleotide
  Antisense strand to SEQ ID NO: 2187124
ucaaggaugacucauuuaa

SEQ ID NO: 2187126 - RNA, 19 nt, Artificial Sequence
  Description of Artificial Sequence: Synthetic oligonucleotide
  Sense strand starting at position 2476 of SEQ ID NO: 1883343
ugagucauccuugaaguau

SEQ ID NO: 2187127 - RNA, 19 nt, Artificial Sequence
  Description of Artificial Sequence: Synthetic oligonucleotide
  Antisense strand to SEQ ID NO: 2187126
auacuucaaggaugacuca

SEQ ID NO: 2187128 - RNA, 19 nt, Artificial Sequence
  Description of Artificial Sequence: Synthetic oligonucleotide
  Sense strand starting at position 2502 of SEQ ID NO: 1883343
ugagucaggccugguauuu

SEQ ID NO: 2187129 - RNA, 19 nt, Artificial Sequence
  Description of Artificial Sequence: Synthetic oligonucleotide
  Antisense strand to SEQ ID NO: 2187128
aaauaccaggccugacuca

SEQ ID NO: 2187130 - RNA, 19 nt, Artificial Sequence
  Description of Artificial Sequence: Synthetic oligonucleotide
  Sense strand starting at position 2579 of SEQ ID NO: 1883343
guaagugugcauuaaagaa

SEQ ID NO: 2187131 - RNA, 19 nt, Artificial Sequence
  Description of Artificial Sequence: Synthetic oligonucleotide
  Antisense strand to SEQ ID NO: 2187130
uucuuuaaugcacacuuac

SEQ ID NO: 2187132 - RNA, 19 nt, Artificial Sequence
  Description of Artificial Sequence: Synthetic oligonucleotide
  Sense strand starting at position 2602 of SEQ ID NO: 1883343
guauaagauggaugaguua

SEQ ID NO: 2187133 - RNA, 19 nt, Artificial Sequence
  Description of Artificial Sequence: Synthetic oligonucleotide
  Antisense strand to SEQ ID NO: 2187132
uaacucauccaucuuauac

SEQ ID NO: 2187134 - RNA, 19 nt, Artificial Sequence
  Description of Artificial Sequence: Synthetic oligonucleotide
  Sense strand starting at position 2783 of SEQ ID NO: 1883343
cucaucauuguguaauuga

SEQ ID NO: 2187135 - RNA, 19 nt, Artificial Sequence
  Description of Artificial Sequence: Synthetic oligonucleotide
  Antisense strand to SEQ ID NO: 2187134
ucaauuacacaaugaugag

SEQ ID NO: 2187136 - RNA, 19 nt, Artificial Sequence
  Description of Artificial Sequence: Synthetic oligonucleotide
  Sense strand starting at position 3135 of SEQ ID NO: 1883343
caagguuaggcauagguca

SEQ ID NO: 2187137 - RNA, 19 nt, Artificial Sequence
  Description of Artificial Sequence: Synthetic oligonucleotide
  Antisense strand to SEQ ID NO: 2187136
ugaccuaugccuaaccuug

SEQ ID NO: 2187138 - RNA, 19 nt, Artificial Sequence
  Description of Artificial Sequence: Synthetic oligonucleotide
  Sense strand starting at position 3177 of SEQ ID NO: 1883343
uggucagcccuauaugaga

SEQ ID NO: 2187139 - RNA, 19 nt, Artificial Sequence
  Description of Artificial Sequence: Synthetic oligonucleotide
  Antisense strand to SEQ ID NO: 2187138
ucucauauagggcugacca

SEQ ID NO: 2187140 - RNA, 19 nt, Artificial Sequence
  Description of Artificial Sequence: Synthetic oligonucleotide
  Sense strand starting at position 3190 of SEQ ID NO: 1883343
augagacagaaauguguau

SEQ ID NO: 2187141 - RNA, 19 nt, Artificial Sequence
  Description of Artificial Sequence: Synthetic oligonucleotide
  Antisense strand to SEQ ID NO: 2187140
auacacauuucugucucau

SEQ ID NO: 2187142 - RNA, 19 nt, Artificial Sequence
  Description of Artificial Sequence: Synthetic oligonucleotide
  Sense strand starting at position 3202 of SEQ ID NO: 1883343
uguguauuaaagcauagga

SEQ ID NO: 2187143 - RNA, 19 nt, Artificial Sequence
  Description of Artificial Sequence: Synthetic oligonucleotide
  Antisense strand to SEQ ID NO: 2187142
uccuaugcuuuaauacaca

SEQ ID NO: 2187144 - RNA, 19 nt, Artificial Sequence
  Description of Artificial Sequence: Synthetic oligonucleotide
  Sense strand starting at position 3328 of SEQ ID NO: 1883343
acagaagucuuacugacua

SEQ ID NO: 2187145 - RNA, 19 nt, Artificial Sequence
  Description of Artificial Sequence: Synthetic oligonucleotide
  Antisense strand to SEQ ID NO: 2187144
uagucaguaagacuucugu

SEQ ID NO: 2187146 - RNA, 19 nt, Artificial Sequence
  Description of Artificial Sequence: Synthetic oligonucleotide
  Sense strand starting at position 3333 of SEQ ID NO: 1883343
agucuuacugacuauugua

SEQ ID NO: 2187147 - RNA, 19 nt, Artificial Sequence
  Description of Artificial Sequence: Synthetic oligonucleotide
  Antisense strand to SEQ ID NO: 2187146
uacaauagucaguaagacu

SEQ ID NO: 2187148 - RNA, 19 nt, Artificial Sequence
  Description of Artificial Sequence: Synthetic oligonucleotide
  Sense strand starting at position 3657 of SEQ ID NO: 1883343
aaucaugaguucucuagag

SEQ ID NO: 2187149 - RNA, 19 nt, Artificial Sequence
  Description of Artificial Sequence: Synthetic oligonucleotide
  Antisense strand to SEQ ID NO: 2187148
cucuagagaacucaugauu

SEQ ID NO: 2187150 - RNA, 19 nt, Artificial Sequence
  Description of Artificial Sequence: Synthetic oligonucleotide
  Sense strand starting at position 3659 of SEQ ID NO: 1883343
ucaugaguucucuagagca

SEQ ID NO: 2187151 - RNA, 19 nt, Artificial Sequence
  Description of Artificial Sequence: Synthetic oligonucleotide
  Antisense strand to SEQ ID NO: 2187150
ugcucuagagaacucauga

SEQ ID NO: 2187152 - RNA, 19 nt, Artificial Sequence
  Description of Artificial Sequence: Synthetic oligonucleotide
  Sense strand starting at position 3727 of SEQ ID NO: 1883343
cugagaugccuguaggaga

SEQ ID NO: 2187153 - RNA, 19 nt, Artificial Sequence
  Description of Artificial Sequence: Synthetic oligonucleotide
  Antisense strand to SEQ ID NO: 2187152
ucuccuacaggcaucucag

SEQ ID NO: 2187154 - RNA, 19 nt, Artificial Sequence
  Description of Artificial Sequence: Synthetic oligonucleotide
  Sense strand starting at position 3758 of SEQ ID NO: 1883343
gggagcaaguccuuaagag

SEQ ID NO: 2187155 - RNA, 19 nt, Artificial Sequence
  Description of Artificial Sequence: Synthetic oligonucleotide
  Antisense strand to SEQ ID NO: 2187154
cucuuaaggacuugcuccc

SEQ ID NO: 2187156 - RNA, 19 nt, Artificial Sequence
  Description of Artificial Sequence: Synthetic oligonucleotide
  Sense strand starting at position 3809 of SEQ ID NO: 1883343
ggauguuacuaucuagaaa

SEQ ID NO: 2187157 - RNA, 19 nt, Artificial Sequence
  Description of Artificial Sequence: Synthetic oligonucleotide
  Antisense strand to SEQ ID NO: 2187156
uuucuagauaguaacaucc

SEQ ID NO: 2187158 - RNA, 19 nt, Artificial Sequence
  Description of Artificial Sequence: Synthetic oligonucleotide
  Sense strand starting at position 203 of SEQ ID NO: 1883344
gaagguauauugguauggu

SEQ ID NO: 2187159 - RNA, 19 nt, Artificial Sequence
  Description of Artificial Sequence: Synthetic oligonucleotide
  Antisense strand to SEQ ID NO: 2187158
accauaccaauauaccuuc

SEQ ID NO: 2187160 - RNA, 19 nt, Artificial Sequence
  Description of Artificial Sequence: Synthetic oligonucleotide
  Sense strand starting at position 324 of SEQ ID NO: 1883344
gggcaucaguagucagaua

SEQ ID NO: 2187161 - RNA, 19 nt, Artificial Sequence
  Description of Artificial Sequence: Synthetic oligonucleotide
  Antisense strand to SEQ ID NO: 2187160
uaucugacuacugaugccc

SEQ ID NO: 2187162 - RNA, 19 nt, Artificial Sequence
  Description of Artificial Sequence: Synthetic oligonucleotide
  Sense strand starting at position 325 of SEQ ID NO: 1883344
ggcaucaguagucagauau

SEQ ID NO: 2187163 - RNA, 19 nt, Artificial Sequence
  Description of Artificial Sequence: Synthetic oligonucleotide
  Antisense strand to SEQ ID NO: 2187162
auaucugacuacugaugcc

SEQ ID NO: 2187164 - RNA, 19 nt, Artificial Sequence
  Description of Artificial Sequence: Synthetic oligonucleotide
  Sense strand starting at position 362 of SEQ ID NO: 1883344
ugaagccucugaucugaua

SEQ ID NO: 2187165 - RNA, 19 nt, Artificial Sequence
  Description of Artificial Sequence: Synthetic oligonucleotide
  Antisense strand to SEQ ID NO: 2187164
uaucagaucagaggcuuca

SEQ ID NO: 2187166 - RNA, 19 nt, Artificial Sequence
  Description of Artificial Sequence: Synthetic oligonucleotide
  Sense strand starting at position 547 of SEQ ID NO: 1883344
uaaggaaauugcucacagu

SEQ ID NO: 2187167 - RNA, 19 nt, Artificial Sequence
  Description of Artificial Sequence: Synthetic oligonucleotide
  Antisense strand to SEQ ID NO: 2187166
acugugagcaauuuccuua

SEQ ID NO: 2187168 - RNA, 19 nt, Artificial Sequence
  Description of Artificial Sequence: Synthetic oligonucleotide
  Sense strand starting at position 562 of SEQ ID NO: 1883344
caguauugugaguaaggcu

SEQ ID NO: 2187169 - RNA, 19 nt, Artificial Sequence
  Description of Artificial Sequence: Synthetic oligonucleotide
  Antisense strand to SEQ ID NO: 2187168
agccuuacucacaauacug

SEQ ID NO: 2187170 - RNA, 19 nt, Artificial Sequence
  Description of Artificial Sequence: Synthetic oligonucleotide
  Sense strand starting at position 569 of SEQ ID NO: 1883344
gugaguaaggcugaagucu

SEQ ID NO: 2187171 - RNA, 19 nt, Artificial Sequence
  Description of Artificial Sequence: Synthetic oligonucleotide
  Antisense strand to SEQ ID NO: 2187170
agacuucagccuuacucac

SEQ ID NO: 2187172 - RNA, 19 nt, Artificial Sequence
  Description of Artificial Sequence: Synthetic oligonucleotide
  Sense strand starting at position 583 of SEQ ID NO: 1883344
agucuugaggcagaaaugu

SEQ ID NO: 2187173 - RNA, 19 nt, Artificial Sequence
  Description of Artificial Sequence: Synthetic oligonucleotide
  Antisense strand to SEQ ID NO: 2187172
acauuucugccucaagacu

SEQ ID NO: 2187174 - RNA, 19 nt, Artificial Sequence
  Description of Artificial Sequence: Synthetic oligonucleotide
  Sense strand starting at position 785 of SEQ ID NO: 1883344
ggaagccugcccuacagau

SEQ ID NO: 2187175 - RNA, 19 nt, Artificial Sequence
  Description of Artificial Sequence: Synthetic oligonucleotide
  Antisense strand to SEQ ID NO: 2187174
aucuguagggcaggcuucc

SEQ ID NO: 2187176 - RNA, 19 nt, Artificial Sequence
  Description of Artificial Sequence: Synthetic oligonucleotide
  Sense strand starting at position 816 of SEQ ID NO: 1883344
agcuaacgugaucauauga

SEQ ID NO: 2187177 - RNA, 19 nt, Artificial Sequence
  Description of Artificial Sequence: Synthetic oligonucleotide
  Antisense strand to SEQ ID NO: 2187176
ucauaugaucacguuagcu

SEQ ID NO: 2187178 - RNA, 19 nt, Artificial Sequence
  Description of Artificial Sequence: Synthetic oligonucleotide
  Sense strand starting at position 1199 of SEQ ID NO: 1883344
gggcuuucuucucuggaga

SEQ ID NO: 2187179 - RNA, 19 nt, Artificial Sequence
  Description of Artificial Sequence: Synthetic oligonucleotide
  Antisense strand to SEQ ID NO: 2187178
ucuccagagaagaaagccc

SEQ ID NO: 2187180 - RNA, 19 nt, Artificial Sequence
  Description of Artificial Sequence: Synthetic oligonucleotide
  Sense strand starting at position 1200 of SEQ ID NO: 1883344
ggcuuucuucucuggagaa

SEQ ID NO: 2187181 - RNA, 19 nt, Artificial Sequence
  Description of Artificial Sequence: Synthetic oligonucleotide
  Antisense strand to SEQ ID NO: 2187180
uucuccagagaagaaagcc

SEQ ID NO: 2187182 - RNA, 19 nt, Artificial Sequence
  Description of Artificial Sequence: Synthetic oligonucleotide
  Sense strand starting at position 1213 of SEQ ID NO: 1883344
ggagaacccuaguugauau

SEQ ID NO: 2187183 - RNA, 19 nt, Artificial Sequence
  Description of Artificial Sequence: Synthetic oligonucleotide
  Antisense strand to SEQ ID NO: 2187182
auaucaacuaggguucucc

SEQ ID NO: 2187184 - RNA, 19 nt, Artificial Sequence
  Description of Artificial Sequence: Synthetic oligonucleotide
  Sense strand starting at position 1227 of SEQ ID NO: 1883344
gauauacugcccuaaguga

SEQ ID NO: 2187185 - RNA, 19 nt, Artificial Sequence
  Description of Artificial Sequence: Synthetic oligonucleotide
  Antisense strand to SEQ ID NO: 2187184
ucacuuagggcaguauauc

SEQ ID NO: 2187186 - RNA, 19 nt, Artificial Sequence
  Description of Artificial Sequence: Synthetic oligonucleotide
  Sense strand starting at position 1245 of SEQ ID NO: 1883344
acuuauauggcauaaguaa

SEQ ID NO: 2187187 - RNA, 19 nt, Artificial Sequence
  Description of Artificial Sequence: Synthetic oligonucleotide
  Antisense strand to SEQ ID NO: 2187186
uuacuuaugccauauaagu

SEQ ID NO: 2187188 - RNA, 19 nt, Artificial Sequence
  Description of Artificial Sequence: Synthetic oligonucleotide
  Sense strand starting at position 1412 of SEQ ID NO: 1883344
gacagaucagcugggagau

SEQ ID NO: 2187189 - RNA, 19 nt, Artificial Sequence
  Description of Artificial Sequence: Synthetic oligonucleotide
  Antisense strand to SEQ ID NO: 2187188
aucucccagcugaucuguc

SEQ ID NO: 2187190 - RNA, 19 nt, Artificial Sequence
  Description of Artificial Sequence: Synthetic oligonucleotide
  Sense strand starting at position 1447 of SEQ ID NO: 1883344
aagagaaccugaguuucuu

SEQ ID NO: 2187191 - RNA, 19 nt, Artificial Sequence
  Description of Artificial Sequence: Synthetic oligonucleotide
  Antisense strand to SEQ ID NO: 2187190
aagaaacucagguucucuu

SEQ ID NO: 2187192 - RNA, 19 nt, Artificial Sequence
  Description of Artificial Sequence: Synthetic oligonucleotide
  Sense strand starting at position 1451 of SEQ ID NO: 1883344
gaaccugaguuucuuuagu

SEQ ID NO: 2187193 - RNA, 19 nt, Artificial Sequence
  Description of Artificial Sequence: Synthetic oligonucleotide
  Antisense strand to SEQ ID NO: 2187192
acuaaagaaacucagguuc

SEQ ID NO: 2187194 - RNA, 19 nt, Artificial Sequence
  Description of Artificial Sequence: Synthetic oligonucleotide
  Sense strand starting at position 1456 of SEQ ID NO: 1883344
ugaguuucuuuagugaaga

SEQ ID NO: 2187195 - RNA, 19 nt, Artificial Sequence
  Description of Artificial Sequence: Synthetic oligonucleotide
  Antisense strand to SEQ ID NO: 2187194
ucuucacuaaagaaacuca

SEQ ID NO: 2187196 - RNA, 19 nt, Artificial Sequence
  Description of Artificial Sequence: Synthetic oligonucleotide
  Sense strand starting at position 1523 of SEQ ID NO: 1883344
ccuaauggacccugauauu

SEQ ID NO: 2187197 - RNA, 19 nt, Artificial Sequence
  Description of Artificial Sequence: Synthetic oligonucleotide
  Antisense strand to SEQ ID NO: 2187196
aauaucaggguccauuagg

SEQ ID NO: 2187198 - RNA, 19 nt, Artificial Sequence
  Description of Artificial Sequence: Synthetic oligonucleotide
  Sense strand starting at position 1609 of SEQ ID NO: 1883344
cuaggagugguccaaugau

SEQ ID NO: 2187199 - RNA, 19 nt, Artificial Sequence
  Description of Artificial Sequence: Synthetic oligonucleotide
  Antisense strand to SEQ ID NO: 2187198
aucauuggaccacuccuag

SEQ ID NO: 2187200 - RNA, 19 nt, Artificial Sequence
  Description of Artificial Sequence: Synthetic oligonucleotide
  Sense strand starting at position 1775 of SEQ ID NO: 1883344
gcaaacauuuaggaucaua

SEQ ID NO: 2187201 - RNA, 19 nt, Artificial Sequence
  Description of Artificial Sequence: Synthetic oligonucleotide
  Antisense strand to SEQ ID NO: 2187200
uaugauccuaaauguuugc

SEQ ID NO: 2187202 - RNA, 19 nt, Artificial Sequence
  Description of Artificial Sequence: Synthetic oligonucleotide
  Sense strand starting at position 1873 of SEQ ID NO: 1883344
cuggacuucucaucagaug

SEQ ID NO: 2187203 - RNA, 19 nt, Artificial Sequence
  Description of Artificial Sequence: Synthetic oligonucleotide
  Antisense strand to SEQ ID NO: 2187202
caucugaugagaaguccag

SEQ ID NO: 2187204 - RNA, 19 nt, Artificial Sequence
  Description of Artificial Sequence: Synthetic oligonucleotide
  Sense strand starting at position 2232 of SEQ ID NO: 1883344
agaaauaaaucugaacuag

SEQ ID NO: 2187205 - RNA, 19 nt, Artificial Sequence
  Description of Artificial Sequence: Synthetic oligonucleotide
  Antisense strand to SEQ ID NO: 2187204
cuaguucagauuuauuucu

SEQ ID NO: 2187206 - RNA, 19 nt, Artificial Sequence
  Description of Artificial Sequence: Synthetic oligonucleotide
  Sense strand starting at position 2697 of SEQ ID NO: 1883344
accugugaucuguaaucua

SEQ ID NO: 2187207 - RNA, 19 nt, Artificial Sequence
  Description of Artificial Sequence: Synthetic oligonucleotide
  Antisense strand to SEQ ID NO: 2187206
uagauuacagaucacaggu

SEQ ID NO: 2187208 - RNA, 19 nt, Artificial Sequence
  Description of Artificial Sequence: Synthetic oligonucleotide
  Sense strand starting at position 2700 of SEQ ID NO: 1883344
ugugaucuguaaucuauau

SEQ ID NO: 2187209 - RNA, 19 nt, Artificial Sequence
  Description of Artificial Sequence: Synthetic oligonucleotide
  Antisense strand to SEQ ID NO: 2187208
auauagauuacagaucaca

SEQ ID NO: 2187210 - RNA, 19 nt, Artificial Sequence
  Description of Artificial Sequence: Synthetic oligonucleotide
  Sense strand starting at position 2915 of SEQ ID NO: 1883344
gaaacucuguaugcauuga

SEQ ID NO: 2187211 - RNA, 19 nt, Artificial Sequence
  Description of Artificial Sequence: Synthetic oligonucleotide
  Antisense strand to SEQ ID NO: 2187210
ucaaugcauacagaguuuc

SEQ ID NO: 2187212 - RNA, 19 nt, Artificial Sequence
  Description of Artificial Sequence: Synthetic oligonucleotide
  Sense strand starting at position 3010 of SEQ ID NO: 1883344
auaagugagcgcuugcagu

SEQ ID NO: 2187213 - RNA, 19 nt, Artificial Sequence
  Description of Artificial Sequence: Synthetic oligonucleotide
  Antisense strand to SEQ ID NO: 2187212
acugcaagcgcucacuuau

SEQ ID NO: 2187214 - RNA, 19 nt, Artificial Sequence
  Description of Artificial Sequence: Synthetic oligonucleotide
  Sense strand starting at position 3241 of SEQ ID NO: 1883344
cuaugaaccuaaguguaca

SEQ ID NO: 2187215 - RNA, 19 nt, Artificial Sequence
  Description of Artificial Sequence: Synthetic oligonucleotide
  Antisense strand to SEQ ID NO: 2187214
uguacacuuagguucauag

SEQ ID NO: 2187216 - RNA, 19 nt, Artificial Sequence
  Description of Artificial Sequence: Synthetic oligonucleotide
  Sense strand starting at position 3369 of SEQ ID NO: 1883344
ggauaaacggccuaucuca

SEQ ID NO: 2187217 - RNA, 19 nt, Artificial Sequence
  Description of Artificial Sequence: Synthetic oligonucleotide
  Antisense strand to SEQ ID NO: 2187216
ugagauaggccguuuaucc

SEQ ID NO: 2187218 - RNA, 19 nt, Artificial Sequence
  Description of Artificial Sequence: Synthetic oligonucleotide
  Sense strand starting at position 3377 of SEQ ID NO: 1883344
ggccuaucucaucagacaa

SEQ ID NO: 2187219 - RNA, 19 nt, Artificial Sequence
  Description of Artificial Sequence: Synthetic oligonucleotide
  Antisense strand to SEQ ID NO: 2187218
uugucugaugagauaggcc

SEQ ID NO: 2187220 - RNA, 19 nt, Artificial Sequence
  Description of Artificial Sequence: Synthetic oligonucleotide
  Sense strand starting at position 3437 of SEQ ID NO: 1883344
uggagcuuauagguuuaga

SEQ ID NO: 2187221 - RNA, 19 nt, Artificial Sequence
  Description of Artificial Sequence: Synthetic oligonucleotide
  Antisense strand to SEQ ID NO: 2187220
ucuaaaccuauaagcucca

SEQ ID NO: 2187222 - RNA, 19 nt, Artificial Sequence
  Description of Artificial Sequence: Synthetic oligonucleotide
  Sense strand starting at position 3440 of SEQ ID NO: 1883344
agcuuauagguuuagaaau

SEQ ID NO: 2187223 - RNA, 19 nt, Artificial Sequence
  Description of Artificial Sequence: Synthetic oligonucleotide
  Antisense strand to SEQ ID NO: 2187222
auuucuaaaccuauaagcu

SEQ ID NO: 2187224 - RNA, 19 nt, Artificial Sequence
  Description of Artificial Sequence: Synthetic oligonucleotide
  Sense strand starting at position 3513 of SEQ ID NO: 1883344
ggcuauguccaauaaguaa

SEQ ID NO: 2187225 - RNA, 19 nt, Artificial Sequence
  Description of Artificial Sequence: Synthetic oligonucleotide
  Antisense strand to SEQ ID NO: 2187224
uuacuuauuggacauagcc

SEQ ID NO: 2187226 - RNA, 19 nt, Artificial Sequence
  Description of Artificial Sequence: Synthetic oligonucleotide
  Sense strand starting at position 3565 of SEQ ID NO: 1883344
uggauaagaucuuugguuc

SEQ ID NO: 2187227 - RNA, 19 nt, Artificial Sequence
  Description of Artificial Sequence: Synthetic oligonucleotide
  Antisense strand to SEQ ID NO: 2187226
gaaccaaagaucuuaucca

SEQ ID NO: 2187228 - RNA, 19 nt, Artificial Sequence
  Description of Artificial Sequence: Synthetic oligonucleotide
  Sense strand starting at position 3568 of SEQ ID NO: 1883344
auaagaucuuugguuccau

SEQ ID NO: 2187229 - RNA, 19 nt, Artificial Sequence
  Description of Artificial Sequence: Synthetic oligonucleotide
  Antisense strand to SEQ ID NO: 2187228
auggaaccaaagaucuuau

SEQ ID NO: 2187230 - RNA, 19 nt, Artificial Sequence
  Description of Artificial Sequence: Synthetic oligonucleotide
  Sense strand starting at position 3588 of SEQ ID NO: 1883344
uguuacuugcaugaaauca

SEQ ID NO: 2187231 - RNA, 19 nt, Artificial Sequence
  Description of Artificial Sequence: Synthetic oligonucleotide
  Antisense strand to SEQ ID NO: 2187230
ugauuucaugcaaguaaca

SEQ ID NO: 2187232 - RNA, 19 nt, Artificial Sequence
  Description of Artificial Sequence: Synthetic oligonucleotide
  Sense strand starting at position 3818 of SEQ ID NO: 1883344
agaccaagcuagcuuaaua

SEQ ID NO: 2187233 - RNA, 19 nt, Artificial Sequence
  Description of Artificial Sequence: Synthetic oligonucleotide
  Antisense strand to SEQ ID NO: 2187232
uauuaagcuagcuuggucu

SEQ ID NO: 2187234 - RNA, 19 nt, Artificial Sequence
  Description of Artificial Sequence: Synthetic oligonucleotide
  Sense strand starting at position 3845 of SEQ ID NO: 1883344
agaggaacauuccagagaa

SEQ ID NO: 2187235 - RNA, 19 nt, Artificial Sequence
  Description of Artificial Sequence: Synthetic oligonucleotide
  Antisense strand to SEQ ID NO: 2187234
uucucuggaauguuccucu

SEQ ID NO: 2187236 - RNA, 19 nt, Artificial Sequence
  Description of Artificial Sequence: Synthetic oligonucleotide
  Sense strand starting at position 3890 of SEQ ID NO: 1883344
ggagauucacccggaagcu

SEQ ID NO: 2187237 - RNA, 19 nt, Artificial Sequence
  Description of Artificial Sequence: Synthetic oligonucleotide
  Antisense strand to SEQ ID NO: 2187236
agcuuccgggugaaucucc

SEQ ID NO: 2187238 - RNA, 19 nt, Artificial Sequence
  Description of Artificial Sequence: Synthetic oligonucleotide
  Sense strand starting at position 31 of SEQ ID NO: 1883345
gccuccucucgauauugga

SEQ ID NO: 2187239 - RNA, 19 nt, Artificial Sequence
  Description of Artificial Sequence: Synthetic oligonucleotide
  Antisense strand to SEQ ID NO: 2187238
uccaauaucgagaggaggc

SEQ ID NO: 2187240 - RNA, 19 nt, Artificial Sequence
  Description of Artificial Sequence: Synthetic oligonucleotide
  Sense strand starting at position 337 of SEQ ID NO: 1883345
agcccugguuucucacaga

SEQ ID NO: 2187241 - RNA, 19 nt, Artificial Sequence
  Description of Artificial Sequence: Synthetic oligonucleotide
  Antisense strand to SEQ ID NO: 2187240
ucugugagaaaccagggcu

SEQ ID NO: 2187242 - RNA, 19 nt, Artificial Sequence
  Description of Artificial Sequence: Synthetic oligonucleotide
  Sense strand starting at position 539 of SEQ ID NO: 1883345
gucggagacucccugacuu

SEQ ID NO: 2187243 - RNA, 19 nt, Artificial Sequence
  Description of Artificial Sequence: Synthetic oligonucleotide
  Antisense strand to SEQ ID NO: 2187242
aagucagggagucuccgac

SEQ ID NO: 2187244 - RNA, 19 nt, Artificial Sequence
  Description of Artificial Sequence: Synthetic oligonucleotide
  Sense strand starting at position 611 of SEQ ID NO: 1883345
caaguaagugacugagagu

SEQ ID NO: 2187245 - RNA, 19 nt, Artificial Sequence
  Description of Artificial Sequence: Synthetic oligonucleotide
  Antisense strand to SEQ ID NO: 2187244
acucucagucacuuacuug

SEQ ID NO: 2187246 - RNA, 19 nt, Artificial Sequence
  Description of Artificial Sequence: Synthetic oligonucleotide
  Sense strand starting at position 630 of SEQ ID NO: 1883345
cuaucagacagcuguggau

SEQ ID NO: 2187247 - RNA, 19 nt, Artificial Sequence
  Description of Artificial Sequence: Synthetic oligonucleotide
  Antisense strand to SEQ ID NO: 2187246
auccacagcugucugauag

SEQ ID NO: 2187248 - RNA, 19 nt, Artificial Sequence
  Description of Artificial Sequence: Synthetic oligonucleotide
  Sense strand starting at position 741 of SEQ ID NO: 1883345
uagccaagcggugauaaga

SEQ ID NO: 2187249 - RNA, 19 nt, Artificial Sequence
  Description of Artificial Sequence: Synthetic oligonucleotide
  Antisense strand to SEQ ID NO: 2187248
ucuuaucaccgcuuggcua

SEQ ID NO: 2187250 - RNA, 19 nt, Artificial Sequence
  Description of Artificial Sequence: Synthetic oligonucleotide
  Sense strand starting at position 749 of SEQ ID NO: 1883345
cggugauaagagcauagau

SEQ ID NO: 2187251 - RNA, 19 nt, Artificial Sequence
  Description of Artificial Sequence: Synthetic oligonucleotide
  Antisense strand to SEQ ID NO: 2187250
aucuaugcucuuaucaccg

SEQ ID NO: 2187252 - RNA, 19 nt, Artificial Sequence
  Description of Artificial Sequence: Synthetic oligonucleotide
  Sense strand starting at position 792 of SEQ ID NO: 1883345
gagugaggcaggcacuauu

SEQ ID NO: 2187253 - RNA, 19 nt, Artificial Sequence
  Description of Artificial Sequence: Synthetic oligonucleotide
  Antisense strand to SEQ ID NO: 2187252
aauagugccugccucacuc

SEQ ID NO: 2187254 - RNA, 19 nt, Artificial Sequence
  Description of Artificial Sequence: Synthetic oligonucleotide
  Sense strand starting at position 804 of SEQ ID NO: 1883345
cacuauugugggcaaguga

SEQ ID NO: 2187255 - RNA, 19 nt, Artificial Sequence
  Description of Artificial Sequence: Synthetic oligonucleotide
  Antisense strand to SEQ ID NO: 2187254
ucacuugcccacaauagug

SEQ ID NO: 2187256 - RNA, 19 nt, Artificial Sequence
  Description of Artificial Sequence: Synthetic oligonucleotide
  Sense strand starting at position 1037 of SEQ ID NO: 1883345
uacugucuuggacaaguga

SEQ ID NO: 2187257 - RNA, 19 nt, Artificial Sequence
  Description of Artificial Sequence: Synthetic oligonucleotide
  Antisense strand to SEQ ID NO: 2187256
ucacuuguccaagacagua

SEQ ID NO: 2187258 - RNA, 19 nt, Artificial Sequence
  Description of Artificial Sequence: Synthetic oligonucleotide
  Sense strand starting at position 1585 of SEQ ID NO: 1883345
ugccuucucuacuugagau

SEQ ID NO: 2187259 - RNA, 19 nt, Artificial Sequence
  Description of Artificial Sequence: Synthetic oligonucleotide
  Antisense strand to SEQ ID NO: 2187258
aucucaaguagagaaggca

SEQ ID NO: 2187260 - RNA, 19 nt, Artificial Sequence
  Description of Artificial Sequence: Synthetic oligonucleotide
  Sense strand starting at position 1597 of SEQ ID NO: 1883345
uugagaugacucuggauuc

SEQ ID NO: 2187261 - RNA, 19 nt, Artificial Sequence
  Description of Artificial Sequence: Synthetic oligonucleotide
  Antisense strand to SEQ ID NO: 2187260
gaauccagagucaucucaa

SEQ ID NO: 2187262 - RNA, 19 nt, Artificial Sequence
  Description of Artificial Sequence: Synthetic oligonucleotide
  Sense strand starting at position 1631 of SEQ ID NO: 1883345
ggcuguuacaaugaccgua

SEQ ID NO: 2187263 - RNA, 19 nt, Artificial Sequence
  Description of Artificial Sequence: Synthetic oligonucleotide
  Antisense strand to SEQ ID NO: 2187262
uacggucauuguaacagcc

SEQ ID NO: 2187264 - RNA, 19 nt, Artificial Sequence
  Description of Artificial Sequence: Synthetic oligonucleotide
  Sense strand starting at position 1647 of SEQ ID NO: 1883345
guacaucucaagugagaga

SEQ ID NO: 2187265 - RNA, 19 nt, Artificial Sequence
  Description of Artificial Sequence: Synthetic oligonucleotide
  Antisense strand to SEQ ID NO: 2187264
ucucucacuugagauguac

SEQ ID NO: 2187266 - RNA, 19 nt, Artificial Sequence
  Description of Artificial Sequence: Synthetic oligonucleotide
  Sense strand starting at position 1674 of SEQ ID NO: 1883345
auggcugucagaugaucau

SEQ ID NO: 2187267 - RNA, 19 nt, Artificial Sequence
  Description of Artificial Sequence: Synthetic oligonucleotide
  Antisense strand to SEQ ID NO: 2187266
augaucaucugacagccau

SEQ ID NO: 2187268 - RNA, 19 nt, Artificial Sequence
  Description of Artificial Sequence: Synthetic oligonucleotide
  Sense strand starting at position 1686 of SEQ ID NO: 1883345
ugaucauggugggugcaau

SEQ ID NO: 2187269 - RNA, 19 nt, Artificial Sequence
  Description of Artificial Sequence: Synthetic oligonucleotide
  Antisense strand to SEQ ID NO: 2187268
auugcacccaccaugauca

SEQ ID NO: 2187270 - RNA, 19 nt, Artificial Sequence
  Description of Artificial Sequence: Synthetic oligonucleotide
  Sense strand starting at position 1764 of SEQ ID NO: 1883345
uguauauagaagugauaga

SEQ ID NO: 2187271 - RNA, 19 nt, Artificial Sequence
  Description of Artificial Sequence: Synthetic oligonucleotide
  Antisense strand to SEQ ID NO: 2187270
ucuaucacuucuauauaca

SEQ ID NO: 2187272 - RNA, 19 nt, Artificial Sequence
  Description of Artificial Sequence: Synthetic oligonucleotide
  Sense strand starting at position 1780 of SEQ ID NO: 1883345
agaagaauauuuggaaaca

SEQ ID NO: 2187273 - RNA, 19 nt, Artificial Sequence
  Description of Artificial Sequence: Synthetic oligonucleotide
  Antisense strand to SEQ ID NO: 2187272
uguuuccaaauauucuucu

SEQ ID NO: 2187274 - RNA, 19 nt, Artificial Sequence
  Description of Artificial Sequence: Synthetic oligonucleotide
  Sense strand starting at position 1831 of SEQ ID NO: 1883345
accauaaucacgggaugca

SEQ ID NO: 2187275 - RNA, 19 nt, Artificial Sequence
  Description of Artificial Sequence: Synthetic oligonucleotide
  Antisense strand to SEQ ID NO: 2187274
ugcaucccgugauuauggu

SEQ ID NO: 2187276 - RNA, 19 nt, Artificial Sequence
  Description of Artificial Sequence: Synthetic oligonucleotide
  Sense strand starting at position 1832 of SEQ ID NO: 1883345
ccauaaucacgggaugcaa

SEQ ID NO: 2187277 - RNA, 19 nt, Artificial Sequence
  Description of Artificial Sequence: Synthetic oligonucleotide
  Antisense strand to SEQ ID NO: 2187276
uugcaucccgugauuaugg

SEQ ID NO: 2187278 - RNA, 19 nt, Artificial Sequence
  Description of Artificial Sequence: Synthetic oligonucleotide
  Sense strand starting at position 1890 of SEQ ID NO: 1883345
cuuaccaugcauugagcaa

SEQ ID NO: 2187279 - RNA, 19 nt, Artificial Sequence
  Description of Artificial Sequence: Synthetic oligonucleotide
  Antisense strand to SEQ ID NO: 2187278
uugcucaaugcaugguaag

SEQ ID NO: 2187280 - RNA, 19 nt, Artificial Sequence
  Description of Artificial Sequence: Synthetic oligonucleotide
  Sense strand starting at position 2268 of SEQ ID NO: 1883345
ggcccuaagcuguggauuu

SEQ ID NO: 2187281 - RNA, 19 nt, Artificial Sequence
  Description of Artificial Sequence: Synthetic oligonucleotide
  Antisense strand to SEQ ID NO: 2187280
aaauccacagcuuagggcc

SEQ ID NO: 2187282 - RNA, 19 nt, Artificial Sequence
  Description of Artificial Sequence: Synthetic oligonucleotide
  Sense strand starting at position 2326 of SEQ ID NO: 1883345
uuaccaccucucugggaaa

SEQ ID NO: 2187283 - RNA, 19 nt, Artificial Sequence
  Description of Artificial Sequence: Synthetic oligonucleotide
  Antisense strand to SEQ ID NO: 2187282
uuucccagagaggugguaa

SEQ ID NO: 2187284 - RNA, 19 nt, Artificial Sequence
  Description of Artificial Sequence: Synthetic oligonucleotide
  Sense strand starting at position 2355 of SEQ ID NO: 1883345
aggucugacuugcuuauga

SEQ ID NO: 2187285 - RNA, 19 nt, Artificial Sequence
  Description of Artificial Sequence: Synthetic oligonucleotide
  Antisense strand to SEQ ID NO: 2187284
ucauaagcaagucagaccu

SEQ ID NO: 2187286 - RNA, 19 nt, Artificial Sequence
  Description of Artificial Sequence: Synthetic oligonucleotide
  Sense strand starting at position 2357 of SEQ ID NO: 1883345
gucugacuugcuuaugaug

SEQ ID NO: 2187287 - RNA, 19 nt, Artificial Sequence
  Description of Artificial Sequence: Synthetic oligonucleotide
  Antisense strand to SEQ ID NO: 2187286
caucauaagcaagucagac

SEQ ID NO: 2187288 - RNA, 19 nt, Artificial Sequence
  Description of Artificial Sequence: Synthetic oligonucleotide
  Sense strand starting at position 2474 of SEQ ID NO: 1883345
gagccuuucccagagcuga

SEQ ID NO: 2187289 - RNA, 19 nt, Artificial Sequence
  Description of Artificial Sequence: Synthetic oligonucleotide
  Antisense strand to SEQ ID NO: 2187288
ucagcucugggaaaggcuc

SEQ ID NO: 2187290 - RNA, 19 nt, Artificial Sequence
  Description of Artificial Sequence: Synthetic oligonucleotide
  Sense strand starting at position 2908 of SEQ ID NO: 1883345
gggauucuugauuguguga

SEQ ID NO: 2187291 - RNA, 19 nt, Artificial Sequence
  Description of Artificial Sequence: Synthetic oligonucleotide
  Antisense strand to SEQ ID NO: 2187290
ucacacaaucaagaauccc

SEQ ID NO: 2187292 - RNA, 19 nt, Artificial Sequence
  Description of Artificial Sequence: Synthetic oligonucleotide
  Sense strand starting at position 2911 of SEQ ID NO: 1883345
auucuugauugugugaaau

SEQ ID NO: 2187293 - RNA, 19 nt, Artificial Sequence
  Description of Artificial Sequence: Synthetic oligonucleotide
  Antisense strand to SEQ ID NO: 2187292
auuucacacaaucaagaau

SEQ ID NO: 2187294 - RNA, 19 nt, Artificial Sequence
  Description of Artificial Sequence: Synthetic oligonucleotide
  Sense strand starting at position 2983 of SEQ ID NO: 1883345
gggcaagagagcuggugau

SEQ ID NO: 2187295 - RNA, 19 nt, Artificial Sequence
  Description of Artificial Sequence: Synthetic oligonucleotide
  Antisense strand to SEQ ID NO: 2187294
aucaccagcucucuugccc

SEQ ID NO: 2187296 - RNA, 19 nt, Artificial Sequence
  Description of Artificial Sequence: Synthetic oligonucleotide
  Sense strand starting at position 3178 of SEQ ID NO: 1883345
ccguguggguaucugauuu

SEQ ID NO: 2187297 - RNA, 19 nt, Artificial Sequence
  Description of Artificial Sequence: Synthetic oligonucleotide
  Antisense strand to SEQ ID NO: 2187296
aaaucagauacccacacgg

SEQ ID NO: 2187298 - RNA, 19 nt, Artificial Sequence
  Description of Artificial Sequence: Synthetic oligonucleotide
  Sense strand starting at position 3182 of SEQ ID NO: 1883345
guggguaucugauuugcac

SEQ ID NO: 2187299 - RNA, 19 nt, Artificial Sequence
  Description of Artificial Sequence: Synthetic oligonucleotide
  Antisense strand to SEQ ID NO: 2187298
gugcaaaucagauacccac

SEQ ID NO: 2187300 - RNA, 19 nt, Artificial Sequence
  Description of Artificial Sequence: Synthetic oligonucleotide
  Sense strand starting at position 3304 of SEQ ID NO: 1883345
gcaaguuaagaggauggua

SEQ ID NO: 2187301 - RNA, 19 nt, Artificial Sequence
  Description of Artificial Sequence: Synthetic oligonucleotide
  Antisense strand to SEQ ID NO: 2187300
uaccauccucuuaacuugc

SEQ ID NO: 2187302 - RNA, 19 nt, Artificial Sequence
  Description of Artificial Sequence: Synthetic oligonucleotide
  Sense strand starting at position 3376 of SEQ ID NO: 1883345
agcaucacuuggcuggaaa

SEQ ID NO: 2187303 - RNA, 19 nt, Artificial Sequence
  Description of Artificial Sequence: Synthetic oligonucleotide
  Antisense strand to SEQ ID NO: 2187302
uuuccagccaagugaugcu

SEQ ID NO: 2187304 - RNA, 19 nt, Artificial Sequence
  Description of Artificial Sequence: Synthetic oligonucleotide
  Sense strand starting at position 3739 of SEQ ID NO: 1883345
gaaauaguagcuuaaagca

SEQ ID NO: 2187305 - RNA, 19 nt, Artificial Sequence
  Description of Artificial Sequence: Synthetic oligonucleotide
  Antisense strand to SEQ ID NO: 2187304
ugcuuuaagcuacuauuuc

SEQ ID NO: 2187306 - RNA, 19 nt, Artificial Sequence
  Description of Artificial Sequence: Synthetic oligonucleotide
  Sense strand starting at position 3747 of SEQ ID NO: 1883345
agcuuaaagcaauagucaa

SEQ ID NO: 2187307 - RNA, 19 nt, Artificial Sequence
  Description of Artificial Sequence: Synthetic oligonucleotide
  Antisense strand to SEQ ID NO: 2187306
uugacuauugcuuuaagcu

SEQ ID NO: 2187308 - RNA, 19 nt, Artificial Sequence
  Description of Artificial Sequence: Synthetic oligonucleotide
  Sense strand starting at position 3783 of SEQ ID NO: 1883345
ucugaugacucucuauaga

SEQ ID NO: 2187309 - RNA, 19 nt, Artificial Sequence
  Description of Artificial Sequence: Synthetic oligonucleotide
  Antisense strand to SEQ ID NO: 2187308
ucuauagagagucaucaga

SEQ ID NO: 2187310 - RNA, 19 nt, Artificial Sequence
  Description of Artificial Sequence: Synthetic oligonucleotide
  Sense strand starting at position 3819 of SEQ ID NO: 1883345
uaacauaugucccugaggu

SEQ ID NO: 2187311 - RNA, 19 nt, Artificial Sequence
  Description of Artificial Sequence: Synthetic oligonucleotide
  Antisense strand to SEQ ID NO: 2187310
accucagggacauauguua

SEQ ID NO: 2187312 - RNA, 19 nt, Artificial Sequence
  Description of Artificial Sequence: Synthetic oligonucleotide
  Sense strand starting at position 3820 of SEQ ID NO: 1883345
aacauaugucccugaggug

SEQ ID NO: 2187313 - RNA, 19 nt, Artificial Sequence
  Description of Artificial Sequence: Synthetic oligonucleotide
  Antisense strand to SEQ ID NO: 2187312
caccucagggacauauguu

SEQ ID NO: 2187314 - RNA, 19 nt, Artificial Sequence
  Description of Artificial Sequence: Synthetic oligonucleotide
  Sense strand starting at position 3821 of SEQ ID NO: 1883345
acauaugucccugaggugu

SEQ ID NO: 2187315 - RNA, 19 nt, Artificial Sequence
  Description of Artificial Sequence: Synthetic oligonucleotide
  Antisense strand to SEQ ID NO: 2187314
acaccucagggacauaugu

SEQ ID NO: 2187316 - RNA, 19 nt, Artificial Sequence
  Description of Artificial Sequence: Synthetic oligonucleotide
  Sense strand starting at position 3925 of SEQ ID NO: 1883345
aggccugaacucugauuga

SEQ ID NO: 2187317 - RNA, 19 nt, Artificial Sequence
  Description of Artificial Sequence: Synthetic oligonucleotide
  Antisense strand to SEQ ID NO: 2187316
ucaaucagaguucaggccu

SEQ ID NO: 2187318 - RNA, 19 nt, Artificial Sequence
  Description of Artificial Sequence: Synthetic oligonucleotide
  Sense strand starting at position 204 of SEQ ID NO: 1883346
ggugaauguuacucuuaua

SEQ ID NO: 2187319 - RNA, 19 nt, Artificial Sequence
  Description of Artificial Sequence: Synthetic oligonucleotide
  Antisense strand to SEQ ID NO: 2187318
uauaagaguaacauucacc

SEQ ID NO: 2187320 - RNA, 19 nt, Artificial Sequence
  Description of Artificial Sequence: Synthetic oligonucleotide
  Sense strand starting at position 499 of SEQ ID NO: 1883346
gguuuaaauaaggguauau

SEQ ID NO: 2187321 - RNA, 19 nt, Artificial Sequence
  Description of Artificial Sequence: Synthetic oligonucleotide
  Antisense strand to SEQ ID NO: 2187320
auauacccuuauuuaaacc

SEQ ID NO: 2187322 - RNA, 19 nt, Artificial Sequence
  Description of Artificial Sequence: Synthetic oligonucleotide
  Sense strand starting at position 508 of SEQ ID NO: 1883346
aaggguauaucugucuaua

SEQ ID NO: 2187323 - RNA, 19 nt, Artificial Sequence
  Description of Artificial Sequence: Synthetic oligonucleotide
  Antisense strand to SEQ ID NO: 2187322
uauagacagauauacccuu

SEQ ID NO: 2187324 - RNA, 19 nt, Artificial Sequence
  Description of Artificial Sequence: Synthetic oligonucleotide
  Sense strand starting at position 511 of SEQ ID NO: 1883346
gguauaucugucuauaaug

SEQ ID NO: 2187325 - RNA, 19 nt, Artificial Sequence
  Description of Artificial Sequence: Synthetic oligonucleotide
  Antisense strand to SEQ ID NO: 2187324
cauuauagacagauauacc

SEQ ID NO: 2187326 - RNA, 19 nt, Artificial Sequence
  Description of Artificial Sequence: Synthetic oligonucleotide
  Sense strand starting at position 592 of SEQ ID NO: 1883346
ugguaaugaccauaggcuu

SEQ ID NO: 2187327 - RNA, 19 nt, Artificial Sequence
  Description of Artificial Sequence: Synthetic oligonucleotide
  Antisense strand to SEQ ID NO: 2187326
aagccuauggucauuacca

SEQ ID NO: 2187328 - RNA, 19 nt, Artificial Sequence
  Description of Artificial Sequence: Synthetic oligonucleotide
  Sense strand starting at position 599 of SEQ ID NO: 1883346
gaccauaggcuuugaggua

SEQ ID NO: 2187329 - RNA, 19 nt, Artificial Sequence
  Description of Artificial Sequence: Synthetic oligonucleotide
  Antisense strand to SEQ ID NO: 2187328
uaccucaaagccuaugguc

SEQ ID NO: 2187330 - RNA, 19 nt, Artificial Sequence
  Description of Artificial Sequence: Synthetic oligonucleotide
  Sense strand starting at position 770 of SEQ ID NO: 1883346
guaaguacucuauaaguga

SEQ ID NO: 2187331 - RNA, 19 nt, Artificial Sequence
  Description of Artificial Sequence: Synthetic oligonucleotide
  Antisense strand to SEQ ID NO: 2187330
ucacuuauagaguacuuac

SEQ ID NO: 2187332 - RNA, 19 nt, Artificial Sequence
  Description of Artificial Sequence: Synthetic oligonucleotide
  Sense strand starting at position 817 of SEQ ID NO: 1883346
uauuaacgugguuacauaa

SEQ ID NO: 2187333 - RNA, 19 nt, Artificial Sequence
  Description of Artificial Sequence: Synthetic oligonucleotide
  Antisense strand to SEQ ID NO: 2187332
uuauguaaccacguuaaua

SEQ ID NO: 2187334 - RNA, 19 nt, Artificial Sequence
  Description of Artificial Sequence: Synthetic oligonucleotide
  Sense strand starting at position 898 of SEQ ID NO: 1883346
aauggaagccuacauguuu

SEQ ID NO: 2187335 - RNA, 19 nt, Artificial Sequence
  Description of Artificial Sequence: Synthetic oligonucleotide
  Antisense strand to SEQ ID NO: 2187334
aaacauguaggcuuccauu

SEQ ID NO: 2187336 - RNA, 19 nt, Artificial Sequence
  Description of Artificial Sequence: Synthetic oligonucleotide
  Sense strand starting at position 1058 of SEQ ID NO: 1883346
gcuguagagguugaacaaa

SEQ ID NO: 2187337 - RNA, 19 nt, Artificial Sequence
  Description of Artificial Sequence: Synthetic oligonucleotide
  Antisense strand to SEQ ID NO: 2187336
uuuguucaaccucuacagc

SEQ ID NO: 2187338 - RNA, 19 nt, Artificial Sequence
  Description of Artificial Sequence: Synthetic oligonucleotide
  Sense strand starting at position 1106 of SEQ ID NO: 1883346
aggucuaagugguugaaga

SEQ ID NO: 2187339 - RNA, 19 nt, Artificial Sequence
  Description of Artificial Sequence: Synthetic oligonucleotide
  Antisense strand to SEQ ID NO: 2187338
ucuucaaccacuuagaccu

SEQ ID NO: 2187340 - RNA, 19 nt, Artificial Sequence
  Description of Artificial Sequence: Synthetic oligonucleotide
  Sense strand starting at position 1107 of SEQ ID NO: 1883346
ggucuaagugguugaagag

SEQ ID NO: 2187341 - RNA, 19 nt, Artificial Sequence
  Description of Artificial Sequence: Synthetic oligonucleotide
  Antisense strand to SEQ ID NO: 2187340
cucuucaaccacuuagacc

SEQ ID NO: 2187342 - RNA, 19 nt, Artificial Sequence
  Description of Artificial Sequence: Synthetic oligonucleotide
  Sense strand starting at position 1108 of SEQ ID NO: 1883346
gucuaagugguugaagaga

SEQ ID NO: 2187343 - RNA, 19 nt, Artificial Sequence
  Description of Artificial Sequence: Synthetic oligonucleotide
  Antisense strand to SEQ ID NO: 2187342
ucucuucaaccacuuagac

SEQ ID NO: 2187344 - RNA, 19 nt, Artificial Sequence
  Description of Artificial Sequence: Synthetic oligonucleotide
  Sense strand starting at position 1131 of SEQ ID NO: 1883346
auugguauaggcuaucaga

SEQ ID NO: 2187345 - RNA, 19 nt, Artificial Sequence
  Description of Artificial Sequence: Synthetic oligonucleotide
  Antisense strand to SEQ ID NO: 2187344
ucugauagccuauaccaau

SEQ ID NO: 2187346 - RNA, 19 nt, Artificial Sequence
  Description of Artificial Sequence: Synthetic oligonucleotide
  Sense strand starting at position 1166 of SEQ ID NO: 1883346
uggguauugguuuaauaca

SEQ ID NO: 2187347 - RNA, 19 nt, Artificial Sequence
  Description of Artificial Sequence: Synthetic oligonucleotide
  Antisense strand to SEQ ID NO: 2187346
uguauuaaaccaauaccca

SEQ ID NO: 2187348 - RNA, 19 nt, Artificial Sequence
  Description of Artificial Sequence: Synthetic oligonucleotide
  Sense strand starting at position 1174 of SEQ ID NO: 1883346
gguuuaauacaguaaguug

SEQ ID NO: 2187349 - RNA, 19 nt, Artificial Sequence
  Description of Artificial Sequence: Synthetic oligonucleotide
  Antisense strand to SEQ ID NO: 2187348
caacuuacuguauuaaacc

SEQ ID NO: 2187350 - RNA, 19 nt, Artificial Sequence
  Description of Artificial Sequence: Synthetic oligonucleotide
  Sense strand starting at position 1288 of SEQ ID NO: 1883346
ucauaacuccuuugggaag

SEQ ID NO: 2187351 - RNA, 19 nt, Artificial Sequence
  Description of Artificial Sequence: Synthetic oligonucleotide
  Antisense strand to SEQ ID NO: 2187350
cuucccaaaggaguuauga

SEQ ID NO: 2187352 - RNA, 19 nt, Artificial Sequence
  Description of Artificial Sequence: Synthetic oligonucleotide
  Sense strand starting at position 1302 of SEQ ID NO: 1883346
ggaagcaaauagguuaaua

SEQ ID NO: 2187353 - RNA, 19 nt, Artificial Sequence
  Description of Artificial Sequence: Synthetic oligonucleotide
  Antisense strand to SEQ ID NO: 2187352
uauuaaccuauuugcuucc

SEQ ID NO: 2187354 - RNA, 19 nt, Artificial Sequence
  Description of Artificial Sequence: Synthetic oligonucleotide
  Sense strand starting at position 1325 of SEQ ID NO: 1883346
gcaggucauaaagauguuu

SEQ ID NO: 2187355 - RNA, 19 nt, Artificial Sequence
  Description of Artificial Sequence: Synthetic oligonucleotide
  Antisense strand to SEQ ID NO: 2187354
aaacaucuuuaugaccugc

SEQ ID NO: 2187356 - RNA, 19 nt, Artificial Sequence
  Description of Artificial Sequence: Synthetic oligonucleotide
  Sense strand starting at position 1384 of SEQ ID NO: 1883346
gguuuaagacuuuggacag

SEQ ID NO: 2187357 - RNA, 19 nt, Artificial Sequence
  Description of Artificial Sequence: Synthetic oligonucleotide
  Antisense strand to SEQ ID NO: 2187356
cuguccaaagucuuaaacc

SEQ ID NO: 2187358 - RNA, 19 nt, Artificial Sequence
  Description of Artificial Sequence: Synthetic oligonucleotide
  Sense strand starting at position 1701 of SEQ ID NO: 1883346
gcacaaguagucuagauau

SEQ ID NO: 2187359 - RNA, 19 nt, Artificial Sequence
  Description of Artificial Sequence: Synthetic oligonucleotide
  Antisense strand to SEQ ID NO: 2187358
auaucuagacuacuugugc

SEQ ID NO: 2187360 - RNA, 19 nt, Artificial Sequence
  Description of Artificial Sequence: Synthetic oligonucleotide
  Sense strand starting at position 1735 of SEQ ID NO: 1883346
guugccucuguuugaauuu

SEQ ID NO: 2187361 - RNA, 19 nt, Artificial Sequence
  Description of Artificial Sequence: Synthetic oligonucleotide
  Antisense strand to SEQ ID NO: 2187360
aaauucaaacagaggcaac

SEQ ID NO: 2187362 - RNA, 19 nt, Artificial Sequence
  Description of Artificial Sequence: Synthetic oligonucleotide
  Sense strand starting at position 1778 of SEQ ID NO: 1883346
caccuaagugaguaauagu

SEQ ID NO: 2187363 - RNA, 19 nt, Artificial Sequence
  Description of Artificial Sequence: Synthetic oligonucleotide
  Antisense strand to SEQ ID NO: 2187362
acuauuacucacuuaggug

SEQ ID NO: 2187364 - RNA, 19 nt, Artificial Sequence
  Description of Artificial Sequence: Synthetic oligonucleotide
  Sense strand starting at position 1787 of SEQ ID NO: 1883346
gaguaauaguuucuaagag

SEQ ID NO: 2187365 - RNA, 19 nt, Artificial Sequence
  Description of Artificial Sequence: Synthetic oligonucleotide
  Antisense strand to SEQ ID NO: 2187364
cucuuagaaacuauuacuc

SEQ ID NO: 2187366 - RNA, 19 nt, Artificial Sequence
  Description of Artificial Sequence: Synthetic oligonucleotide
  Sense strand starting at position 1821 of SEQ ID NO: 1883346
ugaaguaauguugggaaua

SEQ ID NO: 2187367 - RNA, 19 nt, Artificial Sequence
  Description of Artificial Sequence: Synthetic oligonucleotide
  Antisense strand to SEQ ID NO: 2187366
uauucccaacauuacuuca

SEQ ID NO: 2187368 - RNA, 19 nt, Artificial Sequence
  Description of Artificial Sequence: Synthetic oligonucleotide
  Sense strand starting at position 1834 of SEQ ID NO: 1883346
ggaauaguugcauauugca

SEQ ID NO: 2187369 - RNA, 19 nt, Artificial Sequence
  Description of Artificial Sequence: Synthetic oligonucleotide
  Antisense strand to SEQ ID NO: 2187368
ugcaauaugcaacuauucc

SEQ ID NO: 2187370 - RNA, 19 nt, Artificial Sequence
  Description of Artificial Sequence: Synthetic oligonucleotide
  Sense strand starting at position 1858 of SEQ ID NO: 1883346
aucguaucaggacagugau

SEQ ID NO: 2187371 - RNA, 19 nt, Artificial Sequence
  Description of Artificial Sequence: Synthetic oligonucleotide
  Antisense strand to SEQ ID NO: 2187370
aucacuguccugauacgau

SEQ ID NO: 2187372 - RNA, 19 nt, Artificial Sequence
  Description of Artificial Sequence: Synthetic oligonucleotide
  Sense strand starting at position 1932 of SEQ ID NO: 1883346
agcaaaugacguggaaacu

SEQ ID NO: 2187373 - RNA, 19 nt, Artificial Sequence
  Description of Artificial Sequence: Synthetic oligonucleotide
  Antisense strand to SEQ ID NO: 2187372
aguuuccacgucauuugcu

SEQ ID NO: 2187374 - RNA, 19 nt, Artificial Sequence
  Description of Artificial Sequence: Synthetic oligonucleotide
  Sense strand starting at position 2004 of SEQ ID NO: 1883346
ucuacugauccaggaacca

SEQ ID NO: 2187375 - RNA, 19 nt, Artificial Sequence
  Description of Artificial Sequence: Synthetic oligonucleotide
  Antisense strand to SEQ ID NO: 2187374
ugguuccuggaucaguaga

SEQ ID NO: 2187376 - RNA, 19 nt, Artificial Sequence
  Description of Artificial Sequence: Synthetic oligonucleotide
  Sense strand starting at position 2528 of SEQ ID NO: 1883346
ugggcaguaagcuagauua

SEQ ID NO: 2187377 - RNA, 19 nt, Artificial Sequence
  Description of Artificial Sequence: Synthetic oligonucleotide
  Antisense strand to SEQ ID NO: 2187376
uaaucuagcuuacugccca

SEQ ID NO: 2187378 - RNA, 19 nt, Artificial Sequence
  Description of Artificial Sequence: Synthetic oligonucleotide
  Sense strand starting at position 2685 of SEQ ID NO: 1883346
gugucaauccauuaaguua

SEQ ID NO: 2187379 - RNA, 19 nt, Artificial Sequence
  Description of Artificial Sequence: Synthetic oligonucleotide
  Antisense strand to SEQ ID NO: 2187378
uaacuuaauggauugacac

SEQ ID NO: 2187380 - RNA, 19 nt, Artificial Sequence
  Description of Artificial Sequence: Synthetic oligonucleotide
  Sense strand starting at position 2916 of SEQ ID NO: 1883346
gggaacuguucagcaugga

SEQ ID NO: 2187381 - RNA, 19 nt, Artificial Sequence
  Description of Artificial Sequence: Synthetic oligonucleotide
  Antisense strand to SEQ ID NO: 2187380
uccaugcugaacaguuccc

SEQ ID NO: 2187382 - RNA, 19 nt, Artificial Sequence
  Description of Artificial Sequence: Synthetic oligonucleotide
  Sense strand starting at position 3012 of SEQ ID NO: 1883346
aagagaucugggcaggcuu

SEQ ID NO: 2187383 - RNA, 19 nt, Artificial Sequence
  Description of Artificial Sequence: Synthetic oligonucleotide
  Antisense strand to SEQ ID NO: 2187382
aagccugcccagaucucuu

SEQ ID NO: 2187384 - RNA, 19 nt, Artificial Sequence
  Description of Artificial Sequence: Synthetic oligonucleotide
  Sense strand starting at position 3115 of SEQ ID NO: 1883346
guauucugucacuaacuag

SEQ ID NO: 2187385 - RNA, 19 nt, Artificial Sequence
  Description of Artificial Sequence: Synthetic oligonucleotide
  Antisense strand to SEQ ID NO: 2187384
cuaguuagugacagaauac

SEQ ID NO: 2187386 - RNA, 19 nt, Artificial Sequence
  Description of Artificial Sequence: Synthetic oligonucleotide
  Sense strand starting at position 3265 of SEQ ID NO: 1883346
gugaauacagagcauucuu

SEQ ID NO: 2187387 - RNA, 19 nt, Artificial Sequence
  Description of Artificial Sequence: Synthetic oligonucleotide
  Antisense strand to SEQ ID NO: 2187386
aagaaugcucuguauucac

SEQ ID NO: 2187388 - RNA, 19 nt, Artificial Sequence
  Description of Artificial Sequence: Synthetic oligonucleotide
  Sense strand starting at position 3338 of SEQ ID NO: 1883346
ucuuuaaucucuuugggag

SEQ ID NO: 2187389 - RNA, 19 nt, Artificial Sequence
  Description of Artificial Sequence: Synthetic oligonucleotide
  Antisense strand to SEQ ID NO: 2187388
cucccaaagagauuaaaga

SEQ ID NO: 2187390 - RNA, 19 nt, Artificial Sequence
  Description of Artificial Sequence: Synthetic oligonucleotide
  Sense strand starting at position 3339 of SEQ ID NO: 1883346
cuuuaaucucuuugggagg

SEQ ID NO: 2187391 - RNA, 19 nt, Artificial Sequence
  Description of Artificial Sequence: Synthetic oligonucleotide
  Antisense strand to SEQ ID NO: 2187390
ccucccaaagagauuaaag

SEQ ID NO: 2187392 - RNA, 19 nt, Artificial Sequence
  Description of Artificial Sequence: Synthetic oligonucleotide
  Sense strand starting at position 3344 of SEQ ID NO: 1883346
aucucuuugggagguugau

SEQ ID NO: 2187393 - RNA, 19 nt, Artificial Sequence
  Description of Artificial Sequence: Synthetic oligonucleotide
  Antisense strand to SEQ ID NO: 2187392
aucaaccucccaaagagau

SEQ ID NO: 2187394 - RNA, 19 nt, Artificial Sequence
  Description of Artificial Sequence: Synthetic oligonucleotide
  Sense strand starting at position 3398 of SEQ ID NO: 1883346
uaggccucucuauaggaua

SEQ ID NO: 2187395 - RNA, 19 nt, Artificial Sequence
  Description of Artificial Sequence: Synthetic oligonucleotide
  Antisense strand to SEQ ID NO: 2187394
uauccuauagagaggccua

SEQ ID NO: 2187396 - RNA, 19 nt, Artificial Sequence
  Description of Artificial Sequence: Synthetic oligonucleotide
  Sense strand starting at position 3530 of SEQ ID NO: 1883346
gaaagcuggcagugaaaua

SEQ ID NO: 2187397 - RNA, 19 nt, Artificial Sequence
  Description of Artificial Sequence: Synthetic oligonucleotide
  Antisense strand to SEQ ID NO: 2187396
uauuucacugccagcuuuc

SEQ ID NO: 2187398 - RNA, 19 nt, Artificial Sequence
  Description of Artificial Sequence: Synthetic oligonucleotide
  Sense strand starting at position 104 of SEQ ID NO: 1883347
gugagucaggaguaaguca

SEQ ID NO: 2187399 - RNA, 19 nt, Artificial Sequence
  Description of Artificial Sequence: Synthetic oligonucleotide
  Antisense strand to SEQ ID NO: 2187398
ugacuuacuccugacucac

SEQ ID NO: 2187400 - RNA, 19 nt, Artificial Sequence
  Description of Artificial Sequence: Synthetic oligonucleotide
  Sense strand starting at position 112 of SEQ ID NO: 1883347
ggaguaagucaaugugaca

SEQ ID NO: 2187401 - RNA, 19 nt, Artificial Sequence
  Description of Artificial Sequence: Synthetic oligonucleotide
  Antisense strand to SEQ ID NO: 2187400
ugucacauugacuuacucc

SEQ ID NO: 2187402 - RNA, 19 nt, Artificial Sequence
  Description of Artificial Sequence: Synthetic oligonucleotide
  Sense strand starting at position 124 of SEQ ID NO: 1883347
ugugacauauacucacuga

SEQ ID NO: 2187403 - RNA, 19 nt, Artificial Sequence
  Description of Artificial Sequence: Synthetic oligonucleotide
  Antisense strand to SEQ ID NO: 2187402
ucagugaguauaugucaca

SEQ ID NO: 2187404 - RNA, 19 nt, Artificial Sequence
  Description of Artificial Sequence: Synthetic oligonucleotide
  Sense strand starting at position 159 of SEQ ID NO: 1883347
acaagauuauacgucacuu

SEQ ID NO: 2187405 - RNA, 19 nt, Artificial Sequence
  Description of Artificial Sequence: Synthetic oligonucleotide
  Antisense strand to SEQ ID NO: 2187404
aagugacguauaaucuugu

SEQ ID NO: 2187406 - RNA, 19 nt, Artificial Sequence
  Description of Artificial Sequence: Synthetic oligonucleotide
  Sense strand starting at position 182 of SEQ ID NO: 1883347
gugcuagagauucgacaga

SEQ ID NO: 2187407 - RNA, 19 nt, Artificial Sequence
  Description of Artificial Sequence: Synthetic oligonucleotide
  Antisense strand to SEQ ID NO: 2187406
ucugucgaaucucuagcac

SEQ ID NO: 2187408 - RNA, 19 nt, Artificial Sequence
  Description of Artificial Sequence: Synthetic oligonucleotide
  Sense strand starting at position 220 of SEQ ID NO: 1883347
uaggaacucuaguuugaca

SEQ ID NO: 2187409 - RNA, 19 nt, Artificial Sequence
  Description of Artificial Sequence: Synthetic oligonucleotide
  Antisense strand to SEQ ID NO: 2187408
ugucaaacuagaguuccua

SEQ ID NO: 2187410 - RNA, 19 nt, Artificial Sequence
  Description of Artificial Sequence: Synthetic oligonucleotide
  Sense strand starting at position 222 of SEQ ID NO: 1883347
ggaacucuaguuugacaaa

SEQ ID NO: 2187411 - RNA, 19 nt, Artificial Sequence
  Description of Artificial Sequence: Synthetic oligonucleotide
  Antisense strand to SEQ ID NO: 2187410
uuugucaaacuagaguucc

SEQ ID NO: 2187412 - RNA, 19 nt, Artificial Sequence
  Description of Artificial Sequence: Synthetic oligonucleotide
  Sense strand starting at position 275 of SEQ ID NO: 1883347
gcgagacacacauguguaa

SEQ ID NO: 2187413 - RNA, 19 nt, Artificial Sequence
  Description of Artificial Sequence: Synthetic oligonucleotide
  Antisense strand to SEQ ID NO: 2187412
uuacacaugugugucucgc

SEQ ID NO: 2187414 - RNA, 19 nt, Artificial Sequence
  Description of Artificial Sequence: Synthetic oligonucleotide
  Sense strand starting at position 575 of SEQ ID NO: 1883347
ggccacguauguguaauuu

SEQ ID NO: 2187415 - RNA, 19 nt, Artificial Sequence
  Description of Artificial Sequence: Synthetic oligonucleotide
  Antisense strand to SEQ ID NO: 2187414
aaauuacacauacguggcc

SEQ ID NO: 2187416 - RNA, 19 nt, Artificial Sequence
  Description of Artificial Sequence: Synthetic oligonucleotide
  Sense strand starting at position 579 of SEQ ID NO: 1883347
acguauguguaauuucuaa

SEQ ID NO: 2187417 - RNA, 19 nt, Artificial Sequence
  Description of Artificial Sequence: Synthetic oligonucleotide
  Antisense strand to SEQ ID NO: 2187416
uuagaaauuacacauacgu

SEQ ID NO: 2187418 - RNA, 19 nt, Artificial Sequence
  Description of Artificial Sequence: Synthetic oligonucleotide
  Sense strand starting at position 583 of SEQ ID NO: 1883347
auguguaauuucuaaaggu

SEQ ID NO: 2187419 - RNA, 19 nt, Artificial Sequence
  Description of Artificial Sequence: Synthetic oligonucleotide
  Antisense strand to SEQ ID NO: 2187418
accuuuagaaauuacacau

SEQ ID NO: 2187420 - RNA, 19 nt, Artificial Sequence
  Description of Artificial Sequence: Synthetic oligonucleotide
  Sense strand starting at position 718 of SEQ ID NO: 1883347
agugguacucuguaaggca

SEQ ID NO: 2187421 - RNA, 19 nt, Artificial Sequence
  Description of Artificial Sequence: Synthetic oligonucleotide
  Antisense strand to SEQ ID NO: 2187420
ugccuuacagaguaccacu

SEQ ID NO: 2187422 - RNA, 19 nt, Artificial Sequence
  Description of Artificial Sequence: Synthetic oligonucleotide
  Sense strand starting at position 1165 of SEQ ID NO: 1883347
uugggaaguuagcuuuguu

SEQ ID NO: 2187423 - RNA, 19 nt, Artificial Sequence
  Description of Artificial Sequence: Synthetic oligonucleotide
  Antisense strand to SEQ ID NO: 2187422
aacaaagcuaacuucccaa

SEQ ID NO: 2187424 - RNA, 19 nt, Artificial Sequence
  Description of Artificial Sequence: Synthetic oligonucleotide
  Sense strand starting at position 1207 of SEQ ID NO: 1883347
uugggugguaguuaugcau

SEQ ID NO: 2187425 - RNA, 19 nt, Artificial Sequence
  Description of Artificial Sequence: Synthetic oligonucleotide
  Antisense strand to SEQ ID NO: 2187424
augcauaacuaccacccaa

SEQ ID NO: 2187426 - RNA, 19 nt, Artificial Sequence
  Description of Artificial Sequence: Synthetic oligonucleotide
  Sense strand starting at position 1235 of SEQ ID NO: 1883347
aucgacaauucucuaagga

SEQ ID NO: 2187427 - RNA, 19 nt, Artificial Sequence
  Description of Artificial Sequence: Synthetic oligonucleotide
  Antisense strand to SEQ ID NO: 2187426
uccuuagagaauugucgau

SEQ ID NO: 2187428 - RNA, 19 nt, Artificial Sequence
  Description of Artificial Sequence: Synthetic oligonucleotide
  Sense strand starting at position 1260 of SEQ ID NO: 1883347
agugcauguccuggaaauu

SEQ ID NO: 2187429 - RNA, 19 nt, Artificial Sequence
  Description of Artificial Sequence: Synthetic oligonucleotide
  Antisense strand to SEQ ID NO: 2187428
aauuuccaggacaugcacu

SEQ ID NO: 2187430 - RNA, 19 nt, Artificial Sequence
  Description of Artificial Sequence: Synthetic oligonucleotide
  Sense strand starting at position 1261 of SEQ ID NO: 1883347
gugcauguccuggaaauuc

SEQ ID NO: 2187431 - RNA, 19 nt, Artificial Sequence
  Description of Artificial Sequence: Synthetic oligonucleotide
  Antisense strand to SEQ ID NO: 2187430
gaauuuccaggacaugcac

SEQ ID NO: 2187432 - RNA, 19 nt, Artificial Sequence
  Description of Artificial Sequence: Synthetic oligonucleotide
  Sense strand starting at position 1300 of SEQ ID NO: 1883347
ccagguacacuagaauguu

SEQ ID NO: 2187433 - RNA, 19 nt, Artificial Sequence
  Description of Artificial Sequence: Synthetic oligonucleotide
  Antisense strand to SEQ ID NO: 2187432
aacauucuaguguaccugg

SEQ ID NO: 2187434 - RNA, 19 nt, Artificial Sequence
  Description of Artificial Sequence: Synthetic oligonucleotide
  Sense strand starting at position 1303 of SEQ ID NO: 1883347
gguacacuagaauguuuau

SEQ ID NO: 2187435 - RNA, 19 nt, Artificial Sequence
  Description of Artificial Sequence: Synthetic oligonucleotide
  Antisense strand to SEQ ID NO: 2187434
auaaacauucuaguguacc

SEQ ID NO: 2187436 - RNA, 19 nt, Artificial Sequence
  Description of Artificial Sequence: Synthetic oligonucleotide
  Sense strand starting at position 1312 of SEQ ID NO: 1883347
gaauguuuauagccauguu

SEQ ID NO: 2187437 - RNA, 19 nt, Artificial Sequence
  Description of Artificial Sequence: Synthetic oligonucleotide
  Antisense strand to SEQ ID NO: 2187436
aacauggcuauaaacauuc

SEQ ID NO: 2187438 - RNA, 19 nt, Artificial Sequence
  Description of Artificial Sequence: Synthetic oligonucleotide
  Sense strand starting at position 1557 of SEQ ID NO: 1883347
aggaaaugaucacacuagu

SEQ ID NO: 2187439 - RNA, 19 nt, Artificial Sequence
  Description of Artificial Sequence: Synthetic oligonucleotide
  Antisense strand to SEQ ID NO: 2187438
acuagugugaucauuuccu

SEQ ID NO: 2187440 - RNA, 19 nt, Artificial Sequence
  Description of Artificial Sequence: Synthetic oligonucleotide
  Sense strand starting at position 1716 of SEQ ID NO: 1883347
gcguaugcuauaucuguua

SEQ ID NO: 2187441 - RNA, 19 nt, Artificial Sequence
  Description of Artificial Sequence: Synthetic oligonucleotide
  Antisense strand to SEQ ID NO: 2187440
uaacagauauagcauacgc

SEQ ID NO: 2187442 - RNA, 19 nt, Artificial Sequence
  Description of Artificial Sequence: Synthetic oligonucleotide
  Sense strand starting at position 1758 of SEQ ID NO: 1883347
acagauucgugccucuaaa

SEQ ID NO: 2187443 - RNA, 19 nt, Artificial Sequence
  Description of Artificial Sequence: Synthetic oligonucleotide
  Antisense strand to SEQ ID NO: 2187442
uuuagaggcacgaaucugu

SEQ ID NO: 2187444 - RNA, 19 nt, Artificial Sequence
  Description of Artificial Sequence: Synthetic oligonucleotide
  Sense strand starting at position 1780 of SEQ ID NO: 1883347
guggaagcuccagaacgau

SEQ ID NO: 2187445 - RNA, 19 nt, Artificial Sequence
  Description of Artificial Sequence: Synthetic oligonucleotide
  Antisense strand to SEQ ID NO: 2187444
aucguucuggagcuuccac

SEQ ID NO: 2187446 - RNA, 19 nt, Artificial Sequence
  Description of Artificial Sequence: Synthetic oligonucleotide
  Sense strand starting at position 1792 of SEQ ID NO: 1883347
gaacgauccgccucgccau

SEQ ID NO: 2187447 - RNA, 19 nt, Artificial Sequence
  Description of Artificial Sequence: Synthetic oligonucleotide
  Antisense strand to SEQ ID NO: 2187446
auggcgaggcggaucguuc

SEQ ID NO: 2187448 - RNA, 19 nt, Artificial Sequence
  Description of Artificial Sequence: Synthetic oligonucleotide
  Sense strand starting at position 1904 of SEQ ID NO: 1883347
uaaggagaguucucagggu

SEQ ID NO: 2187449 - RNA, 19 nt, Artificial Sequence
  Description of Artificial Sequence: Synthetic oligonucleotide
  Antisense strand to SEQ ID NO: 2187448
acccugagaacucuccuua

SEQ ID NO: 2187450 - RNA, 19 nt, Artificial Sequence
  Description of Artificial Sequence: Synthetic oligonucleotide
  Sense strand starting at position 3413 of SEQ ID NO: 1883347
cgggcagacguuuaaagga

SEQ ID NO: 2187451 - RNA, 19 nt, Artificial Sequence
  Description of Artificial Sequence: Synthetic oligonucleotide
  Antisense strand to SEQ ID NO: 2187450
uccuuuaaacgucugcccg

SEQ ID NO: 2187452 - RNA, 19 nt, Artificial Sequence
  Description of Artificial Sequence: Synthetic oligonucleotide
  Sense strand starting at position 3415 of SEQ ID NO: 1883347
ggcagacguuuaaaggagu

SEQ ID NO: 2187453 - RNA, 19 nt, Artificial Sequence
  Description of Artificial Sequence: Synthetic oligonucleotide
  Antisense strand to SEQ ID NO: 2187452
acuccuuuaaacgucugcc

SEQ ID NO: 2187454 - RNA, 19 nt, Artificial Sequence
  Description of Artificial Sequence: Synthetic oligonucleotide
  Sense strand starting at position 3440 of SEQ ID NO: 1883347
gugucugggcgucaacaau

SEQ ID NO: 2187455 - RNA, 19 nt, Artificial Sequence
  Description of Artificial Sequence: Synthetic oligonucleotide
  Antisense strand to SEQ ID NO: 2187454
auuguugacgcccagacac

SEQ ID NO: 2187456 - RNA, 19 nt, Artificial Sequence
  Description of Artificial Sequence: Synthetic oligonucleotide
  Sense strand starting at position 3479 of SEQ ID NO: 1883347
gacagagucgugggauucu

SEQ ID NO: 2187457 - RNA, 19 nt, Artificial Sequence
  Description of Artificial Sequence: Synthetic oligonucleotide
  Antisense strand to SEQ ID NO: 2187456
agaaucccacgacucuguc

SEQ ID NO: 2187458 - RNA, 19 nt, Artificial Sequence
  Description of Artificial Sequence: Synthetic oligonucleotide
  Sense strand starting at position 3722 of SEQ ID NO: 1883347
cauugcugagaauguuaau

SEQ ID NO: 2187459 - RNA, 19 nt, Artificial Sequence
  Description of Artificial Sequence: Synthetic oligonucleotide
  Antisense strand to SEQ ID NO: 2187458
auuaacauucucagcaaug

SEQ ID NO: 2187460 - RNA, 19 nt, Artificial Sequence
  Description of Artificial Sequence: Synthetic oligonucleotide
  Sense strand starting at position 3749 of SEQ ID NO: 1883347
uacggauguguuuaugaag

SEQ ID NO: 2187461 - RNA, 19 nt, Artificial Sequence
  Description of Artificial Sequence: Synthetic oligonucleotide
  Antisense strand to SEQ ID NO: 2187460
cuucauaaacacauccgua

SEQ ID NO: 2187462 - RNA, 19 nt, Artificial Sequence
  Description of Artificial Sequence: Synthetic oligonucleotide
  Sense strand starting at position 3755 of SEQ ID NO: 1883347
uguguuuaugaaggcuacu

SEQ ID NO: 2187463 - RNA, 19 nt, Artificial Sequence
  Description of Artificial Sequence: Synthetic oligonucleotide
  Antisense strand to SEQ ID NO: 2187462
aguagccuucauaaacaca

SEQ ID NO: 2187464 - RNA, 19 nt, Artificial Sequence
  Description of Artificial Sequence: Synthetic oligonucleotide
  Sense strand starting at position 3758 of SEQ ID NO: 1883347
guuuaugaaggcuacuaca

SEQ ID NO: 2187465 - RNA, 19 nt, Artificial Sequence
  Description of Artificial Sequence: Synthetic oligonucleotide
  Antisense strand to SEQ ID NO: 2187464
uguaguagccuucauaaac

SEQ ID NO: 2187466 - RNA, 19 nt, Artificial Sequence
  Description of Artificial Sequence: Synthetic oligonucleotide
  Sense strand starting at position 3815 of SEQ ID NO: 1883347
gagaaauucucuuuagcgg

SEQ ID NO: 2187467 - RNA, 19 nt, Artificial Sequence
  Description of Artificial Sequence: Synthetic oligonucleotide
  Antisense strand to SEQ ID NO: 2187466
ccgcuaaagagaauuucuc

SEQ ID NO: 2187468 - RNA, 19 nt, Artificial Sequence
  Description of Artificial Sequence: Synthetic oligonucleotide
  Sense strand starting at position 3816 of SEQ ID NO: 1883347
agaaauucucuuuagcggu

SEQ ID NO: 2187469 - RNA, 19 nt, Artificial Sequence
  Description of Artificial Sequence: Synthetic oligonucleotide
  Antisense strand to SEQ ID NO: 2187468
accgcuaaagagaauuucu

SEQ ID NO: 2187470 - RNA, 19 nt, Artificial Sequence
  Description of Artificial Sequence: Synthetic oligonucleotide
  Sense strand starting at position 3832 of SEQ ID NO: 1883347
ggugucuuggguuacgagu

SEQ ID NO: 2187471 - RNA, 19 nt, Artificial Sequence
  Description of Artificial Sequence: Synthetic oligonucleotide
  Antisense strand to SEQ ID NO: 2187470
acucguaacccaagacacc

SEQ ID NO: 2187472 - RNA, 19 nt, Artificial Sequence
  Description of Artificial Sequence: Synthetic oligonucleotide
  Sense strand starting at position 3850 of SEQ ID NO: 1883347
ucaggaucccuggagugua

SEQ ID NO: 2187473 - RNA, 19 nt, Artificial Sequence
  Description of Artificial Sequence: Synthetic oligonucleotide
  Antisense strand to SEQ ID NO: 2187472
uacacuccagggauccuga

SEQ ID NO: 2187474 - RNA, 19 nt, Artificial Sequence
  Description of Artificial Sequence: Synthetic oligonucleotide
  Sense strand starting at position 3912 of SEQ ID NO: 1883347
gaaguauugccuuacguug

SEQ ID NO: 2187475 - RNA, 19 nt, Artificial Sequence
  Description of Artificial Sequence: Synthetic oligonucleotide
  Antisense strand to SEQ ID NO: 2187474
caacguaaggcaauacuuc

SEQ ID NO: 2187476 - RNA, 19 nt, Artificial Sequence
  Description of Artificial Sequence: Synthetic oligonucleotide
  Sense strand starting at position 3975 of SEQ ID NO: 1883347
uggcuacgucacgaaucaa

SEQ ID NO: 2187477 - RNA, 19 nt, Artificial Sequence
  Description of Artificial Sequence: Synthetic oligonucleotide
  Antisense strand to SEQ ID NO: 2187476
uugauucgugacguagcca

SEQ ID NO: 2187478 - RNA, 19 nt, Artificial Sequence
  Description of Artificial Sequence: Synthetic oligonucleotide
  Sense strand starting at position 239 of SEQ ID NO: 1883348
aaacaugauugguucugaa

SEQ ID NO: 2187479 - RNA, 19 nt, Artificial Sequence
  Description of Artificial Sequence: Synthetic oligonucleotide
  Antisense strand to SEQ ID NO: 2187478
uucagaaccaaucauguuu

SEQ ID NO: 2187480 - RNA, 19 nt, Artificial Sequence
  Description of Artificial Sequence: Synthetic oligonucleotide
  Sense strand starting at position 296 of SEQ ID NO: 1883348
gauauaguuuggcugugau

SEQ ID NO: 2187481 - RNA, 19 nt, Artificial Sequence
  Description of Artificial Sequence: Synthetic oligonucleotide
  Antisense strand to SEQ ID NO: 2187480
aucacagccaaacuauauc

SEQ ID NO: 2187482 - RNA, 19 nt, Artificial Sequence
  Description of Artificial Sequence: Synthetic oligonucleotide
  Sense strand starting at position 449 of SEQ ID NO: 1883348
gaaaccuaauggguuuauu

SEQ ID NO: 2187483 - RNA, 19 nt, Artificial Sequence
  Description of Artificial Sequence: Synthetic oligonucleotide
  Antisense strand to SEQ ID NO: 2187482
aauaaacccauuagguuuc

SEQ ID NO: 2187484 - RNA, 19 nt, Artificial Sequence
  Description of Artificial Sequence: Synthetic oligonucleotide
  Sense strand starting at position 597 of SEQ ID NO: 1883348
uucuuuccagucugggaua

SEQ ID NO: 2187485 - RNA, 19 nt, Artificial Sequence
  Description of Artificial Sequence: Synthetic oligonucleotide
  Antisense strand to SEQ ID NO: 2187484
uaucccagacuggaaagaa

SEQ ID NO: 2187486 - RNA, 19 nt, Artificial Sequence
  Description of Artificial Sequence: Synthetic oligonucleotide
  Sense strand starting at position 610 of SEQ ID NO: 1883348
gggauaugucuuuaucugc

SEQ ID NO: 2187487 - RNA, 19 nt, Artificial Sequence
  Description of Artificial Sequence: Synthetic oligonucleotide
  Antisense strand to SEQ ID NO: 2187486
gcagauaaagacauauccc

SEQ ID NO: 2187488 - RNA, 19 nt, Artificial Sequence
  Description of Artificial Sequence: Synthetic oligonucleotide
  Sense strand starting at position 675 of SEQ ID NO: 1883348
cugagcuuccaguaucuaa

SEQ ID NO: 2187489 - RNA, 19 nt, Artificial Sequence
  Description of Artificial Sequence: Synthetic oligonucleotide
  Antisense strand to SEQ ID NO: 2187488
uuagauacuggaagcucag

SEQ ID NO: 2187490 - RNA, 19 nt, Artificial Sequence
  Description of Artificial Sequence: Synthetic oligonucleotide
  Sense strand starting at position 728 of SEQ ID NO: 1883348
gugagaauuuaaggguaaa

SEQ ID NO: 2187491 - RNA, 19 nt, Artificial Sequence
  Description of Artificial Sequence: Synthetic oligonucleotide
  Antisense strand to SEQ ID NO: 2187490
uuuacccuuaaauucucac

SEQ ID NO: 2187492 - RNA, 19 nt, Artificial Sequence
  Description of Artificial Sequence: Synthetic oligonucleotide
  Sense strand starting at position 881 of SEQ ID NO: 1883348
aauauaauagaggguugua

SEQ ID NO: 2187493 - RNA, 19 nt, Artificial Sequence
  Description of Artificial Sequence: Synthetic oligonucleotide
  Antisense strand to SEQ ID NO: 2187492
uacaacccucuauuauauu

SEQ ID NO: 2187494 - RNA, 19 nt, Artificial Sequence
  Description of Artificial Sequence: Synthetic oligonucleotide
  Sense strand starting at position 1380 of SEQ ID NO: 1883348
gggcaugguguuagcaaug

SEQ ID NO: 2187495 - RNA, 19 nt, Artificial Sequence
  Description of Artificial Sequence: Synthetic oligonucleotide
  Antisense strand to SEQ ID NO: 2187494
cauugcuaacaccaugccc

SEQ ID NO: 2187496 - RNA, 19 nt, Artificial Sequence
  Description of Artificial Sequence: Synthetic oligonucleotide
  Sense strand starting at position 1386 of SEQ ID NO: 1883348
gguguuagcaauggugaca

SEQ ID NO: 2187497 - RNA, 19 nt, Artificial Sequence
  Description of Artificial Sequence: Synthetic oligonucleotide
  Antisense strand to SEQ ID NO: 2187496
ugucaccauugcuaacacc

SEQ ID NO: 2187498 - RNA, 19 nt, Artificial Sequence
  Description of Artificial Sequence: Synthetic oligonucleotide
  Sense strand starting at position 1470 of SEQ ID NO: 1883348
uaauacucuguugggaauu

SEQ ID NO: 2187499 - RNA, 19 nt, Artificial Sequence
  Description of Artificial Sequence: Synthetic oligonucleotide
  Antisense strand to SEQ ID NO: 2187498
aauucccaacagaguauua

SEQ ID NO: 2187500 - RNA, 19 nt, Artificial Sequence
  Description of Artificial Sequence: Synthetic oligonucleotide
  Sense strand starting at position 1483 of SEQ ID NO: 1883348
ggaauucucaggcagcaca

SEQ ID NO: 2187501 - RNA, 19 nt, Artificial Sequence
  Description of Artificial Sequence: Synthetic oligonucleotide
  Antisense strand to SEQ ID NO: 2187500
ugugcugccugagaauucc

SEQ ID NO: 2187502 - RNA, 19 nt, Artificial Sequence
  Description of Artificial Sequence: Synthetic oligonucleotide
  Sense strand starting at position 1543 of SEQ ID NO: 1883348
ggugccauccaggguaaga

SEQ ID NO: 2187503 - RNA, 19 nt, Artificial Sequence
  Description of Artificial Sequence: Synthetic oligonucleotide
  Antisense strand to SEQ ID NO: 2187502
ucuuacccuggauggcacc

SEQ ID NO: 2187504 - RNA, 19 nt, Artificial Sequence
  Description of Artificial Sequence: Synthetic oligonucleotide
  Sense strand starting at position 1655 of SEQ ID NO: 1883348
gcaccaaauggaugaacua

SEQ ID NO: 2187505 - RNA, 19 nt, Artificial Sequence
  Description of Artificial Sequence: Synthetic oligonucleotide
  Antisense strand to SEQ ID NO: 2187504
uaguucauccauuuggugc

SEQ ID NO: 2187506 - RNA, 19 nt, Artificial Sequence
  Description of Artificial Sequence: Synthetic oligonucleotide
  Sense strand starting at position 1665 of SEQ ID NO: 1883348
gaugaacuacuacgguuua

SEQ ID NO: 2187507 - RNA, 19 nt, Artificial Sequence
  Description of Artificial Sequence: Synthetic oligonucleotide
  Antisense strand to SEQ ID NO: 2187506
uaaaccguaguaguucauc

SEQ ID NO: 2187508 - RNA, 19 nt, Artificial Sequence
  Description of Artificial Sequence: Synthetic oligonucleotide
  Sense strand starting at position 1677 of SEQ ID NO: 1883348
cgguuuaagcauugaacua

SEQ ID NO: 2187509 - RNA, 19 nt, Artificial Sequence
  Description of Artificial Sequence: Synthetic oligonucleotide
  Antisense strand to SEQ ID NO: 2187508
uaguucaaugcuuaaaccg

SEQ ID NO: 2187510 - RNA, 19 nt, Artificial Sequence
  Description of Artificial Sequence: Synthetic oligonucleotide
  Sense strand starting at position 1678 of SEQ ID NO: 1883348
gguuuaagcauugaacuag

SEQ ID NO: 2187511 - RNA, 19 nt, Artificial Sequence
  Description of Artificial Sequence: Synthetic oligonucleotide
  Antisense strand to SEQ ID NO: 2187510
cuaguucaaugcuuaaacc

SEQ ID NO: 2187512 - RNA, 19 nt, Artificial Sequence
  Description of Artificial Sequence: Synthetic oligonucleotide
  Sense strand starting at position 1749 of SEQ ID NO: 1883348
gggaucucuuucgcaagaa

SEQ ID NO: 2187513 - RNA, 19 nt, Artificial Sequence
  Description of Artificial Sequence: Synthetic oligonucleotide
  Antisense strand to SEQ ID NO: 2187512
uucuugcgaaagagauccc

SEQ ID NO: 2187514 - RNA, 19 nt, Artificial Sequence
  Description of Artificial Sequence: Synthetic oligonucleotide
  Sense strand starting at position 2245 of SEQ ID NO: 1883348
ggugaagucuucccaggug

SEQ ID NO: 2187515 - RNA, 19 nt, Artificial Sequence
  Description of Artificial Sequence: Synthetic oligonucleotide
  Antisense strand to SEQ ID NO: 2187514
caccugggaagacuucacc

SEQ ID NO: 2187516 - RNA, 19 nt, Artificial Sequence
  Description of Artificial Sequence: Synthetic oligonucleotide
  Sense strand starting at position 2820 of SEQ ID NO: 1883348
uggcuuuccguggaauuga

SEQ ID NO: 2187517 - RNA, 19 nt, Artificial Sequence
  Description of Artificial Sequence: Synthetic oligonucleotide
  Antisense strand to SEQ ID NO: 2187516
ucaauuccacggaaagcca

SEQ ID NO: 2187518 - RNA, 19 nt, Artificial Sequence
  Description of Artificial Sequence: Synthetic oligonucleotide
  Sense strand starting at position 2898 of SEQ ID NO: 1883348
agccaaagucagggaaagu

SEQ ID NO: 2187519 - RNA, 19 nt, Artificial Sequence
  Description of Artificial Sequence: Synthetic oligonucleotide
  Antisense strand to SEQ ID NO: 2187518
acuuucccugacuuuggcu

SEQ ID NO: 2187520 - RNA, 19 nt, Artificial Sequence
  Description of Artificial Sequence: Synthetic oligonucleotide
  Sense strand starting at position 2911 of SEQ ID NO: 1883348
gaaagugaguuccugccua

SEQ ID NO: 2187521 - RNA, 19 nt, Artificial Sequence
  Description of Artificial Sequence: Synthetic oligonucleotide
  Antisense strand to SEQ ID NO: 2187520
uaggcaggaacucacuuuc

SEQ ID NO: 2187522 - RNA, 19 nt, Artificial Sequence
  Description of Artificial Sequence: Synthetic oligonucleotide
  Sense strand starting at position 3061 of SEQ ID NO: 1883348
ucuuaauaugcguugcagu

SEQ ID NO: 2187523 - RNA, 19 nt, Artificial Sequence
  Description of Artificial Sequence: Synthetic oligonucleotide
  Antisense strand to SEQ ID NO: 2187522
acugcaacgcauauuaaga

SEQ ID NO: 2187524 - RNA, 19 nt, Artificial Sequence
  Description of Artificial Sequence: Synthetic oligonucleotide
  Sense strand starting at position 3237 of SEQ ID NO: 1883348
cagugauucuugguuucuu

SEQ ID NO: 2187525 - RNA, 19 nt, Artificial Sequence
  Description of Artificial Sequence: Synthetic oligonucleotide
  Antisense strand to SEQ ID NO: 2187524
aagaaaccaagaaucacug

SEQ ID NO: 2187526 - RNA, 19 nt, Artificial Sequence
  Description of Artificial Sequence: Synthetic oligonucleotide
  Sense strand starting at position 3238 of SEQ ID NO: 1883348
agugauucuugguuucuuu

SEQ ID NO: 2187527 - RNA, 19 nt, Artificial Sequence
  Description of Artificial Sequence: Synthetic oligonucleotide
  Antisense strand to SEQ ID NO: 2187526
aaagaaaccaagaaucacu

SEQ ID NO: 2187528 - RNA, 19 nt, Artificial Sequence
  Description of Artificial Sequence: Synthetic oligonucleotide
  Sense strand starting at position 3268 of SEQ ID NO: 1883348
ugacucauauuugggauau

SEQ ID NO: 2187529 - RNA, 19 nt, Artificial Sequence
  Description of Artificial Sequence: Synthetic oligonucleotide
  Antisense strand to SEQ ID NO: 2187528
auaucccaaauaugaguca

SEQ ID NO: 2187530 - RNA, 19 nt, Artificial Sequence
  Description of Artificial Sequence: Synthetic oligonucleotide
  Sense strand starting at position 3269 of SEQ ID NO: 1883348
gacucauauuugggauauu

SEQ ID NO: 2187531 - RNA, 19 nt, Artificial Sequence
  Description of Artificial Sequence: Synthetic oligonucleotide
  Antisense strand to SEQ ID NO: 2187530
aauaucccaaauaugaguc

SEQ ID NO: 2187532 - RNA, 19 nt, Artificial Sequence
  Description of Artificial Sequence: Synthetic oligonucleotide
  Sense strand starting at position 3308 of SEQ ID NO: 1883348
uauggaaugugagcuguaa

SEQ ID NO: 2187533 - RNA, 19 nt, Artificial Sequence
  Description of Artificial Sequence: Synthetic oligonucleotide
  Antisense strand to SEQ ID NO: 2187532
uuacagcucacauuccaua

SEQ ID NO: 2187534 - RNA, 19 nt, Artificial Sequence
  Description of Artificial Sequence: Synthetic oligonucleotide
  Sense strand starting at position 3310 of SEQ ID NO: 1883348
uggaaugugagcuguaaac

SEQ ID NO: 2187535 - RNA, 19 nt, Artificial Sequence
  Description of Artificial Sequence: Synthetic oligonucleotide
  Antisense strand to SEQ ID NO: 2187534
guuuacagcucacauucca

SEQ ID NO: 2187536 - RNA, 19 nt, Artificial Sequence
  Description of Artificial Sequence: Synthetic oligonucleotide
  Sense strand starting at position 3312 of SEQ ID NO: 1883348
gaaugugagcuguaaacuu

SEQ ID NO: 2187537 - RNA, 19 nt, Artificial Sequence
  Description of Artificial Sequence: Synthetic oligonucleotide
  Antisense strand to SEQ ID NO: 2187536
aaguuuacagcucacauuc

SEQ ID NO: 2187538 - RNA, 19 nt, Artificial Sequence
  Description of Artificial Sequence: Synthetic oligonucleotide
  Sense strand starting at position 3335 of SEQ ID NO: 1883348
ugaagugauuuagacucuu

SEQ ID NO: 2187539 - RNA, 19 nt, Artificial Sequence
  Description of Artificial Sequence: Synthetic oligonucleotide
  Antisense strand to SEQ ID NO: 2187538
aagagucuaaaucacuuca

SEQ ID NO: 2187540 - RNA, 19 nt, Artificial Sequence
  Description of Artificial Sequence: Synthetic oligonucleotide
  Sense strand starting at position 3400 of SEQ ID NO: 1883348
augaaucagcuauagucaa

SEQ ID NO: 2187541 - RNA, 19 nt, Artificial Sequence
  Description of Artificial Sequence: Synthetic oligonucleotide
  Antisense strand to SEQ ID NO: 2187540
uugacuauagcugauucau

SEQ ID NO: 2187542 - RNA, 19 nt, Artificial Sequence
  Description of Artificial Sequence: Synthetic oligonucleotide
  Sense strand starting at position 3436 of SEQ ID NO: 1883348
agcacuugucacuaucuga

SEQ ID NO: 2187543 - RNA, 19 nt, Artificial Sequence
  Description of Artificial Sequence: Synthetic oligonucleotide
  Antisense strand to SEQ ID NO: 2187542
ucagauagugacaagugcu

SEQ ID NO: 2187544 - RNA, 19 nt, Artificial Sequence
  Description of Artificial Sequence: Synthetic oligonucleotide
  Sense strand starting at position 3522 of SEQ ID NO: 1883348
guuccuuucccauaauagg

SEQ ID NO: 2187545 - RNA, 19 nt, Artificial Sequence
  Description of Artificial Sequence: Synthetic oligonucleotide
  Antisense strand to SEQ ID NO: 2187544
ccuauuaugggaaaggaac

SEQ ID NO: 2187546 - RNA, 19 nt, Artificial Sequence
  Description of Artificial Sequence: Synthetic oligonucleotide
  Sense strand starting at position 3662 of SEQ ID NO: 1883348
guagacacaguuugaaguu

SEQ ID NO: 2187547 - RNA, 19 nt, Artificial Sequence
  Description of Artificial Sequence: Synthetic oligonucleotide
  Antisense strand to SEQ ID NO: 2187546
aacuucaaacugugucuac

SEQ ID NO: 2187548 - RNA, 19 nt, Artificial Sequence
  Description of Artificial Sequence: Synthetic oligonucleotide
  Sense strand starting at position 3779 of SEQ ID NO: 1883348
gauuaauugccucagccga

SEQ ID NO: 2187549 - RNA, 19 nt, Artificial Sequence
  Description of Artificial Sequence: Synthetic oligonucleotide
  Antisense strand to SEQ ID NO: 2187548
ucggcugaggcaauuaauc

SEQ ID NO: 2187550 - RNA, 19 nt, Artificial Sequence
  Description of Artificial Sequence: Synthetic oligonucleotide
  Sense strand starting at position 3829 of SEQ ID NO: 1883348
gagaauggguucuucucau

SEQ ID NO: 2187551 - RNA, 19 nt, Artificial Sequence
  Description of Artificial Sequence: Synthetic oligonucleotide
  Antisense strand to SEQ ID NO: 2187550
augagaagaacccauucuc

SEQ ID NO: 2187552 - RNA, 19 nt, Artificial Sequence
  Description of Artificial Sequence: Synthetic oligonucleotide
  Sense strand starting at position 3867 of SEQ ID NO: 1883348
agcagagaaagcugaugaa

SEQ ID NO: 2187553 - RNA, 19 nt, Artificial Sequence
  Description of Artificial Sequence: Synthetic oligonucleotide
  Antisense strand to SEQ ID NO: 2187552
uucaucagcuuucucugcu

SEQ ID NO: 2187554 - RNA, 19 nt, Artificial Sequence
  Description of Artificial Sequence: Synthetic oligonucleotide
  Sense strand starting at position 3919 of SEQ ID NO: 1883348
uguagcuauuugccagaga

SEQ ID NO: 2187555 - RNA, 19 nt, Artificial Sequence
  Description of Artificial Sequence: Synthetic oligonucleotide
  Antisense strand to SEQ ID NO: 2187554
ucucuggcaaauagcuaca

SEQ ID NO: 2187556 - RNA, 19 nt, Artificial Sequence
  Description of Artificial Sequence: Synthetic oligonucleotide
  Sense strand starting at position 3982 of SEQ ID NO: 1883348
gcugauugcaucugaggga

SEQ ID NO: 2187557 - RNA, 19 nt, Artificial Sequence
  Description of Artificial Sequence: Synthetic oligonucleotide
  Antisense strand to SEQ ID NO: 2187556
ucccucagaugcaaucagc

SEQ ID NO: 2187558 - RNA, 19 nt, Artificial Sequence
  Description of Artificial Sequence: Synthetic oligonucleotide
  Sense strand starting at position 3 of SEQ ID NO: 1883349
gaauguagccugugauaac

SEQ ID NO: 2187559 - RNA, 19 nt, Artificial Sequence
  Description of Artificial Sequence: Synthetic oligonucleotide
  Antisense strand to SEQ ID NO: 2187558
guuaucacaggcuacauuc

SEQ ID NO: 2187560 - RNA, 19 nt, Artificial Sequence
  Description of Artificial Sequence: Synthetic oligonucleotide
  Sense strand starting at position 107 of SEQ ID NO: 1883349
uuaagcuauggcuaaauau

SEQ ID NO: 2187561 - RNA, 19 nt, Artificial Sequence
  Description of Artificial Sequence: Synthetic oligonucleotide
  Antisense strand to SEQ ID NO: 2187560
auauuuagccauagcuuaa

SEQ ID NO: 2187562 - RNA, 19 nt, Artificial Sequence
  Description of Artificial Sequence: Synthetic oligonucleotide
  Sense strand starting at position 243 of SEQ ID NO: 1883349
cccaaauauggaggcuuua

SEQ ID NO: 2187563 - RNA, 19 nt, Artificial Sequence
  Description of Artificial Sequence: Synthetic oligonucleotide
  Antisense strand to SEQ ID NO: 2187562
uaaagccuccauauuuggg

SEQ ID NO: 2187564 - RNA, 19 nt, Artificial Sequence
  Description of Artificial Sequence: Synthetic oligonucleotide
  Sense strand starting at position 254 of SEQ ID NO: 1883349
aggcuuuauaauggguaaa

SEQ ID NO: 2187565 - RNA, 19 nt, Artificial Sequence
  Description of Artificial Sequence: Synthetic oligonucleotide
  Antisense strand to SEQ ID NO: 2187564
uuuacccauuauaaagccu

SEQ ID NO: 2187566 - RNA, 19 nt, Artificial Sequence
  Description of Artificial Sequence: Synthetic oligonucleotide
  Sense strand starting at position 255 of SEQ ID NO: 1883349
ggcuuuauaauggguaaag

SEQ ID NO: 2187567 - RNA, 19 nt, Artificial Sequence
  Description of Artificial Sequence: Synthetic oligonucleotide
  Antisense strand to SEQ ID NO: 2187566
cuuuacccauuauaaagcc

SEQ ID NO: 2187568 - RNA, 19 nt, Artificial Sequence
  Description of Artificial Sequence: Synthetic oligonucleotide
  Sense strand starting at position 257 of SEQ ID NO: 1883349
cuuuauaauggguaaagca

SEQ ID NO: 2187569 - RNA, 19 nt, Artificial Sequence
  Description of Artificial Sequence: Synthetic oligonucleotide
  Antisense strand to SEQ ID NO: 2187568
ugcuuuacccauuauaaag

SEQ ID NO: 2187570 - RNA, 19 nt, Artificial Sequence
  Description of Artificial Sequence: Synthetic oligonucleotide
  Sense strand starting at position 265 of SEQ ID NO: 1883349
uggguaaagcagugaucca

SEQ ID NO: 2187571 - RNA, 19 nt, Artificial Sequence
  Description of Artificial Sequence: Synthetic oligonucleotide
  Antisense strand to SEQ ID NO: 2187570
uggaucacugcuuuaccca

SEQ ID NO: 2187572 - RNA, 19 nt, Artificial Sequence
  Description of Artificial Sequence: Synthetic oligonucleotide
  Sense strand starting at position 373 of SEQ ID NO: 1883349
ggaaguuacacugggcauu

SEQ ID NO: 2187573 - RNA, 19 nt, Artificial Sequence
  Description of Artificial Sequence: Synthetic oligonucleotide
  Antisense strand to SEQ ID NO: 2187572
aaugcccaguguaacuucc

SEQ ID NO: 2187574 - RNA, 19 nt, Artificial Sequence
  Description of Artificial Sequence: Synthetic oligonucleotide
  Sense strand starting at position 725 of SEQ ID NO: 1883349
gacacugugccugaucaau

SEQ ID NO: 2187575 - RNA, 19 nt, Artificial Sequence
  Description of Artificial Sequence: Synthetic oligonucleotide
  Antisense strand to SEQ ID NO: 2187574
auugaucaggcacaguguc

SEQ ID NO: 2187576 - RNA, 19 nt, Artificial Sequence
  Description of Artificial Sequence: Synthetic oligonucleotide
  Sense strand starting at position 756 of SEQ ID NO: 1883349
auguguuacuuucuacaau

SEQ ID NO: 2187577 - RNA, 19 nt, Artificial Sequence
  Description of Artificial Sequence: Synthetic oligonucleotide
  Antisense strand to SEQ ID NO: 2187576
auuguagaaaguaacacau

SEQ ID NO: 2187578 - RNA, 19 nt, Artificial Sequence
  Description of Artificial Sequence: Synthetic oligonucleotide
  Sense strand starting at position 781 of SEQ ID NO: 1883349
gcuagcugacuuugaagau

SEQ ID NO: 2187579 - RNA, 19 nt, Artificial Sequence
  Description of Artificial Sequence: Synthetic oligonucleotide
  Antisense strand to SEQ ID NO: 2187578
aucuucaaagucagcuagc

SEQ ID NO: 2187580 - RNA, 19 nt, Artificial Sequence
  Description of Artificial Sequence: Synthetic oligonucleotide
  Sense strand starting at position 785 of SEQ ID NO: 1883349
gcugacuuugaagauucuu

SEQ ID NO: 2187581 - RNA, 19 nt, Artificial Sequence
  Description of Artificial Sequence: Synthetic oligonucleotide
  Antisense strand to SEQ ID NO: 2187580
aagaaucuucaaagucagc

SEQ ID NO: 2187582 - RNA, 19 nt, Artificial Sequence
  Description of Artificial Sequence: Synthetic oligonucleotide
  Sense strand starting at position 800 of SEQ ID NO: 1883349
ucuucuuuggaauagaugu

SEQ ID NO: 2187583 - RNA, 19 nt, Artificial Sequence
  Description of Artificial Sequence: Synthetic oligonucleotide
  Antisense strand to SEQ ID NO: 2187582
acaucuauuccaaagaaga

SEQ ID NO: 2187584 - RNA, 19 nt, Artificial Sequence
  Description of Artificial Sequence: Synthetic oligonucleotide
  Sense strand starting at position 806 of SEQ ID NO: 1883349
uuggaauagaugugauguu

SEQ ID NO: 2187585 - RNA, 19 nt, Artificial Sequence
  Description of Artificial Sequence: Synthetic oligonucleotide
  Antisense strand to SEQ ID NO: 2187584
aacaucacaucuauuccaa

SEQ ID NO: 2187586 - RNA, 19 nt, Artificial Sequence
  Description of Artificial Sequence: Synthetic oligonucleotide
  Sense strand starting at position 881 of SEQ ID NO: 1883349
uggagaguuuaaguagaau

SEQ ID NO: 2187587 - RNA, 19 nt, Artificial Sequence
  Description of Artificial Sequence: Synthetic oligonucleotide
  Antisense strand to SEQ ID NO: 2187586
auucuacuuaaacucucca

SEQ ID NO: 2187588 - RNA, 19 nt, Artificial Sequence
  Description of Artificial Sequence: Synthetic oligonucleotide
  Sense strand starting at position 912 of SEQ ID NO: 1883349
auuugaguguuugagauag

SEQ ID NO: 2187589 - RNA, 19 nt, Artificial Sequence
  Description of Artificial Sequence: Synthetic oligonucleotide
  Antisense strand to SEQ ID NO: 2187588
cuaucucaaacacucaaau

SEQ ID NO: 2187590 - RNA, 19 nt, Artificial Sequence
  Description of Artificial Sequence: Synthetic oligonucleotide
  Sense strand starting at position 949 of SEQ ID NO: 1883349
gaaggauagucacuacuua

SEQ ID NO: 2187591 - RNA, 19 nt, Artificial Sequence
  Description of Artificial Sequence: Synthetic oligonucleotide
  Antisense strand to SEQ ID NO: 2187590
uaaguagugacuauccuuc

SEQ ID NO: 2187592 - RNA, 19 nt, Artificial Sequence
  Description of Artificial Sequence: Synthetic oligonucleotide
  Sense strand starting at position 1026 of SEQ ID NO: 1883349
aguucuacaugauucuuau

SEQ ID NO: 2187593 - RNA, 19 nt, Artificial Sequence
  Description of Artificial Sequence: Synthetic oligonucleotide
  Antisense strand to SEQ ID NO: 2187592
auaagaaucauguagaacu

SEQ ID NO: 2187594 - RNA, 19 nt, Artificial Sequence
  Description of Artificial Sequence: Synthetic oligonucleotide
  Sense strand starting at position 1161 of SEQ ID NO: 1883349
uguuguugggcugauauac

SEQ ID NO: 2187595 - RNA, 19 nt, Artificial Sequence
  Description of Artificial Sequence: Synthetic oligonucleotide
  Antisense strand to SEQ ID NO: 2187594
guauaucagcccaacaaca

SEQ ID NO: 2187596 - RNA, 19 nt, Artificial Sequence
  Description of Artificial Sequence: Synthetic oligonucleotide
  Sense strand starting at position 1407 of SEQ ID NO: 1883349
ggccaagagaacugucaaa

SEQ ID NO: 2187597 - RNA, 19 nt, Artificial Sequence
  Description of Artificial Sequence: Synthetic oligonucleotide
  Antisense strand to SEQ ID NO: 2187596
uuugacaguucucuuggcc

SEQ ID NO: 2187598 - RNA, 19 nt, Artificial Sequence
  Description of Artificial Sequence: Synthetic oligonucleotide
  Sense strand starting at position 1658 of SEQ ID NO: 1883349
cugccuaaagucuguauuu

SEQ ID NO: 2187599 - RNA, 19 nt, Artificial Sequence
  Description of Artificial Sequence: Synthetic oligonucleotide
  Antisense strand to SEQ ID NO: 2187598
aaauacagacuuuaggcag

SEQ ID NO: 2187600 - RNA, 19 nt, Artificial Sequence
  Description of Artificial Sequence: Synthetic oligonucleotide
  Sense strand starting at position 1659 of SEQ ID NO: 1883349
ugccuaaagucuguauuua

SEQ ID NO: 2187601 - RNA, 19 nt, Artificial Sequence
  Description of Artificial Sequence: Synthetic oligonucleotide
  Antisense strand to SEQ ID NO: 2187600
uaaauacagacuuuaggca

SEQ ID NO: 2187602 - RNA, 19 nt, Artificial Sequence
  Description of Artificial Sequence: Synthetic oligonucleotide
  Sense strand starting at position 1669 of SEQ ID NO: 1883349
cuguauuuauuguucccau

SEQ ID NO: 2187603 - RNA, 19 nt, Artificial Sequence
  Description of Artificial Sequence: Synthetic oligonucleotide
  Antisense strand to SEQ ID NO: 2187602
augggaacaauaaauacag

SEQ ID NO: 2187604 - RNA, 19 nt, Artificial Sequence
  Description of Artificial Sequence: Synthetic oligonucleotide
  Sense strand starting at position 2159 of SEQ ID NO: 1883349
gggaaacucugacugcaua

SEQ ID NO: 2187605 - RNA, 19 nt, Artificial Sequence
  Description of Artificial Sequence: Synthetic oligonucleotide
  Antisense strand to SEQ ID NO: 2187604
uaugcagucagaguuuccc

SEQ ID NO: 2187606 - RNA, 19 nt, Artificial Sequence
  Description of Artificial Sequence: Synthetic oligonucleotide
  Sense strand starting at position 2439 of SEQ ID NO: 1883349
ggagagucuggguaguuga

SEQ ID NO: 2187607 - RNA, 19 nt, Artificial Sequence
  Description of Artificial Sequence: Synthetic oligonucleotide
  Antisense strand to SEQ ID NO: 2187606
ucaacuacccagacucucc

SEQ ID NO: 2187608 - RNA, 19 nt, Artificial Sequence
  Description of Artificial Sequence: Synthetic oligonucleotide
  Sense strand starting at position 2442 of SEQ ID NO: 1883349
gagucuggguaguugacau

SEQ ID NO: 2187609 - RNA, 19 nt, Artificial Sequence
  Description of Artificial Sequence: Synthetic oligonucleotide
  Antisense strand to SEQ ID NO: 2187608
augucaacuacccagacuc

SEQ ID NO: 2187610 - RNA, 19 nt, Artificial Sequence
  Description of Artificial Sequence: Synthetic oligonucleotide
  Sense strand starting at position 2594 of SEQ ID NO: 1883349
augaauauuguaggugauu

SEQ ID NO: 2187611 - RNA, 19 nt, Artificial Sequence
  Description of Artificial Sequence: Synthetic oligonucleotide
  Antisense strand to SEQ ID NO: 2187610
aaucaccuacaauauucau

SEQ ID NO: 2187612 - RNA, 19 nt, Artificial Sequence
  Description of Artificial Sequence: Synthetic oligonucleotide
  Sense strand starting at position 2688 of SEQ ID NO: 1883349
acaugacauuaguuccuau

SEQ ID NO: 2187613 - RNA, 19 nt, Artificial Sequence
  Description of Artificial Sequence: Synthetic oligonucleotide
  Antisense strand to SEQ ID NO: 2187612
auaggaacuaaugucaugu

SEQ ID NO: 2187614 - RNA, 19 nt, Artificial Sequence
  Description of Artificial Sequence: Synthetic oligonucleotide
  Sense strand starting at position 2751 of SEQ ID NO: 1883349
aagagugacucugucccau

SEQ ID NO: 2187615 - RNA, 19 nt, Artificial Sequence
  Description of Artificial Sequence: Synthetic oligonucleotide
  Antisense strand to SEQ ID NO: 2187614
augggacagagucacucuu

SEQ ID NO: 2187616 - RNA, 19 nt, Artificial Sequence
  Description of Artificial Sequence: Synthetic oligonucleotide
  Sense strand starting at position 2753 of SEQ ID NO: 1883349
gagugacucugucccauaa

SEQ ID NO: 2187617 - RNA, 19 nt, Artificial Sequence
  Description of Artificial Sequence: Synthetic oligonucleotide
  Antisense strand to SEQ ID NO: 2187616
uuaugggacagagucacuc

SEQ ID NO: 2187618 - RNA, 19 nt, Artificial Sequence
  Description of Artificial Sequence: Synthetic oligonucleotide
  Sense strand starting at position 2811 of SEQ ID NO: 1883349
caggauaugcaguaguaac

SEQ ID NO: 2187619 - RNA, 19 nt, Artificial Sequence
  Description of Artificial Sequence: Synthetic oligonucleotide
  Antisense strand to SEQ ID NO: 2187618
guuacuacugcauauccug

SEQ ID NO: 2187620 - RNA, 19 nt, Artificial Sequence
  Description of Artificial Sequence: Synthetic oligonucleotide
  Sense strand starting at position 3001 of SEQ ID NO: 1883349
caagauggguguuccugau

SEQ ID NO: 2187621 - RNA, 19 nt, Artificial Sequence
  Description of Artificial Sequence: Synthetic oligonucleotide
  Antisense strand to SEQ ID NO: 2187620
aucaggaacacccaucuug

SEQ ID NO: 2187622 - RNA, 19 nt, Artificial Sequence
  Description of Artificial Sequence: Synthetic oligonucleotide
  Sense strand starting at position 3253 of SEQ ID NO: 1883349
gaugaagacuuagucaauc

SEQ ID NO: 2187623 - RNA, 19 nt, Artificial Sequence
  Description of Artificial Sequence: Synthetic oligonucleotide
  Antisense strand to SEQ ID NO: 2187622
gauugacuaagucuucauc

SEQ ID NO: 2187624 - RNA, 19 nt, Artificial Sequence
  Description of Artificial Sequence: Synthetic oligonucleotide
  Sense strand starting at position 3369 of SEQ ID NO: 1883349
caagguagucugcagaauu

SEQ ID NO: 2187625 - RNA, 19 nt, Artificial Sequence
  Description of Artificial Sequence: Synthetic oligonucleotide
  Antisense strand to SEQ ID NO: 2187624
aauucugcagacuaccuug

SEQ ID NO: 2187626 - RNA, 19 nt, Artificial Sequence
  Description of Artificial Sequence: Synthetic oligonucleotide
  Sense strand starting at position 3395 of SEQ ID NO: 1883349
cccaaauuauguguuaaau

SEQ ID NO: 2187627 - RNA, 19 nt, Artificial Sequence
  Description of Artificial Sequence: Synthetic oligonucleotide
  Antisense strand to SEQ ID NO: 2187626
auuuaacacauaauuuggg

SEQ ID NO: 2187628 - RNA, 19 nt, Artificial Sequence
  Description of Artificial Sequence: Synthetic oligonucleotide
  Sense strand starting at position 3607 of SEQ ID NO: 1883349
aucaguaucucaguuauac

SEQ ID NO: 2187629 - RNA, 19 nt, Artificial Sequence
  Description of Artificial Sequence: Synthetic oligonucleotide
  Antisense strand to SEQ ID NO: 2187628
guauaacugagauacugau

SEQ ID NO: 2187630 - RNA, 19 nt, Artificial Sequence
  Description of Artificial Sequence: Synthetic oligonucleotide
  Sense strand starting at position 3712 of SEQ ID NO: 1883349
ggacguugaagccaaucaa

SEQ ID NO: 2187631 - RNA, 19 nt, Artificial Sequence
  Description of Artificial Sequence: Synthetic oligonucleotide
  Antisense strand to SEQ ID NO: 2187630
uugauuggcuucaacgucc

SEQ ID NO: 2187632 - RNA, 19 nt, Artificial Sequence
  Description of Artificial Sequence: Synthetic oligonucleotide
  Sense strand starting at position 3756 of SEQ ID NO: 1883349
aagcuuuaggaguaaguuu

SEQ ID NO: 2187633 - RNA, 19 nt, Artificial Sequence
  Description of Artificial Sequence: Synthetic oligonucleotide
  Antisense strand to SEQ ID NO: 2187632
aaacuuacuccuaaagcuu

SEQ ID NO: 2187634 - RNA, 19 nt, Artificial Sequence
  Description of Artificial Sequence: Synthetic oligonucleotide
  Sense strand starting at position 3838 of SEQ ID NO: 1883349
acauauuagccuuacgauu

SEQ ID NO: 2187635 - RNA, 19 nt, Artificial Sequence
  Description of Artificial Sequence: Synthetic oligonucleotide
  Antisense strand to SEQ ID NO: 2187634
aaucguaaggcuaauaugu

SEQ ID NO: 2187636 - RNA, 19 nt, Artificial Sequence
  Description of Artificial Sequence: Synthetic oligonucleotide
  Sense strand starting at position 3906 of SEQ ID NO: 1883349
guugcagaauaauugaaua

SEQ ID NO: 2187637 - RNA, 19 nt, Artificial Sequence
  Description of Artificial Sequence: Synthetic oligonucleotide
  Antisense strand to SEQ ID NO: 2187636
uauucaauuauucugcaac

SEQ ID NO: 2187638 - RNA, 19 nt, Artificial Sequence
  Description of Artificial Sequence: Synthetic oligonucleotide
  Sense strand starting at position 107 of SEQ ID NO: 1883350
guggcuguuccuuggccaa

SEQ ID NO: 2187639 - RNA, 19 nt, Artificial Sequence
  Description of Artificial Sequence: Synthetic oligonucleotide
  Antisense strand to SEQ ID NO: 2187638
uuggccaaggaacagccac

SEQ ID NO: 2187640 - RNA, 19 nt, Artificial Sequence
  Description of Artificial Sequence: Synthetic oligonucleotide
  Sense strand starting at position 138 of SEQ ID NO: 1883350
uauugaaucagccgugagu

SEQ ID NO: 2187641 - RNA, 19 nt, Artificial Sequence
  Description of Artificial Sequence: Synthetic oligonucleotide
  Antisense strand to SEQ ID NO: 2187640
acucacggcugauucaaua

SEQ ID NO: 2187642 - RNA, 19 nt, Artificial Sequence
  Description of Artificial Sequence: Synthetic oligonucleotide
  Sense strand starting at position 174 of SEQ ID NO: 1883350
gacccugugagagaauguu

SEQ ID NO: 2187643 - RNA, 19 nt, Artificial Sequence
  Description of Artificial Sequence: Synthetic oligonucleotide
  Antisense strand to SEQ ID NO: 2187642
aacauucucucacaggguc

SEQ ID NO: 2187644 - RNA, 19 nt, Artificial Sequence
  Description of Artificial Sequence: Synthetic oligonucleotide
  Sense strand starting at position 455 of SEQ ID NO: 1883350
ccaggaguuucguucuugu

SEQ ID NO: 2187645 - RNA, 19 nt, Artificial Sequence
  Description of Artificial Sequence: Synthetic oligonucleotide
  Antisense strand to SEQ ID NO: 2187644
acaagaacgaaacuccugg

SEQ ID NO: 2187646 - RNA, 19 nt, Artificial Sequence
  Description of Artificial Sequence: Synthetic oligonucleotide
  Sense strand starting at position 482 of SEQ ID NO: 1883350
guacaaaugucagggaaga

SEQ ID NO: 2187647 - RNA, 19 nt, Artificial Sequence
  Description of Artificial Sequence: Synthetic oligonucleotide
  Antisense strand to SEQ ID NO: 2187646
ucuucccugacauuuguac

SEQ ID NO: 2187648 - RNA, 19 nt, Artificial Sequence
  Description of Artificial Sequence: Synthetic oligonucleotide
  Sense strand starting at position 499 of SEQ ID NO: 1883350
gaauuuaaaugagggaaac

SEQ ID NO: 2187649 - RNA, 19 nt, Artificial Sequence
  Description of Artificial Sequence: Synthetic oligonucleotide
  Antisense strand to SEQ ID NO: 2187648
guuucccucauuuaaauuc

SEQ ID NO: 2187650 - RNA, 19 nt, Artificial Sequence
  Description of Artificial Sequence: Synthetic oligonucleotide
  Sense strand starting at position 523 of SEQ ID NO: 1883350
cagagaguguguucuggca

SEQ ID NO: 2187651 - RNA, 19 nt, Artificial Sequence
  Description of Artificial Sequence: Synthetic oligonucleotide
  Antisense strand to SEQ ID NO: 2187650
ugccagaacacacucucug

SEQ ID NO: 2187652 - RNA, 19 nt, Artificial Sequence
  Description of Artificial Sequence: Synthetic oligonucleotide
  Sense strand starting at position 547 of SEQ ID NO: 1883350
ucaggacacuuguaauuaa

SEQ ID NO: 2187653 - RNA, 19 nt, Artificial Sequence
  Description of Artificial Sequence: Synthetic oligonucleotide
  Antisense strand to SEQ ID NO: 2187652
uuaauuacaaguguccuga

SEQ ID NO: 2187654 - RNA, 19 nt, Artificial Sequence
  Description of Artificial Sequence: Synthetic oligonucleotide
  Sense strand starting at position 1105 of SEQ ID NO: 1883350
gacaucuauuuagcgcuua

SEQ ID NO: 2187655 - RNA, 19 nt, Artificial Sequence
  Description of Artificial Sequence: Synthetic oligonucleotide
  Antisense strand to SEQ ID NO: 2187654
uaagcgcuaaauagauguc

SEQ ID NO: 2187656 - RNA, 19 nt, Artificial Sequence
  Description of Artificial Sequence: Synthetic oligonucleotide
  Sense strand starting at position 1110 of SEQ ID NO: 1883350
cuauuuagcgcuuacugca

SEQ ID NO: 2187657 - RNA, 19 nt, Artificial Sequence
  Description of Artificial Sequence: Synthetic oligonucleotide
  Antisense strand to SEQ ID NO: 2187656
ugcaguaagcgcuaaauag

SEQ ID NO: 2187658 - RNA, 19 nt, Artificial Sequence
  Description of Artificial Sequence: Synthetic oligonucleotide
  Sense strand starting at position 1145 of SEQ ID NO: 1883350
gcacgcaucgucucauuaa

SEQ ID NO: 2187659 - RNA, 19 nt, Artificial Sequence
  Description of Artificial Sequence: Synthetic oligonucleotide
  Antisense strand to SEQ ID NO: 2187658
uuaaugagacgaugcgugc

SEQ ID NO: 2187660 - RNA, 19 nt, Artificial Sequence
  Description of Artificial Sequence: Synthetic oligonucleotide
  Sense strand starting at position 1319 of SEQ ID NO: 1883350
ucugguucaucguuggagu

SEQ ID NO: 2187661 - RNA, 19 nt, Artificial Sequence
  Description of Artificial Sequence: Synthetic oligonucleotide
  Antisense strand to SEQ ID NO: 2187660
acuccaacgaugaaccaga

SEQ ID NO: 2187662 - RNA, 19 nt, Artificial Sequence
  Description of Artificial Sequence: Synthetic oligonucleotide
  Sense strand starting at position 1426 of SEQ ID NO: 1883350
gcuggaugcuagccucaau

SEQ ID NO: 2187663 - RNA, 19 nt, Artificial Sequence
  Description of Artificial Sequence: Synthetic oligonucleotide
  Antisense strand to SEQ ID NO: 2187662
auugaggcuagcauccagc

SEQ ID NO: 2187664 - RNA, 19 nt, Artificial Sequence
  Description of Artificial Sequence: Synthetic oligonucleotide
  Sense strand starting at position 1529 of SEQ ID NO: 1883350
aggguguucguggagcaga

SEQ ID NO: 2187665 - RNA, 19 nt, Artificial Sequence
  Description of Artificial Sequence: Synthetic oligonucleotide
  Antisense strand to SEQ ID NO: 2187664
ucugcuccacgaacacccu

SEQ ID NO: 2187666 - RNA, 19 nt, Artificial Sequence
  Description of Artificial Sequence: Synthetic oligonucleotide
  Sense strand starting at position 1608 of SEQ ID NO: 1883350
cagggacuguggguagaau

SEQ ID NO: 2187667 - RNA, 19 nt, Artificial Sequence
  Description of Artificial Sequence: Synthetic oligonucleotide
  Antisense strand to SEQ ID NO: 2187666
auucuacccacagucccug

SEQ ID NO: 2187668 - RNA, 19 nt, Artificial Sequence
  Description of Artificial Sequence: Synthetic oligonucleotide
  Sense strand starting at position 1623 of SEQ ID NO: 1883350
gaauguuuaugggugugca

SEQ ID NO: 2187669 - RNA, 19 nt, Artificial Sequence
  Description of Artificial Sequence: Synthetic oligonucleotide
  Antisense strand to SEQ ID NO: 2187668
ugcacacccauaaacauuc

SEQ ID NO: 2187670 - RNA, 19 nt, Artificial Sequence
  Description of Artificial Sequence: Synthetic oligonucleotide
  Sense strand starting at position 1832 of SEQ ID NO: 1883350
acagaucugacccgaguua

SEQ ID NO: 2187671 - RNA, 19 nt, Artificial Sequence
  Description of Artificial Sequence: Synthetic oligonucleotide
  Antisense strand to SEQ ID NO: 2187670
uaacucgggucagaucugu

SEQ ID NO: 2187672 - RNA, 19 nt, Artificial Sequence
  Description of Artificial Sequence: Synthetic oligonucleotide
  Sense strand starting at position 1833 of SEQ ID NO: 1883350
cagaucugacccgaguuaa

SEQ ID NO: 2187673 - RNA, 19 nt, Artificial Sequence
  Description of Artificial Sequence: Synthetic oligonucleotide
  Antisense strand to SEQ ID NO: 2187672
uuaacucgggucagaucug

SEQ ID NO: 2187674 - RNA, 19 nt, Artificial Sequence
  Description of Artificial Sequence: Synthetic oligonucleotide
  Sense strand starting at position 1844 of SEQ ID NO: 1883350
cgaguuaagaucugaguug

SEQ ID NO: 2187675 - RNA, 19 nt, Artificial Sequence
  Description of Artificial Sequence: Synthetic oligonucleotide
  Antisense strand to SEQ ID NO: 2187674
caacucagaucuuaacucg

SEQ ID NO: 2187676 - RNA, 19 nt, Artificial Sequence
  Description of Artificial Sequence: Synthetic oligonucleotide
  Sense strand starting at position 1845 of SEQ ID NO: 1883350
gaguuaagaucugaguuga

SEQ ID NO: 2187677 - RNA, 19 nt, Artificial Sequence
  Description of Artificial Sequence: Synthetic oligonucleotide
  Antisense strand to SEQ ID NO: 2187676
ucaacucagaucuuaacuc

SEQ ID NO: 2187678 - RNA, 19 nt, Artificial Sequence
  Description of Artificial Sequence: Synthetic oligonucleotide
  Sense strand starting at position 1869 of SEQ ID NO: 1883350
aaggcucucccuugugaaa

SEQ ID NO: 2187679 - RNA, 19 nt, Artificial Sequence
  Description of Artificial Sequence: Synthetic oligonucleotide
  Antisense strand to SEQ ID NO: 2187678
uuucacaagggagagccuu

SEQ ID NO: 2187680 - RNA, 19 nt, Artificial Sequence
  Description of Artificial Sequence: Synthetic oligonucleotide
  Sense strand starting at position 2013 of SEQ ID NO: 1883350
gggcuccgugaauguaauu

SEQ ID NO: 2187681 - RNA, 19 nt, Artificial Sequence
  Description of Artificial Sequence: Synthetic oligonucleotide
  Antisense strand to SEQ ID NO: 2187680
aauuacauucacggagccc

SEQ ID NO: 2187682 - RNA, 19 nt, Artificial Sequence
  Description of Artificial Sequence: Synthetic oligonucleotide
  Sense strand starting at position 2018 of SEQ ID NO: 1883350
ccgugaauguaauuaauca

SEQ ID NO: 2187683 - RNA, 19 nt, Artificial Sequence
  Description of Artificial Sequence: Synthetic oligonucleotide
  Antisense strand to SEQ ID NO: 2187682
ugauuaauuacauucacgg

SEQ ID NO: 2187684 - RNA, 19 nt, Artificial Sequence
  Description of Artificial Sequence: Synthetic oligonucleotide
  Sense strand starting at position 2081 of SEQ ID NO: 1883350
agguuaguuccagauugca

SEQ ID NO: 2187685 - RNA, 19 nt, Artificial Sequence
  Description of Artificial Sequence: Synthetic oligonucleotide
  Antisense strand to SEQ ID NO: 2187684
ugcaaucuggaacuaaccu

SEQ ID NO: 2187686 - RNA, 19 nt, Artificial Sequence
  Description of Artificial Sequence: Synthetic oligonucleotide
  Sense strand starting at position 2238 of SEQ ID NO: 1883350
gccugacacucugcaaauu

SEQ ID NO: 2187687 - RNA, 19 nt, Artificial Sequence
  Description of Artificial Sequence: Synthetic oligonucleotide
  Antisense strand to SEQ ID NO: 2187686
aauuugcagagugucaggc

SEQ ID NO: 2187688 - RNA, 19 nt, Artificial Sequence
  Description of Artificial Sequence: Synthetic oligonucleotide
  Sense strand starting at position 2296 of SEQ ID NO: 1883350
ggaagacucugggauucag

SEQ ID NO: 2187689 - RNA, 19 nt, Artificial Sequence
  Description of Artificial Sequence: Synthetic oligonucleotide
  Antisense strand to SEQ ID NO: 2187688
cugaaucccagagucuucc

SEQ ID NO: 2187690 - RNA, 19 nt, Artificial Sequence
  Description of Artificial Sequence: Synthetic oligonucleotide
  Sense strand starting at position 2359 of SEQ ID NO: 1883350
gggagauggguaggguauu

SEQ ID NO: 2187691 - RNA, 19 nt, Artificial Sequence
  Description of Artificial Sequence: Synthetic oligonucleotide
  Antisense strand to SEQ ID NO: 2187690
aauacccuacccaucuccc

SEQ ID NO: 2187692 - RNA, 19 nt, Artificial Sequence
  Description of Artificial Sequence: Synthetic oligonucleotide
  Sense strand starting at position 2390 of SEQ ID NO: 1883350
cagggaagguuugggauuu

SEQ ID NO: 2187693 - RNA, 19 nt, Artificial Sequence
  Description of Artificial Sequence: Synthetic oligonucleotide
  Antisense strand to SEQ ID NO: 2187692
aaaucccaaaccuucccug

SEQ ID NO: 2187694 - RNA, 19 nt, Artificial Sequence
  Description of Artificial Sequence: Synthetic oligonucleotide
  Sense strand starting at position 2479 of SEQ ID NO: 1883350
gggugauauugaccacauc

SEQ ID NO: 2187695 - RNA, 19 nt, Artificial Sequence
  Description of Artificial Sequence: Synthetic oligonucleotide
  Antisense strand to SEQ ID NO: 2187694
gauguggucaauaucaccc

SEQ ID NO: 2187696 - RNA, 19 nt, Artificial Sequence
  Description of Artificial Sequence: Synthetic oligonucleotide
  Sense strand starting at position 2602 of SEQ ID NO: 1883350
gagaguugauccucgguga

SEQ ID NO: 2187697 - RNA, 19 nt, Artificial Sequence
  Description of Artificial Sequence: Synthetic oligonucleotide
  Antisense strand to SEQ ID NO: 2187696
ucaccgaggaucaacucuc

SEQ ID NO: 2187698 - RNA, 19 nt, Artificial Sequence
  Description of Artificial Sequence: Synthetic oligonucleotide
  Sense strand starting at position 2603 of SEQ ID NO: 1883350
agaguugauccucggugag

SEQ ID NO: 2187699 - RNA, 19 nt, Artificial Sequence
  Description of Artificial Sequence: Synthetic oligonucleotide
  Antisense strand to SEQ ID NO: 2187698
cucaccgaggaucaacucu

SEQ ID NO: 2187700 - RNA, 19 nt, Artificial Sequence
  Description of Artificial Sequence: Synthetic oligonucleotide
  Sense strand starting at position 2605 of SEQ ID NO: 1883350
aguugauccucggugagaa

SEQ ID NO: 2187701 - RNA, 19 nt, Artificial Sequence
  Description of Artificial Sequence: Synthetic oligonucleotide
  Antisense strand to SEQ ID NO: 2187700
uucucaccgaggaucaacu

SEQ ID NO: 2187702 - RNA, 19 nt, Artificial Sequence
  Description of Artificial Sequence: Synthetic oligonucleotide
  Sense strand starting at position 2606 of SEQ ID NO: 1883350
guugauccucggugagaaa

SEQ ID NO: 2187703 - RNA, 19 nt, Artificial Sequence
  Description of Artificial Sequence: Synthetic oligonucleotide
  Antisense strand to SEQ ID NO: 2187702
uuucucaccgaggaucaac

SEQ ID NO: 2187704 - RNA, 19 nt, Artificial Sequence
  Description of Artificial Sequence: Synthetic oligonucleotide
  Sense strand starting at position 3013 of SEQ ID NO: 1883350
ucagcuucuccaggcauga

SEQ ID NO: 2187705 - RNA, 19 nt, Artificial Sequence
  Description of Artificial Sequence: Synthetic oligonucleotide
  Antisense strand to SEQ ID NO: 2187704
ucaugccuggagaagcuga

SEQ ID NO: 2187706 - RNA, 19 nt, Artificial Sequence
  Description of Artificial Sequence: Synthetic oligonucleotide
  Sense strand starting at position 3233 of SEQ ID NO: 1883350
augucauggacugaauugu

SEQ ID NO: 2187707 - RNA, 19 nt, Artificial Sequence
  Description of Artificial Sequence: Synthetic oligonucleotide
  Antisense strand to SEQ ID NO: 2187706
acaauucaguccaugacau

SEQ ID NO: 2187708 - RNA, 19 nt, Artificial Sequence
  Description of Artificial Sequence: Synthetic oligonucleotide
  Sense strand starting at position 3331 of SEQ ID NO: 1883350
auguaaugaguucggauga

SEQ ID NO: 2187709 - RNA, 19 nt, Artificial Sequence
  Description of Artificial Sequence: Synthetic oligonucleotide
  Antisense strand to SEQ ID NO: 2187708
ucauccgaacucauuacau

SEQ ID NO: 2187710 - RNA, 19 nt, Artificial Sequence
  Description of Artificial Sequence: Synthetic oligonucleotide
  Sense strand starting at position 3373 of SEQ ID NO: 1883350
uagugugacuguguucuua

SEQ ID NO: 2187711 - RNA, 19 nt, Artificial Sequence
  Description of Artificial Sequence: Synthetic oligonucleotide
  Antisense strand to SEQ ID NO: 2187710
uaagaacacagucacacua

SEQ ID NO: 2187712 - RNA, 19 nt, Artificial Sequence
  Description of Artificial Sequence: Synthetic oligonucleotide
  Sense strand starting at position 3475 of SEQ ID NO: 1883350
cgagcuaccgagugacaaa

SEQ ID NO: 2187713 - RNA, 19 nt, Artificial Sequence
  Description of Artificial Sequence: Synthetic oligonucleotide
  Antisense strand to SEQ ID NO: 2187712
uuugucacucgguagcucg

SEQ ID NO: 2187714 - RNA, 19 nt, Artificial Sequence
  Description of Artificial Sequence: Synthetic oligonucleotide
  Sense strand starting at position 3950 of SEQ ID NO: 1883350
aaaggauccugaugaguca

SEQ ID NO: 2187715 - RNA, 19 nt, Artificial Sequence
  Description of Artificial Sequence: Synthetic oligonucleotide
  Antisense strand to SEQ ID NO: 2187714
ugacucaucaggauccuuu

SEQ ID NO: 2187716 - RNA, 19 nt, Artificial Sequence
  Description of Artificial Sequence: Synthetic oligonucleotide
  Sense strand starting at position 3964 of SEQ ID NO: 1883350
agucauugugggagucgca

SEQ ID NO: 2187717 - RNA, 19 nt, Artificial Sequence
  Description of Artificial Sequence: Synthetic oligonucleotide
  Antisense strand to SEQ ID NO: 2187716
ugcgacucccacaaugacu

SEQ ID NO: 2187718 - RNA, 19 nt, Artificial Sequence
  Description of Artificial Sequence: Synthetic oligonucleotide
  Sense strand starting at position 161 of SEQ ID NO: 1883351
ggguauaucugacauauuu

SEQ ID NO: 2187719 - RNA, 19 nt, Artificial Sequence
  Description of Artificial Sequence: Synthetic oligonucleotide
  Antisense strand to SEQ ID NO: 2187718
aaauaugucagauauaccc

SEQ ID NO: 2187720 - RNA, 19 nt, Artificial Sequence
  Description of Artificial Sequence: Synthetic oligonucleotide
  Sense strand starting at position 332 of SEQ ID NO: 1883351
aguagcucucaauaaguga

SEQ ID NO: 2187721 - RNA, 19 nt, Artificial Sequence
  Description of Artificial Sequence: Synthetic oligonucleotide
  Antisense strand to SEQ ID NO: 2187720
ucacuuauugagagcuacu

SEQ ID NO: 2187722 - RNA, 19 nt, Artificial Sequence
  Description of Artificial Sequence: Synthetic oligonucleotide
  Sense strand starting at position 403 of SEQ ID NO: 1883351
agggaaaguagcugaguaa

SEQ ID NO: 2187723 - RNA, 19 nt, Artificial Sequence
  Description of Artificial Sequence: Synthetic oligonucleotide
  Antisense strand to SEQ ID NO: 2187722
uuacucagcuacuuucccu

SEQ ID NO: 2187724 - RNA, 19 nt, Artificial Sequence
  Description of Artificial Sequence: Synthetic oligonucleotide
  Sense strand starting at position 406 of SEQ ID NO: 1883351
gaaaguagcugaguaagga

SEQ ID NO: 2187725 - RNA, 19 nt, Artificial Sequence
  Description of Artificial Sequence: Synthetic oligonucleotide
  Antisense strand to SEQ ID NO: 2187724
uccuuacucagcuacuuuc

SEQ ID NO: 2187726 - RNA, 19 nt, Artificial Sequence
  Description of Artificial Sequence: Synthetic oligonucleotide
  Sense strand starting at position 429 of SEQ ID NO: 1883351
cagcuauuacaugguggga

SEQ ID NO: 2187727 - RNA, 19 nt, Artificial Sequence
  Description of Artificial Sequence: Synthetic oligonucleotide
  Antisense strand to SEQ ID NO: 2187726
ucccaccauguaauagcug

SEQ ID NO: 2187728 - RNA, 19 nt, Artificial Sequence
  Description of Artificial Sequence: Synthetic oligonucleotide
  Sense strand starting at position 600 of SEQ ID NO: 1883351
gcauuuauuugucaguuaa

SEQ ID NO: 2187729 - RNA, 19 nt, Artificial Sequence
  Description of Artificial Sequence: Synthetic oligonucleotide
  Antisense strand to SEQ ID NO: 2187728
uuaacugacaaauaaaugc

SEQ ID NO: 2187730 - RNA, 19 nt, Artificial Sequence
  Description of Artificial Sequence: Synthetic oligonucleotide
  Sense strand starting at position 660 of SEQ ID NO: 1883351
cuuuaugaaguccaaaguu

SEQ ID NO: 2187731 - RNA, 19 nt, Artificial Sequence
  Description of Artificial Sequence: Synthetic oligonucleotide
  Antisense strand to SEQ ID NO: 2187730
aacuuuggacuucauaaag

SEQ ID NO: 2187732 - RNA, 19 nt, Artificial Sequence
  Description of Artificial Sequence: Synthetic oligonucleotide
  Sense strand starting at position 727 of SEQ ID NO: 1883351
ccaaguaaguuaguaagga

SEQ ID NO: 2187733 - RNA, 19 nt, Artificial Sequence
  Description of Artificial Sequence: Synthetic oligonucleotide
  Antisense strand to SEQ ID NO: 2187732
uccuuacuaacuuacuugg

SEQ ID NO: 2187734 - RNA, 19 nt, Artificial Sequence
  Description of Artificial Sequence: Synthetic oligonucleotide
  Sense strand starting at position 1275 of SEQ ID NO: 1883351
ucuagaaguaguuggaaau

SEQ ID NO: 2187735 - RNA, 19 nt, Artificial Sequence
  Description of Artificial Sequence: Synthetic oligonucleotide
  Antisense strand to SEQ ID NO: 2187734
auuuccaacuacuucuaga

SEQ ID NO: 2187736 - RNA, 19 nt, Artificial Sequence
  Description of Artificial Sequence: Synthetic oligonucleotide
  Sense strand starting at position 1276 of SEQ ID NO: 1883351
cuagaaguaguuggaaaua

SEQ ID NO: 2187737 - RNA, 19 nt, Artificial Sequence
  Description of Artificial Sequence: Synthetic oligonucleotide
  Antisense strand to SEQ ID NO: 2187736
uauuuccaacuacuucuag

SEQ ID NO: 2187738 - RNA, 19 nt, Artificial Sequence
  Description of Artificial Sequence: Synthetic oligonucleotide
  Sense strand starting at position 1286 of SEQ ID NO: 1883351
uuggaaauauggucuguaa

SEQ ID NO: 2187739 - RNA, 19 nt, Artificial Sequence
  Description of Artificial Sequence: Synthetic oligonucleotide
  Antisense strand to SEQ ID NO: 2187738
uuacagaccauauuuccaa

SEQ ID NO: 2187740 - RNA, 19 nt, Artificial Sequence
  Description of Artificial Sequence: Synthetic oligonucleotide
  Sense strand starting at position 1365 of SEQ ID NO: 1883351
auggcaguggcugagaaua

SEQ ID NO: 2187741 - RNA, 19 nt, Artificial Sequence
  Description of Artificial Sequence: Synthetic oligonucleotide
  Antisense strand to SEQ ID NO: 2187740
uauucucagccacugccau

SEQ ID NO: 2187742 - RNA, 19 nt, Artificial Sequence
  Description of Artificial Sequence: Synthetic oligonucleotide
  Sense strand starting at position 1706 of SEQ ID NO: 1883351
gaggucagugguuaaguga

SEQ ID NO: 2187743 - RNA, 19 nt, Artificial Sequence
  Description of Artificial Sequence: Synthetic oligonucleotide
  Antisense strand to SEQ ID NO: 2187742
ucacuuaaccacugaccuc

SEQ ID NO: 2187744 - RNA, 19 nt, Artificial Sequence
  Description of Artificial Sequence: Synthetic oligonucleotide
  Sense strand starting at position 1717 of SEQ ID NO: 1883351
uuaagugagaagugggauu

SEQ ID NO: 2187745 - RNA, 19 nt, Artificial Sequence
  Description of Artificial Sequence: Synthetic oligonucleotide
  Antisense strand to SEQ ID NO: 2187744
aaucccacuucucacuuaa

SEQ ID NO: 2187746 - RNA, 19 nt, Artificial Sequence
  Description of Artificial Sequence: Synthetic oligonucleotide
  Sense strand starting at position 2052 of SEQ ID NO: 1883351
aagggauauugggugcacu

SEQ ID NO: 2187747 - RNA, 19 nt, Artificial Sequence
  Description of Artificial Sequence: Synthetic oligonucleotide
  Antisense strand to SEQ ID NO: 2187746
agugcacccaauaucccuu

SEQ ID NO: 2187748 - RNA, 19 nt, Artificial Sequence
  Description of Artificial Sequence: Synthetic oligonucleotide
  Sense strand starting at position 2066 of SEQ ID NO: 1883351
gcacucuuuccagagaaau

SEQ ID NO: 2187749 - RNA, 19 nt, Artificial Sequence
  Description of Artificial Sequence: Synthetic oligonucleotide
  Antisense strand to SEQ ID NO: 2187748
auuucucuggaaagagugc

SEQ ID NO: 2187750 - RNA, 19 nt, Artificial Sequence
  Description of Artificial Sequence: Synthetic oligonucleotide
  Sense strand starting at position 2190 of SEQ ID NO: 1883351
cuuggcucggcugaaauga

SEQ ID NO: 2187751 - RNA, 19 nt, Artificial Sequence
  Description of Artificial Sequence: Synthetic oligonucleotide
  Antisense strand to SEQ ID NO: 2187750
ucauuucagccgagccaag

SEQ ID NO: 2187752 - RNA, 19 nt, Artificial Sequence
  Description of Artificial Sequence: Synthetic oligonucleotide
  Sense strand starting at position 2229 of SEQ ID NO: 1883351
gaaggcagucagcauugau

SEQ ID NO: 2187753 - RNA, 19 nt, Artificial Sequence
  Description of Artificial Sequence: Synthetic oligonucleotide
  Antisense strand to SEQ ID NO: 2187752
aucaaugcugacugccuuc

SEQ ID NO: 2187754 - RNA, 19 nt, Artificial Sequence
  Description of Artificial Sequence: Synthetic oligonucleotide
  Sense strand starting at position 2471 of SEQ ID NO: 1883351
gaaccagagucagcuauau

SEQ ID NO: 2187755 - RNA, 19 nt, Artificial Sequence
  Description of Artificial Sequence: Synthetic oligonucleotide
  Antisense strand to SEQ ID NO: 2187754
auauagcugacucugguuc

SEQ ID NO: 2187756 - RNA, 19 nt, Artificial Sequence
  Description of Artificial Sequence: Synthetic oligonucleotide
  Sense strand starting at position 2729 of SEQ ID NO: 1883351
agaagaaaucugugguguu

SEQ ID NO: 2187757 - RNA, 19 nt, Artificial Sequence
  Description of Artificial Sequence: Synthetic oligonucleotide
  Antisense strand to SEQ ID NO: 2187756
aacaccacagauuucuucu

SEQ ID NO: 2187758 - RNA, 19 nt, Artificial Sequence
  Description of Artificial Sequence: Synthetic oligonucleotide
  Sense strand starting at position 2904 of SEQ ID NO: 1883351
cuacuucuuugauuaugag

SEQ ID NO: 2187759 - RNA, 19 nt, Artificial Sequence
  Description of Artificial Sequence: Synthetic oligonucleotide
  Antisense strand to SEQ ID NO: 2187758
cucauaaucaaagaaguag

SEQ ID NO: 2187760 - RNA, 19 nt, Artificial Sequence
  Description of Artificial Sequence: Synthetic oligonucleotide
  Sense strand starting at position 2940 of SEQ ID NO: 1883351
ucaagugugugggucauuu

SEQ ID NO: 2187761 - RNA, 19 nt, Artificial Sequence
  Description of Artificial Sequence: Synthetic oligonucleotide
  Antisense strand to SEQ ID NO: 2187760
aaaugacccacacacuuga

SEQ ID NO: 2187762 - RNA, 19 nt, Artificial Sequence
  Description of Artificial Sequence: Synthetic oligonucleotide
  Sense strand starting at position 2944 of SEQ ID NO: 1883351
gugugugggucauuuguau

SEQ ID NO: 2187763 - RNA, 19 nt, Artificial Sequence
  Description of Artificial Sequence: Synthetic oligonucleotide
  Antisense strand to SEQ ID NO: 2187762
auacaaaugacccacacac

SEQ ID NO: 2187764 - RNA, 19 nt, Artificial Sequence
  Description of Artificial Sequence: Synthetic oligonucleotide
  Sense strand starting at position 3254 of SEQ ID NO: 1883351
auggaaauucuagguaucu

SEQ ID NO: 2187765 - RNA, 19 nt, Artificial Sequence
  Description of Artificial Sequence: Synthetic oligonucleotide
  Antisense strand to SEQ ID NO: 2187764
agauaccuagaauuuccau

SEQ ID NO: 2187766 - RNA, 19 nt, Artificial Sequence
  Description of Artificial Sequence: Synthetic oligonucleotide
  Sense strand starting at position 3255 of SEQ ID NO: 1883351
uggaaauucuagguaucug

SEQ ID NO: 2187767 - RNA, 19 nt, Artificial Sequence
  Description of Artificial Sequence: Synthetic oligonucleotide
  Antisense strand to SEQ ID NO: 2187766
cagauaccuagaauuucca

SEQ ID NO: 2187768 - RNA, 19 nt, Artificial Sequence
  Description of Artificial Sequence: Synthetic oligonucleotide
  Sense strand starting at position 3271 of SEQ ID NO: 1883351
cugguuugccauuauagac

SEQ ID NO: 2187769 - RNA, 19 nt, Artificial Sequence
  Description of Artificial Sequence: Synthetic oligonucleotide
  Antisense strand to SEQ ID NO: 2187768
gucuauaauggcaaaccag

SEQ ID NO: 2187770 - RNA, 19 nt, Artificial Sequence
  Description of Artificial Sequence: Synthetic oligonucleotide
  Sense strand starting at position 3540 of SEQ ID NO: 1883351
guuuaaauauuaccacagu

SEQ ID NO: 2187771 - RNA, 19 nt, Artificial Sequence
  Description of Artificial Sequence: Synthetic oligonucleotide
  Antisense strand to SEQ ID NO: 2187770
acugugguaauauuuaaac

SEQ ID NO: 2187772 - RNA, 19 nt, Artificial Sequence
  Description of Artificial Sequence: Synthetic oligonucleotide
  Sense strand starting at position 3602 of SEQ ID NO: 1883351
augucuaaguuuccuauaa

SEQ ID NO: 2187773 - RNA, 19 nt, Artificial Sequence
  Description of Artificial Sequence: Synthetic oligonucleotide
  Antisense strand to SEQ ID NO: 2187772
uuauaggaaacuuagacau

SEQ ID NO: 2187774 - RNA, 19 nt, Artificial Sequence
  Description of Artificial Sequence: Synthetic oligonucleotide
  Sense strand starting at position 3603 of SEQ ID NO: 1883351
ugucuaaguuuccuauaag

SEQ ID NO: 2187775 - RNA, 19 nt, Artificial Sequence
  Description of Artificial Sequence: Synthetic oligonucleotide
  Antisense strand to SEQ ID NO: 2187774
cuuauaggaaacuuagaca

SEQ ID NO: 2187776 - RNA, 19 nt, Artificial Sequence
  Description of Artificial Sequence: Synthetic oligonucleotide
  Sense strand starting at position 3615 of SEQ ID NO: 1883351
cuauaagagguaugcaacu

SEQ ID NO: 2187777 - RNA, 19 nt, Artificial Sequence
  Description of Artificial Sequence: Synthetic oligonucleotide
  Antisense strand to SEQ ID NO: 2187776
aguugcauaccucuuauag

SEQ ID NO: 2187778 - RNA, 19 nt, Artificial Sequence
  Description of Artificial Sequence: Synthetic oligonucleotide
  Sense strand starting at position 3700 of SEQ ID NO: 1883351
caagaaauaugaguguaug

SEQ ID NO: 2187779 - RNA, 19 nt, Artificial Sequence
  Description of Artificial Sequence: Synthetic oligonucleotide
  Antisense strand to SEQ ID NO: 2187778
cauacacucauauuucuug

SEQ ID NO: 2187780 - RNA, 19 nt, Artificial Sequence
  Description of Artificial Sequence: Synthetic oligonucleotide
  Sense strand starting at position 3703 of SEQ ID NO: 1883351
gaaauaugaguguaugcau

SEQ ID NO: 2187781 - RNA, 19 nt, Artificial Sequence
  Description of Artificial Sequence: Synthetic oligonucleotide
  Antisense strand to SEQ ID NO: 2187780
augcauacacucauauuuc

SEQ ID NO: 2187782 - RNA, 19 nt, Artificial Sequence
  Description of Artificial Sequence: Synthetic oligonucleotide
  Sense strand starting at position 3710 of SEQ ID NO: 1883351
gaguguaugcauggaagga

SEQ ID NO: 2187783 - RNA, 19 nt, Artificial Sequence
  Description of Artificial Sequence: Synthetic oligonucleotide
  Antisense strand to SEQ ID NO: 2187782
uccuuccaugcauacacuc

SEQ ID NO: 2187784 - RNA, 19 nt, Artificial Sequence
  Description of Artificial Sequence: Synthetic oligonucleotide
  Sense strand starting at position 3711 of SEQ ID NO: 1883351
aguguaugcauggaaggau

SEQ ID NO: 2187785 - RNA, 19 nt, Artificial Sequence
  Description of Artificial Sequence: Synthetic oligonucleotide
  Antisense strand to SEQ ID NO: 2187784
auccuuccaugcauacacu

SEQ ID NO: 2187786 - RNA, 19 nt, Artificial Sequence
  Description of Artificial Sequence: Synthetic oligonucleotide
  Sense strand starting at position 3714 of SEQ ID NO: 1883351
guaugcauggaaggauaaa

SEQ ID NO: 2187787 - RNA, 19 nt, Artificial Sequence
  Description of Artificial Sequence: Synthetic oligonucleotide
  Antisense strand to SEQ ID NO: 2187786
uuuauccuuccaugcauac

SEQ ID NO: 2187788 - RNA, 19 nt, Artificial Sequence
  Description of Artificial Sequence: Synthetic oligonucleotide
  Sense strand starting at position 3741 of SEQ ID NO: 1883351
ucaauaugcugaguuugag

SEQ ID NO: 2187789 - RNA, 19 nt, Artificial Sequence
  Description of Artificial Sequence: Synthetic oligonucleotide
  Antisense strand to SEQ ID NO: 2187788
cucaaacucagcauauuga

SEQ ID NO: 2187790 - RNA, 19 nt, Artificial Sequence
  Description of Artificial Sequence: Synthetic oligonucleotide
  Sense strand starting at position 3744 of SEQ ID NO: 1883351
auaugcugaguuugagaca

SEQ ID NO: 2187791 - RNA, 19 nt, Artificial Sequence
  Description of Artificial Sequence: Synthetic oligonucleotide
  Antisense strand to SEQ ID NO: 2187790
ugucucaaacucagcauau

SEQ ID NO: 2187792 - RNA, 19 nt, Artificial Sequence
  Description of Artificial Sequence: Synthetic oligonucleotide
  Sense strand starting at position 3780 of SEQ ID NO: 1883351
agcgaagcucucuaaugga

SEQ ID NO: 2187793 - RNA, 19 nt, Artificial Sequence
  Description of Artificial Sequence: Synthetic oligonucleotide
  Antisense strand to SEQ ID NO: 2187792
uccauuagagagcuucgcu

SEQ ID NO: 2187794 - RNA, 19 nt, Artificial Sequence
  Description of Artificial Sequence: Synthetic oligonucleotide
  Sense strand starting at position 3860 of SEQ ID NO: 1883351
gucaucagcagucaaggaa

SEQ ID NO: 2187795 - RNA, 19 nt, Artificial Sequence
  Description of Artificial Sequence: Synthetic oligonucleotide
  Antisense strand to SEQ ID NO: 2187794
uuccuugacugcugaugac

SEQ ID NO: 2187796 - RNA, 19 nt, Artificial Sequence
  Description of Artificial Sequence: Synthetic oligonucleotide
  Sense strand starting at position 3872 of SEQ ID NO: 1883351
caaggaaacgauggcuaaa

SEQ ID NO: 2187797 - RNA, 19 nt, Artificial Sequence
  Description of Artificial Sequence: Synthetic oligonucleotide
  Antisense strand to SEQ ID NO: 2187796
uuuagccaucguuuccuug

SEQ ID NO: 2187798 - RNA, 19 nt, Artificial Sequence
  Description of Artificial Sequence: Synthetic oligonucleotide
  Sense strand starting at position 107 of SEQ ID NO: 1883352
uggacccauuuguacaauu

SEQ ID NO: 2187799 - RNA, 19 nt, Artificial Sequence
  Description of Artificial Sequence: Synthetic oligonucleotide
  Antisense strand to SEQ ID NO: 2187798
aauuguacaaaugggucca

SEQ ID NO: 2187800 - RNA, 19 nt, Artificial Sequence
  Description of Artificial Sequence: Synthetic oligonucleotide
  Sense strand starting at position 115 of SEQ ID NO: 1883352
uuuguacaauuguccauua

SEQ ID NO: 2187801 - RNA, 19 nt, Artificial Sequence
  Description of Artificial Sequence: Synthetic oligonucleotide
  Antisense strand to SEQ ID NO: 2187800
uaauggacaauuguacaaa

SEQ ID NO: 2187802 - RNA, 19 nt, Artificial Sequence
  Description of Artificial Sequence: Synthetic oligonucleotide
  Sense strand starting at position 117 of SEQ ID NO: 1883352
uguacaauuguccauuaga

SEQ ID NO: 2187803 - RNA, 19 nt, Artificial Sequence
  Description of Artificial Sequence: Synthetic oligonucleotide
  Antisense strand to SEQ ID NO: 2187802
ucuaauggacaauuguaca

SEQ ID NO: 2187804 - RNA, 19 nt, Artificial Sequence
  Description of Artificial Sequence: Synthetic oligonucleotide
  Sense strand starting at position 214 of SEQ ID NO: 1883352
ucauauuucuugucuuggu

SEQ ID NO: 2187805 - RNA, 19 nt, Artificial Sequence
  Description of Artificial Sequence: Synthetic oligonucleotide
  Antisense strand to SEQ ID NO: 2187804
accaagacaagaaauauga

SEQ ID NO: 2187806 - RNA, 19 nt, Artificial Sequence
  Description of Artificial Sequence: Synthetic oligonucleotide
  Sense strand starting at position 218 of SEQ ID NO: 1883352
auuucuugucuugguaacu

SEQ ID NO: 2187807 - RNA, 19 nt, Artificial Sequence
  Description of Artificial Sequence: Synthetic oligonucleotide
  Antisense strand to SEQ ID NO: 2187806
aguuaccaagacaagaaau

SEQ ID NO: 2187808 - RNA, 19 nt, Artificial Sequence
  Description of Artificial Sequence: Synthetic oligonucleotide
  Sense strand starting at position 439 of SEQ ID NO: 1883352
uuagguauuuggcuuucua

SEQ ID NO: 2187809 - RNA, 19 nt, Artificial Sequence
  Description of Artificial Sequence: Synthetic oligonucleotide
  Antisense strand to SEQ ID NO: 2187808
uagaaagccaaauaccuaa

SEQ ID NO: 2187810 - RNA, 19 nt, Artificial Sequence
  Description of Artificial Sequence: Synthetic oligonucleotide
  Sense strand starting at position 450 of SEQ ID NO: 1883352
gcuuucuaaugguuauaag

SEQ ID NO: 2187811 - RNA, 19 nt, Artificial Sequence
  Description of Artificial Sequence: Synthetic oligonucleotide
  Antisense strand to SEQ ID NO: 2187810
cuuauaaccauuagaaagc

SEQ ID NO: 2187812 - RNA, 19 nt, Artificial Sequence
  Description of Artificial Sequence: Synthetic oligonucleotide
  Sense strand starting at position 460 of SEQ ID NO: 1883352
gguuauaagggauguggaa

SEQ ID NO: 2187813 - RNA, 19 nt, Artificial Sequence
  Description of Artificial Sequence: Synthetic oligonucleotide
  Antisense strand to SEQ ID NO: 2187812
uuccacaucccuuauaacc

SEQ ID NO: 2187814 - RNA, 19 nt, Artificial Sequence
  Description of Artificial Sequence: Synthetic oligonucleotide
  Sense strand starting at position 542 of SEQ ID NO: 1883352
uuuaauugccaugguuaaa

SEQ ID NO: 2187815 - RNA, 19 nt, Artificial Sequence
  Description of Artificial Sequence: Synthetic oligonucleotide
  Antisense strand to SEQ ID NO: 2187814
uuuaaccauggcaauuaaa

SEQ ID NO: 2187816 - RNA, 19 nt, Artificial Sequence
  Description of Artificial Sequence: Synthetic oligonucleotide
  Sense strand starting at position 627 of SEQ ID NO: 1883352
uaaugaugugucuauaaug

SEQ ID NO: 2187817 - RNA, 19 nt, Artificial Sequence
  Description of Artificial Sequence: Synthetic oligonucleotide
  Antisense strand to SEQ ID NO: 2187816
cauuauagacacaucauua

SEQ ID NO: 2187818 - RNA, 19 nt, Artificial Sequence
  Description of Artificial Sequence: Synthetic oligonucleotide
  Sense strand starting at position 683 of SEQ ID NO: 1883352
ggugaauaacacuggcgau

SEQ ID NO: 2187819 - RNA, 19 nt, Artificial Sequence
  Description of Artificial Sequence: Synthetic oligonucleotide
  Antisense strand to SEQ ID NO: 2187818
aucgccaguguuauucacc

SEQ ID NO: 2187820 - RNA, 19 nt, Artificial Sequence
  Description of Artificial Sequence: Synthetic oligonucleotide
  Sense strand starting at position 684 of SEQ ID NO: 1883352
gugaauaacacuggcgauu

SEQ ID NO: 2187821 - RNA, 19 nt, Artificial Sequence
  Description of Artificial Sequence: Synthetic oligonucleotide
  Antisense strand to SEQ ID NO: 2187820
aaucgccaguguuauucac

SEQ ID NO: 2187822 - RNA, 19 nt, Artificial Sequence
  Description of Artificial Sequence: Synthetic oligonucleotide
  Sense strand starting at position 695 of SEQ ID NO: 1883352
uggcgauuguagagauuug

SEQ ID NO: 2187823 - RNA, 19 nt, Artificial Sequence
  Description of Artificial Sequence: Synthetic oligonucleotide
  Antisense strand to SEQ ID NO: 2187822
caaaucucuacaaucgcca

SEQ ID NO: 2187824 - RNA, 19 nt, Artificial Sequence
  Description of Artificial Sequence: Synthetic oligonucleotide
  Sense strand starting at position 1194 of SEQ ID NO: 1883352
ucucuuacauuugagaagu

SEQ ID NO: 2187825 - RNA, 19 nt, Artificial Sequence
  Description of Artificial Sequence: Synthetic oligonucleotide
  Antisense strand to SEQ ID NO: 2187824
acuucucaaauguaagaga

SEQ ID NO: 2187826 - RNA, 19 nt, Artificial Sequence
  Description of Artificial Sequence: Synthetic oligonucleotide
  Sense strand starting at position 1196 of SEQ ID NO: 1883352
ucuuacauuugagaagucu

SEQ ID NO: 2187827 - RNA, 19 nt, Artificial Sequence
  Description of Artificial Sequence: Synthetic oligonucleotide
  Antisense strand to SEQ ID NO: 2187826
agacuucucaaauguaaga

SEQ ID NO: 2187828 - RNA, 19 nt, Artificial Sequence
  Description of Artificial Sequence: Synthetic oligonucleotide
  Sense strand starting at position 1220 of SEQ ID NO: 1883352
gggucuuacucagcugaaa

SEQ ID NO: 2187829 - RNA, 19 nt, Artificial Sequence
  Description of Artificial Sequence: Synthetic oligonucleotide
  Antisense strand to SEQ ID NO: 2187828
uuucagcugaguaagaccc

SEQ ID NO: 2187830 - RNA, 19 nt, Artificial Sequence
  Description of Artificial Sequence: Synthetic oligonucleotide
  Sense strand starting at position 1650 of SEQ ID NO: 1883352
cuuccuuagcaguggagaa

SEQ ID NO: 2187831 - RNA, 19 nt, Artificial Sequence
  Description of Artificial Sequence: Synthetic oligonucleotide
  Antisense strand to SEQ ID NO: 2187830
uucuccacugcuaaggaag

SEQ ID NO: 2187832 - RNA, 19 nt, Artificial Sequence
  Description of Artificial Sequence: Synthetic oligonucleotide
  Sense strand starting at position 1660 of SEQ ID NO: 1883352
aguggagaacaucguaaga

SEQ ID NO: 2187833 - RNA, 19 nt, Artificial Sequence
  Description of Artificial Sequence: Synthetic oligonucleotide
  Antisense strand to SEQ ID NO: 2187832
ucuuacgauguucuccacu

SEQ ID NO: 2187834 - RNA, 19 nt, Artificial Sequence
  Description of Artificial Sequence: Synthetic oligonucleotide
  Sense strand starting at position 1671 of SEQ ID NO: 1883352
ucguaagaucaaugcugac

SEQ ID NO: 2187835 - RNA, 19 nt, Artificial Sequence
  Description of Artificial Sequence: Synthetic oligonucleotide
  Antisense strand to SEQ ID NO: 2187834
gucagcauugaucuuacga

SEQ ID NO: 2187836 - RNA, 19 nt, Artificial Sequence
  Description of Artificial Sequence: Synthetic oligonucleotide
  Sense strand starting at position 1837 of SEQ ID NO: 1883352
uuauauuucucuggaaaga

SEQ ID NO: 2187837 - RNA, 19 nt, Artificial Sequence
  Description of Artificial Sequence: Synthetic oligonucleotide
  Antisense strand to SEQ ID NO: 2187836
ucuuuccagagaaauauaa

SEQ ID NO: 2187838 - RNA, 19 nt, Artificial Sequence
  Description of Artificial Sequence: Synthetic oligonucleotide
  Sense strand starting at position 1895 of SEQ ID NO: 1883352
ggagucucuugacuuggau

SEQ ID NO: 2187839 - RNA, 19 nt, Artificial Sequence
  Description of Artificial Sequence: Synthetic oligonucleotide
  Antisense strand to SEQ ID NO: 2187838
auccaagucaagagacucc

SEQ ID NO: 2187840 - RNA, 19 nt, Artificial Sequence
  Description of Artificial Sequence: Synthetic oligonucleotide
  Sense strand starting at position 1908 of SEQ ID NO: 1883352
uuggauuucuuuggaagaa

SEQ ID NO: 2187841 - RNA, 19 nt, Artificial Sequence
  Description of Artificial Sequence: Synthetic oligonucleotide
  Antisense strand to SEQ ID NO: 2187840
uucuuccaaagaaauccaa

SEQ ID NO: 2187842 - RNA, 19 nt, Artificial Sequence
  Description of Artificial Sequence: Synthetic oligonucleotide
  Sense strand starting at position 1909 of SEQ ID NO: 1883352
uggauuucuuuggaagaaa

SEQ ID NO: 2187843 - RNA, 19 nt, Artificial Sequence
  Description of Artificial Sequence: Synthetic oligonucleotide
  Antisense strand to SEQ ID NO: 2187842
uuucuuccaaagaaaucca

SEQ ID NO: 2187844 - RNA, 19 nt, Artificial Sequence
  Description of Artificial Sequence: Synthetic oligonucleotide
  Sense strand starting at position 2228 of SEQ ID NO: 1883352
cguaucauuugugucaguu

SEQ ID NO: 2187845 - RNA, 19 nt, Artificial Sequence
  Description of Artificial Sequence: Synthetic oligonucleotide
  Antisense strand to SEQ ID NO: 2187844
aacugacacaaaugauacg

SEQ ID NO: 2187846 - RNA, 19 nt, Artificial Sequence
  Description of Artificial Sequence: Synthetic oligonucleotide
  Sense strand starting at position 2234 of SEQ ID NO: 1883352
auuugugucaguugucaua

SEQ ID NO: 2187847 - RNA, 19 nt, Artificial Sequence
  Description of Artificial Sequence: Synthetic oligonucleotide
  Antisense strand to SEQ ID NO: 2187846
uaugacaacugacacaaau

SEQ ID NO: 2187848 - RNA, 19 nt, Artificial Sequence
  Description of Artificial Sequence: Synthetic oligonucleotide
  Sense strand starting at position 2492 of SEQ ID NO: 1883352
ggauguuuccggagucugu

SEQ ID NO: 2187849 - RNA, 19 nt, Artificial Sequence
  Description of Artificial Sequence: Synthetic oligonucleotide
  Antisense strand to SEQ ID NO: 2187848
acagacuccggaaacaucc

SEQ ID NO: 2187850 - RNA, 19 nt, Artificial Sequence
  Description of Artificial Sequence: Synthetic oligonucleotide
  Sense strand starting at position 2667 of SEQ ID NO: 1883352
gccucaguaugcccaauuu

SEQ ID NO: 2187851 - RNA, 19 nt, Artificial Sequence
  Description of Artificial Sequence: Synthetic oligonucleotide
  Antisense strand to SEQ ID NO: 2187850
aaauugggcauacugaggc

SEQ ID NO: 2187852 - RNA, 19 nt, Artificial Sequence
  Description of Artificial Sequence: Synthetic oligonucleotide
  Sense strand starting at position 2945 of SEQ ID NO: 1883352
cuccguguucucuuuguuu

SEQ ID NO: 2187853 - RNA, 19 nt, Artificial Sequence
  Description of Artificial Sequence: Synthetic oligonucleotide
  Antisense strand to SEQ ID NO: 2187852
aaacaaagagaacacggag

SEQ ID NO: 2187854 - RNA, 19 nt, Artificial Sequence
  Description of Artificial Sequence: Synthetic oligonucleotide
  Sense strand starting at position 3088 of SEQ ID NO: 1883352
gcagaagccuagucacaaa

SEQ ID NO: 2187855 - RNA, 19 nt, Artificial Sequence
  Description of Artificial Sequence: Synthetic oligonucleotide
  Antisense strand to SEQ ID NO: 2187854
uuugugacuaggcuucugc

SEQ ID NO: 2187856 - RNA, 19 nt, Artificial Sequence
  Description of Artificial Sequence: Synthetic oligonucleotide
  Sense strand starting at position 3194 of SEQ ID NO: 1883352
cuuggaugccaguaauuag

SEQ ID NO: 2187857 - RNA, 19 nt, Artificial Sequence
  Description of Artificial Sequence: Synthetic oligonucleotide
  Antisense strand to SEQ ID NO: 2187856
cuaauuacuggcauccaag

SEQ ID NO: 2187858 - RNA, 19 nt, Artificial Sequence
  Description of Artificial Sequence: Synthetic oligonucleotide
  Sense strand starting at position 3291 of SEQ ID NO: 1883352
ggaaguguuaacuaguuua

SEQ ID NO: 2187859 - RNA, 19 nt, Artificial Sequence
  Description of Artificial Sequence: Synthetic oligonucleotide
  Antisense strand to SEQ ID NO: 2187858
uaaacuaguuaacacuucc

SEQ ID NO: 2187860 - RNA, 19 nt, Artificial Sequence
  Description of Artificial Sequence: Synthetic oligonucleotide
  Sense strand starting at position 3296 of SEQ ID NO: 1883352
uguuaacuaguuuaacuga

SEQ ID NO: 2187861 - RNA, 19 nt, Artificial Sequence
  Description of Artificial Sequence: Synthetic oligonucleotide
  Antisense strand to SEQ ID NO: 2187860
ucaguuaaacuaguuaaca

SEQ ID NO: 2187862 - RNA, 19 nt, Artificial Sequence
  Description of Artificial Sequence: Synthetic oligonucleotide
  Sense strand starting at position 3474 of SEQ ID NO: 1883352
acagucccaccauguaaua

SEQ ID NO: 2187863 - RNA, 19 nt, Artificial Sequence
  Description of Artificial Sequence: Synthetic oligonucleotide
  Antisense strand to SEQ ID NO: 2187862
uauuacauggugggacugu

SEQ ID NO: 2187864 - RNA, 19 nt, Artificial Sequence
  Description of Artificial Sequence: Synthetic oligonucleotide
  Sense strand starting at position 3570 of SEQ ID NO: 1883352
ucaugucacuuauugagag

SEQ ID NO: 2187865 - RNA, 19 nt, Artificial Sequence
  Description of Artificial Sequence: Synthetic oligonucleotide
  Antisense strand to SEQ ID NO: 2187864
cucucaauaagugacauga

SEQ ID NO: 2187866 - RNA, 19 nt, Artificial Sequence
  Description of Artificial Sequence: Synthetic oligonucleotide
  Sense strand starting at position 3598 of SEQ ID NO: 1883352
ucuguuaaauugucaguaa

SEQ ID NO: 2187867 - RNA, 19 nt, Artificial Sequence
  Description of Artificial Sequence: Synthetic oligonucleotide
  Antisense strand to SEQ ID NO: 2187866
uuacugacaauuuaacaga

SEQ ID NO: 2187868 - RNA, 19 nt, Artificial Sequence
  Description of Artificial Sequence: Synthetic oligonucleotide
  Sense strand starting at position 3767 of SEQ ID NO: 1883352
gaggauugaaaucguaugu

SEQ ID NO: 2187869 - RNA, 19 nt, Artificial Sequence
  Description of Artificial Sequence: Synthetic oligonucleotide
  Antisense strand to SEQ ID NO: 2187868
acauacgauuucaauccuc

SEQ ID NO: 2187870 - RNA, 19 nt, Artificial Sequence
  Description of Artificial Sequence: Synthetic oligonucleotide
  Sense strand starting at position 3819 of SEQ ID NO: 1883352
augcaauuccuaugaaugu

SEQ ID NO: 2187871 - RNA, 19 nt, Artificial Sequence
  Description of Artificial Sequence: Synthetic oligonucleotide
  Antisense strand to SEQ ID NO: 2187870
acauucauaggaauugcau

SEQ ID NO: 2187872 - RNA, 19 nt, Artificial Sequence
  Description of Artificial Sequence: Synthetic oligonucleotide
  Sense strand starting at position 3879 of SEQ ID NO: 1883352
cccaaauguccaugaagca

SEQ ID NO: 2187873 - RNA, 19 nt, Artificial Sequence
  Description of Artificial Sequence: Synthetic oligonucleotide
  Antisense strand to SEQ ID NO: 2187872
ugcuucauggacauuuggg

SEQ ID NO: 2187874 - RNA, 19 nt, Artificial Sequence
  Description of Artificial Sequence: Synthetic oligonucleotide
  Sense strand starting at position 3880 of SEQ ID NO: 1883352
ccaaauguccaugaagcaa

SEQ ID NO: 2187875 - RNA, 19 nt, Artificial Sequence
  Description of Artificial Sequence: Synthetic oligonucleotide
  Antisense strand to SEQ ID NO: 2187874
uugcuucauggacauuugg

SEQ ID NO: 2187876 - RNA, 19 nt, Artificial Sequence
  Description of Artificial Sequence: Synthetic oligonucleotide
  Sense strand starting at position 3894 of SEQ ID NO: 1883352
agcaauuaauagguaaaca

SEQ ID NO: 2187877 - RNA, 19 nt, Artificial Sequence
  Description of Artificial Sequence: Synthetic oligonucleotide
  Antisense strand to SEQ ID NO: 2187876
uguuuaccuauuaauugcu

SEQ ID NO: 2187878 - RNA, 19 nt, Artificial Sequence
  Description of Artificial Sequence: Synthetic oligonucleotide
  Sense strand starting at position 358 of SEQ ID NO: 1883353
gguauaguauuaguucuau

SEQ ID NO: 2187879 - RNA, 19 nt, Artificial Sequence
  Description of Artificial Sequence: Synthetic oligonucleotide
  Antisense strand to SEQ ID NO: 2187878
auagaacuaauacuauacc

SEQ ID NO: 2187880 - RNA, 19 nt, Artificial Sequence
  Description of Artificial Sequence: Synthetic oligonucleotide
  Sense strand starting at position 406 of SEQ ID NO: 1883353
agguuaauuuaccaaggua

SEQ ID NO: 2187881 - RNA, 19 nt, Artificial Sequence
  Description of Artificial Sequence: Synthetic oligonucleotide
  Antisense strand to SEQ ID NO: 2187880
uaccuugguaaauuaaccu

SEQ ID NO: 2187882 - RNA, 19 nt, Artificial Sequence
  Description of Artificial Sequence: Synthetic oligonucleotide
  Sense strand starting at position 418 of SEQ ID NO: 1883353
caagguaacaguggguaau

SEQ ID NO: 2187883 - RNA, 19 nt, Artificial Sequence
  Description of Artificial Sequence: Synthetic oligonucleotide
  Antisense strand to SEQ ID NO: 2187882
auuacccacuguuaccuug

SEQ ID NO: 2187884 - RNA, 19 nt, Artificial Sequence
  Description of Artificial Sequence: Synthetic oligonucleotide
  Sense strand starting at position 429 of SEQ ID NO: 1883353
uggguaauccuguaugaug

SEQ ID NO: 2187885 - RNA, 19 nt, Artificial Sequence
  Description of Artificial Sequence: Synthetic oligonucleotide
  Antisense strand to SEQ ID NO: 2187884
caucauacaggauuaccca

SEQ ID NO: 2187886 - RNA, 19 nt, Artificial Sequence
  Description of Artificial Sequence: Synthetic oligonucleotide
  Sense strand starting at position 455 of SEQ ID NO: 1883353
cguguucaggucuagaacu

SEQ ID NO: 2187887 - RNA, 19 nt, Artificial Sequence
  Description of Artificial Sequence: Synthetic oligonucleotide
  Antisense strand to SEQ ID NO: 2187886
aguucuagaccugaacacg

SEQ ID NO: 2187888 - RNA, 19 nt, Artificial Sequence
  Description of Artificial Sequence: Synthetic oligonucleotide
  Sense strand starting at position 604 of SEQ ID NO: 1883353
ucugaaugacuagguuauc

SEQ ID NO: 2187889 - RNA, 19 nt, Artificial Sequence
  Description of Artificial Sequence: Synthetic oligonucleotide
  Antisense strand to SEQ ID NO: 2187888
gauaaccuagucauucaga

SEQ ID NO: 2187890 - RNA, 19 nt, Artificial Sequence
  Description of Artificial Sequence: Synthetic oligonucleotide
  Sense strand starting at position 710 of SEQ ID NO: 1883353
acaggaggaugccuaguau

SEQ ID NO: 2187891 - RNA, 19 nt, Artificial Sequence
  Description of Artificial Sequence: Synthetic oligonucleotide
  Antisense strand to SEQ ID NO: 2187890
auacuaggcauccuccugu

SEQ ID NO: 2187892 - RNA, 19 nt, Artificial Sequence
  Description of Artificial Sequence: Synthetic oligonucleotide
  Sense strand starting at position 717 of SEQ ID NO: 1883353
gaugccuaguauucugaua

SEQ ID NO: 2187893 - RNA, 19 nt, Artificial Sequence
  Description of Artificial Sequence: Synthetic oligonucleotide
  Antisense strand to SEQ ID NO: 2187892
uaucagaauacuaggcauc

SEQ ID NO: 2187894 - RNA, 19 nt, Artificial Sequence
  Description of Artificial Sequence: Synthetic oligonucleotide
  Sense strand starting at position 756 of SEQ ID NO: 1883353
ugagaugucuccucccuca

SEQ ID NO: 2187895 - RNA, 19 nt, Artificial Sequence
  Description of Artificial Sequence: Synthetic oligonucleotide
  Antisense strand to SEQ ID NO: 2187894
ugagggaggagacaucuca

SEQ ID NO: 2187896 - RNA, 19 nt, Artificial Sequence
  Description of Artificial Sequence: Synthetic oligonucleotide
  Sense strand starting at position 803 of SEQ ID NO: 1883353
guuuaacuccuuuaaguau

SEQ ID NO: 2187897 - RNA, 19 nt, Artificial Sequence
  Description of Artificial Sequence: Synthetic oligonucleotide
  Antisense strand to SEQ ID NO: 2187896
auacuuaaaggaguuaaac

SEQ ID NO: 2187898 - RNA, 19 nt, Artificial Sequence
  Description of Artificial Sequence: Synthetic oligonucleotide
  Sense strand starting at position 814 of SEQ ID NO: 1883353
uuaaguauuuccuaaagga

SEQ ID NO: 2187899 - RNA, 19 nt, Artificial Sequence
  Description of Artificial Sequence: Synthetic oligonucleotide
  Antisense strand to SEQ ID NO: 2187898
uccuuuaggaaauacuuaa

SEQ ID NO: 2187900 - RNA, 19 nt, Artificial Sequence
  Description of Artificial Sequence: Synthetic oligonucleotide
  Sense strand starting at position 830 of SEQ ID NO: 1883353
ggaaguauuuauugggacu

SEQ ID NO: 2187901 - RNA, 19 nt, Artificial Sequence
  Description of Artificial Sequence: Synthetic oligonucleotide
  Antisense strand to SEQ ID NO: 2187900
agucccaauaaauacuucc

SEQ ID NO: 2187902 - RNA, 19 nt, Artificial Sequence
  Description of Artificial Sequence: Synthetic oligonucleotide
  Sense strand starting at position 1009 of SEQ ID NO: 1883353
gucagaugcuauccauauu

SEQ ID NO: 2187903 - RNA, 19 nt, Artificial Sequence
  Description of Artificial Sequence: Synthetic oligonucleotide
  Antisense strand to SEQ ID NO: 2187902
aauauggauagcaucugac

SEQ ID NO: 2187904 - RNA, 19 nt, Artificial Sequence
  Description of Artificial Sequence: Synthetic oligonucleotide
  Sense strand starting at position 1390 of SEQ ID NO: 1883353
gcccuuuguaaagauggca

SEQ ID NO: 2187905 - RNA, 19 nt, Artificial Sequence
  Description of Artificial Sequence: Synthetic oligonucleotide
  Antisense strand to SEQ ID NO: 2187904
ugccaucuuuacaaagggc

SEQ ID NO: 2187906 - RNA, 19 nt, Artificial Sequence
  Description of Artificial Sequence: Synthetic oligonucleotide
  Sense strand starting at position 1797 of SEQ ID NO: 1883353
gaauuaugacaaugggcuu

SEQ ID NO: 2187907 - RNA, 19 nt, Artificial Sequence
  Description of Artificial Sequence: Synthetic oligonucleotide
  Antisense strand to SEQ ID NO: 2187906
aagcccauugucauaauuc

SEQ ID NO: 2187908 - RNA, 19 nt, Artificial Sequence
  Description of Artificial Sequence: Synthetic oligonucleotide
  Sense strand starting at position 2038 of SEQ ID NO: 1883353
acuaucaauugaguaaugu

SEQ ID NO: 2187909 - RNA, 19 nt, Artificial Sequence
  Description of Artificial Sequence: Synthetic oligonucleotide
  Antisense strand to SEQ ID NO: 2187908
acauuacucaauugauagu

SEQ ID NO: 2187910 - RNA, 19 nt, Artificial Sequence
  Description of Artificial Sequence: Synthetic oligonucleotide
  Sense strand starting at position 2039 of SEQ ID NO: 1883353
cuaucaauugaguaaugug

SEQ ID NO: 2187911 - RNA, 19 nt, Artificial Sequence
  Description of Artificial Sequence: Synthetic oligonucleotide
  Antisense strand to SEQ ID NO: 2187910
cacauuacucaauugauag

SEQ ID NO: 2187912 - RNA, 19 nt, Artificial Sequence
  Description of Artificial Sequence: Synthetic oligonucleotide
  Sense strand starting at position 2096 of SEQ ID NO: 1883353
gcugacauguaauucgaau

SEQ ID NO: 2187913 - RNA, 19 nt, Artificial Sequence
  Description of Artificial Sequence: Synthetic oligonucleotide
  Antisense strand to SEQ ID NO: 2187912
auucgaauuacaugucagc

SEQ ID NO: 2187914 - RNA, 19 nt, Artificial Sequence
  Description of Artificial Sequence: Synthetic oligonucleotide
  Sense strand starting at position 2188 of SEQ ID NO: 1883353
cugcucucagaucgaugaa

SEQ ID NO: 2187915 - RNA, 19 nt, Artificial Sequence
  Description of Artificial Sequence: Synthetic oligonucleotide
  Antisense strand to SEQ ID NO: 2187914
uucaucgaucugagagcag

SEQ ID NO: 2187916 - RNA, 19 nt, Artificial Sequence
  Description of Artificial Sequence: Synthetic oligonucleotide
  Sense strand starting at position 2191 of SEQ ID NO: 1883353
cucucagaucgaugaagca

SEQ ID NO: 2187917 - RNA, 19 nt, Artificial Sequence
  Description of Artificial Sequence: Synthetic oligonucleotide
  Antisense strand to SEQ ID NO: 2187916
ugcuucaucgaucugagag

SEQ ID NO: 2187918 - RNA, 19 nt, Artificial Sequence
  Description of Artificial Sequence: Synthetic oligonucleotide
  Sense strand starting at position 2434 of SEQ ID NO: 1883353
ggccuuggacaagagaguu

SEQ ID NO: 2187919 - RNA, 19 nt, Artificial Sequence
  Description of Artificial Sequence: Synthetic oligonucleotide
  Antisense strand to SEQ ID NO: 2187918
aacucucuuguccaaggcc

SEQ ID NO: 2187920 - RNA, 19 nt, Artificial Sequence
  Description of Artificial Sequence: Synthetic oligonucleotide
  Sense strand starting at position 2468 of SEQ ID NO: 1883353
agcugugcuauggacauaa

SEQ ID NO: 2187921 - RNA, 19 nt, Artificial Sequence
  Description of Artificial Sequence: Synthetic oligonucleotide
  Antisense strand to SEQ ID NO: 2187920
uuauguccauagcacagcu

SEQ ID NO: 2187922 - RNA, 19 nt, Artificial Sequence
  Description of Artificial Sequence: Synthetic oligonucleotide
  Sense strand starting at position 2470 of SEQ ID NO: 1883353
cugugcuauggacauaaua

SEQ ID NO: 2187923 - RNA, 19 nt, Artificial Sequence
  Description of Artificial Sequence: Synthetic oligonucleotide
  Antisense strand to SEQ ID NO: 2187922
uauuauguccauagcacag

SEQ ID NO: 2187924 - RNA, 19 nt, Artificial Sequence
  Description of Artificial Sequence: Synthetic oligonucleotide
  Sense strand starting at position 2502 of SEQ ID NO: 1883353
cuuggacuuguuugaagag

SEQ ID NO: 2187925 - RNA, 19 nt, Artificial Sequence
  Description of Artificial Sequence: Synthetic oligonucleotide
  Antisense strand to SEQ ID NO: 2187924
cucuucaaacaaguccaag

SEQ ID NO: 2187926 - RNA, 19 nt, Artificial Sequence
  Description of Artificial Sequence: Synthetic oligonucleotide
  Sense strand starting at position 2606 of SEQ ID NO: 1883353
uaguauuagcagugaugaa

SEQ ID NO: 2187927 - RNA, 19 nt, Artificial Sequence
  Description of Artificial Sequence: Synthetic oligonucleotide
  Antisense strand to SEQ ID NO: 2187926
uucaucacugcuaauacua

SEQ ID NO: 2187928 - RNA, 19 nt, Artificial Sequence
  Description of Artificial Sequence: Synthetic oligonucleotide
  Sense strand starting at position 2607 of SEQ ID NO: 1883353
aguauuagcagugaugaau

SEQ ID NO: 2187929 - RNA, 19 nt, Artificial Sequence
  Description of Artificial Sequence: Synthetic oligonucleotide
  Antisense strand to SEQ ID NO: 2187928
auucaucacugcuaauacu

SEQ ID NO: 2187930 - RNA, 19 nt, Artificial Sequence
  Description of Artificial Sequence: Synthetic oligonucleotide
  Sense strand starting at position 2676 of SEQ ID NO: 1883353
uggaacugcucuguuggaa

SEQ ID NO: 2187931 - RNA, 19 nt, Artificial Sequence
  Description of Artificial Sequence: Synthetic oligonucleotide
  Antisense strand to SEQ ID NO: 2187930
uuccaacagagcaguucca

SEQ ID NO: 2187932 - RNA, 19 nt, Artificial Sequence
  Description of Artificial Sequence: Synthetic oligonucleotide
  Sense strand starting at position 3128 of SEQ ID NO: 1883353
aggcuaauuaguggaguaa

SEQ ID NO: 2187933 - RNA, 19 nt, Artificial Sequence
  Description of Artificial Sequence: Synthetic oligonucleotide
  Antisense strand to SEQ ID NO: 2187932
uuacuccacuaauuagccu

SEQ ID NO: 2187934 - RNA, 19 nt, Artificial Sequence
  Description of Artificial Sequence: Synthetic oligonucleotide
  Sense strand starting at position 3129 of SEQ ID NO: 1883353
ggcuaauuaguggaguaag

SEQ ID NO: 2187935 - RNA, 19 nt, Artificial Sequence
  Description of Artificial Sequence: Synthetic oligonucleotide
  Antisense strand to SEQ ID NO: 2187934
cuuacuccacuaauuagcc

SEQ ID NO: 2187936 - RNA, 19 nt, Artificial Sequence
  Description of Artificial Sequence: Synthetic oligonucleotide
  Sense strand starting at position 3212 of SEQ ID NO: 1883353
agaugaaugucucuguuug

SEQ ID NO: 2187937 - RNA, 19 nt, Artificial Sequence
  Description of Artificial Sequence: Synthetic oligonucleotide
  Antisense strand to SEQ ID NO: 2187936
caaacagagacauucaucu

SEQ ID NO: 2187938 - RNA, 19 nt, Artificial Sequence
  Description of Artificial Sequence: Synthetic oligonucleotide
  Sense strand starting at position 3213 of SEQ ID NO: 1883353
gaugaaugucucuguuuga

SEQ ID NO: 2187939 - RNA, 19 nt, Artificial Sequence
  Description of Artificial Sequence: Synthetic oligonucleotide
  Antisense strand to SEQ ID NO: 2187938
ucaaacagagacauucauc

SEQ ID NO: 2187940 - RNA, 19 nt, Artificial Sequence
  Description of Artificial Sequence: Synthetic oligonucleotide
  Sense strand starting at position 3214 of SEQ ID NO: 1883353
augaaugucucuguuugau

SEQ ID NO: 2187941 - RNA, 19 nt, Artificial Sequence
  Description of Artificial Sequence: Synthetic oligonucleotide
  Antisense strand to SEQ ID NO: 2187940
aucaaacagagacauucau

SEQ ID NO: 2187942 - RNA, 19 nt, Artificial Sequence
  Description of Artificial Sequence: Synthetic oligonucleotide
  Sense strand starting at position 3267 of SEQ ID NO: 1883353
guguuuccuaaguagguga

SEQ ID NO: 2187943 - RNA, 19 nt, Artificial Sequence
  Description of Artificial Sequence: Synthetic oligonucleotide
  Antisense strand to SEQ ID NO: 2187942
ucaccuacuuaggaaacac

SEQ ID NO: 2187944 - RNA, 19 nt, Artificial Sequence
  Description of Artificial Sequence: Synthetic oligonucleotide
  Sense strand starting at position 3269 of SEQ ID NO: 1883353
guuuccuaaguaggugaau

SEQ ID NO: 2187945 - RNA, 19 nt, Artificial Sequence
  Description of Artificial Sequence: Synthetic oligonucleotide
  Antisense strand to SEQ ID NO: 2187944
auucaccuacuuaggaaac

SEQ ID NO: 2187946 - RNA, 19 nt, Artificial Sequence
  Description of Artificial Sequence: Synthetic oligonucleotide
  Sense strand starting at position 3270 of SEQ ID NO: 1883353
uuuccuaaguaggugaaua

SEQ ID NO: 2187947 - RNA, 19 nt, Artificial Sequence
  Description of Artificial Sequence: Synthetic oligonucleotide
  Antisense strand to SEQ ID NO: 2187946
uauucaccuacuuaggaaa

SEQ ID NO: 2187948 - RNA, 19 nt, Artificial Sequence
  Description of Artificial Sequence: Synthetic oligonucleotide
  Sense strand starting at position 3340 of SEQ ID NO: 1883353
gugcuccuucugggaaaga

SEQ ID NO: 2187949 - RNA, 19 nt, Artificial Sequence
  Description of Artificial Sequence: Synthetic oligonucleotide
  Antisense strand to SEQ ID NO: 2187948
ucuuucccagaaggagcac

SEQ ID NO: 2187950 - RNA, 19 nt, Artificial Sequence
  Description of Artificial Sequence: Synthetic oligonucleotide
  Sense strand starting at position 3404 of SEQ ID NO: 1883353
guucuugggcaguauugau

SEQ ID NO: 2187951 - RNA, 19 nt, Artificial Sequence
  Description of Artificial Sequence: Synthetic oligonucleotide
  Antisense strand to SEQ ID NO: 2187950
aucaauacugcccaagaac

SEQ ID NO: 2187952 - RNA, 19 nt, Artificial Sequence
  Description of Artificial Sequence: Synthetic oligonucleotide
  Sense strand starting at position 3530 of SEQ ID NO: 1883353
ugcaaucagcgugugugaa

SEQ ID NO: 2187953 - RNA, 19 nt, Artificial Sequence
  Description of Artificial Sequence: Synthetic oligonucleotide
  Antisense strand to SEQ ID NO: 2187952
uucacacacgcugauugca

SEQ ID NO: 2187954 - RNA, 19 nt, Artificial Sequence
  Description of Artificial Sequence: Synthetic oligonucleotide
  Sense strand starting at position 3860 of SEQ ID NO: 1883353
uuguucuuuagggaugcua

SEQ ID NO: 2187955 - RNA, 19 nt, Artificial Sequence
  Description of Artificial Sequence: Synthetic oligonucleotide
  Antisense strand to SEQ ID NO: 2187954
uagcaucccuaaagaacaa

SEQ ID NO: 2187956 - RNA, 19 nt, Artificial Sequence
  Description of Artificial Sequence: Synthetic oligonucleotide
  Sense strand starting at position 3979 of SEQ ID NO: 1883353
ggagcaucucauggaagca

SEQ ID NO: 2187957 - RNA, 19 nt, Artificial Sequence
  Description of Artificial Sequence: Synthetic oligonucleotide
  Antisense strand to SEQ ID NO: 2187956
ugcuuccaugagaugcucc

SEQ ID NO: 2187958 - RNA, 19 nt, Artificial Sequence
  Description of Artificial Sequence: Synthetic oligonucleotide
  Sense strand starting at position 29 of SEQ ID NO: 1883354
ugcuuaucacaagaaugca

SEQ ID NO: 2187959 - RNA, 19 nt, Artificial Sequence
  Description of Artificial Sequence: Synthetic oligonucleotide
  Antisense strand to SEQ ID NO: 2187958
ugcauucuugugauaagca

SEQ ID NO: 2187960 - RNA, 19 nt, Artificial Sequence
  Description of Artificial Sequence: Synthetic oligonucleotide
  Sense strand starting at position 240 of SEQ ID NO: 1883354
gaggaagcuuagccuugaa

SEQ ID NO: 2187961 - RNA, 19 nt, Artificial Sequence
  Description of Artificial Sequence: Synthetic oligonucleotide
  Antisense strand to SEQ ID NO: 2187960
uucaaggcuaagcuuccuc

SEQ ID NO: 2187962 - RNA, 19 nt, Artificial Sequence
  Description of Artificial Sequence: Synthetic oligonucleotide
  Sense strand starting at position 243 of SEQ ID NO: 1883354
gaagcuuagccuugaagag

SEQ ID NO: 2187963 - RNA, 19 nt, Artificial Sequence
  Description of Artificial Sequence: Synthetic oligonucleotide
  Antisense strand to SEQ ID NO: 2187962
cucuucaaggcuaagcuuc

SEQ ID NO: 2187964 - RNA, 19 nt, Artificial Sequence
  Description of Artificial Sequence: Synthetic oligonucleotide
  Sense strand starting at position 338 of SEQ ID NO: 1883354
cccacuucuccugggaaca

SEQ ID NO: 2187965 - RNA, 19 nt, Artificial Sequence
  Description of Artificial Sequence: Synthetic oligonucleotide
  Antisense strand to SEQ ID NO: 2187964
uguucccaggagaaguggg

SEQ ID NO: 2187966 - RNA, 19 nt, Artificial Sequence
  Description of Artificial Sequence: Synthetic oligonucleotide
  Sense strand starting at position 339 of SEQ ID NO: 1883354
ccacuucuccugggaacau

SEQ ID NO: 2187967 - RNA, 19 nt, Artificial Sequence
  Description of Artificial Sequence: Synthetic oligonucleotide
  Antisense strand to SEQ ID NO: 2187966
auguucccaggagaagugg

SEQ ID NO: 2187968 - RNA, 19 nt, Artificial Sequence
  Description of Artificial Sequence: Synthetic oligonucleotide
  Sense strand starting at position 359 of SEQ ID NO: 1883354
ugaguuucucaaggaucag

SEQ ID NO: 2187969 - RNA, 19 nt, Artificial Sequence
  Description of Artificial Sequence: Synthetic oligonucleotide
  Antisense strand to SEQ ID NO: 2187968
cugauccuugagaaacuca

SEQ ID NO: 2187970 - RNA, 19 nt, Artificial Sequence
  Description of Artificial Sequence: Synthetic oligonucleotide
  Sense strand starting at position 550 of SEQ ID NO: 1883354
cagacucucugguuaagga

SEQ ID NO: 2187971 - RNA, 19 nt, Artificial Sequence
  Description of Artificial Sequence: Synthetic oligonucleotide
  Antisense strand to SEQ ID NO: 2187970
uccuuaaccagagagucug

SEQ ID NO: 2187972 - RNA, 19 nt, Artificial Sequence
  Description of Artificial Sequence: Synthetic oligonucleotide
  Sense strand starting at position 573 of SEQ ID NO: 1883354
gaauaacauguaugaguuc

SEQ ID NO: 2187973 - RNA, 19 nt, Artificial Sequence
  Description of Artificial Sequence: Synthetic oligonucleotide
  Antisense strand to SEQ ID NO: 2187972
gaacucauacauguuauuc

SEQ ID NO: 2187974 - RNA, 19 nt, Artificial Sequence
  Description of Artificial Sequence: Synthetic oligonucleotide
  Sense strand starting at position 687 of SEQ ID NO: 1883354
uuggacauuaauugaggua

SEQ ID NO: 2187975 - RNA, 19 nt, Artificial Sequence
  Description of Artificial Sequence: Synthetic oligonucleotide
  Antisense strand to SEQ ID NO: 2187974
uaccucaauuaauguccaa

SEQ ID NO: 2187976 - RNA, 19 nt, Artificial Sequence
  Description of Artificial Sequence: Synthetic oligonucleotide
  Sense strand starting at position 699 of SEQ ID NO: 1883354
ugagguauuccaggugaca

SEQ ID NO: 2187977 - RNA, 19 nt, Artificial Sequence
  Description of Artificial Sequence: Synthetic oligonucleotide
  Antisense strand to SEQ ID NO: 2187976
ugucaccuggaauaccuca

SEQ ID NO: 2187978 - RNA, 19 nt, Artificial Sequence
  Description of Artificial Sequence: Synthetic oligonucleotide
  Sense strand starting at position 701 of SEQ ID NO: 1883354
agguauuccaggugacaua

SEQ ID NO: 2187979 - RNA, 19 nt, Artificial Sequence
  Description of Artificial Sequence: Synthetic oligonucleotide
  Antisense strand to SEQ ID NO: 2187978
uaugucaccuggaauaccu

SEQ ID NO: 2187980 - RNA, 19 nt, Artificial Sequence
  Description of Artificial Sequence: Synthetic oligonucleotide
  Sense strand starting at position 702 of SEQ ID NO: 1883354
gguauuccaggugacauau

SEQ ID NO: 2187981 - RNA, 19 nt, Artificial Sequence
  Description of Artificial Sequence: Synthetic oligonucleotide
  Antisense strand to SEQ ID NO: 2187980
auaugucaccuggaauacc

SEQ ID NO: 2187982 - RNA, 19 nt, Artificial Sequence
  Description of Artificial Sequence: Synthetic oligonucleotide
  Sense strand starting at position 850 of SEQ ID NO: 1883354
ucugucagagcacaauuaa

SEQ ID NO: 2187983 - RNA, 19 nt, Artificial Sequence
  Description of Artificial Sequence: Synthetic oligonucleotide
  Antisense strand to SEQ ID NO: 2187982
uuaauugugcucugacaga

SEQ ID NO: 2187984 - RNA, 19 nt, Artificial Sequence
  Description of Artificial Sequence: Synthetic oligonucleotide
  Sense strand starting at position 1023 of SEQ ID NO: 1883354
cuacauaugugaucaagau

SEQ ID NO: 2187985 - RNA, 19 nt, Artificial Sequence
  Description of Artificial Sequence: Synthetic oligonucleotide
  Antisense strand to SEQ ID NO: 2187984
aucuugaucacauauguag

SEQ ID NO: 2187986 - RNA, 19 nt, Artificial Sequence
  Description of Artificial Sequence: Synthetic oligonucleotide
  Sense strand starting at position 1193 of SEQ ID NO: 1883354
uguuuaguucuagauucug

SEQ ID NO: 2187987 - RNA, 19 nt, Artificial Sequence
  Description of Artificial Sequence: Synthetic oligonucleotide
  Antisense strand to SEQ ID NO: 2187986
cagaaucuagaacuaaaca

SEQ ID NO: 2187988 - RNA, 19 nt, Artificial Sequence
  Description of Artificial Sequence: Synthetic oligonucleotide
  Sense strand starting at position 1474 of SEQ ID NO: 1883354
guaaaucgauuacuacaaa

SEQ ID NO: 2187989 - RNA, 19 nt, Artificial Sequence
  Description of Artificial Sequence: Synthetic oligonucleotide
  Antisense strand to SEQ ID NO: 2187988
uuuguaguaaucgauuuac

SEQ ID NO: 2187990 - RNA, 19 nt, Artificial Sequence
  Description of Artificial Sequence: Synthetic oligonucleotide
  Sense strand starting at position 1496 of SEQ ID NO: 1883354
ugcuaaaugccaugaagac

SEQ ID NO: 2187991 - RNA, 19 nt, Artificial Sequence
  Description of Artificial Sequence: Synthetic oligonucleotide
  Antisense strand to SEQ ID NO: 2187990
gucuucauggcauuuagca

SEQ ID NO: 2187992 - RNA, 19 nt, Artificial Sequence
  Description of Artificial Sequence: Synthetic oligonucleotide
  Sense strand starting at position 1497 of SEQ ID NO: 1883354
gcuaaaugccaugaagacu

SEQ ID NO: 2187993 - RNA, 19 nt, Artificial Sequence
  Description of Artificial Sequence: Synthetic oligonucleotide
  Antisense strand to SEQ ID NO: 2187992
agucuucauggcauuuagc

SEQ ID NO: 2187994 - RNA, 19 nt, Artificial Sequence
  Description of Artificial Sequence: Synthetic oligonucleotide
  Sense strand starting at position 1737 of SEQ ID NO: 1883354
caugguuaugucuaguaag

SEQ ID NO: 2187995 - RNA, 19 nt, Artificial Sequence
  Description of Artificial Sequence: Synthetic oligonucleotide
  Antisense strand to SEQ ID NO: 2187994
cuuacuagacauaaccaug

SEQ ID NO: 2187996 - RNA, 19 nt, Artificial Sequence
  Description of Artificial Sequence: Synthetic oligonucleotide
  Sense strand starting at position 1754 of SEQ ID NO: 1883354
agacauaauuuguacauga

SEQ ID NO: 2187997 - RNA, 19 nt, Artificial Sequence
  Description of Artificial Sequence: Synthetic oligonucleotide
  Antisense strand to SEQ ID NO: 2187996
ucauguacaaauuaugucu

SEQ ID NO: 2187998 - RNA, 19 nt, Artificial Sequence
  Description of Artificial Sequence: Synthetic oligonucleotide
  Sense strand starting at position 1863 of SEQ ID NO: 1883354
gguaaaggacauugugaga

SEQ ID NO: 2187999 - RNA, 19 nt, Artificial Sequence
  Description of Artificial Sequence: Synthetic oligonucleotide
  Antisense strand to SEQ ID NO: 2187998
ucucacaauguccuuuacc

SEQ ID NO: 2188000 - RNA, 19 nt, Artificial Sequence
  Description of Artificial Sequence: Synthetic oligonucleotide
  Sense strand starting at position 2034 of SEQ ID NO: 1883354
ucaggugauguguaaauac

SEQ ID NO: 2188001 - RNA, 19 nt, Artificial Sequence
  Description of Artificial Sequence: Synthetic oligonucleotide
  Antisense strand to SEQ ID NO: 2188000
guauuuacacaucaccuga

SEQ ID NO: 2188002 - RNA, 19 nt, Artificial Sequence
  Description of Artificial Sequence: Synthetic oligonucleotide
  Sense strand starting at position 2041 of SEQ ID NO: 1883354
auguguaaauaccugacau

SEQ ID NO: 2188003 - RNA, 19 nt, Artificial Sequence
  Description of Artificial Sequence: Synthetic oligonucleotide
  Antisense strand to SEQ ID NO: 2188002
augucagguauuuacacau

SEQ ID NO: 2188004 - RNA, 19 nt, Artificial Sequence
  Description of Artificial Sequence: Synthetic oligonucleotide
  Sense strand starting at position 2064 of SEQ ID NO: 1883354
ugaugugaacucugaugac

SEQ ID NO: 2188005 - RNA, 19 nt, Artificial Sequence
  Description of Artificial Sequence: Synthetic oligonucleotide
  Antisense strand to SEQ ID NO: 2188004
gucaucagaguucacauca

SEQ ID NO: 2188006 - RNA, 19 nt, Artificial Sequence
  Description of Artificial Sequence: Synthetic oligonucleotide
  Sense strand starting at position 2076 of SEQ ID NO: 1883354
ugaugacuguuccuggauu

SEQ ID NO: 2188007 - RNA, 19 nt, Artificial Sequence
  Description of Artificial Sequence: Synthetic oligonucleotide
  Antisense strand to SEQ ID NO: 2188006
aauccaggaacagucauca

SEQ ID NO: 2188008 - RNA, 19 nt, Artificial Sequence
  Description of Artificial Sequence: Synthetic oligonucleotide
  Sense strand starting at position 2122 of SEQ ID NO: 1883354
cguaaagcagcuguuguaa

SEQ ID NO: 2188009 - RNA, 19 nt, Artificial Sequence
  Description of Artificial Sequence: Synthetic oligonucleotide
  Antisense strand to SEQ ID NO: 2188008
uuacaacagcugcuuuacg

SEQ ID NO: 2188010 - RNA, 19 nt, Artificial Sequence
  Description of Artificial Sequence: Synthetic oligonucleotide
  Sense strand starting at position 2280 of SEQ ID NO: 1883354
ucucucuacuugguaugaa

SEQ ID NO: 2188011 - RNA, 19 nt, Artificial Sequence
  Description of Artificial Sequence: Synthetic oligonucleotide
  Antisense strand to SEQ ID NO: 2188010
uucauaccaaguagagaga

SEQ ID NO: 2188012 - RNA, 19 nt, Artificial Sequence
  Description of Artificial Sequence: Synthetic oligonucleotide
  Sense strand starting at position 2283 of SEQ ID NO: 1883354
cucuacuugguaugaagga

SEQ ID NO: 2188013 - RNA, 19 nt, Artificial Sequence
  Description of Artificial Sequence: Synthetic oligonucleotide
  Antisense strand to SEQ ID NO: 2188012
uccuucauaccaaguagag

SEQ ID NO: 2188014 - RNA, 19 nt, Artificial Sequence
  Description of Artificial Sequence: Synthetic oligonucleotide
  Sense strand starting at position 2711 of SEQ ID NO: 1883354
cuaaguagugaugaucuca

SEQ ID NO: 2188015 - RNA, 19 nt, Artificial Sequence
  Description of Artificial Sequence: Synthetic oligonucleotide
  Antisense strand to SEQ ID NO: 2188014
ugagaucaucacuacuuag

SEQ ID NO: 2188016 - RNA, 19 nt, Artificial Sequence
  Description of Artificial Sequence: Synthetic oligonucleotide
  Sense strand starting at position 2722 of SEQ ID NO: 1883354
ugaucucauccaggaguua

SEQ ID NO: 2188017 - RNA, 19 nt, Artificial Sequence
  Description of Artificial Sequence: Synthetic oligonucleotide
  Antisense strand to SEQ ID NO: 2188016
uaacuccuggaugagauca

SEQ ID NO: 2188018 - RNA, 19 nt, Artificial Sequence
  Description of Artificial Sequence: Synthetic oligonucleotide
  Sense strand starting at position 2775 of SEQ ID NO: 1883354
guaagaauacauuaucagc

SEQ ID NO: 2188019 - RNA, 19 nt, Artificial Sequence
  Description of Artificial Sequence: Synthetic oligonucleotide
  Antisense strand to SEQ ID NO: 2188018
gcugauaauguauucuuac

SEQ ID NO: 2188020 - RNA, 19 nt, Artificial Sequence
  Description of Artificial Sequence: Synthetic oligonucleotide
  Sense strand starting at position 2913 of SEQ ID NO: 1883354
cugcuuacaguggaguaaa

SEQ ID NO: 2188021 - RNA, 19 nt, Artificial Sequence
  Description of Artificial Sequence: Synthetic oligonucleotide
  Antisense strand to SEQ ID NO: 2188020
uuuacuccacuguaagcag

SEQ ID NO: 2188022 - RNA, 19 nt, Artificial Sequence
  Description of Artificial Sequence: Synthetic oligonucleotide
  Sense strand starting at position 2921 of SEQ ID NO: 1883354
aguggaguaaagugaaaga

SEQ ID NO: 2188023 - RNA, 19 nt, Artificial Sequence
  Description of Artificial Sequence: Synthetic oligonucleotide
  Antisense strand to SEQ ID NO: 2188022
ucuuucacuuuacuccacu

SEQ ID NO: 2188024 - RNA, 19 nt, Artificial Sequence
  Description of Artificial Sequence: Synthetic oligonucleotide
  Sense strand starting at position 3022 of SEQ ID NO: 1883354
cagcauagaggccauauua

SEQ ID NO: 2188025 - RNA, 19 nt, Artificial Sequence
  Description of Artificial Sequence: Synthetic oligonucleotide
  Antisense strand to SEQ ID NO: 2188024
uaauauggccucuaugcug

SEQ ID NO: 2188026 - RNA, 19 nt, Artificial Sequence
  Description of Artificial Sequence: Synthetic oligonucleotide
  Sense strand starting at position 3237 of SEQ ID NO: 1883354
uaguaagguguguaagaca

SEQ ID NO: 2188027 - RNA, 19 nt, Artificial Sequence
  Description of Artificial Sequence: Synthetic oligonucleotide
  Antisense strand to SEQ ID NO: 2188026
ugucuuacacaccuuacua

SEQ ID NO: 2188028 - RNA, 19 nt, Artificial Sequence
  Description of Artificial Sequence: Synthetic oligonucleotide
  Sense strand starting at position 3258 of SEQ ID NO: 1883354
accauuucccugugguacu

SEQ ID NO: 2188029 - RNA, 19 nt, Artificial Sequence
  Description of Artificial Sequence: Synthetic oligonucleotide
  Antisense strand to SEQ ID NO: 2188028
aguaccacagggaaauggu

SEQ ID NO: 2188030 - RNA, 19 nt, Artificial Sequence
  Description of Artificial Sequence: Synthetic oligonucleotide
  Sense strand starting at position 3300 of SEQ ID NO: 1883354
cagagauucucagcccuga

SEQ ID NO: 2188031 - RNA, 19 nt, Artificial Sequence
  Description of Artificial Sequence: Synthetic oligonucleotide
  Antisense strand to SEQ ID NO: 2188030
ucagggcugagaaucucug

SEQ ID NO: 2188032 - RNA, 19 nt, Artificial Sequence
  Description of Artificial Sequence: Synthetic oligonucleotide
  Sense strand starting at position 3706 of SEQ ID NO: 1883354
guaguucuaggguaggaua

SEQ ID NO: 2188033 - RNA, 19 nt, Artificial Sequence
  Description of Artificial Sequence: Synthetic oligonucleotide
  Antisense strand to SEQ ID NO: 2188032
uauccuacccuagaacuac

SEQ ID NO: 2188034 - RNA, 19 nt, Artificial Sequence
  Description of Artificial Sequence: Synthetic oligonucleotide
  Sense strand starting at position 3708 of SEQ ID NO: 1883354
aguucuaggguaggauaau

SEQ ID NO: 2188035 - RNA, 19 nt, Artificial Sequence
  Description of Artificial Sequence: Synthetic oligonucleotide
  Antisense strand to SEQ ID NO: 2188034
auuauccuacccuagaacu

SEQ ID NO: 2188036 - RNA, 19 nt, Artificial Sequence
  Description of Artificial Sequence: Synthetic oligonucleotide
  Sense strand starting at position 3714 of SEQ ID NO: 1883354
aggguaggauaaucuguau

SEQ ID NO: 2188037 - RNA, 19 nt, Artificial Sequence
  Description of Artificial Sequence: Synthetic oligonucleotide
  Antisense strand to SEQ ID NO: 2188036
auacagauuauccuacccu

SEQ ID NO: 2188038 - RNA, 19 nt, Artificial Sequence
  Description of Artificial Sequence: Synthetic oligonucleotide
  Sense strand starting at position 20 of SEQ ID NO: 1883355
ugcuucgauccacagagaa

SEQ ID NO: 2188039 - RNA, 19 nt, Artificial Sequence
  Description of Artificial Sequence: Synthetic oligonucleotide
  Antisense strand to SEQ ID NO: 2188038
uucucuguggaucgaagca

SEQ ID NO: 2188040 - RNA, 19 nt, Artificial Sequence
  Description of Artificial Sequence: Synthetic oligonucleotide
  Sense strand starting at position 217 of SEQ ID NO: 1883355
uguccaugggcucaacuaa

SEQ ID NO: 2188041 - RNA, 19 nt, Artificial Sequence
  Description of Artificial Sequence: Synthetic oligonucleotide
  Antisense strand to SEQ ID NO: 2188040
uuaguugagcccauggaca

SEQ ID NO: 2188042 - RNA, 19 nt, Artificial Sequence
  Description of Artificial Sequence: Synthetic oligonucleotide
  Sense strand starting at position 296 of SEQ ID NO: 1883355
gccuguuauagccaaggaa

SEQ ID NO: 2188043 - RNA, 19 nt, Artificial Sequence
  Description of Artificial Sequence: Synthetic oligonucleotide
  Antisense strand to SEQ ID NO: 2188042
uuccuuggcuauaacaggc

SEQ ID NO: 2188044 - RNA, 19 nt, Artificial Sequence
  Description of Artificial Sequence: Synthetic oligonucleotide
  Sense strand starting at position 551 of SEQ ID NO: 1883355
auggauaguucuuccaaag

SEQ ID NO: 2188045 - RNA, 19 nt, Artificial Sequence
  Description of Artificial Sequence: Synthetic oligonucleotide
  Antisense strand to SEQ ID NO: 2188044
cuuuggaagaacuauccau

SEQ ID NO: 2188046 - RNA, 19 nt, Artificial Sequence
  Description of Artificial Sequence: Synthetic oligonucleotide
  Sense strand starting at position 569 of SEQ ID NO: 1883355
gacccaggguccucauaga

SEQ ID NO: 2188047 - RNA, 19 nt, Artificial Sequence
  Description of Artificial Sequence: Synthetic oligonucleotide
  Antisense strand to SEQ ID NO: 2188046
ucuaugaggacccuggguc

SEQ ID NO: 2188048 - RNA, 19 nt, Artificial Sequence
  Description of Artificial Sequence: Synthetic oligonucleotide
  Sense strand starting at position 600 of SEQ ID NO: 1883355
caguaaugaucuccuugga

SEQ ID NO: 2188049 - RNA, 19 nt, Artificial Sequence
  Description of Artificial Sequence: Synthetic oligonucleotide
  Antisense strand to SEQ ID NO: 2188048
uccaaggagaucauuacug

SEQ ID NO: 2188050 - RNA, 19 nt, Artificial Sequence
  Description of Artificial Sequence: Synthetic oligonucleotide
  Sense strand starting at position 621 of SEQ ID NO: 1883355
ucaaacagucccugagcua

SEQ ID NO: 2188051 - RNA, 19 nt, Artificial Sequence
  Description of Artificial Sequence: Synthetic oligonucleotide
  Antisense strand to SEQ ID NO: 2188050
uagcucagggacuguuuga

SEQ ID NO: 2188052 - RNA, 19 nt, Artificial Sequence
  Description of Artificial Sequence: Synthetic oligonucleotide
  Sense strand starting at position 658 of SEQ ID NO: 1883355
agggcuuaaugcucaggga

SEQ ID NO: 2188053 - RNA, 19 nt, Artificial Sequence
  Description of Artificial Sequence: Synthetic oligonucleotide
  Antisense strand to SEQ ID NO: 2188052
ucccugagcauuaagcccu

SEQ ID NO: 2188054 - RNA, 19 nt, Artificial Sequence
  Description of Artificial Sequence: Synthetic oligonucleotide
  Sense strand starting at position 659 of SEQ ID NO: 1883355
gggcuuaaugcucagggaa

SEQ ID NO: 2188055 - RNA, 19 nt, Artificial Sequence
  Description of Artificial Sequence: Synthetic oligonucleotide
  Antisense strand to SEQ ID NO: 2188054
uucccugagcauuaagccc

SEQ ID NO: 2188056 - RNA, 19 nt, Artificial Sequence
  Description of Artificial Sequence: Synthetic oligonucleotide
  Sense strand starting at position 711 of SEQ ID NO: 1883355
uucugugggucacuugaaa

SEQ ID NO: 2188057 - RNA, 19 nt, Artificial Sequence
  Description of Artificial Sequence: Synthetic oligonucleotide
  Antisense strand to SEQ ID NO: 2188056
uuucaagugacccacagaa

SEQ ID NO: 2188058 - RNA, 19 nt, Artificial Sequence
  Description of Artificial Sequence: Synthetic oligonucleotide
  Sense strand starting at position 847 of SEQ ID NO: 1883355
auaguuggguuguugacau

SEQ ID NO: 2188059 - RNA, 19 nt, Artificial Sequence
  Description of Artificial Sequence: Synthetic oligonucleotide
  Antisense strand to SEQ ID NO: 2188058
augucaacaacccaacuau

SEQ ID NO: 2188060 - RNA, 19 nt, Artificial Sequence
  Description of Artificial Sequence: Synthetic oligonucleotide
  Sense strand starting at position 870 of SEQ ID NO: 1883355
ucuucuguuguauacauaa

SEQ ID NO: 2188061 - RNA, 19 nt, Artificial Sequence
  Description of Artificial Sequence: Synthetic oligonucleotide
  Antisense strand to SEQ ID NO: 2188060
uuauguauacaacagaaga

SEQ ID NO: 2188062 - RNA, 19 nt, Artificial Sequence
  Description of Artificial Sequence: Synthetic oligonucleotide
  Sense strand starting at position 921 of SEQ ID NO: 1883355
gaggucagaugcuuaaaug

SEQ ID NO: 2188063 - RNA, 19 nt, Artificial Sequence
  Description of Artificial Sequence: Synthetic oligonucleotide
  Antisense strand to SEQ ID NO: 2188062
cauuuaagcaucugaccuc

SEQ ID NO: 2188064 - RNA, 19 nt, Artificial Sequence
  Description of Artificial Sequence: Synthetic oligonucleotide
  Sense strand starting at position 922 of SEQ ID NO: 1883355
aggucagaugcuuaaaugu

SEQ ID NO: 2188065 - RNA, 19 nt, Artificial Sequence
  Description of Artificial Sequence: Synthetic oligonucleotide
  Antisense strand to SEQ ID NO: 2188064
acauuuaagcaucugaccu

SEQ ID NO: 2188066 - RNA, 19 nt, Artificial Sequence
  Description of Artificial Sequence: Synthetic oligonucleotide
  Sense strand starting at position 951 of SEQ ID NO: 1883355
aaugcuuauccauggguac

SEQ ID NO: 2188067 - RNA, 19 nt, Artificial Sequence
  Description of Artificial Sequence: Synthetic oligonucleotide
  Antisense strand to SEQ ID NO: 2188066
guacccauggauaagcauu

SEQ ID NO: 2188068 - RNA, 19 nt, Artificial Sequence
  Description of Artificial Sequence: Synthetic oligonucleotide
  Sense strand starting at position 963 of SEQ ID NO: 1883355
uggguacucuaguuuaauc

SEQ ID NO: 2188069 - RNA, 19 nt, Artificial Sequence
  Description of Artificial Sequence: Synthetic oligonucleotide
  Antisense strand to SEQ ID NO: 2188068
gauuaaacuagaguaccca

SEQ ID NO: 2188070 - RNA, 19 nt, Artificial Sequence
  Description of Artificial Sequence: Synthetic oligonucleotide
  Sense strand starting at position 1090 of SEQ ID NO: 1883355
ggucccagugacuauggaa

SEQ ID NO: 2188071 - RNA, 19 nt, Artificial Sequence
  Description of Artificial Sequence: Synthetic oligonucleotide
  Antisense strand to SEQ ID NO: 2188070
uuccauagucacugggacc

SEQ ID NO: 2188072 - RNA, 19 nt, Artificial Sequence
  Description of Artificial Sequence: Synthetic oligonucleotide
  Sense strand starting at position 1153 of SEQ ID NO: 1883355
cccauacuaccugagucuu

SEQ ID NO: 2188073 - RNA, 19 nt, Artificial Sequence
  Description of Artificial Sequence: Synthetic oligonucleotide
  Antisense strand to SEQ ID NO: 2188072
aagacucagguaguauggg

SEQ ID NO: 2188074 - RNA, 19 nt, Artificial Sequence
  Description of Artificial Sequence: Synthetic oligonucleotide
  Sense strand starting at position 1306 of SEQ ID NO: 1883355
aaggauguccgauguuaac

SEQ ID NO: 2188075 - RNA, 19 nt, Artificial Sequence
  Description of Artificial Sequence: Synthetic oligonucleotide
  Antisense strand to SEQ ID NO: 2188074
guuaacaucggacauccuu

SEQ ID NO: 2188076 - RNA, 19 nt, Artificial Sequence
  Description of Artificial Sequence: Synthetic oligonucleotide
  Sense strand starting at position 1364 of SEQ ID NO: 1883355
uuaggaauguguuuacaau

SEQ ID NO: 2188077 - RNA, 19 nt, Artificial Sequence
  Description of Artificial Sequence: Synthetic oligonucleotide
  Antisense strand to SEQ ID NO: 2188076
auuguaaacacauuccuaa

SEQ ID NO: 2188078 - RNA, 19 nt, Artificial Sequence
  Description of Artificial Sequence: Synthetic oligonucleotide
  Sense strand starting at position 1378 of SEQ ID NO: 1883355
acaauauaugacuggguuu

SEQ ID NO: 2188079 - RNA, 19 nt, Artificial Sequence
  Description of Artificial Sequence: Synthetic oligonucleotide
  Antisense strand to SEQ ID NO: 2188078
aaacccagucauauauugu

SEQ ID NO: 2188080 - RNA, 19 nt, Artificial Sequence
  Description of Artificial Sequence: Synthetic oligonucleotide
  Sense strand starting at position 1857 of SEQ ID NO: 1883355
cuuuccauguuggucaaua

SEQ ID NO: 2188081 - RNA, 19 nt, Artificial Sequence
  Description of Artificial Sequence: Synthetic oligonucleotide
  Antisense strand to SEQ ID NO: 2188080
uauugaccaacauggaaag

SEQ ID NO: 2188082 - RNA, 19 nt, Artificial Sequence
  Description of Artificial Sequence: Synthetic oligonucleotide
  Sense strand starting at position 1858 of SEQ ID NO: 1883355
uuuccauguuggucaauag

SEQ ID NO: 2188083 - RNA, 19 nt, Artificial Sequence
  Description of Artificial Sequence: Synthetic oligonucleotide
  Antisense strand to SEQ ID NO: 2188082
cuauugaccaacauggaaa

SEQ ID NO: 2188084 - RNA, 19 nt, Artificial Sequence
  Description of Artificial Sequence: Synthetic oligonucleotide
  Sense strand starting at position 1859 of SEQ ID NO: 1883355
uuccauguuggucaauaga

SEQ ID NO: 2188085 - RNA, 19 nt, Artificial Sequence
  Description of Artificial Sequence: Synthetic oligonucleotide
  Antisense strand to SEQ ID NO: 2188084
ucuauugaccaacauggaa

SEQ ID NO: 2188086 - RNA, 19 nt, Artificial Sequence
  Description of Artificial Sequence: Synthetic oligonucleotide
  Sense strand starting at position 1862 of SEQ ID NO: 1883355
cauguuggucaauagaauc

SEQ ID NO: 2188087 - RNA, 19 nt, Artificial Sequence
  Description of Artificial Sequence: Synthetic oligonucleotide
  Antisense strand to SEQ ID NO: 2188086
gauucuauugaccaacaug

SEQ ID NO: 2188088 - RNA, 19 nt, Artificial Sequence
  Description of Artificial Sequence: Synthetic oligonucleotide
  Sense strand starting at position 1993 of SEQ ID NO: 1883355
cuaaauagacacuguggua

SEQ ID NO: 2188089 - RNA, 19 nt, Artificial Sequence
  Description of Artificial Sequence: Synthetic oligonucleotide
  Antisense strand to SEQ ID NO: 2188088
uaccacagugucuauuuag

SEQ ID NO: 2188090 - RNA, 19 nt, Artificial Sequence
  Description of Artificial Sequence: Synthetic oligonucleotide
  Sense strand starting at position 2045 of SEQ ID NO: 1883355
aguaaacuuccuuguauau

SEQ ID NO: 2188091 - RNA, 19 nt, Artificial Sequence
  Description of Artificial Sequence: Synthetic oligonucleotide
  Antisense strand to SEQ ID NO: 2188090
auauacaaggaaguuuacu

SEQ ID NO: 2188092 - RNA, 19 nt, Artificial Sequence
  Description of Artificial Sequence: Synthetic oligonucleotide
  Sense strand starting at position 2160 of SEQ ID NO: 1883355
aaugacucgccuuaauguu

SEQ ID NO: 2188093 - RNA, 19 nt, Artificial Sequence
  Description of Artificial Sequence: Synthetic oligonucleotide
  Antisense strand to SEQ ID NO: 2188092
aacauuaaggcgagucauu

SEQ ID NO: 2188094 - RNA, 19 nt, Artificial Sequence
  Description of Artificial Sequence: Synthetic oligonucleotide
  Sense strand starting at position 2170 of SEQ ID NO: 1883355
cuuaauguuguccaaaggu

SEQ ID NO: 2188095 - RNA, 19 nt, Artificial Sequence
  Description of Artificial Sequence: Synthetic oligonucleotide
  Antisense strand to SEQ ID NO: 2188094
accuuuggacaacauuaag

SEQ ID NO: 2188096 - RNA, 19 nt, Artificial Sequence
  Description of Artificial Sequence: Synthetic oligonucleotide
  Sense strand starting at position 2271 of SEQ ID NO: 1883355
gugaaagcaaaguaugauc

SEQ ID NO: 2188097 - RNA, 19 nt, Artificial Sequence
  Description of Artificial Sequence: Synthetic oligonucleotide
  Antisense strand to SEQ ID NO: 2188096
gaucauacuuugcuuucac

SEQ ID NO: 2188098 - RNA, 19 nt, Artificial Sequence
  Description of Artificial Sequence: Synthetic oligonucleotide
  Sense strand starting at position 2276 of SEQ ID NO: 1883355
agcaaaguaugaucccuau

SEQ ID NO: 2188099 - RNA, 19 nt, Artificial Sequence
  Description of Artificial Sequence: Synthetic oligonucleotide
  Antisense strand to SEQ ID NO: 2188098
auagggaucauacuuugcu

SEQ ID NO: 2188100 - RNA, 19 nt, Artificial Sequence
  Description of Artificial Sequence: Synthetic oligonucleotide
  Sense strand starting at position 2407 of SEQ ID NO: 1883355
cgucuucccacugagauug

SEQ ID NO: 2188101 - RNA, 19 nt, Artificial Sequence
  Description of Artificial Sequence: Synthetic oligonucleotide
  Antisense strand to SEQ ID NO: 2188100
caaucucagugggaagacg

SEQ ID NO: 2188102 - RNA, 19 nt, Artificial Sequence
  Description of Artificial Sequence: Synthetic oligonucleotide
  Sense strand starting at position 2432 of SEQ ID NO: 1883355
agacaaagaugucugcuuu

SEQ ID NO: 2188103 - RNA, 19 nt, Artificial Sequence
  Description of Artificial Sequence: Synthetic oligonucleotide
  Antisense strand to SEQ ID NO: 2188102
aaagcagacaucuuugucu

SEQ ID NO: 2188104 - RNA, 19 nt, Artificial Sequence
  Description of Artificial Sequence: Synthetic oligonucleotide
  Sense strand starting at position 2691 of SEQ ID NO: 1883355
gcauuuguuuauccuguca

SEQ ID NO: 2188105 - RNA, 19 nt, Artificial Sequence
  Description of Artificial Sequence: Synthetic oligonucleotide
  Antisense strand to SEQ ID NO: 2188104
ugacaggauaaacaaaugc

SEQ ID NO: 2188106 - RNA, 19 nt, Artificial Sequence
  Description of Artificial Sequence: Synthetic oligonucleotide
  Sense strand starting at position 2792 of SEQ ID NO: 1883355
auacuaugucucugaugaa

SEQ ID NO: 2188107 - RNA, 19 nt, Artificial Sequence
  Description of Artificial Sequence: Synthetic oligonucleotide
  Antisense strand to SEQ ID NO: 2188106
uucaucagagacauaguau

SEQ ID NO: 2188108 - RNA, 19 nt, Artificial Sequence
  Description of Artificial Sequence: Synthetic oligonucleotide
  Sense strand starting at position 2876 of SEQ ID NO: 1883355
cuggaagacucaucauagu

SEQ ID NO: 2188109 - RNA, 19 nt, Artificial Sequence
  Description of Artificial Sequence: Synthetic oligonucleotide
  Antisense strand to SEQ ID NO: 2188108
acuaugaugagucuuccag

SEQ ID NO: 2188110 - RNA, 19 nt, Artificial Sequence
  Description of Artificial Sequence: Synthetic oligonucleotide
  Sense strand starting at position 2988 of SEQ ID NO: 1883355
aaauuuguaugggaggcaa

SEQ ID NO: 2188111 - RNA, 19 nt, Artificial Sequence
  Description of Artificial Sequence: Synthetic oligonucleotide
  Antisense strand to SEQ ID NO: 2188110
uugccucccauacaaauuu

SEQ ID NO: 2188112 - RNA, 19 nt, Artificial Sequence
  Description of Artificial Sequence: Synthetic oligonucleotide
  Sense strand starting at position 3071 of SEQ ID NO: 1883355
uguuaagucucacuauaua

SEQ ID NO: 2188113 - RNA, 19 nt, Artificial Sequence
  Description of Artificial Sequence: Synthetic oligonucleotide
  Antisense strand to SEQ ID NO: 2188112
uauauagugagacuuaaca

SEQ ID NO: 2188114 - RNA, 19 nt, Artificial Sequence
  Description of Artificial Sequence: Synthetic oligonucleotide
  Sense strand starting at position 3428 of SEQ ID NO: 1883355
cuaaguuaaggaggucuua

SEQ ID NO: 2188115 - RNA, 19 nt, Artificial Sequence
  Description of Artificial Sequence: Synthetic oligonucleotide
  Antisense strand to SEQ ID NO: 2188114
uaagaccuccuuaacuuag

SEQ ID NO: 2188116 - RNA, 19 nt, Artificial Sequence
  Description of Artificial Sequence: Synthetic oligonucleotide
  Sense strand starting at position 3907 of SEQ ID NO: 1883355
acagacuuguaucuagacu

SEQ ID NO: 2188117 - RNA, 19 nt, Artificial Sequence
  Description of Artificial Sequence: Synthetic oligonucleotide
  Antisense strand to SEQ ID NO: 2188116
agucuagauacaagucugu

SEQ ID NO: 2188118 - RNA, 19 nt, Artificial Sequence
  Description of Artificial Sequence: Synthetic oligonucleotide
  Sense strand starting at position 7 of SEQ ID NO: 1883356
uagauacaagucuguuaga

SEQ ID NO: 2188119 - RNA, 19 nt, Artificial Sequence
  Description of Artificial Sequence: Synthetic oligonucleotide
  Antisense strand to SEQ ID NO: 2188118
ucuaacagacuuguaucua

SEQ ID NO: 2188120 - RNA, 19 nt, Artificial Sequence
  Description of Artificial Sequence: Synthetic oligonucleotide
  Sense strand starting at position 8 of SEQ ID NO: 1883356
agauacaagucuguuagau

SEQ ID NO: 2188121 - RNA, 19 nt, Artificial Sequence
  Description of Artificial Sequence: Synthetic oligonucleotide
  Antisense strand to SEQ ID NO: 2188120
aucuaacagacuuguaucu

SEQ ID NO: 2188122 - RNA, 19 nt, Artificial Sequence
  Description of Artificial Sequence: Synthetic oligonucleotide
  Sense strand starting at position 20 of SEQ ID NO: 1883356
guuagaugaauaugugguu

SEQ ID NO: 2188123 - RNA, 19 nt, Artificial Sequence
  Description of Artificial Sequence: Synthetic oligonucleotide
  Antisense strand to SEQ ID NO: 2188122
aaccacauauucaucuaac

SEQ ID NO: 2188124 - RNA, 19 nt, Artificial Sequence
  Description of Artificial Sequence: Synthetic oligonucleotide
  Sense strand starting at position 53 of SEQ ID NO: 1883356
cccagucucugguuuauuu

SEQ ID NO: 2188125 - RNA, 19 nt, Artificial Sequence
  Description of Artificial Sequence: Synthetic oligonucleotide
  Antisense strand to SEQ ID NO: 2188124
aaauaaaccagagacuggg

SEQ ID NO: 2188126 - RNA, 19 nt, Artificial Sequence
  Description of Artificial Sequence: Synthetic oligonucleotide
  Sense strand starting at position 428 of SEQ ID NO: 1883356
guaucaagaugccucaauu

SEQ ID NO: 2188127 - RNA, 19 nt, Artificial Sequence
  Description of Artificial Sequence: Synthetic oligonucleotide
  Antisense strand to SEQ ID NO: 2188126
aauugaggcaucuugauac

SEQ ID NO: 2188128 - RNA, 19 nt, Artificial Sequence
  Description of Artificial Sequence: Synthetic oligonucleotide
  Sense strand starting at position 755 of SEQ ID NO: 1883356
gucuauuucugaguccucu

SEQ ID NO: 2188129 - RNA, 19 nt, Artificial Sequence
  Description of Artificial Sequence: Synthetic oligonucleotide
  Antisense strand to SEQ ID NO: 2188128
agaggacucagaaauagac

SEQ ID NO: 2188130 - RNA, 19 nt, Artificial Sequence
  Description of Artificial Sequence: Synthetic oligonucleotide
  Sense strand starting at position 794 of SEQ ID NO: 1883356
ggguuuaucucuccaccaa

SEQ ID NO: 2188131 - RNA, 19 nt, Artificial Sequence
  Description of Artificial Sequence: Synthetic oligonucleotide
  Antisense strand to SEQ ID NO: 2188130
uugguggagagauaaaccc

SEQ ID NO: 2188132 - RNA, 19 nt, Artificial Sequence
  Description of Artificial Sequence: Synthetic oligonucleotide
  Sense strand starting at position 1003 of SEQ ID NO: 1883356
uauugauaauuugggaaga

SEQ ID NO: 2188133 - RNA, 19 nt, Artificial Sequence
  Description of Artificial Sequence: Synthetic oligonucleotide
  Antisense strand to SEQ ID NO: 2188132
ucuucccaaauuaucaaua

SEQ ID NO: 2188134 - RNA, 19 nt, Artificial Sequence
  Description of Artificial Sequence: Synthetic oligonucleotide
  Sense strand starting at position 1004 of SEQ ID NO: 1883356
auugauaauuugggaagaa

SEQ ID NO: 2188135 - RNA, 19 nt, Artificial Sequence
  Description of Artificial Sequence: Synthetic oligonucleotide
  Antisense strand to SEQ ID NO: 2188134
uucuucccaaauuaucaau

SEQ ID NO: 2188136 - RNA, 19 nt, Artificial Sequence
  Description of Artificial Sequence: Synthetic oligonucleotide
  Sense strand starting at position 1247 of SEQ ID NO: 1883356
uugaguguugaucauguau

SEQ ID NO: 2188137 - RNA, 19 nt, Artificial Sequence
  Description of Artificial Sequence: Synthetic oligonucleotide
  Antisense strand to SEQ ID NO: 2188136
auacaugaucaacacucaa

SEQ ID NO: 2188138 - RNA, 19 nt, Artificial Sequence
  Description of Artificial Sequence: Synthetic oligonucleotide
  Sense strand starting at position 1254 of SEQ ID NO: 1883356
uugaucauguauucuguga

SEQ ID NO: 2188139 - RNA, 19 nt, Artificial Sequence
  Description of Artificial Sequence: Synthetic oligonucleotide
  Antisense strand to SEQ ID NO: 2188138
ucacagaauacaugaucaa

SEQ ID NO: 2188140 - RNA, 19 nt, Artificial Sequence
  Description of Artificial Sequence: Synthetic oligonucleotide
  Sense strand starting at position 1291 of SEQ ID NO: 1883356
uuaauucuaggagguuuau

SEQ ID NO: 2188141 - RNA, 19 nt, Artificial Sequence
  Description of Artificial Sequence: Synthetic oligonucleotide
  Antisense strand to SEQ ID NO: 2188140
auaaaccuccuagaauuaa

SEQ ID NO: 2188142 - RNA, 19 nt, Artificial Sequence
  Description of Artificial Sequence: Synthetic oligonucleotide
  Sense strand starting at position 1461 of SEQ ID NO: 1883356
uguugaagaagauguugaa

SEQ ID NO: 2188143 - RNA, 19 nt, Artificial Sequence
  Description of Artificial Sequence: Synthetic oligonucleotide
  Antisense strand to SEQ ID NO: 2188142
uucaacaucuucuucaaca

SEQ ID NO: 2188144 - RNA, 19 nt, Artificial Sequence
  Description of Artificial Sequence: Synthetic oligonucleotide
  Sense strand starting at position 1500 of SEQ ID NO: 1883356
ucccaaucucagugggaag

SEQ ID NO: 2188145 - RNA, 19 nt, Artificial Sequence
  Description of Artificial Sequence: Synthetic oligonucleotide
  Antisense strand to SEQ ID NO: 2188144
cuucccacugagauuggga

SEQ ID NO: 2188146 - RNA, 19 nt, Artificial Sequence
  Description of Artificial Sequence: Synthetic oligonucleotide
  Sense strand starting at position 1501 of SEQ ID NO: 1883356
cccaaucucagugggaaga

SEQ ID NO: 2188147 - RNA, 19 nt, Artificial Sequence
  Description of Artificial Sequence: Synthetic oligonucleotide
  Antisense strand to SEQ ID NO: 2188146
ucuucccacugagauuggg

SEQ ID NO: 2188148 - RNA, 19 nt, Artificial Sequence
  Description of Artificial Sequence: Synthetic oligonucleotide
  Sense strand starting at position 1635 of SEQ ID NO: 1883356
uagggaucauacuuugcuu

SEQ ID NO: 2188149 - RNA, 19 nt, Artificial Sequence
  Description of Artificial Sequence: Synthetic oligonucleotide
  Antisense strand to SEQ ID NO: 2188148
aagcaaaguaugaucccua

SEQ ID NO: 2188150 - RNA, 19 nt, Artificial Sequence
  Description of Artificial Sequence: Synthetic oligonucleotide
  Sense strand starting at position 1660 of SEQ ID NO: 1883356
gauugcugugaugauucua

SEQ ID NO: 2188151 - RNA, 19 nt, Artificial Sequence
  Description of Artificial Sequence: Synthetic oligonucleotide
  Antisense strand to SEQ ID NO: 2188150
uagaaucaucacagcaauc

SEQ ID NO: 2188152 - RNA, 19 nt, Artificial Sequence
  Description of Artificial Sequence: Synthetic oligonucleotide
  Sense strand starting at position 1668 of SEQ ID NO: 1883356
ugaugauucuaggugaaac

SEQ ID NO: 2188153 - RNA, 19 nt, Artificial Sequence
  Description of Artificial Sequence: Synthetic oligonucleotide
  Antisense strand to SEQ ID NO: 2188152
guuucaccuagaaucauca

SEQ ID NO: 2188154 - RNA, 19 nt, Artificial Sequence
  Description of Artificial Sequence: Synthetic oligonucleotide
  Sense strand starting at position 1749 of SEQ ID NO: 1883356
caacauuaaggcgagucau

SEQ ID NO: 2188155 - RNA, 19 nt, Artificial Sequence
  Description of Artificial Sequence: Synthetic oligonucleotide
  Antisense strand to SEQ ID NO: 2188154
augacucgccuuaauguug

SEQ ID NO: 2188156 - RNA, 19 nt, Artificial Sequence
  Description of Artificial Sequence: Synthetic oligonucleotide
  Sense strand starting at position 1779 of SEQ ID NO: 1883356
gugaaaccuucuguagaca

SEQ ID NO: 2188157 - RNA, 19 nt, Artificial Sequence
  Description of Artificial Sequence: Synthetic oligonucleotide
  Antisense strand to SEQ ID NO: 2188156
ugucuacagaagguuucac

SEQ ID NO: 2188158 - RNA, 19 nt, Artificial Sequence
  Description of Artificial Sequence: Synthetic oligonucleotide
  Sense strand starting at position 1819 of SEQ ID NO: 1883356
cuagguaucucuucugaag

SEQ ID NO: 2188159 - RNA, 19 nt, Artificial Sequence
  Description of Artificial Sequence: Synthetic oligonucleotide
  Antisense strand to SEQ ID NO: 2188158
cuucagaagagauaccuag

SEQ ID NO: 2188160 - RNA, 19 nt, Artificial Sequence
  Description of Artificial Sequence: Synthetic oligonucleotide
  Sense strand starting at position 1873 of SEQ ID NO: 1883356
ggaaguuuacugcaaccau

SEQ ID NO: 2188161 - RNA, 19 nt, Artificial Sequence
  Description of Artificial Sequence: Synthetic oligonucleotide
  Antisense strand to SEQ ID NO: 2188160
augguugcaguaaacuucc

SEQ ID NO: 2188162 - RNA, 19 nt, Artificial Sequence
  Description of Artificial Sequence: Synthetic oligonucleotide
  Sense strand starting at position 1916 of SEQ ID NO: 1883356
guaccacagugucuauuua

SEQ ID NO: 2188163 - RNA, 19 nt, Artificial Sequence
  Description of Artificial Sequence: Synthetic oligonucleotide
  Antisense strand to SEQ ID NO: 2188162
uaaauagacacugugguac

SEQ ID NO: 2188164 - RNA, 19 nt, Artificial Sequence
  Description of Artificial Sequence: Synthetic oligonucleotide
  Sense strand starting at position 1923 of SEQ ID NO: 1883356
agugucuauuuagccaauu

SEQ ID NO: 2188165 - RNA, 19 nt, Artificial Sequence
  Description of Artificial Sequence: Synthetic oligonucleotide
  Antisense strand to SEQ ID NO: 2188164
aauuggcuaaauagacacu

SEQ ID NO: 2188166 - RNA, 19 nt, Artificial Sequence
  Description of Artificial Sequence: Synthetic oligonucleotide
  Sense strand starting at position 2022 of SEQ ID NO: 1883356
ccaugaagccaucgacaaa

SEQ ID NO: 2188167 - RNA, 19 nt, Artificial Sequence
  Description of Artificial Sequence: Synthetic oligonucleotide
  Antisense strand to SEQ ID NO: 2188166
uuugucgauggcuucaugg

SEQ ID NO: 2188168 - RNA, 19 nt, Artificial Sequence
  Description of Artificial Sequence: Synthetic oligonucleotide
  Sense strand starting at position 2123 of SEQ ID NO: 1883356
aggccaagaugguuauauc

SEQ ID NO: 2188169 - RNA, 19 nt, Artificial Sequence
  Description of Artificial Sequence: Synthetic oligonucleotide
  Antisense strand to SEQ ID NO: 2188168
gauauaaccaucuuggccu

SEQ ID NO: 2188170 - RNA, 19 nt, Artificial Sequence
  Description of Artificial Sequence: Synthetic oligonucleotide
  Sense strand starting at position 2124 of SEQ ID NO: 1883356
ggccaagaugguuauauca

SEQ ID NO: 2188171 - RNA, 19 nt, Artificial Sequence
  Description of Artificial Sequence: Synthetic oligonucleotide
  Antisense strand to SEQ ID NO: 2188170
ugauauaaccaucuuggcc

SEQ ID NO: 2188172 - RNA, 19 nt, Artificial Sequence
  Description of Artificial Sequence: Synthetic oligonucleotide
  Sense strand starting at position 2611 of SEQ ID NO: 1883356
ucggacauccuucgggaaa

SEQ ID NO: 2188173 - RNA, 19 nt, Artificial Sequence
  Description of Artificial Sequence: Synthetic oligonucleotide
  Antisense strand to SEQ ID NO: 2188172
uuucccgaaggauguccga

SEQ ID NO: 2188174 - RNA, 19 nt, Artificial Sequence
  Description of Artificial Sequence: Synthetic oligonucleotide
  Sense strand starting at position 2635 of SEQ ID NO: 1883356
gggauuggguagaguacaa

SEQ ID NO: 2188175 - RNA, 19 nt, Artificial Sequence
  Description of Artificial Sequence: Synthetic oligonucleotide
  Antisense strand to SEQ ID NO: 2188174
uuguacucuacccaauccc

SEQ ID NO: 2188176 - RNA, 19 nt, Artificial Sequence
  Description of Artificial Sequence: Synthetic oligonucleotide
  Sense strand starting at position 2860 of SEQ ID NO: 1883356
guucuauugcuggcugcaa

SEQ ID NO: 2188177 - RNA, 19 nt, Artificial Sequence
  Description of Artificial Sequence: Synthetic oligonucleotide
  Antisense strand to SEQ ID NO: 2188176
uugcagccagcaauagaac

SEQ ID NO: 2188178 - RNA, 19 nt, Artificial Sequence
  Description of Artificial Sequence: Synthetic oligonucleotide
  Sense strand starting at position 3296 of SEQ ID NO: 1883356
gggacuguuugagcuccaa

SEQ ID NO: 2188179 - RNA, 19 nt, Artificial Sequence
  Description of Artificial Sequence: Synthetic oligonucleotide
  Antisense strand to SEQ ID NO: 2188178
uuggagcucaaacaguccc

SEQ ID NO: 2188180 - RNA, 19 nt, Artificial Sequence
  Description of Artificial Sequence: Synthetic oligonucleotide
  Sense strand starting at position 3320 of SEQ ID NO: 1883356
ucauuacuguuucuagaga

SEQ ID NO: 2188181 - RNA, 19 nt, Artificial Sequence
  Description of Artificial Sequence: Synthetic oligonucleotide
  Antisense strand to SEQ ID NO: 2188180
ucucuagaaacaguaauga

SEQ ID NO: 2188182 - RNA, 19 nt, Artificial Sequence
  Description of Artificial Sequence: Synthetic oligonucleotide
  Sense strand starting at position 3529 of SEQ ID NO: 1883356
ugcugugaaauaugagaaa

SEQ ID NO: 2188183 - RNA, 19 nt, Artificial Sequence
  Description of Artificial Sequence: Synthetic oligonucleotide
  Antisense strand to SEQ ID NO: 2188182
uuucucauauuucacagca

SEQ ID NO: 2188184 - RNA, 19 nt, Artificial Sequence
  Description of Artificial Sequence: Synthetic oligonucleotide
  Sense strand starting at position 3579 of SEQ ID NO: 1883356
gcgccaucucgaguucugu

SEQ ID NO: 2188185 - RNA, 19 nt, Artificial Sequence
  Description of Artificial Sequence: Synthetic oligonucleotide
  Antisense strand to SEQ ID NO: 2188184
acagaacucgagauggcgc

SEQ ID NO: 2188186 - RNA, 19 nt, Artificial Sequence
  Description of Artificial Sequence: Synthetic oligonucleotide
  Sense strand starting at position 3611 of SEQ ID NO: 1883356
gccuuccuuggcuauaaca

SEQ ID NO: 2188187 - RNA, 19 nt, Artificial Sequence
  Description of Artificial Sequence: Synthetic oligonucleotide
  Antisense strand to SEQ ID NO: 2188186
uguuauagccaaggaaggc

SEQ ID NO: 2188188 - RNA, 19 nt, Artificial Sequence
  Description of Artificial Sequence: Synthetic oligonucleotide
  Sense strand starting at position 3620 of SEQ ID NO: 1883356
ggcuauaacaggcaugaua

SEQ ID NO: 2188189 - RNA, 19 nt, Artificial Sequence
  Description of Artificial Sequence: Synthetic oligonucleotide
  Antisense strand to SEQ ID NO: 2188188
uaucaugccuguuauagcc

SEQ ID NO: 2188190 - RNA, 19 nt, Artificial Sequence
  Description of Artificial Sequence: Synthetic oligonucleotide
  Sense strand starting at position 3622 of SEQ ID NO: 1883356
cuauaacaggcaugauaag

SEQ ID NO: 2188191 - RNA, 19 nt, Artificial Sequence
  Description of Artificial Sequence: Synthetic oligonucleotide
  Antisense strand to SEQ ID NO: 2188190
cuuaucaugccuguuauag

SEQ ID NO: 2188192 - RNA, 19 nt, Artificial Sequence
  Description of Artificial Sequence: Synthetic oligonucleotide
  Sense strand starting at position 3665 of SEQ ID NO: 1883356
agggcuagauguccuacaa

SEQ ID NO: 2188193 - RNA, 19 nt, Artificial Sequence
  Description of Artificial Sequence: Synthetic oligonucleotide
  Antisense strand to SEQ ID NO: 2188192
uuguaggacaucuagcccu

SEQ ID NO: 2188194 - RNA, 19 nt, Artificial Sequence
  Description of Artificial Sequence: Synthetic oligonucleotide
  Sense strand starting at position 3715 of SEQ ID NO: 1883356
acagccauagucugagaua

SEQ ID NO: 2188195 - RNA, 19 nt, Artificial Sequence
  Description of Artificial Sequence: Synthetic oligonucleotide
  Antisense strand to SEQ ID NO: 2188194
uaucucagacuauggcugu

SEQ ID NO: 2188196 - RNA, 19 nt, Artificial Sequence
  Description of Artificial Sequence: Synthetic oligonucleotide
  Sense strand starting at position 3887 of SEQ ID NO: 1883356
gucuucucuguggaucgaa

SEQ ID NO: 2188197 - RNA, 19 nt, Artificial Sequence
  Description of Artificial Sequence: Synthetic oligonucleotide
  Antisense strand to SEQ ID NO: 2188196
uucgauccacagagaagac

SEQ ID NO: 2188198 - RNA, 19 nt, Artificial Sequence
  Description of Artificial Sequence: Synthetic oligonucleotide
  Sense strand starting at position 66 of SEQ ID NO: 1883357
uaccauuaagccgaugagu

SEQ ID NO: 2188199 - RNA, 19 nt, Artificial Sequence
  Description of Artificial Sequence: Synthetic oligonucleotide
  Antisense strand to SEQ ID NO: 2188198
acucaucggcuuaauggua

SEQ ID NO: 2188200 - RNA, 19 nt, Artificial Sequence
  Description of Artificial Sequence: Synthetic oligonucleotide
  Sense strand starting at position 69 of SEQ ID NO: 1883357
cauuaagccgaugagugaa

SEQ ID NO: 2188201 - RNA, 19 nt, Artificial Sequence
  Description of Artificial Sequence: Synthetic oligonucleotide
  Antisense strand to SEQ ID NO: 2188200
uucacucaucggcuuaaug

SEQ ID NO: 2188202 - RNA, 19 nt, Artificial Sequence
  Description of Artificial Sequence: Synthetic oligonucleotide
  Sense strand starting at position 89 of SEQ ID NO: 1883357
guaugucauuuauaaagag

SEQ ID NO: 2188203 - RNA, 19 nt, Artificial Sequence
  Description of Artificial Sequence: Synthetic oligonucleotide
  Antisense strand to SEQ ID NO: 2188202
cucuuuauaaaugacauac

SEQ ID NO: 2188204 - RNA, 19 nt, Artificial Sequence
  Description of Artificial Sequence: Synthetic oligonucleotide
  Sense strand starting at position 169 of SEQ ID NO: 1883357
uaggauucuugaguugcaa

SEQ ID NO: 2188205 - RNA, 19 nt, Artificial Sequence
  Description of Artificial Sequence: Synthetic oligonucleotide
  Antisense strand to SEQ ID NO: 2188204
uugcaacucaagaauccua

SEQ ID NO: 2188206 - RNA, 19 nt, Artificial Sequence
  Description of Artificial Sequence: Synthetic oligonucleotide
  Sense strand starting at position 430 of SEQ ID NO: 1883357
uaaguuagugccguagcau

SEQ ID NO: 2188207 - RNA, 19 nt, Artificial Sequence
  Description of Artificial Sequence: Synthetic oligonucleotide
  Antisense strand to SEQ ID NO: 2188206
augcuacggcacuaacuua

SEQ ID NO: 2188208 - RNA, 19 nt, Artificial Sequence
  Description of Artificial Sequence: Synthetic oligonucleotide
  Sense strand starting at position 492 of SEQ ID NO: 1883357
agaucucagcaaugacauu

SEQ ID NO: 2188209 - RNA, 19 nt, Artificial Sequence
  Description of Artificial Sequence: Synthetic oligonucleotide
  Antisense strand to SEQ ID NO: 2188208
aaugucauugcugagaucu

SEQ ID NO: 2188210 - RNA, 19 nt, Artificial Sequence
  Description of Artificial Sequence: Synthetic oligonucleotide
  Sense strand starting at position 519 of SEQ ID NO: 1883357
uuggaugacgcaggauaau

SEQ ID NO: 2188211 - RNA, 19 nt, Artificial Sequence
  Description of Artificial Sequence: Synthetic oligonucleotide
  Antisense strand to SEQ ID NO: 2188210
auuauccugcgucauccaa

SEQ ID NO: 2188212 - RNA, 19 nt, Artificial Sequence
  Description of Artificial Sequence: Synthetic oligonucleotide
  Sense strand starting at position 549 of SEQ ID NO: 1883357
aaugucagcugauuagaaa

SEQ ID NO: 2188213 - RNA, 19 nt, Artificial Sequence
  Description of Artificial Sequence: Synthetic oligonucleotide
  Antisense strand to SEQ ID NO: 2188212
uuucuaaucagcugacauu

SEQ ID NO: 2188214 - RNA, 19 nt, Artificial Sequence
  Description of Artificial Sequence: Synthetic oligonucleotide
  Sense strand starting at position 550 of SEQ ID NO: 1883357
augucagcugauuagaaac

SEQ ID NO: 2188215 - RNA, 19 nt, Artificial Sequence
  Description of Artificial Sequence: Synthetic oligonucleotide
  Antisense strand to SEQ ID NO: 2188214
guuucuaaucagcugacau

SEQ ID NO: 2188216 - RNA, 19 nt, Artificial Sequence
  Description of Artificial Sequence: Synthetic oligonucleotide
  Sense strand starting at position 690 of SEQ ID NO: 1883357
cuggaauccuaaguaguaa

SEQ ID NO: 2188217 - RNA, 19 nt, Artificial Sequence
  Description of Artificial Sequence: Synthetic oligonucleotide
  Antisense strand to SEQ ID NO: 2188216
uuacuacuuaggauuccag

SEQ ID NO: 2188218 - RNA, 19 nt, Artificial Sequence
  Description of Artificial Sequence: Synthetic oligonucleotide
  Sense strand starting at position 839 of SEQ ID NO: 1883357
ggugaaugcuacucaggag

SEQ ID NO: 2188219 - RNA, 19 nt, Artificial Sequence
  Description of Artificial Sequence: Synthetic oligonucleotide
  Antisense strand to SEQ ID NO: 2188218
cuccugaguagcauucacc

SEQ ID NO: 2188220 - RNA, 19 nt, Artificial Sequence
  Description of Artificial Sequence: Synthetic oligonucleotide
  Sense strand starting at position 1074 of SEQ ID NO: 1883357
gucacuuuggcagaacaca

SEQ ID NO: 2188221 - RNA, 19 nt, Artificial Sequence
  Description of Artificial Sequence: Synthetic oligonucleotide
  Antisense strand to SEQ ID NO: 2188220
uguguucugccaaagugac

SEQ ID NO: 2188222 - RNA, 19 nt, Artificial Sequence
  Description of Artificial Sequence: Synthetic oligonucleotide
  Sense strand starting at position 1159 of SEQ ID NO: 1883357
gagagaaucugauuagcca

SEQ ID NO: 2188223 - RNA, 19 nt, Artificial Sequence
  Description of Artificial Sequence: Synthetic oligonucleotide
  Antisense strand to SEQ ID NO: 2188222
uggcuaaucagauucucuc

SEQ ID NO: 2188224 - RNA, 19 nt, Artificial Sequence
  Description of Artificial Sequence: Synthetic oligonucleotide
  Sense strand starting at position 1163 of SEQ ID NO: 1883357
gaaucugauuagccaggua

SEQ ID NO: 2188225 - RNA, 19 nt, Artificial Sequence
  Description of Artificial Sequence: Synthetic oligonucleotide
  Antisense strand to SEQ ID NO: 2188224
uaccuggcuaaucagauuc

SEQ ID NO: 2188226 - RNA, 19 nt, Artificial Sequence
  Description of Artificial Sequence: Synthetic oligonucleotide
  Sense strand starting at position 1221 of SEQ ID NO: 1883357
uaagguaguugaguacaaa

SEQ ID NO: 2188227 - RNA, 19 nt, Artificial Sequence
  Description of Artificial Sequence: Synthetic oligonucleotide
  Antisense strand to SEQ ID NO: 2188226
uuuguacucaacuaccuua

SEQ ID NO: 2188228 - RNA, 19 nt, Artificial Sequence
  Description of Artificial Sequence: Synthetic oligonucleotide
  Sense strand starting at position 1224 of SEQ ID NO: 1883357
gguaguugaguacaaacau

SEQ ID NO: 2188229 - RNA, 19 nt, Artificial Sequence
  Description of Artificial Sequence: Synthetic oligonucleotide
  Antisense strand to SEQ ID NO: 2188228
auguuuguacucaacuacc

SEQ ID NO: 2188230 - RNA, 19 nt, Artificial Sequence
  Description of Artificial Sequence: Synthetic oligonucleotide
  Sense strand starting at position 1236 of SEQ ID NO: 1883357
caaacaugauugcuaggua

SEQ ID NO: 2188231 - RNA, 19 nt, Artificial Sequence
  Description of Artificial Sequence: Synthetic oligonucleotide
  Antisense strand to SEQ ID NO: 2188230
uaccuagcaaucauguuug

SEQ ID NO: 2188232 - RNA, 19 nt, Artificial Sequence
  Description of Artificial Sequence: Synthetic oligonucleotide
  Sense strand starting at position 1745 of SEQ ID NO: 1883357
uuaauaaaugguggccuua

SEQ ID NO: 2188233 - RNA, 19 nt, Artificial Sequence
  Description of Artificial Sequence: Synthetic oligonucleotide
  Antisense strand to SEQ ID NO: 2188232
uaaggccaccauuuauuaa

SEQ ID NO: 2188234 - RNA, 19 nt, Artificial Sequence
  Description of Artificial Sequence: Synthetic oligonucleotide
  Sense strand starting at position 1747 of SEQ ID NO: 1883357
aauaaaugguggccuuaga

SEQ ID NO: 2188235 - RNA, 19 nt, Artificial Sequence
  Description of Artificial Sequence: Synthetic oligonucleotide
  Antisense strand to SEQ ID NO: 2188234
ucuaaggccaccauuuauu

SEQ ID NO: 2188236 - RNA, 19 nt, Artificial Sequence
  Description of Artificial Sequence: Synthetic oligonucleotide
  Sense strand starting at position 2032 of SEQ ID NO: 1883357
gugaucuggccaggaggaa

SEQ ID NO: 2188237 - RNA, 19 nt, Artificial Sequence
  Description of Artificial Sequence: Synthetic oligonucleotide
  Antisense strand to SEQ ID NO: 2188236
uuccuccuggccagaucac

SEQ ID NO: 2188238 - RNA, 19 nt, Artificial Sequence
  Description of Artificial Sequence: Synthetic oligonucleotide
  Sense strand starting at position 2106 of SEQ ID NO: 1883357
ggcauaugaugacauuuga

SEQ ID NO: 2188239 - RNA, 19 nt, Artificial Sequence
  Description of Artificial Sequence: Synthetic oligonucleotide
  Antisense strand to SEQ ID NO: 2188238
ucaaaugucaucauaugcc

SEQ ID NO: 2188240 - RNA, 19 nt, Artificial Sequence
  Description of Artificial Sequence: Synthetic oligonucleotide
  Sense strand starting at position 2171 of SEQ ID NO: 1883357
gugaccuuuggguggagau

SEQ ID NO: 2188241 - RNA, 19 nt, Artificial Sequence
  Description of Artificial Sequence: Synthetic oligonucleotide
  Antisense strand to SEQ ID NO: 2188240
aucuccacccaaaggucac

SEQ ID NO: 2188242 - RNA, 19 nt, Artificial Sequence
  Description of Artificial Sequence: Synthetic oligonucleotide
  Sense strand starting at position 2748 of SEQ ID NO: 1883357
cugugagaauaucuuucca

SEQ ID NO: 2188243 - RNA, 19 nt, Artificial Sequence
  Description of Artificial Sequence: Synthetic oligonucleotide
  Antisense strand to SEQ ID NO: 2188242
uggaaagauauucucacag

SEQ ID NO: 2188244 - RNA, 19 nt, Artificial Sequence
  Description of Artificial Sequence: Synthetic oligonucleotide
  Sense strand starting at position 2750 of SEQ ID NO: 1883357
gugagaauaucuuuccaag

SEQ ID NO: 2188245 - RNA, 19 nt, Artificial Sequence
  Description of Artificial Sequence: Synthetic oligonucleotide
  Antisense strand to SEQ ID NO: 2188244
cuuggaaagauauucucac

SEQ ID NO: 2188246 - RNA, 19 nt, Artificial Sequence
  Description of Artificial Sequence: Synthetic oligonucleotide
  Sense strand starting at position 3291 of SEQ ID NO: 1883357
gugacucacucacuguuaa

SEQ ID NO: 2188247 - RNA, 19 nt, Artificial Sequence
  Description of Artificial Sequence: Synthetic oligonucleotide
  Antisense strand to SEQ ID NO: 2188246
uuaacagugagugagucac

SEQ ID NO: 2188248 - RNA, 19 nt, Artificial Sequence
  Description of Artificial Sequence: Synthetic oligonucleotide
  Sense strand starting at position 3301 of SEQ ID NO: 1883357
cacuguuaaggguagugau

SEQ ID NO: 2188249 - RNA, 19 nt, Artificial Sequence
  Description of Artificial Sequence: Synthetic oligonucleotide
  Antisense strand to SEQ ID NO: 2188248
aucacuacccuuaacagug

SEQ ID NO: 2188250 - RNA, 19 nt, Artificial Sequence
  Description of Artificial Sequence: Synthetic oligonucleotide
  Sense strand starting at position 3378 of SEQ ID NO: 1883357
accaucugugcuggaaaug

SEQ ID NO: 2188251 - RNA, 19 nt, Artificial Sequence
  Description of Artificial Sequence: Synthetic oligonucleotide
  Antisense strand to SEQ ID NO: 2188250
cauuuccagcacagauggu

SEQ ID NO: 2188252 - RNA, 19 nt, Artificial Sequence
  Description of Artificial Sequence: Synthetic oligonucleotide
  Sense strand starting at position 3379 of SEQ ID NO: 1883357
ccaucugugcuggaaauga

SEQ ID NO: 2188253 - RNA, 19 nt, Artificial Sequence
  Description of Artificial Sequence: Synthetic oligonucleotide
  Antisense strand to SEQ ID NO: 2188252
ucauuuccagcacagaugg

SEQ ID NO: 2188254 - RNA, 19 nt, Artificial Sequence
  Description of Artificial Sequence: Synthetic oligonucleotide
  Sense strand starting at position 3387 of SEQ ID NO: 1883357
gcuggaaaugauugugaug

SEQ ID NO: 2188255 - RNA, 19 nt, Artificial Sequence
  Description of Artificial Sequence: Synthetic oligonucleotide
  Antisense strand to SEQ ID NO: 2188254
caucacaaucauuuccagc

SEQ ID NO: 2188256 - RNA, 19 nt, Artificial Sequence
  Description of Artificial Sequence: Synthetic oligonucleotide
  Sense strand starting at position 3401 of SEQ ID NO: 1883357
ugaugacuuugugugauga

SEQ ID NO: 2188257 - RNA, 19 nt, Artificial Sequence
  Description of Artificial Sequence: Synthetic oligonucleotide
  Antisense strand to SEQ ID NO: 2188256
ucaucacacaaagucauca

SEQ ID NO: 2188258 - RNA, 19 nt, Artificial Sequence
  Description of Artificial Sequence: Synthetic oligonucleotide
  Sense strand starting at position 3402 of SEQ ID NO: 1883357
gaugacuuugugugaugaa

SEQ ID NO: 2188259 - RNA, 19 nt, Artificial Sequence
  Description of Artificial Sequence: Synthetic oligonucleotide
  Antisense strand to SEQ ID NO: 2188258
uucaucacacaaagucauc

SEQ ID NO: 2188260 - RNA, 19 nt, Artificial Sequence
  Description of Artificial Sequence: Synthetic oligonucleotide
  Sense strand starting at position 3422 of SEQ ID NO: 1883357
cccagaggugcccaguauu

SEQ ID NO: 2188261 - RNA, 19 nt, Artificial Sequence
  Description of Artificial Sequence: Synthetic oligonucleotide
  Antisense strand to SEQ ID NO: 2188260
aauacugggcaccucuggg

SEQ ID NO: 2188262 - RNA, 19 nt, Artificial Sequence
  Description of Artificial Sequence: Synthetic oligonucleotide
  Sense strand starting at position 3557 of SEQ ID NO: 1883357
gugaguaggaucugugaag

SEQ ID NO: 2188263 - RNA, 19 nt, Artificial Sequence
  Description of Artificial Sequence: Synthetic oligonucleotide
  Antisense strand to SEQ ID NO: 2188262
cuucacagauccuacucac

SEQ ID NO: 2188264 - RNA, 19 nt, Artificial Sequence
  Description of Artificial Sequence: Synthetic oligonucleotide
  Sense strand starting at position 3558 of SEQ ID NO: 1883357
ugaguaggaucugugaaga

SEQ ID NO: 2188265 - RNA, 19 nt, Artificial Sequence
  Description of Artificial Sequence: Synthetic oligonucleotide
  Antisense strand to SEQ ID NO: 2188264
ucuucacagauccuacuca

SEQ ID NO: 2188266 - RNA, 19 nt, Artificial Sequence
  Description of Artificial Sequence: Synthetic oligonucleotide
  Sense strand starting at position 3583 of SEQ ID NO: 1883357
gggcauucaggaugaugca

SEQ ID NO: 2188267 - RNA, 19 nt, Artificial Sequence
  Description of Artificial Sequence: Synthetic oligonucleotide
  Antisense strand to SEQ ID NO: 2188266
ugcaucauccugaaugccc

SEQ ID NO: 2188268 - RNA, 19 nt, Artificial Sequence
  Description of Artificial Sequence: Synthetic oligonucleotide
  Sense strand starting at position 3629 of SEQ ID NO: 1883357
agaugaaacgcucaaagca

SEQ ID NO: 2188269 - RNA, 19 nt, Artificial Sequence
  Description of Artificial Sequence: Synthetic oligonucleotide
  Antisense strand to SEQ ID NO: 2188268
ugcuuugagcguuucaucu

SEQ ID NO: 2188270 - RNA, 19 nt, Artificial Sequence
  Description of Artificial Sequence: Synthetic oligonucleotide
  Sense strand starting at position 3658 of SEQ ID NO: 1883357
uggcaagugggcuaggaua

SEQ ID NO: 2188271 - RNA, 19 nt, Artificial Sequence
  Description of Artificial Sequence: Synthetic oligonucleotide
  Antisense strand to SEQ ID NO: 2188270
uauccuagcccacuugcca

SEQ ID NO: 2188272 - RNA, 19 nt, Artificial Sequence
  Description of Artificial Sequence: Synthetic oligonucleotide
  Sense strand starting at position 3801 of SEQ ID NO: 1883357
guaucacaucugcagggua

SEQ ID NO: 2188273 - RNA, 19 nt, Artificial Sequence
  Description of Artificial Sequence: Synthetic oligonucleotide
  Antisense strand to SEQ ID NO: 2188272
uacccugcagaugugauac

SEQ ID NO: 2188274 - RNA, 19 nt, Artificial Sequence
  Description of Artificial Sequence: Synthetic oligonucleotide
  Sense strand starting at position 3872 of SEQ ID NO: 1883357
acaaauauuuagugagaug

SEQ ID NO: 2188275 - RNA, 19 nt, Artificial Sequence
  Description of Artificial Sequence: Synthetic oligonucleotide
  Antisense strand to SEQ ID NO: 2188274
caucucacuaaauauuugu

SEQ ID NO: 2188276 - RNA, 19 nt, Artificial Sequence
  Description of Artificial Sequence: Synthetic oligonucleotide
  Sense strand starting at position 3932 of SEQ ID NO: 1883357
gucacagucccugacuuua

SEQ ID NO: 2188277 - RNA, 19 nt, Artificial Sequence
  Description of Artificial Sequence: Synthetic oligonucleotide
  Antisense strand to SEQ ID NO: 2188276
uaaagucagggacugugac

SEQ ID NO: 2188278 - RNA, 19 nt, Artificial Sequence
  Description of Artificial Sequence: Synthetic oligonucleotide
  Sense strand starting at position 696 of SEQ ID NO: 1883358
ucuccagaaaggugucaga

SEQ ID NO: 2188279 - RNA, 19 nt, Artificial Sequence
  Description of Artificial Sequence: Synthetic oligonucleotide
  Antisense strand to SEQ ID NO: 2188278
ucugacaccuuucuggaga

SEQ ID NO: 2188280 - RNA, 19 nt, Artificial Sequence
  Description of Artificial Sequence: Synthetic oligonucleotide
  Sense strand starting at position 857 of SEQ ID NO: 1883358
cacacagguuccugaaugu

SEQ ID NO: 2188281 - RNA, 19 nt, Artificial Sequence
  Description of Artificial Sequence: Synthetic oligonucleotide
  Antisense strand to SEQ ID NO: 2188280
acauucaggaaccugugug

SEQ ID NO: 2188282 - RNA, 19 nt, Artificial Sequence
  Description of Artificial Sequence: Synthetic oligonucleotide
  Sense strand starting at position 966 of SEQ ID NO: 1883358
gagccacuuggcugagaau

SEQ ID NO: 2188283 - RNA, 19 nt, Artificial Sequence
  Description of Artificial Sequence: Synthetic oligonucleotide
  Antisense strand to SEQ ID NO: 2188282
auucucagccaaguggcuc

SEQ ID NO: 2188284 - RNA, 19 nt, Artificial Sequence
  Description of Artificial Sequence: Synthetic oligonucleotide
  Sense strand starting at position 969 of SEQ ID NO: 1883358
ccacuuggcugagaauguu

SEQ ID NO: 2188285 - RNA, 19 nt, Artificial Sequence
  Description of Artificial Sequence: Synthetic oligonucleotide
  Antisense strand to SEQ ID NO: 2188284
aacauucucagccaagugg

SEQ ID NO: 2188286 - RNA, 19 nt, Artificial Sequence
  Description of Artificial Sequence: Synthetic oligonucleotide
  Sense strand starting at position 1027 of SEQ ID NO: 1883358
gugacauggaguugagaca

SEQ ID NO: 2188287 - RNA, 19 nt, Artificial Sequence
  Description of Artificial Sequence: Synthetic oligonucleotide
  Antisense strand to SEQ ID NO: 2188286
ugucucaacuccaugucac

SEQ ID NO: 2188288 - RNA, 19 nt, Artificial Sequence
  Description of Artificial Sequence: Synthetic oligonucleotide
  Sense strand starting at position 1048 of SEQ ID NO: 1883358
ggaaauaccuggugccacu

SEQ ID NO: 2188289 - RNA, 19 nt, Artificial Sequence
  Description of Artificial Sequence: Synthetic oligonucleotide
  Antisense strand to SEQ ID NO: 2188288
aguggcaccagguauuucc

SEQ ID NO: 2188290 - RNA, 19 nt, Artificial Sequence
  Description of Artificial Sequence: Synthetic oligonucleotide
  Sense strand starting at position 1093 of SEQ ID NO: 1883358
gggagaagcugucccaaca

SEQ ID NO: 2188291 - RNA, 19 nt, Artificial Sequence
  Description of Artificial Sequence: Synthetic oligonucleotide
  Antisense strand to SEQ ID NO: 2188290
uguugggacagcuucuccc

SEQ ID NO: 2188292 - RNA, 19 nt, Artificial Sequence
  Description of Artificial Sequence: Synthetic oligonucleotide
  Sense strand starting at position 1129 of SEQ ID NO: 1883358
cguccucaugguugacaua

SEQ ID NO: 2188293 - RNA, 19 nt, Artificial Sequence
  Description of Artificial Sequence: Synthetic oligonucleotide
  Antisense strand to SEQ ID NO: 2188292
uaugucaaccaugaggacg

SEQ ID NO: 2188294 - RNA, 19 nt, Artificial Sequence
  Description of Artificial Sequence: Synthetic oligonucleotide
  Sense strand starting at position 1130 of SEQ ID NO: 1883358
guccucaugguugacauau

SEQ ID NO: 2188295 - RNA, 19 nt, Artificial Sequence
  Description of Artificial Sequence: Synthetic oligonucleotide
  Antisense strand to SEQ ID NO: 2188294
auaugucaaccaugaggac

SEQ ID NO: 2188296 - RNA, 19 nt, Artificial Sequence
  Description of Artificial Sequence: Synthetic oligonucleotide
  Sense strand starting at position 1276 of SEQ ID NO: 1883358
ggcggugucugaccauaca

SEQ ID NO: 2188297 - RNA, 19 nt, Artificial Sequence
  Description of Artificial Sequence: Synthetic oligonucleotide
  Antisense strand to SEQ ID NO: 2188296
uguauggucagacaccgcc

SEQ ID NO: 2188298 - RNA, 19 nt, Artificial Sequence
  Description of Artificial Sequence: Synthetic oligonucleotide
  Sense strand starting at position 1304 of SEQ ID NO: 1883358
gaacaacccugcugauguu

SEQ ID NO: 2188299 - RNA, 19 nt, Artificial Sequence
  Description of Artificial Sequence: Synthetic oligonucleotide
  Antisense strand to SEQ ID NO: 2188298
aacaucagcaggguuguuc

SEQ ID NO: 2188300 - RNA, 19 nt, Artificial Sequence
  Description of Artificial Sequence: Synthetic oligonucleotide
  Sense strand starting at position 1317 of SEQ ID NO: 1883358
gauguuguuugaggguacu

SEQ ID NO: 2188301 - RNA, 19 nt, Artificial Sequence
  Description of Artificial Sequence: Synthetic oligonucleotide
  Antisense strand to SEQ ID NO: 2188300
aguacccucaaacaacauc

SEQ ID NO: 2188302 - RNA, 19 nt, Artificial Sequence
  Description of Artificial Sequence: Synthetic oligonucleotide
  Sense strand starting at position 1327 of SEQ ID NO: 1883358
gaggguacuucccgacacu

SEQ ID NO: 2188303 - RNA, 19 nt, Artificial Sequence
  Description of Artificial Sequence: Synthetic oligonucleotide
  Antisense strand to SEQ ID NO: 2188302
agugucgggaaguacccuc

SEQ ID NO: 2188304 - RNA, 19 nt, Artificial Sequence
  Description of Artificial Sequence: Synthetic oligonucleotide
  Sense strand starting at position 1399 of SEQ ID NO: 1883358
gcuccaggcuguguguaau

SEQ ID NO: 2188305 - RNA, 19 nt, Artificial Sequence
  Description of Artificial Sequence: Synthetic oligonucleotide
  Antisense strand to SEQ ID NO: 2188304
auuacacacagccuggagc

SEQ ID NO: 2188306 - RNA, 19 nt, Artificial Sequence
  Description of Artificial Sequence: Synthetic oligonucleotide
  Sense strand starting at position 1547 of SEQ ID NO: 1883358
guacgugucuccugggcua

SEQ ID NO: 2188307 - RNA, 19 nt, Artificial Sequence
  Description of Artificial Sequence: Synthetic oligonucleotide
  Antisense strand to SEQ ID NO: 2188306
uagcccaggagacacguac

SEQ ID NO: 2188308 - RNA, 19 nt, Artificial Sequence
  Description of Artificial Sequence: Synthetic oligonucleotide
  Sense strand starting at position 1683 of SEQ ID NO: 1883358
ggcaaugacucagcacgaa

SEQ ID NO: 2188309 - RNA, 19 nt, Artificial Sequence
  Description of Artificial Sequence: Synthetic oligonucleotide
  Antisense strand to SEQ ID NO: 2188308
uucgugcugagucauugcc

SEQ ID NO: 2188310 - RNA, 19 nt, Artificial Sequence
  Description of Artificial Sequence: Synthetic oligonucleotide
  Sense strand starting at position 1803 of SEQ ID NO: 1883358
uccugaguaucuggaagga

SEQ ID NO: 2188311 - RNA, 19 nt, Artificial Sequence
  Description of Artificial Sequence: Synthetic oligonucleotide
  Antisense strand to SEQ ID NO: 2188310
uccuuccagauacucagga

SEQ ID NO: 2188312 - RNA, 19 nt, Artificial Sequence
  Description of Artificial Sequence: Synthetic oligonucleotide
  Sense strand starting at position 1828 of SEQ ID NO: 1883358
cauggaaggaucuggaguu

SEQ ID NO: 2188313 - RNA, 19 nt, Artificial Sequence
  Description of Artificial Sequence: Synthetic oligonucleotide
  Antisense strand to SEQ ID NO: 2188312
aacuccagauccuuccaug

SEQ ID NO: 2188314 - RNA, 19 nt, Artificial Sequence
  Description of Artificial Sequence: Synthetic oligonucleotide
  Sense strand starting at position 1860 of SEQ ID NO: 1883358
gggugaaccugugccaagu

SEQ ID NO: 2188315 - RNA, 19 nt, Artificial Sequence
  Description of Artificial Sequence: Synthetic oligonucleotide
  Antisense strand to SEQ ID NO: 2188314
acuuggcacagguucaccc

SEQ ID NO: 2188316 - RNA, 19 nt, Artificial Sequence
  Description of Artificial Sequence: Synthetic oligonucleotide
  Sense strand starting at position 1951 of SEQ ID NO: 1883358
ccggaagucgcucagugau

SEQ ID NO: 2188317 - RNA, 19 nt, Artificial Sequence
  Description of Artificial Sequence: Synthetic oligonucleotide
  Antisense strand to SEQ ID NO: 2188316
aucacugagcgacuuccgg

SEQ ID NO: 2188318 - RNA, 19 nt, Artificial Sequence
  Description of Artificial Sequence: Synthetic oligonucleotide
  Sense strand starting at position 1953 of SEQ ID NO: 1883358
ggaagucgcucagugauaa

SEQ ID NO: 2188319 - RNA, 19 nt, Artificial Sequence
  Description of Artificial Sequence: Synthetic oligonucleotide
  Antisense strand to SEQ ID NO: 2188318
uuaucacugagcgacuucc

SEQ ID NO: 2188320 - RNA, 19 nt, Artificial Sequence
  Description of Artificial Sequence: Synthetic oligonucleotide
  Sense strand starting at position 1954 of SEQ ID NO: 1883358
gaagucgcucagugauaac

SEQ ID NO: 2188321 - RNA, 19 nt, Artificial Sequence
  Description of Artificial Sequence: Synthetic oligonucleotide
  Antisense strand to SEQ ID NO: 2188320
guuaucacugagcgacuuc

SEQ ID NO: 2188322 - RNA, 19 nt, Artificial Sequence
  Description of Artificial Sequence: Synthetic oligonucleotide
  Sense strand starting at position 2980 of SEQ ID NO: 1883358
cggcucagucgcuaggaaa

SEQ ID NO: 2188323 - RNA, 19 nt, Artificial Sequence
  Description of Artificial Sequence: Synthetic oligonucleotide
  Antisense strand to SEQ ID NO: 2188322
uuuccuagcgacugagccg

SEQ ID NO: 2188324 - RNA, 19 nt, Artificial Sequence
  Description of Artificial Sequence: Synthetic oligonucleotide
  Sense strand starting at position 3497 of SEQ ID NO: 1883358
ugagauuucucagacacca

SEQ ID NO: 2188325 - RNA, 19 nt, Artificial Sequence
  Description of Artificial Sequence: Synthetic oligonucleotide
  Antisense strand to SEQ ID NO: 2188324
uggugucugagaaaucuca

SEQ ID NO: 2188326 - RNA, 19 nt, Artificial Sequence
  Description of Artificial Sequence: Synthetic oligonucleotide
  Sense strand starting at position 3794 of SEQ ID NO: 1883358
acuggaucaucuguccaaa

SEQ ID NO: 2188327 - RNA, 19 nt, Artificial Sequence
  Description of Artificial Sequence: Synthetic oligonucleotide
  Antisense strand to SEQ ID NO: 2188326
uuuggacagaugauccagu

SEQ ID NO: 2188328 - RNA, 19 nt, Artificial Sequence
  Description of Artificial Sequence: Synthetic oligonucleotide
  Sense strand starting at position 3900 of SEQ ID NO: 1883358
uuccucuugccaugugauc

SEQ ID NO: 2188329 - RNA, 19 nt, Artificial Sequence
  Description of Artificial Sequence: Synthetic oligonucleotide
  Antisense strand to SEQ ID NO: 2188328
gaucacauggcaagaggaa

SEQ ID NO: 2188330 - RNA, 19 nt, Artificial Sequence
  Description of Artificial Sequence: Synthetic oligonucleotide
  Sense strand starting at position 421 of SEQ ID NO: 1883359
aauaaauagucgcugugaa

SEQ ID NO: 2188331 - RNA, 19 nt, Artificial Sequence
  Description of Artificial Sequence: Synthetic oligonucleotide
  Antisense strand to SEQ ID NO: 2188330
uucacagcgacuauuuauu

SEQ ID NO: 2188332 - RNA, 19 nt, Artificial Sequence
  Description of Artificial Sequence: Synthetic oligonucleotide
  Sense strand starting at position 422 of SEQ ID NO: 1883359
auaaauagucgcugugaac

SEQ ID NO: 2188333 - RNA, 19 nt, Artificial Sequence
  Description of Artificial Sequence: Synthetic oligonucleotide
  Antisense strand to SEQ ID NO: 2188332
guucacagcgacuauuuau

SEQ ID NO: 2188334 - RNA, 19 nt, Artificial Sequence
  Description of Artificial Sequence: Synthetic oligonucleotide
  Sense strand starting at position 431 of SEQ ID NO: 1883359
cgcugugaacacggaauua

SEQ ID NO: 2188335 - RNA, 19 nt, Artificial Sequence
  Description of Artificial Sequence: Synthetic oligonucleotide
  Antisense strand to SEQ ID NO: 2188334
uaauuccguguucacagcg

SEQ ID NO: 2188336 - RNA, 19 nt, Artificial Sequence
  Description of Artificial Sequence: Synthetic oligonucleotide
  Sense strand starting at position 547 of SEQ ID NO: 1883359
guguuaaaugcguuucugu

SEQ ID NO: 2188337 - RNA, 19 nt, Artificial Sequence
  Description of Artificial Sequence: Synthetic oligonucleotide
  Antisense strand to SEQ ID NO: 2188336
acagaaacgcauuuaacac

SEQ ID NO: 2188338 - RNA, 19 nt, Artificial Sequence
  Description of Artificial Sequence: Synthetic oligonucleotide
  Sense strand starting at position 548 of SEQ ID NO: 1883359
uguuaaaugcguuucuguu

SEQ ID NO: 2188339 - RNA, 19 nt, Artificial Sequence
  Description of Artificial Sequence: Synthetic oligonucleotide
  Antisense strand to SEQ ID NO: 2188338
aacagaaacgcauuuaaca

SEQ ID NO: 2188340 - RNA, 19 nt, Artificial Sequence
  Description of Artificial Sequence: Synthetic oligonucleotide
  Sense strand starting at position 549 of SEQ ID NO: 1883359
guuaaaugcguuucuguuu

SEQ ID NO: 2188341 - RNA, 19 nt, Artificial Sequence
  Description of Artificial Sequence: Synthetic oligonucleotide
  Antisense strand to SEQ ID NO: 2188340
aaacagaaacgcauuuaac

SEQ ID NO: 2188342 - RNA, 19 nt, Artificial Sequence
  Description of Artificial Sequence: Synthetic oligonucleotide
  Sense strand starting at position 579 of SEQ ID NO: 1883359
auguaauauauaggguuga

SEQ ID NO: 2188343 - RNA, 19 nt, Artificial Sequence
  Description of Artificial Sequence: Synthetic oligonucleotide
  Antisense strand to SEQ ID NO: 2188342
ucaacccuauauauuacau

SEQ ID NO: 2188344 - RNA, 19 nt, Artificial Sequence
  Description of Artificial Sequence: Synthetic oligonucleotide
  Sense strand starting at position 583 of SEQ ID NO: 1883359
aauauauaggguugacuca

SEQ ID NO: 2188345 - RNA, 19 nt, Artificial Sequence
  Description of Artificial Sequence: Synthetic oligonucleotide
  Antisense strand to SEQ ID NO: 2188344
ugagucaacccuauauauu

SEQ ID NO: 2188346 - RNA, 19 nt, Artificial Sequence
  Description of Artificial Sequence: Synthetic oligonucleotide
  Sense strand starting at position 590 of SEQ ID NO: 1883359
aggguugacucauuaacac

SEQ ID NO: 2188347 - RNA, 19 nt, Artificial Sequence
  Description of Artificial Sequence: Synthetic oligonucleotide
  Antisense strand to SEQ ID NO: 2188346
guguuaaugagucaacccu

SEQ ID NO: 2188348 - RNA, 19 nt, Artificial Sequence
  Description of Artificial Sequence: Synthetic oligonucleotide
  Sense strand starting at position 642 of SEQ ID NO: 1883359
cugagcagagcuuaucuga

SEQ ID NO: 2188349 - RNA, 19 nt, Artificial Sequence
  Description of Artificial Sequence: Synthetic oligonucleotide
  Antisense strand to SEQ ID NO: 2188348
ucagauaagcucugcucag

SEQ ID NO: 2188350 - RNA, 19 nt, Artificial Sequence
  Description of Artificial Sequence: Synthetic oligonucleotide
  Sense strand starting at position 952 of SEQ ID NO: 1883359
auaaauguuagcgagugga

SEQ ID NO: 2188351 - RNA, 19 nt, Artificial Sequence
  Description of Artificial Sequence: Synthetic oligonucleotide
  Antisense strand to SEQ ID NO: 2188350
uccacucgcuaacauuuau

SEQ ID NO: 2188352 - RNA, 19 nt, Artificial Sequence
  Description of Artificial Sequence: Synthetic oligonucleotide
  Sense strand starting at position 965 of SEQ ID NO: 1883359
aguggacgaauucgcaaau

SEQ ID NO: 2188353 - RNA, 19 nt, Artificial Sequence
  Description of Artificial Sequence: Synthetic oligonucleotide
  Antisense strand to SEQ ID NO: 2188352
auuugcgaauucguccacu

SEQ ID NO: 2188354 - RNA, 19 nt, Artificial Sequence
  Description of Artificial Sequence: Synthetic oligonucleotide
  Sense strand starting at position 971 of SEQ ID NO: 1883359
cgaauucgcaaaugcagaa

SEQ ID NO: 2188355 - RNA, 19 nt, Artificial Sequence
  Description of Artificial Sequence: Synthetic oligonucleotide
  Antisense strand to SEQ ID NO: 2188354
uucugcauuugcgaauucg

SEQ ID NO: 2188356 - RNA, 19 nt, Artificial Sequence
  Description of Artificial Sequence: Synthetic oligonucleotide
  Sense strand starting at position 983 of SEQ ID NO: 1883359
ugcagaauccgugaaugau

SEQ ID NO: 2188357 - RNA, 19 nt, Artificial Sequence
  Description of Artificial Sequence: Synthetic oligonucleotide
  Antisense strand to SEQ ID NO: 2188356
aucauucacggauucugca

SEQ ID NO: 2188358 - RNA, 19 nt, Artificial Sequence
  Description of Artificial Sequence: Synthetic oligonucleotide
  Sense strand starting at position 1223 of SEQ ID NO: 1883359
ugugccugucacugacaga

SEQ ID NO: 2188359 - RNA, 19 nt, Artificial Sequence
  Description of Artificial Sequence: Synthetic oligonucleotide
  Antisense strand to SEQ ID NO: 2188358
ucugucagugacaggcaca

SEQ ID NO: 2188360 - RNA, 19 nt, Artificial Sequence
  Description of Artificial Sequence: Synthetic oligonucleotide
  Sense strand starting at position 1266 of SEQ ID NO: 1883359
ggcugcuccguguuucuga

SEQ ID NO: 2188361 - RNA, 19 nt, Artificial Sequence
  Description of Artificial Sequence: Synthetic oligonucleotide
  Antisense strand to SEQ ID NO: 2188360
ucagaaacacggagcagcc

SEQ ID NO: 2188362 - RNA, 19 nt, Artificial Sequence
  Description of Artificial Sequence: Synthetic oligonucleotide
  Sense strand starting at position 1294 of SEQ ID NO: 1883359
uagugugguccgguccuua

SEQ ID NO: 2188363 - RNA, 19 nt, Artificial Sequence
  Description of Artificial Sequence: Synthetic oligonucleotide
  Antisense strand to SEQ ID NO: 2188362
uaaggaccggaccacacua

SEQ ID NO: 2188364 - RNA, 19 nt, Artificial Sequence
  Description of Artificial Sequence: Synthetic oligonucleotide
  Sense strand starting at position 1561 of SEQ ID NO: 1883359
ggguucuuuccaggaccca

SEQ ID NO: 2188365 - RNA, 19 nt, Artificial Sequence
  Description of Artificial Sequence: Synthetic oligonucleotide
  Antisense strand to SEQ ID NO: 2188364
uggguccuggaaagaaccc

SEQ ID NO: 2188366 - RNA, 19 nt, Artificial Sequence
  Description of Artificial Sequence: Synthetic oligonucleotide
  Sense strand starting at position 1562 of SEQ ID NO: 1883359
gguucuuuccaggacccaa

SEQ ID NO: 2188367 - RNA, 19 nt, Artificial Sequence
  Description of Artificial Sequence: Synthetic oligonucleotide
  Antisense strand to SEQ ID NO: 2188366
uuggguccuggaaagaacc

SEQ ID NO: 2188368 - RNA, 19 nt, Artificial Sequence
  Description of Artificial Sequence: Synthetic oligonucleotide
  Sense strand starting at position 1720 of SEQ ID NO: 1883359
ugcccaagugcugagauau

SEQ ID NO: 2188369 - RNA, 19 nt, Artificial Sequence
  Description of Artificial Sequence: Synthetic oligonucleotide
  Antisense strand to SEQ ID NO: 2188368
auaucucagcacuugggca

SEQ ID NO: 2188370 - RNA, 19 nt, Artificial Sequence
  Description of Artificial Sequence: Synthetic oligonucleotide
  Sense strand starting at position 1929 of SEQ ID NO: 1883359
cgagguauccuguacugag

SEQ ID NO: 2188371 - RNA, 19 nt, Artificial Sequence
  Description of Artificial Sequence: Synthetic oligonucleotide
  Antisense strand to SEQ ID NO: 2188370
cucaguacaggauaccucg

SEQ ID NO: 2188372 - RNA, 19 nt, Artificial Sequence
  Description of Artificial Sequence: Synthetic oligonucleotide
  Sense strand starting at position 2194 of SEQ ID NO: 1883359
ggucuccugacuugcagaa

SEQ ID NO: 2188373 - RNA, 19 nt, Artificial Sequence
  Description of Artificial Sequence: Synthetic oligonucleotide
  Antisense strand to SEQ ID NO: 2188372
uucugcaagucaggagacc

SEQ ID NO: 2188374 - RNA, 19 nt, Artificial Sequence
  Description of Artificial Sequence: Synthetic oligonucleotide
  Sense strand starting at position 2246 of SEQ ID NO: 1883359
agcccuuuccuagaaagca

SEQ ID NO: 2188375 - RNA, 19 nt, Artificial Sequence
  Description of Artificial Sequence: Synthetic oligonucleotide
  Antisense strand to SEQ ID NO: 2188374
ugcuuucuaggaaagggcu

SEQ ID NO: 2188376 - RNA, 19 nt, Artificial Sequence
  Description of Artificial Sequence: Synthetic oligonucleotide
  Sense strand starting at position 2267 of SEQ ID NO: 1883359
ggagcaacguguuucacaa

SEQ ID NO: 2188377 - RNA, 19 nt, Artificial Sequence
  Description of Artificial Sequence: Synthetic oligonucleotide
  Antisense strand to SEQ ID NO: 2188376
uugugaaacacguugcucc

SEQ ID NO: 2188378 - RNA, 19 nt, Artificial Sequence
  Description of Artificial Sequence: Synthetic oligonucleotide
  Sense strand starting at position 2371 of SEQ ID NO: 1883359
agcucuuauguugaagcau

SEQ ID NO: 2188379 - RNA, 19 nt, Artificial Sequence
  Description of Artificial Sequence: Synthetic oligonucleotide
  Antisense strand to SEQ ID NO: 2188378
augcuucaacauaagagcu

SEQ ID NO: 2188380 - RNA, 19 nt, Artificial Sequence
  Description of Artificial Sequence: Synthetic oligonucleotide
  Sense strand starting at position 2448 of SEQ ID NO: 1883359
cccauugcuugguuuccaa

SEQ ID NO: 2188381 - RNA, 19 nt, Artificial Sequence
  Description of Artificial Sequence: Synthetic oligonucleotide
  Antisense strand to SEQ ID NO: 2188380
uuggaaaccaagcaauggg

SEQ ID NO: 2188382 - RNA, 19 nt, Artificial Sequence
  Description of Artificial Sequence: Synthetic oligonucleotide
  Sense strand starting at position 2451 of SEQ ID NO: 1883359
auugcuugguuuccaagau

SEQ ID NO: 2188383 - RNA, 19 nt, Artificial Sequence
  Description of Artificial Sequence: Synthetic oligonucleotide
  Antisense strand to SEQ ID NO: 2188382
aucuuggaaaccaagcaau

SEQ ID NO: 2188384 - RNA, 19 nt, Artificial Sequence
  Description of Artificial Sequence: Synthetic oligonucleotide
  Sense strand starting at position 2694 of SEQ ID NO: 1883359
ggucccugauaaguggaua

SEQ ID NO: 2188385 - RNA, 19 nt, Artificial Sequence
  Description of Artificial Sequence: Synthetic oligonucleotide
  Antisense strand to SEQ ID NO: 2188384
uauccacuuaucagggacc

SEQ ID NO: 2188386 - RNA, 19 nt, Artificial Sequence
  Description of Artificial Sequence: Synthetic oligonucleotide
  Sense strand starting at position 2695 of SEQ ID NO: 1883359
gucccugauaaguggauau

SEQ ID NO: 2188387 - RNA, 19 nt, Artificial Sequence
  Description of Artificial Sequence: Synthetic oligonucleotide
  Antisense strand to SEQ ID NO: 2188386
auauccacuuaucagggac

SEQ ID NO: 2188388 - RNA, 19 nt, Artificial Sequence
  Description of Artificial Sequence: Synthetic oligonucleotide
  Sense strand starting at position 2708 of SEQ ID NO: 1883359
ggauauuauuaacucuguu

SEQ ID NO: 2188389 - RNA, 19 nt, Artificial Sequence
  Description of Artificial Sequence: Synthetic oligonucleotide
  Antisense strand to SEQ ID NO: 2188388
aacagaguuaauaauaucc

SEQ ID NO: 2188390 - RNA, 19 nt, Artificial Sequence
  Description of Artificial Sequence: Synthetic oligonucleotide
  Sense strand starting at position 2778 of SEQ ID NO: 1883359
gugagaaucucugccucga

SEQ ID NO: 2188391 - RNA, 19 nt, Artificial Sequence
  Description of Artificial Sequence: Synthetic oligonucleotide
  Antisense strand to SEQ ID NO: 2188390
ucgaggcagagauucucac

SEQ ID NO: 2188392 - RNA, 19 nt, Artificial Sequence
  Description of Artificial Sequence: Synthetic oligonucleotide
  Sense strand starting at position 2780 of SEQ ID NO: 1883359
gagaaucucugccucgaga

SEQ ID NO: 2188393 - RNA, 19 nt, Artificial Sequence
  Description of Artificial Sequence: Synthetic oligonucleotide
  Antisense strand to SEQ ID NO: 2188392
ucucgaggcagagauucuc

SEQ ID NO: 2188394 - RNA, 19 nt, Artificial Sequence
  Description of Artificial Sequence: Synthetic oligonucleotide
  Sense strand starting at position 2782 of SEQ ID NO: 1883359
gaaucucugccucgagaca

SEQ ID NO: 2188395 - RNA, 19 nt, Artificial Sequence
  Description of Artificial Sequence: Synthetic oligonucleotide
  Antisense strand to SEQ ID NO: 2188394
ugucucgaggcagagauuc

SEQ ID NO: 2188396 - RNA, 19 nt, Artificial Sequence
  Description of Artificial Sequence: Synthetic oligonucleotide
  Sense strand starting at position 2806 of SEQ ID NO: 1883359
acaaguuguuugucccaca

SEQ ID NO: 2188397 - RNA, 19 nt, Artificial Sequence
  Description of Artificial Sequence: Synthetic oligonucleotide
  Antisense strand to SEQ ID NO: 2188396
ugugggacaaacaacuugu

SEQ ID NO: 2188398 - RNA, 19 nt, Artificial Sequence
  Description of Artificial Sequence: Synthetic oligonucleotide
  Sense strand starting at position 2811 of SEQ ID NO: 1883359
uuguuugucccacaucaug

SEQ ID NO: 2188399 - RNA, 19 nt, Artificial Sequence
  Description of Artificial Sequence: Synthetic oligonucleotide
  Antisense strand to SEQ ID NO: 2188398
caugaugugggacaaacaa

SEQ ID NO: 2188400 - RNA, 19 nt, Artificial Sequence
  Description of Artificial Sequence: Synthetic oligonucleotide
  Sense strand starting at position 3398 of SEQ ID NO: 1883359
ggacaagucuaucugucga

SEQ ID NO: 2188401 - RNA, 19 nt, Artificial Sequence
  Description of Artificial Sequence: Synthetic oligonucleotide
  Antisense strand to SEQ ID NO: 2188400
ucgacagauagacuugucc

SEQ ID NO: 2188402 - RNA, 19 nt, Artificial Sequence
  Description of Artificial Sequence: Synthetic oligonucleotide
  Sense strand starting at position 3418 of SEQ ID NO: 1883359
ccaccuugcgaaugaucua

SEQ ID NO: 2188403 - RNA, 19 nt, Artificial Sequence
  Description of Artificial Sequence: Synthetic oligonucleotide
  Antisense strand to SEQ ID NO: 2188402
uagaucauucgcaaggugg

SEQ ID NO: 2188404 - RNA, 19 nt, Artificial Sequence
  Description of Artificial Sequence: Synthetic oligonucleotide
  Sense strand starting at position 3421 of SEQ ID NO: 1883359
ccuugcgaaugaucuagga

SEQ ID NO: 2188405 - RNA, 19 nt, Artificial Sequence
  Description of Artificial Sequence: Synthetic oligonucleotide
  Antisense strand to SEQ ID NO: 2188404
uccuagaucauucgcaagg

SEQ ID NO: 2188406 - RNA, 19 nt, Artificial Sequence
  Description of Artificial Sequence: Synthetic oligonucleotide
  Sense strand starting at position 3425 of SEQ ID NO: 1883359
gcgaaugaucuaggaaagg

SEQ ID NO: 2188407 - RNA, 19 nt, Artificial Sequence
  Description of Artificial Sequence: Synthetic oligonucleotide
  Antisense strand to SEQ ID NO: 2188406
ccuuuccuagaucauucgc

SEQ ID NO: 2188408 - RNA, 19 nt, Artificial Sequence
  Description of Artificial Sequence: Synthetic oligonucleotide
  Sense strand starting at position 3771 of SEQ ID NO: 1883359
uggucaagcccucaagaca

SEQ ID NO: 2188409 - RNA, 19 nt, Artificial Sequence
  Description of Artificial Sequence: Synthetic oligonucleotide
  Antisense strand to SEQ ID NO: 2188408
ugucuugagggcuugacca

SEQ ID NO: 2188410 - RNA, 19 nt, Artificial Sequence
  Description of Artificial Sequence: Synthetic oligonucleotide
  Sense strand starting at position 114 of SEQ ID NO: 1883360
gagcucauuccugggaacu

SEQ ID NO: 2188411 - RNA, 19 nt, Artificial Sequence
  Description of Artificial Sequence: Synthetic oligonucleotide
  Antisense strand to SEQ ID NO: 2188410
aguucccaggaaugagcuc

SEQ ID NO: 2188412 - RNA, 19 nt, Artificial Sequence
  Description of Artificial Sequence: Synthetic oligonucleotide
  Sense strand starting at position 115 of SEQ ID NO: 1883360
agcucauuccugggaacug

SEQ ID NO: 2188413 - RNA, 19 nt, Artificial Sequence
  Description of Artificial Sequence: Synthetic oligonucleotide
  Antisense strand to SEQ ID NO: 2188412
caguucccaggaaugagcu

SEQ ID NO: 2188414 - RNA, 19 nt, Artificial Sequence
  Description of Artificial Sequence: Synthetic oligonucleotide
  Sense strand starting at position 126 of SEQ ID NO: 1883360
gggaacugcuguucugaag

SEQ ID NO: 2188415 - RNA, 19 nt, Artificial Sequence
  Description of Artificial Sequence: Synthetic oligonucleotide
  Antisense strand to SEQ ID NO: 2188414
cuucagaacagcaguuccc

SEQ ID NO: 2188416 - RNA, 19 nt, Artificial Sequence
  Description of Artificial Sequence: Synthetic oligonucleotide
  Sense strand starting at position 515 of SEQ ID NO: 1883360
ggugguucgacagauagac

SEQ ID NO: 2188417 - RNA, 19 nt, Artificial Sequence
  Description of Artificial Sequence: Synthetic oligonucleotide
  Antisense strand to SEQ ID NO: 2188416
gucuaucugucgaaccacc

SEQ ID NO: 2188418 - RNA, 19 nt, Artificial Sequence
  Description of Artificial Sequence: Synthetic oligonucleotide
  Sense strand starting at position 517 of SEQ ID NO: 1883360
ugguucgacagauagacuu

SEQ ID NO: 2188419 - RNA, 19 nt, Artificial Sequence
  Description of Artificial Sequence: Synthetic oligonucleotide
  Antisense strand to SEQ ID NO: 2188418
aagucuaucugucgaacca

SEQ ID NO: 2188420 - RNA, 19 nt, Artificial Sequence
  Description of Artificial Sequence: Synthetic oligonucleotide
  Sense strand starting at position 590 of SEQ ID NO: 1883360
ggaggaucccagugagcug

SEQ ID NO: 2188421 - RNA, 19 nt, Artificial Sequence
  Description of Artificial Sequence: Synthetic oligonucleotide
  Antisense strand to SEQ ID NO: 2188420
cagcucacugggauccucc

SEQ ID NO: 2188422 - RNA, 19 nt, Artificial Sequence
  Description of Artificial Sequence: Synthetic oligonucleotide
  Sense strand starting at position 605 of SEQ ID NO: 1883360
gcuggaggucgauauugau

SEQ ID NO: 2188423 - RNA, 19 nt, Artificial Sequence
  Description of Artificial Sequence: Synthetic oligonucleotide
  Antisense strand to SEQ ID NO: 2188422
aucaauaucgaccuccagc

SEQ ID NO: 2188424 - RNA, 19 nt, Artificial Sequence
  Description of Artificial Sequence: Synthetic oligonucleotide
  Sense strand starting at position 612 of SEQ ID NO: 1883360
gucgauauugauuacuuua

SEQ ID NO: 2188425 - RNA, 19 nt, Artificial Sequence
  Description of Artificial Sequence: Synthetic oligonucleotide
  Antisense strand to SEQ ID NO: 2188424
uaaaguaaucaauaucgac

SEQ ID NO: 2188426 - RNA, 19 nt, Artificial Sequence
  Description of Artificial Sequence: Synthetic oligonucleotide
  Sense strand starting at position 614 of SEQ ID NO: 1883360
cgauauugauuacuuuaug

SEQ ID NO: 2188427 - RNA, 19 nt, Artificial Sequence
  Description of Artificial Sequence: Synthetic oligonucleotide
  Antisense strand to SEQ ID NO: 2188426
cauaaaguaaucaauaucg

SEQ ID NO: 2188428 - RNA, 19 nt, Artificial Sequence
  Description of Artificial Sequence: Synthetic oligonucleotide
  Sense strand starting at position 840 of SEQ ID NO: 1883360
uugcgaucuguccugcuuu

SEQ ID NO: 2188429 - RNA, 19 nt, Artificial Sequence
  Description of Artificial Sequence: Synthetic oligonucleotide
  Antisense strand to SEQ ID NO: 2188428
aaagcaggacagaucgcaa

SEQ ID NO: 2188430 - RNA, 19 nt, Artificial Sequence
  Description of Artificial Sequence: Synthetic oligonucleotide
  Sense strand starting at position 1105 of SEQ ID NO: 1883360
cagcaugaugugggacaaa

SEQ ID NO: 2188431 - RNA, 19 nt, Artificial Sequence
  Description of Artificial Sequence: Synthetic oligonucleotide
  Antisense strand to SEQ ID NO: 2188430
uuugucccacaucaugcug

SEQ ID NO: 2188432 - RNA, 19 nt, Artificial Sequence
  Description of Artificial Sequence: Synthetic oligonucleotide
  Sense strand starting at position 1192 of SEQ ID NO: 1883360
ccagcuuccucaucaagga

SEQ ID NO: 2188433 - RNA, 19 nt, Artificial Sequence
  Description of Artificial Sequence: Synthetic oligonucleotide
  Antisense strand to SEQ ID NO: 2188432
uccuugaugaggaagcugg

SEQ ID NO: 2188434 - RNA, 19 nt, Artificial Sequence
  Description of Artificial Sequence: Synthetic oligonucleotide
  Sense strand starting at position 1324 of SEQ ID NO: 1883360
aaaggauugcuuuaggcca

SEQ ID NO: 2188435 - RNA, 19 nt, Artificial Sequence
  Description of Artificial Sequence: Synthetic oligonucleotide
  Antisense strand to SEQ ID NO: 2188434
uggccuaaagcaauccuuu

SEQ ID NO: 2188436 - RNA, 19 nt, Artificial Sequence
  Description of Artificial Sequence: Synthetic oligonucleotide
  Sense strand starting at position 1445 of SEQ ID NO: 1883360
cuguaaaucuaagugguaa

SEQ ID NO: 2188437 - RNA, 19 nt, Artificial Sequence
  Description of Artificial Sequence: Synthetic oligonucleotide
  Antisense strand to SEQ ID NO: 2188436
uuaccacuuagauuuacag

SEQ ID NO: 2188438 - RNA, 19 nt, Artificial Sequence
  Description of Artificial Sequence: Synthetic oligonucleotide
  Sense strand starting at position 1457 of SEQ ID NO: 1883360
gugguaauauuaucuugga

SEQ ID NO: 2188439 - RNA, 19 nt, Artificial Sequence
  Description of Artificial Sequence: Synthetic oligonucleotide
  Antisense strand to SEQ ID NO: 2188438
uccaagauaauauuaccac

SEQ ID NO: 2188440 - RNA, 19 nt, Artificial Sequence
  Description of Artificial Sequence: Synthetic oligonucleotide
  Sense strand starting at position 1458 of SEQ ID NO: 1883360
ugguaauauuaucuuggaa

SEQ ID NO: 2188441 - RNA, 19 nt, Artificial Sequence
  Description of Artificial Sequence: Synthetic oligonucleotide
  Antisense strand to SEQ ID NO: 2188440
uuccaagauaauauuacca

SEQ ID NO: 2188442 - RNA, 19 nt, Artificial Sequence
  Description of Artificial Sequence: Synthetic oligonucleotide
  Sense strand starting at position 1714 of SEQ ID NO: 1883360
gacgacgugcuuucugcaa

SEQ ID NO: 2188443 - RNA, 19 nt, Artificial Sequence
  Description of Artificial Sequence: Synthetic oligonucleotide
  Antisense strand to SEQ ID NO: 2188442
uugcagaaagcacgucguc

SEQ ID NO: 2188444 - RNA, 19 nt, Artificial Sequence
  Description of Artificial Sequence: Synthetic oligonucleotide
  Sense strand starting at position 2186 of SEQ ID NO: 1883360
ugggcuucccaauauaucu

SEQ ID NO: 2188445 - RNA, 19 nt, Artificial Sequence
  Description of Artificial Sequence: Synthetic oligonucleotide
  Antisense strand to SEQ ID NO: 2188444
agauauauugggaagccca

SEQ ID NO: 2188446 - RNA, 19 nt, Artificial Sequence
  Description of Artificial Sequence: Synthetic oligonucleotide
  Sense strand starting at position 2332 of SEQ ID NO: 1883360
uuuagaagacucugaguag

SEQ ID NO: 2188447 - RNA, 19 nt, Artificial Sequence
  Description of Artificial Sequence: Synthetic oligonucleotide
  Antisense strand to SEQ ID NO: 2188446
cuacucagagucuucuaaa

SEQ ID NO: 2188448 - RNA, 19 nt, Artificial Sequence
  Description of Artificial Sequence: Synthetic oligonucleotide
  Sense strand starting at position 2457 of SEQ ID NO: 1883360
ggcggcuguggcuuuaaau

SEQ ID NO: 2188449 - RNA, 19 nt, Artificial Sequence
  Description of Artificial Sequence: Synthetic oligonucleotide
  Antisense strand to SEQ ID NO: 2188448
auuuaaagccacagccgcc

SEQ ID NO: 2188450 - RNA, 19 nt, Artificial Sequence
  Description of Artificial Sequence: Synthetic oligonucleotide
  Sense strand starting at position 2458 of SEQ ID NO: 1883360
gcggcuguggcuuuaaauu

SEQ ID NO: 2188451 - RNA, 19 nt, Artificial Sequence
  Description of Artificial Sequence: Synthetic oligonucleotide
  Antisense strand to SEQ ID NO: 2188450
aauuuaaagccacagccgc

SEQ ID NO: 2188452 - RNA, 19 nt, Artificial Sequence
  Description of Artificial Sequence: Synthetic oligonucleotide
  Sense strand starting at position 2580 of SEQ ID NO: 1883360
guaagugaucugcaaugug

SEQ ID NO: 2188453 - RNA, 19 nt, Artificial Sequence
  Description of Artificial Sequence: Synthetic oligonucleotide
  Antisense strand to SEQ ID NO: 2188452
cacauugcagaucacuuac

SEQ ID NO: 2188454 - RNA, 19 nt, Artificial Sequence
  Description of Artificial Sequence: Synthetic oligonucleotide
  Sense strand starting at position 2793 of SEQ ID NO: 1883360
gccaaagucccagaggguu

SEQ ID NO: 2188455 - RNA, 19 nt, Artificial Sequence
  Description of Artificial Sequence: Synthetic oligonucleotide
  Antisense strand to SEQ ID NO: 2188454
aacccucugggacuuuggc

SEQ ID NO: 2188456 - RNA, 19 nt, Artificial Sequence
  Description of Artificial Sequence: Synthetic oligonucleotide
  Sense strand starting at position 2923 of SEQ ID NO: 1883360
acagucgauccucaucauu

SEQ ID NO: 2188457 - RNA, 19 nt, Artificial Sequence
  Description of Artificial Sequence: Synthetic oligonucleotide
  Antisense strand to SEQ ID NO: 2188456
aaugaugaggaucgacugu

SEQ ID NO: 2188458 - RNA, 19 nt, Artificial Sequence
  Description of Artificial Sequence: Synthetic oligonucleotide
  Sense strand starting at position 2945 of SEQ ID NO: 1883360
ggauucugcauuugcgaau

SEQ ID NO: 2188459 - RNA, 19 nt, Artificial Sequence
  Description of Artificial Sequence: Synthetic oligonucleotide
  Antisense strand to SEQ ID NO: 2188458
auucgcaaaugcagaaucc

SEQ ID NO: 2188460 - RNA, 19 nt, Artificial Sequence
  Description of Artificial Sequence: Synthetic oligonucleotide
  Sense strand starting at position 2946 of SEQ ID NO: 1883360
gauucugcauuugcgaauu

SEQ ID NO: 2188461 - RNA, 19 nt, Artificial Sequence
  Description of Artificial Sequence: Synthetic oligonucleotide
  Antisense strand to SEQ ID NO: 2188460
aauucgcaaaugcagaauc

SEQ ID NO: 2188462 - RNA, 19 nt, Artificial Sequence
  Description of Artificial Sequence: Synthetic oligonucleotide
  Sense strand starting at position 2959 of SEQ ID NO: 1883360
cgaauucguccacucgcua

SEQ ID NO: 2188463 - RNA, 19 nt, Artificial Sequence
  Description of Artificial Sequence: Synthetic oligonucleotide
  Antisense strand to SEQ ID NO: 2188462
uagcgaguggacgaauucg

SEQ ID NO: 2188464 - RNA, 19 nt, Artificial Sequence
  Description of Artificial Sequence: Synthetic oligonucleotide
  Sense strand starting at position 3126 of SEQ ID NO: 1883360
auaaauaaguguccuccuu

SEQ ID NO: 2188465 - RNA, 19 nt, Artificial Sequence
  Description of Artificial Sequence: Synthetic oligonucleotide
  Antisense strand to SEQ ID NO: 2188464
aaggaggacacuuauuuau

SEQ ID NO: 2188466 - RNA, 19 nt, Artificial Sequence
  Description of Artificial Sequence: Synthetic oligonucleotide
  Sense strand starting at position 3148 of SEQ ID NO: 1883360
gcuuguguagugccacauu

SEQ ID NO: 2188467 - RNA, 19 nt, Artificial Sequence
  Description of Artificial Sequence: Synthetic oligonucleotide
  Antisense strand to SEQ ID NO: 2188466
aauguggcacuacacaagc

SEQ ID NO: 2188468 - RNA, 19 nt, Artificial Sequence
  Description of Artificial Sequence: Synthetic oligonucleotide
  Sense strand starting at position 3217 of SEQ ID NO: 1883360
aagugcugucuggugcgaa

SEQ ID NO: 2188469 - RNA, 19 nt, Artificial Sequence
  Description of Artificial Sequence: Synthetic oligonucleotide
  Antisense strand to SEQ ID NO: 2188468
uucgcaccagacagcacuu

SEQ ID NO: 2188470 - RNA, 19 nt, Artificial Sequence
  Description of Artificial Sequence: Synthetic oligonucleotide
  Sense strand starting at position 3219 of SEQ ID NO: 1883360
gugcugucuggugcgaagu

SEQ ID NO: 2188471 - RNA, 19 nt, Artificial Sequence
  Description of Artificial Sequence: Synthetic oligonucleotide
  Antisense strand to SEQ ID NO: 2188470
acuucgcaccagacagcac

SEQ ID NO: 2188472 - RNA, 19 nt, Artificial Sequence
  Description of Artificial Sequence: Synthetic oligonucleotide
  Sense strand starting at position 3247 of SEQ ID NO: 1883360
cugggauguuccuuaagga

SEQ ID NO: 2188473 - RNA, 19 nt, Artificial Sequence
  Description of Artificial Sequence: Synthetic oligonucleotide
  Antisense strand to SEQ ID NO: 2188472
uccuuaaggaacaucccag

SEQ ID NO: 2188474 - RNA, 19 nt, Artificial Sequence
  Description of Artificial Sequence: Synthetic oligonucleotide
  Sense strand starting at position 3281 of SEQ ID NO: 1883360
auaagcucugcucagggau

SEQ ID NO: 2188475 - RNA, 19 nt, Artificial Sequence
  Description of Artificial Sequence: Synthetic oligonucleotide
  Antisense strand to SEQ ID NO: 2188474
aucccugagcagagcuuau

SEQ ID NO: 2188476 - RNA, 19 nt, Artificial Sequence
  Description of Artificial Sequence: Synthetic oligonucleotide
  Sense strand starting at position 3287 of SEQ ID NO: 1883360
ucugcucagggaugaguua

SEQ ID NO: 2188477 - RNA, 19 nt, Artificial Sequence
  Description of Artificial Sequence: Synthetic oligonucleotide
  Antisense strand to SEQ ID NO: 2188476
uaacucaucccugagcaga

SEQ ID NO: 2188478 - RNA, 19 nt, Artificial Sequence
  Description of Artificial Sequence: Synthetic oligonucleotide
  Sense strand starting at position 3316 of SEQ ID NO: 1883360
gguggugaagucaguguua

SEQ ID NO: 2188479 - RNA, 19 nt, Artificial Sequence
  Description of Artificial Sequence: Synthetic oligonucleotide
  Antisense strand to SEQ ID NO: 2188478
uaacacugacuucaccacc

SEQ ID NO: 2188480 - RNA, 19 nt, Artificial Sequence
  Description of Artificial Sequence: Synthetic oligonucleotide
  Sense strand starting at position 3325 of SEQ ID NO: 1883360
gucaguguuaaugagucaa

SEQ ID NO: 2188481 - RNA, 19 nt, Artificial Sequence
  Description of Artificial Sequence: Synthetic oligonucleotide
  Antisense strand to SEQ ID NO: 2188480
uugacucauuaacacugac

SEQ ID NO: 2188482 - RNA, 19 nt, Artificial Sequence
  Description of Artificial Sequence: Synthetic oligonucleotide
  Sense strand starting at position 3855 of SEQ ID NO: 1883360
agaacagagcuauggcaaa

SEQ ID NO: 2188483 - RNA, 19 nt, Artificial Sequence
  Description of Artificial Sequence: Synthetic oligonucleotide
  Antisense strand to SEQ ID NO: 2188482
uuugccauagcucuguucu

SEQ ID NO: 2188484 - RNA, 19 nt, Artificial Sequence
  Description of Artificial Sequence: Synthetic oligonucleotide
  Sense strand starting at position 3866 of SEQ ID NO: 1883360
auggcaaauggcuguauuu

SEQ ID NO: 2188485 - RNA, 19 nt, Artificial Sequence
  Description of Artificial Sequence: Synthetic oligonucleotide
  Antisense strand to SEQ ID NO: 2188484
aaauacagccauuugccau

SEQ ID NO: 2188486 - RNA, 19 nt, Artificial Sequence
  Description of Artificial Sequence: Synthetic oligonucleotide
  Sense strand starting at position 3868 of SEQ ID NO: 1883360
ggcaaauggcuguauuugu

SEQ ID NO: 2188487 - RNA, 19 nt, Artificial Sequence
  Description of Artificial Sequence: Synthetic oligonucleotide
  Antisense strand to SEQ ID NO: 2188486
acaaauacagccauuugcc

SEQ ID NO: 2188488 - RNA, 19 nt, Artificial Sequence
  Description of Artificial Sequence: Synthetic oligonucleotide
  Sense strand starting at position 3875 of SEQ ID NO: 1883360
ggcuguauuuguuucagag

SEQ ID NO: 2188489 - RNA, 19 nt, Artificial Sequence
  Description of Artificial Sequence: Synthetic oligonucleotide
  Antisense strand to SEQ ID NO: 2188488
cucugaaacaaauacagcc

SEQ ID NO: 2188490 - RNA, 19 nt, Artificial Sequence
  Description of Artificial Sequence: Synthetic oligonucleotide
  Sense strand starting at position 370 of SEQ ID NO: 1883361
cuugaaagcagagguauaa

SEQ ID NO: 2188491 - RNA, 19 nt, Artificial Sequence
  Description of Artificial Sequence: Synthetic oligonucleotide
  Antisense strand to SEQ ID NO: 2188490
uuauaccucugcuuucaag

SEQ ID NO: 2188492 - RNA, 19 nt, Artificial Sequence
  Description of Artificial Sequence: Synthetic oligonucleotide
  Sense strand starting at position 383 of SEQ ID NO: 1883361
guauaaauccuaugugcac

SEQ ID NO: 2188493 - RNA, 19 nt, Artificial Sequence
  Description of Artificial Sequence: Synthetic oligonucleotide
  Antisense strand to SEQ ID NO: 2188492
gugcacauaggauuuauac

SEQ ID NO: 2188494 - RNA, 19 nt, Artificial Sequence
  Description of Artificial Sequence: Synthetic oligonucleotide
  Sense strand starting at position 398 of SEQ ID NO: 1883361
gcaccuuauuugcucaagu

SEQ ID NO: 2188495 - RNA, 19 nt, Artificial Sequence
  Description of Artificial Sequence: Synthetic oligonucleotide
  Antisense strand to SEQ ID NO: 2188494
acuugagcaaauaaggugc

SEQ ID NO: 2188496 - RNA, 19 nt, Artificial Sequence
  Description of Artificial Sequence: Synthetic oligonucleotide
  Sense strand starting at position 575 of SEQ ID NO: 1883361
agagguagauuauuaguau

SEQ ID NO: 2188497 - RNA, 19 nt, Artificial Sequence
  Description of Artificial Sequence: Synthetic oligonucleotide
  Antisense strand to SEQ ID NO: 2188496
auacuaauaaucuaccucu

SEQ ID NO: 2188498 - RNA, 19 nt, Artificial Sequence
  Description of Artificial Sequence: Synthetic oligonucleotide
  Sense strand starting at position 578 of SEQ ID NO: 1883361
gguagauuauuaguaugag

SEQ ID NO: 2188499 - RNA, 19 nt, Artificial Sequence
  Description of Artificial Sequence: Synthetic oligonucleotide
  Antisense strand to SEQ ID NO: 2188498
cucauacuaauaaucuacc

SEQ ID NO: 2188500 - RNA, 19 nt, Artificial Sequence
  Description of Artificial Sequence: Synthetic oligonucleotide
  Sense strand starting at position 581 of SEQ ID NO: 1883361
agauuauuaguaugaguca

SEQ ID NO: 2188501 - RNA, 19 nt, Artificial Sequence
  Description of Artificial Sequence: Synthetic oligonucleotide
  Antisense strand to SEQ ID NO: 2188500
ugacucauacuaauaaucu

SEQ ID NO: 2188502 - RNA, 19 nt, Artificial Sequence
  Description of Artificial Sequence: Synthetic oligonucleotide
  Sense strand starting at position 584 of SEQ ID NO: 1883361
uuauuaguaugagucaguu

SEQ ID NO: 2188503 - RNA, 19 nt, Artificial Sequence
  Description of Artificial Sequence: Synthetic oligonucleotide
  Antisense strand to SEQ ID NO: 2188502
aacugacucauacuaauaa

SEQ ID NO: 2188504 - RNA, 19 nt, Artificial Sequence
  Description of Artificial Sequence: Synthetic oligonucleotide
  Sense strand starting at position 732 of SEQ ID NO: 1883361
cugagaugcccgccguuau

SEQ ID NO: 2188505 - RNA, 19 nt, Artificial Sequence
  Description of Artificial Sequence: Synthetic oligonucleotide
  Antisense strand to SEQ ID NO: 2188504
auaacggcgggcaucucag

SEQ ID NO: 2188506 - RNA, 19 nt, Artificial Sequence
  Description of Artificial Sequence: Synthetic oligonucleotide
  Sense strand starting at position 750 of SEQ ID NO: 1883361
ugagaugcccacugagaaa

SEQ ID NO: 2188507 - RNA, 19 nt, Artificial Sequence
  Description of Artificial Sequence: Synthetic oligonucleotide
  Antisense strand to SEQ ID NO: 2188506
uuucucagugggcaucuca

SEQ ID NO: 2188508 - RNA, 19 nt, Artificial Sequence
  Description of Artificial Sequence: Synthetic oligonucleotide
  Sense strand starting at position 998 of SEQ ID NO: 1883361
cucacagaguuaccaugaa

SEQ ID NO: 2188509 - RNA, 19 nt, Artificial Sequence
  Description of Artificial Sequence: Synthetic oligonucleotide
  Antisense strand to SEQ ID NO: 2188508
uucaugguaacucugugag

SEQ ID NO: 2188510 - RNA, 19 nt, Artificial Sequence
  Description of Artificial Sequence: Synthetic oligonucleotide
  Sense strand starting at position 1010 of SEQ ID NO: 1883361
ccaugaaaguaagaaauaa

SEQ ID NO: 2188511 - RNA, 19 nt, Artificial Sequence
  Description of Artificial Sequence: Synthetic oligonucleotide
  Antisense strand to SEQ ID NO: 2188510
uuauuucuuacuuucaugg

SEQ ID NO: 2188512 - RNA, 19 nt, Artificial Sequence
  Description of Artificial Sequence: Synthetic oligonucleotide
  Sense strand starting at position 1433 of SEQ ID NO: 1883361
cgacgugauccugauggga

SEQ ID NO: 2188513 - RNA, 19 nt, Artificial Sequence
  Description of Artificial Sequence: Synthetic oligonucleotide
  Antisense strand to SEQ ID NO: 2188512
ucccaucaggaucacgucg

SEQ ID NO: 2188514 - RNA, 19 nt, Artificial Sequence
  Description of Artificial Sequence: Synthetic oligonucleotide
  Sense strand starting at position 1805 of SEQ ID NO: 1883361
gcacacauaguccagaaau

SEQ ID NO: 2188515 - RNA, 19 nt, Artificial Sequence
  Description of Artificial Sequence: Synthetic oligonucleotide
  Antisense strand to SEQ ID NO: 2188514
auuucuggacuaugugugc

SEQ ID NO: 2188516 - RNA, 19 nt, Artificial Sequence
  Description of Artificial Sequence: Synthetic oligonucleotide
  Sense strand starting at position 1965 of SEQ ID NO: 1883361
ccuagaagggcugaguuua

SEQ ID NO: 2188517 - RNA, 19 nt, Artificial Sequence
  Description of Artificial Sequence: Synthetic oligonucleotide
  Antisense strand to SEQ ID NO: 2188516
uaaacucagcccuucuagg

SEQ ID NO: 2188518 - RNA, 19 nt, Artificial Sequence
  Description of Artificial Sequence: Synthetic oligonucleotide
  Sense strand starting at position 1970 of SEQ ID NO: 1883361
aagggcugaguuuaaguua

SEQ ID NO: 2188519 - RNA, 19 nt, Artificial Sequence
  Description of Artificial Sequence: Synthetic oligonucleotide
  Antisense strand to SEQ ID NO: 2188518
uaacuuaaacucagcccuu

SEQ ID NO: 2188520 - RNA, 19 nt, Artificial Sequence
  Description of Artificial Sequence: Synthetic oligonucleotide
  Sense strand starting at position 2143 of SEQ ID NO: 1883361
uguugaauggcaggaugaa

SEQ ID NO: 2188521 - RNA, 19 nt, Artificial Sequence
  Description of Artificial Sequence: Synthetic oligonucleotide
  Antisense strand to SEQ ID NO: 2188520
uucauccugccauucaaca

SEQ ID NO: 2188522 - RNA, 19 nt, Artificial Sequence
  Description of Artificial Sequence: Synthetic oligonucleotide
  Sense strand starting at position 2192 of SEQ ID NO: 1883361
gagaguuaugaaggcaugu

SEQ ID NO: 2188523 - RNA, 19 nt, Artificial Sequence
  Description of Artificial Sequence: Synthetic oligonucleotide
  Antisense strand to SEQ ID NO: 2188522
acaugccuucauaacucuc

SEQ ID NO: 2188524 - RNA, 19 nt, Artificial Sequence
  Description of Artificial Sequence: Synthetic oligonucleotide
  Sense strand starting at position 2194 of SEQ ID NO: 1883361
gaguuaugaaggcauguuu

SEQ ID NO: 2188525 - RNA, 19 nt, Artificial Sequence
  Description of Artificial Sequence: Synthetic oligonucleotide
  Antisense strand to SEQ ID NO: 2188524
aaacaugccuucauaacuc

SEQ ID NO: 2188526 - RNA, 19 nt, Artificial Sequence
  Description of Artificial Sequence: Synthetic oligonucleotide
  Sense strand starting at position 2281 of SEQ ID NO: 1883361
ccuguuugaucugucuaca

SEQ ID NO: 2188527 - RNA, 19 nt, Artificial Sequence
  Description of Artificial Sequence: Synthetic oligonucleotide
  Antisense strand to SEQ ID NO: 2188526
uguagacagaucaaacagg

SEQ ID NO: 2188528 - RNA, 19 nt, Artificial Sequence
  Description of Artificial Sequence: Synthetic oligonucleotide
  Sense strand starting at position 2284 of SEQ ID NO: 1883361
guuugaucugucuacacac

SEQ ID NO: 2188529 - RNA, 19 nt, Artificial Sequence
  Description of Artificial Sequence: Synthetic oligonucleotide
  Antisense strand to SEQ ID NO: 2188528
guguguagacagaucaaac

SEQ ID NO: 2188530 - RNA, 19 nt, Artificial Sequence
  Description of Artificial Sequence: Synthetic oligonucleotide
  Sense strand starting at position 2379 of SEQ ID NO: 1883361
ggaaguuauugcccaaguu

SEQ ID NO: 2188531 - RNA, 19 nt, Artificial Sequence
  Description of Artificial Sequence: Synthetic oligonucleotide
  Antisense strand to SEQ ID NO: 2188530
aacuugggcaauaacuucc

SEQ ID NO: 2188532 - RNA, 19 nt, Artificial Sequence
  Description of Artificial Sequence: Synthetic oligonucleotide
  Sense strand starting at position 2380 of SEQ ID NO: 1883361
gaaguuauugcccaaguuu

SEQ ID NO: 2188533 - RNA, 19 nt, Artificial Sequence
  Description of Artificial Sequence: Synthetic oligonucleotide
  Antisense strand to SEQ ID NO: 2188532
aaacuugggcaauaacuuc

SEQ ID NO: 2188534 - RNA, 19 nt, Artificial Sequence
  Description of Artificial Sequence: Synthetic oligonucleotide
  Sense strand starting at position 2460 of SEQ ID NO: 1883361
ugaagaaacuucccuuagu

SEQ ID NO: 2188535 - RNA, 19 nt, Artificial Sequence
  Description of Artificial Sequence: Synthetic oligonucleotide
  Antisense strand to SEQ ID NO: 2188534
acuaagggaaguuucuuca

SEQ ID NO: 2188536 - RNA, 19 nt, Artificial Sequence
  Description of Artificial Sequence: Synthetic oligonucleotide
  Sense strand starting at position 2552 of SEQ ID NO: 1883361
gaugcuagacccuauguca

SEQ ID NO: 2188537 - RNA, 19 nt, Artificial Sequence
  Description of Artificial Sequence: Synthetic oligonucleotide
  Antisense strand to SEQ ID NO: 2188536
ugacauagggucuagcauc

SEQ ID NO: 2188538 - RNA, 19 nt, Artificial Sequence
  Description of Artificial Sequence: Synthetic oligonucleotide
  Sense strand starting at position 2639 of SEQ ID NO: 1883361
gagguuaugcaaugugcaa

SEQ ID NO: 2188539 - RNA, 19 nt, Artificial Sequence
  Description of Artificial Sequence: Synthetic oligonucleotide
  Antisense strand to SEQ ID NO: 2188538
uugcacauugcauaaccuc

SEQ ID NO: 2188540 - RNA, 19 nt, Artificial Sequence
  Description of Artificial Sequence: Synthetic oligonucleotide
  Sense strand starting at position 2673 of SEQ ID NO: 1883361
gggagucgggucugaauca

SEQ ID NO: 2188541 - RNA, 19 nt, Artificial Sequence
  Description of Artificial Sequence: Synthetic oligonucleotide
  Antisense strand to SEQ ID NO: 2188540
ugauucagacccgacuccc

SEQ ID NO: 2188542 - RNA, 19 nt, Artificial Sequence
  Description of Artificial Sequence: Synthetic oligonucleotide
  Sense strand starting at position 3159 of SEQ ID NO: 1883361
ccaucucugccagaaggau

SEQ ID NO: 2188543 - RNA, 19 nt, Artificial Sequence
  Description of Artificial Sequence: Synthetic oligonucleotide
  Antisense strand to SEQ ID NO: 2188542
auccuucuggcagagaugg

SEQ ID NO: 2188544 - RNA, 19 nt, Artificial Sequence
  Description of Artificial Sequence: Synthetic oligonucleotide
  Sense strand starting at position 3227 of SEQ ID NO: 1883361
gggagaaggacguguauau

SEQ ID NO: 2188545 - RNA, 19 nt, Artificial Sequence
  Description of Artificial Sequence: Synthetic oligonucleotide
  Antisense strand to SEQ ID NO: 2188544
auauacacguccuucuccc

SEQ ID NO: 2188546 - RNA, 19 nt, Artificial Sequence
  Description of Artificial Sequence: Synthetic oligonucleotide
  Sense strand starting at position 3249 of SEQ ID NO: 1883361
ggcuuucugcuagacuaug

SEQ ID NO: 2188547 - RNA, 19 nt, Artificial Sequence
  Description of Artificial Sequence: Synthetic oligonucleotide
  Antisense strand to SEQ ID NO: 2188546
cauagucuagcagaaagcc

SEQ ID NO: 2188548 - RNA, 19 nt, Artificial Sequence
  Description of Artificial Sequence: Synthetic oligonucleotide
  Sense strand starting at position 3255 of SEQ ID NO: 1883361
cugcuagacuaugcuagau

SEQ ID NO: 2188549 - RNA, 19 nt, Artificial Sequence
  Description of Artificial Sequence: Synthetic oligonucleotide
  Antisense strand to SEQ ID NO: 2188548
aucuagcauagucuagcag

SEQ ID NO: 2188550 - RNA, 19 nt, Artificial Sequence
  Description of Artificial Sequence: Synthetic oligonucleotide
  Sense strand starting at position 3259 of SEQ ID NO: 1883361
uagacuaugcuagaugcuu

SEQ ID NO: 2188551 - RNA, 19 nt, Artificial Sequence
  Description of Artificial Sequence: Synthetic oligonucleotide
  Antisense strand to SEQ ID NO: 2188550
aagcaucuagcauagucua

SEQ ID NO: 2188552 - RNA, 19 nt, Artificial Sequence
  Description of Artificial Sequence: Synthetic oligonucleotide
  Sense strand starting at position 3264 of SEQ ID NO: 1883361
uaugcuagaugcuuugaua

SEQ ID NO: 2188553 - RNA, 19 nt, Artificial Sequence
  Description of Artificial Sequence: Synthetic oligonucleotide
  Antisense strand to SEQ ID NO: 2188552
uaucaaagcaucuagcaua

SEQ ID NO: 2188554 - RNA, 19 nt, Artificial Sequence
  Description of Artificial Sequence: Synthetic oligonucleotide
  Sense strand starting at position 3349 of SEQ ID NO: 1883361
ugacaauucugguucugca

SEQ ID NO: 2188555 - RNA, 19 nt, Artificial Sequence
  Description of Artificial Sequence: Synthetic oligonucleotide
  Antisense strand to SEQ ID NO: 2188554
ugcagaaccagaauuguca

SEQ ID NO: 2188556 - RNA, 19 nt, Artificial Sequence
  Description of Artificial Sequence: Synthetic oligonucleotide
  Sense strand starting at position 3362 of SEQ ID NO: 1883361
ucugcagugggaugugauu

SEQ ID NO: 2188557 - RNA, 19 nt, Artificial Sequence
  Description of Artificial Sequence: Synthetic oligonucleotide
  Antisense strand to SEQ ID NO: 2188556
aaucacaucccacugcaga

SEQ ID NO: 2188558 - RNA, 19 nt, Artificial Sequence
  Description of Artificial Sequence: Synthetic oligonucleotide
  Sense strand starting at position 3454 of SEQ ID NO: 1883361
gugagcacuggauguaaau

SEQ ID NO: 2188559 - RNA, 19 nt, Artificial Sequence
  Description of Artificial Sequence: Synthetic oligonucleotide
  Antisense strand to SEQ ID NO: 2188558
auuuacauccagugcucac

SEQ ID NO: 2188560 - RNA, 19 nt, Artificial Sequence
  Description of Artificial Sequence: Synthetic oligonucleotide
  Sense strand starting at position 3463 of SEQ ID NO: 1883361
ggauguaaauuccaaagag

SEQ ID NO: 2188561 - RNA, 19 nt, Artificial Sequence
  Description of Artificial Sequence: Synthetic oligonucleotide
  Antisense strand to SEQ ID NO: 2188560
cucuuuggaauuuacaucc

SEQ ID NO: 2188562 - RNA, 19 nt, Artificial Sequence
  Description of Artificial Sequence: Synthetic oligonucleotide
  Sense strand starting at position 3671 of SEQ ID NO: 1883361
gaggauuagucucuggcau

SEQ ID NO: 2188563 - RNA, 19 nt, Artificial Sequence
  Description of Artificial Sequence: Synthetic oligonucleotide
  Antisense strand to SEQ ID NO: 2188562
augccagagacuaauccuc

SEQ ID NO: 2188564 - RNA, 19 nt, Artificial Sequence
  Description of Artificial Sequence: Synthetic oligonucleotide
  Sense strand starting at position 3672 of SEQ ID NO: 1883361
aggauuagucucuggcaug

SEQ ID NO: 2188565 - RNA, 19 nt, Artificial Sequence
  Description of Artificial Sequence: Synthetic oligonucleotide
  Antisense strand to SEQ ID NO: 2188564
caugccagagacuaauccu

SEQ ID NO: 2188566 - RNA, 19 nt, Artificial Sequence
  Description of Artificial Sequence: Synthetic oligonucleotide
  Sense strand starting at position 3807 of SEQ ID NO: 1883361
uagagaaaguccucagcau

SEQ ID NO: 2188567 - RNA, 19 nt, Artificial Sequence
  Description of Artificial Sequence: Synthetic oligonucleotide
  Antisense strand to SEQ ID NO: 2188566
augcugaggacuuucucua

SEQ ID NO: 2188568 - RNA, 19 nt, Artificial Sequence
  Description of Artificial Sequence: Synthetic oligonucleotide
  Sense strand starting at position 3808 of SEQ ID NO: 1883361
agagaaaguccucagcauc

SEQ ID NO: 2188569 - RNA, 19 nt, Artificial Sequence
  Description of Artificial Sequence: Synthetic oligonucleotide
  Antisense strand to SEQ ID NO: 2188568
gaugcugaggacuuucucu

SEQ ID NO: 2188570 - RNA, 19 nt, Artificial Sequence
  Description of Artificial Sequence: Synthetic oligonucleotide
  Sense strand starting at position 57 of SEQ ID NO: 1883362
ugaaaucuugcaggaaagu

SEQ ID NO: 2188571 - RNA, 19 nt, Artificial Sequence
  Description of Artificial Sequence: Synthetic oligonucleotide
  Antisense strand to SEQ ID NO: 2188570
acuuuccugcaagauuuca

SEQ ID NO: 2188572 - RNA, 19 nt, Artificial Sequence
  Description of Artificial Sequence: Synthetic oligonucleotide
  Sense strand starting at position 185 of SEQ ID NO: 1883362
uugauugagcuccauugau

SEQ ID NO: 2188573 - RNA, 19 nt, Artificial Sequence
  Description of Artificial Sequence: Synthetic oligonucleotide
  Antisense strand to SEQ ID NO: 2188572
aucaauggagcucaaucaa

SEQ ID NO: 2188574 - RNA, 19 nt, Artificial Sequence
  Description of Artificial Sequence: Synthetic oligonucleotide
  Sense strand starting at position 288 of SEQ ID NO: 1883362
ccaguagacugguuaagaa

SEQ ID NO: 2188575 - RNA, 19 nt, Artificial Sequence
  Description of Artificial Sequence: Synthetic oligonucleotide
  Antisense strand to SEQ ID NO: 2188574
uucuuaaccagucuacugg

SEQ ID NO: 2188576 - RNA, 19 nt, Artificial Sequence
  Description of Artificial Sequence: Synthetic oligonucleotide
  Sense strand starting at position 305 of SEQ ID NO: 1883362
aagguuacuccauggguaa

SEQ ID NO: 2188577 - RNA, 19 nt, Artificial Sequence
  Description of Artificial Sequence: Synthetic oligonucleotide
  Antisense strand to SEQ ID NO: 2188576
uuacccauggaguaaccuu

SEQ ID NO: 2188578 - RNA, 19 nt, Artificial Sequence
  Description of Artificial Sequence: Synthetic oligonucleotide
  Sense strand starting at position 306 of SEQ ID NO: 1883362
agguuacuccauggguaac

SEQ ID NO: 2188579 - RNA, 19 nt, Artificial Sequence
  Description of Artificial Sequence: Synthetic oligonucleotide
  Antisense strand to SEQ ID NO: 2188578
guuacccauggaguaaccu

SEQ ID NO: 2188580 - RNA, 19 nt, Artificial Sequence
  Description of Artificial Sequence: Synthetic oligonucleotide
  Sense strand starting at position 408 of SEQ ID NO: 1883362
gaugcaacugcucagugaa

SEQ ID NO: 2188581 - RNA, 19 nt, Artificial Sequence
  Description of Artificial Sequence: Synthetic oligonucleotide
  Antisense strand to SEQ ID NO: 2188580
uucacugagcaguugcauc

SEQ ID NO: 2188582 - RNA, 19 nt, Artificial Sequence
  Description of Artificial Sequence: Synthetic oligonucleotide
  Sense strand starting at position 484 of SEQ ID NO: 1883362
gauacuggguaugcaaauu

SEQ ID NO: 2188583 - RNA, 19 nt, Artificial Sequence
  Description of Artificial Sequence: Synthetic oligonucleotide
  Antisense strand to SEQ ID NO: 2188582
aauuugcauacccaguauc

SEQ ID NO: 2188584 - RNA, 19 nt, Artificial Sequence
  Description of Artificial Sequence: Synthetic oligonucleotide
  Sense strand starting at position 490 of SEQ ID NO: 1883362
ggguaugcaaauuaguagu

SEQ ID NO: 2188585 - RNA, 19 nt, Artificial Sequence
  Description of Artificial Sequence: Synthetic oligonucleotide
  Antisense strand to SEQ ID NO: 2188584
acuacuaauuugcauaccc

SEQ ID NO: 2188586 - RNA, 19 nt, Artificial Sequence
  Description of Artificial Sequence: Synthetic oligonucleotide
  Sense strand starting at position 505 of SEQ ID NO: 1883362
uaguguuugcuacaacaag

SEQ ID NO: 2188587 - RNA, 19 nt, Artificial Sequence
  Description of Artificial Sequence: Synthetic oligonucleotide
  Antisense strand to SEQ ID NO: 2188586
cuuguuguagcaaacacua

SEQ ID NO: 2188588 - RNA, 19 nt, Artificial Sequence
  Description of Artificial Sequence: Synthetic oligonucleotide
  Sense strand starting at position 524 of SEQ ID NO: 1883362
auaacaacgugaucugaaa

SEQ ID NO: 2188589 - RNA, 19 nt, Artificial Sequence
  Description of Artificial Sequence: Synthetic oligonucleotide
  Antisense strand to SEQ ID NO: 2188588
uuucagaucacguuguuau

SEQ ID NO: 2188590 - RNA, 19 nt, Artificial Sequence
  Description of Artificial Sequence: Synthetic oligonucleotide
  Sense strand starting at position 835 of SEQ ID NO: 1883362
cauguacgauagcuuauuu

SEQ ID NO: 2188591 - RNA, 19 nt, Artificial Sequence
  Description of Artificial Sequence: Synthetic oligonucleotide
  Antisense strand to SEQ ID NO: 2188590
aaauaagcuaucguacaug

SEQ ID NO: 2188592 - RNA, 19 nt, Artificial Sequence
  Description of Artificial Sequence: Synthetic oligonucleotide
  Sense strand starting at position 1253 of SEQ ID NO: 1883362
uucccagagcauuauguau

SEQ ID NO: 2188593 - RNA, 19 nt, Artificial Sequence
  Description of Artificial Sequence: Synthetic oligonucleotide
  Antisense strand to SEQ ID NO: 2188592
auacauaaugcucugggaa

SEQ ID NO: 2188594 - RNA, 19 nt, Artificial Sequence
  Description of Artificial Sequence: Synthetic oligonucleotide
  Sense strand starting at position 1338 of SEQ ID NO: 1883362
gugauugacuuccugaaag

SEQ ID NO: 2188595 - RNA, 19 nt, Artificial Sequence
  Description of Artificial Sequence: Synthetic oligonucleotide
  Antisense strand to SEQ ID NO: 2188594
cuuucaggaagucaaucac

SEQ ID NO: 2188596 - RNA, 19 nt, Artificial Sequence
  Description of Artificial Sequence: Synthetic oligonucleotide
  Sense strand starting at position 1397 of SEQ ID NO: 1883362
gcaaucugacuccagacuu

SEQ ID NO: 2188597 - RNA, 19 nt, Artificial Sequence
  Description of Artificial Sequence: Synthetic oligonucleotide
  Antisense strand to SEQ ID NO: 2188596
aagucuggagucagauugc

SEQ ID NO: 2188598 - RNA, 19 nt, Artificial Sequence
  Description of Artificial Sequence: Synthetic oligonucleotide
  Sense strand starting at position 1429 of SEQ ID NO: 1883362
uguugccucuaagcaauuu

SEQ ID NO: 2188599 - RNA, 19 nt, Artificial Sequence
  Description of Artificial Sequence: Synthetic oligonucleotide
  Antisense strand to SEQ ID NO: 2188598
aaauugcuuagaggcaaca

SEQ ID NO: 2188600 - RNA, 19 nt, Artificial Sequence
  Description of Artificial Sequence: Synthetic oligonucleotide
  Sense strand starting at position 1569 of SEQ ID NO: 1883362
gcaucaaugcugugauuuc

SEQ ID NO: 2188601 - RNA, 19 nt, Artificial Sequence
  Description of Artificial Sequence: Synthetic oligonucleotide
  Antisense strand to SEQ ID NO: 2188600
gaaaucacagcauugaugc

SEQ ID NO: 2188602 - RNA, 19 nt, Artificial Sequence
  Description of Artificial Sequence: Synthetic oligonucleotide
  Sense strand starting at position 1668 of SEQ ID NO: 1883362
gacaguggagcagaguuaa

SEQ ID NO: 2188603 - RNA, 19 nt, Artificial Sequence
  Description of Artificial Sequence: Synthetic oligonucleotide
  Antisense strand to SEQ ID NO: 2188602
uuaacucugcuccacuguc

SEQ ID NO: 2188604 - RNA, 19 nt, Artificial Sequence
  Description of Artificial Sequence: Synthetic oligonucleotide
  Sense strand starting at position 1804 of SEQ ID NO: 1883362
uggaaugacuuaccugcua

SEQ ID NO: 2188605 - RNA, 19 nt, Artificial Sequence
  Description of Artificial Sequence: Synthetic oligonucleotide
  Antisense strand to SEQ ID NO: 2188604
uagcagguaagucauucca

SEQ ID NO: 2188606 - RNA, 19 nt, Artificial Sequence
  Description of Artificial Sequence: Synthetic oligonucleotide
  Sense strand starting at position 1867 of SEQ ID NO: 1883362
uggguuggccagugauuug

SEQ ID NO: 2188607 - RNA, 19 nt, Artificial Sequence
  Description of Artificial Sequence: Synthetic oligonucleotide
  Antisense strand to SEQ ID NO: 2188606
caaaucacuggccaaccca

SEQ ID NO: 2188608 - RNA, 19 nt, Artificial Sequence
  Description of Artificial Sequence: Synthetic oligonucleotide
  Sense strand starting at position 2003 of SEQ ID NO: 1883362
gucugagacucugucauaa

SEQ ID NO: 2188609 - RNA, 19 nt, Artificial Sequence
  Description of Artificial Sequence: Synthetic oligonucleotide
  Antisense strand to SEQ ID NO: 2188608
uuaugacagagucucagac

SEQ ID NO: 2188610 - RNA, 19 nt, Artificial Sequence
  Description of Artificial Sequence: Synthetic oligonucleotide
  Sense strand starting at position 2034 of SEQ ID NO: 1883362
uucuguauacuguaacauu

SEQ ID NO: 2188611 - RNA, 19 nt, Artificial Sequence
  Description of Artificial Sequence: Synthetic oligonucleotide
  Antisense strand to SEQ ID NO: 2188610
aauguuacaguauacagaa

SEQ ID NO: 2188612 - RNA, 19 nt, Artificial Sequence
  Description of Artificial Sequence: Synthetic oligonucleotide
  Sense strand starting at position 2067 of SEQ ID NO: 1883362
gcuuccaugcucuaaggaa

SEQ ID NO: 2188613 - RNA, 19 nt, Artificial Sequence
  Description of Artificial Sequence: Synthetic oligonucleotide
  Antisense strand to SEQ ID NO: 2188612
uuccuuagagcauggaagc

SEQ ID NO: 2188614 - RNA, 19 nt, Artificial Sequence
  Description of Artificial Sequence: Synthetic oligonucleotide
  Sense strand starting at position 2193 of SEQ ID NO: 1883362
gggaguauauucuccaacu

SEQ ID NO: 2188615 - RNA, 19 nt, Artificial Sequence
  Description of Artificial Sequence: Synthetic oligonucleotide
  Antisense strand to SEQ ID NO: 2188614
aguuggagaauauacuccc

SEQ ID NO: 2188616 - RNA, 19 nt, Artificial Sequence
  Description of Artificial Sequence: Synthetic oligonucleotide
  Sense strand starting at position 2194 of SEQ ID NO: 1883362
ggaguauauucuccaacuc

SEQ ID NO: 2188617 - RNA, 19 nt, Artificial Sequence
  Description of Artificial Sequence: Synthetic oligonucleotide
  Antisense strand to SEQ ID NO: 2188616
gaguuggagaauauacucc

SEQ ID NO: 2188618 - RNA, 19 nt, Artificial Sequence
  Description of Artificial Sequence: Synthetic oligonucleotide
  Sense strand starting at position 2477 of SEQ ID NO: 1883362
ucaacuccagcuugauaga

SEQ ID NO: 2188619 - RNA, 19 nt, Artificial Sequence
  Description of Artificial Sequence: Synthetic oligonucleotide
  Antisense strand to SEQ ID NO: 2188618
ucuaucaagcuggaguuga

SEQ ID NO: 2188620 - RNA, 19 nt, Artificial Sequence
  Description of Artificial Sequence: Synthetic oligonucleotide
  Sense strand starting at position 2585 of SEQ ID NO: 1883362
gcccuuauuggcuauauga

SEQ ID NO: 2188621 - RNA, 19 nt, Artificial Sequence
  Description of Artificial Sequence: Synthetic oligonucleotide
  Antisense strand to SEQ ID NO: 2188620
ucauauagccaauaagggc

SEQ ID NO: 2188622 - RNA, 19 nt, Artificial Sequence
  Description of Artificial Sequence: Synthetic oligonucleotide
  Sense strand starting at position 2669 of SEQ ID NO: 1883362
aagaaauuggcaggugaua

SEQ ID NO: 2188623 - RNA, 19 nt, Artificial Sequence
  Description of Artificial Sequence: Synthetic oligonucleotide
  Antisense strand to SEQ ID NO: 2188622
uaucaccugccaauuucuu

SEQ ID NO: 2188624 - RNA, 19 nt, Artificial Sequence
  Description of Artificial Sequence: Synthetic oligonucleotide
  Sense strand starting at position 2839 of SEQ ID NO: 1883362
ucagaauggccugacuucu

SEQ ID NO: 2188625 - RNA, 19 nt, Artificial Sequence
  Description of Artificial Sequence: Synthetic oligonucleotide
  Antisense strand to SEQ ID NO: 2188624
agaagucaggccauucuga

SEQ ID NO: 2188626 - RNA, 19 nt, Artificial Sequence
  Description of Artificial Sequence: Synthetic oligonucleotide
  Sense strand starting at position 3064 of SEQ ID NO: 1883362
cuugaauguugauuaccuu

SEQ ID NO: 2188627 - RNA, 19 nt, Artificial Sequence
  Description of Artificial Sequence: Synthetic oligonucleotide
  Antisense strand to SEQ ID NO: 2188626
aagguaaucaacauucaag

SEQ ID NO: 2188628 - RNA, 19 nt, Artificial Sequence
  Description of Artificial Sequence: Synthetic oligonucleotide
  Sense strand starting at position 3065 of SEQ ID NO: 1883362
uugaauguugauuaccuua

SEQ ID NO: 2188629 - RNA, 19 nt, Artificial Sequence
  Description of Artificial Sequence: Synthetic oligonucleotide
  Antisense strand to SEQ ID NO: 2188628
uaagguaaucaacauucaa

SEQ ID NO: 2188630 - RNA, 19 nt, Artificial Sequence
  Description of Artificial Sequence: Synthetic oligonucleotide
  Sense strand starting at position 3139 of SEQ ID NO: 1883362
uugcaauuuguaugcuauu

SEQ ID NO: 2188631 - RNA, 19 nt, Artificial Sequence
  Description of Artificial Sequence: Synthetic oligonucleotide
  Antisense strand to SEQ ID NO: 2188630
aauagcauacaaauugcaa

SEQ ID NO: 2188632 - RNA, 19 nt, Artificial Sequence
  Description of Artificial Sequence: Synthetic oligonucleotide
  Sense strand starting at position 3152 of SEQ ID NO: 1883362
gcuauuccugaagaagagu

SEQ ID NO: 2188633 - RNA, 19 nt, Artificial Sequence
  Description of Artificial Sequence: Synthetic oligonucleotide
  Antisense strand to SEQ ID NO: 2188632
acucuucuucaggaauagc

SEQ ID NO: 2188634 - RNA, 19 nt, Artificial Sequence
  Description of Artificial Sequence: Synthetic oligonucleotide
  Sense strand starting at position 3231 of SEQ ID NO: 1883362
ggaccuuccugaguaaagc

SEQ ID NO: 2188635 - RNA, 19 nt, Artificial Sequence
  Description of Artificial Sequence: Synthetic oligonucleotide
  Antisense strand to SEQ ID NO: 2188634
gcuuuacucaggaaggucc

SEQ ID NO: 2188636 - RNA, 19 nt, Artificial Sequence
  Description of Artificial Sequence: Synthetic oligonucleotide
  Sense strand starting at position 3232 of SEQ ID NO: 1883362
gaccuuccugaguaaagca

SEQ ID NO: 2188637 - RNA, 19 nt, Artificial Sequence
  Description of Artificial Sequence: Synthetic oligonucleotide
  Antisense strand to SEQ ID NO: 2188636
ugcuuuacucaggaagguc

SEQ ID NO: 2188638 - RNA, 19 nt, Artificial Sequence
  Description of Artificial Sequence: Synthetic oligonucleotide
  Sense strand starting at position 3422 of SEQ ID NO: 1883362
ucccauuuagccugucuua

SEQ ID NO: 2188639 - RNA, 19 nt, Artificial Sequence
  Description of Artificial Sequence: Synthetic oligonucleotide
  Antisense strand to SEQ ID NO: 2188638
uaagacaggcuaaauggga

SEQ ID NO: 2188640 - RNA, 19 nt, Artificial Sequence
  Description of Artificial Sequence: Synthetic oligonucleotide
  Sense strand starting at position 3476 of SEQ ID NO: 1883362
guaagcaguagugagaauu

SEQ ID NO: 2188641 - RNA, 19 nt, Artificial Sequence
  Description of Artificial Sequence: Synthetic oligonucleotide
  Antisense strand to SEQ ID NO: 2188640
aauucucacuacugcuuac

SEQ ID NO: 2188642 - RNA, 19 nt, Artificial Sequence
  Description of Artificial Sequence: Synthetic oligonucleotide
  Sense strand starting at position 3578 of SEQ ID NO: 1883362
gggcuucuggcccauagau

SEQ ID NO: 2188643 - RNA, 19 nt, Artificial Sequence
  Description of Artificial Sequence: Synthetic oligonucleotide
  Antisense strand to SEQ ID NO: 2188642
aucuaugggccagaagccc

SEQ ID NO: 2188644 - RNA, 19 nt, Artificial Sequence
  Description of Artificial Sequence: Synthetic oligonucleotide
  Sense strand starting at position 3647 of SEQ ID NO: 1883362
ggugcucugacugacaaga

SEQ ID NO: 2188645 - RNA, 19 nt, Artificial Sequence
  Description of Artificial Sequence: Synthetic oligonucleotide
  Antisense strand to SEQ ID NO: 2188644
ucuugucagucagagcacc

SEQ ID NO: 2188646 - RNA, 19 nt, Artificial Sequence
  Description of Artificial Sequence: Synthetic oligonucleotide
  Sense strand starting at position 3673 of SEQ ID NO: 1883362
cuguauccuguugagaaga

SEQ ID NO: 2188647 - RNA, 19 nt, Artificial Sequence
  Description of Artificial Sequence: Synthetic oligonucleotide
  Antisense strand to SEQ ID NO: 2188646
ucuucucaacaggauacag

SEQ ID NO: 2188648 - RNA, 19 nt, Artificial Sequence
  Description of Artificial Sequence: Synthetic oligonucleotide
  Sense strand starting at position 3719 of SEQ ID NO: 1883362
aucuguauccuguaaagaa

SEQ ID NO: 2188649 - RNA, 19 nt, Artificial Sequence
  Description of Artificial Sequence: Synthetic oligonucleotide
  Antisense strand to SEQ ID NO: 2188648
uucuuuacaggauacagau

SEQ ID NO: 2188650 - RNA, 19 nt, Artificial Sequence
  Description of Artificial Sequence: Synthetic oligonucleotide
  Sense strand starting at position 406 of SEQ ID NO: 1883363
ucaauuucugugggccauu

SEQ ID NO: 2188651 - RNA, 19 nt, Artificial Sequence
  Description of Artificial Sequence: Synthetic oligonucleotide
  Antisense strand to SEQ ID NO: 2188650
aauggcccacagaaauuga

SEQ ID NO: 2188652 - RNA, 19 nt, Artificial Sequence
  Description of Artificial Sequence: Synthetic oligonucleotide
  Sense strand starting at position 610 of SEQ ID NO: 1883363
cuagcucuuauggauggau

SEQ ID NO: 2188653 - RNA, 19 nt, Artificial Sequence
  Description of Artificial Sequence: Synthetic oligonucleotide
  Antisense strand to SEQ ID NO: 2188652
auccauccauaagagcuag

SEQ ID NO: 2188654 - RNA, 19 nt, Artificial Sequence
  Description of Artificial Sequence: Synthetic oligonucleotide
  Sense strand starting at position 641 of SEQ ID NO: 1883363
gggaaauuguggucauugg

SEQ ID NO: 2188655 - RNA, 19 nt, Artificial Sequence
  Description of Artificial Sequence: Synthetic oligonucleotide
  Antisense strand to SEQ ID NO: 2188654
ccaaugaccacaauuuccc

SEQ ID NO: 2188656 - RNA, 19 nt, Artificial Sequence
  Description of Artificial Sequence: Synthetic oligonucleotide
  Sense strand starting at position 642 of SEQ ID NO: 1883363
ggaaauuguggucauuggu

SEQ ID NO: 2188657 - RNA, 19 nt, Artificial Sequence
  Description of Artificial Sequence: Synthetic oligonucleotide
  Antisense strand to SEQ ID NO: 2188656
accaaugaccacaauuucc

SEQ ID NO: 2188658 - RNA, 19 nt, Artificial Sequence
  Description of Artificial Sequence: Synthetic oligonucleotide
  Sense strand starting at position 707 of SEQ ID NO: 1883363
gucgcuuugauagagaauu

SEQ ID NO: 2188659 - RNA, 19 nt, Artificial Sequence
  Description of Artificial Sequence: Synthetic oligonucleotide
  Antisense strand to SEQ ID NO: 2188658
aauucucuaucaaagcgac

SEQ ID NO: 2188660 - RNA, 19 nt, Artificial Sequence
  Description of Artificial Sequence: Synthetic oligonucleotide
  Sense strand starting at position 738 of SEQ ID NO: 1883363
gccugauaaagagguaaga

SEQ ID NO: 2188661 - RNA, 19 nt, Artificial Sequence
  Description of Artificial Sequence: Synthetic oligonucleotide
  Antisense strand to SEQ ID NO: 2188660
ucuuaccucuuuaucaggc

SEQ ID NO: 2188662 - RNA, 19 nt, Artificial Sequence
  Description of Artificial Sequence: Synthetic oligonucleotide
  Sense strand starting at position 802 of SEQ ID NO: 1883363
auaauaagucuugguauag

SEQ ID NO: 2188663 - RNA, 19 nt, Artificial Sequence
  Description of Artificial Sequence: Synthetic oligonucleotide
  Antisense strand to SEQ ID NO: 2188662
cuauaccaagacuuauuau

SEQ ID NO: 2188664 - RNA, 19 nt, Artificial Sequence
  Description of Artificial Sequence: Synthetic oligonucleotide
  Sense strand starting at position 806 of SEQ ID NO: 1883363
uaagucuugguauaguaaa

SEQ ID NO: 2188665 - RNA, 19 nt, Artificial Sequence
  Description of Artificial Sequence: Synthetic oligonucleotide
  Antisense strand to SEQ ID NO: 2188664
uuuacuauaccaagacuua

SEQ ID NO: 2188666 - RNA, 19 nt, Artificial Sequence
  Description of Artificial Sequence: Synthetic oligonucleotide
  Sense strand starting at position 1001 of SEQ ID NO: 1883363
auggcuuaaugaguaauca

SEQ ID NO: 2188667 - RNA, 19 nt, Artificial Sequence
  Description of Artificial Sequence: Synthetic oligonucleotide
  Antisense strand to SEQ ID NO: 2188666
ugauuacucauuaagccau

SEQ ID NO: 2188668 - RNA, 19 nt, Artificial Sequence
  Description of Artificial Sequence: Synthetic oligonucleotide
  Sense strand starting at position 1002 of SEQ ID NO: 1883363
uggcuuaaugaguaaucaa

SEQ ID NO: 2188669 - RNA, 19 nt, Artificial Sequence
  Description of Artificial Sequence: Synthetic oligonucleotide
  Antisense strand to SEQ ID NO: 2188668
uugauuacucauuaagcca

SEQ ID NO: 2188670 - RNA, 19 nt, Artificial Sequence
  Description of Artificial Sequence: Synthetic oligonucleotide
  Sense strand starting at position 1091 of SEQ ID NO: 1883363
ucuacuuaaucuucuggga

SEQ ID NO: 2188671 - RNA, 19 nt, Artificial Sequence
  Description of Artificial Sequence: Synthetic oligonucleotide
  Antisense strand to SEQ ID NO: 2188670
ucccagaagauuaaguaga

SEQ ID NO: 2188672 - RNA, 19 nt, Artificial Sequence
  Description of Artificial Sequence: Synthetic oligonucleotide
  Sense strand starting at position 1095 of SEQ ID NO: 1883363
cuuaaucuucugggaacca

SEQ ID NO: 2188673 - RNA, 19 nt, Artificial Sequence
  Description of Artificial Sequence: Synthetic oligonucleotide
  Antisense strand to SEQ ID NO: 2188672
ugguucccagaagauuaag

SEQ ID NO: 2188674 - RNA, 19 nt, Artificial Sequence
  Description of Artificial Sequence: Synthetic oligonucleotide
  Sense strand starting at position 1175 of SEQ ID NO: 1883363
augaauagcuacuuuagua

SEQ ID NO: 2188675 - RNA, 19 nt, Artificial Sequence
  Description of Artificial Sequence: Synthetic oligonucleotide
  Antisense strand to SEQ ID NO: 2188674
uacuaaaguagcuauucau

SEQ ID NO: 2188676 - RNA, 19 nt, Artificial Sequence
  Description of Artificial Sequence: Synthetic oligonucleotide
  Sense strand starting at position 1204 of SEQ ID NO: 1883363
ucuuauuuguguuuaugac

SEQ ID NO: 2188677 - RNA, 19 nt, Artificial Sequence
  Description of Artificial Sequence: Synthetic oligonucleotide
  Antisense strand to SEQ ID NO: 2188676
gucauaaacacaaauaaga

SEQ ID NO: 2188678 - RNA, 19 nt, Artificial Sequence
  Description of Artificial Sequence: Synthetic oligonucleotide
  Sense strand starting at position 1211 of SEQ ID NO: 1883363
uguguuuaugacgaauaua

SEQ ID NO: 2188679 - RNA, 19 nt, Artificial Sequence
  Description of Artificial Sequence: Synthetic oligonucleotide
  Antisense strand to SEQ ID NO: 2188678
uauauucgucauaaacaca

SEQ ID NO: 2188680 - RNA, 19 nt, Artificial Sequence
  Description of Artificial Sequence: Synthetic oligonucleotide
  Sense strand starting at position 1214 of SEQ ID NO: 1883363
guuuaugacgaauauaacu

SEQ ID NO: 2188681 - RNA, 19 nt, Artificial Sequence
  Description of Artificial Sequence: Synthetic oligonucleotide
  Antisense strand to SEQ ID NO: 2188680
aguuauauucgucauaaac

SEQ ID NO: 2188682 - RNA, 19 nt, Artificial Sequence
  Description of Artificial Sequence: Synthetic oligonucleotide
  Sense strand starting at position 1219 of SEQ ID NO: 1883363
ugacgaauauaacuuuagu

SEQ ID NO: 2188683 - RNA, 19 nt, Artificial Sequence
  Description of Artificial Sequence: Synthetic oligonucleotide
  Antisense strand to SEQ ID NO: 2188682
acuaaaguuauauucguca

SEQ ID NO: 2188684 - RNA, 19 nt, Artificial Sequence
  Description of Artificial Sequence: Synthetic oligonucleotide
  Sense strand starting at position 1701 of SEQ ID NO: 1883363
auguaaucugaauagcauu

SEQ ID NO: 2188685 - RNA, 19 nt, Artificial Sequence
  Description of Artificial Sequence: Synthetic oligonucleotide
  Antisense strand to SEQ ID NO: 2188684
aaugcuauucagauuacau

SEQ ID NO: 2188686 - RNA, 19 nt, Artificial Sequence
  Description of Artificial Sequence: Synthetic oligonucleotide
  Sense strand starting at position 2053 of SEQ ID NO: 1883363
caugaagucuugguauuaa

SEQ ID NO: 2188687 - RNA, 19 nt, Artificial Sequence
  Description of Artificial Sequence: Synthetic oligonucleotide
  Antisense strand to SEQ ID NO: 2188686
uuaauaccaagacuucaug

SEQ ID NO: 2188688 - RNA, 19 nt, Artificial Sequence
  Description of Artificial Sequence: Synthetic oligonucleotide
  Sense strand starting at position 2247 of SEQ ID NO: 1883363
ugugauguagguagcagua

SEQ ID NO: 2188689 - RNA, 19 nt, Artificial Sequence
  Description of Artificial Sequence: Synthetic oligonucleotide
  Antisense strand to SEQ ID NO: 2188688
uacugcuaccuacaucaca

SEQ ID NO: 2188690 - RNA, 19 nt, Artificial Sequence
  Description of Artificial Sequence: Synthetic oligonucleotide
  Sense strand starting at position 2260 of SEQ ID NO: 1883363
gcaguaucucuacagauga

SEQ ID NO: 2188691 - RNA, 19 nt, Artificial Sequence
  Description of Artificial Sequence: Synthetic oligonucleotide
  Antisense strand to SEQ ID NO: 2188690
ucaucuguagagauacugc

SEQ ID NO: 2188692 - RNA, 19 nt, Artificial Sequence
  Description of Artificial Sequence: Synthetic oligonucleotide
  Sense strand starting at position 2286 of SEQ ID NO: 1883363
gcuggagagcauuauguga

SEQ ID NO: 2188693 - RNA, 19 nt, Artificial Sequence
  Description of Artificial Sequence: Synthetic oligonucleotide
  Antisense strand to SEQ ID NO: 2188692
ucacauaaugcucuccagc

SEQ ID NO: 2188694 - RNA, 19 nt, Artificial Sequence
  Description of Artificial Sequence: Synthetic oligonucleotide
  Sense strand starting at position 2297 of SEQ ID NO: 1883363
uuaugugaaucuucuaagg

SEQ ID NO: 2188695 - RNA, 19 nt, Artificial Sequence
  Description of Artificial Sequence: Synthetic oligonucleotide
  Antisense strand to SEQ ID NO: 2188694
ccuuagaagauucacauaa

SEQ ID NO: 2188696 - RNA, 19 nt, Artificial Sequence
  Description of Artificial Sequence: Synthetic oligonucleotide
  Sense strand starting at position 2349 of SEQ ID NO: 1883363
aaucuagucugugugauuu

SEQ ID NO: 2188697 - RNA, 19 nt, Artificial Sequence
  Description of Artificial Sequence: Synthetic oligonucleotide
  Antisense strand to SEQ ID NO: 2188696
aaaucacacagacuagauu

SEQ ID NO: 2188698 - RNA, 19 nt, Artificial Sequence
  Description of Artificial Sequence: Synthetic oligonucleotide
  Sense strand starting at position 2425 of SEQ ID NO: 1883363
aaaguugauugauuguuga

SEQ ID NO: 2188699 - RNA, 19 nt, Artificial Sequence
  Description of Artificial Sequence: Synthetic oligonucleotide
  Antisense strand to SEQ ID NO: 2188698
ucaacaaucaaucaacuuu

SEQ ID NO: 2188700 - RNA, 19 nt, Artificial Sequence
  Description of Artificial Sequence: Synthetic oligonucleotide
  Sense strand starting at position 2457 of SEQ ID NO: 1883363
ccuauaaguuuacugggua

SEQ ID NO: 2188701 - RNA, 19 nt, Artificial Sequence
  Description of Artificial Sequence: Synthetic oligonucleotide
  Antisense strand to SEQ ID NO: 2188700
uacccaguaaacuuauagg

SEQ ID NO: 2188702 - RNA, 19 nt, Artificial Sequence
  Description of Artificial Sequence: Synthetic oligonucleotide
  Sense strand starting at position 2614 of SEQ ID NO: 1883363
gguugcuuuggauaggaua

SEQ ID NO: 2188703 - RNA, 19 nt, Artificial Sequence
  Description of Artificial Sequence: Synthetic oligonucleotide
  Antisense strand to SEQ ID NO: 2188702
uauccuauccaaagcaacc

SEQ ID NO: 2188704 - RNA, 19 nt, Artificial Sequence
  Description of Artificial Sequence: Synthetic oligonucleotide
  Sense strand starting at position 2631 of SEQ ID NO: 1883363
uacuguggagcagauauua

SEQ ID NO: 2188705 - RNA, 19 nt, Artificial Sequence
  Description of Artificial Sequence: Synthetic oligonucleotide
  Antisense strand to SEQ ID NO: 2188704
uaauaucugcuccacagua

SEQ ID NO: 2188706 - RNA, 19 nt, Artificial Sequence
  Description of Artificial Sequence: Synthetic oligonucleotide
  Sense strand starting at position 2670 of SEQ ID NO: 1883363
gcuuuaugugcuuuacgac

SEQ ID NO: 2188707 - RNA, 19 nt, Artificial Sequence
  Description of Artificial Sequence: Synthetic oligonucleotide
  Antisense strand to SEQ ID NO: 2188706
gucguaaagcacauaaagc

SEQ ID NO: 2188708 - RNA, 19 nt, Artificial Sequence
  Description of Artificial Sequence: Synthetic oligonucleotide
  Sense strand starting at position 2800 of SEQ ID NO: 1883363
cccaaagagcugugacauc

SEQ ID NO: 2188709 - RNA, 19 nt, Artificial Sequence
  Description of Artificial Sequence: Synthetic oligonucleotide
  Antisense strand to SEQ ID NO: 2188708
gaugucacagcucuuuggg

SEQ ID NO: 2188710 - RNA, 19 nt, Artificial Sequence
  Description of Artificial Sequence: Synthetic oligonucleotide
  Sense strand starting at position 3057 of SEQ ID NO: 1883363
augcuuuaccugggauauu

SEQ ID NO: 2188711 - RNA, 19 nt, Artificial Sequence
  Description of Artificial Sequence: Synthetic oligonucleotide
  Antisense strand to SEQ ID NO: 2188710
aauaucccagguaaagcau

SEQ ID NO: 2188712 - RNA, 19 nt, Artificial Sequence
  Description of Artificial Sequence: Synthetic oligonucleotide
  Sense strand starting at position 3305 of SEQ ID NO: 1883363
gaaagugacuuggcuuaca

SEQ ID NO: 2188713 - RNA, 19 nt, Artificial Sequence
  Description of Artificial Sequence: Synthetic oligonucleotide
  Antisense strand to SEQ ID NO: 2188712
uguaagccaagucacuuuc

SEQ ID NO: 2188714 - RNA, 19 nt, Artificial Sequence
  Description of Artificial Sequence: Synthetic oligonucleotide
  Sense strand starting at position 3314 of SEQ ID NO: 1883363
uuggcuuacagugaugaug

SEQ ID NO: 2188715 - RNA, 19 nt, Artificial Sequence
  Description of Artificial Sequence: Synthetic oligonucleotide
  Antisense strand to SEQ ID NO: 2188714
caucaucacuguaagccaa

SEQ ID NO: 2188716 - RNA, 19 nt, Artificial Sequence
  Description of Artificial Sequence: Synthetic oligonucleotide
  Sense strand starting at position 3325 of SEQ ID NO: 1883363
ugaugaugauguuccauca

SEQ ID NO: 2188717 - RNA, 19 nt, Artificial Sequence
  Description of Artificial Sequence: Synthetic oligonucleotide
  Antisense strand to SEQ ID NO: 2188716
ugauggaacaucaucauca

SEQ ID NO: 2188718 - RNA, 19 nt, Artificial Sequence
  Description of Artificial Sequence: Synthetic oligonucleotide
  Sense strand starting at position 3335 of SEQ ID NO: 1883363
guuccaucaguuuaugaaa

SEQ ID NO: 2188719 - RNA, 19 nt, Artificial Sequence
  Description of Artificial Sequence: Synthetic oligonucleotide
  Antisense strand to SEQ ID NO: 2188718
uuucauaaacugauggaac

SEQ ID NO: 2188720 - RNA, 19 nt, Artificial Sequence
  Description of Artificial Sequence: Synthetic oligonucleotide
  Sense strand starting at position 3469 of SEQ ID NO: 1883363
auaaaugagaugugguuga

SEQ ID NO: 2188721 - RNA, 19 nt, Artificial Sequence
  Description of Artificial Sequence: Synthetic oligonucleotide
  Antisense strand to SEQ ID NO: 2188720
ucaaccacaucucauuuau

SEQ ID NO: 2188722 - RNA, 19 nt, Artificial Sequence
  Description of Artificial Sequence: Synthetic oligonucleotide
  Sense strand starting at position 3682 of SEQ ID NO: 1883363
gaaaguuuauaguugacaa

SEQ ID NO: 2188723 - RNA, 19 nt, Artificial Sequence
  Description of Artificial Sequence: Synthetic oligonucleotide
  Antisense strand to SEQ ID NO: 2188722
uugucaacuauaaacuuuc

SEQ ID NO: 2188724 - RNA, 19 nt, Artificial Sequence
  Description of Artificial Sequence: Synthetic oligonucleotide
  Sense strand starting at position 3934 of SEQ ID NO: 1883363
agaaacaugugcccaggua

SEQ ID NO: 2188725 - RNA, 19 nt, Artificial Sequence
  Description of Artificial Sequence: Synthetic oligonucleotide
  Antisense strand to SEQ ID NO: 2188724
uaccugggcacauguuucu

SEQ ID NO: 2188726 - RNA, 19 nt, Artificial Sequence
  Description of Artificial Sequence: Synthetic oligonucleotide
  Sense strand starting at position 3935 of SEQ ID NO: 1883363
gaaacaugugcccagguaa

SEQ ID NO: 2188727 - RNA, 19 nt, Artificial Sequence
  Description of Artificial Sequence: Synthetic oligonucleotide
  Antisense strand to SEQ ID NO: 2188726
uuaccugggcacauguuuc

SEQ ID NO: 2188728 - RNA, 19 nt, Artificial Sequence
  Description of Artificial Sequence: Synthetic oligonucleotide
  Sense strand starting at position 3953 of SEQ ID NO: 1883363
auuuguuggugcccaagua

SEQ ID NO: 2188729 - RNA, 19 nt, Artificial Sequence
  Description of Artificial Sequence: Synthetic oligonucleotide
  Antisense strand to SEQ ID NO: 2188728
uacuugggcaccaacaaau

SEQ ID NO: 2188730 - RNA, 19 nt, Artificial Sequence
  Description of Artificial Sequence: Synthetic oligonucleotide
  Sense strand starting at position 264 of SEQ ID NO: 1883364
ugggucuuucucgggaaau

SEQ ID NO: 2188731 - RNA, 19 nt, Artificial Sequence
  Description of Artificial Sequence: Synthetic oligonucleotide
  Antisense strand to SEQ ID NO: 2188730
auuucccgagaaagaccca

SEQ ID NO: 2188732 - RNA, 19 nt, Artificial Sequence
  Description of Artificial Sequence: Synthetic oligonucleotide
  Sense strand starting at position 266 of SEQ ID NO: 1883364
ggucuuucucgggaaaucu

SEQ ID NO: 2188733 - RNA, 19 nt, Artificial Sequence
  Description of Artificial Sequence: Synthetic oligonucleotide
  Antisense strand to SEQ ID NO: 2188732
agauuucccgagaaagacc

SEQ ID NO: 2188734 - RNA, 19 nt, Artificial Sequence
  Description of Artificial Sequence: Synthetic oligonucleotide
  Sense strand starting at position 304 of SEQ ID NO: 1883364
ugaguaggccauuaagcuu

SEQ ID NO: 2188735 - RNA, 19 nt, Artificial Sequence
  Description of Artificial Sequence: Synthetic oligonucleotide
  Antisense strand to SEQ ID NO: 2188734
aagcuuaauggccuacuca

SEQ ID NO: 2188736 - RNA, 19 nt, Artificial Sequence
  Description of Artificial Sequence: Synthetic oligonucleotide
  Sense strand starting at position 546 of SEQ ID NO: 1883364
ugacuuugaacguaaggca

SEQ ID NO: 2188737 - RNA, 19 nt, Artificial Sequence
  Description of Artificial Sequence: Synthetic oligonucleotide
  Antisense strand to SEQ ID NO: 2188736
ugccuuacguucaaaguca

SEQ ID NO: 2188738 - RNA, 19 nt, Artificial Sequence
  Description of Artificial Sequence: Synthetic oligonucleotide
  Sense strand starting at position 592 of SEQ ID NO: 1883364
uaaccaguccuguggaaug

SEQ ID NO: 2188739 - RNA, 19 nt, Artificial Sequence
  Description of Artificial Sequence: Synthetic oligonucleotide
  Antisense strand to SEQ ID NO: 2188738
cauuccacaggacugguua

SEQ ID NO: 2188740 - RNA, 19 nt, Artificial Sequence
  Description of Artificial Sequence: Synthetic oligonucleotide
  Sense strand starting at position 603 of SEQ ID NO: 1883364
guggaauggcuguaggaau

SEQ ID NO: 2188741 - RNA, 19 nt, Artificial Sequence
  Description of Artificial Sequence: Synthetic oligonucleotide
  Antisense strand to SEQ ID NO: 2188740
auuccuacagccauuccac

SEQ ID NO: 2188742 - RNA, 19 nt, Artificial Sequence
  Description of Artificial Sequence: Synthetic oligonucleotide
  Sense strand starting at position 693 of SEQ ID NO: 1883364
agaugauaguagcaaugaa

SEQ ID NO: 2188743 - RNA, 19 nt, Artificial Sequence
  Description of Artificial Sequence: Synthetic oligonucleotide
  Antisense strand to SEQ ID NO: 2188742
uucauugcuacuaucaucu

SEQ ID NO: 2188744 - RNA, 19 nt, Artificial Sequence
  Description of Artificial Sequence: Synthetic oligonucleotide
  Sense strand starting at position 748 of SEQ ID NO: 1883364
agcgccuucgucaggugaa

SEQ ID NO: 2188745 - RNA, 19 nt, Artificial Sequence
  Description of Artificial Sequence: Synthetic oligonucleotide
  Antisense strand to SEQ ID NO: 2188744
uucaccugacgaaggcgcu

SEQ ID NO: 2188746 - RNA, 19 nt, Artificial Sequence
  Description of Artificial Sequence: Synthetic oligonucleotide
  Sense strand starting at position 814 of SEQ ID NO: 1883364
caggcagcccagugucaau

SEQ ID NO: 2188747 - RNA, 19 nt, Artificial Sequence
  Description of Artificial Sequence: Synthetic oligonucleotide
  Antisense strand to SEQ ID NO: 2188746
auugacacugggcugccug

SEQ ID NO: 2188748 - RNA, 19 nt, Artificial Sequence
  Description of Artificial Sequence: Synthetic oligonucleotide
  Sense strand starting at position 882 of SEQ ID NO: 1883364
ugccgaagagcuuaagaau

SEQ ID NO: 2188749 - RNA, 19 nt, Artificial Sequence
  Description of Artificial Sequence: Synthetic oligonucleotide
  Antisense strand to SEQ ID NO: 2188748
auucuuaagcucuucggca

SEQ ID NO: 2188750 - RNA, 19 nt, Artificial Sequence
  Description of Artificial Sequence: Synthetic oligonucleotide
  Sense strand starting at position 891 of SEQ ID NO: 1883364
gcuuaagaaugagucugaa

SEQ ID NO: 2188751 - RNA, 19 nt, Artificial Sequence
  Description of Artificial Sequence: Synthetic oligonucleotide
  Antisense strand to SEQ ID NO: 2188750
uucagacucauucuuaagc

SEQ ID NO: 2188752 - RNA, 19 nt, Artificial Sequence
  Description of Artificial Sequence: Synthetic oligonucleotide
  Sense strand starting at position 968 of SEQ ID NO: 1883364
uggaguggugagggcaaau

SEQ ID NO: 2188753 - RNA, 19 nt, Artificial Sequence
  Description of Artificial Sequence: Synthetic oligonucleotide
  Antisense strand to SEQ ID NO: 2188752
auuugcccucaccacucca

SEQ ID NO: 2188754 - RNA, 19 nt, Artificial Sequence
  Description of Artificial Sequence: Synthetic oligonucleotide
  Sense strand starting at position 1078 of SEQ ID NO: 1883364
acgcuagccacauggauua

SEQ ID NO: 2188755 - RNA, 19 nt, Artificial Sequence
  Description of Artificial Sequence: Synthetic oligonucleotide
  Antisense strand to SEQ ID NO: 2188754
uaauccauguggcuagcgu

SEQ ID NO: 2188756 - RNA, 19 nt, Artificial Sequence
  Description of Artificial Sequence: Synthetic oligonucleotide
  Sense strand starting at position 1176 of SEQ ID NO: 1883364
gcaagaaagugguaaagga

SEQ ID NO: 2188757 - RNA, 19 nt, Artificial Sequence
  Description of Artificial Sequence: Synthetic oligonucleotide
  Antisense strand to SEQ ID NO: 2188756
uccuuuaccacuuucuugc

SEQ ID NO: 2188758 - RNA, 19 nt, Artificial Sequence
  Description of Artificial Sequence: Synthetic oligonucleotide
  Sense strand starting at position 1283 of SEQ ID NO: 1883364
uagggaugccaguaaagug

SEQ ID NO: 2188759 - RNA, 19 nt, Artificial Sequence
  Description of Artificial Sequence: Synthetic oligonucleotide
  Antisense strand to SEQ ID NO: 2188758
cacuuuacuggcaucccua

SEQ ID NO: 2188760 - RNA, 19 nt, Artificial Sequence
  Description of Artificial Sequence: Synthetic oligonucleotide
  Sense strand starting at position 1436 of SEQ ID NO: 1883364
ugggauuggcagcaaguuu

SEQ ID NO: 2188761 - RNA, 19 nt, Artificial Sequence
  Description of Artificial Sequence: Synthetic oligonucleotide
  Antisense strand to SEQ ID NO: 2188760
aaacuugcugccaauccca

SEQ ID NO: 2188762 - RNA, 19 nt, Artificial Sequence
  Description of Artificial Sequence: Synthetic oligonucleotide
  Sense strand starting at position 1800 of SEQ ID NO: 1883364
accaaaggguuacaugaaa

SEQ ID NO: 2188763 - RNA, 19 nt, Artificial Sequence
  Description of Artificial Sequence: Synthetic oligonucleotide
  Antisense strand to SEQ ID NO: 2188762
uuucauguaacccuuuggu

SEQ ID NO: 2188764 - RNA, 19 nt, Artificial Sequence
  Description of Artificial Sequence: Synthetic oligonucleotide
  Sense strand starting at position 1811 of SEQ ID NO: 1883364
acaugaaagucugcaaagu

SEQ ID NO: 2188765 - RNA, 19 nt, Artificial Sequence
  Description of Artificial Sequence: Synthetic oligonucleotide
  Antisense strand to SEQ ID NO: 2188764
acuuugcagacuuucaugu

SEQ ID NO: 2188766 - RNA, 19 nt, Artificial Sequence
  Description of Artificial Sequence: Synthetic oligonucleotide
  Sense strand starting at position 1840 of SEQ ID NO: 1883364
acacucgggucuuagaaca

SEQ ID NO: 2188767 - RNA, 19 nt, Artificial Sequence
  Description of Artificial Sequence: Synthetic oligonucleotide
  Antisense strand to SEQ ID NO: 2188766
uguucuaagacccgagugu

SEQ ID NO: 2188768 - RNA, 19 nt, Artificial Sequence
  Description of Artificial Sequence: Synthetic oligonucleotide
  Sense strand starting at position 1864 of SEQ ID NO: 1883364
uuuauaugccugugucaga

SEQ ID NO: 2188769 - RNA, 19 nt, Artificial Sequence
  Description of Artificial Sequence: Synthetic oligonucleotide
  Antisense strand to SEQ ID NO: 2188768
ucugacacaggcauauaaa

SEQ ID NO: 2188770 - RNA, 19 nt, Artificial Sequence
  Description of Artificial Sequence: Synthetic oligonucleotide
  Sense strand starting at position 1871 of SEQ ID NO: 1883364
gccugugucagaggauuga

SEQ ID NO: 2188771 - RNA, 19 nt, Artificial Sequence
  Description of Artificial Sequence: Synthetic oligonucleotide
  Antisense strand to SEQ ID NO: 2188770
ucaauccucugacacaggc

SEQ ID NO: 2188772 - RNA, 19 nt, Artificial Sequence
  Description of Artificial Sequence: Synthetic oligonucleotide
  Sense strand starting at position 1877 of SEQ ID NO: 1883364
gucagaggauugagugguu

SEQ ID NO: 2188773 - RNA, 19 nt, Artificial Sequence
  Description of Artificial Sequence: Synthetic oligonucleotide
  Antisense strand to SEQ ID NO: 2188772
aaccacucaauccucugac

SEQ ID NO: 2188774 - RNA, 19 nt, Artificial Sequence
  Description of Artificial Sequence: Synthetic oligonucleotide
  Sense strand starting at position 1969 of SEQ ID NO: 1883364
guaguuacuucugcaucaa

SEQ ID NO: 2188775 - RNA, 19 nt, Artificial Sequence
  Description of Artificial Sequence: Synthetic oligonucleotide
  Antisense strand to SEQ ID NO: 2188774
uugaugcagaaguaacuac

SEQ ID NO: 2188776 - RNA, 19 nt, Artificial Sequence
  Description of Artificial Sequence: Synthetic oligonucleotide
  Sense strand starting at position 1981 of SEQ ID NO: 1883364
gcaucaaccuaagaauagu

SEQ ID NO: 2188777 - RNA, 19 nt, Artificial Sequence
  Description of Artificial Sequence: Synthetic oligonucleotide
  Antisense strand to SEQ ID NO: 2188776
acuauucuuagguugaugc

SEQ ID NO: 2188778 - RNA, 19 nt, Artificial Sequence
  Description of Artificial Sequence: Synthetic oligonucleotide
  Sense strand starting at position 2088 of SEQ ID NO: 1883364
acgucaugucucgcuguua

SEQ ID NO: 2188779 - RNA, 19 nt, Artificial Sequence
  Description of Artificial Sequence: Synthetic oligonucleotide
  Antisense strand to SEQ ID NO: 2188778
uaacagcgagacaugacgu

SEQ ID NO: 2188780 - RNA, 19 nt, Artificial Sequence
  Description of Artificial Sequence: Synthetic oligonucleotide
  Sense strand starting at position 2152 of SEQ ID NO: 1883364
uccaaaugugaauggcaga

SEQ ID NO: 2188781 - RNA, 19 nt, Artificial Sequence
  Description of Artificial Sequence: Synthetic oligonucleotide
  Antisense strand to SEQ ID NO: 2188780
ucugccauucacauuugga

SEQ ID NO: 2188782 - RNA, 19 nt, Artificial Sequence
  Description of Artificial Sequence: Synthetic oligonucleotide
  Sense strand starting at position 2221 of SEQ ID NO: 1883364
gagacaaugcagggaguau

SEQ ID NO: 2188783 - RNA, 19 nt, Artificial Sequence
  Description of Artificial Sequence: Synthetic oligonucleotide
  Antisense strand to SEQ ID NO: 2188782
auacucccugcauugucuc

SEQ ID NO: 2188784 - RNA, 19 nt, Artificial Sequence
  Description of Artificial Sequence: Synthetic oligonucleotide
  Sense strand starting at position 2337 of SEQ ID NO: 1883364
ggguucucauucuugucau

SEQ ID NO: 2188785 - RNA, 19 nt, Artificial Sequence
  Description of Artificial Sequence: Synthetic oligonucleotide
  Antisense strand to SEQ ID NO: 2188784
augacaagaaugagaaccc

SEQ ID NO: 2188786 - RNA, 19 nt, Artificial Sequence
  Description of Artificial Sequence: Synthetic oligonucleotide
  Sense strand starting at position 2349 of SEQ ID NO: 1883364
uugucauuauggccucaau

SEQ ID NO: 2188787 - RNA, 19 nt, Artificial Sequence
  Description of Artificial Sequence: Synthetic oligonucleotide
  Antisense strand to SEQ ID NO: 2188786
auugaggccauaaugacaa

SEQ ID NO: 2188788 - RNA, 19 nt, Artificial Sequence
  Description of Artificial Sequence: Synthetic oligonucleotide
  Sense strand starting at position 2352 of SEQ ID NO: 1883364
ucauuauggccucaauaug

SEQ ID NO: 2188789 - RNA, 19 nt, Artificial Sequence
  Description of Artificial Sequence: Synthetic oligonucleotide
  Antisense strand to SEQ ID NO: 2188788
cauauugaggccauaauga

SEQ ID NO: 2188790 - RNA, 19 nt, Artificial Sequence
  Description of Artificial Sequence: Synthetic oligonucleotide
  Sense strand starting at position 2377 of SEQ ID NO: 1883364
caguguuuccaucaguaug

SEQ ID NO: 2188791 - RNA, 19 nt, Artificial Sequence
  Description of Artificial Sequence: Synthetic oligonucleotide
  Antisense strand to SEQ ID NO: 2188790
cauacugauggaaacacug

SEQ ID NO: 2188792 - RNA, 19 nt, Artificial Sequence
  Description of Artificial Sequence: Synthetic oligonucleotide
  Sense strand starting at position 2379 of SEQ ID NO: 1883364
guguuuccaucaguaugca

SEQ ID NO: 2188793 - RNA, 19 nt, Artificial Sequence
  Description of Artificial Sequence: Synthetic oligonucleotide
  Antisense strand to SEQ ID NO: 2188792
ugcauacugauggaaacac

SEQ ID NO: 2188794 - RNA, 19 nt, Artificial Sequence
  Description of Artificial Sequence: Synthetic oligonucleotide
  Sense strand starting at position 2431 of SEQ ID NO: 1883364
agcuucccugaauggauua

SEQ ID NO: 2188795 - RNA, 19 nt, Artificial Sequence
  Description of Artificial Sequence: Synthetic oligonucleotide
  Antisense strand to SEQ ID NO: 2188794
uaauccauucagggaagcu

SEQ ID NO: 2188796 - RNA, 19 nt, Artificial Sequence
  Description of Artificial Sequence: Synthetic oligonucleotide
  Sense strand starting at position 2479 of SEQ ID NO: 1883364
augcuagcucucuguacau

SEQ ID NO: 2188797 - RNA, 19 nt, Artificial Sequence
  Description of Artificial Sequence: Synthetic oligonucleotide
  Antisense strand to SEQ ID NO: 2188796
auguacagagagcuagcau

SEQ ID NO: 2188798 - RNA, 19 nt, Artificial Sequence
  Description of Artificial Sequence: Synthetic oligonucleotide
  Sense strand starting at position 2481 of SEQ ID NO: 1883364
gcuagcucucuguacauaa

SEQ ID NO: 2188799 - RNA, 19 nt, Artificial Sequence
  Description of Artificial Sequence: Synthetic oligonucleotide
  Antisense strand to SEQ ID NO: 2188798
uuauguacagagagcuagc

SEQ ID NO: 2188800 - RNA, 19 nt, Artificial Sequence
  Description of Artificial Sequence: Synthetic oligonucleotide
  Sense strand starting at position 2725 of SEQ ID NO: 1883364
augagaagaucagcugagu

SEQ ID NO: 2188801 - RNA, 19 nt, Artificial Sequence
  Description of Artificial Sequence: Synthetic oligonucleotide
  Antisense strand to SEQ ID NO: 2188800
acucagcugaucuucucau

SEQ ID NO: 2188802 - RNA, 19 nt, Artificial Sequence
  Description of Artificial Sequence: Synthetic oligonucleotide
  Sense strand starting at position 3610 of SEQ ID NO: 1883364
aggguauuauagcaagaga

SEQ ID NO: 2188803 - RNA, 19 nt, Artificial Sequence
  Description of Artificial Sequence: Synthetic oligonucleotide
  Antisense strand to SEQ ID NO: 2188802
ucucuugcuauaauacccu

SEQ ID NO: 2188804 - RNA, 19 nt, Artificial Sequence
  Description of Artificial Sequence: Synthetic oligonucleotide
  Sense strand starting at position 3693 of SEQ ID NO: 1883364
gaacaugaguccucagguu

SEQ ID NO: 2188805 - RNA, 19 nt, Artificial Sequence
  Description of Artificial Sequence: Synthetic oligonucleotide
  Antisense strand to SEQ ID NO: 2188804
aaccugaggacucauguuc

SEQ ID NO: 2188806 - RNA, 19 nt, Artificial Sequence
  Description of Artificial Sequence: Synthetic oligonucleotide
  Sense strand starting at position 3793 of SEQ ID NO: 1883364
guagacaucuaauacaaag

SEQ ID NO: 2188807 - RNA, 19 nt, Artificial Sequence
  Description of Artificial Sequence: Synthetic oligonucleotide
  Antisense strand to SEQ ID NO: 2188806
cuuuguauuagaugucuac

SEQ ID NO: 2188808 - RNA, 19 nt, Artificial Sequence
  Description of Artificial Sequence: Synthetic oligonucleotide
  Sense strand starting at position 3913 of SEQ ID NO: 1883364
gcuaucaaucagcaugcaa

SEQ ID NO: 2188809 - RNA, 19 nt, Artificial Sequence
  Description of Artificial Sequence: Synthetic oligonucleotide
  Antisense strand to SEQ ID NO: 2188808
uugcaugcugauugauagc

SEQ ID NO: 2188810 - RNA, 19 nt, Artificial Sequence
  Description of Artificial Sequence: Synthetic oligonucleotide
  Sense strand starting at position 50 of SEQ ID NO: 1883365
gcuguauuggaucaaaccu

SEQ ID NO: 2188811 - RNA, 19 nt, Artificial Sequence
  Description of Artificial Sequence: Synthetic oligonucleotide
  Antisense strand to SEQ ID NO: 2188810
agguuugauccaauacagc

SEQ ID NO: 2188812 - RNA, 19 nt, Artificial Sequence
  Description of Artificial Sequence: Synthetic oligonucleotide
  Sense strand starting at position 124 of SEQ ID NO: 1883365
aucguuugaagauaucuga

SEQ ID NO: 2188813 - RNA, 19 nt, Artificial Sequence
  Description of Artificial Sequence: Synthetic oligonucleotide
  Antisense strand to SEQ ID NO: 2188812
ucagauaucuucaaacgau

SEQ ID NO: 2188814 - RNA, 19 nt, Artificial Sequence
  Description of Artificial Sequence: Synthetic oligonucleotide
  Sense strand starting at position 155 of SEQ ID NO: 1883365
gcugccaagauuugugaau

SEQ ID NO: 2188815 - RNA, 19 nt, Artificial Sequence
  Description of Artificial Sequence: Synthetic oligonucleotide
  Antisense strand to SEQ ID NO: 2188814
auucacaaaucuuggcagc

SEQ ID NO: 2188816 - RNA, 19 nt, Artificial Sequence
  Description of Artificial Sequence: Synthetic oligonucleotide
  Sense strand starting at position 289 of SEQ ID NO: 1883365
uggcuuaaucaugggacua

SEQ ID NO: 2188817 - RNA, 19 nt, Artificial Sequence
  Description of Artificial Sequence: Synthetic oligonucleotide
  Antisense strand to SEQ ID NO: 2188816
uagucccaugauuaagcca

SEQ ID NO: 2188818 - RNA, 19 nt, Artificial Sequence
  Description of Artificial Sequence: Synthetic oligonucleotide
  Sense strand starting at position 290 of SEQ ID NO: 1883365
ggcuuaaucaugggacuag

SEQ ID NO: 2188819 - RNA, 19 nt, Artificial Sequence
  Description of Artificial Sequence: Synthetic oligonucleotide
  Antisense strand to SEQ ID NO: 2188818
cuagucccaugauuaagcc

SEQ ID NO: 2188820 - RNA, 19 nt, Artificial Sequence
  Description of Artificial Sequence: Synthetic oligonucleotide
  Sense strand starting at position 646 of SEQ ID NO: 1883365
uuggcaugcaucgugucau

SEQ ID NO: 2188821 - RNA, 19 nt, Artificial Sequence
  Description of Artificial Sequence: Synthetic oligonucleotide
  Antisense strand to SEQ ID NO: 2188820
augacacgaugcaugccaa

SEQ ID NO: 2188822 - RNA, 19 nt, Artificial Sequence
  Description of Artificial Sequence: Synthetic oligonucleotide
  Sense strand starting at position 674 of SEQ ID NO: 1883365
gggauuuguuucuugcuac

SEQ ID NO: 2188823 - RNA, 19 nt, Artificial Sequence
  Description of Artificial Sequence: Synthetic oligonucleotide
  Antisense strand to SEQ ID NO: 2188822
guagcaagaaacaaauccc

SEQ ID NO: 2188824 - RNA, 19 nt, Artificial Sequence
  Description of Artificial Sequence: Synthetic oligonucleotide
  Sense strand starting at position 677 of SEQ ID NO: 1883365
auuuguuucuugcuacacu

SEQ ID NO: 2188825 - RNA, 19 nt, Artificial Sequence
  Description of Artificial Sequence: Synthetic oligonucleotide
  Antisense strand to SEQ ID NO: 2188824
aguguagcaagaaacaaau

SEQ ID NO: 2188826 - RNA, 19 nt, Artificial Sequence
  Description of Artificial Sequence: Synthetic oligonucleotide
  Sense strand starting at position 710 of SEQ ID NO: 1883365
accuuccuugaguagaauu

SEQ ID NO: 2188827 - RNA, 19 nt, Artificial Sequence
  Description of Artificial Sequence: Synthetic oligonucleotide
  Antisense strand to SEQ ID NO: 2188826
aauucuacucaaggaaggu

SEQ ID NO: 2188828 - RNA, 19 nt, Artificial Sequence
  Description of Artificial Sequence: Synthetic oligonucleotide
  Sense strand starting at position 1013 of SEQ ID NO: 1883365
cuaaguugaaguugaagau

SEQ ID NO: 2188829 - RNA, 19 nt, Artificial Sequence
  Description of Artificial Sequence: Synthetic oligonucleotide
  Antisense strand to SEQ ID NO: 2188828
aucuucaacuucaacuuag

SEQ ID NO: 2188830 - RNA, 19 nt, Artificial Sequence
  Description of Artificial Sequence: Synthetic oligonucleotide
  Sense strand starting at position 1193 of SEQ ID NO: 1883365
acacuaaaccuguguaauc

SEQ ID NO: 2188831 - RNA, 19 nt, Artificial Sequence
  Description of Artificial Sequence: Synthetic oligonucleotide
  Antisense strand to SEQ ID NO: 2188830
gauuacacagguuuagugu

SEQ ID NO: 2188832 - RNA, 19 nt, Artificial Sequence
  Description of Artificial Sequence: Synthetic oligonucleotide
  Sense strand starting at position 1204 of SEQ ID NO: 1883365
guguaaucccaauacagua

SEQ ID NO: 2188833 - RNA, 19 nt, Artificial Sequence
  Description of Artificial Sequence: Synthetic oligonucleotide
  Antisense strand to SEQ ID NO: 2188832
uacuguauugggauuacac

SEQ ID NO: 2188834 - RNA, 19 nt, Artificial Sequence
  Description of Artificial Sequence: Synthetic oligonucleotide
  Sense strand starting at position 1285 of SEQ ID NO: 1883365
guaaauauugauggugaaa

SEQ ID NO: 2188835 - RNA, 19 nt, Artificial Sequence
  Description of Artificial Sequence: Synthetic oligonucleotide
  Antisense strand to SEQ ID NO: 2188834
uuucaccaucaauauuuac

SEQ ID NO: 2188836 - RNA, 19 nt, Artificial Sequence
  Description of Artificial Sequence: Synthetic oligonucleotide
  Sense strand starting at position 1397 of SEQ ID NO: 1883365
gaaagugaauguuuaggua

SEQ ID NO: 2188837 - RNA, 19 nt, Artificial Sequence
  Description of Artificial Sequence: Synthetic oligonucleotide
  Antisense strand to SEQ ID NO: 2188836
uaccuaaacauucacuuuc

SEQ ID NO: 2188838 - RNA, 19 nt, Artificial Sequence
  Description of Artificial Sequence: Synthetic oligonucleotide
  Sense strand starting at position 1422 of SEQ ID NO: 1883365
cuacacuuugaaugauaug

SEQ ID NO: 2188839 - RNA, 19 nt, Artificial Sequence
  Description of Artificial Sequence: Synthetic oligonucleotide
  Antisense strand to SEQ ID NO: 2188838
cauaucauucaaaguguag

SEQ ID NO: 2188840 - RNA, 19 nt, Artificial Sequence
  Description of Artificial Sequence: Synthetic oligonucleotide
  Sense strand starting at position 1484 of SEQ ID NO: 1883365
ugucucauccuugaucauc

SEQ ID NO: 2188841 - RNA, 19 nt, Artificial Sequence
  Description of Artificial Sequence: Synthetic oligonucleotide
  Antisense strand to SEQ ID NO: 2188840
gaugaucaaggaugagaca

SEQ ID NO: 2188842 - RNA, 19 nt, Artificial Sequence
  Description of Artificial Sequence: Synthetic oligonucleotide
  Sense strand starting at position 1493 of SEQ ID NO: 1883365
cuugaucaucagcaaguuu

SEQ ID NO: 2188843 - RNA, 19 nt, Artificial Sequence
  Description of Artificial Sequence: Synthetic oligonucleotide
  Antisense strand to SEQ ID NO: 2188842
aaacuugcugaugaucaag

SEQ ID NO: 2188844 - RNA, 19 nt, Artificial Sequence
  Description of Artificial Sequence: Synthetic oligonucleotide
  Sense strand starting at position 1509 of SEQ ID NO: 1883365
uuuagaguuccggagauga

SEQ ID NO: 2188845 - RNA, 19 nt, Artificial Sequence
  Description of Artificial Sequence: Synthetic oligonucleotide
  Antisense strand to SEQ ID NO: 2188844
ucaucuccggaacucuaaa

SEQ ID NO: 2188846 - RNA, 19 nt, Artificial Sequence
  Description of Artificial Sequence: Synthetic oligonucleotide
  Sense strand starting at position 1618 of SEQ ID NO: 1883365
auuuguguuguggguaauu

SEQ ID NO: 2188847 - RNA, 19 nt, Artificial Sequence
  Description of Artificial Sequence: Synthetic oligonucleotide
  Antisense strand to SEQ ID NO: 2188846
aauuacccacaacacaaau

SEQ ID NO: 2188848 - RNA, 19 nt, Artificial Sequence
  Description of Artificial Sequence: Synthetic oligonucleotide
  Sense strand starting at position 1620 of SEQ ID NO: 1883365
uuguguuguggguaauuuc

SEQ ID NO: 2188849 - RNA, 19 nt, Artificial Sequence
  Description of Artificial Sequence: Synthetic oligonucleotide
  Antisense strand to SEQ ID NO: 2188848
gaaauuacccacaacacaa

SEQ ID NO: 2188850 - RNA, 19 nt, Artificial Sequence
  Description of Artificial Sequence: Synthetic oligonucleotide
  Sense strand starting at position 1623 of SEQ ID NO: 1883365
uguuguggguaauuucuua

SEQ ID NO: 2188851 - RNA, 19 nt, Artificial Sequence
  Description of Artificial Sequence: Synthetic oligonucleotide
  Antisense strand to SEQ ID NO: 2188850
uaagaaauuacccacaaca

SEQ ID NO: 2188852 - RNA, 19 nt, Artificial Sequence
  Description of Artificial Sequence: Synthetic oligonucleotide
  Sense strand starting at position 1789 of SEQ ID NO: 1883365
ugauuauaagauggcaguu

SEQ ID NO: 2188853 - RNA, 19 nt, Artificial Sequence
  Description of Artificial Sequence: Synthetic oligonucleotide
  Antisense strand to SEQ ID NO: 2188852
aacugccaucuuauaauca

SEQ ID NO: 2188854 - RNA, 19 nt, Artificial Sequence
  Description of Artificial Sequence: Synthetic oligonucleotide
  Sense strand starting at position 1824 of SEQ ID NO: 1883365
augcuacaccacugaaagu

SEQ ID NO: 2188855 - RNA, 19 nt, Artificial Sequence
  Description of Artificial Sequence: Synthetic oligonucleotide
  Antisense strand to SEQ ID NO: 2188854
acuuucagugguguagcau

SEQ ID NO: 2188856 - RNA, 19 nt, Artificial Sequence
  Description of Artificial Sequence: Synthetic oligonucleotide
  Sense strand starting at position 1847 of SEQ ID NO: 1883365
uugccagagucaccaauaa

SEQ ID NO: 2188857 - RNA, 19 nt, Artificial Sequence
  Description of Artificial Sequence: Synthetic oligonucleotide
  Antisense strand to SEQ ID NO: 2188856
uuauuggugacucuggcaa

SEQ ID NO: 2188858 - RNA, 19 nt, Artificial Sequence
  Description of Artificial Sequence: Synthetic oligonucleotide
  Sense strand starting at position 1902 of SEQ ID NO: 1883365
gcagcaaauuuauuagguu

SEQ ID NO: 2188859 - RNA, 19 nt, Artificial Sequence
  Description of Artificial Sequence: Synthetic oligonucleotide
  Antisense strand to SEQ ID NO: 2188858
aaccuaauaaauuugcugc

SEQ ID NO: 2188860 - RNA, 19 nt, Artificial Sequence
  Description of Artificial Sequence: Synthetic oligonucleotide
  Sense strand starting at position 2137 of SEQ ID NO: 1883365
uccagauucuagccuagau

SEQ ID NO: 2188861 - RNA, 19 nt, Artificial Sequence
  Description of Artificial Sequence: Synthetic oligonucleotide
  Antisense strand to SEQ ID NO: 2188860
aucuaggcuagaaucugga

SEQ ID NO: 2188862 - RNA, 19 nt, Artificial Sequence
  Description of Artificial Sequence: Synthetic oligonucleotide
  Sense strand starting at position 2296 of SEQ ID NO: 1883365
auuuguuagucaccuagua

SEQ ID NO: 2188863 - RNA, 19 nt, Artificial Sequence
  Description of Artificial Sequence: Synthetic oligonucleotide
  Antisense strand to SEQ ID NO: 2188862
uacuaggugacuaacaaau

SEQ ID NO: 2188864 - RNA, 19 nt, Artificial Sequence
  Description of Artificial Sequence: Synthetic oligonucleotide
  Sense strand starting at position 2298 of SEQ ID NO: 1883365
uuguuagucaccuaguaga

SEQ ID NO: 2188865 - RNA, 19 nt, Artificial Sequence
  Description of Artificial Sequence: Synthetic oligonucleotide
  Antisense strand to SEQ ID NO: 2188864
ucuacuaggugacuaacaa

SEQ ID NO: 2188866 - RNA, 19 nt, Artificial Sequence
  Description of Artificial Sequence: Synthetic oligonucleotide
  Sense strand starting at position 2903 of SEQ ID NO: 1883365
augguuugugaauguaaga

SEQ ID NO: 2188867 - RNA, 19 nt, Artificial Sequence
  Description of Artificial Sequence: Synthetic oligonucleotide
  Antisense strand to SEQ ID NO: 2188866
ucuuacauucacaaaccau

SEQ ID NO: 2188868 - RNA, 19 nt, Artificial Sequence
  Description of Artificial Sequence: Synthetic oligonucleotide
  Sense strand starting at position 2998 of SEQ ID NO: 1883365
agugauaucucaguuugac

SEQ ID NO: 2188869 - RNA, 19 nt, Artificial Sequence
  Description of Artificial Sequence: Synthetic oligonucleotide
  Antisense strand to SEQ ID NO: 2188868
gucaaacugagauaucacu

SEQ ID NO: 2188870 - RNA, 19 nt, Artificial Sequence
  Description of Artificial Sequence: Synthetic oligonucleotide
  Sense strand starting at position 3096 of SEQ ID NO: 1883365
agggcuucuguauaguaua

SEQ ID NO: 2188871 - RNA, 19 nt, Artificial Sequence
  Description of Artificial Sequence: Synthetic oligonucleotide
  Antisense strand to SEQ ID NO: 2188870
uauacuauacagaagcccu

SEQ ID NO: 2188872 - RNA, 19 nt, Artificial Sequence
  Description of Artificial Sequence: Synthetic oligonucleotide
  Sense strand starting at position 3135 of SEQ ID NO: 1883365
ugucgauauggauaggguu

SEQ ID NO: 2188873 - RNA, 19 nt, Artificial Sequence
  Description of Artificial Sequence: Synthetic oligonucleotide
  Antisense strand to SEQ ID NO: 2188872
aacccuauccauaucgaca

SEQ ID NO: 2188874 - RNA, 19 nt, Artificial Sequence
  Description of Artificial Sequence: Synthetic oligonucleotide
  Sense strand starting at position 3190 of SEQ ID NO: 1883365
uucccagugccuguuguau

SEQ ID NO: 2188875 - RNA, 19 nt, Artificial Sequence
  Description of Artificial Sequence: Synthetic oligonucleotide
  Antisense strand to SEQ ID NO: 2188874
auacaacaggcacugggaa

SEQ ID NO: 2188876 - RNA, 19 nt, Artificial Sequence
  Description of Artificial Sequence: Synthetic oligonucleotide
  Sense strand starting at position 3272 of SEQ ID NO: 1883365
gugcauguguggaugucua

SEQ ID NO: 2188877 - RNA, 19 nt, Artificial Sequence
  Description of Artificial Sequence: Synthetic oligonucleotide
  Antisense strand to SEQ ID NO: 2188876
uagacauccacacaugcac

SEQ ID NO: 2188878 - RNA, 19 nt, Artificial Sequence
  Description of Artificial Sequence: Synthetic oligonucleotide
  Sense strand starting at position 3314 of SEQ ID NO: 1883365
agaggagugggaugucuuu

SEQ ID NO: 2188879 - RNA, 19 nt, Artificial Sequence
  Description of Artificial Sequence: Synthetic oligonucleotide
  Antisense strand to SEQ ID NO: 2188878
aaagacaucccacuccucu

SEQ ID NO: 2188880 - RNA, 19 nt, Artificial Sequence
  Description of Artificial Sequence: Synthetic oligonucleotide
  Sense strand starting at position 3358 of SEQ ID NO: 1883365
gguguuaugguugaaucac

SEQ ID NO: 2188881 - RNA, 19 nt, Artificial Sequence
  Description of Artificial Sequence: Synthetic oligonucleotide
  Antisense strand to SEQ ID NO: 2188880
gugauucaaccauaacacc

SEQ ID NO: 2188882 - RNA, 19 nt, Artificial Sequence
  Description of Artificial Sequence: Synthetic oligonucleotide
  Sense strand starting at position 3364 of SEQ ID NO: 1883365
augguugaaucaccuaaua

SEQ ID NO: 2188883 - RNA, 19 nt, Artificial Sequence
  Description of Artificial Sequence: Synthetic oligonucleotide
  Antisense strand to SEQ ID NO: 2188882
uauuaggugauucaaccau

SEQ ID NO: 2188884 - RNA, 19 nt, Artificial Sequence
  Description of Artificial Sequence: Synthetic oligonucleotide
  Sense strand starting at position 3413 of SEQ ID NO: 1883365
cuuggucuacacugagaga

SEQ ID NO: 2188885 - RNA, 19 nt, Artificial Sequence
  Description of Artificial Sequence: Synthetic oligonucleotide
  Antisense strand to SEQ ID NO: 2188884
ucucucaguguagaccaag

SEQ ID NO: 2188886 - RNA, 19 nt, Artificial Sequence
  Description of Artificial Sequence: Synthetic oligonucleotide
  Sense strand starting at position 3538 of SEQ ID NO: 1883365
gucuucuaaggcugacaaa

SEQ ID NO: 2188887 - RNA, 19 nt, Artificial Sequence
  Description of Artificial Sequence: Synthetic oligonucleotide
  Antisense strand to SEQ ID NO: 2188886
uuugucagccuuagaagac

SEQ ID NO: 2188888 - RNA, 19 nt, Artificial Sequence
  Description of Artificial Sequence: Synthetic oligonucleotide
  Sense strand starting at position 3880 of SEQ ID NO: 1883365
cauauagaaugggagauaa

SEQ ID NO: 2188889 - RNA, 19 nt, Artificial Sequence
  Description of Artificial Sequence: Synthetic oligonucleotide
  Antisense strand to SEQ ID NO: 2188888
uuaucucccauucuauaug

SEQ ID NO: 2188890 - RNA, 19 nt, Artificial Sequence
  Description of Artificial Sequence: Synthetic oligonucleotide
  Sense strand starting at position 64 of SEQ ID NO: 1883366
gugagaaccuugcccaaau

SEQ ID NO: 2188891 - RNA, 19 nt, Artificial Sequence
  Description of Artificial Sequence: Synthetic oligonucleotide
  Antisense strand to SEQ ID NO: 2188890
auuugggcaagguucucac

SEQ ID NO: 2188892 - RNA, 19 nt, Artificial Sequence
  Description of Artificial Sequence: Synthetic oligonucleotide
  Sense strand starting at position 98 of SEQ ID NO: 1883366
aucaauauucuuggucgaa

SEQ ID NO: 2188893 - RNA, 19 nt, Artificial Sequence
  Description of Artificial Sequence: Synthetic oligonucleotide
  Antisense strand to SEQ ID NO: 2188892
uucgaccaagaauauugau

SEQ ID NO: 2188894 - RNA, 19 nt, Artificial Sequence
  Description of Artificial Sequence: Synthetic oligonucleotide
  Sense strand starting at position 99 of SEQ ID NO: 1883366
ucaauauucuuggucgaaa

SEQ ID NO: 2188895 - RNA, 19 nt, Artificial Sequence
  Description of Artificial Sequence: Synthetic oligonucleotide
  Antisense strand to SEQ ID NO: 2188894
uuucgaccaagaauauuga

SEQ ID NO: 2188896 - RNA, 19 nt, Artificial Sequence
  Description of Artificial Sequence: Synthetic oligonucleotide
  Sense strand starting at position 117 of SEQ ID NO: 1883366
aagacauagguugguaaca

SEQ ID NO: 2188897 - RNA, 19 nt, Artificial Sequence
  Description of Artificial Sequence: Synthetic oligonucleotide
  Antisense strand to SEQ ID NO: 2188896
uguuaccaaccuaugucuu

SEQ ID NO: 2188898 - RNA, 19 nt, Artificial Sequence
  Description of Artificial Sequence: Synthetic oligonucleotide
  Sense strand starting at position 118 of SEQ ID NO: 1883366
agacauagguugguaacaa

SEQ ID NO: 2188899 - RNA, 19 nt, Artificial Sequence
  Description of Artificial Sequence: Synthetic oligonucleotide
  Antisense strand to SEQ ID NO: 2188898
uuguuaccaaccuaugucu

SEQ ID NO: 2188900 - RNA, 19 nt, Artificial Sequence
  Description of Artificial Sequence: Synthetic oligonucleotide
  Sense strand starting at position 133 of SEQ ID NO: 1883366
acaagcauuucugaaagag

SEQ ID NO: 2188901 - RNA, 19 nt, Artificial Sequence
  Description of Artificial Sequence: Synthetic oligonucleotide
  Antisense strand to SEQ ID NO: 2188900
cucuuucagaaaugcuugu

SEQ ID NO: 2188902 - RNA, 19 nt, Artificial Sequence
  Description of Artificial Sequence: Synthetic oligonucleotide
  Sense strand starting at position 527 of SEQ ID NO: 1883366
ugagaagauuucugagaaa

SEQ ID NO: 2188903 - RNA, 19 nt, Artificial Sequence
  Description of Artificial Sequence: Synthetic oligonucleotide
  Antisense strand to SEQ ID NO: 2188902
uuucucagaaaucuucuca

SEQ ID NO: 2188904 - RNA, 19 nt, Artificial Sequence
  Description of Artificial Sequence: Synthetic oligonucleotide
  Sense strand starting at position 530 of SEQ ID NO: 1883366
gaagauuucugagaaaguc

SEQ ID NO: 2188905 - RNA, 19 nt, Artificial Sequence
  Description of Artificial Sequence: Synthetic oligonucleotide
  Antisense strand to SEQ ID NO: 2188904
gacuuucucagaaaucuuc

SEQ ID NO: 2188906 - RNA, 19 nt, Artificial Sequence
  Description of Artificial Sequence: Synthetic oligonucleotide
  Sense strand starting at position 566 of SEQ ID NO: 1883366
ggaacaucaucaucacugu

SEQ ID NO: 2188907 - RNA, 19 nt, Artificial Sequence
  Description of Artificial Sequence: Synthetic oligonucleotide
  Antisense strand to SEQ ID NO: 2188906
acagugaugaugauguucc

SEQ ID NO: 2188908 - RNA, 19 nt, Artificial Sequence
  Description of Artificial Sequence: Synthetic oligonucleotide
  Sense strand starting at position 800 of SEQ ID NO: 1883366
aagggcaauccauggagua

SEQ ID NO: 2188909 - RNA, 19 nt, Artificial Sequence
  Description of Artificial Sequence: Synthetic oligonucleotide
  Antisense strand to SEQ ID NO: 2188908
uacuccauggauugcccuu

SEQ ID NO: 2188910 - RNA, 19 nt, Artificial Sequence
  Description of Artificial Sequence: Synthetic oligonucleotide
  Sense strand starting at position 801 of SEQ ID NO: 1883366
agggcaauccauggaguaa

SEQ ID NO: 2188911 - RNA, 19 nt, Artificial Sequence
  Description of Artificial Sequence: Synthetic oligonucleotide
  Antisense strand to SEQ ID NO: 2188910
uuacuccauggauugcccu

SEQ ID NO: 2188912 - RNA, 19 nt, Artificial Sequence
  Description of Artificial Sequence: Synthetic oligonucleotide
  Sense strand starting at position 839 of SEQ ID NO: 1883366
gguaaagcauuaccaaauu

SEQ ID NO: 2188913 - RNA, 19 nt, Artificial Sequence
  Description of Artificial Sequence: Synthetic oligonucleotide
  Antisense strand to SEQ ID NO: 2188912
aauuugguaaugcuuuacc

SEQ ID NO: 2188914 - RNA, 19 nt, Artificial Sequence
  Description of Artificial Sequence: Synthetic oligonucleotide
  Sense strand starting at position 985 of SEQ ID NO: 1883366
cugaauucugcauguggaa

SEQ ID NO: 2188915 - RNA, 19 nt, Artificial Sequence
  Description of Artificial Sequence: Synthetic oligonucleotide
  Antisense strand to SEQ ID NO: 2188914
uuccacaugcagaauucag

SEQ ID NO: 2188916 - RNA, 19 nt, Artificial Sequence
  Description of Artificial Sequence: Synthetic oligonucleotide
  Sense strand starting at position 1133 of SEQ ID NO: 1883366
ccucgaaauccuuagcuga

SEQ ID NO: 2188917 - RNA, 19 nt, Artificial Sequence
  Description of Artificial Sequence: Synthetic oligonucleotide
  Antisense strand to SEQ ID NO: 2188916
ucagcuaaggauuucgagg

SEQ ID NO: 2188918 - RNA, 19 nt, Artificial Sequence
  Description of Artificial Sequence: Synthetic oligonucleotide
  Sense strand starting at position 1135 of SEQ ID NO: 1883366
ucgaaauccuuagcugaga

SEQ ID NO: 2188919 - RNA, 19 nt, Artificial Sequence
  Description of Artificial Sequence: Synthetic oligonucleotide
  Antisense strand to SEQ ID NO: 2188918
ucucagcuaaggauuucga

SEQ ID NO: 2188920 - RNA, 19 nt, Artificial Sequence
  Description of Artificial Sequence: Synthetic oligonucleotide
  Sense strand starting at position 1136 of SEQ ID NO: 1883366
cgaaauccuuagcugagau

SEQ ID NO: 2188921 - RNA, 19 nt, Artificial Sequence
  Description of Artificial Sequence: Synthetic oligonucleotide
  Antisense strand to SEQ ID NO: 2188920
aucucagcuaaggauuucg

SEQ ID NO: 2188922 - RNA, 19 nt, Artificial Sequence
  Description of Artificial Sequence: Synthetic oligonucleotide
  Sense strand starting at position 1186 of SEQ ID NO: 1883366
ucacuagugguauagaucu

SEQ ID NO: 2188923 - RNA, 19 nt, Artificial Sequence
  Description of Artificial Sequence: Synthetic oligonucleotide
  Antisense strand to SEQ ID NO: 2188922
agaucuauaccacuaguga

SEQ ID NO: 2188924 - RNA, 19 nt, Artificial Sequence
  Description of Artificial Sequence: Synthetic oligonucleotide
  Sense strand starting at position 1193 of SEQ ID NO: 1883366
ugguauagaucugugggua

SEQ ID NO: 2188925 - RNA, 19 nt, Artificial Sequence
  Description of Artificial Sequence: Synthetic oligonucleotide
  Antisense strand to SEQ ID NO: 2188924
uacccacagaucuauacca

SEQ ID NO: 2188926 - RNA, 19 nt, Artificial Sequence
  Description of Artificial Sequence: Synthetic oligonucleotide
  Sense strand starting at position 1205 of SEQ ID NO: 1883366
guggguagcgucgucguaa

SEQ ID NO: 2188927 - RNA, 19 nt, Artificial Sequence
  Description of Artificial Sequence: Synthetic oligonucleotide
  Antisense strand to SEQ ID NO: 2188926
uuacgacgacgcuacccac

SEQ ID NO: 2188928 - RNA, 19 nt, Artificial Sequence
  Description of Artificial Sequence: Synthetic oligonucleotide
  Sense strand starting at position 1340 of SEQ ID NO: 1883366
uuagcaugaccaugguuaa

SEQ ID NO: 2188929 - RNA, 19 nt, Artificial Sequence
  Description of Artificial Sequence: Synthetic oligonucleotide
  Antisense strand to SEQ ID NO: 2188928
uuaaccauggucaugcuaa

SEQ ID NO: 2188930 - RNA, 19 nt, Artificial Sequence
  Description of Artificial Sequence: Synthetic oligonucleotide
  Sense strand starting at position 1341 of SEQ ID NO: 1883366
uagcaugaccaugguuaaa

SEQ ID NO: 2188931 - RNA, 19 nt, Artificial Sequence
  Description of Artificial Sequence: Synthetic oligonucleotide
  Antisense strand to SEQ ID NO: 2188930
uuuaaccauggucaugcua

SEQ ID NO: 2188932 - RNA, 19 nt, Artificial Sequence
  Description of Artificial Sequence: Synthetic oligonucleotide
  Sense strand starting at position 1379 of SEQ ID NO: 1883366
cucggaauauaguuagcaa

SEQ ID NO: 2188933 - RNA, 19 nt, Artificial Sequence
  Description of Artificial Sequence: Synthetic oligonucleotide
  Antisense strand to SEQ ID NO: 2188932
uugcuaacuauauuccgag

SEQ ID NO: 2188934 - RNA, 19 nt, Artificial Sequence
  Description of Artificial Sequence: Synthetic oligonucleotide
  Sense strand starting at position 1380 of SEQ ID NO: 1883366
ucggaauauaguuagcaaa

SEQ ID NO: 2188935 - RNA, 19 nt, Artificial Sequence
  Description of Artificial Sequence: Synthetic oligonucleotide
  Antisense strand to SEQ ID NO: 2188934
uuugcuaacuauauuccga

SEQ ID NO: 2188936 - RNA, 19 nt, Artificial Sequence
  Description of Artificial Sequence: Synthetic oligonucleotide
  Sense strand starting at position 1382 of SEQ ID NO: 1883366
ggaauauaguuagcaaaua

SEQ ID NO: 2188937 - RNA, 19 nt, Artificial Sequence
  Description of Artificial Sequence: Synthetic oligonucleotide
  Antisense strand to SEQ ID NO: 2188936
uauuugcuaacuauauucc

SEQ ID NO: 2188938 - RNA, 19 nt, Artificial Sequence
  Description of Artificial Sequence: Synthetic oligonucleotide
  Sense strand starting at position 1448 of SEQ ID NO: 1883366
gguaguaauggccaucaac

SEQ ID NO: 2188939 - RNA, 19 nt, Artificial Sequence
  Description of Artificial Sequence: Synthetic oligonucleotide
  Antisense strand to SEQ ID NO: 2188938
guugauggccauuacuacc

SEQ ID NO: 2188940 - RNA, 19 nt, Artificial Sequence
  Description of Artificial Sequence: Synthetic oligonucleotide
  Sense strand starting at position 1451 of SEQ ID NO: 1883366
aguaauggccaucaacaau

SEQ ID NO: 2188941 - RNA, 19 nt, Artificial Sequence
  Description of Artificial Sequence: Synthetic oligonucleotide
  Antisense strand to SEQ ID NO: 2188940
auuguugauggccauuacu

SEQ ID NO: 2188942 - RNA, 19 nt, Artificial Sequence
  Description of Artificial Sequence: Synthetic oligonucleotide
  Sense strand starting at position 1581 of SEQ ID NO: 1883366
gcuguaugaccuuagaaga

SEQ ID NO: 2188943 - RNA, 19 nt, Artificial Sequence
  Description of Artificial Sequence: Synthetic oligonucleotide
  Antisense strand to SEQ ID NO: 2188942
ucuucuaaggucauacagc

SEQ ID NO: 2188944 - RNA, 19 nt, Artificial Sequence
  Description of Artificial Sequence: Synthetic oligonucleotide
  Sense strand starting at position 1723 of SEQ ID NO: 1883366
gucaguaaagaauagcuau

SEQ ID NO: 2188945 - RNA, 19 nt, Artificial Sequence
  Description of Artificial Sequence: Synthetic oligonucleotide
  Antisense strand to SEQ ID NO: 2188944
auagcuauucuuuacugac

SEQ ID NO: 2188946 - RNA, 19 nt, Artificial Sequence
  Description of Artificial Sequence: Synthetic oligonucleotide
  Sense strand starting at position 1809 of SEQ ID NO: 1883366
uggccaauuugucaaauau

SEQ ID NO: 2188947 - RNA, 19 nt, Artificial Sequence
  Description of Artificial Sequence: Synthetic oligonucleotide
  Antisense strand to SEQ ID NO: 2188946
auauuugacaaauuggcca

SEQ ID NO: 2188948 - RNA, 19 nt, Artificial Sequence
  Description of Artificial Sequence: Synthetic oligonucleotide
  Sense strand starting at position 2102 of SEQ ID NO: 1883366
auuccaaucccugguguga

SEQ ID NO: 2188949 - RNA, 19 nt, Artificial Sequence
  Description of Artificial Sequence: Synthetic oligonucleotide
  Antisense strand to SEQ ID NO: 2188948
ucacaccagggauuggaau

SEQ ID NO: 2188950 - RNA, 19 nt, Artificial Sequence
  Description of Artificial Sequence: Synthetic oligonucleotide
  Sense strand starting at position 2113 of SEQ ID NO: 1883366
uggugugaaucuuuagaau

SEQ ID NO: 2188951 - RNA, 19 nt, Artificial Sequence
  Description of Artificial Sequence: Synthetic oligonucleotide
  Antisense strand to SEQ ID NO: 2188950
auucuaaagauucacacca

SEQ ID NO: 2188952 - RNA, 19 nt, Artificial Sequence
  Description of Artificial Sequence: Synthetic oligonucleotide
  Sense strand starting at position 2245 of SEQ ID NO: 1883366
agugaucaguacuuaauac

SEQ ID NO: 2188953 - RNA, 19 nt, Artificial Sequence
  Description of Artificial Sequence: Synthetic oligonucleotide
  Antisense strand to SEQ ID NO: 2188952
guauuaaguacugaucacu

SEQ ID NO: 2188954 - RNA, 19 nt, Artificial Sequence
  Description of Artificial Sequence: Synthetic oligonucleotide
  Sense strand starting at position 2673 of SEQ ID NO: 1883366
aguuauauucgucauaaac

SEQ ID NO: 2188955 - RNA, 19 nt, Artificial Sequence
  Description of Artificial Sequence: Synthetic oligonucleotide
  Antisense strand to SEQ ID NO: 2188954
guuuaugacgaauauaacu

SEQ ID NO: 2188956 - RNA, 19 nt, Artificial Sequence
  Description of Artificial Sequence: Synthetic oligonucleotide
  Sense strand starting at position 3022 of SEQ ID NO: 1883366
uugaguuguuuacuaucau

SEQ ID NO: 2188957 - RNA, 19 nt, Artificial Sequence
  Description of Artificial Sequence: Synthetic oligonucleotide
  Antisense strand to SEQ ID NO: 2188956
augauaguaaacaacucaa

SEQ ID NO: 2188958 - RNA, 19 nt, Artificial Sequence
  Description of Artificial Sequence: Synthetic oligonucleotide
  Sense strand starting at position 3157 of SEQ ID NO: 1883366
cuuuaucaggcaggcuaaa

SEQ ID NO: 2188959 - RNA, 19 nt, Artificial Sequence
  Description of Artificial Sequence: Synthetic oligonucleotide
  Antisense strand to SEQ ID NO: 2188958
uuuagccugccugauaaag

SEQ ID NO: 2188960 - RNA, 19 nt, Artificial Sequence
  Description of Artificial Sequence: Synthetic oligonucleotide
  Sense strand starting at position 3205 of SEQ ID NO: 1883366
uucguaaagcaggaucuau

SEQ ID NO: 2188961 - RNA, 19 nt, Artificial Sequence
  Description of Artificial Sequence: Synthetic oligonucleotide
  Antisense strand to SEQ ID NO: 2188960
auagauccugcuuuacgaa

SEQ ID NO: 2188962 - RNA, 19 nt, Artificial Sequence
  Description of Artificial Sequence: Synthetic oligonucleotide
  Sense strand starting at position 3335 of SEQ ID NO: 1883366
agaagagauuaauacuaug

SEQ ID NO: 2188963 - RNA, 19 nt, Artificial Sequence
  Description of Artificial Sequence: Synthetic oligonucleotide
  Antisense strand to SEQ ID NO: 2188962
cauaguauuaaucucuucu

SEQ ID NO: 2188964 - RNA, 19 nt, Artificial Sequence
  Description of Artificial Sequence: Synthetic oligonucleotide
  Sense strand starting at position 3338 of SEQ ID NO: 1883366
agagauuaauacuaugaac

SEQ ID NO: 2188965 - RNA, 19 nt, Artificial Sequence
  Description of Artificial Sequence: Synthetic oligonucleotide
  Antisense strand to SEQ ID NO: 2188964
guucauaguauuaaucucu

SEQ ID NO: 2188966 - RNA, 19 nt, Artificial Sequence
  Description of Artificial Sequence: Synthetic oligonucleotide
  Sense strand starting at position 3534 of SEQ ID NO: 1883366
acaaaugaauccuagaaga

SEQ ID NO: 2188967 - RNA, 19 nt, Artificial Sequence
  Description of Artificial Sequence: Synthetic oligonucleotide
  Antisense strand to SEQ ID NO: 2188966
ucuucuaggauucauuugu

SEQ ID NO: 2188968 - RNA, 19 nt, Artificial Sequence
  Description of Artificial Sequence: Synthetic oligonucleotide
  Sense strand starting at position 3822 of SEQ ID NO: 1883366
uacguagugagccaagauu

SEQ ID NO: 2188969 - RNA, 19 nt, Artificial Sequence
  Description of Artificial Sequence: Synthetic oligonucleotide
  Antisense strand to SEQ ID NO: 2188968
aaucuuggcucacuacgua

SEQ ID NO: 2188970 - RNA, 19 nt, Artificial Sequence
  Description of Artificial Sequence: Synthetic oligonucleotide
  Sense strand starting at position 164 of SEQ ID NO: 1883367
ggagauguucagggugaaa

SEQ ID NO: 2188971 - RNA, 19 nt, Artificial Sequence
  Description of Artificial Sequence: Synthetic oligonucleotide
  Antisense strand to SEQ ID NO: 2188970
uuucacccugaacaucucc

SEQ ID NO: 2188972 - RNA, 19 nt, Artificial Sequence
  Description of Artificial Sequence: Synthetic oligonucleotide
  Sense strand starting at position 166 of SEQ ID NO: 1883367
agauguucagggugaaauu

SEQ ID NO: 2188973 - RNA, 19 nt, Artificial Sequence
  Description of Artificial Sequence: Synthetic oligonucleotide
  Antisense strand to SEQ ID NO: 2188972
aauuucacccugaacaucu

SEQ ID NO: 2188974 - RNA, 19 nt, Artificial Sequence
  Description of Artificial Sequence: Synthetic oligonucleotide
  Sense strand starting at position 176 of SEQ ID NO: 1883367
ggugaaauuguauggauug

SEQ ID NO: 2188975 - RNA, 19 nt, Artificial Sequence
  Description of Artificial Sequence: Synthetic oligonucleotide
  Antisense strand to SEQ ID NO: 2188974
caauccauacaauuucacc

SEQ ID NO: 2188976 - RNA, 19 nt, Artificial Sequence
  Description of Artificial Sequence: Synthetic oligonucleotide
  Sense strand starting at position 345 of SEQ ID NO: 1883367
guggguaaagcugacuaua

SEQ ID NO: 2188977 - RNA, 19 nt, Artificial Sequence
  Description of Artificial Sequence: Synthetic oligonucleotide
  Antisense strand to SEQ ID NO: 2188976
uauagucagcuuuacccac

SEQ ID NO: 2188978 - RNA, 19 nt, Artificial Sequence
  Description of Artificial Sequence: Synthetic oligonucleotide
  Sense strand starting at position 347 of SEQ ID NO: 1883367
ggguaaagcugacuauaug

SEQ ID NO: 2188979 - RNA, 19 nt, Artificial Sequence
  Description of Artificial Sequence: Synthetic oligonucleotide
  Antisense strand to SEQ ID NO: 2188978
cauauagucagcuuuaccc

SEQ ID NO: 2188980 - RNA, 19 nt, Artificial Sequence
  Description of Artificial Sequence: Synthetic oligonucleotide
  Sense strand starting at position 355 of SEQ ID NO: 1883367
cugacuauaugguuauuaa

SEQ ID NO: 2188981 - RNA, 19 nt, Artificial Sequence
  Description of Artificial Sequence: Synthetic oligonucleotide
  Antisense strand to SEQ ID NO: 2188980
uuaauaaccauauagucag

SEQ ID NO: 2188982 - RNA, 19 nt, Artificial Sequence
  Description of Artificial Sequence: Synthetic oligonucleotide
  Sense strand starting at position 416 of SEQ ID NO: 1883367
uuaggucucccuggaugaa

SEQ ID NO: 2188983 - RNA, 19 nt, Artificial Sequence
  Description of Artificial Sequence: Synthetic oligonucleotide
  Antisense strand to SEQ ID NO: 2188982
uucauccagggagaccuaa

SEQ ID NO: 2188984 - RNA, 19 nt, Artificial Sequence
  Description of Artificial Sequence: Synthetic oligonucleotide
  Sense strand starting at position 454 of SEQ ID NO: 1883367
gauuguucugcugaagaga

SEQ ID NO: 2188985 - RNA, 19 nt, Artificial Sequence
  Description of Artificial Sequence: Synthetic oligonucleotide
  Antisense strand to SEQ ID NO: 2188984
ucucuucagcagaacaauc

SEQ ID NO: 2188986 - RNA, 19 nt, Artificial Sequence
  Description of Artificial Sequence: Synthetic oligonucleotide
  Sense strand starting at position 492 of SEQ ID NO: 1883367
gugguaaagggauagccau

SEQ ID NO: 2188987 - RNA, 19 nt, Artificial Sequence
  Description of Artificial Sequence: Synthetic oligonucleotide
  Antisense strand to SEQ ID NO: 2188986
auggcuaucccuuuaccac

SEQ ID NO: 2188988 - RNA, 19 nt, Artificial Sequence
  Description of Artificial Sequence: Synthetic oligonucleotide
  Sense strand starting at position 719 of SEQ ID NO: 1883367
cuuccuugaggcugggaaa

SEQ ID NO: 2188989 - RNA, 19 nt, Artificial Sequence
  Description of Artificial Sequence: Synthetic oligonucleotide
  Antisense strand to SEQ ID NO: 2188988
uuucccagccucaaggaag

SEQ ID NO: 2188990 - RNA, 19 nt, Artificial Sequence
  Description of Artificial Sequence: Synthetic oligonucleotide
  Sense strand starting at position 768 of SEQ ID NO: 1883367
gguguuuaugaaggaggaa

SEQ ID NO: 2188991 - RNA, 19 nt, Artificial Sequence
  Description of Artificial Sequence: Synthetic oligonucleotide
  Antisense strand to SEQ ID NO: 2188990
uuccuccuucauaaacacc

SEQ ID NO: 2188992 - RNA, 19 nt, Artificial Sequence
  Description of Artificial Sequence: Synthetic oligonucleotide
  Sense strand starting at position 874 of SEQ ID NO: 1883367
guggaaucagugcaucuca

SEQ ID NO: 2188993 - RNA, 19 nt, Artificial Sequence
  Description of Artificial Sequence: Synthetic oligonucleotide
  Antisense strand to SEQ ID NO: 2188992
ugagaugcacugauuccac

SEQ ID NO: 2188994 - RNA, 19 nt, Artificial Sequence
  Description of Artificial Sequence: Synthetic oligonucleotide
  Sense strand starting at position 941 of SEQ ID NO: 1883367
uuggguagcuuaucagaga

SEQ ID NO: 2188995 - RNA, 19 nt, Artificial Sequence
  Description of Artificial Sequence: Synthetic oligonucleotide
  Antisense strand to SEQ ID NO: 2188994
ucucugauaagcuacccaa

SEQ ID NO: 2188996 - RNA, 19 nt, Artificial Sequence
  Description of Artificial Sequence: Synthetic oligonucleotide
  Sense strand starting at position 955 of SEQ ID NO: 1883367
agagaagaucgcugacacu

SEQ ID NO: 2188997 - RNA, 19 nt, Artificial Sequence
  Description of Artificial Sequence: Synthetic oligonucleotide
  Antisense strand to SEQ ID NO: 2188996
agugucagcgaucuucucu

SEQ ID NO: 2188998 - RNA, 19 nt, Artificial Sequence
  Description of Artificial Sequence: Synthetic oligonucleotide
  Sense strand starting at position 986 of SEQ ID NO: 1883367
cugaauagcucccucugaa

SEQ ID NO: 2188999 - RNA, 19 nt, Artificial Sequence
  Description of Artificial Sequence: Synthetic oligonucleotide
  Antisense strand to SEQ ID NO: 2188998
uucagagggagcuauucag

SEQ ID NO: 2189000 - RNA, 19 nt, Artificial Sequence
  Description of Artificial Sequence: Synthetic oligonucleotide
  Sense strand starting at position 1032 of SEQ ID NO: 1883367
uuccuacuagaccaguauu

SEQ ID NO: 2189001 - RNA, 19 nt, Artificial Sequence
  Description of Artificial Sequence: Synthetic oligonucleotide
  Antisense strand to SEQ ID NO: 2189000
aauacuggucuaguaggaa

SEQ ID NO: 2189002 - RNA, 19 nt, Artificial Sequence
  Description of Artificial Sequence: Synthetic oligonucleotide
  Sense strand starting at position 1149 of SEQ ID NO: 1883367
agucucagaccuuguggaa

SEQ ID NO: 2189003 - RNA, 19 nt, Artificial Sequence
  Description of Artificial Sequence: Synthetic oligonucleotide
  Antisense strand to SEQ ID NO: 2189002
uuccacaaggucugagacu

SEQ ID NO: 2189004 - RNA, 19 nt, Artificial Sequence
  Description of Artificial Sequence: Synthetic oligonucleotide
  Sense strand starting at position 1278 of SEQ ID NO: 1883367
ucuacaguuggugaaaucu

SEQ ID NO: 2189005 - RNA, 19 nt, Artificial Sequence
  Description of Artificial Sequence: Synthetic oligonucleotide
  Antisense strand to SEQ ID NO: 2189004
agauuucaccaacuguaga

SEQ ID NO: 2189006 - RNA, 19 nt, Artificial Sequence
  Description of Artificial Sequence: Synthetic oligonucleotide
  Sense strand starting at position 1694 of SEQ ID NO: 1883367
uggugaaugcugggaauau

SEQ ID NO: 2189007 - RNA, 19 nt, Artificial Sequence
  Description of Artificial Sequence: Synthetic oligonucleotide
  Antisense strand to SEQ ID NO: 2189006
auauucccagcauucacca

SEQ ID NO: 2189008 - RNA, 19 nt, Artificial Sequence
  Description of Artificial Sequence: Synthetic oligonucleotide
  Sense strand starting at position 1829 of SEQ ID NO: 1883367
aagugugauuuaguuugua

SEQ ID NO: 2189009 - RNA, 19 nt, Artificial Sequence
  Description of Artificial Sequence: Synthetic oligonucleotide
  Antisense strand to SEQ ID NO: 2189008
uacaaacuaaaucacacuu

SEQ ID NO: 2189010 - RNA, 19 nt, Artificial Sequence
  Description of Artificial Sequence: Synthetic oligonucleotide
  Sense strand starting at position 2092 of SEQ ID NO: 1883367
ggaggcgauggauauguuu

SEQ ID NO: 2189011 - RNA, 19 nt, Artificial Sequence
  Description of Artificial Sequence: Synthetic oligonucleotide
  Antisense strand to SEQ ID NO: 2189010
aaacauauccaucgccucc

SEQ ID NO: 2189012 - RNA, 19 nt, Artificial Sequence
  Description of Artificial Sequence: Synthetic oligonucleotide
  Sense strand starting at position 2124 of SEQ ID NO: 1883367
ugaugauaucaugggugua

SEQ ID NO: 2189013 - RNA, 19 nt, Artificial Sequence
  Description of Artificial Sequence: Synthetic oligonucleotide
  Antisense strand to SEQ ID NO: 2189012
uacacccaugauaucauca

SEQ ID NO: 2189014 - RNA, 19 nt, Artificial Sequence
  Description of Artificial Sequence: Synthetic oligonucleotide
  Sense strand starting at position 2125 of SEQ ID NO: 1883367
gaugauaucauggguguau

SEQ ID NO: 2189015 - RNA, 19 nt, Artificial Sequence
  Description of Artificial Sequence: Synthetic oligonucleotide
  Antisense strand to SEQ ID NO: 2189014
auacacccaugauaucauc

SEQ ID NO: 2189016 - RNA, 19 nt, Artificial Sequence
  Description of Artificial Sequence: Synthetic oligonucleotide
  Sense strand starting at position 2126 of SEQ ID NO: 1883367
augauaucauggguguaua

SEQ ID NO: 2189017 - RNA, 19 nt, Artificial Sequence
  Description of Artificial Sequence: Synthetic oligonucleotide
  Antisense strand to SEQ ID NO: 2189016
uauacacccaugauaucau

SEQ ID NO: 2189018 - RNA, 19 nt, Artificial Sequence
  Description of Artificial Sequence: Synthetic oligonucleotide
  Sense strand starting at position 2127 of SEQ ID NO: 1883367
ugauaucauggguguauau

SEQ ID NO: 2189019 - RNA, 19 nt, Artificial Sequence
  Description of Artificial Sequence: Synthetic oligonucleotide
  Antisense strand to SEQ ID NO: 2189018
auauacacccaugauauca

SEQ ID NO: 2189020 - RNA, 19 nt, Artificial Sequence
  Description of Artificial Sequence: Synthetic oligonucleotide
  Sense strand starting at position 2129 of SEQ ID NO: 1883367
auaucauggguguauaugu

SEQ ID NO: 2189021 - RNA, 19 nt, Artificial Sequence
  Description of Artificial Sequence: Synthetic oligonucleotide
  Antisense strand to SEQ ID NO: 2189020
acauauacacccaugauau

SEQ ID NO: 2189022 - RNA, 19 nt, Artificial Sequence
  Description of Artificial Sequence: Synthetic oligonucleotide
  Sense strand starting at position 2478 of SEQ ID NO: 1883367
ucaggauuguaauucccaa

SEQ ID NO: 2189023 - RNA, 19 nt, Artificial Sequence
  Description of Artificial Sequence: Synthetic oligonucleotide
  Antisense strand to SEQ ID NO: 2189022
uugggaauuacaauccuga

SEQ ID NO: 2189024 - RNA, 19 nt, Artificial Sequence
  Description of Artificial Sequence: Synthetic oligonucleotide
  Sense strand starting at position 2518 of SEQ ID NO: 1883367
cuaucagugacaggcagaa

SEQ ID NO: 2189025 - RNA, 19 nt, Artificial Sequence
  Description of Artificial Sequence: Synthetic oligonucleotide
  Antisense strand to SEQ ID NO: 2189024
uucugccugucacugauag

SEQ ID NO: 2189026 - RNA, 19 nt, Artificial Sequence
  Description of Artificial Sequence: Synthetic oligonucleotide
  Sense strand starting at position 3016 of SEQ ID NO: 1883367
aucuguucugcacaagauu

SEQ ID NO: 2189027 - RNA, 19 nt, Artificial Sequence
  Description of Artificial Sequence: Synthetic oligonucleotide
  Antisense strand to SEQ ID NO: 2189026
aaucuugugcagaacagau

SEQ ID NO: 2189028 - RNA, 19 nt, Artificial Sequence
  Description of Artificial Sequence: Synthetic oligonucleotide
  Sense strand starting at position 3160 of SEQ ID NO: 1883367
auaaacagucucuguaaau

SEQ ID NO: 2189029 - RNA, 19 nt, Artificial Sequence
  Description of Artificial Sequence: Synthetic oligonucleotide
  Antisense strand to SEQ ID NO: 2189028
auuuacagagacuguuuau

SEQ ID NO: 2189030 - RNA, 19 nt, Artificial Sequence
  Description of Artificial Sequence: Synthetic oligonucleotide
  Sense strand starting at position 3191 of SEQ ID NO: 1883367
guaggagacugcuuacaug

SEQ ID NO: 2189031 - RNA, 19 nt, Artificial Sequence
  Description of Artificial Sequence: Synthetic oligonucleotide
  Antisense strand to SEQ ID NO: 2189030
cauguaagcagucuccuac

SEQ ID NO: 2189032 - RNA, 19 nt, Artificial Sequence
  Description of Artificial Sequence: Synthetic oligonucleotide
  Sense strand starting at position 3274 of SEQ ID NO: 1883367
ggauaauguuuagucacag

SEQ ID NO: 2189033 - RNA, 19 nt, Artificial Sequence
  Description of Artificial Sequence: Synthetic oligonucleotide
  Antisense strand to SEQ ID NO: 2189032
cugugacuaaacauuaucc

SEQ ID NO: 2189034 - RNA, 19 nt, Artificial Sequence
  Description of Artificial Sequence: Synthetic oligonucleotide
  Sense strand starting at position 3275 of SEQ ID NO: 1883367
gauaauguuuagucacaga

SEQ ID NO: 2189035 - RNA, 19 nt, Artificial Sequence
  Description of Artificial Sequence: Synthetic oligonucleotide
  Antisense strand to SEQ ID NO: 2189034
ucugugacuaaacauuauc

SEQ ID NO: 2189036 - RNA, 19 nt, Artificial Sequence
  Description of Artificial Sequence: Synthetic oligonucleotide
  Sense strand starting at position 3313 of SEQ ID NO: 1883367
uuaacaccagauugguaau

SEQ ID NO: 2189037 - RNA, 19 nt, Artificial Sequence
  Description of Artificial Sequence: Synthetic oligonucleotide
  Antisense strand to SEQ ID NO: 2189036
auuaccaaucugguguuaa

SEQ ID NO: 2189038 - RNA, 19 nt, Artificial Sequence
  Description of Artificial Sequence: Synthetic oligonucleotide
  Sense strand starting at position 3361 of SEQ ID NO: 1883367
cucugaaugcagcaugaaa

SEQ ID NO: 2189039 - RNA, 19 nt, Artificial Sequence
  Description of Artificial Sequence: Synthetic oligonucleotide
  Antisense strand to SEQ ID NO: 2189038
uuucaugcugcauucagag

SEQ ID NO: 2189040 - RNA, 19 nt, Artificial Sequence
  Description of Artificial Sequence: Synthetic oligonucleotide
  Sense strand starting at position 3363 of SEQ ID NO: 1883367
cugaaugcagcaugaaaua

SEQ ID NO: 2189041 - RNA, 19 nt, Artificial Sequence
  Description of Artificial Sequence: Synthetic oligonucleotide
  Antisense strand to SEQ ID NO: 2189040
uauuucaugcugcauucag

SEQ ID NO: 2189042 - RNA, 19 nt, Artificial Sequence
  Description of Artificial Sequence: Synthetic oligonucleotide
  Sense strand starting at position 3442 of SEQ ID NO: 1883367
gggauugauguuuaccgca

SEQ ID NO: 2189043 - RNA, 19 nt, Artificial Sequence
  Description of Artificial Sequence: Synthetic oligonucleotide
  Antisense strand to SEQ ID NO: 2189042
ugcgguaaacaucaauccc

SEQ ID NO: 2189044 - RNA, 19 nt, Artificial Sequence
  Description of Artificial Sequence: Synthetic oligonucleotide
  Sense strand starting at position 3447 of SEQ ID NO: 1883367
ugauguuuaccgcaaagag

SEQ ID NO: 2189045 - RNA, 19 nt, Artificial Sequence
  Description of Artificial Sequence: Synthetic oligonucleotide
  Antisense strand to SEQ ID NO: 2189044
cucuuugcgguaaacauca

SEQ ID NO: 2189046 - RNA, 19 nt, Artificial Sequence
  Description of Artificial Sequence: Synthetic oligonucleotide
  Sense strand starting at position 3899 of SEQ ID NO: 1883367
auaugaaacugugcauaga

SEQ ID NO: 2189047 - RNA, 19 nt, Artificial Sequence
  Description of Artificial Sequence: Synthetic oligonucleotide
  Antisense strand to SEQ ID NO: 2189046
ucuaugcacaguuucauau

SEQ ID NO: 2189048 - RNA, 19 nt, Artificial Sequence
  Description of Artificial Sequence: Synthetic oligonucleotide
  Sense strand starting at position 3958 of SEQ ID NO: 1883367
ugagucacuucuccauaua

SEQ ID NO: 2189049 - RNA, 19 nt, Artificial Sequence
  Description of Artificial Sequence: Synthetic oligonucleotide
  Antisense strand to SEQ ID NO: 2189048
uauauggagaagugacuca

SEQ ID NO: 2189050 - RNA, 19 nt, Artificial Sequence
  Description of Artificial Sequence: Synthetic oligonucleotide
  Sense strand starting at position 623 of SEQ ID NO: 1883368
auacucuugugauaauuug

SEQ ID NO: 2189051 - RNA, 19 nt, Artificial Sequence
  Description of Artificial Sequence: Synthetic oligonucleotide
  Antisense strand to SEQ ID NO: 2189050
caaauuaucacaagaguau

SEQ ID NO: 2189052 - RNA, 19 nt, Artificial Sequence
  Description of Artificial Sequence: Synthetic oligonucleotide
  Sense strand starting at position 862 of SEQ ID NO: 1883368
gaugguuaacgguauguau

SEQ ID NO: 2189053 - RNA, 19 nt, Artificial Sequence
  Description of Artificial Sequence: Synthetic oligonucleotide
  Antisense strand to SEQ ID NO: 2189052
auacauaccguuaaccauc

SEQ ID NO: 2189054 - RNA, 19 nt, Artificial Sequence
  Description of Artificial Sequence: Synthetic oligonucleotide
  Sense strand starting at position 864 of SEQ ID NO: 1883368
ugguuaacgguauguauca

SEQ ID NO: 2189055 - RNA, 19 nt, Artificial Sequence
  Description of Artificial Sequence: Synthetic oligonucleotide
  Antisense strand to SEQ ID NO: 2189054
ugauacauaccguuaacca

SEQ ID NO: 2189056 - RNA, 19 nt, Artificial Sequence
  Description of Artificial Sequence: Synthetic oligonucleotide
  Sense strand starting at position 865 of SEQ ID NO: 1883368
gguuaacgguauguaucaa

SEQ ID NO: 2189057 - RNA, 19 nt, Artificial Sequence
  Description of Artificial Sequence: Synthetic oligonucleotide
  Antisense strand to SEQ ID NO: 2189056
uugauacauaccguuaacc

SEQ ID NO: 2189058 - RNA, 19 nt, Artificial Sequence
  Description of Artificial Sequence: Synthetic oligonucleotide
  Sense strand starting at position 866 of SEQ ID NO: 1883368
guuaacgguauguaucaau

SEQ ID NO: 2189059 - RNA, 19 nt, Artificial Sequence
  Description of Artificial Sequence: Synthetic oligonucleotide
  Antisense strand to SEQ ID NO: 2189058
auugauacauaccguuaac

SEQ ID NO: 2189060 - RNA, 19 nt, Artificial Sequence
  Description of Artificial Sequence: Synthetic oligonucleotide
  Sense strand starting at position 1053 of SEQ ID NO: 1883368
aagguagagucagagagaa

SEQ ID NO: 2189061 - RNA, 19 nt, Artificial Sequence
  Description of Artificial Sequence: Synthetic oligonucleotide
  Antisense strand to SEQ ID NO: 2189060
uucucucugacucuaccuu

SEQ ID NO: 2189062 - RNA, 19 nt, Artificial Sequence
  Description of Artificial Sequence: Synthetic oligonucleotide
  Sense strand starting at position 1132 of SEQ ID NO: 1883368
guggacucgaguuggaaca

SEQ ID NO: 2189063 - RNA, 19 nt, Artificial Sequence
  Description of Artificial Sequence: Synthetic oligonucleotide
  Antisense strand to SEQ ID NO: 2189062
uguuccaacucgaguccac

SEQ ID NO: 2189064 - RNA, 19 nt, Artificial Sequence
  Description of Artificial Sequence: Synthetic oligonucleotide
  Sense strand starting at position 1146 of SEQ ID NO: 1883368
gaacaauaucauuggcugu

SEQ ID NO: 2189065 - RNA, 19 nt, Artificial Sequence
  Description of Artificial Sequence: Synthetic oligonucleotide
  Antisense strand to SEQ ID NO: 2189064
acagccaaugauauuguuc

SEQ ID NO: 2189066 - RNA, 19 nt, Artificial Sequence
  Description of Artificial Sequence: Synthetic oligonucleotide
  Sense strand starting at position 1249 of SEQ ID NO: 1883368
cugucucuauguguauaga

SEQ ID NO: 2189067 - RNA, 19 nt, Artificial Sequence
  Description of Artificial Sequence: Synthetic oligonucleotide
  Antisense strand to SEQ ID NO: 2189066
ucuauacacauagagacag

SEQ ID NO: 2189068 - RNA, 19 nt, Artificial Sequence
  Description of Artificial Sequence: Synthetic oligonucleotide
  Sense strand starting at position 1250 of SEQ ID NO: 1883368
ugucucuauguguauagau

SEQ ID NO: 2189069 - RNA, 19 nt, Artificial Sequence
  Description of Artificial Sequence: Synthetic oligonucleotide
  Antisense strand to SEQ ID NO: 2189068
aucuauacacauagagaca

SEQ ID NO: 2189070 - RNA, 19 nt, Artificial Sequence
  Description of Artificial Sequence: Synthetic oligonucleotide
  Sense strand starting at position 1252 of SEQ ID NO: 1883368
ucucuauguguauagaucu

SEQ ID NO: 2189071 - RNA, 19 nt, Artificial Sequence
  Description of Artificial Sequence: Synthetic oligonucleotide
  Antisense strand to SEQ ID NO: 2189070
agaucuauacacauagaga

SEQ ID NO: 2189072 - RNA, 19 nt, Artificial Sequence
  Description of Artificial Sequence: Synthetic oligonucleotide
  Sense strand starting at position 1285 of SEQ ID NO: 1883368
gcucuuucucuggagaacu

SEQ ID NO: 2189073 - RNA, 19 nt, Artificial Sequence
  Description of Artificial Sequence: Synthetic oligonucleotide
  Antisense strand to SEQ ID NO: 2189072
aguucuccagagaaagagc

SEQ ID NO: 2189074 - RNA, 19 nt, Artificial Sequence
  Description of Artificial Sequence: Synthetic oligonucleotide
  Sense strand starting at position 1307 of SEQ ID NO: 1883368
aguaauacacaagguuaca

SEQ ID NO: 2189075 - RNA, 19 nt, Artificial Sequence
  Description of Artificial Sequence: Synthetic oligonucleotide
  Antisense strand to SEQ ID NO: 2189074
uguaaccuuguguauuacu

SEQ ID NO: 2189076 - RNA, 19 nt, Artificial Sequence
  Description of Artificial Sequence: Synthetic oligonucleotide
  Sense strand starting at position 1317 of SEQ ID NO: 1883368
aagguuacauuagagaaga

SEQ ID NO: 2189077 - RNA, 19 nt, Artificial Sequence
  Description of Artificial Sequence: Synthetic oligonucleotide
  Antisense strand to SEQ ID NO: 2189076
ucuucucuaauguaaccuu

SEQ ID NO: 2189078 - RNA, 19 nt, Artificial Sequence
  Description of Artificial Sequence: Synthetic oligonucleotide
  Sense strand starting at position 2123 of SEQ ID NO: 1883368
gcaugacuauauguuaaau

SEQ ID NO: 2189079 - RNA, 19 nt, Artificial Sequence
  Description of Artificial Sequence: Synthetic oligonucleotide
  Antisense strand to SEQ ID NO: 2189078
auuuaacauauagucaugc

SEQ ID NO: 2189080 - RNA, 19 nt, Artificial Sequence
  Description of Artificial Sequence: Synthetic oligonucleotide
  Sense strand starting at position 2280 of SEQ ID NO: 1883368
gaaggauguuucuccuuau

SEQ ID NO: 2189081 - RNA, 19 nt, Artificial Sequence
  Description of Artificial Sequence: Synthetic oligonucleotide
  Antisense strand to SEQ ID NO: 2189080
auaaggagaaacauccuuc

SEQ ID NO: 2189082 - RNA, 19 nt, Artificial Sequence
  Description of Artificial Sequence: Synthetic oligonucleotide
  Sense strand starting at position 2283 of SEQ ID NO: 1883368
ggauguuucuccuuauaag

SEQ ID NO: 2189083 - RNA, 19 nt, Artificial Sequence
  Description of Artificial Sequence: Synthetic oligonucleotide
  Antisense strand to SEQ ID NO: 2189082
cuuauaaggagaaacaucc

SEQ ID NO: 2189084 - RNA, 19 nt, Artificial Sequence
  Description of Artificial Sequence: Synthetic oligonucleotide
  Sense strand starting at position 2446 of SEQ ID NO: 1883368
uguuauggcaaauaugguu

SEQ ID NO: 2189085 - RNA, 19 nt, Artificial Sequence
  Description of Artificial Sequence: Synthetic oligonucleotide
  Antisense strand to SEQ ID NO: 2189084
aaccauauuugccauaaca

SEQ ID NO: 2189086 - RNA, 19 nt, Artificial Sequence
  Description of Artificial Sequence: Synthetic oligonucleotide
  Sense strand starting at position 2466 of SEQ ID NO: 1883368
ggaauuuauuugcgaugcu

SEQ ID NO: 2189087 - RNA, 19 nt, Artificial Sequence
  Description of Artificial Sequence: Synthetic oligonucleotide
  Antisense strand to SEQ ID NO: 2189086
agcaucgcaaauaaauucc

SEQ ID NO: 2189088 - RNA, 19 nt, Artificial Sequence
  Description of Artificial Sequence: Synthetic oligonucleotide
  Sense strand starting at position 2467 of SEQ ID NO: 1883368
gaauuuauuugcgaugcuu

SEQ ID NO: 2189089 - RNA, 19 nt, Artificial Sequence
  Description of Artificial Sequence: Synthetic oligonucleotide
  Antisense strand to SEQ ID NO: 2189088
aagcaucgcaaauaaauuc

SEQ ID NO: 2189090 - RNA, 19 nt, Artificial Sequence
  Description of Artificial Sequence: Synthetic oligonucleotide
  Sense strand starting at position 2505 of SEQ ID NO: 1883368
agugaagucuuuccuagag

SEQ ID NO: 2189091 - RNA, 19 nt, Artificial Sequence
  Description of Artificial Sequence: Synthetic oligonucleotide
  Antisense strand to SEQ ID NO: 2189090
cucuaggaaagacuucacu

SEQ ID NO: 2189092 - RNA, 19 nt, Artificial Sequence
  Description of Artificial Sequence: Synthetic oligonucleotide
  Sense strand starting at position 2518 of SEQ ID NO: 1883368
cuagaguuggacggugaga

SEQ ID NO: 2189093 - RNA, 19 nt, Artificial Sequence
  Description of Artificial Sequence: Synthetic oligonucleotide
  Antisense strand to SEQ ID NO: 2189092
ucucaccguccaacucuag

SEQ ID NO: 2189094 - RNA, 19 nt, Artificial Sequence
  Description of Artificial Sequence: Synthetic oligonucleotide
  Sense strand starting at position 2520 of SEQ ID NO: 1883368
agaguuggacggugagauu

SEQ ID NO: 2189095 - RNA, 19 nt, Artificial Sequence
  Description of Artificial Sequence: Synthetic oligonucleotide
  Antisense strand to SEQ ID NO: 2189094
aaucucaccguccaacucu

SEQ ID NO: 2189096 - RNA, 19 nt, Artificial Sequence
  Description of Artificial Sequence: Synthetic oligonucleotide
  Sense strand starting at position 2693 of SEQ ID NO: 1883368
gaggaagguaacuguuaag

SEQ ID NO: 2189097 - RNA, 19 nt, Artificial Sequence
  Description of Artificial Sequence: Synthetic oligonucleotide
  Antisense strand to SEQ ID NO: 2189096
cuuaacaguuaccuuccuc

SEQ ID NO: 2189098 - RNA, 19 nt, Artificial Sequence
  Description of Artificial Sequence: Synthetic oligonucleotide
  Sense strand starting at position 3054 of SEQ ID NO: 1883368
caaauuguguucuuuggac

SEQ ID NO: 2189099 - RNA, 19 nt, Artificial Sequence
  Description of Artificial Sequence: Synthetic oligonucleotide
  Antisense strand to SEQ ID NO: 2189098
guccaaagaacacaauuug

SEQ ID NO: 2189100 - RNA, 19 nt, Artificial Sequence
  Description of Artificial Sequence: Synthetic oligonucleotide
  Sense strand starting at position 3056 of SEQ ID NO: 1883368
aauuguguucuuuggacca

SEQ ID NO: 2189101 - RNA, 19 nt, Artificial Sequence
  Description of Artificial Sequence: Synthetic oligonucleotide
  Antisense strand to SEQ ID NO: 2189100
ugguccaaagaacacaauu

SEQ ID NO: 2189102 - RNA, 19 nt, Artificial Sequence
  Description of Artificial Sequence: Synthetic oligonucleotide
  Sense strand starting at position 3133 of SEQ ID NO: 1883368
acaugugcccauuggugaa

SEQ ID NO: 2189103 - RNA, 19 nt, Artificial Sequence
  Description of Artificial Sequence: Synthetic oligonucleotide
  Antisense strand to SEQ ID NO: 2189102
uucaccaaugggcacaugu

SEQ ID NO: 2189104 - RNA, 19 nt, Artificial Sequence
  Description of Artificial Sequence: Synthetic oligonucleotide
  Sense strand starting at position 3325 of SEQ ID NO: 1883368
aagggauguggcuaguacu

SEQ ID NO: 2189105 - RNA, 19 nt, Artificial Sequence
  Description of Artificial Sequence: Synthetic oligonucleotide
  Antisense strand to SEQ ID NO: 2189104
aguacuagccacaucccuu

SEQ ID NO: 2189106 - RNA, 19 nt, Artificial Sequence
  Description of Artificial Sequence: Synthetic oligonucleotide
  Sense strand starting at position 3376 of SEQ ID NO: 1883368
agacuucuagcccgaagca

SEQ ID NO: 2189107 - RNA, 19 nt, Artificial Sequence
  Description of Artificial Sequence: Synthetic oligonucleotide
  Antisense strand to SEQ ID NO: 2189106
ugcuucgggcuagaagucu

SEQ ID NO: 2189108 - RNA, 19 nt, Artificial Sequence
  Description of Artificial Sequence: Synthetic oligonucleotide
  Sense strand starting at position 3377 of SEQ ID NO: 1883368
gacuucuagcccgaagcau

SEQ ID NO: 2189109 - RNA, 19 nt, Artificial Sequence
  Description of Artificial Sequence: Synthetic oligonucleotide
  Antisense strand to SEQ ID NO: 2189108
augcuucgggcuagaaguc

SEQ ID NO: 2189110 - RNA, 19 nt, Artificial Sequence
  Description of Artificial Sequence: Synthetic oligonucleotide
  Sense strand starting at position 3448 of SEQ ID NO: 1883368
ggugauacucgagguauug

SEQ ID NO: 2189111 - RNA, 19 nt, Artificial Sequence
  Description of Artificial Sequence: Synthetic oligonucleotide
  Antisense strand to SEQ ID NO: 2189110
caauaccucgaguaucacc

SEQ ID NO: 2189112 - RNA, 19 nt, Artificial Sequence
  Description of Artificial Sequence: Synthetic oligonucleotide
  Sense strand starting at position 3450 of SEQ ID NO: 1883368
ugauacucgagguauugca

SEQ ID NO: 2189113 - RNA, 19 nt, Artificial Sequence
  Description of Artificial Sequence: Synthetic oligonucleotide
  Antisense strand to SEQ ID NO: 2189112
ugcaauaccucgaguauca

SEQ ID NO: 2189114 - RNA, 19 nt, Artificial Sequence
  Description of Artificial Sequence: Synthetic oligonucleotide
  Sense strand starting at position 3489 of SEQ ID NO: 1883368
uagggaaaguuugauggga

SEQ ID NO: 2189115 - RNA, 19 nt, Artificial Sequence
  Description of Artificial Sequence: Synthetic oligonucleotide
  Antisense strand to SEQ ID NO: 2189114
ucccaucaaacuuucccua

SEQ ID NO: 2189116 - RNA, 19 nt, Artificial Sequence
  Description of Artificial Sequence: Synthetic oligonucleotide
  Sense strand starting at position 3531 of SEQ ID NO: 1883368
gcagauguagcaugaguaa

SEQ ID NO: 2189117 - RNA, 19 nt, Artificial Sequence
  Description of Artificial Sequence: Synthetic oligonucleotide
  Antisense strand to SEQ ID NO: 2189116
uuacucaugcuacaucugc

SEQ ID NO: 2189118 - RNA, 19 nt, Artificial Sequence
  Description of Artificial Sequence: Synthetic oligonucleotide
  Sense strand starting at position 3534 of SEQ ID NO: 1883368
gauguagcaugaguaagaa

SEQ ID NO: 2189119 - RNA, 19 nt, Artificial Sequence
  Description of Artificial Sequence: Synthetic oligonucleotide
  Antisense strand to SEQ ID NO: 2189118
uucuuacucaugcuacauc

SEQ ID NO: 2189120 - RNA, 19 nt, Artificial Sequence
  Description of Artificial Sequence: Synthetic oligonucleotide
  Sense strand starting at position 3627 of SEQ ID NO: 1883368
accaaucaugguggaaauu

SEQ ID NO: 2189121 - RNA, 19 nt, Artificial Sequence
  Description of Artificial Sequence: Synthetic oligonucleotide
  Antisense strand to SEQ ID NO: 2189120
aauuuccaccaugauuggu

SEQ ID NO: 2189122 - RNA, 19 nt, Artificial Sequence
  Description of Artificial Sequence: Synthetic oligonucleotide
  Sense strand starting at position 3820 of SEQ ID NO: 1883368
gagaacuacugugugggau

SEQ ID NO: 2189123 - RNA, 19 nt, Artificial Sequence
  Description of Artificial Sequence: Synthetic oligonucleotide
  Antisense strand to SEQ ID NO: 2189122
aucccacacaguaguucuc

SEQ ID NO: 2189124 - RNA, 19 nt, Artificial Sequence
  Description of Artificial Sequence: Synthetic oligonucleotide
  Sense strand starting at position 3832 of SEQ ID NO: 1883368
gugggaugucuuuaaagac

SEQ ID NO: 2189125 - RNA, 19 nt, Artificial Sequence
  Description of Artificial Sequence: Synthetic oligonucleotide
  Antisense strand to SEQ ID NO: 2189124
gucuuuaaagacaucccac

SEQ ID NO: 2189126 - RNA, 19 nt, Artificial Sequence
  Description of Artificial Sequence: Synthetic oligonucleotide
  Sense strand starting at position 3839 of SEQ ID NO: 1883368
gucuuuaaagaccagguua

SEQ ID NO: 2189127 - RNA, 19 nt, Artificial Sequence
  Description of Artificial Sequence: Synthetic oligonucleotide
  Antisense strand to SEQ ID NO: 2189126
uaaccuggucuuuaaagac

SEQ ID NO: 2189128 - RNA, 19 nt, Artificial Sequence
  Description of Artificial Sequence: Synthetic oligonucleotide
  Sense strand starting at position 3841 of SEQ ID NO: 1883368
cuuuaaagaccagguuauu

SEQ ID NO: 2189129 - RNA, 19 nt, Artificial Sequence
  Description of Artificial Sequence: Synthetic oligonucleotide
  Antisense strand to SEQ ID NO: 2189128
aauaaccuggucuuuaaag

SEQ ID NO: 2189130 - RNA, 19 nt, Artificial Sequence
  Description of Artificial Sequence: Synthetic oligonucleotide
  Sense strand starting at position 156 of SEQ ID NO: 1883369
uuauaauagugcucaguau

SEQ ID NO: 2189131 - RNA, 19 nt, Artificial Sequence
  Description of Artificial Sequence: Synthetic oligonucleotide
  Antisense strand to SEQ ID NO: 2189130
auacugagcacuauuauaa

SEQ ID NO: 2189132 - RNA, 19 nt, Artificial Sequence
  Description of Artificial Sequence: Synthetic oligonucleotide
  Sense strand starting at position 402 of SEQ ID NO: 1883369
gcauuaaaccgguaucucu

SEQ ID NO: 2189133 - RNA, 19 nt, Artificial Sequence
  Description of Artificial Sequence: Synthetic oligonucleotide
  Antisense strand to SEQ ID NO: 2189132
agagauaccgguuuaaugc

SEQ ID NO: 2189134 - RNA, 19 nt, Artificial Sequence
  Description of Artificial Sequence: Synthetic oligonucleotide
  Sense strand starting at position 499 of SEQ ID NO: 1883369
aggaaaucauuccugagug

SEQ ID NO: 2189135 - RNA, 19 nt, Artificial Sequence
  Description of Artificial Sequence: Synthetic oligonucleotide
  Antisense strand to SEQ ID NO: 2189134
cacucaggaaugauuuccu

SEQ ID NO: 2189136 - RNA, 19 nt, Artificial Sequence
  Description of Artificial Sequence: Synthetic oligonucleotide
  Sense strand starting at position 503 of SEQ ID NO: 1883369
aaucauuccugaguggguu

SEQ ID NO: 2189137 - RNA, 19 nt, Artificial Sequence
  Description of Artificial Sequence: Synthetic oligonucleotide
  Antisense strand to SEQ ID NO: 2189136
aacccacucaggaaugauu

SEQ ID NO: 2189138 - RNA, 19 nt, Artificial Sequence
  Description of Artificial Sequence: Synthetic oligonucleotide
  Sense strand starting at position 840 of SEQ ID NO: 1883369
gcggguucuggagcuguau

SEQ ID NO: 2189139 - RNA, 19 nt, Artificial Sequence
  Description of Artificial Sequence: Synthetic oligonucleotide
  Antisense strand to SEQ ID NO: 2189138
auacagcuccagaacccgc

SEQ ID NO: 2189140 - RNA, 19 nt, Artificial Sequence
  Description of Artificial Sequence: Synthetic oligonucleotide
  Sense strand starting at position 923 of SEQ ID NO: 1883369
caguacaauugucugggaa

SEQ ID NO: 2189141 - RNA, 19 nt, Artificial Sequence
  Description of Artificial Sequence: Synthetic oligonucleotide
  Antisense strand to SEQ ID NO: 2189140
uucccagacaauuguacug

SEQ ID NO: 2189142 - RNA, 19 nt, Artificial Sequence
  Description of Artificial Sequence: Synthetic oligonucleotide
  Sense strand starting at position 924 of SEQ ID NO: 1883369
aguacaauugucugggaaa

SEQ ID NO: 2189143 - RNA, 19 nt, Artificial Sequence
  Description of Artificial Sequence: Synthetic oligonucleotide
  Antisense strand to SEQ ID NO: 2189142
uuucccagacaauuguacu

SEQ ID NO: 2189144 - RNA, 19 nt, Artificial Sequence
  Description of Artificial Sequence: Synthetic oligonucleotide
  Sense strand starting at position 926 of SEQ ID NO: 1883369
uacaauugucugggaaauu

SEQ ID NO: 2189145 - RNA, 19 nt, Artificial Sequence
  Description of Artificial Sequence: Synthetic oligonucleotide
  Antisense strand to SEQ ID NO: 2189144
aauuucccagacaauugua

SEQ ID NO: 2189146 - RNA, 19 nt, Artificial Sequence
  Description of Artificial Sequence: Synthetic oligonucleotide
  Sense strand starting at position 1132 of SEQ ID NO: 1883369
gaaugcucacgccacaaga

SEQ ID NO: 2189147 - RNA, 19 nt, Artificial Sequence
  Description of Artificial Sequence: Synthetic oligonucleotide
  Antisense strand to SEQ ID NO: 2189146
ucuuguggcgugagcauuc

SEQ ID NO: 2189148 - RNA, 19 nt, Artificial Sequence
  Description of Artificial Sequence: Synthetic oligonucleotide
  Sense strand starting at position 1621 of SEQ ID NO: 1883369
auuaaaugcaaguggugau

SEQ ID NO: 2189149 - RNA, 19 nt, Artificial Sequence
  Description of Artificial Sequence: Synthetic oligonucleotide
  Antisense strand to SEQ ID NO: 2189148
aucaccacuugcauuuaau

SEQ ID NO: 2189150 - RNA, 19 nt, Artificial Sequence
  Description of Artificial Sequence: Synthetic oligonucleotide
  Sense strand starting at position 1671 of SEQ ID NO: 1883369
uagguauugugggcaagga

SEQ ID NO: 2189151 - RNA, 19 nt, Artificial Sequence
  Description of Artificial Sequence: Synthetic oligonucleotide
  Antisense strand to SEQ ID NO: 2189150
uccuugcccacaauaccua

SEQ ID NO: 2189152 - RNA, 19 nt, Artificial Sequence
  Description of Artificial Sequence: Synthetic oligonucleotide
  Sense strand starting at position 1689 of SEQ ID NO: 1883369
acagcaacccaguaaugau

SEQ ID NO: 2189153 - RNA, 19 nt, Artificial Sequence
  Description of Artificial Sequence: Synthetic oligonucleotide
  Antisense strand to SEQ ID NO: 2189152
aucauuacuggguugcugu

SEQ ID NO: 2189154 - RNA, 19 nt, Artificial Sequence
  Description of Artificial Sequence: Synthetic oligonucleotide
  Sense strand starting at position 1697 of SEQ ID NO: 1883369
ccaguaaugauacgugaac

SEQ ID NO: 2189155 - RNA, 19 nt, Artificial Sequence
  Description of Artificial Sequence: Synthetic oligonucleotide
  Antisense strand to SEQ ID NO: 2189154
guucacguaucauuacugg

SEQ ID NO: 2189156 - RNA, 19 nt, Artificial Sequence
  Description of Artificial Sequence: Synthetic oligonucleotide
  Sense strand starting at position 1698 of SEQ ID NO: 1883369
caguaaugauacgugaaca

SEQ ID NO: 2189157 - RNA, 19 nt, Artificial Sequence
  Description of Artificial Sequence: Synthetic oligonucleotide
  Antisense strand to SEQ ID NO: 2189156
uguucacguaucauuacug

SEQ ID NO: 2189158 - RNA, 19 nt, Artificial Sequence
  Description of Artificial Sequence: Synthetic oligonucleotide
  Sense strand starting at position 1699 of SEQ ID NO: 1883369
aguaaugauacgugaacaa

SEQ ID NO: 2189159 - RNA, 19 nt, Artificial Sequence
  Description of Artificial Sequence: Synthetic oligonucleotide
  Antisense strand to SEQ ID NO: 2189158
uuguucacguaucauuacu

SEQ ID NO: 2189160 - RNA, 19 nt, Artificial Sequence
  Description of Artificial Sequence: Synthetic oligonucleotide
  Sense strand starting at position 1706 of SEQ ID NO: 1883369
auacgugaacaauggauga

SEQ ID NO: 2189161 - RNA, 19 nt, Artificial Sequence
  Description of Artificial Sequence: Synthetic oligonucleotide
  Antisense strand to SEQ ID NO: 2189160
ucauccauuguucacguau

SEQ ID NO: 2189162 - RNA, 19 nt, Artificial Sequence
  Description of Artificial Sequence: Synthetic oligonucleotide
  Sense strand starting at position 1710 of SEQ ID NO: 1883369
gugaacaauggaugacgua

SEQ ID NO: 2189163 - RNA, 19 nt, Artificial Sequence
  Description of Artificial Sequence: Synthetic oligonucleotide
  Antisense strand to SEQ ID NO: 2189162
uacgucauccauuguucac

SEQ ID NO: 2189164 - RNA, 19 nt, Artificial Sequence
  Description of Artificial Sequence: Synthetic oligonucleotide
  Sense strand starting at position 1867 of SEQ ID NO: 1883369
cgugucuuuggugaggauu

SEQ ID NO: 2189165 - RNA, 19 nt, Artificial Sequence
  Description of Artificial Sequence: Synthetic oligonucleotide
  Antisense strand to SEQ ID NO: 2189164
aauccucaccaaagacacg

SEQ ID NO: 2189166 - RNA, 19 nt, Artificial Sequence
  Description of Artificial Sequence: Synthetic oligonucleotide
  Sense strand starting at position 1881 of SEQ ID NO: 1883369
ggauuuaaauaagguaagu

SEQ ID NO: 2189167 - RNA, 19 nt, Artificial Sequence
  Description of Artificial Sequence: Synthetic oligonucleotide
  Antisense strand to SEQ ID NO: 2189166
acuuaccuuauuuaaaucc

SEQ ID NO: 2189168 - RNA, 19 nt, Artificial Sequence
  Description of Artificial Sequence: Synthetic oligonucleotide
  Sense strand starting at position 2045 of SEQ ID NO: 1883369
acagcaucugggcaugaua

SEQ ID NO: 2189169 - RNA, 19 nt, Artificial Sequence
  Description of Artificial Sequence: Synthetic oligonucleotide
  Antisense strand to SEQ ID NO: 2189168
uaucaugcccagaugcugu

SEQ ID NO: 2189170 - RNA, 19 nt, Artificial Sequence
  Description of Artificial Sequence: Synthetic oligonucleotide
  Sense strand starting at position 2047 of SEQ ID NO: 1883369
agcaucugggcaugauaau

SEQ ID NO: 2189171 - RNA, 19 nt, Artificial Sequence
  Description of Artificial Sequence: Synthetic oligonucleotide
  Antisense strand to SEQ ID NO: 2189170
auuaucaugcccagaugcu

SEQ ID NO: 2189172 - RNA, 19 nt, Artificial Sequence
  Description of Artificial Sequence: Synthetic oligonucleotide
  Sense strand starting at position 2048 of SEQ ID NO: 1883369
gcaucugggcaugauaaua

SEQ ID NO: 2189173 - RNA, 19 nt, Artificial Sequence
  Description of Artificial Sequence: Synthetic oligonucleotide
  Antisense strand to SEQ ID NO: 2189172
uauuaucaugcccagaugc

SEQ ID NO: 2189174 - RNA, 19 nt, Artificial Sequence
  Description of Artificial Sequence: Synthetic oligonucleotide
  Sense strand starting at position 2328 of SEQ ID NO: 1883369
uuggaauccaaguguauug

SEQ ID NO: 2189175 - RNA, 19 nt, Artificial Sequence
  Description of Artificial Sequence: Synthetic oligonucleotide
  Antisense strand to SEQ ID NO: 2189174
caauacacuuggauuccaa

SEQ ID NO: 2189176 - RNA, 19 nt, Artificial Sequence
  Description of Artificial Sequence: Synthetic oligonucleotide
  Sense strand starting at position 2330 of SEQ ID NO: 1883369
ggaauccaaguguauugua

SEQ ID NO: 2189177 - RNA, 19 nt, Artificial Sequence
  Description of Artificial Sequence: Synthetic oligonucleotide
  Antisense strand to SEQ ID NO: 2189176
uacaauacacuuggauucc

SEQ ID NO: 2189178 - RNA, 19 nt, Artificial Sequence
  Description of Artificial Sequence: Synthetic oligonucleotide
  Sense strand starting at position 2424 of SEQ ID NO: 1883369
ggacacaucagcuguagau

SEQ ID NO: 2189179 - RNA, 19 nt, Artificial Sequence
  Description of Artificial Sequence: Synthetic oligonucleotide
  Antisense strand to SEQ ID NO: 2189178
aucuacagcugaugugucc

SEQ ID NO: 2189180 - RNA, 19 nt, Artificial Sequence
  Description of Artificial Sequence: Synthetic oligonucleotide
  Sense strand starting at position 2426 of SEQ ID NO: 1883369
acacaucagcuguagauaa

SEQ ID NO: 2189181 - RNA, 19 nt, Artificial Sequence
  Description of Artificial Sequence: Synthetic oligonucleotide
  Antisense strand to SEQ ID NO: 2189180
uuaucuacagcugaugugu

SEQ ID NO: 2189182 - RNA, 19 nt, Artificial Sequence
  Description of Artificial Sequence: Synthetic oligonucleotide
  Sense strand starting at position 2459 of SEQ ID NO: 1883369
aagauuuaaucagcagcgu

SEQ ID NO: 2189183 - RNA, 19 nt, Artificial Sequence
  Description of Artificial Sequence: Synthetic oligonucleotide
  Antisense strand to SEQ ID NO: 2189182
acgcugcugauuaaaucuu

SEQ ID NO: 2189184 - RNA, 19 nt, Artificial Sequence
  Description of Artificial Sequence: Synthetic oligonucleotide
  Sense strand starting at position 2509 of SEQ ID NO: 1883369
gugcuugggauggauuaua

SEQ ID NO: 2189185 - RNA, 19 nt, Artificial Sequence
  Description of Artificial Sequence: Synthetic oligonucleotide
  Antisense strand to SEQ ID NO: 2189184
uauaauccaucccaagcac

SEQ ID NO: 2189186 - RNA, 19 nt, Artificial Sequence
  Description of Artificial Sequence: Synthetic oligonucleotide
  Sense strand starting at position 2536 of SEQ ID NO: 1883369
acaguacaagccuaaugau

SEQ ID NO: 2189187 - RNA, 19 nt, Artificial Sequence
  Description of Artificial Sequence: Synthetic oligonucleotide
  Antisense strand to SEQ ID NO: 2189186
aucauuaggcuuguacugu

SEQ ID NO: 2189188 - RNA, 19 nt, Artificial Sequence
  Description of Artificial Sequence: Synthetic oligonucleotide
  Sense strand starting at position 2886 of SEQ ID NO: 1883369
gcuaucaugaucuagugga

SEQ ID NO: 2189189 - RNA, 19 nt, Artificial Sequence
  Description of Artificial Sequence: Synthetic oligonucleotide
  Antisense strand to SEQ ID NO: 2189188
uccacuagaucaugauagc

SEQ ID NO: 2189190 - RNA, 19 nt, Artificial Sequence
  Description of Artificial Sequence: Synthetic oligonucleotide
  Sense strand starting at position 2890 of SEQ ID NO: 1883369
ucaugaucuaguggaagcu

SEQ ID NO: 2189191 - RNA, 19 nt, Artificial Sequence
  Description of Artificial Sequence: Synthetic oligonucleotide
  Antisense strand to SEQ ID NO: 2189190
agcuuccacuagaucauga

SEQ ID NO: 2189192 - RNA, 19 nt, Artificial Sequence
  Description of Artificial Sequence: Synthetic oligonucleotide
  Sense strand starting at position 2903 of SEQ ID NO: 1883369
gaagcuauccagggucuga

SEQ ID NO: 2189193 - RNA, 19 nt, Artificial Sequence
  Description of Artificial Sequence: Synthetic oligonucleotide
  Antisense strand to SEQ ID NO: 2189192
ucagacccuggauagcuuc

SEQ ID NO: 2189194 - RNA, 19 nt, Artificial Sequence
  Description of Artificial Sequence: Synthetic oligonucleotide
  Sense strand starting at position 2968 of SEQ ID NO: 1883369
agcacugugaaaugagagu

SEQ ID NO: 2189195 - RNA, 19 nt, Artificial Sequence
  Description of Artificial Sequence: Synthetic oligonucleotide
  Antisense strand to SEQ ID NO: 2189194
acucucauuucacagugcu

SEQ ID NO: 2189196 - RNA, 19 nt, Artificial Sequence
  Description of Artificial Sequence: Synthetic oligonucleotide
  Sense strand starting at position 3046 of SEQ ID NO: 1883369
gggcuauuaggcuagauau

SEQ ID NO: 2189197 - RNA, 19 nt, Artificial Sequence
  Description of Artificial Sequence: Synthetic oligonucleotide
  Antisense strand to SEQ ID NO: 2189196
auaucuagccuaauagccc

SEQ ID NO: 2189198 - RNA, 19 nt, Artificial Sequence
  Description of Artificial Sequence: Synthetic oligonucleotide
  Sense strand starting at position 3048 of SEQ ID NO: 1883369
gcuauuaggcuagauauaa

SEQ ID NO: 2189199 - RNA, 19 nt, Artificial Sequence
  Description of Artificial Sequence: Synthetic oligonucleotide
  Antisense strand to SEQ ID NO: 2189198
uuauaucuagccuaauagc

SEQ ID NO: 2189200 - RNA, 19 nt, Artificial Sequence
  Description of Artificial Sequence: Synthetic oligonucleotide
  Sense strand starting at position 3126 of SEQ ID NO: 1883369
aguauacaguuucuaguua

SEQ ID NO: 2189201 - RNA, 19 nt, Artificial Sequence
  Description of Artificial Sequence: Synthetic oligonucleotide
  Antisense strand to SEQ ID NO: 2189200
uaacuagaaacuguauacu

SEQ ID NO: 2189202 - RNA, 19 nt, Artificial Sequence
  Description of Artificial Sequence: Synthetic oligonucleotide
  Sense strand starting at position 3144 of SEQ ID NO: 1883369
agcuuacuugguuauauaa

SEQ ID NO: 2189203 - RNA, 19 nt, Artificial Sequence
  Description of Artificial Sequence: Synthetic oligonucleotide
  Antisense strand to SEQ ID NO: 2189202
uuauauaaccaaguaagcu

SEQ ID NO: 2189204 - RNA, 19 nt, Artificial Sequence
  Description of Artificial Sequence: Synthetic oligonucleotide
  Sense strand starting at position 3632 of SEQ ID NO: 1883369
auugaaacugucuacuagu

SEQ ID NO: 2189205 - RNA, 19 nt, Artificial Sequence
  Description of Artificial Sequence: Synthetic oligonucleotide
  Antisense strand to SEQ ID NO: 2189204
acuaguagacaguuucaau

SEQ ID NO: 2189206 - RNA, 19 nt, Artificial Sequence
  Description of Artificial Sequence: Synthetic oligonucleotide
  Sense strand starting at position 3748 of SEQ ID NO: 1883369
ccaggacagguuuguugau

SEQ ID NO: 2189207 - RNA, 19 nt, Artificial Sequence
  Description of Artificial Sequence: Synthetic oligonucleotide
  Antisense strand to SEQ ID NO: 2189206
aucaacaaaccuguccugg

SEQ ID NO: 2189208 - RNA, 19 nt, Artificial Sequence
  Description of Artificial Sequence: Synthetic oligonucleotide
  Sense strand starting at position 3754 of SEQ ID NO: 1883369
cagguuuguugaucugaac

SEQ ID NO: 2189209 - RNA, 19 nt, Artificial Sequence
  Description of Artificial Sequence: Synthetic oligonucleotide
  Antisense strand to SEQ ID NO: 2189208
guucagaucaacaaaccug

SEQ ID NO: 2189210 - RNA, 19 nt, Artificial Sequence
  Description of Artificial Sequence: Synthetic oligonucleotide
  Sense strand starting at position 570 of SEQ ID NO: 1883370
ggaguuaccaugugaucug

SEQ ID NO: 2189211 - RNA, 19 nt, Artificial Sequence
  Description of Artificial Sequence: Synthetic oligonucleotide
  Antisense strand to SEQ ID NO: 2189210
cagaucacaugguaacucc

SEQ ID NO: 2189212 - RNA, 19 nt, Artificial Sequence
  Description of Artificial Sequence: Synthetic oligonucleotide
  Sense strand starting at position 738 of SEQ ID NO: 1883370
agagcuauacaaugacauc

SEQ ID NO: 2189213 - RNA, 19 nt, Artificial Sequence
  Description of Artificial Sequence: Synthetic oligonucleotide
  Antisense strand to SEQ ID NO: 2189212
gaugucauuguauagcucu

SEQ ID NO: 2189214 - RNA, 19 nt, Artificial Sequence
  Description of Artificial Sequence: Synthetic oligonucleotide
  Sense strand starting at position 744 of SEQ ID NO: 1883370
auacaaugacaucguuugu

SEQ ID NO: 2189215 - RNA, 19 nt, Artificial Sequence
  Description of Artificial Sequence: Synthetic oligonucleotide
  Antisense strand to SEQ ID NO: 2189214
acaaacgaugucauuguau

SEQ ID NO: 2189216 - RNA, 19 nt, Artificial Sequence
  Description of Artificial Sequence: Synthetic oligonucleotide
  Sense strand starting at position 800 of SEQ ID NO: 1883370
augagacagccuugauaac

SEQ ID NO: 2189217 - RNA, 19 nt, Artificial Sequence
  Description of Artificial Sequence: Synthetic oligonucleotide
  Antisense strand to SEQ ID NO: 2189216
guuaucaaggcugucucau

SEQ ID NO: 2189218 - RNA, 19 nt, Artificial Sequence
  Description of Artificial Sequence: Synthetic oligonucleotide
  Sense strand starting at position 817 of SEQ ID NO: 1883370
acauuaagcugagugaaag

SEQ ID NO: 2189219 - RNA, 19 nt, Artificial Sequence
  Description of Artificial Sequence: Synthetic oligonucleotide
  Antisense strand to SEQ ID NO: 2189218
cuuucacucagcuuaaugu

SEQ ID NO: 2189220 - RNA, 19 nt, Artificial Sequence
  Description of Artificial Sequence: Synthetic oligonucleotide
  Sense strand starting at position 842 of SEQ ID NO: 1883370
gucacaaaguccucaaauu

SEQ ID NO: 2189221 - RNA, 19 nt, Artificial Sequence
  Description of Artificial Sequence: Synthetic oligonucleotide
  Antisense strand to SEQ ID NO: 2189220
aauuugaggacuuugugac

SEQ ID NO: 2189222 - RNA, 19 nt, Artificial Sequence
  Description of Artificial Sequence: Synthetic oligonucleotide
  Sense strand starting at position 920 of SEQ ID NO: 1883370
auaaguggucacuggaagu

SEQ ID NO: 2189223 - RNA, 19 nt, Artificial Sequence
  Description of Artificial Sequence: Synthetic oligonucleotide
  Antisense strand to SEQ ID NO: 2189222
acuuccagugaccacuuau

SEQ ID NO: 2189224 - RNA, 19 nt, Artificial Sequence
  Description of Artificial Sequence: Synthetic oligonucleotide
  Sense strand starting at position 966 of SEQ ID NO: 1883370
ugcuaauaggugugggauu

SEQ ID NO: 2189225 - RNA, 19 nt, Artificial Sequence
  Description of Artificial Sequence: Synthetic oligonucleotide
  Antisense strand to SEQ ID NO: 2189224
aaucccacaccuauuagca

SEQ ID NO: 2189226 - RNA, 19 nt, Artificial Sequence
  Description of Artificial Sequence: Synthetic oligonucleotide
  Sense strand starting at position 1023 of SEQ ID NO: 1883370
augguaauaguuuguacaa

SEQ ID NO: 2189227 - RNA, 19 nt, Artificial Sequence
  Description of Artificial Sequence: Synthetic oligonucleotide
  Antisense strand to SEQ ID NO: 2189226
uuguacaaacuauuaccau

SEQ ID NO: 2189228 - RNA, 19 nt, Artificial Sequence
  Description of Artificial Sequence: Synthetic oligonucleotide
  Sense strand starting at position 1024 of SEQ ID NO: 1883370
ugguaauaguuuguacaac

SEQ ID NO: 2189229 - RNA, 19 nt, Artificial Sequence
  Description of Artificial Sequence: Synthetic oligonucleotide
  Antisense strand to SEQ ID NO: 2189228
guuguacaaacuauuacca

SEQ ID NO: 2189230 - RNA, 19 nt, Artificial Sequence
  Description of Artificial Sequence: Synthetic oligonucleotide
  Sense strand starting at position 1080 of SEQ ID NO: 1883370
gagugaauaguaugaugug

SEQ ID NO: 2189231 - RNA, 19 nt, Artificial Sequence
  Description of Artificial Sequence: Synthetic oligonucleotide
  Antisense strand to SEQ ID NO: 2189230
cacaucauacuauucacuc

SEQ ID NO: 2189232 - RNA, 19 nt, Artificial Sequence
  Description of Artificial Sequence: Synthetic oligonucleotide
  Sense strand starting at position 1086 of SEQ ID NO: 1883370
auaguaugaugugugaauu

SEQ ID NO: 2189233 - RNA, 19 nt, Artificial Sequence
  Description of Artificial Sequence: Synthetic oligonucleotide
  Antisense strand to SEQ ID NO: 2189232
aauucacacaucauacuau

SEQ ID NO: 2189234 - RNA, 19 nt, Artificial Sequence
  Description of Artificial Sequence: Synthetic oligonucleotide
  Sense strand starting at position 1087 of SEQ ID NO: 1883370
uaguaugaugugugaauua

SEQ ID NO: 2189235 - RNA, 19 nt, Artificial Sequence
  Description of Artificial Sequence: Synthetic oligonucleotide
  Antisense strand to SEQ ID NO: 2189234
uaauucacacaucauacua

SEQ ID NO: 2189236 - RNA, 19 nt, Artificial Sequence
  Description of Artificial Sequence: Synthetic oligonucleotide
  Sense strand starting at position 1097 of SEQ ID NO: 1883370
ugugaauuauaccucagca

SEQ ID NO: 2189237 - RNA, 19 nt, Artificial Sequence
  Description of Artificial Sequence: Synthetic oligonucleotide
  Antisense strand to SEQ ID NO: 2189236
ugcugagguauaauucaca

SEQ ID NO: 2189238 - RNA, 19 nt, Artificial Sequence
  Description of Artificial Sequence: Synthetic oligonucleotide
  Sense strand starting at position 1239 of SEQ ID NO: 1883370
acugcuuccuaugcacaga

SEQ ID NO: 2189239 - RNA, 19 nt, Artificial Sequence
  Description of Artificial Sequence: Synthetic oligonucleotide
  Antisense strand to SEQ ID NO: 2189238
ucugugcauaggaagcagu

SEQ ID NO: 2189240 - RNA, 19 nt, Artificial Sequence
  Description of Artificial Sequence: Synthetic oligonucleotide
  Sense strand starting at position 1296 of SEQ ID NO: 1883370
gaccacuuguggccuacaa

SEQ ID NO: 2189241 - RNA, 19 nt, Artificial Sequence
  Description of Artificial Sequence: Synthetic oligonucleotide
  Antisense strand to SEQ ID NO: 2189240
uuguaggccacaagugguc

SEQ ID NO: 2189242 - RNA, 19 nt, Artificial Sequence
  Description of Artificial Sequence: Synthetic oligonucleotide
  Sense strand starting at position 1298 of SEQ ID NO: 1883370
ccacuuguggccuacaaau

SEQ ID NO: 2189243 - RNA, 19 nt, Artificial Sequence
  Description of Artificial Sequence: Synthetic oligonucleotide
  Antisense strand to SEQ ID NO: 2189242
auuuguaggccacaagugg

SEQ ID NO: 2189244 - RNA, 19 nt, Artificial Sequence
  Description of Artificial Sequence: Synthetic oligonucleotide
  Sense strand starting at position 1689 of SEQ ID NO: 1883370
cugcuugaugauuggcuaa

SEQ ID NO: 2189245 - RNA, 19 nt, Artificial Sequence
  Description of Artificial Sequence: Synthetic oligonucleotide
  Antisense strand to SEQ ID NO: 2189244
uuagccaaucaucaagcag

SEQ ID NO: 2189246 - RNA, 19 nt, Artificial Sequence
  Description of Artificial Sequence: Synthetic oligonucleotide
  Sense strand starting at position 1691 of SEQ ID NO: 1883370
gcuugaugauuggcuaauc

SEQ ID NO: 2189247 - RNA, 19 nt, Artificial Sequence
  Description of Artificial Sequence: Synthetic oligonucleotide
  Antisense strand to SEQ ID NO: 2189246
gauuagccaaucaucaagc

SEQ ID NO: 2189248 - RNA, 19 nt, Artificial Sequence
  Description of Artificial Sequence: Synthetic oligonucleotide
  Sense strand starting at position 1707 of SEQ ID NO: 1883370
auccuauggugguuuccaa

SEQ ID NO: 2189249 - RNA, 19 nt, Artificial Sequence
  Description of Artificial Sequence: Synthetic oligonucleotide
  Antisense strand to SEQ ID NO: 2189248
uuggaaaccaccauaggau

SEQ ID NO: 2189250 - RNA, 19 nt, Artificial Sequence
  Description of Artificial Sequence: Synthetic oligonucleotide
  Sense strand starting at position 1915 of SEQ ID NO: 1883370
cuugcauuggauuagcaga

SEQ ID NO: 2189251 - RNA, 19 nt, Artificial Sequence
  Description of Artificial Sequence: Synthetic oligonucleotide
  Antisense strand to SEQ ID NO: 2189250
ucugcuaauccaaugcaag

SEQ ID NO: 2189252 - RNA, 19 nt, Artificial Sequence
  Description of Artificial Sequence: Synthetic oligonucleotide
  Sense strand starting at position 2115 of SEQ ID NO: 1883370
uuuacuugguguuuaaauc

SEQ ID NO: 2189253 - RNA, 19 nt, Artificial Sequence
  Description of Artificial Sequence: Synthetic oligonucleotide
  Antisense strand to SEQ ID NO: 2189252
gauuuaaacaccaaguaaa

SEQ ID NO: 2189254 - RNA, 19 nt, Artificial Sequence
  Description of Artificial Sequence: Synthetic oligonucleotide
  Sense strand starting at position 2116 of SEQ ID NO: 1883370
uuacuugguguuuaaauca

SEQ ID NO: 2189255 - RNA, 19 nt, Artificial Sequence
  Description of Artificial Sequence: Synthetic oligonucleotide
  Antisense strand to SEQ ID NO: 2189254
ugauuuaaacaccaaguaa

SEQ ID NO: 2189256 - RNA, 19 nt, Artificial Sequence
  Description of Artificial Sequence: Synthetic oligonucleotide
  Sense strand starting at position 2121 of SEQ ID NO: 1883370
ugguguuuaaaucagaguu

SEQ ID NO: 2189257 - RNA, 19 nt, Artificial Sequence
  Description of Artificial Sequence: Synthetic oligonucleotide
  Antisense strand to SEQ ID NO: 2189256
aacucugauuuaaacacca

SEQ ID NO: 2189258 - RNA, 19 nt, Artificial Sequence
  Description of Artificial Sequence: Synthetic oligonucleotide
  Sense strand starting at position 2159 of SEQ ID NO: 1883370
auguaacuguccuuucuau

SEQ ID NO: 2189259 - RNA, 19 nt, Artificial Sequence
  Description of Artificial Sequence: Synthetic oligonucleotide
  Antisense strand to SEQ ID NO: 2189258
auagaaaggacaguuacau

SEQ ID NO: 2189260 - RNA, 19 nt, Artificial Sequence
  Description of Artificial Sequence: Synthetic oligonucleotide
  Sense strand starting at position 2235 of SEQ ID NO: 1883370
gccuuugcagccuuguuau

SEQ ID NO: 2189261 - RNA, 19 nt, Artificial Sequence
  Description of Artificial Sequence: Synthetic oligonucleotide
  Antisense strand to SEQ ID NO: 2189260
auaacaaggcugcaaaggc

SEQ ID NO: 2189262 - RNA, 19 nt, Artificial Sequence
  Description of Artificial Sequence: Synthetic oligonucleotide
  Sense strand starting at position 2315 of SEQ ID NO: 1883370
cuggaaaugucaccagggu

SEQ ID NO: 2189263 - RNA, 19 nt, Artificial Sequence
  Description of Artificial Sequence: Synthetic oligonucleotide
  Antisense strand to SEQ ID NO: 2189262
acccuggugacauuuccag

SEQ ID NO: 2189264 - RNA, 19 nt, Artificial Sequence
  Description of Artificial Sequence: Synthetic oligonucleotide
  Sense strand starting at position 2316 of SEQ ID NO: 1883370
uggaaaugucaccaggguu

SEQ ID NO: 2189265 - RNA, 19 nt, Artificial Sequence
  Description of Artificial Sequence: Synthetic oligonucleotide
  Antisense strand to SEQ ID NO: 2189264
aacccuggugacauuucca

SEQ ID NO: 2189266 - RNA, 19 nt, Artificial Sequence
  Description of Artificial Sequence: Synthetic oligonucleotide
  Sense strand starting at position 2419 of SEQ ID NO: 1883370
ccagcagguacucgauaaa

SEQ ID NO: 2189267 - RNA, 19 nt, Artificial Sequence
  Description of Artificial Sequence: Synthetic oligonucleotide
  Antisense strand to SEQ ID NO: 2189266
uuuaucgaguaccugcugg

SEQ ID NO: 2189268 - RNA, 19 nt, Artificial Sequence
  Description of Artificial Sequence: Synthetic oligonucleotide
  Sense strand starting at position 2422 of SEQ ID NO: 1883370
gcagguacucgauaaauau

SEQ ID NO: 2189269 - RNA, 19 nt, Artificial Sequence
  Description of Artificial Sequence: Synthetic oligonucleotide
  Antisense strand to SEQ ID NO: 2189268
auauuuaucgaguaccugc

SEQ ID NO: 2189270 - RNA, 19 nt, Artificial Sequence
  Description of Artificial Sequence: Synthetic oligonucleotide
  Sense strand starting at position 2430 of SEQ ID NO: 1883370
ucgauaaauauugggugaa

SEQ ID NO: 2189271 - RNA, 19 nt, Artificial Sequence
  Description of Artificial Sequence: Synthetic oligonucleotide
  Antisense strand to SEQ ID NO: 2189270
uucacccaauauuuaucga

SEQ ID NO: 2189272 - RNA, 19 nt, Artificial Sequence
  Description of Artificial Sequence: Synthetic oligonucleotide
  Sense strand starting at position 2538 of SEQ ID NO: 1883370
gaugucuuccuccggauuu

SEQ ID NO: 2189273 - RNA, 19 nt, Artificial Sequence
  Description of Artificial Sequence: Synthetic oligonucleotide
  Antisense strand to SEQ ID NO: 2189272
aaauccggaggaagacauc

SEQ ID NO: 2189274 - RNA, 19 nt, Artificial Sequence
  Description of Artificial Sequence: Synthetic oligonucleotide
  Sense strand starting at position 2638 of SEQ ID NO: 1883370
ccuugugggcaugaagagu

SEQ ID NO: 2189275 - RNA, 19 nt, Artificial Sequence
  Description of Artificial Sequence: Synthetic oligonucleotide
  Antisense strand to SEQ ID NO: 2189274
acucuucaugcccacaagg

SEQ ID NO: 2189276 - RNA, 19 nt, Artificial Sequence
  Description of Artificial Sequence: Synthetic oligonucleotide
  Sense strand starting at position 2764 of SEQ ID NO: 1883370
ggaggugcucuaggcugaa

SEQ ID NO: 2189277 - RNA, 19 nt, Artificial Sequence
  Description of Artificial Sequence: Synthetic oligonucleotide
  Antisense strand to SEQ ID NO: 2189276
uucagccuagagcaccucc

SEQ ID NO: 2189278 - RNA, 19 nt, Artificial Sequence
  Description of Artificial Sequence: Synthetic oligonucleotide
  Sense strand starting at position 3389 of SEQ ID NO: 1883370
ccugucaauuccucuguca

SEQ ID NO: 2189279 - RNA, 19 nt, Artificial Sequence
  Description of Artificial Sequence: Synthetic oligonucleotide
  Antisense strand to SEQ ID NO: 2189278
ugacagaggaauugacagg

SEQ ID NO: 2189280 - RNA, 19 nt, Artificial Sequence
  Description of Artificial Sequence: Synthetic oligonucleotide
  Sense strand starting at position 3391 of SEQ ID NO: 1883370
ugucaauuccucugucauu

SEQ ID NO: 2189281 - RNA, 19 nt, Artificial Sequence
  Description of Artificial Sequence: Synthetic oligonucleotide
  Antisense strand to SEQ ID NO: 2189280
aaugacagaggaauugaca

SEQ ID NO: 2189282 - RNA, 19 nt, Artificial Sequence
  Description of Artificial Sequence: Synthetic oligonucleotide
  Sense strand starting at position 3392 of SEQ ID NO: 1883370
gucaauuccucugucauuc

SEQ ID NO: 2189283 - RNA, 19 nt, Artificial Sequence
  Description of Artificial Sequence: Synthetic oligonucleotide
  Antisense strand to SEQ ID NO: 2189282
gaaugacagaggaauugac

SEQ ID NO: 2189284 - RNA, 19 nt, Artificial Sequence
  Description of Artificial Sequence: Synthetic oligonucleotide
  Sense strand starting at position 3826 of SEQ ID NO: 1883370
gggagauguguuugagugu

SEQ ID NO: 2189285 - RNA, 19 nt, Artificial Sequence
  Description of Artificial Sequence: Synthetic oligonucleotide
  Antisense strand to SEQ ID NO: 2189284
acacucaaacacaucuccc

SEQ ID NO: 2189286 - RNA, 19 nt, Artificial Sequence
  Description of Artificial Sequence: Synthetic oligonucleotide
  Sense strand starting at position 3892 of SEQ ID NO: 1883370
ugcaaaguggguuguauca

SEQ ID NO: 2189287 - RNA, 19 nt, Artificial Sequence
  Description of Artificial Sequence: Synthetic oligonucleotide
  Antisense strand to SEQ ID NO: 2189286
ugauacaacccacuuugca

SEQ ID NO: 2189288 - RNA, 19 nt, Artificial Sequence
  Description of Artificial Sequence: Synthetic oligonucleotide
  Sense strand starting at position 3983 of SEQ ID NO: 1883370
agaugcuugcuuuaacuuu

SEQ ID NO: 2189289 - RNA, 19 nt, Artificial Sequence
  Description of Artificial Sequence: Synthetic oligonucleotide
  Antisense strand to SEQ ID NO: 2189288
aaaguuaaagcaagcaucu

SEQ ID NO: 2189290 - RNA, 19 nt, Artificial Sequence
  Description of Artificial Sequence: Synthetic oligonucleotide
  Sense strand starting at position 365 of SEQ ID NO: 1883371
ugacuaaaugauuguaacu

SEQ ID NO: 2189291 - RNA, 19 nt, Artificial Sequence
  Description of Artificial Sequence: Synthetic oligonucleotide
  Antisense strand to SEQ ID NO: 2189290
aguuacaaucauuuaguca

SEQ ID NO: 2189292 - RNA, 19 nt, Artificial Sequence
  Description of Artificial Sequence: Synthetic oligonucleotide
  Sense strand starting at position 697 of SEQ ID NO: 1883371
uggcgauaaauguaauuaa

SEQ ID NO: 2189293 - RNA, 19 nt, Artificial Sequence
  Description of Artificial Sequence: Synthetic oligonucleotide
  Antisense strand to SEQ ID NO: 2189292
uuaauuacauuuaucgcca

SEQ ID NO: 2189294 - RNA, 19 nt, Artificial Sequence
  Description of Artificial Sequence: Synthetic oligonucleotide
  Sense strand starting at position 1091 of SEQ ID NO: 1883371
acagucuugaccugugaga

SEQ ID NO: 2189295 - RNA, 19 nt, Artificial Sequence
  Description of Artificial Sequence: Synthetic oligonucleotide
  Antisense strand to SEQ ID NO: 2189294
ucucacaggucaagacugu

SEQ ID NO: 2189296 - RNA, 19 nt, Artificial Sequence
  Description of Artificial Sequence: Synthetic oligonucleotide
  Sense strand starting at position 1093 of SEQ ID NO: 1883371
agucuugaccugugagaua

SEQ ID NO: 2189297 - RNA, 19 nt, Artificial Sequence
  Description of Artificial Sequence: Synthetic oligonucleotide
  Antisense strand to SEQ ID NO: 2189296
uaucucacaggucaagacu

SEQ ID NO: 2189298 - RNA, 19 nt, Artificial Sequence
  Description of Artificial Sequence: Synthetic oligonucleotide
  Sense strand starting at position 1231 of SEQ ID NO: 1883371
gcgugcauggucucuaaug

SEQ ID NO: 2189299 - RNA, 19 nt, Artificial Sequence
  Description of Artificial Sequence: Synthetic oligonucleotide
  Antisense strand to SEQ ID NO: 2189298
cauuagagaccaugcacgc

SEQ ID NO: 2189300 - RNA, 19 nt, Artificial Sequence
  Description of Artificial Sequence: Synthetic oligonucleotide
  Sense strand starting at position 1233 of SEQ ID NO: 1883371
gugcauggucucuaaugaa

SEQ ID NO: 2189301 - RNA, 19 nt, Artificial Sequence
  Description of Artificial Sequence: Synthetic oligonucleotide
  Antisense strand to SEQ ID NO: 2189300
uucauuagagaccaugcac

SEQ ID NO: 2189302 - RNA, 19 nt, Artificial Sequence
  Description of Artificial Sequence: Synthetic oligonucleotide
  Sense strand starting at position 1286 of SEQ ID NO: 1883371
ccugcaaaucuugagagcu

SEQ ID NO: 2189303 - RNA, 19 nt, Artificial Sequence
  Description of Artificial Sequence: Synthetic oligonucleotide
  Antisense strand to SEQ ID NO: 2189302
agcucucaagauuugcagg

SEQ ID NO: 2189304 - RNA, 19 nt, Artificial Sequence
  Description of Artificial Sequence: Synthetic oligonucleotide
  Sense strand starting at position 1294 of SEQ ID NO: 1883371
ucuugagagcuuggagaca

SEQ ID NO: 2189305 - RNA, 19 nt, Artificial Sequence
  Description of Artificial Sequence: Synthetic oligonucleotide
  Antisense strand to SEQ ID NO: 2189304
ugucuccaagcucucaaga

SEQ ID NO: 2189306 - RNA, 19 nt, Artificial Sequence
  Description of Artificial Sequence: Synthetic oligonucleotide
  Sense strand starting at position 1433 of SEQ ID NO: 1883371
cucacaagucaauguaaug

SEQ ID NO: 2189307 - RNA, 19 nt, Artificial Sequence
  Description of Artificial Sequence: Synthetic oligonucleotide
  Antisense strand to SEQ ID NO: 2189306
cauuacauugacuugugag

SEQ ID NO: 2189308 - RNA, 19 nt, Artificial Sequence
  Description of Artificial Sequence: Synthetic oligonucleotide
  Sense strand starting at position 1481 of SEQ ID NO: 1883371
cuuuguuuaagaggaugaa

SEQ ID NO: 2189309 - RNA, 19 nt, Artificial Sequence
  Description of Artificial Sequence: Synthetic oligonucleotide
  Antisense strand to SEQ ID NO: 2189308
uucauccucuuaaacaaag

SEQ ID NO: 2189310 - RNA, 19 nt, Artificial Sequence
  Description of Artificial Sequence: Synthetic oligonucleotide
  Sense strand starting at position 1524 of SEQ ID NO: 1883371
gagacuuguuugguugaaa

SEQ ID NO: 2189311 - RNA, 19 nt, Artificial Sequence
  Description of Artificial Sequence: Synthetic oligonucleotide
  Antisense strand to SEQ ID NO: 2189310
uuucaaccaaacaagucuc

SEQ ID NO: 2189312 - RNA, 19 nt, Artificial Sequence
  Description of Artificial Sequence: Synthetic oligonucleotide
  Sense strand starting at position 1525 of SEQ ID NO: 1883371
agacuuguuugguugaaag

SEQ ID NO: 2189313 - RNA, 19 nt, Artificial Sequence
  Description of Artificial Sequence: Synthetic oligonucleotide
  Antisense strand to SEQ ID NO: 2189312
cuuucaaccaaacaagucu

SEQ ID NO: 2189314 - RNA, 19 nt, Artificial Sequence
  Description of Artificial Sequence: Synthetic oligonucleotide
  Sense strand starting at position 1649 of SEQ ID NO: 1883371
aagugugcaagucagagaa

SEQ ID NO: 2189315 - RNA, 19 nt, Artificial Sequence
  Description of Artificial Sequence: Synthetic oligonucleotide
  Antisense strand to SEQ ID NO: 2189314
uucucugacuugcacacuu

SEQ ID NO: 2189316 - RNA, 19 nt, Artificial Sequence
  Description of Artificial Sequence: Synthetic oligonucleotide
  Sense strand starting at position 1653 of SEQ ID NO: 1883371
gugcaagucagagaacuag

SEQ ID NO: 2189317 - RNA, 19 nt, Artificial Sequence
  Description of Artificial Sequence: Synthetic oligonucleotide
  Antisense strand to SEQ ID NO: 2189316
cuaguucucugacuugcac

SEQ ID NO: 2189318 - RNA, 19 nt, Artificial Sequence
  Description of Artificial Sequence: Synthetic oligonucleotide
  Sense strand starting at position 1782 of SEQ ID NO: 1883371
cucagaauaguguauauug

SEQ ID NO: 2189319 - RNA, 19 nt, Artificial Sequence
  Description of Artificial Sequence: Synthetic oligonucleotide
  Antisense strand to SEQ ID NO: 2189318
caauauacacuauucugag

SEQ ID NO: 2189320 - RNA, 19 nt, Artificial Sequence
  Description of Artificial Sequence: Synthetic oligonucleotide
  Sense strand starting at position 1896 of SEQ ID NO: 1883371
ugaggcaacucacuuaaua

SEQ ID NO: 2189321 - RNA, 19 nt, Artificial Sequence
  Description of Artificial Sequence: Synthetic oligonucleotide
  Antisense strand to SEQ ID NO: 2189320
uauuaagugaguugccuca

SEQ ID NO: 2189322 - RNA, 19 nt, Artificial Sequence
  Description of Artificial Sequence: Synthetic oligonucleotide
  Sense strand starting at position 2045 of SEQ ID NO: 1883371
gcccuuugugaacaauaaa

SEQ ID NO: 2189323 - RNA, 19 nt, Artificial Sequence
  Description of Artificial Sequence: Synthetic oligonucleotide
  Antisense strand to SEQ ID NO: 2189322
uuuauuguucacaaagggc

SEQ ID NO: 2189324 - RNA, 19 nt, Artificial Sequence
  Description of Artificial Sequence: Synthetic oligonucleotide
  Sense strand starting at position 2192 of SEQ ID NO: 1883371
ccgucaauugcuuaaggga

SEQ ID NO: 2189325 - RNA, 19 nt, Artificial Sequence
  Description of Artificial Sequence: Synthetic oligonucleotide
  Antisense strand to SEQ ID NO: 2189324
ucccuuaagcaauugacgg

SEQ ID NO: 2189326 - RNA, 19 nt, Artificial Sequence
  Description of Artificial Sequence: Synthetic oligonucleotide
  Sense strand starting at position 2248 of SEQ ID NO: 1883371
ggcaguuguuuauuuaguu

SEQ ID NO: 2189327 - RNA, 19 nt, Artificial Sequence
  Description of Artificial Sequence: Synthetic oligonucleotide
  Antisense strand to SEQ ID NO: 2189326
aacuaaauaaacaacugcc

SEQ ID NO: 2189328 - RNA, 19 nt, Artificial Sequence
  Description of Artificial Sequence: Synthetic oligonucleotide
  Sense strand starting at position 2268 of SEQ ID NO: 1883371
uuugaaauguuuccaagga

SEQ ID NO: 2189329 - RNA, 19 nt, Artificial Sequence
  Description of Artificial Sequence: Synthetic oligonucleotide
  Antisense strand to SEQ ID NO: 2189328
uccuuggaaacauuucaaa

SEQ ID NO: 2189330 - RNA, 19 nt, Artificial Sequence
  Description of Artificial Sequence: Synthetic oligonucleotide
  Sense strand starting at position 2378 of SEQ ID NO: 1883371
gacauuugcugagcaguau

SEQ ID NO: 2189331 - RNA, 19 nt, Artificial Sequence
  Description of Artificial Sequence: Synthetic oligonucleotide
  Antisense strand to SEQ ID NO: 2189330
auacugcucagcaaauguc

SEQ ID NO: 2189332 - RNA, 19 nt, Artificial Sequence
  Description of Artificial Sequence: Synthetic oligonucleotide
  Sense strand starting at position 2592 of SEQ ID NO: 1883371
cugagaagauguuuccuac

SEQ ID NO: 2189333 - RNA, 19 nt, Artificial Sequence
  Description of Artificial Sequence: Synthetic oligonucleotide
  Antisense strand to SEQ ID NO: 2189332
guaggaaacaucuucucag

SEQ ID NO: 2189334 - RNA, 19 nt, Artificial Sequence
  Description of Artificial Sequence: Synthetic oligonucleotide
  Sense strand starting at position 2686 of SEQ ID NO: 1883371
aacaguuuauaaucgugaa

SEQ ID NO: 2189335 - RNA, 19 nt, Artificial Sequence
  Description of Artificial Sequence: Synthetic oligonucleotide
  Antisense strand to SEQ ID NO: 2189334
uucacgauuauaaacuguu

SEQ ID NO: 2189336 - RNA, 19 nt, Artificial Sequence
  Description of Artificial Sequence: Synthetic oligonucleotide
  Sense strand starting at position 2843 of SEQ ID NO: 1883371
ugaagaaauugauugagcu

SEQ ID NO: 2189337 - RNA, 19 nt, Artificial Sequence
  Description of Artificial Sequence: Synthetic oligonucleotide
  Antisense strand to SEQ ID NO: 2189336
agcucaaucaauuucuuca

SEQ ID NO: 2189338 - RNA, 19 nt, Artificial Sequence
  Description of Artificial Sequence: Synthetic oligonucleotide
  Sense strand starting at position 2844 of SEQ ID NO: 1883371
gaagaaauugauugagcuc

SEQ ID NO: 2189339 - RNA, 19 nt, Artificial Sequence
  Description of Artificial Sequence: Synthetic oligonucleotide
  Antisense strand to SEQ ID NO: 2189338
gagcucaaucaauuucuuc

SEQ ID NO: 2189340 - RNA, 19 nt, Artificial Sequence
  Description of Artificial Sequence: Synthetic oligonucleotide
  Sense strand starting at position 2847 of SEQ ID NO: 1883371
gaaauugauugagcucaga

SEQ ID NO: 2189341 - RNA, 19 nt, Artificial Sequence
  Description of Artificial Sequence: Synthetic oligonucleotide
  Antisense strand to SEQ ID NO: 2189340
ucugagcucaaucaauuuc

SEQ ID NO: 2189342 - RNA, 19 nt, Artificial Sequence
  Description of Artificial Sequence: Synthetic oligonucleotide
  Sense strand starting at position 3048 of SEQ ID NO: 1883371
augggagauuuauaaucga

SEQ ID NO: 2189343 - RNA, 19 nt, Artificial Sequence
  Description of Artificial Sequence: Synthetic oligonucleotide
  Antisense strand to SEQ ID NO: 2189342
ucgauuauaaaucucccau

SEQ ID NO: 2189344 - RNA, 19 nt, Artificial Sequence
  Description of Artificial Sequence: Synthetic oligonucleotide
  Sense strand starting at position 3072 of SEQ ID NO: 1883371
uaaagucgaucacuaauga

SEQ ID NO: 2189345 - RNA, 19 nt, Artificial Sequence
  Description of Artificial Sequence: Synthetic oligonucleotide
  Antisense strand to SEQ ID NO: 2189344
ucauuagugaucgacuuua

SEQ ID NO: 2189346 - RNA, 19 nt, Artificial Sequence
  Description of Artificial Sequence: Synthetic oligonucleotide
  Sense strand starting at position 3144 of SEQ ID NO: 1883371
ggcuuccauuuguuaaugu

SEQ ID NO: 2189347 - RNA, 19 nt, Artificial Sequence
  Description of Artificial Sequence: Synthetic oligonucleotide
  Antisense strand to SEQ ID NO: 2189346
acauuaacaaauggaagcc

SEQ ID NO: 2189348 - RNA, 19 nt, Artificial Sequence
  Description of Artificial Sequence: Synthetic oligonucleotide
  Sense strand starting at position 3195 of SEQ ID NO: 1883371
ugggcuaugagccacagaa

SEQ ID NO: 2189349 - RNA, 19 nt, Artificial Sequence
  Description of Artificial Sequence: Synthetic oligonucleotide
  Antisense strand to SEQ ID NO: 2189348
uucuguggcucauagccca

SEQ ID NO: 2189350 - RNA, 19 nt, Artificial Sequence
  Description of Artificial Sequence: Synthetic oligonucleotide
  Sense strand starting at position 3250 of SEQ ID NO: 1883371
aguaaacugccuugaggaa

SEQ ID NO: 2189351 - RNA, 19 nt, Artificial Sequence
  Description of Artificial Sequence: Synthetic oligonucleotide
  Antisense strand to SEQ ID NO: 2189350
uuccucaaggcaguuuacu

SEQ ID NO: 2189352 - RNA, 19 nt, Artificial Sequence
  Description of Artificial Sequence: Synthetic oligonucleotide
  Sense strand starting at position 3263 of SEQ ID NO: 1883371
gaggaaauggucugccaca

SEQ ID NO: 2189353 - RNA, 19 nt, Artificial Sequence
  Description of Artificial Sequence: Synthetic oligonucleotide
  Antisense strand to SEQ ID NO: 2189352
uguggcagaccauuuccuc

SEQ ID NO: 2189354 - RNA, 19 nt, Artificial Sequence
  Description of Artificial Sequence: Synthetic oligonucleotide
  Sense strand starting at position 3264 of SEQ ID NO: 1883371
aggaaauggucugccacaa

SEQ ID NO: 2189355 - RNA, 19 nt, Artificial Sequence
  Description of Artificial Sequence: Synthetic oligonucleotide
  Antisense strand to SEQ ID NO: 2189354
uuguggcagaccauuuccu

SEQ ID NO: 2189356 - RNA, 19 nt, Artificial Sequence
  Description of Artificial Sequence: Synthetic oligonucleotide
  Sense strand starting at position 3277 of SEQ ID NO: 1883371
ccacaaacaucuguaguua

SEQ ID NO: 2189357 - RNA, 19 nt, Artificial Sequence
  Description of Artificial Sequence: Synthetic oligonucleotide
  Antisense strand to SEQ ID NO: 2189356
uaacuacagauguuugugg

SEQ ID NO: 2189358 - RNA, 19 nt, Artificial Sequence
  Description of Artificial Sequence: Synthetic oligonucleotide
  Sense strand starting at position 3496 of SEQ ID NO: 1883371
uugagaauucuugguccaa

SEQ ID NO: 2189359 - RNA, 19 nt, Artificial Sequence
  Description of Artificial Sequence: Synthetic oligonucleotide
  Antisense strand to SEQ ID NO: 2189358
uuggaccaagaauucucaa

SEQ ID NO: 2189360 - RNA, 19 nt, Artificial Sequence
  Description of Artificial Sequence: Synthetic oligonucleotide
  Sense strand starting at position 3497 of SEQ ID NO: 1883371
ugagaauucuugguccaaa

SEQ ID NO: 2189361 - RNA, 19 nt, Artificial Sequence
  Description of Artificial Sequence: Synthetic oligonucleotide
  Antisense strand to SEQ ID NO: 2189360
uuuggaccaagaauucuca

SEQ ID NO: 2189362 - RNA, 19 nt, Artificial Sequence
  Description of Artificial Sequence: Synthetic oligonucleotide
  Sense strand starting at position 3498 of SEQ ID NO: 1883371
gagaauucuugguccaaac

SEQ ID NO: 2189363 - RNA, 19 nt, Artificial Sequence
  Description of Artificial Sequence: Synthetic oligonucleotide
  Antisense strand to SEQ ID NO: 2189362
guuuggaccaagaauucuc

SEQ ID NO: 2189364 - RNA, 19 nt, Artificial Sequence
  Description of Artificial Sequence: Synthetic oligonucleotide
  Sense strand starting at position 3522 of SEQ ID NO: 1883371
ggacuugguagcuggaaga

SEQ ID NO: 2189365 - RNA, 19 nt, Artificial Sequence
  Description of Artificial Sequence: Synthetic oligonucleotide
  Antisense strand to SEQ ID NO: 2189364
ucuuccagcuaccaagucc

SEQ ID NO: 2189366 - RNA, 19 nt, Artificial Sequence
  Description of Artificial Sequence: Synthetic oligonucleotide
  Sense strand starting at position 3577 of SEQ ID NO: 1883371
cggcaaauuugggcucauu

SEQ ID NO: 2189367 - RNA, 19 nt, Artificial Sequence
  Description of Artificial Sequence: Synthetic oligonucleotide
  Antisense strand to SEQ ID NO: 2189366
aaugagcccaaauuugccg

SEQ ID NO: 2189368 - RNA, 19 nt, Artificial Sequence
  Description of Artificial Sequence: Synthetic oligonucleotide
  Sense strand starting at position 3590 of SEQ ID NO: 1883371
cucauuuguucugcuggau

SEQ ID NO: 2189369 - RNA, 19 nt, Artificial Sequence
  Description of Artificial Sequence: Synthetic oligonucleotide
  Antisense strand to SEQ ID NO: 2189368
auccagcagaacaaaugag

SEQ ID NO: 2189370 - RNA, 19 nt, Artificial Sequence
  Description of Artificial Sequence: Synthetic oligonucleotide
  Sense strand starting at position 36 of SEQ ID NO: 1883372
cugugcauaguguuugcaa

SEQ ID NO: 2189371 - RNA, 19 nt, Artificial Sequence
  Description of Artificial Sequence: Synthetic oligonucleotide
  Antisense strand to SEQ ID NO: 2189370
uugcaaacacuaugcacag

SEQ ID NO: 2189372 - RNA, 19 nt, Artificial Sequence
  Description of Artificial Sequence: Synthetic oligonucleotide
  Sense strand starting at position 204 of SEQ ID NO: 1883372
gcaauuacagaagguuacu

SEQ ID NO: 2189373 - RNA, 19 nt, Artificial Sequence
  Description of Artificial Sequence: Synthetic oligonucleotide
  Antisense strand to SEQ ID NO: 2189372
aguaaccuucuguaauugc

SEQ ID NO: 2189374 - RNA, 19 nt, Artificial Sequence
  Description of Artificial Sequence: Synthetic oligonucleotide
  Sense strand starting at position 280 of SEQ ID NO: 1883372
ggcagugaauuggugagaa

SEQ ID NO: 2189375 - RNA, 19 nt, Artificial Sequence
  Description of Artificial Sequence: Synthetic oligonucleotide
  Antisense strand to SEQ ID NO: 2189374
uucucaccaauucacugcc

SEQ ID NO: 2189376 - RNA, 19 nt, Artificial Sequence
  Description of Artificial Sequence: Synthetic oligonucleotide
  Sense strand starting at position 313 of SEQ ID NO: 1883372
agugaagugccugaaucca

SEQ ID NO: 2189377 - RNA, 19 nt, Artificial Sequence
  Description of Artificial Sequence: Synthetic oligonucleotide
  Antisense strand to SEQ ID NO: 2189376
uggauucaggcacuucacu

SEQ ID NO: 2189378 - RNA, 19 nt, Artificial Sequence
  Description of Artificial Sequence: Synthetic oligonucleotide
  Sense strand starting at position 321 of SEQ ID NO: 1883372
gccugaauccagcagaaca

SEQ ID NO: 2189379 - RNA, 19 nt, Artificial Sequence
  Description of Artificial Sequence: Synthetic oligonucleotide
  Antisense strand to SEQ ID NO: 2189378
uguucugcuggauucaggc

SEQ ID NO: 2189380 - RNA, 19 nt, Artificial Sequence
  Description of Artificial Sequence: Synthetic oligonucleotide
  Sense strand starting at position 415 of SEQ ID NO: 1883372
gucuguuuggaccaagaau

SEQ ID NO: 2189381 - RNA, 19 nt, Artificial Sequence
  Description of Artificial Sequence: Synthetic oligonucleotide
  Antisense strand to SEQ ID NO: 2189380
auucuugguccaaacagac

SEQ ID NO: 2189382 - RNA, 19 nt, Artificial Sequence
  Description of Artificial Sequence: Synthetic oligonucleotide
  Sense strand starting at position 522 of SEQ ID NO: 1883372
agaugaacaucaguacuuu

SEQ ID NO: 2189383 - RNA, 19 nt, Artificial Sequence
  Description of Artificial Sequence: Synthetic oligonucleotide
  Antisense strand to SEQ ID NO: 2189382
aaaguacugauguucaucu

SEQ ID NO: 2189384 - RNA, 19 nt, Artificial Sequence
  Description of Artificial Sequence: Synthetic oligonucleotide
  Sense strand starting at position 575 of SEQ ID NO: 1883372
agcuaugaaucacugacuu

SEQ ID NO: 2189385 - RNA, 19 nt, Artificial Sequence
  Description of Artificial Sequence: Synthetic oligonucleotide
  Antisense strand to SEQ ID NO: 2189384
aagucagugauucauagcu

SEQ ID NO: 2189386 - RNA, 19 nt, Artificial Sequence
  Description of Artificial Sequence: Synthetic oligonucleotide
  Sense strand starting at position 744 of SEQ ID NO: 1883372
guagaauguguacagcaga

SEQ ID NO: 2189387 - RNA, 19 nt, Artificial Sequence
  Description of Artificial Sequence: Synthetic oligonucleotide
  Antisense strand to SEQ ID NO: 2189386
ucugcuguacacauucuac

SEQ ID NO: 2189388 - RNA, 19 nt, Artificial Sequence
  Description of Artificial Sequence: Synthetic oligonucleotide
  Sense strand starting at position 755 of SEQ ID NO: 1883372
acagcagauguuugaauga

SEQ ID NO: 2189389 - RNA, 19 nt, Artificial Sequence
  Description of Artificial Sequence: Synthetic oligonucleotide
  Antisense strand to SEQ ID NO: 2189388
ucauucaaacaucugcugu

SEQ ID NO: 2189390 - RNA, 19 nt, Artificial Sequence
  Description of Artificial Sequence: Synthetic oligonucleotide
  Sense strand starting at position 982 of SEQ ID NO: 1883372
aucagauuucugugcacuc

SEQ ID NO: 2189391 - RNA, 19 nt, Artificial Sequence
  Description of Artificial Sequence: Synthetic oligonucleotide
  Antisense strand to SEQ ID NO: 2189390
gagugcacagaaaucugau

SEQ ID NO: 2189392 - RNA, 19 nt, Artificial Sequence
  Description of Artificial Sequence: Synthetic oligonucleotide
  Sense strand starting at position 1024 of SEQ ID NO: 1883372
gaaauuauggaaggugguu

SEQ ID NO: 2189393 - RNA, 19 nt, Artificial Sequence
  Description of Artificial Sequence: Synthetic oligonucleotide
  Antisense strand to SEQ ID NO: 2189392
aaccaccuuccauaauuuc

SEQ ID NO: 2189394 - RNA, 19 nt, Artificial Sequence
  Description of Artificial Sequence: Synthetic oligonucleotide
  Sense strand starting at position 1029 of SEQ ID NO: 1883372
uauggaaggugguugauua

SEQ ID NO: 2189395 - RNA, 19 nt, Artificial Sequence
  Description of Artificial Sequence: Synthetic oligonucleotide
  Antisense strand to SEQ ID NO: 2189394
uaaucaaccaccuuccaua

SEQ ID NO: 2189396 - RNA, 19 nt, Artificial Sequence
  Description of Artificial Sequence: Synthetic oligonucleotide
  Sense strand starting at position 1030 of SEQ ID NO: 1883372
auggaaggugguugauuau

SEQ ID NO: 2189397 - RNA, 19 nt, Artificial Sequence
  Description of Artificial Sequence: Synthetic oligonucleotide
  Antisense strand to SEQ ID NO: 2189396
auaaucaaccaccuuccau

SEQ ID NO: 2189398 - RNA, 19 nt, Artificial Sequence
  Description of Artificial Sequence: Synthetic oligonucleotide
  Sense strand starting at position 1051 of SEQ ID NO: 1883372
uagacaucugaaggauugu

SEQ ID NO: 2189399 - RNA, 19 nt, Artificial Sequence
  Description of Artificial Sequence: Synthetic oligonucleotide
  Antisense strand to SEQ ID NO: 2189398
acaauccuucagaugucua

SEQ ID NO: 2189400 - RNA, 19 nt, Artificial Sequence
  Description of Artificial Sequence: Synthetic oligonucleotide
  Sense strand starting at position 1066 of SEQ ID NO: 1883372
uuguucugagcucaaucaa

SEQ ID NO: 2189401 - RNA, 19 nt, Artificial Sequence
  Description of Artificial Sequence: Synthetic oligonucleotide
  Antisense strand to SEQ ID NO: 2189400
uugauugagcucagaacaa

SEQ ID NO: 2189402 - RNA, 19 nt, Artificial Sequence
  Description of Artificial Sequence: Synthetic oligonucleotide
  Sense strand starting at position 1246 of SEQ ID NO: 1883372
uguuacuuugggcaaagga

SEQ ID NO: 2189403 - RNA, 19 nt, Artificial Sequence
  Description of Artificial Sequence: Synthetic oligonucleotide
  Antisense strand to SEQ ID NO: 2189402
uccuuugcccaaaguaaca

SEQ ID NO: 2189404 - RNA, 19 nt, Artificial Sequence
  Description of Artificial Sequence: Synthetic oligonucleotide
  Sense strand starting at position 1256 of SEQ ID NO: 1883372
ggcaaaggauuguuuccaa

SEQ ID NO: 2189405 - RNA, 19 nt, Artificial Sequence
  Description of Artificial Sequence: Synthetic oligonucleotide
  Antisense strand to SEQ ID NO: 2189404
uuggaaacaauccuuugcc

SEQ ID NO: 2189406 - RNA, 19 nt, Artificial Sequence
  Description of Artificial Sequence: Synthetic oligonucleotide
  Sense strand starting at position 1263 of SEQ ID NO: 1883372
gauuguuuccaagaagcca

SEQ ID NO: 2189407 - RNA, 19 nt, Artificial Sequence
  Description of Artificial Sequence: Synthetic oligonucleotide
  Antisense strand to SEQ ID NO: 2189406
uggcuucuuggaaacaauc

SEQ ID NO: 2189408 - RNA, 19 nt, Artificial Sequence
  Description of Artificial Sequence: Synthetic oligonucleotide
  Sense strand starting at position 1271 of SEQ ID NO: 1883372
ccaagaagccaaugaauug

SEQ ID NO: 2189409 - RNA, 19 nt, Artificial Sequence
  Description of Artificial Sequence: Synthetic oligonucleotide
  Antisense strand to SEQ ID NO: 2189408
caauucauuggcuucuugg

SEQ ID NO: 2189410 - RNA, 19 nt, Artificial Sequence
  Description of Artificial Sequence: Synthetic oligonucleotide
  Sense strand starting at position 1718 of SEQ ID NO: 1883372
ggagcaaucccuuaagcaa

SEQ ID NO: 2189411 - RNA, 19 nt, Artificial Sequence
  Description of Artificial Sequence: Synthetic oligonucleotide
  Antisense strand to SEQ ID NO: 2189410
uugcuuaagggauugcucc

SEQ ID NO: 2189412 - RNA, 19 nt, Artificial Sequence
  Description of Artificial Sequence: Synthetic oligonucleotide
  Sense strand starting at position 1743 of SEQ ID NO: 1883372
guucuuugggagcagaaau

SEQ ID NO: 2189413 - RNA, 19 nt, Artificial Sequence
  Description of Artificial Sequence: Synthetic oligonucleotide
  Antisense strand to SEQ ID NO: 2189412
auuucugcucccaaagaac

SEQ ID NO: 2189414 - RNA, 19 nt, Artificial Sequence
  Description of Artificial Sequence: Synthetic oligonucleotide
  Sense strand starting at position 1797 of SEQ ID NO: 1883372
cuaccuuaaucugugagag

SEQ ID NO: 2189415 - RNA, 19 nt, Artificial Sequence
  Description of Artificial Sequence: Synthetic oligonucleotide
  Antisense strand to SEQ ID NO: 2189414
cucucacagauuaagguag

SEQ ID NO: 2189416 - RNA, 19 nt, Artificial Sequence
  Description of Artificial Sequence: Synthetic oligonucleotide
  Sense strand starting at position 1798 of SEQ ID NO: 1883372
uaccuuaaucugugagaga

SEQ ID NO: 2189417 - RNA, 19 nt, Artificial Sequence
  Description of Artificial Sequence: Synthetic oligonucleotide
  Antisense strand to SEQ ID NO: 2189416
ucucucacagauuaaggua

SEQ ID NO: 2189418 - RNA, 19 nt, Artificial Sequence
  Description of Artificial Sequence: Synthetic oligonucleotide
  Sense strand starting at position 1860 of SEQ ID NO: 1883372
uguuuaucgugauuuauug

SEQ ID NO: 2189419 - RNA, 19 nt, Artificial Sequence
  Description of Artificial Sequence: Synthetic oligonucleotide
  Antisense strand to SEQ ID NO: 2189418
caauaaaucacgauaaaca

SEQ ID NO: 2189420 - RNA, 19 nt, Artificial Sequence
  Description of Artificial Sequence: Synthetic oligonucleotide
  Sense strand starting at position 1917 of SEQ ID NO: 1883372
uuacaacuuccuugugaag

SEQ ID NO: 2189421 - RNA, 19 nt, Artificial Sequence
  Description of Artificial Sequence: Synthetic oligonucleotide
  Antisense strand to SEQ ID NO: 2189420
cuucacaaggaaguuguaa

SEQ ID NO: 2189422 - RNA, 19 nt, Artificial Sequence
  Description of Artificial Sequence: Synthetic oligonucleotide
  Sense strand starting at position 2005 of SEQ ID NO: 1883372
aacugagacuuguugauau

SEQ ID NO: 2189423 - RNA, 19 nt, Artificial Sequence
  Description of Artificial Sequence: Synthetic oligonucleotide
  Antisense strand to SEQ ID NO: 2189422
auaucaacaagucucaguu

SEQ ID NO: 2189424 - RNA, 19 nt, Artificial Sequence
  Description of Artificial Sequence: Synthetic oligonucleotide
  Sense strand starting at position 2141 of SEQ ID NO: 1883372
acacuauucugagccaaag

SEQ ID NO: 2189425 - RNA, 19 nt, Artificial Sequence
  Description of Artificial Sequence: Synthetic oligonucleotide
  Antisense strand to SEQ ID NO: 2189424
cuuuggcucagaauagugu

SEQ ID NO: 2189426 - RNA, 19 nt, Artificial Sequence
  Description of Artificial Sequence: Synthetic oligonucleotide
  Sense strand starting at position 2226 of SEQ ID NO: 1883372
gagacuuccuguuuagaag

SEQ ID NO: 2189427 - RNA, 19 nt, Artificial Sequence
  Description of Artificial Sequence: Synthetic oligonucleotide
  Antisense strand to SEQ ID NO: 2189426
cuucuaaacaggaagucuc

SEQ ID NO: 2189428 - RNA, 19 nt, Artificial Sequence
  Description of Artificial Sequence: Synthetic oligonucleotide
  Sense strand starting at position 2480 of SEQ ID NO: 1883372
ggagcauuacauugacuug

SEQ ID NO: 2189429 - RNA, 19 nt, Artificial Sequence
  Description of Artificial Sequence: Synthetic oligonucleotide
  Antisense strand to SEQ ID NO: 2189428
caagucaauguaaugcucc

SEQ ID NO: 2189430 - RNA, 19 nt, Artificial Sequence
  Description of Artificial Sequence: Synthetic oligonucleotide
  Sense strand starting at position 2548 of SEQ ID NO: 1883372
caagcagaucaaggugaaa

SEQ ID NO: 2189431 - RNA, 19 nt, Artificial Sequence
  Description of Artificial Sequence: Synthetic oligonucleotide
  Antisense strand to SEQ ID NO: 2189430
uuucaccuugaucugcuug

SEQ ID NO: 2189432 - RNA, 19 nt, Artificial Sequence
  Description of Artificial Sequence: Synthetic oligonucleotide
  Sense strand starting at position 2821 of SEQ ID NO: 1883372
ggguaucucacaggucaag

SEQ ID NO: 2189433 - RNA, 19 nt, Artificial Sequence
  Description of Artificial Sequence: Synthetic oligonucleotide
  Antisense strand to SEQ ID NO: 2189432
cuugaccugugagauaccc

SEQ ID NO: 2189434 - RNA, 19 nt, Artificial Sequence
  Description of Artificial Sequence: Synthetic oligonucleotide
  Sense strand starting at position 2833 of SEQ ID NO: 1883372
ggucaagacuguccaggau

SEQ ID NO: 2189435 - RNA, 19 nt, Artificial Sequence
  Description of Artificial Sequence: Synthetic oligonucleotide
  Antisense strand to SEQ ID NO: 2189434
auccuggacagucuugacc

SEQ ID NO: 2189436 - RNA, 19 nt, Artificial Sequence
  Description of Artificial Sequence: Synthetic oligonucleotide
  Sense strand starting at position 3270 of SEQ ID NO: 1883372
gcacauuaucugggaaauu

SEQ ID NO: 2189437 - RNA, 19 nt, Artificial Sequence
  Description of Artificial Sequence: Synthetic oligonucleotide
  Antisense strand to SEQ ID NO: 2189436
aauuucccagauaaugugc

SEQ ID NO: 2189438 - RNA, 19 nt, Artificial Sequence
  Description of Artificial Sequence: Synthetic oligonucleotide
  Sense strand starting at position 3395 of SEQ ID NO: 1883372
ugguaucaucuuuaugaua

SEQ ID NO: 2189439 - RNA, 19 nt, Artificial Sequence
  Description of Artificial Sequence: Synthetic oligonucleotide
  Antisense strand to SEQ ID NO: 2189438
uaucauaaagaugauacca

SEQ ID NO: 2189440 - RNA, 19 nt, Artificial Sequence
  Description of Artificial Sequence: Synthetic oligonucleotide
  Sense strand starting at position 3760 of SEQ ID NO: 1883372
aagaaaggguguuugaagu

SEQ ID NO: 2189441 - RNA, 19 nt, Artificial Sequence
  Description of Artificial Sequence: Synthetic oligonucleotide
  Antisense strand to SEQ ID NO: 2189440
acuucaaacacccuuucuu

SEQ ID NO: 2189442 - RNA, 19 nt, Artificial Sequence
  Description of Artificial Sequence: Synthetic oligonucleotide
  Sense strand starting at position 3766 of SEQ ID NO: 1883372
ggguguuugaaguacagga

SEQ ID NO: 2189443 - RNA, 19 nt, Artificial Sequence
  Description of Artificial Sequence: Synthetic oligonucleotide
  Antisense strand to SEQ ID NO: 2189442
uccuguacuucaaacaccc

SEQ ID NO: 2189444 - RNA, 19 nt, Artificial Sequence
  Description of Artificial Sequence: Synthetic oligonucleotide
  Sense strand starting at position 3768 of SEQ ID NO: 1883372
guguuugaaguacaggauu

SEQ ID NO: 2189445 - RNA, 19 nt, Artificial Sequence
  Description of Artificial Sequence: Synthetic oligonucleotide
  Antisense strand to SEQ ID NO: 2189444
aauccuguacuucaaacac

SEQ ID NO: 2189446 - RNA, 19 nt, Artificial Sequence
  Description of Artificial Sequence: Synthetic oligonucleotide
  Sense strand starting at position 3863 of SEQ ID NO: 1883372
gcugccaccucuuugauuu

SEQ ID NO: 2189447 - RNA, 19 nt, Artificial Sequence
  Description of Artificial Sequence: Synthetic oligonucleotide
  Antisense strand to SEQ ID NO: 2189446
aaaucaaagagguggcagc

SEQ ID NO: 2189448 - RNA, 19 nt, Artificial Sequence
  Description of Artificial Sequence: Synthetic oligonucleotide
  Sense strand starting at position 3902 of SEQ ID NO: 1883372
aguuuagcaguuuaugaag

SEQ ID NO: 2189449 - RNA, 19 nt, Artificial Sequence
  Description of Artificial Sequence: Synthetic oligonucleotide
  Antisense strand to SEQ ID NO: 2189448
cuucauaaacugcuaaacu

SEQ ID NO: 2189450 - RNA, 19 nt, Artificial Sequence
  Description of Artificial Sequence: Synthetic oligonucleotide
  Sense strand starting at position 386 of SEQ ID NO: 1883373
ugauuugaguguccagcuu

SEQ ID NO: 2189451 - RNA, 19 nt, Artificial Sequence
  Description of Artificial Sequence: Synthetic oligonucleotide
  Antisense strand to SEQ ID NO: 2189450
aagcuggacacucaaauca

SEQ ID NO: 2189452 - RNA, 19 nt, Artificial Sequence
  Description of Artificial Sequence: Synthetic oligonucleotide
  Sense strand starting at position 517 of SEQ ID NO: 1883373
gcaggucauccagaagagu

SEQ ID NO: 2189453 - RNA, 19 nt, Artificial Sequence
  Description of Artificial Sequence: Synthetic oligonucleotide
  Antisense strand to SEQ ID NO: 2189452
acucuucuggaugaccugc

SEQ ID NO: 2189454 - RNA, 19 nt, Artificial Sequence
  Description of Artificial Sequence: Synthetic oligonucleotide
  Sense strand starting at position 1256 of SEQ ID NO: 1883373
guaaaccuacggugauauu

SEQ ID NO: 2189455 - RNA, 19 nt, Artificial Sequence
  Description of Artificial Sequence: Synthetic oligonucleotide
  Antisense strand to SEQ ID NO: 2189454
aauaucaccguagguuuac

SEQ ID NO: 2189456 - RNA, 19 nt, Artificial Sequence
  Description of Artificial Sequence: Synthetic oligonucleotide
  Sense strand starting at position 1257 of SEQ ID NO: 1883373
uaaaccuacggugauauua

SEQ ID NO: 2189457 - RNA, 19 nt, Artificial Sequence
  Description of Artificial Sequence: Synthetic oligonucleotide
  Antisense strand to SEQ ID NO: 2189456
uaauaucaccguagguuua

SEQ ID NO: 2189458 - RNA, 19 nt, Artificial Sequence
  Description of Artificial Sequence: Synthetic oligonucleotide
  Sense strand starting at position 1327 of SEQ ID NO: 1883373
ccacucugauauucgaagu

SEQ ID NO: 2189459 - RNA, 19 nt, Artificial Sequence
  Description of Artificial Sequence: Synthetic oligonucleotide
  Antisense strand to SEQ ID NO: 2189458
acuucgaauaucagagugg

SEQ ID NO: 2189460 - RNA, 19 nt, Artificial Sequence
  Description of Artificial Sequence: Synthetic oligonucleotide
  Sense strand starting at position 1614 of SEQ ID NO: 1883373
gaagaauaucaugggugua

SEQ ID NO: 2189461 - RNA, 19 nt, Artificial Sequence
  Description of Artificial Sequence: Synthetic oligonucleotide
  Antisense strand to SEQ ID NO: 2189460
uacacccaugauauucuuc

SEQ ID NO: 2189462 - RNA, 19 nt, Artificial Sequence
  Description of Artificial Sequence: Synthetic oligonucleotide
  Sense strand starting at position 1616 of SEQ ID NO: 1883373
agaauaucauggguguaca

SEQ ID NO: 2189463 - RNA, 19 nt, Artificial Sequence
  Description of Artificial Sequence: Synthetic oligonucleotide
  Antisense strand to SEQ ID NO: 2189462
uguacacccaugauauucu

SEQ ID NO: 2189464 - RNA, 19 nt, Artificial Sequence
  Description of Artificial Sequence: Synthetic oligonucleotide
  Sense strand starting at position 1617 of SEQ ID NO: 1883373
gaauaucauggguguacac

SEQ ID NO: 2189465 - RNA, 19 nt, Artificial Sequence
  Description of Artificial Sequence: Synthetic oligonucleotide
  Antisense strand to SEQ ID NO: 2189464
guguacacccaugauauuc

SEQ ID NO: 2189466 - RNA, 19 nt, Artificial Sequence
  Description of Artificial Sequence: Synthetic oligonucleotide
  Sense strand starting at position 1676 of SEQ ID NO: 1883373
gaagaauaccacugggugu

SEQ ID NO: 2189467 - RNA, 19 nt, Artificial Sequence
  Description of Artificial Sequence: Synthetic oligonucleotide
  Antisense strand to SEQ ID NO: 2189466
acacccagugguauucuuc

SEQ ID NO: 2189468 - RNA, 19 nt, Artificial Sequence
  Description of Artificial Sequence: Synthetic oligonucleotide
  Sense strand starting at position 1689 of SEQ ID NO: 1883373
ggguguacgcccucuguca

SEQ ID NO: 2189469 - RNA, 19 nt, Artificial Sequence
  Description of Artificial Sequence: Synthetic oligonucleotide
  Antisense strand to SEQ ID NO: 2189468
ugacagagggcguacaccc

SEQ ID NO: 2189470 - RNA, 19 nt, Artificial Sequence
  Description of Artificial Sequence: Synthetic oligonucleotide
  Sense strand starting at position 1690 of SEQ ID NO: 1883373
gguguacgcccucugucau

SEQ ID NO: 2189471 - RNA, 19 nt, Artificial Sequence
  Description of Artificial Sequence: Synthetic oligonucleotide
  Antisense strand to SEQ ID NO: 2189470
augacagagggcguacacc

SEQ ID NO: 2189472 - RNA, 19 nt, Artificial Sequence
  Description of Artificial Sequence: Synthetic oligonucleotide
  Sense strand starting at position 1705 of SEQ ID NO: 1883373
ucauauuaggagugacauc

SEQ ID NO: 2189473 - RNA, 19 nt, Artificial Sequence
  Description of Artificial Sequence: Synthetic oligonucleotide
  Antisense strand to SEQ ID NO: 2189472
gaugucacuccuaauauga

SEQ ID NO: 2189474 - RNA, 19 nt, Artificial Sequence
  Description of Artificial Sequence: Synthetic oligonucleotide
  Sense strand starting at position 1916 of SEQ ID NO: 1883373
augucauguuuaccaugga

SEQ ID NO: 2189475 - RNA, 19 nt, Artificial Sequence
  Description of Artificial Sequence: Synthetic oligonucleotide
  Antisense strand to SEQ ID NO: 2189474
uccaugguaaacaugacau

SEQ ID NO: 2189476 - RNA, 19 nt, Artificial Sequence
  Description of Artificial Sequence: Synthetic oligonucleotide
  Sense strand starting at position 2037 of SEQ ID NO: 1883373
guuauaacucuguaauauc

SEQ ID NO: 2189477 - RNA, 19 nt, Artificial Sequence
  Description of Artificial Sequence: Synthetic oligonucleotide
  Antisense strand to SEQ ID NO: 2189476
gauauuacagaguuauaac

SEQ ID NO: 2189478 - RNA, 19 nt, Artificial Sequence
  Description of Artificial Sequence: Synthetic oligonucleotide
  Sense strand starting at position 2074 of SEQ ID NO: 1883373
auaucacagugaguguaaa

SEQ ID NO: 2189479 - RNA, 19 nt, Artificial Sequence
  Description of Artificial Sequence: Synthetic oligonucleotide
  Antisense strand to SEQ ID NO: 2189478
uuuacacucacugugauau

SEQ ID NO: 2189480 - RNA, 19 nt, Artificial Sequence
  Description of Artificial Sequence: Synthetic oligonucleotide
  Sense strand starting at position 2155 of SEQ ID NO: 1883373
aauauuaucgaagggugua

SEQ ID NO: 2189481 - RNA, 19 nt, Artificial Sequence
  Description of Artificial Sequence: Synthetic oligonucleotide
  Antisense strand to SEQ ID NO: 2189480
uacacccuucgauaauauu

SEQ ID NO: 2189482 - RNA, 19 nt, Artificial Sequence
  Description of Artificial Sequence: Synthetic oligonucleotide
  Sense strand starting at position 2156 of SEQ ID NO: 1883373
auauuaucgaaggguguac

SEQ ID NO: 2189483 - RNA, 19 nt, Artificial Sequence
  Description of Artificial Sequence: Synthetic oligonucleotide
  Antisense strand to SEQ ID NO: 2189482
guacacccuucgauaauau

SEQ ID NO: 2189484 - RNA, 19 nt, Artificial Sequence
  Description of Artificial Sequence: Synthetic oligonucleotide
  Sense strand starting at position 2343 of SEQ ID NO: 1883373
uugcauuaggcauaaucuu

SEQ ID NO: 2189485 - RNA, 19 nt, Artificial Sequence
  Description of Artificial Sequence: Synthetic oligonucleotide
  Antisense strand to SEQ ID NO: 2189484
aagauuaugccuaaugcaa

SEQ ID NO: 2189486 - RNA, 19 nt, Artificial Sequence
  Description of Artificial Sequence: Synthetic oligonucleotide
  Sense strand starting at position 2453 of SEQ ID NO: 1883373
gaaauaauauuaccagcgu

SEQ ID NO: 2189487 - RNA, 19 nt, Artificial Sequence
  Description of Artificial Sequence: Synthetic oligonucleotide
  Antisense strand to SEQ ID NO: 2189486
acgcugguaauauuauuuc

SEQ ID NO: 2189488 - RNA, 19 nt, Artificial Sequence
  Description of Artificial Sequence: Synthetic oligonucleotide
  Sense strand starting at position 2601 of SEQ ID NO: 1883373
cgauguuaugaguaauauc

SEQ ID NO: 2189489 - RNA, 19 nt, Artificial Sequence
  Description of Artificial Sequence: Synthetic oligonucleotide
  Antisense strand to SEQ ID NO: 2189488
gauauuacucauaacaucg

SEQ ID NO: 2189490 - RNA, 19 nt, Artificial Sequence
  Description of Artificial Sequence: Synthetic oligonucleotide
  Sense strand starting at position 2621 of SEQ ID NO: 1883373
cagaauguguacucauaug

SEQ ID NO: 2189491 - RNA, 19 nt, Artificial Sequence
  Description of Artificial Sequence: Synthetic oligonucleotide
  Antisense strand to SEQ ID NO: 2189490
cauaugaguacacauucug

SEQ ID NO: 2189492 - RNA, 19 nt, Artificial Sequence
  Description of Artificial Sequence: Synthetic oligonucleotide
  Sense strand starting at position 2809 of SEQ ID NO: 1883373
ugacguuaggagugcauuu

SEQ ID NO: 2189493 - RNA, 19 nt, Artificial Sequence
  Description of Artificial Sequence: Synthetic oligonucleotide
  Antisense strand to SEQ ID NO: 2189492
aaaugcacuccuaacguca

SEQ ID NO: 2189494 - RNA, 19 nt, Artificial Sequence
  Description of Artificial Sequence: Synthetic oligonucleotide
  Sense strand starting at position 2946 of SEQ ID NO: 1883373
aacgucuuucuaggauauu

SEQ ID NO: 2189495 - RNA, 19 nt, Artificial Sequence
  Description of Artificial Sequence: Synthetic oligonucleotide
  Antisense strand to SEQ ID NO: 2189494
aauauccuagaaagacguu

SEQ ID NO: 2189496 - RNA, 19 nt, Artificial Sequence
  Description of Artificial Sequence: Synthetic oligonucleotide
  Sense strand starting at position 3029 of SEQ ID NO: 1883373
ggaauaauaucacagggag

SEQ ID NO: 2189497 - RNA, 19 nt, Artificial Sequence
  Description of Artificial Sequence: Synthetic oligonucleotide
  Antisense strand to SEQ ID NO: 2189496
cucccugugauauuauucc

SEQ ID NO: 2189498 - RNA, 19 nt, Artificial Sequence
  Description of Artificial Sequence: Synthetic oligonucleotide
  Sense strand starting at position 3043 of SEQ ID NO: 1883373
gggaguacaccucauguga

SEQ ID NO: 2189499 - RNA, 19 nt, Artificial Sequence
  Description of Artificial Sequence: Synthetic oligonucleotide
  Antisense strand to SEQ ID NO: 2189498
ucacaugagguguacuccc

SEQ ID NO: 2189500 - RNA, 19 nt, Artificial Sequence
  Description of Artificial Sequence: Synthetic oligonucleotide
  Sense strand starting at position 3195 of SEQ ID NO: 1883373
aguaacaucucccugggau

SEQ ID NO: 2189501 - RNA, 19 nt, Artificial Sequence
  Description of Artificial Sequence: Synthetic oligonucleotide
  Antisense strand to SEQ ID NO: 2189500
aucccagggagauguuacu

SEQ ID NO: 2189502 - RNA, 19 nt, Artificial Sequence
  Description of Artificial Sequence: Synthetic oligonucleotide
  Sense strand starting at position 3196 of SEQ ID NO: 1883373
guaacaucucccugggaua

SEQ ID NO: 2189503 - RNA, 19 nt, Artificial Sequence
  Description of Artificial Sequence: Synthetic oligonucleotide
  Antisense strand to SEQ ID NO: 2189502
uaucccagggagauguuac

SEQ ID NO: 2189504 - RNA, 19 nt, Artificial Sequence
  Description of Artificial Sequence: Synthetic oligonucleotide
  Sense strand starting at position 3284 of SEQ ID NO: 1883373
augauaucacaggguguca

SEQ ID NO: 2189505 - RNA, 19 nt, Artificial Sequence
  Description of Artificial Sequence: Synthetic oligonucleotide
  Antisense strand to SEQ ID NO: 2189504
ugacacccugugauaucau

SEQ ID NO: 2189506 - RNA, 19 nt, Artificial Sequence
  Description of Artificial Sequence: Synthetic oligonucleotide
  Sense strand starting at position 3296 of SEQ ID NO: 1883373
ggugucaacucacuuugau

SEQ ID NO: 2189507 - RNA, 19 nt, Artificial Sequence
  Description of Artificial Sequence: Synthetic oligonucleotide
  Antisense strand to SEQ ID NO: 2189506
aucaaagugaguugacacc

SEQ ID NO: 2189508 - RNA, 19 nt, Artificial Sequence
  Description of Artificial Sequence: Synthetic oligonucleotide
  Sense strand starting at position 3310 of SEQ ID NO: 1883373
uugauauuagaaggacugu

SEQ ID NO: 2189509 - RNA, 19 nt, Artificial Sequence
  Description of Artificial Sequence: Synthetic oligonucleotide
  Antisense strand to SEQ ID NO: 2189508
acaguccuucuaauaucaa

SEQ ID NO: 2189510 - RNA, 19 nt, Artificial Sequence
  Description of Artificial Sequence: Synthetic oligonucleotide
  Sense strand starting at position 3321 of SEQ ID NO: 1883373
aggacugucucccuaggau

SEQ ID NO: 2189511 - RNA, 19 nt, Artificial Sequence
  Description of Artificial Sequence: Synthetic oligonucleotide
  Antisense strand to SEQ ID NO: 2189510
auccuagggagacaguccu

SEQ ID NO: 2189512 - RNA, 19 nt, Artificial Sequence
  Description of Artificial Sequence: Synthetic oligonucleotide
  Sense strand starting at position 3324 of SEQ ID NO: 1883373
acugucucccuaggauaua

SEQ ID NO: 2189513 - RNA, 19 nt, Artificial Sequence
  Description of Artificial Sequence: Synthetic oligonucleotide
  Antisense strand to SEQ ID NO: 2189512
uauauccuagggagacagu

SEQ ID NO: 2189514 - RNA, 19 nt, Artificial Sequence
  Description of Artificial Sequence: Synthetic oligonucleotide
  Sense strand starting at position 3348 of SEQ ID NO: 1883373
ucucaugucacagagugua

SEQ ID NO: 2189515 - RNA, 19 nt, Artificial Sequence
  Description of Artificial Sequence: Synthetic oligonucleotide
  Antisense strand to SEQ ID NO: 2189514
uacacucugugacaugaga

SEQ ID NO: 2189516 - RNA, 19 nt, Artificial Sequence
  Description of Artificial Sequence: Synthetic oligonucleotide
  Sense strand starting at position 3389 of SEQ ID NO: 1883373
uguuauuagcagcaauauc

SEQ ID NO: 2189517 - RNA, 19 nt, Artificial Sequence
  Description of Artificial Sequence: Synthetic oligonucleotide
  Antisense strand to SEQ ID NO: 2189516
gauauugcugcuaauaaca

SEQ ID NO: 2189518 - RNA, 19 nt, Artificial Sequence
  Description of Artificial Sequence: Synthetic oligonucleotide
  Sense strand starting at position 3443 of SEQ ID NO: 1883373
cccucuguggauuacuaga

SEQ ID NO: 2189519 - RNA, 19 nt, Artificial Sequence
  Description of Artificial Sequence: Synthetic oligonucleotide
  Antisense strand to SEQ ID NO: 2189518
ucuaguaauccacagaggg

SEQ ID NO: 2189520 - RNA, 19 nt, Artificial Sequence
  Description of Artificial Sequence: Synthetic oligonucleotide
  Sense strand starting at position 3539 of SEQ ID NO: 1883373
gugauaucucucgaagaua

SEQ ID NO: 2189521 - RNA, 19 nt, Artificial Sequence
  Description of Artificial Sequence: Synthetic oligonucleotide
  Antisense strand to SEQ ID NO: 2189520
uaucuucgagagauaucac

SEQ ID NO: 2189522 - RNA, 19 nt, Artificial Sequence
  Description of Artificial Sequence: Synthetic oligonucleotide
  Sense strand starting at position 3791 of SEQ ID NO: 1883373
uugugacauuagucauaau

SEQ ID NO: 2189523 - RNA, 19 nt, Artificial Sequence
  Description of Artificial Sequence: Synthetic oligonucleotide
  Antisense strand to SEQ ID NO: 2189522
auuaugacuaaugucacaa

SEQ ID NO: 2189524 - RNA, 19 nt, Artificial Sequence
  Description of Artificial Sequence: Synthetic oligonucleotide
  Sense strand starting at position 3844 of SEQ ID NO: 1883373
ggagcacaccugugacauu

SEQ ID NO: 2189525 - RNA, 19 nt, Artificial Sequence
  Description of Artificial Sequence: Synthetic oligonucleotide
  Antisense strand to SEQ ID NO: 2189524
aaugucacaggugugcucc

SEQ ID NO: 2189526 - RNA, 19 nt, Artificial Sequence
  Description of Artificial Sequence: Synthetic oligonucleotide
  Sense strand starting at position 3929 of SEQ ID NO: 1883373
ggaaucaucucgcuagaac

SEQ ID NO: 2189527 - RNA, 19 nt, Artificial Sequence
  Description of Artificial Sequence: Synthetic oligonucleotide
  Antisense strand to SEQ ID NO: 2189526
guucuagcgagaugauucc

SEQ ID NO: 2189528 - RNA, 19 nt, Artificial Sequence
  Description of Artificial Sequence: Synthetic oligonucleotide
  Sense strand starting at position 3954 of SEQ ID NO: 1883373
aagaaugucacaggguguu

SEQ ID NO: 2189529 - RNA, 19 nt, Artificial Sequence
  Description of Artificial Sequence: Synthetic oligonucleotide
  Antisense strand to SEQ ID NO: 2189528
aacacccugugacauucuu

SEQ ID NO: 2189530 - RNA, 19 nt, Artificial Sequence
  Description of Artificial Sequence: Synthetic oligonucleotide
  Sense strand starting at position 391 of SEQ ID NO: 1883374
ugauuugaguguccagcuu

SEQ ID NO: 2189531 - RNA, 19 nt, Artificial Sequence
  Description of Artificial Sequence: Synthetic oligonucleotide
  Antisense strand to SEQ ID NO: 2189530
aagcuggacacucaaauca

SEQ ID NO: 2189532 - RNA, 19 nt, Artificial Sequence
  Description of Artificial Sequence: Synthetic oligonucleotide
  Sense strand starting at position 522 of SEQ ID NO: 1883374
gcaggucauccagaagagu

SEQ ID NO: 2189533 - RNA, 19 nt, Artificial Sequence
  Description of Artificial Sequence: Synthetic oligonucleotide
  Antisense strand to SEQ ID NO: 2189532
acucuucuggaugaccugc

SEQ ID NO: 2189534 - RNA, 19 nt, Artificial Sequence
  Description of Artificial Sequence: Synthetic oligonucleotide
  Sense strand starting at position 1261 of SEQ ID NO: 1883374
guaaaccuacggugauauu

SEQ ID NO: 2189535 - RNA, 19 nt, Artificial Sequence
  Description of Artificial Sequence: Synthetic oligonucleotide
  Antisense strand to SEQ ID NO: 2189534
aauaucaccguagguuuac

SEQ ID NO: 2189536 - RNA, 19 nt, Artificial Sequence
  Description of Artificial Sequence: Synthetic oligonucleotide
  Sense strand starting at position 1262 of SEQ ID NO: 1883374
uaaaccuacggugauauua

SEQ ID NO: 2189537 - RNA, 19 nt, Artificial Sequence
  Description of Artificial Sequence: Synthetic oligonucleotide
  Antisense strand to SEQ ID NO: 2189536
uaauaucaccguagguuua

SEQ ID NO: 2189538 - RNA, 19 nt, Artificial Sequence
  Description of Artificial Sequence: Synthetic oligonucleotide
  Sense strand starting at position 1332 of SEQ ID NO: 1883374
ccacucugauauucgaagu

SEQ ID NO: 2189539 - RNA, 19 nt, Artificial Sequence
  Description of Artificial Sequence: Synthetic oligonucleotide
  Antisense strand to SEQ ID NO: 2189538
acuucgaauaucagagugg

SEQ ID NO: 2189540 - RNA, 19 nt, Artificial Sequence
  Description of Artificial Sequence: Synthetic oligonucleotide
  Sense strand starting at position 1619 of SEQ ID NO: 1883374
gaagaauaucaugggugua

SEQ ID NO: 2189541 - RNA, 19 nt, Artificial Sequence
  Description of Artificial Sequence: Synthetic oligonucleotide
  Antisense strand to SEQ ID NO: 2189540
uacacccaugauauucuuc

SEQ ID NO: 2189542 - RNA, 19 nt, Artificial Sequence
  Description of Artificial Sequence: Synthetic oligonucleotide
  Sense strand starting at position 1621 of SEQ ID NO: 1883374
agaauaucauggguguaca

SEQ ID NO: 2189543 - RNA, 19 nt, Artificial Sequence
  Description of Artificial Sequence: Synthetic oligonucleotide
  Antisense strand to SEQ ID NO: 2189542
uguacacccaugauauucu

SEQ ID NO: 2189544 - RNA, 19 nt, Artificial Sequence
  Description of Artificial Sequence: Synthetic oligonucleotide
  Sense strand starting at position 1622 of SEQ ID NO: 1883374
gaauaucauggguguacac

SEQ ID NO: 2189545 - RNA, 19 nt, Artificial Sequence
  Description of Artificial Sequence: Synthetic oligonucleotide
  Antisense strand to SEQ ID NO: 2189544
guguacacccaugauauuc

SEQ ID NO: 2189546 - RNA, 19 nt, Artificial Sequence
  Description of Artificial Sequence: Synthetic oligonucleotide
  Sense strand starting at position 1681 of SEQ ID NO: 1883374
gaagaauaccacugggugu

SEQ ID NO: 2189547 - RNA, 19 nt, Artificial Sequence
  Description of Artificial Sequence: Synthetic oligonucleotide
  Antisense strand to SEQ ID NO: 2189546
acacccagugguauucuuc

SEQ ID NO: 2189548 - RNA, 19 nt, Artificial Sequence
  Description of Artificial Sequence: Synthetic oligonucleotide
  Sense strand starting at position 1694 of SEQ ID NO: 1883374
ggguguacgcccucuguca

SEQ ID NO: 2189549 - RNA, 19 nt, Artificial Sequence
  Description of Artificial Sequence: Synthetic oligonucleotide
  Antisense strand to SEQ ID NO: 2189548
ugacagagggcguacaccc

SEQ ID NO: 2189550 - RNA, 19 nt, Artificial Sequence
  Description of Artificial Sequence: Synthetic oligonucleotide
  Sense strand starting at position 1695 of SEQ ID NO: 1883374
gguguacgcccucugucau

SEQ ID NO: 2189551 - RNA, 19 nt, Artificial Sequence
  Description of Artificial Sequence: Synthetic oligonucleotide
  Antisense strand to SEQ ID NO: 2189550
augacagagggcguacacc

SEQ ID NO: 2189552 - RNA, 19 nt, Artificial Sequence
  Description of Artificial Sequence: Synthetic oligonucleotide
  Sense strand starting at position 1710 of SEQ ID NO: 1883374
ucauauuaggagugacauc

SEQ ID NO: 2189553 - RNA, 19 nt, Artificial Sequence
  Description of Artificial Sequence: Synthetic oligonucleotide
  Antisense strand to SEQ ID NO: 2189552
gaugucacuccuaauauga

SEQ ID NO: 2189554 - RNA, 19 nt, Artificial Sequence
  Description of Artificial Sequence: Synthetic oligonucleotide
  Sense strand starting at position 1921 of SEQ ID NO: 1883374
augucauguuuaccaugga

SEQ ID NO: 2189555 - RNA, 19 nt, Artificial Sequence
  Description of Artificial Sequence: Synthetic oligonucleotide
  Antisense strand to SEQ ID NO: 2189554
uccaugguaaacaugacau

SEQ ID NO: 2189556 - RNA, 19 nt, Artificial Sequence
  Description of Artificial Sequence: Synthetic oligonucleotide
  Sense strand starting at position 2042 of SEQ ID NO: 1883374
guuauaacucuguaauauc

SEQ ID NO: 2189557 - RNA, 19 nt, Artificial Sequence
  Description of Artificial Sequence: Synthetic oligonucleotide
  Antisense strand to SEQ ID NO: 2189556
gauauuacagaguuauaac

SEQ ID NO: 2189558 - RNA, 19 nt, Artificial Sequence
  Description of Artificial Sequence: Synthetic oligonucleotide
  Sense strand starting at position 2079 of SEQ ID NO: 1883374
auaucacagugaguguaaa

SEQ ID NO: 2189559 - RNA, 19 nt, Artificial Sequence
  Description of Artificial Sequence: Synthetic oligonucleotide
  Antisense strand to SEQ ID NO: 2189558
uuuacacucacugugauau

SEQ ID NO: 2189560 - RNA, 19 nt, Artificial Sequence
  Description of Artificial Sequence: Synthetic oligonucleotide
  Sense strand starting at position 2160 of SEQ ID NO: 1883374
aauauuaucgaagggugua

SEQ ID NO: 2189561 - RNA, 19 nt, Artificial Sequence
  Description of Artificial Sequence: Synthetic oligonucleotide
  Antisense strand to SEQ ID NO: 2189560
uacacccuucgauaauauu

SEQ ID NO: 2189562 - RNA, 19 nt, Artificial Sequence
  Description of Artificial Sequence: Synthetic oligonucleotide
  Sense strand starting at position 2161 of SEQ ID NO: 1883374
auauuaucgaaggguguac

SEQ ID NO: 2189563 - RNA, 19 nt, Artificial Sequence
  Description of Artificial Sequence: Synthetic oligonucleotide
  Antisense strand to SEQ ID NO: 2189562
guacacccuucgauaauau

SEQ ID NO: 2189564 - RNA, 19 nt, Artificial Sequence
  Description of Artificial Sequence: Synthetic oligonucleotide
  Sense strand starting at position 2348 of SEQ ID NO: 1883374
uugcauuaggcauaaucuu

SEQ ID NO: 2189565 - RNA, 19 nt, Artificial Sequence
  Description of Artificial Sequence: Synthetic oligonucleotide
  Antisense strand to SEQ ID NO: 2189564
aagauuaugccuaaugcaa

SEQ ID NO: 2189566 - RNA, 19 nt, Artificial Sequence
  Description of Artificial Sequence: Synthetic oligonucleotide
  Sense strand starting at position 2458 of SEQ ID NO: 1883374
gaaauaauauuaccagcgu

SEQ ID NO: 2189567 - RNA, 19 nt, Artificial Sequence
  Description of Artificial Sequence: Synthetic oligonucleotide
  Antisense strand to SEQ ID NO: 2189566
acgcugguaauauuauuuc

SEQ ID NO: 2189568 - RNA, 19 nt, Artificial Sequence
  Description of Artificial Sequence: Synthetic oligonucleotide
  Sense strand starting at position 2606 of SEQ ID NO: 1883374
cgauguuaugaguaauauc

SEQ ID NO: 2189569 - RNA, 19 nt, Artificial Sequence
  Description of Artificial Sequence: Synthetic oligonucleotide
  Antisense strand to SEQ ID NO: 2189568
gauauuacucauaacaucg

SEQ ID NO: 2189570 - RNA, 19 nt, Artificial Sequence
  Description of Artificial Sequence: Synthetic oligonucleotide
  Sense strand starting at position 2626 of SEQ ID NO: 1883374
cagaauguguacucauaug

SEQ ID NO: 2189571 - RNA, 19 nt, Artificial Sequence
  Description of Artificial Sequence: Synthetic oligonucleotide
  Antisense strand to SEQ ID NO: 2189570
cauaugaguacacauucug

SEQ ID NO: 2189572 - RNA, 19 nt, Artificial Sequence
  Description of Artificial Sequence: Synthetic oligonucleotide
  Sense strand starting at position 2814 of SEQ ID NO: 1883374
ugacguuaggagugcauuu

SEQ ID NO: 2189573 - RNA, 19 nt, Artificial Sequence
  Description of Artificial Sequence: Synthetic oligonucleotide
  Antisense strand to SEQ ID NO: 2189572
aaaugcacuccuaacguca

SEQ ID NO: 2189574 - RNA, 19 nt, Artificial Sequence
  Description of Artificial Sequence: Synthetic oligonucleotide
  Sense strand starting at position 2951 of SEQ ID NO: 1883374
aacgucuuucuaggauauu

SEQ ID NO: 2189575 - RNA, 19 nt, Artificial Sequence
  Description of Artificial Sequence: Synthetic oligonucleotide
  Antisense strand to SEQ ID NO: 2189574
aauauccuagaaagacguu

SEQ ID NO: 2189576 - RNA, 19 nt, Artificial Sequence
  Description of Artificial Sequence: Synthetic oligonucleotide
  Sense strand starting at position 3034 of SEQ ID NO: 1883374
ggaauaauaucacagggag

SEQ ID NO: 2189577 - RNA, 19 nt, Artificial Sequence
  Description of Artificial Sequence: Synthetic oligonucleotide
  Antisense strand to SEQ ID NO: 2189576
cucccugugauauuauucc

SEQ ID NO: 2189578 - RNA, 19 nt, Artificial Sequence
  Description of Artificial Sequence: Synthetic oligonucleotide
  Sense strand starting at position 3048 of SEQ ID NO: 1883374
gggaguacaccucauguga

SEQ ID NO: 2189579 - RNA, 19 nt, Artificial Sequence
  Description of Artificial Sequence: Synthetic oligonucleotide
  Antisense strand to SEQ ID NO: 2189578
ucacaugagguguacuccc

SEQ ID NO: 2189580 - RNA, 19 nt, Artificial Sequence
  Description of Artificial Sequence: Synthetic oligonucleotide
  Sense strand starting at position 3200 of SEQ ID NO: 1883374
aguaacaucucccugggau

SEQ ID NO: 2189581 - RNA, 19 nt, Artificial Sequence
  Description of Artificial Sequence: Synthetic oligonucleotide
  Antisense strand to SEQ ID NO: 2189580
aucccagggagauguuacu

SEQ ID NO: 2189582 - RNA, 19 nt, Artificial Sequence
  Description of Artificial Sequence: Synthetic oligonucleotide
  Sense strand starting at position 3201 of SEQ ID NO: 1883374
guaacaucucccugggaua

SEQ ID NO: 2189583 - RNA, 19 nt, Artificial Sequence
  Description of Artificial Sequence: Synthetic oligonucleotide
  Antisense strand to SEQ ID NO: 2189582
uaucccagggagauguuac

SEQ ID NO: 2189584 - RNA, 19 nt, Artificial Sequence
  Description of Artificial Sequence: Synthetic oligonucleotide
  Sense strand starting at position 3289 of SEQ ID NO: 1883374
augauaucacaggguguca

SEQ ID NO: 2189585 - RNA, 19 nt, Artificial Sequence
  Description of Artificial Sequence: Synthetic oligonucleotide
  Antisense strand to SEQ ID NO: 2189584
ugacacccugugauaucau

SEQ ID NO: 2189586 - RNA, 19 nt, Artificial Sequence
  Description of Artificial Sequence: Synthetic oligonucleotide
  Sense strand starting at position 3301 of SEQ ID NO: 1883374
ggugucaacucacuuugau

SEQ ID NO: 2189587 - RNA, 19 nt, Artificial Sequence
  Description of Artificial Sequence: Synthetic oligonucleotide
  Antisense strand to SEQ ID NO: 2189586
aucaaagugaguugacacc

SEQ ID NO: 2189588 - RNA, 19 nt, Artificial Sequence
  Description of Artificial Sequence: Synthetic oligonucleotide
  Sense strand starting at position 3315 of SEQ ID NO: 1883374
uugauauuagaaggacugu

SEQ ID NO: 2189589 - RNA, 19 nt, Artificial Sequence
  Description of Artificial Sequence: Synthetic oligonucleotide
  Antisense strand to SEQ ID NO: 2189588
acaguccuucuaauaucaa

SEQ ID NO: 2189590 - RNA, 19 nt, Artificial Sequence
  Description of Artificial Sequence: Synthetic oligonucleotide
  Sense strand starting at position 3326 of SEQ ID NO: 1883374
aggacugucucccuaggau

SEQ ID NO: 2189591 - RNA, 19 nt, Artificial Sequence
  Description of Artificial Sequence: Synthetic oligonucleotide
  Antisense strand to SEQ ID NO: 2189590
auccuagggagacaguccu

SEQ ID NO: 2189592 - RNA, 19 nt, Artificial Sequence
  Description of Artificial Sequence: Synthetic oligonucleotide
  Sense strand starting at position 3329 of SEQ ID NO: 1883374
acugucucccuaggauaua

SEQ ID NO: 2189593 - RNA, 19 nt, Artificial Sequence
  Description of Artificial Sequence: Synthetic oligonucleotide
  Antisense strand to SEQ ID NO: 2189592
uauauccuagggagacagu

SEQ ID NO: 2189594 - RNA, 19 nt, Artificial Sequence
  Description of Artificial Sequence: Synthetic oligonucleotide
  Sense strand starting at position 3353 of SEQ ID NO: 1883374
ucucaugucacagagugua

SEQ ID NO: 2189595 - RNA, 19 nt, Artificial Sequence
  Description of Artificial Sequence: Synthetic oligonucleotide
  Antisense strand to SEQ ID NO: 2189594
uacacucugugacaugaga

SEQ ID NO: 2189596 - RNA, 19 nt, Artificial Sequence
  Description of Artificial Sequence: Synthetic oligonucleotide
  Sense strand starting at position 3394 of SEQ ID NO: 1883374
uguuauuagcagcaauauc

SEQ ID NO: 2189597 - RNA, 19 nt, Artificial Sequence
  Description of Artificial Sequence: Synthetic oligonucleotide
  Antisense strand to SEQ ID NO: 2189596
gauauugcugcuaauaaca

SEQ ID NO: 2189598 - RNA, 19 nt, Artificial Sequence
  Description of Artificial Sequence: Synthetic oligonucleotide
  Sense strand starting at position 3448 of SEQ ID NO: 1883374
cccucuguggauuacuaga

SEQ ID NO: 2189599 - RNA, 19 nt, Artificial Sequence
  Description of Artificial Sequence: Synthetic oligonucleotide
  Antisense strand to SEQ ID NO: 2189598
ucuaguaauccacagaggg

SEQ ID NO: 2189600 - RNA, 19 nt, Artificial Sequence
  Description of Artificial Sequence: Synthetic oligonucleotide
  Sense strand starting at position 3544 of SEQ ID NO: 1883374
gugauaucucucgaagaua

SEQ ID NO: 2189601 - RNA, 19 nt, Artificial Sequence
  Description of Artificial Sequence: Synthetic oligonucleotide
  Antisense strand to SEQ ID NO: 2189600
uaucuucgagagauaucac

SEQ ID NO: 2189602 - RNA, 19 nt, Artificial Sequence
  Description of Artificial Sequence: Synthetic oligonucleotide
  Sense strand starting at position 3796 of SEQ ID NO: 1883374
uugugacauuagucauaau

SEQ ID NO: 2189603 - RNA, 19 nt, Artificial Sequence
  Description of Artificial Sequence: Synthetic oligonucleotide
  Antisense strand to SEQ ID NO: 2189602
auuaugacuaaugucacaa

SEQ ID NO: 2189604 - RNA, 19 nt, Artificial Sequence
  Description of Artificial Sequence: Synthetic oligonucleotide
  Sense strand starting at position 3849 of SEQ ID NO: 1883374
ggagcacaccugugacauu

SEQ ID NO: 2189605 - RNA, 19 nt, Artificial Sequence
  Description of Artificial Sequence: Synthetic oligonucleotide
  Antisense strand to SEQ ID NO: 2189604
aaugucacaggugugcucc

SEQ ID NO: 2189606 - RNA, 19 nt, Artificial Sequence
  Description of Artificial Sequence: Synthetic oligonucleotide
  Sense strand starting at position 3934 of SEQ ID NO: 1883374
ggaaucaucucgcuagaac

SEQ ID NO: 2189607 - RNA, 19 nt, Artificial Sequence
  Description of Artificial Sequence: Synthetic oligonucleotide
  Antisense strand to SEQ ID NO: 2189606
guucuagcgagaugauucc

SEQ ID NO: 2189608 - RNA, 19 nt, Artificial Sequence
  Description of Artificial Sequence: Synthetic oligonucleotide
  Sense strand starting at position 3959 of SEQ ID NO: 1883374
aagaaugucacaggguguu

SEQ ID NO: 2189609 - RNA, 19 nt, Artificial Sequence
  Description of Artificial Sequence: Synthetic oligonucleotide
  Antisense strand to SEQ ID NO: 2189608
aacacccugugacauucuu

SEQ ID NO: 2189610 - RNA, 19 nt, Artificial Sequence
  Description of Artificial Sequence: Synthetic oligonucleotide
  Sense strand starting at position 299 of SEQ ID NO: 1883375
agaucagugugacccaaga

SEQ ID NO: 2189611 - RNA, 19 nt, Artificial Sequence
  Description of Artificial Sequence: Synthetic oligonucleotide
  Antisense strand to SEQ ID NO: 2189610
ucuugggucacacugaucu

SEQ ID NO: 2189612 - RNA, 19 nt, Artificial Sequence
  Description of Artificial Sequence: Synthetic oligonucleotide
  Sense strand starting at position 470 of SEQ ID NO: 1883375
gauauaaaugagugauucu

SEQ ID NO: 2189613 - RNA, 19 nt, Artificial Sequence
  Description of Artificial Sequence: Synthetic oligonucleotide
  Antisense strand to SEQ ID NO: 2189612
agaaucacucauuuauauc

SEQ ID NO: 2189614 - RNA, 19 nt, Artificial Sequence
  Description of Artificial Sequence: Synthetic oligonucleotide
  Sense strand starting at position 481 of SEQ ID NO: 1883375
gugauucuuauaggcauag

SEQ ID NO: 2189615 - RNA, 19 nt, Artificial Sequence
  Description of Artificial Sequence: Synthetic oligonucleotide
  Antisense strand to SEQ ID NO: 2189614
cuaugccuauaagaaucac

SEQ ID NO: 2189616 - RNA, 19 nt, Artificial Sequence
  Description of Artificial Sequence: Synthetic oligonucleotide
  Sense strand starting at position 485 of SEQ ID NO: 1883375
uucuuauaggcauagcuaa

SEQ ID NO: 2189617 - RNA, 19 nt, Artificial Sequence
  Description of Artificial Sequence: Synthetic oligonucleotide
  Antisense strand to SEQ ID NO: 2189616
uuagcuaugccuauaagaa

SEQ ID NO: 2189618 - RNA, 19 nt, Artificial Sequence
  Description of Artificial Sequence: Synthetic oligonucleotide
  Sense strand starting at position 493 of SEQ ID NO: 1883375
ggcauagcuaaagguuaua

SEQ ID NO: 2189619 - RNA, 19 nt, Artificial Sequence
  Description of Artificial Sequence: Synthetic oligonucleotide
  Antisense strand to SEQ ID NO: 2189618
uauaaccuuuagcuaugcc

SEQ ID NO: 2189620 - RNA, 19 nt, Artificial Sequence
  Description of Artificial Sequence: Synthetic oligonucleotide
  Sense strand starting at position 549 of SEQ ID NO: 1883375
aaaggaggaugcuuucuau

SEQ ID NO: 2189621 - RNA, 19 nt, Artificial Sequence
  Description of Artificial Sequence: Synthetic oligonucleotide
  Antisense strand to SEQ ID NO: 2189620
auagaaagcauccuccuuu

SEQ ID NO: 2189622 - RNA, 19 nt, Artificial Sequence
  Description of Artificial Sequence: Synthetic oligonucleotide
  Sense strand starting at position 552 of SEQ ID NO: 1883375
ggaggaugcuuucuaugca

SEQ ID NO: 2189623 - RNA, 19 nt, Artificial Sequence
  Description of Artificial Sequence: Synthetic oligonucleotide
  Antisense strand to SEQ ID NO: 2189622
ugcauagaaagcauccucc

SEQ ID NO: 2189624 - RNA, 19 nt, Artificial Sequence
  Description of Artificial Sequence: Synthetic oligonucleotide
  Sense strand starting at position 555 of SEQ ID NO: 1883375
ggaugcuuucuaugcagau

SEQ ID NO: 2189625 - RNA, 19 nt, Artificial Sequence
  Description of Artificial Sequence: Synthetic oligonucleotide
  Antisense strand to SEQ ID NO: 2189624
aucugcauagaaagcaucc

SEQ ID NO: 2189626 - RNA, 19 nt, Artificial Sequence
  Description of Artificial Sequence: Synthetic oligonucleotide
  Sense strand starting at position 556 of SEQ ID NO: 1883375
gaugcuuucuaugcagauu

SEQ ID NO: 2189627 - RNA, 19 nt, Artificial Sequence
  Description of Artificial Sequence: Synthetic oligonucleotide
  Antisense strand to SEQ ID NO: 2189626
aaucugcauagaaagcauc

SEQ ID NO: 2189628 - RNA, 19 nt, Artificial Sequence
  Description of Artificial Sequence: Synthetic oligonucleotide
  Sense strand starting at position 564 of SEQ ID NO: 1883375
cuaugcagauuuggagaga

SEQ ID NO: 2189629 - RNA, 19 nt, Artificial Sequence
  Description of Artificial Sequence: Synthetic oligonucleotide
  Antisense strand to SEQ ID NO: 2189628
ucucuccaaaucugcauag

SEQ ID NO: 2189630 - RNA, 19 nt, Artificial Sequence
  Description of Artificial Sequence: Synthetic oligonucleotide
  Sense strand starting at position 618 of SEQ ID NO: 1883375
gccuccuaaugacuaguau

SEQ ID NO: 2189631 - RNA, 19 nt, Artificial Sequence
  Description of Artificial Sequence: Synthetic oligonucleotide
  Antisense strand to SEQ ID NO: 2189630
auacuagucauuaggaggc

SEQ ID NO: 2189632 - RNA, 19 nt, Artificial Sequence
  Description of Artificial Sequence: Synthetic oligonucleotide
  Sense strand starting at position 1397 of SEQ ID NO: 1883375
gggcaacucugucucaaga

SEQ ID NO: 2189633 - RNA, 19 nt, Artificial Sequence
  Description of Artificial Sequence: Synthetic oligonucleotide
  Antisense strand to SEQ ID NO: 2189632
ucuugagacagaguugccc

SEQ ID NO: 2189634 - RNA, 19 nt, Artificial Sequence
  Description of Artificial Sequence: Synthetic oligonucleotide
  Sense strand starting at position 1472 of SEQ ID NO: 1883375
guuuguuggaaaggauaua

SEQ ID NO: 2189635 - RNA, 19 nt, Artificial Sequence
  Description of Artificial Sequence: Synthetic oligonucleotide
  Antisense strand to SEQ ID NO: 2189634
uauauccuuuccaacaaac

SEQ ID NO: 2189636 - RNA, 19 nt, Artificial Sequence
  Description of Artificial Sequence: Synthetic oligonucleotide
  Sense strand starting at position 1577 of SEQ ID NO: 1883375
ucacaauaagugugauccu

SEQ ID NO: 2189637 - RNA, 19 nt, Artificial Sequence
  Description of Artificial Sequence: Synthetic oligonucleotide
  Antisense strand to SEQ ID NO: 2189636
aggaucacacuuauuguga

SEQ ID NO: 2189638 - RNA, 19 nt, Artificial Sequence
  Description of Artificial Sequence: Synthetic oligonucleotide
  Sense strand starting at position 1584 of SEQ ID NO: 1883375
aagugugauccuuggaagg

SEQ ID NO: 2189639 - RNA, 19 nt, Artificial Sequence
  Description of Artificial Sequence: Synthetic oligonucleotide
  Antisense strand to SEQ ID NO: 2189638
ccuuccaaggaucacacuu

SEQ ID NO: 2189640 - RNA, 19 nt, Artificial Sequence
  Description of Artificial Sequence: Synthetic oligonucleotide
  Sense strand starting at position 2031 of SEQ ID NO: 1883375
gacugcuugaggcagagaa

SEQ ID NO: 2189641 - RNA, 19 nt, Artificial Sequence
  Description of Artificial Sequence: Synthetic oligonucleotide
  Antisense strand to SEQ ID NO: 2189640
uucucugccucaagcaguc

SEQ ID NO: 2189642 - RNA, 19 nt, Artificial Sequence
  Description of Artificial Sequence: Synthetic oligonucleotide
  Sense strand starting at position 2033 of SEQ ID NO: 1883375
cugcuugaggcagagaauu

SEQ ID NO: 2189643 - RNA, 19 nt, Artificial Sequence
  Description of Artificial Sequence: Synthetic oligonucleotide
  Antisense strand to SEQ ID NO: 2189642
aauucucugccucaagcag

SEQ ID NO: 2189644 - RNA, 19 nt, Artificial Sequence
  Description of Artificial Sequence: Synthetic oligonucleotide
  Sense strand starting at position 2302 of SEQ ID NO: 1883375
uccaguguucugcuguauu

SEQ ID NO: 2189645 - RNA, 19 nt, Artificial Sequence
  Description of Artificial Sequence: Synthetic oligonucleotide
  Antisense strand to SEQ ID NO: 2189644
aauacagcagaacacugga

SEQ ID NO: 2189646 - RNA, 19 nt, Artificial Sequence
  Description of Artificial Sequence: Synthetic oligonucleotide
  Sense strand starting at position 2336 of SEQ ID NO: 1883375
acugaagcuucccuugaau

SEQ ID NO: 2189647 - RNA, 19 nt, Artificial Sequence
  Description of Artificial Sequence: Synthetic oligonucleotide
  Antisense strand to SEQ ID NO: 2189646
auucaagggaagcuucagu

SEQ ID NO: 2189648 - RNA, 19 nt, Artificial Sequence
  Description of Artificial Sequence: Synthetic oligonucleotide
  Sense strand starting at position 2338 of SEQ ID NO: 1883375
ugaagcuucccuugaauca

SEQ ID NO: 2189649 - RNA, 19 nt, Artificial Sequence
  Description of Artificial Sequence: Synthetic oligonucleotide
  Antisense strand to SEQ ID NO: 2189648
ugauucaagggaagcuuca

SEQ ID NO: 2189650 - RNA, 19 nt, Artificial Sequence
  Description of Artificial Sequence: Synthetic oligonucleotide
  Sense strand starting at position 2359 of SEQ ID NO: 1883375
auauucuugucauugagac

SEQ ID NO: 2189651 - RNA, 19 nt, Artificial Sequence
  Description of Artificial Sequence: Synthetic oligonucleotide
  Antisense strand to SEQ ID NO: 2189650
gucucaaugacaagaauau

SEQ ID NO: 2189652 - RNA, 19 nt, Artificial Sequence
  Description of Artificial Sequence: Synthetic oligonucleotide
  Sense strand starting at position 2426 of SEQ ID NO: 1883375
gaaggcauuugagacaucu

SEQ ID NO: 2189653 - RNA, 19 nt, Artificial Sequence
  Description of Artificial Sequence: Synthetic oligonucleotide
  Antisense strand to SEQ ID NO: 2189652
agaugucucaaaugccuuc

SEQ ID NO: 2189654 - RNA, 19 nt, Artificial Sequence
  Description of Artificial Sequence: Synthetic oligonucleotide
  Sense strand starting at position 2471 of SEQ ID NO: 1883375
gcuagagacucucuguauu

SEQ ID NO: 2189655 - RNA, 19 nt, Artificial Sequence
  Description of Artificial Sequence: Synthetic oligonucleotide
  Antisense strand to SEQ ID NO: 2189654
aauacagagagucucuagc

SEQ ID NO: 2189656 - RNA, 19 nt, Artificial Sequence
  Description of Artificial Sequence: Synthetic oligonucleotide
  Sense strand starting at position 2481 of SEQ ID NO: 1883375
cucuguauucccugacucu

SEQ ID NO: 2189657 - RNA, 19 nt, Artificial Sequence
  Description of Artificial Sequence: Synthetic oligonucleotide
  Antisense strand to SEQ ID NO: 2189656
agagucagggaauacagag

SEQ ID NO: 2189658 - RNA, 19 nt, Artificial Sequence
  Description of Artificial Sequence: Synthetic oligonucleotide
  Sense strand starting at position 2527 of SEQ ID NO: 1883375
agcagaguccugggaagca

SEQ ID NO: 2189659 - RNA, 19 nt, Artificial Sequence
  Description of Artificial Sequence: Synthetic oligonucleotide
  Antisense strand to SEQ ID NO: 2189658
ugcuucccaggacucugcu

SEQ ID NO: 2189660 - RNA, 19 nt, Artificial Sequence
  Description of Artificial Sequence: Synthetic oligonucleotide
  Sense strand starting at position 2709 of SEQ ID NO: 1883375
ggcguucaacuuugacaga

SEQ ID NO: 2189661 - RNA, 19 nt, Artificial Sequence
  Description of Artificial Sequence: Synthetic oligonucleotide
  Antisense strand to SEQ ID NO: 2189660
ucugucaaaguugaacgcc

SEQ ID NO: 2189662 - RNA, 19 nt, Artificial Sequence
  Description of Artificial Sequence: Synthetic oligonucleotide
  Sense strand starting at position 2807 of SEQ ID NO: 1883375
gcagguuaauagguaguca

SEQ ID NO: 2189663 - RNA, 19 nt, Artificial Sequence
  Description of Artificial Sequence: Synthetic oligonucleotide
  Antisense strand to SEQ ID NO: 2189662
ugacuaccuauuaaccugc

SEQ ID NO: 2189664 - RNA, 19 nt, Artificial Sequence
  Description of Artificial Sequence: Synthetic oligonucleotide
  Sense strand starting at position 2855 of SEQ ID NO: 1883375
guugaaagacugcgaagaa

SEQ ID NO: 2189665 - RNA, 19 nt, Artificial Sequence
  Description of Artificial Sequence: Synthetic oligonucleotide
  Antisense strand to SEQ ID NO: 2189664
uucuucgcagucuuucaac

SEQ ID NO: 2189666 - RNA, 19 nt, Artificial Sequence
  Description of Artificial Sequence: Synthetic oligonucleotide
  Sense strand starting at position 2941 of SEQ ID NO: 1883375
ccuugcaauccagggacau

SEQ ID NO: 2189667 - RNA, 19 nt, Artificial Sequence
  Description of Artificial Sequence: Synthetic oligonucleotide
  Antisense strand to SEQ ID NO: 2189666
augucccuggauugcaagg

SEQ ID NO: 2189668 - RNA, 19 nt, Artificial Sequence
  Description of Artificial Sequence: Synthetic oligonucleotide
  Sense strand starting at position 2942 of SEQ ID NO: 1883375
cuugcaauccagggacauu

SEQ ID NO: 2189669 - RNA, 19 nt, Artificial Sequence
  Description of Artificial Sequence: Synthetic oligonucleotide
  Antisense strand to SEQ ID NO: 2189668
aaugucccuggauugcaag

SEQ ID NO: 2189670 - RNA, 19 nt, Artificial Sequence
  Description of Artificial Sequence: Synthetic oligonucleotide
  Sense strand starting at position 2987 of SEQ ID NO: 1883375
gcuguuacagauuagguuu

SEQ ID NO: 2189671 - RNA, 19 nt, Artificial Sequence
  Description of Artificial Sequence: Synthetic oligonucleotide
  Antisense strand to SEQ ID NO: 2189670
aaaccuaaucuguaacagc

SEQ ID NO: 2189672 - RNA, 19 nt, Artificial Sequence
  Description of Artificial Sequence: Synthetic oligonucleotide
  Sense strand starting at position 3076 of SEQ ID NO: 1883375
ccagcucuuucucugaaag

SEQ ID NO: 2189673 - RNA, 19 nt, Artificial Sequence
  Description of Artificial Sequence: Synthetic oligonucleotide
  Antisense strand to SEQ ID NO: 2189672
cuuucagagaaagagcugg

SEQ ID NO: 2189674 - RNA, 19 nt, Artificial Sequence
  Description of Artificial Sequence: Synthetic oligonucleotide
  Sense strand starting at position 3161 of SEQ ID NO: 1883375
cuaaccgagcucugacaaa

SEQ ID NO: 2189675 - RNA, 19 nt, Artificial Sequence
  Description of Artificial Sequence: Synthetic oligonucleotide
  Antisense strand to SEQ ID NO: 2189674
uuugucagagcucgguuag

SEQ ID NO: 2189676 - RNA, 19 nt, Artificial Sequence
  Description of Artificial Sequence: Synthetic oligonucleotide
  Sense strand starting at position 3856 of SEQ ID NO: 1883375
guaaaugugccuuucugcu

SEQ ID NO: 2189677 - RNA, 19 nt, Artificial Sequence
  Description of Artificial Sequence: Synthetic oligonucleotide
  Antisense strand to SEQ ID NO: 2189676
agcagaaaggcacauuuac

SEQ ID NO: 2189678 - RNA, 19 nt, Artificial Sequence
  Description of Artificial Sequence: Synthetic oligonucleotide
  Sense strand starting at position 3888 of SEQ ID NO: 1883375
gggucaggugcucacugaa

SEQ ID NO: 2189679 - RNA, 19 nt, Artificial Sequence
  Description of Artificial Sequence: Synthetic oligonucleotide
  Antisense strand to SEQ ID NO: 2189678
uucagugagcaccugaccc

SEQ ID NO: 2189680 - RNA, 19 nt, Artificial Sequence
  Description of Artificial Sequence: Synthetic oligonucleotide
  Sense strand starting at position 3951 of SEQ ID NO: 1883375
aacaauucuugucuuggga

SEQ ID NO: 2189681 - RNA, 19 nt, Artificial Sequence
  Description of Artificial Sequence: Synthetic oligonucleotide
  Antisense strand to SEQ ID NO: 2189680
ucccaagacaagaauuguu

SEQ ID NO: 2189682 - RNA, 19 nt, Artificial Sequence
  Description of Artificial Sequence: Synthetic oligonucleotide
  Sense strand starting at position 3954 of SEQ ID NO: 1883375
aauucuugucuugggaauu

SEQ ID NO: 2189683 - RNA, 19 nt, Artificial Sequence
  Description of Artificial Sequence: Synthetic oligonucleotide
  Antisense strand to SEQ ID NO: 2189682
aauucccaagacaagaauu

SEQ ID NO: 2189684 - RNA, 19 nt, Artificial Sequence
  Description of Artificial Sequence: Synthetic oligonucleotide
  Sense strand starting at position 3966 of SEQ ID NO: 1883375
gggaauugcuuccuuggga

SEQ ID NO: 2189685 - RNA, 19 nt, Artificial Sequence
  Description of Artificial Sequence: Synthetic oligonucleotide
  Antisense strand to SEQ ID NO: 2189684
ucccaaggaagcaauuccc

SEQ ID NO: 2189686 - RNA, 19 nt, Artificial Sequence
  Description of Artificial Sequence: Synthetic oligonucleotide
  Sense strand starting at position 3967 of SEQ ID NO: 1883375
ggaauugcuuccuugggag

SEQ ID NO: 2189687 - RNA, 19 nt, Artificial Sequence
  Description of Artificial Sequence: Synthetic oligonucleotide
  Antisense strand to SEQ ID NO: 2189686
cucccaaggaagcaauucc

SEQ ID NO: 2189688 - RNA, 19 nt, Artificial Sequence
  Description of Artificial Sequence: Synthetic oligonucleotide
  Sense strand starting at position 3969 of SEQ ID NO: 1883375
aauugcuuccuugggagaa

SEQ ID NO: 2189689 - RNA, 19 nt, Artificial Sequence
  Description of Artificial Sequence: Synthetic oligonucleotide
  Antisense strand to SEQ ID NO: 2189688
uucucccaaggaagcaauu

SEQ ID NO: 2189690 - RNA, 19 nt, Artificial Sequence
  Description of Artificial Sequence: Synthetic oligonucleotide
  Sense strand starting at position 117 of SEQ ID NO: 1883376
gugcgugaggucagcucua

SEQ ID NO: 2189691 - RNA, 19 nt, Artificial Sequence
  Description of Artificial Sequence: Synthetic oligonucleotide
  Antisense strand to SEQ ID NO: 2189690
uagagcugaccucacgcac

SEQ ID NO: 2189692 - RNA, 19 nt, Artificial Sequence
  Description of Artificial Sequence: Synthetic oligonucleotide
  Sense strand starting at position 152 of SEQ ID NO: 1883376
ugggcucuaucaucaaaua

SEQ ID NO: 2189693 - RNA, 19 nt, Artificial Sequence
  Description of Artificial Sequence: Synthetic oligonucleotide
  Antisense strand to SEQ ID NO: 2189692
uauuugaugauagagccca

SEQ ID NO: 2189694 - RNA, 19 nt, Artificial Sequence
  Description of Artificial Sequence: Synthetic oligonucleotide
  Sense strand starting at position 206 of SEQ ID NO: 1883376
gaugaacaugggcgucauu

SEQ ID NO: 2189695 - RNA, 19 nt, Artificial Sequence
  Description of Artificial Sequence: Synthetic oligonucleotide
  Antisense strand to SEQ ID NO: 2189694
aaugacgcccauguucauc

SEQ ID NO: 2189696 - RNA, 19 nt, Artificial Sequence
  Description of Artificial Sequence: Synthetic oligonucleotide
  Sense strand starting at position 236 of SEQ ID NO: 1883376
gccucagucuccucacuga

SEQ ID NO: 2189697 - RNA, 19 nt, Artificial Sequence
  Description of Artificial Sequence: Synthetic oligonucleotide
  Antisense strand to SEQ ID NO: 2189696
ucagugaggagacugaggc

SEQ ID NO: 2189698 - RNA, 19 nt, Artificial Sequence
  Description of Artificial Sequence: Synthetic oligonucleotide
  Sense strand starting at position 356 of SEQ ID NO: 1883376
ugaggcacuguccgaagau

SEQ ID NO: 2189699 - RNA, 19 nt, Artificial Sequence
  Description of Artificial Sequence: Synthetic oligonucleotide
  Antisense strand to SEQ ID NO: 2189698
aucuucggacagugccuca

SEQ ID NO: 2189700 - RNA, 19 nt, Artificial Sequence
  Description of Artificial Sequence: Synthetic oligonucleotide
  Sense strand starting at position 435 of SEQ ID NO: 1883376
ccagcugugcuaucugcau

SEQ ID NO: 2189701 - RNA, 19 nt, Artificial Sequence
  Description of Artificial Sequence: Synthetic oligonucleotide
  Antisense strand to SEQ ID NO: 2189700
augcagauagcacagcugg

SEQ ID NO: 2189702 - RNA, 19 nt, Artificial Sequence
  Description of Artificial Sequence: Synthetic oligonucleotide
  Sense strand starting at position 441 of SEQ ID NO: 1883376
gugcuaucugcauugcugu

SEQ ID NO: 2189703 - RNA, 19 nt, Artificial Sequence
  Description of Artificial Sequence: Synthetic oligonucleotide
  Antisense strand to SEQ ID NO: 2189702
acagcaaugcagauagcac

SEQ ID NO: 2189704 - RNA, 19 nt, Artificial Sequence
  Description of Artificial Sequence: Synthetic oligonucleotide
  Sense strand starting at position 462 of SEQ ID NO: 1883376
cucaguuuccugcaaagaa

SEQ ID NO: 2189705 - RNA, 19 nt, Artificial Sequence
  Description of Artificial Sequence: Synthetic oligonucleotide
  Antisense strand to SEQ ID NO: 2189704
uucuuugcaggaaacugag

SEQ ID NO: 2189706 - RNA, 19 nt, Artificial Sequence
  Description of Artificial Sequence: Synthetic oligonucleotide
  Sense strand starting at position 635 of SEQ ID NO: 1883376
ggaagacuauguuagacaa

SEQ ID NO: 2189707 - RNA, 19 nt, Artificial Sequence
  Description of Artificial Sequence: Synthetic oligonucleotide
  Antisense strand to SEQ ID NO: 2189706
uugucuaacauagucuucc

SEQ ID NO: 2189708 - RNA, 19 nt, Artificial Sequence
  Description of Artificial Sequence: Synthetic oligonucleotide
  Sense strand starting at position 677 of SEQ ID NO: 1883376
uggaaaggcuuuccagaga

SEQ ID NO: 2189709 - RNA, 19 nt, Artificial Sequence
  Description of Artificial Sequence: Synthetic oligonucleotide
  Antisense strand to SEQ ID NO: 2189708
ucucuggaaagccuuucca

SEQ ID NO: 2189710 - RNA, 19 nt, Artificial Sequence
  Description of Artificial Sequence: Synthetic oligonucleotide
  Sense strand starting at position 801 of SEQ ID NO: 1883376
ggauccaggcucuaaaucu

SEQ ID NO: 2189711 - RNA, 19 nt, Artificial Sequence
  Description of Artificial Sequence: Synthetic oligonucleotide
  Antisense strand to SEQ ID NO: 2189710
agauuuagagccuggaucc

SEQ ID NO: 2189712 - RNA, 19 nt, Artificial Sequence
  Description of Artificial Sequence: Synthetic oligonucleotide
  Sense strand starting at position 865 of SEQ ID NO: 1883376
guaggauggcgccauugaa

SEQ ID NO: 2189713 - RNA, 19 nt, Artificial Sequence
  Description of Artificial Sequence: Synthetic oligonucleotide
  Antisense strand to SEQ ID NO: 2189712
uucaauggcgccauccuac

SEQ ID NO: 2189714 - RNA, 19 nt, Artificial Sequence
  Description of Artificial Sequence: Synthetic oligonucleotide
  Sense strand starting at position 873 of SEQ ID NO: 1883376
gcgccauugaaagggagau

SEQ ID NO: 2189715 - RNA, 19 nt, Artificial Sequence
  Description of Artificial Sequence: Synthetic oligonucleotide
  Antisense strand to SEQ ID NO: 2189714
aucucccuuucaauggcgc

SEQ ID NO: 2189716 - RNA, 19 nt, Artificial Sequence
  Description of Artificial Sequence: Synthetic oligonucleotide
  Sense strand starting at position 983 of SEQ ID NO: 1883376
cagacaagucccugaccgu

SEQ ID NO: 2189717 - RNA, 19 nt, Artificial Sequence
  Description of Artificial Sequence: Synthetic oligonucleotide
  Antisense strand to SEQ ID NO: 2189716
acggucagggacuugucug

SEQ ID NO: 2189718 - RNA, 19 nt, Artificial Sequence
  Description of Artificial Sequence: Synthetic oligonucleotide
  Sense strand starting at position 984 of SEQ ID NO: 1883376
agacaagucccugaccgua

SEQ ID NO: 2189719 - RNA, 19 nt, Artificial Sequence
  Description of Artificial Sequence: Synthetic oligonucleotide
  Antisense strand to SEQ ID NO: 2189718
uacggucagggacuugucu

SEQ ID NO: 2189720 - RNA, 19 nt, Artificial Sequence
  Description of Artificial Sequence: Synthetic oligonucleotide
  Sense strand starting at position 1009 of SEQ ID NO: 1883376
cugcuaucucguggauaca

SEQ ID NO: 2189721 - RNA, 19 nt, Artificial Sequence
  Description of Artificial Sequence: Synthetic oligonucleotide
  Antisense strand to SEQ ID NO: 2189720
uguauccacgagauagcag

SEQ ID NO: 2189722 - RNA, 19 nt, Artificial Sequence
  Description of Artificial Sequence: Synthetic oligonucleotide
  Sense strand starting at position 1667 of SEQ ID NO: 1883376
gcagaugcccuccaggaaa

SEQ ID NO: 2189723 - RNA, 19 nt, Artificial Sequence
  Description of Artificial Sequence: Synthetic oligonucleotide
  Antisense strand to SEQ ID NO: 2189722
uuuccuggagggcaucugc

SEQ ID NO: 2189724 - RNA, 19 nt, Artificial Sequence
  Description of Artificial Sequence: Synthetic oligonucleotide
  Sense strand starting at position 1686 of SEQ ID NO: 1883376
gcaggaugcucugcagaua

SEQ ID NO: 2189725 - RNA, 19 nt, Artificial Sequence
  Description of Artificial Sequence: Synthetic oligonucleotide
  Antisense strand to SEQ ID NO: 2189724
uaucugcagagcauccugc

SEQ ID NO: 2189726 - RNA, 19 nt, Artificial Sequence
  Description of Artificial Sequence: Synthetic oligonucleotide
  Sense strand starting at position 1689 of SEQ ID NO: 1883376
ggaugcucugcagauagga

SEQ ID NO: 2189727 - RNA, 19 nt, Artificial Sequence
  Description of Artificial Sequence: Synthetic oligonucleotide
  Antisense strand to SEQ ID NO: 2189726
uccuaucugcagagcaucc

SEQ ID NO: 2189728 - RNA, 19 nt, Artificial Sequence
  Description of Artificial Sequence: Synthetic oligonucleotide
  Sense strand starting at position 1809 of SEQ ID NO: 1883376
cauuuccuagugugaguuu

SEQ ID NO: 2189729 - RNA, 19 nt, Artificial Sequence
  Description of Artificial Sequence: Synthetic oligonucleotide
  Antisense strand to SEQ ID NO: 2189728
aaacucacacuaggaaaug

SEQ ID NO: 2189730 - RNA, 19 nt, Artificial Sequence
  Description of Artificial Sequence: Synthetic oligonucleotide
  Sense strand starting at position 1816 of SEQ ID NO: 1883376
uagugugaguuugucucua

SEQ ID NO: 2189731 - RNA, 19 nt, Artificial Sequence
  Description of Artificial Sequence: Synthetic oligonucleotide
  Antisense strand to SEQ ID NO: 2189730
uagagacaaacucacacua

SEQ ID NO: 2189732 - RNA, 19 nt, Artificial Sequence
  Description of Artificial Sequence: Synthetic oligonucleotide
  Sense strand starting at position 1820 of SEQ ID NO: 1883376
gugaguuugucucuacuca

SEQ ID NO: 2189733 - RNA, 19 nt, Artificial Sequence
  Description of Artificial Sequence: Synthetic oligonucleotide
  Antisense strand to SEQ ID NO: 2189732
ugaguagagacaaacucac

SEQ ID NO: 2189734 - RNA, 19 nt, Artificial Sequence
  Description of Artificial Sequence: Synthetic oligonucleotide
  Sense strand starting at position 1821 of SEQ ID NO: 1883376
ugaguuugucucuacucau

SEQ ID NO: 2189735 - RNA, 19 nt, Artificial Sequence
  Description of Artificial Sequence: Synthetic oligonucleotide
  Antisense strand to SEQ ID NO: 2189734
augaguagagacaaacuca

SEQ ID NO: 2189736 - RNA, 19 nt, Artificial Sequence
  Description of Artificial Sequence: Synthetic oligonucleotide
  Sense strand starting at position 2031 of SEQ ID NO: 1883376
cugcuaugcguuccucaga

SEQ ID NO: 2189737 - RNA, 19 nt, Artificial Sequence
  Description of Artificial Sequence: Synthetic oligonucleotide
  Antisense strand to SEQ ID NO: 2189736
ucugaggaacgcauagcag

SEQ ID NO: 2189738 - RNA, 19 nt, Artificial Sequence
  Description of Artificial Sequence: Synthetic oligonucleotide
  Sense strand starting at position 2034 of SEQ ID NO: 1883376
cuaugcguuccucagaacu

SEQ ID NO: 2189739 - RNA, 19 nt, Artificial Sequence
  Description of Artificial Sequence: Synthetic oligonucleotide
  Antisense strand to SEQ ID NO: 2189738
aguucugaggaacgcauag

SEQ ID NO: 2189740 - RNA, 19 nt, Artificial Sequence
  Description of Artificial Sequence: Synthetic oligonucleotide
  Sense strand starting at position 2278 of SEQ ID NO: 1883376
gggaguaucuaggcucgga

SEQ ID NO: 2189741 - RNA, 19 nt, Artificial Sequence
  Description of Artificial Sequence: Synthetic oligonucleotide
  Antisense strand to SEQ ID NO: 2189740
uccgagccuagauacuccc

SEQ ID NO: 2189742 - RNA, 19 nt, Artificial Sequence
  Description of Artificial Sequence: Synthetic oligonucleotide
  Sense strand starting at position 2453 of SEQ ID NO: 1883376
ccgcucucccgggcaaauu

SEQ ID NO: 2189743 - RNA, 19 nt, Artificial Sequence
  Description of Artificial Sequence: Synthetic oligonucleotide
  Antisense strand to SEQ ID NO: 2189742
aauuugcccgggagagcgg

SEQ ID NO: 2189744 - RNA, 19 nt, Artificial Sequence
  Description of Artificial Sequence: Synthetic oligonucleotide
  Sense strand starting at position 3084 of SEQ ID NO: 1883376
auguguguccgcuccaaau

SEQ ID NO: 2189745 - RNA, 19 nt, Artificial Sequence
  Description of Artificial Sequence: Synthetic oligonucleotide
  Antisense strand to SEQ ID NO: 2189744
auuuggagcggacacacau

SEQ ID NO: 2189746 - RNA, 19 nt, Artificial Sequence
  Description of Artificial Sequence: Synthetic oligonucleotide
  Sense strand starting at position 3113 of SEQ ID NO: 1883376
aauuguaucccguguugga

SEQ ID NO: 2189747 - RNA, 19 nt, Artificial Sequence
  Description of Artificial Sequence: Synthetic oligonucleotide
  Antisense strand to SEQ ID NO: 2189746
uccaacacgggauacaauu

SEQ ID NO: 2189748 - RNA, 19 nt, Artificial Sequence
  Description of Artificial Sequence: Synthetic oligonucleotide
  Sense strand starting at position 3168 of SEQ ID NO: 1883376
ugggucccucgugaauaga

SEQ ID NO: 2189749 - RNA, 19 nt, Artificial Sequence
  Description of Artificial Sequence: Synthetic oligonucleotide
  Antisense strand to SEQ ID NO: 2189748
ucuauucacgagggaccca

SEQ ID NO: 2189750 - RNA, 19 nt, Artificial Sequence
  Description of Artificial Sequence: Synthetic oligonucleotide
  Sense strand starting at position 3204 of SEQ ID NO: 1883376
agugacuucuugcuguauu

SEQ ID NO: 2189751 - RNA, 19 nt, Artificial Sequence
  Description of Artificial Sequence: Synthetic oligonucleotide
  Antisense strand to SEQ ID NO: 2189750
aauacagcaagaagucacu

SEQ ID NO: 2189752 - RNA, 19 nt, Artificial Sequence
  Description of Artificial Sequence: Synthetic oligonucleotide
  Sense strand starting at position 3217 of SEQ ID NO: 1883376
uguauuaguucugugaaag

SEQ ID NO: 2189753 - RNA, 19 nt, Artificial Sequence
  Description of Artificial Sequence: Synthetic oligonucleotide
  Antisense strand to SEQ ID NO: 2189752
cuuucacagaacuaauaca

SEQ ID NO: 2189754 - RNA, 19 nt, Artificial Sequence
  Description of Artificial Sequence: Synthetic oligonucleotide
  Sense strand starting at position 3218 of SEQ ID NO: 1883376
guauuaguucugugaaagc

SEQ ID NO: 2189755 - RNA, 19 nt, Artificial Sequence
  Description of Artificial Sequence: Synthetic oligonucleotide
  Antisense strand to SEQ ID NO: 2189754
gcuuucacagaacuaauac

SEQ ID NO: 2189756 - RNA, 19 nt, Artificial Sequence
  Description of Artificial Sequence: Synthetic oligonucleotide
  Sense strand starting at position 3227 of SEQ ID NO: 1883376
cugugaaagcuggaugcua

SEQ ID NO: 2189757 - RNA, 19 nt, Artificial Sequence
  Description of Artificial Sequence: Synthetic oligonucleotide
  Antisense strand to SEQ ID NO: 2189756
uagcauccagcuuucacag

SEQ ID NO: 2189758 - RNA, 19 nt, Artificial Sequence
  Description of Artificial Sequence: Synthetic oligonucleotide
  Sense strand starting at position 3229 of SEQ ID NO: 1883376
gugaaagcuggaugcuaaa

SEQ ID NO: 2189759 - RNA, 19 nt, Artificial Sequence
  Description of Artificial Sequence: Synthetic oligonucleotide
  Antisense strand to SEQ ID NO: 2189758
uuuagcauccagcuuucac

SEQ ID NO: 2189760 - RNA, 19 nt, Artificial Sequence
  Description of Artificial Sequence: Synthetic oligonucleotide
  Sense strand starting at position 3451 of SEQ ID NO: 1883376
uuucuuucgacggagucuu

SEQ ID NO: 2189761 - RNA, 19 nt, Artificial Sequence
  Description of Artificial Sequence: Synthetic oligonucleotide
  Antisense strand to SEQ ID NO: 2189760
aagacuccgucgaaagaaa

SEQ ID NO: 2189762 - RNA, 19 nt, Artificial Sequence
  Description of Artificial Sequence: Synthetic oligonucleotide
  Sense strand starting at position 3459 of SEQ ID NO: 1883376
gacggagucuuggugucuu

SEQ ID NO: 2189763 - RNA, 19 nt, Artificial Sequence
  Description of Artificial Sequence: Synthetic oligonucleotide
  Antisense strand to SEQ ID NO: 2189762
aagacaccaagacuccguc

SEQ ID NO: 2189764 - RNA, 19 nt, Artificial Sequence
  Description of Artificial Sequence: Synthetic oligonucleotide
  Sense strand starting at position 3615 of SEQ ID NO: 1883376
uguguauguuuaguaguaa

SEQ ID NO: 2189765 - RNA, 19 nt, Artificial Sequence
  Description of Artificial Sequence: Synthetic oligonucleotide
  Antisense strand to SEQ ID NO: 2189764
uuacuacuaaacauacaca

SEQ ID NO: 2189766 - RNA, 19 nt, Artificial Sequence
  Description of Artificial Sequence: Synthetic oligonucleotide
  Sense strand starting at position 3847 of SEQ ID NO: 1883376
uggcgccaugcuucuagua

SEQ ID NO: 2189767 - RNA, 19 nt, Artificial Sequence
  Description of Artificial Sequence: Synthetic oligonucleotide
  Antisense strand to SEQ ID NO: 2189766
uacuagaagcauggcgcca

SEQ ID NO: 2189768 - RNA, 19 nt, Artificial Sequence
  Description of Artificial Sequence: Synthetic oligonucleotide
  Sense strand starting at position 3914 of SEQ ID NO: 1883376
agguguuccuuucuagcaa

SEQ ID NO: 2189769 - RNA, 19 nt, Artificial Sequence
  Description of Artificial Sequence: Synthetic oligonucleotide
  Antisense strand to SEQ ID NO: 2189768
uugcuagaaaggaacaccu

SEQ ID NO: 2189770 - RNA, 19 nt, Artificial Sequence
  Description of Artificial Sequence: Synthetic oligonucleotide
  Sense strand starting at position 235 of SEQ ID NO: 1883377
guuagacacuugcugaaga

SEQ ID NO: 2189771 - RNA, 19 nt, Artificial Sequence
  Description of Artificial Sequence: Synthetic oligonucleotide
  Antisense strand to SEQ ID NO: 2189770
ucuucagcaagugucuaac

SEQ ID NO: 2189772 - RNA, 19 nt, Artificial Sequence
  Description of Artificial Sequence: Synthetic oligonucleotide
  Sense strand starting at position 248 of SEQ ID NO: 1883377
ugaagacuacuggguuaua

SEQ ID NO: 2189773 - RNA, 19 nt, Artificial Sequence
  Description of Artificial Sequence: Synthetic oligonucleotide
  Antisense strand to SEQ ID NO: 2189772
uauaacccaguagucuuca

SEQ ID NO: 2189774 - RNA, 19 nt, Artificial Sequence
  Description of Artificial Sequence: Synthetic oligonucleotide
  Sense strand starting at position 343 of SEQ ID NO: 1883377
cagaguuugcuagacuaaa

SEQ ID NO: 2189775 - RNA, 19 nt, Artificial Sequence
  Description of Artificial Sequence: Synthetic oligonucleotide
  Antisense strand to SEQ ID NO: 2189774
uuuagucuagcaaacucug

SEQ ID NO: 2189776 - RNA, 19 nt, Artificial Sequence
  Description of Artificial Sequence: Synthetic oligonucleotide
  Sense strand starting at position 399 of SEQ ID NO: 1883377
aagagauaauauuaggaag

SEQ ID NO: 2189777 - RNA, 19 nt, Artificial Sequence
  Description of Artificial Sequence: Synthetic oligonucleotide
  Antisense strand to SEQ ID NO: 2189776
cuuccuaauauuaucucuu

SEQ ID NO: 2189778 - RNA, 19 nt, Artificial Sequence
  Description of Artificial Sequence: Synthetic oligonucleotide
  Sense strand starting at position 402 of SEQ ID NO: 1883377
agauaauauuaggaagaag

SEQ ID NO: 2189779 - RNA, 19 nt, Artificial Sequence
  Description of Artificial Sequence: Synthetic oligonucleotide
  Antisense strand to SEQ ID NO: 2189778
cuucuuccuaauauuaucu

SEQ ID NO: 2189780 - RNA, 19 nt, Artificial Sequence
  Description of Artificial Sequence: Synthetic oligonucleotide
  Sense strand starting at position 431 of SEQ ID NO: 1883377
aguagagaucacuggguaa

SEQ ID NO: 2189781 - RNA, 19 nt, Artificial Sequence
  Description of Artificial Sequence: Synthetic oligonucleotide
  Antisense strand to SEQ ID NO: 2189780
uuacccagugaucucuacu

SEQ ID NO: 2189782 - RNA, 19 nt, Artificial Sequence
  Description of Artificial Sequence: Synthetic oligonucleotide
  Sense strand starting at position 460 of SEQ ID NO: 1883377
acaguugcucuauaaauug

SEQ ID NO: 2189783 - RNA, 19 nt, Artificial Sequence
  Description of Artificial Sequence: Synthetic oligonucleotide
  Antisense strand to SEQ ID NO: 2189782
caauuuauagagcaacugu

SEQ ID NO: 2189784 - RNA, 19 nt, Artificial Sequence
  Description of Artificial Sequence: Synthetic oligonucleotide
  Sense strand starting at position 497 of SEQ ID NO: 1883377
agcuguauuccagaugaua

SEQ ID NO: 2189785 - RNA, 19 nt, Artificial Sequence
  Description of Artificial Sequence: Synthetic oligonucleotide
  Antisense strand to SEQ ID NO: 2189784
uaucaucuggaauacagcu

SEQ ID NO: 2189786 - RNA, 19 nt, Artificial Sequence
  Description of Artificial Sequence: Synthetic oligonucleotide
  Sense strand starting at position 541 of SEQ ID NO: 1883377
augauauguggccaggcua

SEQ ID NO: 2189787 - RNA, 19 nt, Artificial Sequence
  Description of Artificial Sequence: Synthetic oligonucleotide
  Antisense strand to SEQ ID NO: 2189786
uagccuggccacauaucau

SEQ ID NO: 2189788 - RNA, 19 nt, Artificial Sequence
  Description of Artificial Sequence: Synthetic oligonucleotide
  Sense strand starting at position 1146 of SEQ ID NO: 1883377
guuacugauugguuacuaa

SEQ ID NO: 2189789 - RNA, 19 nt, Artificial Sequence
  Description of Artificial Sequence: Synthetic oligonucleotide
  Antisense strand to SEQ ID NO: 2189788
uuaguaaccaaucaguaac

SEQ ID NO: 2189790 - RNA, 19 nt, Artificial Sequence
  Description of Artificial Sequence: Synthetic oligonucleotide
  Sense strand starting at position 1149 of SEQ ID NO: 1883377
acugauugguuacuaauaa

SEQ ID NO: 2189791 - RNA, 19 nt, Artificial Sequence
  Description of Artificial Sequence: Synthetic oligonucleotide
  Antisense strand to SEQ ID NO: 2189790
uuauuaguaaccaaucagu

SEQ ID NO: 2189792 - RNA, 19 nt, Artificial Sequence
  Description of Artificial Sequence: Synthetic oligonucleotide
  Sense strand starting at position 1383 of SEQ ID NO: 1883377
agagucaaaguuugccaaa

SEQ ID NO: 2189793 - RNA, 19 nt, Artificial Sequence
  Description of Artificial Sequence: Synthetic oligonucleotide
  Antisense strand to SEQ ID NO: 2189792
uuuggcaaacuuugacucu

SEQ ID NO: 2189794 - RNA, 19 nt, Artificial Sequence
  Description of Artificial Sequence: Synthetic oligonucleotide
  Sense strand starting at position 1601 of SEQ ID NO: 1883377
uuuacaaggccuggagaau

SEQ ID NO: 2189795 - RNA, 19 nt, Artificial Sequence
  Description of Artificial Sequence: Synthetic oligonucleotide
  Antisense strand to SEQ ID NO: 2189794
auucuccaggccuuguaaa

SEQ ID NO: 2189796 - RNA, 19 nt, Artificial Sequence
  Description of Artificial Sequence: Synthetic oligonucleotide
  Sense strand starting at position 1630 of SEQ ID NO: 1883377
uucucaccucaguaaguua

SEQ ID NO: 2189797 - RNA, 19 nt, Artificial Sequence
  Description of Artificial Sequence: Synthetic oligonucleotide
  Antisense strand to SEQ ID NO: 2189796
uaacuuacugaggugagaa

SEQ ID NO: 2189798 - RNA, 19 nt, Artificial Sequence
  Description of Artificial Sequence: Synthetic oligonucleotide
  Sense strand starting at position 1771 of SEQ ID NO: 1883377
gggaguuaugggugauggu

SEQ ID NO: 2189799 - RNA, 19 nt, Artificial Sequence
  Description of Artificial Sequence: Synthetic oligonucleotide
  Antisense strand to SEQ ID NO: 2189798
accaucacccauaacuccc

SEQ ID NO: 2189800 - RNA, 19 nt, Artificial Sequence
  Description of Artificial Sequence: Synthetic oligonucleotide
  Sense strand starting at position 1781 of SEQ ID NO: 1883377
ggugauggugaauaaaguu

SEQ ID NO: 2189801 - RNA, 19 nt, Artificial Sequence
  Description of Artificial Sequence: Synthetic oligonucleotide
  Antisense strand to SEQ ID NO: 2189800
aacuuuauucaccaucacc

SEQ ID NO: 2189802 - RNA, 19 nt, Artificial Sequence
  Description of Artificial Sequence: Synthetic oligonucleotide
  Sense strand starting at position 1816 of SEQ ID NO: 1883377
uggacuuccggucaggaga

SEQ ID NO: 2189803 - RNA, 19 nt, Artificial Sequence
  Description of Artificial Sequence: Synthetic oligonucleotide
  Antisense strand to SEQ ID NO: 2189802
ucuccugaccggaagucca

SEQ ID NO: 2189804 - RNA, 19 nt, Artificial Sequence
  Description of Artificial Sequence: Synthetic oligonucleotide
  Sense strand starting at position 1833 of SEQ ID NO: 1883377
gaccgauugcauuacaccu

SEQ ID NO: 2189805 - RNA, 19 nt, Artificial Sequence
  Description of Artificial Sequence: Synthetic oligonucleotide
  Antisense strand to SEQ ID NO: 2189804
agguguaaugcaaucgguc

SEQ ID NO: 2189806 - RNA, 19 nt, Artificial Sequence
  Description of Artificial Sequence: Synthetic oligonucleotide
  Sense strand starting at position 1904 of SEQ ID NO: 1883377
cgaccaguacucuacauua

SEQ ID NO: 2189807 - RNA, 19 nt, Artificial Sequence
  Description of Artificial Sequence: Synthetic oligonucleotide
  Antisense strand to SEQ ID NO: 2189806
uaauguagaguacuggucg

SEQ ID NO: 2189808 - RNA, 19 nt, Artificial Sequence
  Description of Artificial Sequence: Synthetic oligonucleotide
  Sense strand starting at position 2087 of SEQ ID NO: 1883377
gugcaaggugaagacuaau

SEQ ID NO: 2189809 - RNA, 19 nt, Artificial Sequence
  Description of Artificial Sequence: Synthetic oligonucleotide
  Antisense strand to SEQ ID NO: 2189808
auuagucuucaccuugcac

SEQ ID NO: 2189810 - RNA, 19 nt, Artificial Sequence
  Description of Artificial Sequence: Synthetic oligonucleotide
  Sense strand starting at position 2123 of SEQ ID NO: 1883377
aacgcuaucccaugagaag

SEQ ID NO: 2189811 - RNA, 19 nt, Artificial Sequence
  Description of Artificial Sequence: Synthetic oligonucleotide
  Antisense strand to SEQ ID NO: 2189810
cuucucaugggauagcguu

SEQ ID NO: 2189812 - RNA, 19 nt, Artificial Sequence
  Description of Artificial Sequence: Synthetic oligonucleotide
  Sense strand starting at position 2124 of SEQ ID NO: 1883377
acgcuaucccaugagaaga

SEQ ID NO: 2189813 - RNA, 19 nt, Artificial Sequence
  Description of Artificial Sequence: Synthetic oligonucleotide
  Antisense strand to SEQ ID NO: 2189812
ucuucucaugggauagcgu

SEQ ID NO: 2189814 - RNA, 19 nt, Artificial Sequence
  Description of Artificial Sequence: Synthetic oligonucleotide
  Sense strand starting at position 2197 of SEQ ID NO: 1883377
ccgugacugcuauaaagac

SEQ ID NO: 2189815 - RNA, 19 nt, Artificial Sequence
  Description of Artificial Sequence: Synthetic oligonucleotide
  Antisense strand to SEQ ID NO: 2189814
gucuuuauagcagucacgg

SEQ ID NO: 2189816 - RNA, 19 nt, Artificial Sequence
  Description of Artificial Sequence: Synthetic oligonucleotide
  Sense strand starting at position 2204 of SEQ ID NO: 1883377
ugcuauaaagacugugaaa

SEQ ID NO: 2189817 - RNA, 19 nt, Artificial Sequence
  Description of Artificial Sequence: Synthetic oligonucleotide
  Antisense strand to SEQ ID NO: 2189816
uuucacagucuuuauagca

SEQ ID NO: 2189818 - RNA, 19 nt, Artificial Sequence
  Description of Artificial Sequence: Synthetic oligonucleotide
  Sense strand starting at position 2217 of SEQ ID NO: 1883377
gugaaaggugaaggcuaau

SEQ ID NO: 2189819 - RNA, 19 nt, Artificial Sequence
  Description of Artificial Sequence: Synthetic oligonucleotide
  Antisense strand to SEQ ID NO: 2189818
auuagccuucaccuuucac

SEQ ID NO: 2189820 - RNA, 19 nt, Artificial Sequence
  Description of Artificial Sequence: Synthetic oligonucleotide
  Sense strand starting at position 2261 of SEQ ID NO: 1883377
auguaugggaucuacugua

SEQ ID NO: 2189821 - RNA, 19 nt, Artificial Sequence
  Description of Artificial Sequence: Synthetic oligonucleotide
  Antisense strand to SEQ ID NO: 2189820
uacaguagaucccauacau

SEQ ID NO: 2189822 - RNA, 19 nt, Artificial Sequence
  Description of Artificial Sequence: Synthetic oligonucleotide
  Sense strand starting at position 2266 of SEQ ID NO: 1883377
ugggaucuacuguagucua

SEQ ID NO: 2189823 - RNA, 19 nt, Artificial Sequence
  Description of Artificial Sequence: Synthetic oligonucleotide
  Antisense strand to SEQ ID NO: 2189822
uagacuacaguagauccca

SEQ ID NO: 2189824 - RNA, 19 nt, Artificial Sequence
  Description of Artificial Sequence: Synthetic oligonucleotide
  Sense strand starting at position 2368 of SEQ ID NO: 1883377
aguuuacagagacgauaaa

SEQ ID NO: 2189825 - RNA, 19 nt, Artificial Sequence
  Description of Artificial Sequence: Synthetic oligonucleotide
  Antisense strand to SEQ ID NO: 2189824
uuuaucgucucuguaaacu

SEQ ID NO: 2189826 - RNA, 19 nt, Artificial Sequence
  Description of Artificial Sequence: Synthetic oligonucleotide
  Sense strand starting at position 2431 of SEQ ID NO: 1883377
uuaacugaagcuuagcaaa

SEQ ID NO: 2189827 - RNA, 19 nt, Artificial Sequence
  Description of Artificial Sequence: Synthetic oligonucleotide
  Antisense strand to SEQ ID NO: 2189826
uuugcuaagcuucaguuaa

SEQ ID NO: 2189828 - RNA, 19 nt, Artificial Sequence
  Description of Artificial Sequence: Synthetic oligonucleotide
  Sense strand starting at position 2515 of SEQ ID NO: 1883377
augauauacauguguaagu

SEQ ID NO: 2189829 - RNA, 19 nt, Artificial Sequence
  Description of Artificial Sequence: Synthetic oligonucleotide
  Antisense strand to SEQ ID NO: 2189828
acuuacacauguauaucau

SEQ ID NO: 2189830 - RNA, 19 nt, Artificial Sequence
  Description of Artificial Sequence: Synthetic oligonucleotide
  Sense strand starting at position 2517 of SEQ ID NO: 1883377
gauauacauguguaaguua

SEQ ID NO: 2189831 - RNA, 19 nt, Artificial Sequence
  Description of Artificial Sequence: Synthetic oligonucleotide
  Antisense strand to SEQ ID NO: 2189830
uaacuuacacauguauauc

SEQ ID NO: 2189832 - RNA, 19 nt, Artificial Sequence
  Description of Artificial Sequence: Synthetic oligonucleotide
  Sense strand starting at position 2641 of SEQ ID NO: 1883377
gagaucaucucggcugaca

SEQ ID NO: 2189833 - RNA, 19 nt, Artificial Sequence
  Description of Artificial Sequence: Synthetic oligonucleotide
  Antisense strand to SEQ ID NO: 2189832
ugucagccgagaugaucuc

SEQ ID NO: 2189834 - RNA, 19 nt, Artificial Sequence
  Description of Artificial Sequence: Synthetic oligonucleotide
  Sense strand starting at position 2906 of SEQ ID NO: 1883377
aagucuuugguagaaguau

SEQ ID NO: 2189835 - RNA, 19 nt, Artificial Sequence
  Description of Artificial Sequence: Synthetic oligonucleotide
  Antisense strand to SEQ ID NO: 2189834
auacuucuaccaaagacuu

SEQ ID NO: 2189836 - RNA, 19 nt, Artificial Sequence
  Description of Artificial Sequence: Synthetic oligonucleotide
  Sense strand starting at position 2914 of SEQ ID NO: 1883377
gguagaaguauuuguugcu

SEQ ID NO: 2189837 - RNA, 19 nt, Artificial Sequence
  Description of Artificial Sequence: Synthetic oligonucleotide
  Antisense strand to SEQ ID NO: 2189836
agcaacaaauacuucuacc

SEQ ID NO: 2189838 - RNA, 19 nt, Artificial Sequence
  Description of Artificial Sequence: Synthetic oligonucleotide
  Sense strand starting at position 2948 of SEQ ID NO: 1883377
ccuuaugugaaggaagguu

SEQ ID NO: 2189839 - RNA, 19 nt, Artificial Sequence
  Description of Artificial Sequence: Synthetic oligonucleotide
  Antisense strand to SEQ ID NO: 2189838
aaccuuccuucacauaagg

SEQ ID NO: 2189840 - RNA, 19 nt, Artificial Sequence
  Description of Artificial Sequence: Synthetic oligonucleotide
  Sense strand starting at position 3252 of SEQ ID NO: 1883377
agaauaugguaaucaaggu

SEQ ID NO: 2189841 - RNA, 19 nt, Artificial Sequence
  Description of Artificial Sequence: Synthetic oligonucleotide
  Antisense strand to SEQ ID NO: 2189840
accuugauuaccauauucu

SEQ ID NO: 2189842 - RNA, 19 nt, Artificial Sequence
  Description of Artificial Sequence: Synthetic oligonucleotide
  Sense strand starting at position 3342 of SEQ ID NO: 1883377
agugauuccaacugugaga

SEQ ID NO: 2189843 - RNA, 19 nt, Artificial Sequence
  Description of Artificial Sequence: Synthetic oligonucleotide
  Antisense strand to SEQ ID NO: 2189842
ucucacaguuggaaucacu

SEQ ID NO: 2189844 - RNA, 19 nt, Artificial Sequence
  Description of Artificial Sequence: Synthetic oligonucleotide
  Sense strand starting at position 3344 of SEQ ID NO: 1883377
ugauuccaacugugagaac

SEQ ID NO: 2189845 - RNA, 19 nt, Artificial Sequence
  Description of Artificial Sequence: Synthetic oligonucleotide
  Antisense strand to SEQ ID NO: 2189844
guucucacaguuggaauca

SEQ ID NO: 2189846 - RNA, 19 nt, Artificial Sequence
  Description of Artificial Sequence: Synthetic oligonucleotide
  Sense strand starting at position 3446 of SEQ ID NO: 1883377
cauccuauuucugccguga

SEQ ID NO: 2189847 - RNA, 19 nt, Artificial Sequence
  Description of Artificial Sequence: Synthetic oligonucleotide
  Antisense strand to SEQ ID NO: 2189846
ucacggcagaaauaggaug

SEQ ID NO: 2189848 - RNA, 19 nt, Artificial Sequence
  Description of Artificial Sequence: Synthetic oligonucleotide
  Sense strand starting at position 3554 of SEQ ID NO: 1883377
aacugaugacaguguuuga

SEQ ID NO: 2189849 - RNA, 19 nt, Artificial Sequence
  Description of Artificial Sequence: Synthetic oligonucleotide
  Antisense strand to SEQ ID NO: 2189848
ucaaacacugucaucaguu

SEQ ID NO: 2189850 - RNA, 19 nt, Artificial Sequence
  Description of Artificial Sequence: Synthetic oligonucleotide
  Sense strand starting at position 129 of SEQ ID NO: 1883378
ugaugaugauggucguaau

SEQ ID NO: 2189851 - RNA, 19 nt, Artificial Sequence
  Description of Artificial Sequence: Synthetic oligonucleotide
  Antisense strand to SEQ ID NO: 2189850
auuacgaccaucaucauca

SEQ ID NO: 2189852 - RNA, 19 nt, Artificial Sequence
  Description of Artificial Sequence: Synthetic oligonucleotide
  Sense strand starting at position 181 of SEQ ID NO: 1883378
ggugguaaugacuauggua

SEQ ID NO: 2189853 - RNA, 19 nt, Artificial Sequence
  Description of Artificial Sequence: Synthetic oligonucleotide
  Antisense strand to SEQ ID NO: 2189852
uaccauagucauuaccacc

SEQ ID NO: 2189854 - RNA, 19 nt, Artificial Sequence
  Description of Artificial Sequence: Synthetic oligonucleotide
  Sense strand starting at position 183 of SEQ ID NO: 1883378
ugguaaugacuaugguaau

SEQ ID NO: 2189855 - RNA, 19 nt, Artificial Sequence
  Description of Artificial Sequence: Synthetic oligonucleotide
  Antisense strand to SEQ ID NO: 2189854
auuaccauagucauuacca

SEQ ID NO: 2189856 - RNA, 19 nt, Artificial Sequence
  Description of Artificial Sequence: Synthetic oligonucleotide
  Sense strand starting at position 243 of SEQ ID NO: 1883378
ucacgaugacaaugaugau

SEQ ID NO: 2189857 - RNA, 19 nt, Artificial Sequence
  Description of Artificial Sequence: Synthetic oligonucleotide
  Antisense strand to SEQ ID NO: 2189856
aucaucauugucaucguga

SEQ ID NO: 2189858 - RNA, 19 nt, Artificial Sequence
  Description of Artificial Sequence: Synthetic oligonucleotide
  Sense strand starting at position 405 of SEQ ID NO: 1883378
cucaaaggguagucugaga

SEQ ID NO: 2189859 - RNA, 19 nt, Artificial Sequence
  Description of Artificial Sequence: Synthetic oligonucleotide
  Antisense strand to SEQ ID NO: 2189858
ucucagacuacccuuugag

SEQ ID NO: 2189860 - RNA, 19 nt, Artificial Sequence
  Description of Artificial Sequence: Synthetic oligonucleotide
  Sense strand starting at position 453 of SEQ ID NO: 1883378
gugugaauuaugcagauac

SEQ ID NO: 2189861 - RNA, 19 nt, Artificial Sequence
  Description of Artificial Sequence: Synthetic oligonucleotide
  Antisense strand to SEQ ID NO: 2189860
guaucugcauaauucacac

SEQ ID NO: 2189862 - RNA, 19 nt, Artificial Sequence
  Description of Artificial Sequence: Synthetic oligonucleotide
  Sense strand starting at position 546 of SEQ ID NO: 1883378
aguucuuccguauacuaga

SEQ ID NO: 2189863 - RNA, 19 nt, Artificial Sequence
  Description of Artificial Sequence: Synthetic oligonucleotide
  Antisense strand to SEQ ID NO: 2189862
ucuaguauacggaagaacu

SEQ ID NO: 2189864 - RNA, 19 nt, Artificial Sequence
  Description of Artificial Sequence: Synthetic oligonucleotide
  Sense strand starting at position 859 of SEQ ID NO: 1883378
gggaauggugagugccaga

SEQ ID NO: 2189865 - RNA, 19 nt, Artificial Sequence
  Description of Artificial Sequence: Synthetic oligonucleotide
  Antisense strand to SEQ ID NO: 2189864
ucuggcacucaccauuccc

SEQ ID NO: 2189866 - RNA, 19 nt, Artificial Sequence
  Description of Artificial Sequence: Synthetic oligonucleotide
  Sense strand starting at position 1061 of SEQ ID NO: 1883378
gagagcaucauggguaaag

SEQ ID NO: 2189867 - RNA, 19 nt, Artificial Sequence
  Description of Artificial Sequence: Synthetic oligonucleotide
  Antisense strand to SEQ ID NO: 2189866
cuuuacccaugaugcucuc

SEQ ID NO: 2189868 - RNA, 19 nt, Artificial Sequence
  Description of Artificial Sequence: Synthetic oligonucleotide
  Sense strand starting at position 1063 of SEQ ID NO: 1883378
gagcaucauggguaaaggu

SEQ ID NO: 2189869 - RNA, 19 nt, Artificial Sequence
  Description of Artificial Sequence: Synthetic oligonucleotide
  Antisense strand to SEQ ID NO: 2189868
accuuuacccaugaugcuc

SEQ ID NO: 2189870 - RNA, 19 nt, Artificial Sequence
  Description of Artificial Sequence: Synthetic oligonucleotide
  Sense strand starting at position 1134 of SEQ ID NO: 1883378
ucuagagcuccaggugaaa

SEQ ID NO: 2189871 - RNA, 19 nt, Artificial Sequence
  Description of Artificial Sequence: Synthetic oligonucleotide
  Antisense strand to SEQ ID NO: 2189870
uuucaccuggagcucuaga

SEQ ID NO: 2189872 - RNA, 19 nt, Artificial Sequence
  Description of Artificial Sequence: Synthetic oligonucleotide
  Sense strand starting at position 1270 of SEQ ID NO: 1883378
gggagugacaugcaccuua

SEQ ID NO: 2189873 - RNA, 19 nt, Artificial Sequence
  Description of Artificial Sequence: Synthetic oligonucleotide
  Antisense strand to SEQ ID NO: 2189872
uaaggugcaugucacuccc

SEQ ID NO: 2189874 - RNA, 19 nt, Artificial Sequence
  Description of Artificial Sequence: Synthetic oligonucleotide
  Sense strand starting at position 1329 of SEQ ID NO: 1883378
ggagacaacuuugucccua

SEQ ID NO: 2189875 - RNA, 19 nt, Artificial Sequence
  Description of Artificial Sequence: Synthetic oligonucleotide
  Antisense strand to SEQ ID NO: 2189874
uagggacaaaguugucucc

SEQ ID NO: 2189876 - RNA, 19 nt, Artificial Sequence
  Description of Artificial Sequence: Synthetic oligonucleotide
  Sense strand starting at position 1745 of SEQ ID NO: 1883378
gggccaguuacugauucuu

SEQ ID NO: 2189877 - RNA, 19 nt, Artificial Sequence
  Description of Artificial Sequence: Synthetic oligonucleotide
  Antisense strand to SEQ ID NO: 2189876
aagaaucaguaacuggccc

SEQ ID NO: 2189878 - RNA, 19 nt, Artificial Sequence
  Description of Artificial Sequence: Synthetic oligonucleotide
  Sense strand starting at position 1750 of SEQ ID NO: 1883378
aguuacugauucuuucuga

SEQ ID NO: 2189879 - RNA, 19 nt, Artificial Sequence
  Description of Artificial Sequence: Synthetic oligonucleotide
  Antisense strand to SEQ ID NO: 2189878
ucagaaagaaucaguaacu

SEQ ID NO: 2189880 - RNA, 19 nt, Artificial Sequence
  Description of Artificial Sequence: Synthetic oligonucleotide
  Sense strand starting at position 1796 of SEQ ID NO: 1883378
ggaugaugauacuuaccuu

SEQ ID NO: 2189881 - RNA, 19 nt, Artificial Sequence
  Description of Artificial Sequence: Synthetic oligonucleotide
  Antisense strand to SEQ ID NO: 2189880
aagguaaguaucaucaucc

SEQ ID NO: 2189882 - RNA, 19 nt, Artificial Sequence
  Description of Artificial Sequence: Synthetic oligonucleotide
  Sense strand starting at position 2093 of SEQ ID NO: 1883378
agugcaacuccaggaaaga

SEQ ID NO: 2189883 - RNA, 19 nt, Artificial Sequence
  Description of Artificial Sequence: Synthetic oligonucleotide
  Antisense strand to SEQ ID NO: 2189882
ucuuuccuggaguugcacu

SEQ ID NO: 2189884 - RNA, 19 nt, Artificial Sequence
  Description of Artificial Sequence: Synthetic oligonucleotide
  Sense strand starting at position 2289 of SEQ ID NO: 1883378
gaaguucucgcugaagaau

SEQ ID NO: 2189885 - RNA, 19 nt, Artificial Sequence
  Description of Artificial Sequence: Synthetic oligonucleotide
  Antisense strand to SEQ ID NO: 2189884
auucuucagcgagaacuuc

SEQ ID NO: 2189886 - RNA, 19 nt, Artificial Sequence
  Description of Artificial Sequence: Synthetic oligonucleotide
  Sense strand starting at position 2390 of SEQ ID NO: 1883378
aguggugugucauuucuca

SEQ ID NO: 2189887 - RNA, 19 nt, Artificial Sequence
  Description of Artificial Sequence: Synthetic oligonucleotide
  Antisense strand to SEQ ID NO: 2189886
ugagaaaugacacaccacu

SEQ ID NO: 2189888 - RNA, 19 nt, Artificial Sequence
  Description of Artificial Sequence: Synthetic oligonucleotide
  Sense strand starting at position 2394 of SEQ ID NO: 1883378
gugugucauuucucacaca

SEQ ID NO: 2189889 - RNA, 19 nt, Artificial Sequence
  Description of Artificial Sequence: Synthetic oligonucleotide
  Antisense strand to SEQ ID NO: 2189888
ugugugagaaaugacacac

SEQ ID NO: 2189890 - RNA, 19 nt, Artificial Sequence
  Description of Artificial Sequence: Synthetic oligonucleotide
  Sense strand starting at position 2422 of SEQ ID NO: 1883378
ccaucaucccugugaggag

SEQ ID NO: 2189891 - RNA, 19 nt, Artificial Sequence
  Description of Artificial Sequence: Synthetic oligonucleotide
  Antisense strand to SEQ ID NO: 2189890
cuccucacagggaugaugg

SEQ ID NO: 2189892 - RNA, 19 nt, Artificial Sequence
  Description of Artificial Sequence: Synthetic oligonucleotide
  Sense strand starting at position 2448 of SEQ ID NO: 1883378
ggagauuagugaguugaug

SEQ ID NO: 2189893 - RNA, 19 nt, Artificial Sequence
  Description of Artificial Sequence: Synthetic oligonucleotide
  Antisense strand to SEQ ID NO: 2189892
caucaacucacuaaucucc

SEQ ID NO: 2189894 - RNA, 19 nt, Artificial Sequence
  Description of Artificial Sequence: Synthetic oligonucleotide
  Sense strand starting at position 2450 of SEQ ID NO: 1883378
agauuagugaguugaugug

SEQ ID NO: 2189895 - RNA, 19 nt, Artificial Sequence
  Description of Artificial Sequence: Synthetic oligonucleotide
  Antisense strand to SEQ ID NO: 2189894
cacaucaacucacuaaucu

SEQ ID NO: 2189896 - RNA, 19 nt, Artificial Sequence
  Description of Artificial Sequence: Synthetic oligonucleotide
  Sense strand starting at position 2551 of SEQ ID NO: 1883378
gucugauucuaccuacauc

SEQ ID NO: 2189897 - RNA, 19 nt, Artificial Sequence
  Description of Artificial Sequence: Synthetic oligonucleotide
  Antisense strand to SEQ ID NO: 2189896
gauguagguagaaucagac

SEQ ID NO: 2189898 - RNA, 19 nt, Artificial Sequence
  Description of Artificial Sequence: Synthetic oligonucleotide
  Sense strand starting at position 2582 of SEQ ID NO: 1883378
uuguguaucugaccagaug

SEQ ID NO: 2189899 - RNA, 19 nt, Artificial Sequence
  Description of Artificial Sequence: Synthetic oligonucleotide
  Antisense strand to SEQ ID NO: 2189898
caucuggucagauacacaa

SEQ ID NO: 2189900 - RNA, 19 nt, Artificial Sequence
  Description of Artificial Sequence: Synthetic oligonucleotide
  Sense strand starting at position 2585 of SEQ ID NO: 1883378
uguaucugaccagaugcau

SEQ ID NO: 2189901 - RNA, 19 nt, Artificial Sequence
  Description of Artificial Sequence: Synthetic oligonucleotide
  Antisense strand to SEQ ID NO: 2189900
augcaucuggucagauaca

SEQ ID NO: 2189902 - RNA, 19 nt, Artificial Sequence
  Description of Artificial Sequence: Synthetic oligonucleotide
  Sense strand starting at position 2591 of SEQ ID NO: 1883378
ugaccagaugcaugugaga

SEQ ID NO: 2189903 - RNA, 19 nt, Artificial Sequence
  Description of Artificial Sequence: Synthetic oligonucleotide
  Antisense strand to SEQ ID NO: 2189902
ucucacaugcaucugguca

SEQ ID NO: 2189904 - RNA, 19 nt, Artificial Sequence
  Description of Artificial Sequence: Synthetic oligonucleotide
  Sense strand starting at position 2593 of SEQ ID NO: 1883378
accagaugcaugugagaaa

SEQ ID NO: 2189905 - RNA, 19 nt, Artificial Sequence
  Description of Artificial Sequence: Synthetic oligonucleotide
  Antisense strand to SEQ ID NO: 2189904
uuucucacaugcaucuggu

SEQ ID NO: 2189906 - RNA, 19 nt, Artificial Sequence
  Description of Artificial Sequence: Synthetic oligonucleotide
  Sense strand starting at position 2602 of SEQ ID NO: 1883378
augugagaaaucugaguug

SEQ ID NO: 2189907 - RNA, 19 nt, Artificial Sequence
  Description of Artificial Sequence: Synthetic oligonucleotide
  Antisense strand to SEQ ID NO: 2189906
caacucagauuucucacau

SEQ ID NO: 2189908 - RNA, 19 nt, Artificial Sequence
  Description of Artificial Sequence: Synthetic oligonucleotide
  Sense strand starting at position 2605 of SEQ ID NO: 1883378
ugagaaaucugaguugagu

SEQ ID NO: 2189909 - RNA, 19 nt, Artificial Sequence
  Description of Artificial Sequence: Synthetic oligonucleotide
  Antisense strand to SEQ ID NO: 2189908
acucaacucagauuucuca

SEQ ID NO: 2189910 - RNA, 19 nt, Artificial Sequence
  Description of Artificial Sequence: Synthetic oligonucleotide
  Sense strand starting at position 2607 of SEQ ID NO: 1883378
agaaaucugaguugaguua

SEQ ID NO: 2189911 - RNA, 19 nt, Artificial Sequence
  Description of Artificial Sequence: Synthetic oligonucleotide
  Antisense strand to SEQ ID NO: 2189910
uaacucaacucagauuucu

SEQ ID NO: 2189912 - RNA, 19 nt, Artificial Sequence
  Description of Artificial Sequence: Synthetic oligonucleotide
  Sense strand starting at position 2616 of SEQ ID NO: 1883378
aguugaguuaccugugaaa

SEQ ID NO: 2189913 - RNA, 19 nt, Artificial Sequence
  Description of Artificial Sequence: Synthetic oligonucleotide
  Antisense strand to SEQ ID NO: 2189912
uuucacagguaacucaacu

SEQ ID NO: 2189914 - RNA, 19 nt, Artificial Sequence
  Description of Artificial Sequence: Synthetic oligonucleotide
  Sense strand starting at position 3099 of SEQ ID NO: 1883378
agauaucuucucuggucaa

SEQ ID NO: 2189915 - RNA, 19 nt, Artificial Sequence
  Description of Artificial Sequence: Synthetic oligonucleotide
  Antisense strand to SEQ ID NO: 2189914
uugaccagagaagauaucu

SEQ ID NO: 2189916 - RNA, 19 nt, Artificial Sequence
  Description of Artificial Sequence: Synthetic oligonucleotide
  Sense strand starting at position 3126 of SEQ ID NO: 1883378
caaaccguugaaugugaau

SEQ ID NO: 2189917 - RNA, 19 nt, Artificial Sequence
  Description of Artificial Sequence: Synthetic oligonucleotide
  Antisense strand to SEQ ID NO: 2189916
auucacauucaacgguuug

SEQ ID NO: 2189918 - RNA, 19 nt, Artificial Sequence
  Description of Artificial Sequence: Synthetic oligonucleotide
  Sense strand starting at position 3450 of SEQ ID NO: 1883378
gcccuugaacccuaaguua

SEQ ID NO: 2189919 - RNA, 19 nt, Artificial Sequence
  Description of Artificial Sequence: Synthetic oligonucleotide
  Antisense strand to SEQ ID NO: 2189918
uaacuuaggguucaagggc

SEQ ID NO: 2189920 - RNA, 19 nt, Artificial Sequence
  Description of Artificial Sequence: Synthetic oligonucleotide
  Sense strand starting at position 3554 of SEQ ID NO: 1883378
gcguguguuauucugugag

SEQ ID NO: 2189921 - RNA, 19 nt, Artificial Sequence
  Description of Artificial Sequence: Synthetic oligonucleotide
  Antisense strand to SEQ ID NO: 2189920
cucacagaauaacacacgc

SEQ ID NO: 2189922 - RNA, 19 nt, Artificial Sequence
  Description of Artificial Sequence: Synthetic oligonucleotide
  Sense strand starting at position 3783 of SEQ ID NO: 1883378
ugcuacgugacacagaaau

SEQ ID NO: 2189923 - RNA, 19 nt, Artificial Sequence
  Description of Artificial Sequence: Synthetic oligonucleotide
  Antisense strand to SEQ ID NO: 2189922
auuucugugucacguagca

SEQ ID NO: 2189924 - RNA, 19 nt, Artificial Sequence
  Description of Artificial Sequence: Synthetic oligonucleotide
  Sense strand starting at position 3885 of SEQ ID NO: 1883378
accaccacuuaugugauua

SEQ ID NO: 2189925 - RNA, 19 nt, Artificial Sequence
  Description of Artificial Sequence: Synthetic oligonucleotide
  Antisense strand to SEQ ID NO: 2189924
uaaucacauaagugguggu

SEQ ID NO: 2189926 - RNA, 19 nt, Artificial Sequence
  Description of Artificial Sequence: Synthetic oligonucleotide
  Sense strand starting at position 3889 of SEQ ID NO: 1883378
ccacuuaugugauuacaug

SEQ ID NO: 2189927 - RNA, 19 nt, Artificial Sequence
  Description of Artificial Sequence: Synthetic oligonucleotide
  Antisense strand to SEQ ID NO: 2189926
cauguaaucacauaagugg

SEQ ID NO: 2189928 - RNA, 19 nt, Artificial Sequence
  Description of Artificial Sequence: Synthetic oligonucleotide
  Sense strand starting at position 3897 of SEQ ID NO: 1883378
gugauuacaugaguugauc

SEQ ID NO: 2189929 - RNA, 19 nt, Artificial Sequence
  Description of Artificial Sequence: Synthetic oligonucleotide
  Antisense strand to SEQ ID NO: 2189928
gaucaacucauguaaucac

SEQ ID NO: 2189930 - RNA, 19 nt, Artificial Sequence
  Description of Artificial Sequence: Synthetic oligonucleotide
  Sense strand starting at position 34 of SEQ ID NO: 1883379
aagugucugauguaaagga

SEQ ID NO: 2189931 - RNA, 19 nt, Artificial Sequence
  Description of Artificial Sequence: Synthetic oligonucleotide
  Antisense strand to SEQ ID NO: 2189930
uccuuuacaucagacacuu

SEQ ID NO: 2189932 - RNA, 19 nt, Artificial Sequence
  Description of Artificial Sequence: Synthetic oligonucleotide
  Sense strand starting at position 223 of SEQ ID NO: 1883379
gugugagaaaccuguaaau

SEQ ID NO: 2189933 - RNA, 19 nt, Artificial Sequence
  Description of Artificial Sequence: Synthetic oligonucleotide
  Antisense strand to SEQ ID NO: 2189932
auuuacagguuucucacac

SEQ ID NO: 2189934 - RNA, 19 nt, Artificial Sequence
  Description of Artificial Sequence: Synthetic oligonucleotide
  Sense strand starting at position 225 of SEQ ID NO: 1883379
gugagaaaccuguaaaugu

SEQ ID NO: 2189935 - RNA, 19 nt, Artificial Sequence
  Description of Artificial Sequence: Synthetic oligonucleotide
  Antisense strand to SEQ ID NO: 2189934
acauuuacagguuucucac

SEQ ID NO: 2189936 - RNA, 19 nt, Artificial Sequence
  Description of Artificial Sequence: Synthetic oligonucleotide
  Sense strand starting at position 238 of SEQ ID NO: 1883379
aaaugugagaagcaguguu

SEQ ID NO: 2189937 - RNA, 19 nt, Artificial Sequence
  Description of Artificial Sequence: Synthetic oligonucleotide
  Antisense strand to SEQ ID NO: 2189936
aacacugcuucucacauuu

SEQ ID NO: 2189938 - RNA, 19 nt, Artificial Sequence
  Description of Artificial Sequence: Synthetic oligonucleotide
  Sense strand starting at position 604 of SEQ ID NO: 1883379
ugaggucacuguccuagaa

SEQ ID NO: 2189939 - RNA, 19 nt, Artificial Sequence
  Description of Artificial Sequence: Synthetic oligonucleotide
  Antisense strand to SEQ ID NO: 2189938
uucuaggacagugaccuca

SEQ ID NO: 2189940 - RNA, 19 nt, Artificial Sequence
  Description of Artificial Sequence: Synthetic oligonucleotide
  Sense strand starting at position 608 of SEQ ID NO: 1883379
gucacuguccuagaauaaa

SEQ ID NO: 2189941 - RNA, 19 nt, Artificial Sequence
  Description of Artificial Sequence: Synthetic oligonucleotide
  Antisense strand to SEQ ID NO: 2189940
uuuauucuaggacagugac

SEQ ID NO: 2189942 - RNA, 19 nt, Artificial Sequence
  Description of Artificial Sequence: Synthetic oligonucleotide
  Sense strand starting at position 661 of SEQ ID NO: 1883379
acuuauccuguuugaagaa

SEQ ID NO: 2189943 - RNA, 19 nt, Artificial Sequence
  Description of Artificial Sequence: Synthetic oligonucleotide
  Antisense strand to SEQ ID NO: 2189942
uucuucaaacaggauaagu

SEQ ID NO: 2189944 - RNA, 19 nt, Artificial Sequence
  Description of Artificial Sequence: Synthetic oligonucleotide
  Sense strand starting at position 688 of SEQ ID NO: 1883379
cucugugguguagacagau

SEQ ID NO: 2189945 - RNA, 19 nt, Artificial Sequence
  Description of Artificial Sequence: Synthetic oligonucleotide
  Antisense strand to SEQ ID NO: 2189944
aucugucuacaccacagag

SEQ ID NO: 2189946 - RNA, 19 nt, Artificial Sequence
  Description of Artificial Sequence: Synthetic oligonucleotide
  Sense strand starting at position 783 of SEQ ID NO: 1883379
agcauucuacauugagaaa

SEQ ID NO: 2189947 - RNA, 19 nt, Artificial Sequence
  Description of Artificial Sequence: Synthetic oligonucleotide
  Antisense strand to SEQ ID NO: 2189946
uuucucaauguagaaugcu

SEQ ID NO: 2189948 - RNA, 19 nt, Artificial Sequence
  Description of Artificial Sequence: Synthetic oligonucleotide
  Sense strand starting at position 841 of SEQ ID NO: 1883379
aaagucagugcauagcuaa

SEQ ID NO: 2189949 - RNA, 19 nt, Artificial Sequence
  Description of Artificial Sequence: Synthetic oligonucleotide
  Antisense strand to SEQ ID NO: 2189948
uuagcuaugcacugacuuu

SEQ ID NO: 2189950 - RNA, 19 nt, Artificial Sequence
  Description of Artificial Sequence: Synthetic oligonucleotide
  Sense strand starting at position 844 of SEQ ID NO: 1883379
gucagugcauagcuaauuu

SEQ ID NO: 2189951 - RNA, 19 nt, Artificial Sequence
  Description of Artificial Sequence: Synthetic oligonucleotide
  Antisense strand to SEQ ID NO: 2189950
aaauuagcuaugcacugac

SEQ ID NO: 2189952 - RNA, 19 nt, Artificial Sequence
  Description of Artificial Sequence: Synthetic oligonucleotide
  Sense strand starting at position 934 of SEQ ID NO: 1883379
uauacaguugaaugaaguu

SEQ ID NO: 2189953 - RNA, 19 nt, Artificial Sequence
  Description of Artificial Sequence: Synthetic oligonucleotide
  Antisense strand to SEQ ID NO: 2189952
aacuucauucaacuguaua

SEQ ID NO: 2189954 - RNA, 19 nt, Artificial Sequence
  Description of Artificial Sequence: Synthetic oligonucleotide
  Sense strand starting at position 1008 of SEQ ID NO: 1883379
cucauucuagccuguauuu

SEQ ID NO: 2189955 - RNA, 19 nt, Artificial Sequence
  Description of Artificial Sequence: Synthetic oligonucleotide
  Antisense strand to SEQ ID NO: 2189954
aaauacaggcuagaaugag

SEQ ID NO: 2189956 - RNA, 19 nt, Artificial Sequence
  Description of Artificial Sequence: Synthetic oligonucleotide
  Sense strand starting at position 1031 of SEQ ID NO: 1883379
gugcaaagauaaucauuau

SEQ ID NO: 2189957 - RNA, 19 nt, Artificial Sequence
  Description of Artificial Sequence: Synthetic oligonucleotide
  Antisense strand to SEQ ID NO: 2189956
auaaugauuaucuuugcac

SEQ ID NO: 2189958 - RNA, 19 nt, Artificial Sequence
  Description of Artificial Sequence: Synthetic oligonucleotide
  Sense strand starting at position 1260 of SEQ ID NO: 1883379
cccagaguggauuguaaug

SEQ ID NO: 2189959 - RNA, 19 nt, Artificial Sequence
  Description of Artificial Sequence: Synthetic oligonucleotide
  Antisense strand to SEQ ID NO: 2189958
cauuacaauccacucuggg

SEQ ID NO: 2189960 - RNA, 19 nt, Artificial Sequence
  Description of Artificial Sequence: Synthetic oligonucleotide
  Sense strand starting at position 1605 of SEQ ID NO: 1883379
ccauguaaaucucugaaug

SEQ ID NO: 2189961 - RNA, 19 nt, Artificial Sequence
  Description of Artificial Sequence: Synthetic oligonucleotide
  Antisense strand to SEQ ID NO: 2189960
cauucagagauuuacaugg

SEQ ID NO: 2189962 - RNA, 19 nt, Artificial Sequence
  Description of Artificial Sequence: Synthetic oligonucleotide
  Sense strand starting at position 1904 of SEQ ID NO: 1883379
cugucauccaaguaugggu

SEQ ID NO: 2189963 - RNA, 19 nt, Artificial Sequence
  Description of Artificial Sequence: Synthetic oligonucleotide
  Antisense strand to SEQ ID NO: 2189962
acccauacuuggaugacag

SEQ ID NO: 2189964 - RNA, 19 nt, Artificial Sequence
  Description of Artificial Sequence: Synthetic oligonucleotide
  Sense strand starting at position 1909 of SEQ ID NO: 1883379
auccaaguauggguuugau

SEQ ID NO: 2189965 - RNA, 19 nt, Artificial Sequence
  Description of Artificial Sequence: Synthetic oligonucleotide
  Antisense strand to SEQ ID NO: 2189964
aucaaacccauacuuggau

SEQ ID NO: 2189966 - RNA, 19 nt, Artificial Sequence
  Description of Artificial Sequence: Synthetic oligonucleotide
  Sense strand starting at position 1912 of SEQ ID NO: 1883379
caaguauggguuugauaaa

SEQ ID NO: 2189967 - RNA, 19 nt, Artificial Sequence
  Description of Artificial Sequence: Synthetic oligonucleotide
  Antisense strand to SEQ ID NO: 2189966
uuuaucaaacccauacuug

SEQ ID NO: 2189968 - RNA, 19 nt, Artificial Sequence
  Description of Artificial Sequence: Synthetic oligonucleotide
  Sense strand starting at position 2013 of SEQ ID NO: 1883379
auucccagucauuaaaguu

SEQ ID NO: 2189969 - RNA, 19 nt, Artificial Sequence
  Description of Artificial Sequence: Synthetic oligonucleotide
  Antisense strand to SEQ ID NO: 2189968
aacuuuaaugacugggaau

SEQ ID NO: 2189970 - RNA, 19 nt, Artificial Sequence
  Description of Artificial Sequence: Synthetic oligonucleotide
  Sense strand starting at position 2035 of SEQ ID NO: 1883379
aauagaagucacgaagcuu

SEQ ID NO: 2189971 - RNA, 19 nt, Artificial Sequence
  Description of Artificial Sequence: Synthetic oligonucleotide
  Antisense strand to SEQ ID NO: 2189970
aagcuucgugacuucuauu

SEQ ID NO: 2189972 - RNA, 19 nt, Artificial Sequence
  Description of Artificial Sequence: Synthetic oligonucleotide
  Sense strand starting at position 2063 of SEQ ID NO: 1883379
gagacacaaccucaguguu

SEQ ID NO: 2189973 - RNA, 19 nt, Artificial Sequence
  Description of Artificial Sequence: Synthetic oligonucleotide
  Antisense strand to SEQ ID NO: 2189972
aacacugagguugugucuc

SEQ ID NO: 2189974 - RNA, 19 nt, Artificial Sequence
  Description of Artificial Sequence: Synthetic oligonucleotide
  Sense strand starting at position 2164 of SEQ ID NO: 1883379
aaguaacaugcauagaguu

SEQ ID NO: 2189975 - RNA, 19 nt, Artificial Sequence
  Description of Artificial Sequence: Synthetic oligonucleotide
  Antisense strand to SEQ ID NO: 2189974
aacucuaugcauguuacuu

SEQ ID NO: 2189976 - RNA, 19 nt, Artificial Sequence
  Description of Artificial Sequence: Synthetic oligonucleotide
  Sense strand starting at position 2266 of SEQ ID NO: 1883379
ucugguaaaccaugucaaa

SEQ ID NO: 2189977 - RNA, 19 nt, Artificial Sequence
  Description of Artificial Sequence: Synthetic oligonucleotide
  Antisense strand to SEQ ID NO: 2189976
uuugacaugguuuaccaga

SEQ ID NO: 2189978 - RNA, 19 nt, Artificial Sequence
  Description of Artificial Sequence: Synthetic oligonucleotide
  Sense strand starting at position 2478 of SEQ ID NO: 1883379
uuuggaauagugcacuaaa

SEQ ID NO: 2189979 - RNA, 19 nt, Artificial Sequence
  Description of Artificial Sequence: Synthetic oligonucleotide
  Antisense strand to SEQ ID NO: 2189978
uuuagugcacuauuccaaa

SEQ ID NO: 2189980 - RNA, 19 nt, Artificial Sequence
  Description of Artificial Sequence: Synthetic oligonucleotide
  Sense strand starting at position 2558 of SEQ ID NO: 1883379
auucuagugcuguaaauau

SEQ ID NO: 2189981 - RNA, 19 nt, Artificial Sequence
  Description of Artificial Sequence: Synthetic oligonucleotide
  Antisense strand to SEQ ID NO: 2189980
auauuuacagcacuagaau

SEQ ID NO: 2189982 - RNA, 19 nt, Artificial Sequence
  Description of Artificial Sequence: Synthetic oligonucleotide
  Sense strand starting at position 2599 of SEQ ID NO: 1883379
uauggugauguaggucaaa

SEQ ID NO: 2189983 - RNA, 19 nt, Artificial Sequence
  Description of Artificial Sequence: Synthetic oligonucleotide
  Antisense strand to SEQ ID NO: 2189982
uuugaccuacaucaccaua

SEQ ID NO: 2189984 - RNA, 19 nt, Artificial Sequence
  Description of Artificial Sequence: Synthetic oligonucleotide
  Sense strand starting at position 2673 of SEQ ID NO: 1883379
cuauaacauuuauagguga

SEQ ID NO: 2189985 - RNA, 19 nt, Artificial Sequence
  Description of Artificial Sequence: Synthetic oligonucleotide
  Antisense strand to SEQ ID NO: 2189984
ucaccuauaaauguuauag

SEQ ID NO: 2189986 - RNA, 19 nt, Artificial Sequence
  Description of Artificial Sequence: Synthetic oligonucleotide
  Sense strand starting at position 3051 of SEQ ID NO: 1883379
uuuauaugaugaucagugu

SEQ ID NO: 2189987 - RNA, 19 nt, Artificial Sequence
  Description of Artificial Sequence: Synthetic oligonucleotide
  Antisense strand to SEQ ID NO: 2189986
acacugaucaucauauaaa

SEQ ID NO: 2189988 - RNA, 19 nt, Artificial Sequence
  Description of Artificial Sequence: Synthetic oligonucleotide
  Sense strand starting at position 3052 of SEQ ID NO: 1883379
uuauaugaugaucaguguu

SEQ ID NO: 2189989 - RNA, 19 nt, Artificial Sequence
  Description of Artificial Sequence: Synthetic oligonucleotide
  Antisense strand to SEQ ID NO: 2189988
aacacugaucaucauauaa

SEQ ID NO: 2189990 - RNA, 19 nt, Artificial Sequence
  Description of Artificial Sequence: Synthetic oligonucleotide
  Sense strand starting at position 3093 of SEQ ID NO: 1883379
ugugguccaggucauuaaa

SEQ ID NO: 2189991 - RNA, 19 nt, Artificial Sequence
  Description of Artificial Sequence: Synthetic oligonucleotide
  Antisense strand to SEQ ID NO: 2189990
uuuaaugaccuggaccaca

SEQ ID NO: 2189992 - RNA, 19 nt, Artificial Sequence
  Description of Artificial Sequence: Synthetic oligonucleotide
  Sense strand starting at position 3096 of SEQ ID NO: 1883379
gguccaggucauuaaaguu

SEQ ID NO: 2189993 - RNA, 19 nt, Artificial Sequence
  Description of Artificial Sequence: Synthetic oligonucleotide
  Antisense strand to SEQ ID NO: 2189992
aacuuuaaugaccuggacc

SEQ ID NO: 2189994 - RNA, 19 nt, Artificial Sequence
  Description of Artificial Sequence: Synthetic oligonucleotide
  Sense strand starting at position 3156 of SEQ ID NO: 1883379
gcauuaucauaauuaaggu

SEQ ID NO: 2189995 - RNA, 19 nt, Artificial Sequence
  Description of Artificial Sequence: Synthetic oligonucleotide
  Antisense strand to SEQ ID NO: 2189994
accuuaauuaugauaaugc

SEQ ID NO: 2189996 - RNA, 19 nt, Artificial Sequence
  Description of Artificial Sequence: Synthetic oligonucleotide
  Sense strand starting at position 3298 of SEQ ID NO: 1883379
agcauuacugucgacagau

SEQ ID NO: 2189997 - RNA, 19 nt, Artificial Sequence
  Description of Artificial Sequence: Synthetic oligonucleotide
  Antisense strand to SEQ ID NO: 2189996
aucugucgacaguaaugcu

SEQ ID NO: 2189998 - RNA, 19 nt, Artificial Sequence
  Description of Artificial Sequence: Synthetic oligonucleotide
  Sense strand starting at position 3311 of SEQ ID NO: 1883379
acagaugcucuuuagguuu

SEQ ID NO: 2189999 - RNA, 19 nt, Artificial Sequence
  Description of Artificial Sequence: Synthetic oligonucleotide
  Antisense strand to SEQ ID NO: 2189998
aaaccuaaagagcaucugu

SEQ ID NO: 2190000 - RNA, 19 nt, Artificial Sequence
  Description of Artificial Sequence: Synthetic oligonucleotide
  Sense strand starting at position 3380 of SEQ ID NO: 1883379
aauuaccuguggguauaua

SEQ ID NO: 2190001 - RNA, 19 nt, Artificial Sequence
  Description of Artificial Sequence: Synthetic oligonucleotide
  Antisense strand to SEQ ID NO: 2190000
uauauacccacagguaauu

SEQ ID NO: 2190002 - RNA, 19 nt, Artificial Sequence
  Description of Artificial Sequence: Synthetic oligonucleotide
  Sense strand starting at position 3381 of SEQ ID NO: 1883379
auuaccuguggguauauaa

SEQ ID NO: 2190003 - RNA, 19 nt, Artificial Sequence
  Description of Artificial Sequence: Synthetic oligonucleotide
  Antisense strand to SEQ ID NO: 2190002
uuauauacccacagguaau

SEQ ID NO: 2190004 - RNA, 19 nt, Artificial Sequence
  Description of Artificial Sequence: Synthetic oligonucleotide
  Sense strand starting at position 3566 of SEQ ID NO: 1883379
ccuuuaaauguuuagguuu

SEQ ID NO: 2190005 - RNA, 19 nt, Artificial Sequence
  Description of Artificial Sequence: Synthetic oligonucleotide
  Antisense strand to SEQ ID NO: 2190004
aaaccuaaacauuuaaagg

SEQ ID NO: 2190006 - RNA, 19 nt, Artificial Sequence
  Description of Artificial Sequence: Synthetic oligonucleotide
  Sense strand starting at position 3723 of SEQ ID NO: 1883379
uugacaauuugacaaugau

SEQ ID NO: 2190007 - RNA, 19 nt, Artificial Sequence
  Description of Artificial Sequence: Synthetic oligonucleotide
  Antisense strand to SEQ ID NO: 2190006
aucauugucaaauugucaa

SEQ ID NO: 2190008 - RNA, 19 nt, Artificial Sequence
  Description of Artificial Sequence: Synthetic oligonucleotide
  Sense strand starting at position 3807 of SEQ ID NO: 1883379
guuugaggguuguuuauuu

SEQ ID NO: 2190009 - RNA, 19 nt, Artificial Sequence
  Description of Artificial Sequence: Synthetic oligonucleotide
  Antisense strand to SEQ ID NO: 2190008
aaauaaacaacccucaaac

SEQ ID NO: 2190010 - RNA, 19 nt, Artificial Sequence
  Description of Artificial Sequence: Synthetic oligonucleotide
  Sense strand starting at position 888 of SEQ ID NO: 1883380
caagguuaguuggccuuaa

SEQ ID NO: 2190011 - RNA, 19 nt, Artificial Sequence
  Description of Artificial Sequence: Synthetic oligonucleotide
  Antisense strand to SEQ ID NO: 2190010
uuaaggccaacuaaccuug

SEQ ID NO: 2190012 - RNA, 19 nt, Artificial Sequence
  Description of Artificial Sequence: Synthetic oligonucleotide
  Sense strand starting at position 1710 of SEQ ID NO: 1883380
guucuaauauaauagagca

SEQ ID NO: 2190013 - RNA, 19 nt, Artificial Sequence
  Description of Artificial Sequence: Synthetic oligonucleotide
  Antisense strand to SEQ ID NO: 2190012
ugcucuauuauauuagaac

SEQ ID NO: 2190014 - RNA, 19 nt, Artificial Sequence
  Description of Artificial Sequence: Synthetic oligonucleotide
  Sense strand starting at position 2136 of SEQ ID NO: 1883380
agcauauccuaugcagauc

SEQ ID NO: 2190015 - RNA, 19 nt, Artificial Sequence
  Description of Artificial Sequence: Synthetic oligonucleotide
  Antisense strand to SEQ ID NO: 2190014
gaucugcauaggauaugcu

SEQ ID NO: 2190016 - RNA, 19 nt, Artificial Sequence
  Description of Artificial Sequence: Synthetic oligonucleotide
  Sense strand starting at position 2792 of SEQ ID NO: 1883380
gacucaauggccuggguga

SEQ ID NO: 2190017 - RNA, 19 nt, Artificial Sequence
  Description of Artificial Sequence: Synthetic oligonucleotide
  Antisense strand to SEQ ID NO: 2190016
ucacccaggccauugaguc

SEQ ID NO: 2190018 - RNA, 19 nt, Artificial Sequence
  Description of Artificial Sequence: Synthetic oligonucleotide
  Sense strand starting at position 3707 of SEQ ID NO: 1883380
ggugcuugcugaccaguga

SEQ ID NO: 2190019 - RNA, 19 nt, Artificial Sequence
  Description of Artificial Sequence: Synthetic oligonucleotide
  Antisense strand to SEQ ID NO: 2190018
ucacuggucagcaagcacc

SEQ ID NO: 2190020 - RNA, 19 nt, Artificial Sequence
  Description of Artificial Sequence: Synthetic oligonucleotide
  Sense strand starting at position 3708 of SEQ ID NO: 1883380
gugcuugcugaccagugaa

SEQ ID NO: 2190021 - RNA, 19 nt, Artificial Sequence
  Description of Artificial Sequence: Synthetic oligonucleotide
  Antisense strand to SEQ ID NO: 2190020
uucacuggucagcaagcac

SEQ ID NO: 2190022 - RNA, 19 nt, Artificial Sequence
  Description of Artificial Sequence: Synthetic oligonucleotide
  Sense strand starting at position 3716 of SEQ ID NO: 1883380
ugaccagugaagugcaaau

SEQ ID NO: 2190023 - RNA, 19 nt, Artificial Sequence
  Description of Artificial Sequence: Synthetic oligonucleotide
  Antisense strand to SEQ ID NO: 2190022
auuugcacuucacugguca

SEQ ID NO: 2190024 - RNA, 19 nt, Artificial Sequence
  Description of Artificial Sequence: Synthetic oligonucleotide
  Sense strand starting at position 3767 of SEQ ID NO: 1883380
gccggcgaucuacagaaau

SEQ ID NO: 2190025 - RNA, 19 nt, Artificial Sequence
  Description of Artificial Sequence: Synthetic oligonucleotide
  Antisense strand to SEQ ID NO: 2190024
auuucuguagaucgccggc

SEQ ID NO: 2190026 - RNA, 19 nt, Artificial Sequence
  Description of Artificial Sequence: Synthetic oligonucleotide
  Sense strand starting at position 3810 of SEQ ID NO: 1883380
gccagugaucccuguggaa

SEQ ID NO: 2190027 - RNA, 19 nt, Artificial Sequence
  Description of Artificial Sequence: Synthetic oligonucleotide
  Antisense strand to SEQ ID NO: 2190026
uuccacagggaucacuggc

SEQ ID NO: 2190028 - RNA, 19 nt, Artificial Sequence
  Description of Artificial Sequence: Synthetic oligonucleotide
  Sense strand starting at position 3960 of SEQ ID NO: 1883380
ggcguguccuccguguaga

SEQ ID NO: 2190029 - RNA, 19 nt, Artificial Sequence
  Description of Artificial Sequence: Synthetic oligonucleotide
  Antisense strand to SEQ ID NO: 2190028
ucuacacggaggacacgcc

SEQ ID NO: 2190030 - RNA, 19 nt, Artificial Sequence
  Description of Artificial Sequence: Synthetic oligonucleotide
  Sense strand starting at position 3961 of SEQ ID NO: 1883380
gcguguccuccguguagag

SEQ ID NO: 2190031 - RNA, 19 nt, Artificial Sequence
  Description of Artificial Sequence: Synthetic oligonucleotide
  Antisense strand to SEQ ID NO: 2190030
cucuacacggaggacacgc

SEQ ID NO: 2190032 - RNA, 19 nt, Artificial Sequence
  Description of Artificial Sequence: Synthetic oligonucleotide
  Sense strand starting at position 33 of SEQ ID NO: 1883381
caguuauagggaugaaugu

SEQ ID NO: 2190033 - RNA, 19 nt, Artificial Sequence
  Description of Artificial Sequence: Synthetic oligonucleotide
  Antisense strand to SEQ ID NO: 2190032
acauucaucccuauaacug

SEQ ID NO: 2190034 - RNA, 19 nt, Artificial Sequence
  Description of Artificial Sequence: Synthetic oligonucleotide
  Sense strand starting at position 69 of SEQ ID NO: 1883381
uccauauugcauugugaca

SEQ ID NO: 2190035 - RNA, 19 nt, Artificial Sequence
  Description of Artificial Sequence: Synthetic oligonucleotide
  Antisense strand to SEQ ID NO: 2190034
ugucacaaugcaauaugga

SEQ ID NO: 2190036 - RNA, 19 nt, Artificial Sequence
  Description of Artificial Sequence: Synthetic oligonucleotide
  Sense strand starting at position 81 of SEQ ID NO: 1883381
ugugacauaucaguuugaa

SEQ ID NO: 2190037 - RNA, 19 nt, Artificial Sequence
  Description of Artificial Sequence: Synthetic oligonucleotide
  Antisense strand to SEQ ID NO: 2190036
uucaaacugauaugucaca

SEQ ID NO: 2190038 - RNA, 19 nt, Artificial Sequence
  Description of Artificial Sequence: Synthetic oligonucleotide
  Sense strand starting at position 101 of SEQ ID NO: 1883381
ugaccuauuuaucaugguu

SEQ ID NO: 2190039 - RNA, 19 nt, Artificial Sequence
  Description of Artificial Sequence: Synthetic oligonucleotide
  Antisense strand to SEQ ID NO: 2190038
aaccaugauaaauagguca

SEQ ID NO: 2190040 - RNA, 19 nt, Artificial Sequence
  Description of Artificial Sequence: Synthetic oligonucleotide
  Sense strand starting at position 116 of SEQ ID NO: 1883381
gguuccauaguguaauggu

SEQ ID NO: 2190041 - RNA, 19 nt, Artificial Sequence
  Description of Artificial Sequence: Synthetic oligonucleotide
  Antisense strand to SEQ ID NO: 2190040
accauuacacuauggaacc

SEQ ID NO: 2190042 - RNA, 19 nt, Artificial Sequence
  Description of Artificial Sequence: Synthetic oligonucleotide
  Sense strand starting at position 123 of SEQ ID NO: 1883381
uaguguaaugguuagcacu

SEQ ID NO: 2190043 - RNA, 19 nt, Artificial Sequence
  Description of Artificial Sequence: Synthetic oligonucleotide
  Antisense strand to SEQ ID NO: 2190042
agugcuaaccauuacacua

SEQ ID NO: 2190044 - RNA, 19 nt, Artificial Sequence
  Description of Artificial Sequence: Synthetic oligonucleotide
  Sense strand starting at position 166 of SEQ ID NO: 1883381
ccauaaagaguguaucugu

SEQ ID NO: 2190045 - RNA, 19 nt, Artificial Sequence
  Description of Artificial Sequence: Synthetic oligonucleotide
  Antisense strand to SEQ ID NO: 2190044
acagauacacucuuuaugg

SEQ ID NO: 2190046 - RNA, 19 nt, Artificial Sequence
  Description of Artificial Sequence: Synthetic oligonucleotide
  Sense strand starting at position 169 of SEQ ID NO: 1883381
uaaagaguguaucugucaa

SEQ ID NO: 2190047 - RNA, 19 nt, Artificial Sequence
  Description of Artificial Sequence: Synthetic oligonucleotide
  Antisense strand to SEQ ID NO: 2190046
uugacagauacacucuuua

SEQ ID NO: 2190048 - RNA, 19 nt, Artificial Sequence
  Description of Artificial Sequence: Synthetic oligonucleotide
  Sense strand starting at position 171 of SEQ ID NO: 1883381
aagaguguaucugucaagu

SEQ ID NO: 2190049 - RNA, 19 nt, Artificial Sequence
  Description of Artificial Sequence: Synthetic oligonucleotide
  Antisense strand to SEQ ID NO: 2190048
acuugacagauacacucuu

SEQ ID NO: 2190050 - RNA, 19 nt, Artificial Sequence
  Description of Artificial Sequence: Synthetic oligonucleotide
  Sense strand starting at position 238 of SEQ ID NO: 1883381
cguguuaugaggcaaaguc

SEQ ID NO: 2190051 - RNA, 19 nt, Artificial Sequence
  Description of Artificial Sequence: Synthetic oligonucleotide
  Antisense strand to SEQ ID NO: 2190050
gacuuugccucauaacacg

SEQ ID NO: 2190052 - RNA, 19 nt, Artificial Sequence
  Description of Artificial Sequence: Synthetic oligonucleotide
  Sense strand starting at position 430 of SEQ ID NO: 1883381
ucaauaguccacugguaua

SEQ ID NO: 2190053 - RNA, 19 nt, Artificial Sequence
  Description of Artificial Sequence: Synthetic oligonucleotide
  Antisense strand to SEQ ID NO: 2190052
uauaccaguggacuauuga

SEQ ID NO: 2190054 - RNA, 19 nt, Artificial Sequence
  Description of Artificial Sequence: Synthetic oligonucleotide
  Sense strand starting at position 459 of SEQ ID NO: 1883381
uggugccaucuuuaaggua

SEQ ID NO: 2190055 - RNA, 19 nt, Artificial Sequence
  Description of Artificial Sequence: Synthetic oligonucleotide
  Antisense strand to SEQ ID NO: 2190054
uaccuuaaagauggcacca

SEQ ID NO: 2190056 - RNA, 19 nt, Artificial Sequence
  Description of Artificial Sequence: Synthetic oligonucleotide
  Sense strand starting at position 507 of SEQ ID NO: 1883381
auacaucauucgguauaac

SEQ ID NO: 2190057 - RNA, 19 nt, Artificial Sequence
  Description of Artificial Sequence: Synthetic oligonucleotide
  Antisense strand to SEQ ID NO: 2190056
guuauaccgaaugauguau

SEQ ID NO: 2190058 - RNA, 19 nt, Artificial Sequence
  Description of Artificial Sequence: Synthetic oligonucleotide
  Sense strand starting at position 553 of SEQ ID NO: 1883381
cagggucuuuaauugcuaa

SEQ ID NO: 2190059 - RNA, 19 nt, Artificial Sequence
  Description of Artificial Sequence: Synthetic oligonucleotide
  Antisense strand to SEQ ID NO: 2190058
uuagcaauuaaagacccug

SEQ ID NO: 2190060 - RNA, 19 nt, Artificial Sequence
  Description of Artificial Sequence: Synthetic oligonucleotide
  Sense strand starting at position 556 of SEQ ID NO: 1883381
ggucuuuaauugcuaacca

SEQ ID NO: 2190061 - RNA, 19 nt, Artificial Sequence
  Description of Artificial Sequence: Synthetic oligonucleotide
  Antisense strand to SEQ ID NO: 2190060
ugguuagcaauuaaagacc

SEQ ID NO: 2190062 - RNA, 19 nt, Artificial Sequence
  Description of Artificial Sequence: Synthetic oligonucleotide
  Sense strand starting at position 680 of SEQ ID NO: 1883381
gccguagauccugaacuca

SEQ ID NO: 2190063 - RNA, 19 nt, Artificial Sequence
  Description of Artificial Sequence: Synthetic oligonucleotide
  Antisense strand to SEQ ID NO: 2190062
ugaguucaggaucuacggc

SEQ ID NO: 2190064 - RNA, 19 nt, Artificial Sequence
  Description of Artificial Sequence: Synthetic oligonucleotide
  Sense strand starting at position 893 of SEQ ID NO: 1883381
ugaccugauuucgggagaa

SEQ ID NO: 2190065 - RNA, 19 nt, Artificial Sequence
  Description of Artificial Sequence: Synthetic oligonucleotide
  Antisense strand to SEQ ID NO: 2190064
uucucccgaaaucagguca

SEQ ID NO: 2190066 - RNA, 19 nt, Artificial Sequence
  Description of Artificial Sequence: Synthetic oligonucleotide
  Sense strand starting at position 903 of SEQ ID NO: 1883381
ucgggagaauuauuccuga

SEQ ID NO: 2190067 - RNA, 19 nt, Artificial Sequence
  Description of Artificial Sequence: Synthetic oligonucleotide
  Antisense strand to SEQ ID NO: 2190066
ucaggaauaauucucccga

SEQ ID NO: 2190068 - RNA, 19 nt, Artificial Sequence
  Description of Artificial Sequence: Synthetic oligonucleotide
  Sense strand starting at position 1113 of SEQ ID NO: 1883381
augcaaauccaggguaagu

SEQ ID NO: 2190069 - RNA, 19 nt, Artificial Sequence
  Description of Artificial Sequence: Synthetic oligonucleotide
  Antisense strand to SEQ ID NO: 2190068
acuuacccuggauuugcau

SEQ ID NO: 2190070 - RNA, 19 nt, Artificial Sequence
  Description of Artificial Sequence: Synthetic oligonucleotide
  Sense strand starting at position 1230 of SEQ ID NO: 1883381
agacaaagcuugccaugaa

SEQ ID NO: 2190071 - RNA, 19 nt, Artificial Sequence
  Description of Artificial Sequence: Synthetic oligonucleotide
  Antisense strand to SEQ ID NO: 2190070
uucauggcaagcuuugucu

SEQ ID NO: 2190072 - RNA, 19 nt, Artificial Sequence
  Description of Artificial Sequence: Synthetic oligonucleotide
  Sense strand starting at position 1381 of SEQ ID NO: 1883381
accaaccugcuguguuaaa

SEQ ID NO: 2190073 - RNA, 19 nt, Artificial Sequence
  Description of Artificial Sequence: Synthetic oligonucleotide
  Antisense strand to SEQ ID NO: 2190072
uuuaacacagcagguuggu

SEQ ID NO: 2190074 - RNA, 19 nt, Artificial Sequence
  Description of Artificial Sequence: Synthetic oligonucleotide
  Sense strand starting at position 1382 of SEQ ID NO: 1883381
ccaaccugcuguguuaaau

SEQ ID NO: 2190075 - RNA, 19 nt, Artificial Sequence
  Description of Artificial Sequence: Synthetic oligonucleotide
  Antisense strand to SEQ ID NO: 2190074
auuuaacacagcagguugg

SEQ ID NO: 2190076 - RNA, 19 nt, Artificial Sequence
  Description of Artificial Sequence: Synthetic oligonucleotide
  Sense strand starting at position 1442 of SEQ ID NO: 1883381
cagaguagaugccuuagga

SEQ ID NO: 2190077 - RNA, 19 nt, Artificial Sequence
  Description of Artificial Sequence: Synthetic oligonucleotide
  Antisense strand to SEQ ID NO: 2190076
uccuaaggcaucuacucug

SEQ ID NO: 2190078 - RNA, 19 nt, Artificial Sequence
  Description of Artificial Sequence: Synthetic oligonucleotide
  Sense strand starting at position 1858 of SEQ ID NO: 1883381
gggaguagccacugguuau

SEQ ID NO: 2190079 - RNA, 19 nt, Artificial Sequence
  Description of Artificial Sequence: Synthetic oligonucleotide
  Antisense strand to SEQ ID NO: 2190078
auaaccaguggcuacuccc

SEQ ID NO: 2190080 - RNA, 19 nt, Artificial Sequence
  Description of Artificial Sequence: Synthetic oligonucleotide
  Sense strand starting at position 1859 of SEQ ID NO: 1883381
ggaguagccacugguuaug

SEQ ID NO: 2190081 - RNA, 19 nt, Artificial Sequence
  Description of Artificial Sequence: Synthetic oligonucleotide
  Antisense strand to SEQ ID NO: 2190080
cauaaccaguggcuacucc

SEQ ID NO: 2190082 - RNA, 19 nt, Artificial Sequence
  Description of Artificial Sequence: Synthetic oligonucleotide
  Sense strand starting at position 2131 of SEQ ID NO: 1883381
uccuaauuacaggguuaaa

SEQ ID NO: 2190083 - RNA, 19 nt, Artificial Sequence
  Description of Artificial Sequence: Synthetic oligonucleotide
  Antisense strand to SEQ ID NO: 2190082
uuuaacccuguaauuagga

SEQ ID NO: 2190084 - RNA, 19 nt, Artificial Sequence
  Description of Artificial Sequence: Synthetic oligonucleotide
  Sense strand starting at position 2226 of SEQ ID NO: 1883381
gaagguuucugauccaaca

SEQ ID NO: 2190085 - RNA, 19 nt, Artificial Sequence
  Description of Artificial Sequence: Synthetic oligonucleotide
  Antisense strand to SEQ ID NO: 2190084
uguuggaucagaaaccuuc

SEQ ID NO: 2190086 - RNA, 19 nt, Artificial Sequence
  Description of Artificial Sequence: Synthetic oligonucleotide
  Sense strand starting at position 2278 of SEQ ID NO: 1883381
guuuaauggcugcugucuu

SEQ ID NO: 2190087 - RNA, 19 nt, Artificial Sequence
  Description of Artificial Sequence: Synthetic oligonucleotide
  Antisense strand to SEQ ID NO: 2190086
aagacagcagccauuaaac

SEQ ID NO: 2190088 - RNA, 19 nt, Artificial Sequence
  Description of Artificial Sequence: Synthetic oligonucleotide
  Sense strand starting at position 2354 of SEQ ID NO: 1883381
ugaggaggucuugguauuc

SEQ ID NO: 2190089 - RNA, 19 nt, Artificial Sequence
  Description of Artificial Sequence: Synthetic oligonucleotide
  Antisense strand to SEQ ID NO: 2190088
gaauaccaagaccuccuca

SEQ ID NO: 2190090 - RNA, 19 nt, Artificial Sequence
  Description of Artificial Sequence: Synthetic oligonucleotide
  Sense strand starting at position 2542 of SEQ ID NO: 1883381
ggugcacaccuuugauaaa

SEQ ID NO: 2190091 - RNA, 19 nt, Artificial Sequence
  Description of Artificial Sequence: Synthetic oligonucleotide
  Antisense strand to SEQ ID NO: 2190090
uuuaucaaaggugugcacc

SEQ ID NO: 2190092 - RNA, 19 nt, Artificial Sequence
  Description of Artificial Sequence: Synthetic oligonucleotide
  Sense strand starting at position 2620 of SEQ ID NO: 1883381
guucaugaagccugagaug

SEQ ID NO: 2190093 - RNA, 19 nt, Artificial Sequence
  Description of Artificial Sequence: Synthetic oligonucleotide
  Antisense strand to SEQ ID NO: 2190092
caucucaggcuucaugaac

SEQ ID NO: 2190094 - RNA, 19 nt, Artificial Sequence
  Description of Artificial Sequence: Synthetic oligonucleotide
  Sense strand starting at position 2766 of SEQ ID NO: 1883381
cuucuuuagcuggguuaca

SEQ ID NO: 2190095 - RNA, 19 nt, Artificial Sequence
  Description of Artificial Sequence: Synthetic oligonucleotide
  Antisense strand to SEQ ID NO: 2190094
uguaacccagcuaaagaag

SEQ ID NO: 2190096 - RNA, 19 nt, Artificial Sequence
  Description of Artificial Sequence: Synthetic oligonucleotide
  Sense strand starting at position 2767 of SEQ ID NO: 1883381
uucuuuagcuggguuacau

SEQ ID NO: 2190097 - RNA, 19 nt, Artificial Sequence
  Description of Artificial Sequence: Synthetic oligonucleotide
  Antisense strand to SEQ ID NO: 2190096
auguaacccagcuaaagaa

SEQ ID NO: 2190098 - RNA, 19 nt, Artificial Sequence
  Description of Artificial Sequence: Synthetic oligonucleotide
  Sense strand starting at position 2778 of SEQ ID NO: 1883381
gguuacaugccaggaaacu

SEQ ID NO: 2190099 - RNA, 19 nt, Artificial Sequence
  Description of Artificial Sequence: Synthetic oligonucleotide
  Antisense strand to SEQ ID NO: 2190098
aguuuccuggcauguaacc

SEQ ID NO: 2190100 - RNA, 19 nt, Artificial Sequence
  Description of Artificial Sequence: Synthetic oligonucleotide
  Sense strand starting at position 2779 of SEQ ID NO: 1883381
guuacaugccaggaaacua

SEQ ID NO: 2190101 - RNA, 19 nt, Artificial Sequence
  Description of Artificial Sequence: Synthetic oligonucleotide
  Antisense strand to SEQ ID NO: 2190100
uaguuuccuggcauguaac

SEQ ID NO: 2190102 - RNA, 19 nt, Artificial Sequence
  Description of Artificial Sequence: Synthetic oligonucleotide
  Sense strand starting at position 3237 of SEQ ID NO: 1883381
uuaacuagaugauccgaua

SEQ ID NO: 2190103 - RNA, 19 nt, Artificial Sequence
  Description of Artificial Sequence: Synthetic oligonucleotide
  Antisense strand to SEQ ID NO: 2190102
uaucggaucaucuaguuaa

SEQ ID NO: 2190104 - RNA, 19 nt, Artificial Sequence
  Description of Artificial Sequence: Synthetic oligonucleotide
  Sense strand starting at position 3267 of SEQ ID NO: 1883381
guaacuugugguuaaugca

SEQ ID NO: 2190105 - RNA, 19 nt, Artificial Sequence
  Description of Artificial Sequence: Synthetic oligonucleotide
  Antisense strand to SEQ ID NO: 2190104
ugcauuaaccacaaguuac

SEQ ID NO: 2190106 - RNA, 19 nt, Artificial Sequence
  Description of Artificial Sequence: Synthetic oligonucleotide
  Sense strand starting at position 3688 of SEQ ID NO: 1883381
cuucgauuuccagggucuu

SEQ ID NO: 2190107 - RNA, 19 nt, Artificial Sequence
  Description of Artificial Sequence: Synthetic oligonucleotide
  Antisense strand to SEQ ID NO: 2190106
aagacccuggaaaucgaag

SEQ ID NO: 2190108 - RNA, 19 nt, Artificial Sequence
  Description of Artificial Sequence: Synthetic oligonucleotide
  Sense strand starting at position 3701 of SEQ ID NO: 1883381
ggucuuggccuugagcaga

SEQ ID NO: 2190109 - RNA, 19 nt, Artificial Sequence
  Description of Artificial Sequence: Synthetic oligonucleotide
  Antisense strand to SEQ ID NO: 2190108
ucugcucaaggccaagacc

SEQ ID NO: 2190110 - RNA, 19 nt, Artificial Sequence
  Description of Artificial Sequence: Synthetic oligonucleotide
  Sense strand starting at position 3904 of SEQ ID NO: 1883381
cguccaucuccacggagau

SEQ ID NO: 2190111 - RNA, 19 nt, Artificial Sequence
  Description of Artificial Sequence: Synthetic oligonucleotide
  Antisense strand to SEQ ID NO: 2190110
aucuccguggagauggacg

SEQ ID NO: 2190112 - RNA, 19 nt, Artificial Sequence
  Description of Artificial Sequence: Synthetic oligonucleotide
  Sense strand starting at position 5 of SEQ ID NO: 1883382
ccuaauucccaaugcgaug

SEQ ID NO: 2190113 - RNA, 19 nt, Artificial Sequence
  Description of Artificial Sequence: Synthetic oligonucleotide
  Antisense strand to SEQ ID NO: 2190112
caucgcauugggaauuagg

SEQ ID NO: 2190114 - RNA, 19 nt, Artificial Sequence
  Description of Artificial Sequence: Synthetic oligonucleotide
  Sense strand starting at position 10 of SEQ ID NO: 1883382
uucccaaugcgaugggauu

SEQ ID NO: 2190115 - RNA, 19 nt, Artificial Sequence
  Description of Artificial Sequence: Synthetic oligonucleotide
  Antisense strand to SEQ ID NO: 2190114
aaucccaucgcauugggaa

SEQ ID NO: 2190116 - RNA, 19 nt, Artificial Sequence
  Description of Artificial Sequence: Synthetic oligonucleotide
  Sense strand starting at position 11 of SEQ ID NO: 1883382
ucccaaugcgaugggauua

SEQ ID NO: 2190117 - RNA, 19 nt, Artificial Sequence
  Description of Artificial Sequence: Synthetic oligonucleotide
  Antisense strand to SEQ ID NO: 2190116
uaaucccaucgcauuggga

SEQ ID NO: 2190118 - RNA, 19 nt, Artificial Sequence
  Description of Artificial Sequence: Synthetic oligonucleotide
  Sense strand starting at position 83 of SEQ ID NO: 1883382
gggaucugugcucauguac

SEQ ID NO: 2190119 - RNA, 19 nt, Artificial Sequence
  Description of Artificial Sequence: Synthetic oligonucleotide
  Antisense strand to SEQ ID NO: 2190118
guacaugagcacagauccc

SEQ ID NO: 2190120 - RNA, 19 nt, Artificial Sequence
  Description of Artificial Sequence: Synthetic oligonucleotide
  Sense strand starting at position 239 of SEQ ID NO: 1883382
aacugugagcaauaaagua

SEQ ID NO: 2190121 - RNA, 19 nt, Artificial Sequence
  Description of Artificial Sequence: Synthetic oligonucleotide
  Antisense strand to SEQ ID NO: 2190120
uacuuuauugcucacaguu

SEQ ID NO: 2190122 - RNA, 19 nt, Artificial Sequence
  Description of Artificial Sequence: Synthetic oligonucleotide
  Sense strand starting at position 247 of SEQ ID NO: 1883382
gcaauaaaguaucugguuu

SEQ ID NO: 2190123 - RNA, 19 nt, Artificial Sequence
  Description of Artificial Sequence: Synthetic oligonucleotide
  Antisense strand to SEQ ID NO: 2190122
aaaccagauacuuuauugc

SEQ ID NO: 2190124 - RNA, 19 nt, Artificial Sequence
  Description of Artificial Sequence: Synthetic oligonucleotide
  Sense strand starting at position 343 of SEQ ID NO: 1883382
agcgauuacuacucaugau

SEQ ID NO: 2190125 - RNA, 19 nt, Artificial Sequence
  Description of Artificial Sequence: Synthetic oligonucleotide
  Antisense strand to SEQ ID NO: 2190124
aucaugaguaguaaucgcu

SEQ ID NO: 2190126 - RNA, 19 nt, Artificial Sequence
  Description of Artificial Sequence: Synthetic oligonucleotide
  Sense strand starting at position 379 of SEQ ID NO: 1883382
gagucuugcuggguugaca

SEQ ID NO: 2190127 - RNA, 19 nt, Artificial Sequence
  Description of Artificial Sequence: Synthetic oligonucleotide
  Antisense strand to SEQ ID NO: 2190126
ugucaacccagcaagacuc

SEQ ID NO: 2190128 - RNA, 19 nt, Artificial Sequence
  Description of Artificial Sequence: Synthetic oligonucleotide
  Sense strand starting at position 717 of SEQ ID NO: 1883382
ggaggaaacccucggcaau

SEQ ID NO: 2190129 - RNA, 19 nt, Artificial Sequence
  Description of Artificial Sequence: Synthetic oligonucleotide
  Antisense strand to SEQ ID NO: 2190128
auugccgaggguuuccucc

SEQ ID NO: 2190130 - RNA, 19 nt, Artificial Sequence
  Description of Artificial Sequence: Synthetic oligonucleotide
  Sense strand starting at position 729 of SEQ ID NO: 1883382
cggcaaugucacgagagca

SEQ ID NO: 2190131 - RNA, 19 nt, Artificial Sequence
  Description of Artificial Sequence: Synthetic oligonucleotide
  Antisense strand to SEQ ID NO: 2190130
ugcucucgugacauugccg

SEQ ID NO: 2190132 - RNA, 19 nt, Artificial Sequence
  Description of Artificial Sequence: Synthetic oligonucleotide
  Sense strand starting at position 892 of SEQ ID NO: 1883382
cucagaggccgguaauguu

SEQ ID NO: 2190133 - RNA, 19 nt, Artificial Sequence
  Description of Artificial Sequence: Synthetic oligonucleotide
  Antisense strand to SEQ ID NO: 2190132
aacauuaccggccucugag

SEQ ID NO: 2190134 - RNA, 19 nt, Artificial Sequence
  Description of Artificial Sequence: Synthetic oligonucleotide
  Sense strand starting at position 953 of SEQ ID NO: 1883382
ggagaaguagucuguccaa

SEQ ID NO: 2190135 - RNA, 19 nt, Artificial Sequence
  Description of Artificial Sequence: Synthetic oligonucleotide
  Antisense strand to SEQ ID NO: 2190134
uuggacagacuacuucucc

SEQ ID NO: 2190136 - RNA, 19 nt, Artificial Sequence
  Description of Artificial Sequence: Synthetic oligonucleotide
  Sense strand starting at position 956 of SEQ ID NO: 1883382
gaaguagucuguccaaauu

SEQ ID NO: 2190137 - RNA, 19 nt, Artificial Sequence
  Description of Artificial Sequence: Synthetic oligonucleotide
  Antisense strand to SEQ ID NO: 2190136
aauuuggacagacuacuuc

SEQ ID NO: 2190138 - RNA, 19 nt, Artificial Sequence
  Description of Artificial Sequence: Synthetic oligonucleotide
  Sense strand starting at position 1070 of SEQ ID NO: 1883382
ggaauauuccugcagguau

SEQ ID NO: 2190139 - RNA, 19 nt, Artificial Sequence
  Description of Artificial Sequence: Synthetic oligonucleotide
  Antisense strand to SEQ ID NO: 2190138
auaccugcaggaauauucc

SEQ ID NO: 2190140 - RNA, 19 nt, Artificial Sequence
  Description of Artificial Sequence: Synthetic oligonucleotide
  Sense strand starting at position 1083 of SEQ ID NO: 1883382
agguauuuauugggaggga

SEQ ID NO: 2190141 - RNA, 19 nt, Artificial Sequence
  Description of Artificial Sequence: Synthetic oligonucleotide
  Antisense strand to SEQ ID NO: 2190140
ucccucccaauaaauaccu

SEQ ID NO: 2190142 - RNA, 19 nt, Artificial Sequence
  Description of Artificial Sequence: Synthetic oligonucleotide
  Sense strand starting at position 1084 of SEQ ID NO: 1883382
gguauuuauugggagggaa

SEQ ID NO: 2190143 - RNA, 19 nt, Artificial Sequence
  Description of Artificial Sequence: Synthetic oligonucleotide
  Antisense strand to SEQ ID NO: 2190142
uucccucccaauaaauacc

SEQ ID NO: 2190144 - RNA, 19 nt, Artificial Sequence
  Description of Artificial Sequence: Synthetic oligonucleotide
  Sense strand starting at position 1131 of SEQ ID NO: 1883382
gccugaaagccagaaacua

SEQ ID NO: 2190145 - RNA, 19 nt, Artificial Sequence
  Description of Artificial Sequence: Synthetic oligonucleotide
  Antisense strand to SEQ ID NO: 2190144
uaguuucuggcuuucaggc

SEQ ID NO: 2190146 - RNA, 19 nt, Artificial Sequence
  Description of Artificial Sequence: Synthetic oligonucleotide
  Sense strand starting at position 1653 of SEQ ID NO: 1883382
gggcuuaaagccuaagaug

SEQ ID NO: 2190147 - RNA, 19 nt, Artificial Sequence
  Description of Artificial Sequence: Synthetic oligonucleotide
  Antisense strand to SEQ ID NO: 2190146
caucuuaggcuuuaagccc

SEQ ID NO: 2190148 - RNA, 19 nt, Artificial Sequence
  Description of Artificial Sequence: Synthetic oligonucleotide
  Sense strand starting at position 2699 of SEQ ID NO: 1883382
guucucuugguauaacuua

SEQ ID NO: 2190149 - RNA, 19 nt, Artificial Sequence
  Description of Artificial Sequence: Synthetic oligonucleotide
  Antisense strand to SEQ ID NO: 2190148
uaaguuauaccaagagaac

SEQ ID NO: 2190150 - RNA, 19 nt, Artificial Sequence
  Description of Artificial Sequence: Synthetic oligonucleotide
  Sense strand starting at position 2710 of SEQ ID NO: 1883382
auaacuuaggccugugauu

SEQ ID NO: 2190151 - RNA, 19 nt, Artificial Sequence
  Description of Artificial Sequence: Synthetic oligonucleotide
  Antisense strand to SEQ ID NO: 2190150
aaucacaggccuaaguuau

SEQ ID NO: 2190152 - RNA, 19 nt, Artificial Sequence
  Description of Artificial Sequence: Synthetic oligonucleotide
  Sense strand starting at position 2740 of SEQ ID NO: 1883382
ucuggucaccuugaacauu

SEQ ID NO: 2190153 - RNA, 19 nt, Artificial Sequence
  Description of Artificial Sequence: Synthetic oligonucleotide
  Antisense strand to SEQ ID NO: 2190152
aauguucaaggugaccaga

SEQ ID NO: 2190154 - RNA, 19 nt, Artificial Sequence
  Description of Artificial Sequence: Synthetic oligonucleotide
  Sense strand starting at position 2852 of SEQ ID NO: 1883382
ugucuaagaacuuggugca

SEQ ID NO: 2190155 - RNA, 19 nt, Artificial Sequence
  Description of Artificial Sequence: Synthetic oligonucleotide
  Antisense strand to SEQ ID NO: 2190154
ugcaccaaguucuuagaca

SEQ ID NO: 2190156 - RNA, 19 nt, Artificial Sequence
  Description of Artificial Sequence: Synthetic oligonucleotide
  Sense strand starting at position 3163 of SEQ ID NO: 1883382
caugcagauuggucaguau

SEQ ID NO: 2190157 - RNA, 19 nt, Artificial Sequence
  Description of Artificial Sequence: Synthetic oligonucleotide
  Antisense strand to SEQ ID NO: 2190156
auacugaccaaucugcaug

SEQ ID NO: 2190158 - RNA, 19 nt, Artificial Sequence
  Description of Artificial Sequence: Synthetic oligonucleotide
  Sense strand starting at position 3208 of SEQ ID NO: 1883382
ggaguuucucugggagaug

SEQ ID NO: 2190159 - RNA, 19 nt, Artificial Sequence
  Description of Artificial Sequence: Synthetic oligonucleotide
  Antisense strand to SEQ ID NO: 2190158
caucucccagagaaacucc

SEQ ID NO: 2190160 - RNA, 19 nt, Artificial Sequence
  Description of Artificial Sequence: Synthetic oligonucleotide
  Sense strand starting at position 3252 of SEQ ID NO: 1883382
cuagaaggauccucuaguu

SEQ ID NO: 2190161 - RNA, 19 nt, Artificial Sequence
  Description of Artificial Sequence: Synthetic oligonucleotide
  Antisense strand to SEQ ID NO: 2190160
aacuagaggauccuucuag

SEQ ID NO: 2190162 - RNA, 19 nt, Artificial Sequence
  Description of Artificial Sequence: Synthetic oligonucleotide
  Sense strand starting at position 3450 of SEQ ID NO: 1883382
ggaccacaggcuugaucua

SEQ ID NO: 2190163 - RNA, 19 nt, Artificial Sequence
  Description of Artificial Sequence: Synthetic oligonucleotide
  Antisense strand to SEQ ID NO: 2190162
uagaucaagccuguggucc

SEQ ID NO: 2190164 - RNA, 19 nt, Artificial Sequence
  Description of Artificial Sequence: Synthetic oligonucleotide
  Sense strand starting at position 3480 of SEQ ID NO: 1883382
ucccuaugccaaggagaaa

SEQ ID NO: 2190165 - RNA, 19 nt, Artificial Sequence
  Description of Artificial Sequence: Synthetic oligonucleotide
  Antisense strand to SEQ ID NO: 2190164
uuucuccuuggcauaggga

SEQ ID NO: 2190166 - RNA, 19 nt, Artificial Sequence
  Description of Artificial Sequence: Synthetic oligonucleotide
  Sense strand starting at position 3516 of SEQ ID NO: 1883382
ccaggacuugcucaacauc

SEQ ID NO: 2190167 - RNA, 19 nt, Artificial Sequence
  Description of Artificial Sequence: Synthetic oligonucleotide
  Antisense strand to SEQ ID NO: 2190166
gauguugagcaaguccugg

SEQ ID NO: 2190168 - RNA, 19 nt, Artificial Sequence
  Description of Artificial Sequence: Synthetic oligonucleotide
  Sense strand starting at position 3588 of SEQ ID NO: 1883382
agggaaucaugccuuauau

SEQ ID NO: 2190169 - RNA, 19 nt, Artificial Sequence
  Description of Artificial Sequence: Synthetic oligonucleotide
  Antisense strand to SEQ ID NO: 2190168
auauaaggcaugauucccu

SEQ ID NO: 2190170 - RNA, 19 nt, Artificial Sequence
  Description of Artificial Sequence: Synthetic oligonucleotide
  Sense strand starting at position 3590 of SEQ ID NO: 1883382
ggaaucaugccuuauauug

SEQ ID NO: 2190171 - RNA, 19 nt, Artificial Sequence
  Description of Artificial Sequence: Synthetic oligonucleotide
  Antisense strand to SEQ ID NO: 2190170
caauauaaggcaugauucc

SEQ ID NO: 2190172 - RNA, 19 nt, Artificial Sequence
  Description of Artificial Sequence: Synthetic oligonucleotide
  Sense strand starting at position 3597 of SEQ ID NO: 1883382
ugccuuauauugucacuga

SEQ ID NO: 2190173 - RNA, 19 nt, Artificial Sequence
  Description of Artificial Sequence: Synthetic oligonucleotide
  Antisense strand to SEQ ID NO: 2190172
ucagugacaauauaaggca

SEQ ID NO: 2190174 - RNA, 19 nt, Artificial Sequence
  Description of Artificial Sequence: Synthetic oligonucleotide
  Sense strand starting at position 3600 of SEQ ID NO: 1883382
cuuauauugucacugaaag

SEQ ID NO: 2190175 - RNA, 19 nt, Artificial Sequence
  Description of Artificial Sequence: Synthetic oligonucleotide
  Antisense strand to SEQ ID NO: 2190174
cuuucagugacaauauaag

SEQ ID NO: 2190176 - RNA, 19 nt, Artificial Sequence
  Description of Artificial Sequence: Synthetic oligonucleotide
  Sense strand starting at position 3601 of SEQ ID NO: 1883382
uuauauugucacugaaaga

SEQ ID NO: 2190177 - RNA, 19 nt, Artificial Sequence
  Description of Artificial Sequence: Synthetic oligonucleotide
  Antisense strand to SEQ ID NO: 2190176
ucuuucagugacaauauaa

SEQ ID NO: 2190178 - RNA, 19 nt, Artificial Sequence
  Description of Artificial Sequence: Synthetic oligonucleotide
  Sense strand starting at position 3631 of SEQ ID NO: 1883382
gagcucugcgaguaaucau

SEQ ID NO: 2190179 - RNA, 19 nt, Artificial Sequence
  Description of Artificial Sequence: Synthetic oligonucleotide
  Antisense strand to SEQ ID NO: 2190178
augauuacucgcagagcuc

SEQ ID NO: 2190180 - RNA, 19 nt, Artificial Sequence
  Description of Artificial Sequence: Synthetic oligonucleotide
  Sense strand starting at position 3634 of SEQ ID NO: 1883382
cucugcgaguaaucauuga

SEQ ID NO: 2190181 - RNA, 19 nt, Artificial Sequence
  Description of Artificial Sequence: Synthetic oligonucleotide
  Antisense strand to SEQ ID NO: 2190180
ucaaugauuacucgcagag

SEQ ID NO: 2190182 - RNA, 19 nt, Artificial Sequence
  Description of Artificial Sequence: Synthetic oligonucleotide
  Sense strand starting at position 3639 of SEQ ID NO: 1883382
cgaguaaucauugaggccu

SEQ ID NO: 2190183 - RNA, 19 nt, Artificial Sequence
  Description of Artificial Sequence: Synthetic oligonucleotide
  Antisense strand to SEQ ID NO: 2190182
aggccucaaugauuacucg

SEQ ID NO: 2190184 - RNA, 19 nt, Artificial Sequence
  Description of Artificial Sequence: Synthetic oligonucleotide
  Sense strand starting at position 3763 of SEQ ID NO: 1883382
agggcauggccuuagaaga

SEQ ID NO: 2190185 - RNA, 19 nt, Artificial Sequence
  Description of Artificial Sequence: Synthetic oligonucleotide
  Antisense strand to SEQ ID NO: 2190184
ucuucuaaggccaugcccu

SEQ ID NO: 2190186 - RNA, 19 nt, Artificial Sequence
  Description of Artificial Sequence: Synthetic oligonucleotide
  Sense strand starting at position 3962 of SEQ ID NO: 1883382
guuccauccuugcuggaau

SEQ ID NO: 2190187 - RNA, 19 nt, Artificial Sequence
  Description of Artificial Sequence: Synthetic oligonucleotide
  Antisense strand to SEQ ID NO: 2190186
auuccagcaaggauggaac

SEQ ID NO: 2190188 - RNA, 19 nt, Artificial Sequence
  Description of Artificial Sequence: Synthetic oligonucleotide
  Sense strand starting at position 3964 of SEQ ID NO: 1883382
uccauccuugcuggaauaa

SEQ ID NO: 2190189 - RNA, 19 nt, Artificial Sequence
  Description of Artificial Sequence: Synthetic oligonucleotide
  Antisense strand to SEQ ID NO: 2190188
uuauuccagcaaggaugga

SEQ ID NO: 2190190 - RNA, 19 nt, Artificial Sequence
  Description of Artificial Sequence: Synthetic oligonucleotide
  Sense strand starting at position 3965 of SEQ ID NO: 1883382
ccauccuugcuggaauaaa

SEQ ID NO: 2190191 - RNA, 19 nt, Artificial Sequence
  Description of Artificial Sequence: Synthetic oligonucleotide
  Antisense strand to SEQ ID NO: 2190190
uuuauuccagcaaggaugg

SEQ ID NO: 2190192 - RNA, 19 nt, Artificial Sequence
  Description of Artificial Sequence: Synthetic oligonucleotide
  Sense strand starting at position 252 of SEQ ID NO: 1883383
cuaugagagucuuuaucug

SEQ ID NO: 2190193 - RNA, 19 nt, Artificial Sequence
  Description of Artificial Sequence: Synthetic oligonucleotide
  Antisense strand to SEQ ID NO: 2190192
cagauaaagacucucauag

SEQ ID NO: 2190194 - RNA, 19 nt, Artificial Sequence
  Description of Artificial Sequence: Synthetic oligonucleotide
  Sense strand starting at position 314 of SEQ ID NO: 1883383
uuacuucccugauuggaca

SEQ ID NO: 2190195 - RNA, 19 nt, Artificial Sequence
  Description of Artificial Sequence: Synthetic oligonucleotide
  Antisense strand to SEQ ID NO: 2190194
uguccaaucagggaaguaa

SEQ ID NO: 2190196 - RNA, 19 nt, Artificial Sequence
  Description of Artificial Sequence: Synthetic oligonucleotide
  Sense strand starting at position 532 of SEQ ID NO: 1883383
gcacccuacugcuuagaaa

SEQ ID NO: 2190197 - RNA, 19 nt, Artificial Sequence
  Description of Artificial Sequence: Synthetic oligonucleotide
  Antisense strand to SEQ ID NO: 2190196
uuucuaagcaguagggugc

SEQ ID NO: 2190198 - RNA, 19 nt, Artificial Sequence
  Description of Artificial Sequence: Synthetic oligonucleotide
  Sense strand starting at position 566 of SEQ ID NO: 1883383
ccggcacacccagaguuau

SEQ ID NO: 2190199 - RNA, 19 nt, Artificial Sequence
  Description of Artificial Sequence: Synthetic oligonucleotide
  Antisense strand to SEQ ID NO: 2190198
auaacucugggugugccgg

SEQ ID NO: 2190200 - RNA, 19 nt, Artificial Sequence
  Description of Artificial Sequence: Synthetic oligonucleotide
  Sense strand starting at position 728 of SEQ ID NO: 1883383
aguuuaaacagauaugugu

SEQ ID NO: 2190201 - RNA, 19 nt, Artificial Sequence
  Description of Artificial Sequence: Synthetic oligonucleotide
  Antisense strand to SEQ ID NO: 2190200
acacauaucuguuuaaacu

SEQ ID NO: 2190202 - RNA, 19 nt, Artificial Sequence
  Description of Artificial Sequence: Synthetic oligonucleotide
  Sense strand starting at position 745 of SEQ ID NO: 1883383
guauuucuuuguuccaaug

SEQ ID NO: 2190203 - RNA, 19 nt, Artificial Sequence
  Description of Artificial Sequence: Synthetic oligonucleotide
  Antisense strand to SEQ ID NO: 2190202
cauuggaacaaagaaauac

SEQ ID NO: 2190204 - RNA, 19 nt, Artificial Sequence
  Description of Artificial Sequence: Synthetic oligonucleotide
  Sense strand starting at position 805 of SEQ ID NO: 1883383
agguauagcacuggugaca

SEQ ID NO: 2190205 - RNA, 19 nt, Artificial Sequence
  Description of Artificial Sequence: Synthetic oligonucleotide
  Antisense strand to SEQ ID NO: 2190204
ugucaccagugcuauaccu

SEQ ID NO: 2190206 - RNA, 19 nt, Artificial Sequence
  Description of Artificial Sequence: Synthetic oligonucleotide
  Sense strand starting at position 808 of SEQ ID NO: 1883383
uauagcacuggugacaaau

SEQ ID NO: 2190207 - RNA, 19 nt, Artificial Sequence
  Description of Artificial Sequence: Synthetic oligonucleotide
  Antisense strand to SEQ ID NO: 2190206
auuugucaccagugcuaua

SEQ ID NO: 2190208 - RNA, 19 nt, Artificial Sequence
  Description of Artificial Sequence: Synthetic oligonucleotide
  Sense strand starting at position 819 of SEQ ID NO: 1883383
ugacaaaugcagcgaaaca

SEQ ID NO: 2190209 - RNA, 19 nt, Artificial Sequence
  Description of Artificial Sequence: Synthetic oligonucleotide
  Antisense strand to SEQ ID NO: 2190208
uguuucgcugcauuuguca

SEQ ID NO: 2190210 - RNA, 19 nt, Artificial Sequence
  Description of Artificial Sequence: Synthetic oligonucleotide
  Sense strand starting at position 900 of SEQ ID NO: 1883383
ucaugugcaguuuacauaa

SEQ ID NO: 2190211 - RNA, 19 nt, Artificial Sequence
  Description of Artificial Sequence: Synthetic oligonucleotide
  Antisense strand to SEQ ID NO: 2190210
uuauguaaacugcacauga

SEQ ID NO: 2190212 - RNA, 19 nt, Artificial Sequence
  Description of Artificial Sequence: Synthetic oligonucleotide
  Sense strand starting at position 981 of SEQ ID NO: 1883383
gggucaaaguguucaucag

SEQ ID NO: 2190213 - RNA, 19 nt, Artificial Sequence
  Description of Artificial Sequence: Synthetic oligonucleotide
  Antisense strand to SEQ ID NO: 2190212
cugaugaacacuuugaccc

SEQ ID NO: 2190214 - RNA, 19 nt, Artificial Sequence
  Description of Artificial Sequence: Synthetic oligonucleotide
  Sense strand starting at position 1007 of SEQ ID NO: 1883383
gaguauguucuggaggucu

SEQ ID NO: 2190215 - RNA, 19 nt, Artificial Sequence
  Description of Artificial Sequence: Synthetic oligonucleotide
  Antisense strand to SEQ ID NO: 2190214
agaccuccagaacauacuc

SEQ ID NO: 2190216 - RNA, 19 nt, Artificial Sequence
  Description of Artificial Sequence: Synthetic oligonucleotide
  Sense strand starting at position 1484 of SEQ ID NO: 1883383
ccgaaagugcuugggaaau

SEQ ID NO: 2190217 - RNA, 19 nt, Artificial Sequence
  Description of Artificial Sequence: Synthetic oligonucleotide
  Antisense strand to SEQ ID NO: 2190216
auuucccaagcacuuucgg

SEQ ID NO: 2190218 - RNA, 19 nt, Artificial Sequence
  Description of Artificial Sequence: Synthetic oligonucleotide
  Sense strand starting at position 1494 of SEQ ID NO: 1883383
uugggaaaugccugcaaau

SEQ ID NO: 2190219 - RNA, 19 nt, Artificial Sequence
  Description of Artificial Sequence: Synthetic oligonucleotide
  Antisense strand to SEQ ID NO: 2190218
auuugcaggcauuucccaa

SEQ ID NO: 2190220 - RNA, 19 nt, Artificial Sequence
  Description of Artificial Sequence: Synthetic oligonucleotide
  Sense strand starting at position 1700 of SEQ ID NO: 1883383
gaacaucaugcuuggucua

SEQ ID NO: 2190221 - RNA, 19 nt, Artificial Sequence
  Description of Artificial Sequence: Synthetic oligonucleotide
  Antisense strand to SEQ ID NO: 2190220
uagaccaagcaugauguuc

SEQ ID NO: 2190222 - RNA, 19 nt, Artificial Sequence
  Description of Artificial Sequence: Synthetic oligonucleotide
  Sense strand starting at position 1726 of SEQ ID NO: 1883383
uggagcucauugucugaga

SEQ ID NO: 2190223 - RNA, 19 nt, Artificial Sequence
  Description of Artificial Sequence: Synthetic oligonucleotide
  Antisense strand to SEQ ID NO: 2190222
ucucagacaaugagcucca

SEQ ID NO: 2190224 - RNA, 19 nt, Artificial Sequence
  Description of Artificial Sequence: Synthetic oligonucleotide
  Sense strand starting at position 1822 of SEQ ID NO: 1883383
ccuccaauucuggagucuu

SEQ ID NO: 2190225 - RNA, 19 nt, Artificial Sequence
  Description of Artificial Sequence: Synthetic oligonucleotide
  Antisense strand to SEQ ID NO: 2190224
aagacuccagaauuggagg

SEQ ID NO: 2190226 - RNA, 19 nt, Artificial Sequence
  Description of Artificial Sequence: Synthetic oligonucleotide
  Sense strand starting at position 2077 of SEQ ID NO: 1883383
agcaauguugaguggaaga

SEQ ID NO: 2190227 - RNA, 19 nt, Artificial Sequence
  Description of Artificial Sequence: Synthetic oligonucleotide
  Antisense strand to SEQ ID NO: 2190226
ucuuccacucaacauugcu

SEQ ID NO: 2190228 - RNA, 19 nt, Artificial Sequence
  Description of Artificial Sequence: Synthetic oligonucleotide
  Sense strand starting at position 2198 of SEQ ID NO: 1883383
cagagugguaucgaucaug

SEQ ID NO: 2190229 - RNA, 19 nt, Artificial Sequence
  Description of Artificial Sequence: Synthetic oligonucleotide
  Antisense strand to SEQ ID NO: 2190228
caugaucgauaccacucug

SEQ ID NO: 2190230 - RNA, 19 nt, Artificial Sequence
  Description of Artificial Sequence: Synthetic oligonucleotide
  Sense strand starting at position 2201 of SEQ ID NO: 1883383
agugguaucgaucauguca

SEQ ID NO: 2190231 - RNA, 19 nt, Artificial Sequence
  Description of Artificial Sequence: Synthetic oligonucleotide
  Antisense strand to SEQ ID NO: 2190230
ugacaugaucgauaccacu

SEQ ID NO: 2190232 - RNA, 19 nt, Artificial Sequence
  Description of Artificial Sequence: Synthetic oligonucleotide
  Sense strand starting at position 2526 of SEQ ID NO: 1883383
gacaauucccuucggagag

SEQ ID NO: 2190233 - RNA, 19 nt, Artificial Sequence
  Description of Artificial Sequence: Synthetic oligonucleotide
  Antisense strand to SEQ ID NO: 2190232
cucuccgaagggaauuguc

SEQ ID NO: 2190234 - RNA, 19 nt, Artificial Sequence
  Description of Artificial Sequence: Synthetic oligonucleotide
  Sense strand starting at position 2569 of SEQ ID NO: 1883383
ggagcaggcuucccagaga

SEQ ID NO: 2190235 - RNA, 19 nt, Artificial Sequence
  Description of Artificial Sequence: Synthetic oligonucleotide
  Antisense strand to SEQ ID NO: 2190234
ucucugggaagccugcucc

SEQ ID NO: 2190236 - RNA, 19 nt, Artificial Sequence
  Description of Artificial Sequence: Synthetic oligonucleotide
  Sense strand starting at position 2572 of SEQ ID NO: 1883383
gcaggcuucccagagaaag

SEQ ID NO: 2190237 - RNA, 19 nt, Artificial Sequence
  Description of Artificial Sequence: Synthetic oligonucleotide
  Antisense strand to SEQ ID NO: 2190236
cuuucucugggaagccugc

SEQ ID NO: 2190238 - RNA, 19 nt, Artificial Sequence
  Description of Artificial Sequence: Synthetic oligonucleotide
  Sense strand starting at position 2582 of SEQ ID NO: 1883383
cagagaaagucccuuugga

SEQ ID NO: 2190239 - RNA, 19 nt, Artificial Sequence
  Description of Artificial Sequence: Synthetic oligonucleotide
  Antisense strand to SEQ ID NO: 2190238
uccaaagggacuuucucug

SEQ ID NO: 2190240 - RNA, 19 nt, Artificial Sequence
  Description of Artificial Sequence: Synthetic oligonucleotide
  Sense strand starting at position 2825 of SEQ ID NO: 1883383
ccaagaacugcuuaucuga

SEQ ID NO: 2190241 - RNA, 19 nt, Artificial Sequence
  Description of Artificial Sequence: Synthetic oligonucleotide
  Antisense strand to SEQ ID NO: 2190240
ucagauaagcaguucuugg

SEQ ID NO: 2190242 - RNA, 19 nt, Artificial Sequence
  Description of Artificial Sequence: Synthetic oligonucleotide
  Sense strand starting at position 2967 of SEQ ID NO: 1883383
agugccucucaugagaagu

SEQ ID NO: 2190243 - RNA, 19 nt, Artificial Sequence
  Description of Artificial Sequence: Synthetic oligonucleotide
  Antisense strand to SEQ ID NO: 2190242
acuucucaugagaggcacu

SEQ ID NO: 2190244 - RNA, 19 nt, Artificial Sequence
  Description of Artificial Sequence: Synthetic oligonucleotide
  Sense strand starting at position 2981 of SEQ ID NO: 1883383
gaaguaaucaggcgcaaag

SEQ ID NO: 2190245 - RNA, 19 nt, Artificial Sequence
  Description of Artificial Sequence: Synthetic oligonucleotide
  Antisense strand to SEQ ID NO: 2190244
cuuugcgccugauuacuuc

SEQ ID NO: 2190246 - RNA, 19 nt, Artificial Sequence
  Description of Artificial Sequence: Synthetic oligonucleotide
  Sense strand starting at position 3116 of SEQ ID NO: 1883383
cccacugagcccugaaaug

SEQ ID NO: 2190247 - RNA, 19 nt, Artificial Sequence
  Description of Artificial Sequence: Synthetic oligonucleotide
  Antisense strand to SEQ ID NO: 2190246
cauuucagggcucaguggg

SEQ ID NO: 2190248 - RNA, 19 nt, Artificial Sequence
  Description of Artificial Sequence: Synthetic oligonucleotide
  Sense strand starting at position 3267 of SEQ ID NO: 1883383
ggugcugggccaugaagaa

SEQ ID NO: 2190249 - RNA, 19 nt, Artificial Sequence
  Description of Artificial Sequence: Synthetic oligonucleotide
  Antisense strand to SEQ ID NO: 2190248
uucuucauggcccagcacc

SEQ ID NO: 2190250 - RNA, 19 nt, Artificial Sequence
  Description of Artificial Sequence: Synthetic oligonucleotide
  Sense strand starting at position 3489 of SEQ ID NO: 1883383
caugguaacccugggauga

SEQ ID NO: 2190251 - RNA, 19 nt, Artificial Sequence
  Description of Artificial Sequence: Synthetic oligonucleotide
  Antisense strand to SEQ ID NO: 2190250
ucaucccaggguuaccaug

SEQ ID NO: 2190252 - RNA, 19 nt, Artificial Sequence
  Description of Artificial Sequence: Synthetic oligonucleotide
  Sense strand starting at position 3533 of SEQ ID NO: 1883383
ccaguauucuuuccuugau

SEQ ID NO: 2190253 - RNA, 19 nt, Artificial Sequence
  Description of Artificial Sequence: Synthetic oligonucleotide
  Antisense strand to SEQ ID NO: 2190252
aucaaggaaagaauacugg

SEQ ID NO: 2190254 - RNA, 19 nt, Artificial Sequence
  Description of Artificial Sequence: Synthetic oligonucleotide
  Sense strand starting at position 3535 of SEQ ID NO: 1883383
aguauucuuuccuugauuc

SEQ ID NO: 2190255 - RNA, 19 nt, Artificial Sequence
  Description of Artificial Sequence: Synthetic oligonucleotide
  Antisense strand to SEQ ID NO: 2190254
gaaucaaggaaagaauacu

SEQ ID NO: 2190256 - RNA, 19 nt, Artificial Sequence
  Description of Artificial Sequence: Synthetic oligonucleotide
  Sense strand starting at position 3625 of SEQ ID NO: 1883383
gaauguguucuguaaacac

SEQ ID NO: 2190257 - RNA, 19 nt, Artificial Sequence
  Description of Artificial Sequence: Synthetic oligonucleotide
  Antisense strand to SEQ ID NO: 2190256
guguuuacagaacacauuc

SEQ ID NO: 2190258 - RNA, 19 nt, Artificial Sequence
  Description of Artificial Sequence: Synthetic oligonucleotide
  Sense strand starting at position 3710 of SEQ ID NO: 1883383
auuggcagugucuaaucaa

SEQ ID NO: 2190259 - RNA, 19 nt, Artificial Sequence
  Description of Artificial Sequence: Synthetic oligonucleotide
  Antisense strand to SEQ ID NO: 2190258
uugauuagacacugccaau

SEQ ID NO: 2190260 - RNA, 19 nt, Artificial Sequence
  Description of Artificial Sequence: Synthetic oligonucleotide
  Sense strand starting at position 3717 of SEQ ID NO: 1883383
gugucuaaucaacaugucu

SEQ ID NO: 2190261 - RNA, 19 nt, Artificial Sequence
  Description of Artificial Sequence: Synthetic oligonucleotide
  Antisense strand to SEQ ID NO: 2190260
agacauguugauuagacac

SEQ ID NO: 2190262 - RNA, 19 nt, Artificial Sequence
  Description of Artificial Sequence: Synthetic oligonucleotide
  Sense strand starting at position 3722 of SEQ ID NO: 1883383
uaaucaacaugucuggaga

SEQ ID NO: 2190263 - RNA, 19 nt, Artificial Sequence
  Description of Artificial Sequence: Synthetic oligonucleotide
  Antisense strand to SEQ ID NO: 2190262
ucuccagacauguugauua

SEQ ID NO: 2190264 - RNA, 19 nt, Artificial Sequence
  Description of Artificial Sequence: Synthetic oligonucleotide
  Sense strand starting at position 3800 of SEQ ID NO: 1883383
cucugcuuugcugaaauga

SEQ ID NO: 2190265 - RNA, 19 nt, Artificial Sequence
  Description of Artificial Sequence: Synthetic oligonucleotide
  Antisense strand to SEQ ID NO: 2190264
ucauuucagcaaagcagag

SEQ ID NO: 2190266 - RNA, 19 nt, Artificial Sequence
  Description of Artificial Sequence: Synthetic oligonucleotide
  Sense strand starting at position 3917 of SEQ ID NO: 1883383
ugcugauccaaggaauguu

SEQ ID NO: 2190267 - RNA, 19 nt, Artificial Sequence
  Description of Artificial Sequence: Synthetic oligonucleotide
  Antisense strand to SEQ ID NO: 2190266
aacauuccuuggaucagca

SEQ ID NO: 2190268 - RNA, 19 nt, Artificial Sequence
  Description of Artificial Sequence: Synthetic oligonucleotide
  Sense strand starting at position 3920 of SEQ ID NO: 1883383
ugauccaaggaauguucua

SEQ ID NO: 2190269 - RNA, 19 nt, Artificial Sequence
  Description of Artificial Sequence: Synthetic oligonucleotide
  Antisense strand to SEQ ID NO: 2190268
uagaacauuccuuggauca

SEQ ID NO: 2190270 - RNA, 19 nt, Artificial Sequence
  Description of Artificial Sequence: Synthetic oligonucleotide
  Sense strand starting at position 3927 of SEQ ID NO: 1883383
aggaauguucuagaaccgu

SEQ ID NO: 2190271 - RNA, 19 nt, Artificial Sequence
  Description of Artificial Sequence: Synthetic oligonucleotide
  Antisense strand to SEQ ID NO: 2190270
acgguucuagaacauuccu

SEQ ID NO: 2190272 - RNA, 19 nt, Artificial Sequence
  Description of Artificial Sequence: Synthetic oligonucleotide
  Sense strand starting at position 58 of SEQ ID NO: 1883384
cuuagagaauacgcauaaa

SEQ ID NO: 2190273 - RNA, 19 nt, Artificial Sequence
  Description of Artificial Sequence: Synthetic oligonucleotide
  Antisense strand to SEQ ID NO: 2190272
uuuaugcguauucucuaag

SEQ ID NO: 2190274 - RNA, 19 nt, Artificial Sequence
  Description of Artificial Sequence: Synthetic oligonucleotide
  Sense strand starting at position 203 of SEQ ID NO: 1883384
cugagucacucuccugaaa

SEQ ID NO: 2190275 - RNA, 19 nt, Artificial Sequence
  Description of Artificial Sequence: Synthetic oligonucleotide
  Antisense strand to SEQ ID NO: 2190274
uuucaggagagugacucag

SEQ ID NO: 2190276 - RNA, 19 nt, Artificial Sequence
  Description of Artificial Sequence: Synthetic oligonucleotide
  Sense strand starting at position 206 of SEQ ID NO: 1883384
agucacucuccugaaauug

SEQ ID NO: 2190277 - RNA, 19 nt, Artificial Sequence
  Description of Artificial Sequence: Synthetic oligonucleotide
  Antisense strand to SEQ ID NO: 2190276
caauuucaggagagugacu

SEQ ID NO: 2190278 - RNA, 19 nt, Artificial Sequence
  Description of Artificial Sequence: Synthetic oligonucleotide
  Sense strand starting at position 273 of SEQ ID NO: 1883384
aggaguccaugaucgaaga

SEQ ID NO: 2190279 - RNA, 19 nt, Artificial Sequence
  Description of Artificial Sequence: Synthetic oligonucleotide
  Antisense strand to SEQ ID NO: 2190278
ucuucgaucauggacuccu

SEQ ID NO: 2190280 - RNA, 19 nt, Artificial Sequence
  Description of Artificial Sequence: Synthetic oligonucleotide
  Sense strand starting at position 603 of SEQ ID NO: 1883384
gccauagauaucggaggua

SEQ ID NO: 2190281 - RNA, 19 nt, Artificial Sequence
  Description of Artificial Sequence: Synthetic oligonucleotide
  Antisense strand to SEQ ID NO: 2190280
uaccuccgauaucuauggc

SEQ ID NO: 2190282 - RNA, 19 nt, Artificial Sequence
  Description of Artificial Sequence: Synthetic oligonucleotide
  Sense strand starting at position 606 of SEQ ID NO: 1883384
auagauaucggagguaugu

SEQ ID NO: 2190283 - RNA, 19 nt, Artificial Sequence
  Description of Artificial Sequence: Synthetic oligonucleotide
  Antisense strand to SEQ ID NO: 2190282
acauaccuccgauaucuau

SEQ ID NO: 2190284 - RNA, 19 nt, Artificial Sequence
  Description of Artificial Sequence: Synthetic oligonucleotide
  Sense strand starting at position 616 of SEQ ID NO: 1883384
gagguaugugguuagcaga

SEQ ID NO: 2190285 - RNA, 19 nt, Artificial Sequence
  Description of Artificial Sequence: Synthetic oligonucleotide
  Antisense strand to SEQ ID NO: 2190284
ucugcuaaccacauaccuc

SEQ ID NO: 2190286 - RNA, 19 nt, Artificial Sequence
  Description of Artificial Sequence: Synthetic oligonucleotide
  Sense strand starting at position 623 of SEQ ID NO: 1883384
gugguuagcagauaguauu

SEQ ID NO: 2190287 - RNA, 19 nt, Artificial Sequence
  Description of Artificial Sequence: Synthetic oligonucleotide
  Antisense strand to SEQ ID NO: 2190286
aauacuaucugcuaaccac

SEQ ID NO: 2190288 - RNA, 19 nt, Artificial Sequence
  Description of Artificial Sequence: Synthetic oligonucleotide
  Sense strand starting at position 633 of SEQ ID NO: 1883384
gauaguauuuaugggaaau

SEQ ID NO: 2190289 - RNA, 19 nt, Artificial Sequence
  Description of Artificial Sequence: Synthetic oligonucleotide
  Antisense strand to SEQ ID NO: 2190288
auuucccauaaauacuauc

SEQ ID NO: 2190290 - RNA, 19 nt, Artificial Sequence
  Description of Artificial Sequence: Synthetic oligonucleotide
  Sense strand starting at position 635 of SEQ ID NO: 1883384
uaguauuuaugggaaaugu

SEQ ID NO: 2190291 - RNA, 19 nt, Artificial Sequence
  Description of Artificial Sequence: Synthetic oligonucleotide
  Antisense strand to SEQ ID NO: 2190290
acauuucccauaaauacua

SEQ ID NO: 2190292 - RNA, 19 nt, Artificial Sequence
  Description of Artificial Sequence: Synthetic oligonucleotide
  Sense strand starting at position 644 of SEQ ID NO: 1883384
ugggaaaugucuccagaau

SEQ ID NO: 2190293 - RNA, 19 nt, Artificial Sequence
  Description of Artificial Sequence: Synthetic oligonucleotide
  Antisense strand to SEQ ID NO: 2190292
auucuggagacauuuccca

SEQ ID NO: 2190294 - RNA, 19 nt, Artificial Sequence
  Description of Artificial Sequence: Synthetic oligonucleotide
  Sense strand starting at position 675 of SEQ ID NO: 1883384
ggcuauaucagagaagugu

SEQ ID NO: 2190295 - RNA, 19 nt, Artificial Sequence
  Description of Artificial Sequence: Synthetic oligonucleotide
  Antisense strand to SEQ ID NO: 2190294
acacuucucugauauagcc

SEQ ID NO: 2190296 - RNA, 19 nt, Artificial Sequence
  Description of Artificial Sequence: Synthetic oligonucleotide
  Sense strand starting at position 679 of SEQ ID NO: 1883384
auaucagagaaguguuuag

SEQ ID NO: 2190297 - RNA, 19 nt, Artificial Sequence
  Description of Artificial Sequence: Synthetic oligonucleotide
  Antisense strand to SEQ ID NO: 2190296
cuaaacacuucucugauau

SEQ ID NO: 2190298 - RNA, 19 nt, Artificial Sequence
  Description of Artificial Sequence: Synthetic oligonucleotide
  Sense strand starting at position 683 of SEQ ID NO: 1883384
cagagaaguguuuagugca

SEQ ID NO: 2190299 - RNA, 19 nt, Artificial Sequence
  Description of Artificial Sequence: Synthetic oligonucleotide
  Antisense strand to SEQ ID NO: 2190298
ugcacuaaacacuucucug

SEQ ID NO: 2190300 - RNA, 19 nt, Artificial Sequence
  Description of Artificial Sequence: Synthetic oligonucleotide
  Sense strand starting at position 688 of SEQ ID NO: 1883384
aaguguuuagugcagaaug

SEQ ID NO: 2190301 - RNA, 19 nt, Artificial Sequence
  Description of Artificial Sequence: Synthetic oligonucleotide
  Antisense strand to SEQ ID NO: 2190300
cauucugcacuaaacacuu

SEQ ID NO: 2190302 - RNA, 19 nt, Artificial Sequence
  Description of Artificial Sequence: Synthetic oligonucleotide
  Sense strand starting at position 737 of SEQ ID NO: 1883384
aucagaauaguaggugaau

SEQ ID NO: 2190303 - RNA, 19 nt, Artificial Sequence
  Description of Artificial Sequence: Synthetic oligonucleotide
  Antisense strand to SEQ ID NO: 2190302
auucaccuacuauucugau

SEQ ID NO: 2190304 - RNA, 19 nt, Artificial Sequence
  Description of Artificial Sequence: Synthetic oligonucleotide
  Sense strand starting at position 738 of SEQ ID NO: 1883384
ucagaauaguaggugaaua

SEQ ID NO: 2190305 - RNA, 19 nt, Artificial Sequence
  Description of Artificial Sequence: Synthetic oligonucleotide
  Antisense strand to SEQ ID NO: 2190304
uauucaccuacuauucuga

SEQ ID NO: 2190306 - RNA, 19 nt, Artificial Sequence
  Description of Artificial Sequence: Synthetic oligonucleotide
  Sense strand starting at position 899 of SEQ ID NO: 1883384
agcauuaggauguguagaa

SEQ ID NO: 2190307 - RNA, 19 nt, Artificial Sequence
  Description of Artificial Sequence: Synthetic oligonucleotide
  Antisense strand to SEQ ID NO: 2190306
uucuacacauccuaaugcu

SEQ ID NO: 2190308 - RNA, 19 nt, Artificial Sequence
  Description of Artificial Sequence: Synthetic oligonucleotide
  Sense strand starting at position 900 of SEQ ID NO: 1883384
gcauuaggauguguagaau

SEQ ID NO: 2190309 - RNA, 19 nt, Artificial Sequence
  Description of Artificial Sequence: Synthetic oligonucleotide
  Antisense strand to SEQ ID NO: 2190308
auucuacacauccuaaugc

SEQ ID NO: 2190310 - RNA, 19 nt, Artificial Sequence
  Description of Artificial Sequence: Synthetic oligonucleotide
  Sense strand starting at position 1273 of SEQ ID NO: 1883384
aauggaauucuguacgcau

SEQ ID NO: 2190311 - RNA, 19 nt, Artificial Sequence
  Description of Artificial Sequence: Synthetic oligonucleotide
  Antisense strand to SEQ ID NO: 2190310
augcguacagaauuccauu

SEQ ID NO: 2190312 - RNA, 19 nt, Artificial Sequence
  Description of Artificial Sequence: Synthetic oligonucleotide
  Sense strand starting at position 1627 of SEQ ID NO: 1883384
agaaaucuuugggaaggga

SEQ ID NO: 2190313 - RNA, 19 nt, Artificial Sequence
  Description of Artificial Sequence: Synthetic oligonucleotide
  Antisense strand to SEQ ID NO: 2190312
ucccuucccaaagauuucu

SEQ ID NO: 2190314 - RNA, 19 nt, Artificial Sequence
  Description of Artificial Sequence: Synthetic oligonucleotide
  Sense strand starting at position 1930 of SEQ ID NO: 1883384
ucauuaugucugugaauua

SEQ ID NO: 2190315 - RNA, 19 nt, Artificial Sequence
  Description of Artificial Sequence: Synthetic oligonucleotide
  Antisense strand to SEQ ID NO: 2190314
uaauucacagacauaauga

SEQ ID NO: 2190316 - RNA, 19 nt, Artificial Sequence
  Description of Artificial Sequence: Synthetic oligonucleotide
  Sense strand starting at position 1993 of SEQ ID NO: 1883384
uuaaguucugaaugagacu

SEQ ID NO: 2190317 - RNA, 19 nt, Artificial Sequence
  Description of Artificial Sequence: Synthetic oligonucleotide
  Antisense strand to SEQ ID NO: 2190316
agucucauucagaacuuaa

SEQ ID NO: 2190318 - RNA, 19 nt, Artificial Sequence
  Description of Artificial Sequence: Synthetic oligonucleotide
  Sense strand starting at position 2044 of SEQ ID NO: 1883384
gaguuucgacaaugaagaa

SEQ ID NO: 2190319 - RNA, 19 nt, Artificial Sequence
  Description of Artificial Sequence: Synthetic oligonucleotide
  Antisense strand to SEQ ID NO: 2190318
uucuucauugucgaaacuc

SEQ ID NO: 2190320 - RNA, 19 nt, Artificial Sequence
  Description of Artificial Sequence: Synthetic oligonucleotide
  Sense strand starting at position 2250 of SEQ ID NO: 1883384
gcacaucaggcuuaucaaa

SEQ ID NO: 2190321 - RNA, 19 nt, Artificial Sequence
  Description of Artificial Sequence: Synthetic oligonucleotide
  Antisense strand to SEQ ID NO: 2190320
uuugauaagccugaugugc

SEQ ID NO: 2190322 - RNA, 19 nt, Artificial Sequence
  Description of Artificial Sequence: Synthetic oligonucleotide
  Sense strand starting at position 2605 of SEQ ID NO: 1883384
agugguagcccugaauauc

SEQ ID NO: 2190323 - RNA, 19 nt, Artificial Sequence
  Description of Artificial Sequence: Synthetic oligonucleotide
  Antisense strand to SEQ ID NO: 2190322
gauauucagggcuaccacu

SEQ ID NO: 2190324 - RNA, 19 nt, Artificial Sequence
  Description of Artificial Sequence: Synthetic oligonucleotide
  Sense strand starting at position 2608 of SEQ ID NO: 1883384
gguagcccugaauaucuua

SEQ ID NO: 2190325 - RNA, 19 nt, Artificial Sequence
  Description of Artificial Sequence: Synthetic oligonucleotide
  Antisense strand to SEQ ID NO: 2190324
uaagauauucagggcuacc

SEQ ID NO: 2190326 - RNA, 19 nt, Artificial Sequence
  Description of Artificial Sequence: Synthetic oligonucleotide
  Sense strand starting at position 2658 of SEQ ID NO: 1883384
accagauaccauugucuca

SEQ ID NO: 2190327 - RNA, 19 nt, Artificial Sequence
  Description of Artificial Sequence: Synthetic oligonucleotide
  Antisense strand to SEQ ID NO: 2190326
ugagacaaugguaucuggu

SEQ ID NO: 2190328 - RNA, 19 nt, Artificial Sequence
  Description of Artificial Sequence: Synthetic oligonucleotide
  Sense strand starting at position 2713 of SEQ ID NO: 1883384
gucagagagguguaguacu

SEQ ID NO: 2190329 - RNA, 19 nt, Artificial Sequence
  Description of Artificial Sequence: Synthetic oligonucleotide
  Antisense strand to SEQ ID NO: 2190328
aguacuacaccucucugac

SEQ ID NO: 2190330 - RNA, 19 nt, Artificial Sequence
  Description of Artificial Sequence: Synthetic oligonucleotide
  Sense strand starting at position 2965 of SEQ ID NO: 1883384
gauaacagguggcuuauua

SEQ ID NO: 2190331 - RNA, 19 nt, Artificial Sequence
  Description of Artificial Sequence: Synthetic oligonucleotide
  Antisense strand to SEQ ID NO: 2190330
uaauaagccaccuguuauc

SEQ ID NO: 2190332 - RNA, 19 nt, Artificial Sequence
  Description of Artificial Sequence: Synthetic oligonucleotide
  Sense strand starting at position 3084 of SEQ ID NO: 1883384
uccugaugugcaggacuau

SEQ ID NO: 2190333 - RNA, 19 nt, Artificial Sequence
  Description of Artificial Sequence: Synthetic oligonucleotide
  Antisense strand to SEQ ID NO: 2190332
auaguccugcacaucagga

SEQ ID NO: 2190334 - RNA, 19 nt, Artificial Sequence
  Description of Artificial Sequence: Synthetic oligonucleotide
  Sense strand starting at position 3085 of SEQ ID NO: 1883384
ccugaugugcaggacuauu

SEQ ID NO: 2190335 - RNA, 19 nt, Artificial Sequence
  Description of Artificial Sequence: Synthetic oligonucleotide
  Antisense strand to SEQ ID NO: 2190334
aauaguccugcacaucagg

SEQ ID NO: 2190336 - RNA, 19 nt, Artificial Sequence
  Description of Artificial Sequence: Synthetic oligonucleotide
  Sense strand starting at position 3527 of SEQ ID NO: 1883384
uuaccaaauguuuggguuu

SEQ ID NO: 2190337 - RNA, 19 nt, Artificial Sequence
  Description of Artificial Sequence: Synthetic oligonucleotide
  Antisense strand to SEQ ID NO: 2190336
aaacccaaacauuugguaa

SEQ ID NO: 2190338 - RNA, 19 nt, Artificial Sequence
  Description of Artificial Sequence: Synthetic oligonucleotide
  Sense strand starting at position 3560 of SEQ ID NO: 1883384
cagauucugcuggguuaga

SEQ ID NO: 2190339 - RNA, 19 nt, Artificial Sequence
  Description of Artificial Sequence: Synthetic oligonucleotide
  Antisense strand to SEQ ID NO: 2190338
ucuaacccagcagaaucug

SEQ ID NO: 2190340 - RNA, 19 nt, Artificial Sequence
  Description of Artificial Sequence: Synthetic oligonucleotide
  Sense strand starting at position 3561 of SEQ ID NO: 1883384
agauucugcuggguuagaa

SEQ ID NO: 2190341 - RNA, 19 nt, Artificial Sequence
  Description of Artificial Sequence: Synthetic oligonucleotide
  Antisense strand to SEQ ID NO: 2190340
uucuaacccagcagaaucu

SEQ ID NO: 2190342 - RNA, 19 nt, Artificial Sequence
  Description of Artificial Sequence: Synthetic oligonucleotide
  Sense strand starting at position 3710 of SEQ ID NO: 1883384
accaaaugucagcaguuaa

SEQ ID NO: 2190343 - RNA, 19 nt, Artificial Sequence
  Description of Artificial Sequence: Synthetic oligonucleotide
  Antisense strand to SEQ ID NO: 2190342
uuaacugcugacauuuggu

SEQ ID NO: 2190344 - RNA, 19 nt, Artificial Sequence
  Description of Artificial Sequence: Synthetic oligonucleotide
  Sense strand starting at position 3732 of SEQ ID NO: 1883384
ugcacuagucauuauguca

SEQ ID NO: 2190345 - RNA, 19 nt, Artificial Sequence
  Description of Artificial Sequence: Synthetic oligonucleotide
  Antisense strand to SEQ ID NO: 2190344
ugacauaaugacuagugca

SEQ ID NO: 2190346 - RNA, 19 nt, Artificial Sequence
  Description of Artificial Sequence: Synthetic oligonucleotide
  Sense strand starting at position 3735 of SEQ ID NO: 1883384
acuagucauuaugucaacu

SEQ ID NO: 2190347 - RNA, 19 nt, Artificial Sequence
  Description of Artificial Sequence: Synthetic oligonucleotide
  Antisense strand to SEQ ID NO: 2190346
aguugacauaaugacuagu

SEQ ID NO: 2190348 - RNA, 19 nt, Artificial Sequence
  Description of Artificial Sequence: Synthetic oligonucleotide
  Sense strand starting at position 3890 of SEQ ID NO: 1883384
uaucuaauggucggaugga

SEQ ID NO: 2190349 - RNA, 19 nt, Artificial Sequence
  Description of Artificial Sequence: Synthetic oligonucleotide
  Antisense strand to SEQ ID NO: 2190348
uccauccgaccauuagaua

SEQ ID NO: 2190350 - RNA, 19 nt, Artificial Sequence
  Description of Artificial Sequence: Synthetic oligonucleotide
  Sense strand starting at position 3911 of SEQ ID NO: 1883384
auuagcuuccuauaggaau

SEQ ID NO: 2190351 - RNA, 19 nt, Artificial Sequence
  Description of Artificial Sequence: Synthetic oligonucleotide
  Antisense strand to SEQ ID NO: 2190350
auuccuauaggaagcuaau

SEQ ID NO: 2190352 - RNA, 19 nt, Artificial Sequence
  Description of Artificial Sequence: Synthetic oligonucleotide
  Sense strand starting at position 509 of SEQ ID NO: 1883385
uaaggaaagcuucgagaag

SEQ ID NO: 2190353 - RNA, 19 nt, Artificial Sequence
  Description of Artificial Sequence: Synthetic oligonucleotide
  Antisense strand to SEQ ID NO: 2190352
cuucucgaagcuuuccuua

SEQ ID NO: 2190354 - RNA, 19 nt, Artificial Sequence
  Description of Artificial Sequence: Synthetic oligonucleotide
  Sense strand starting at position 520 of SEQ ID NO: 1883385
ucgagaagagucgacauua

SEQ ID NO: 2190355 - RNA, 19 nt, Artificial Sequence
  Description of Artificial Sequence: Synthetic oligonucleotide
  Antisense strand to SEQ ID NO: 2190354
uaaugucgacucuucucga

SEQ ID NO: 2190356 - RNA, 19 nt, Artificial Sequence
  Description of Artificial Sequence: Synthetic oligonucleotide
  Sense strand starting at position 565 of SEQ ID NO: 1883385
gagcuuucaccgcggagag

SEQ ID NO: 2190357 - RNA, 19 nt, Artificial Sequence
  Description of Artificial Sequence: Synthetic oligonucleotide
  Antisense strand to SEQ ID NO: 2190356
cucuccgcggugaaagcuc

SEQ ID NO: 2190358 - RNA, 19 nt, Artificial Sequence
  Description of Artificial Sequence: Synthetic oligonucleotide
  Sense strand starting at position 566 of SEQ ID NO: 1883385
agcuuucaccgcggagaga

SEQ ID NO: 2190359 - RNA, 19 nt, Artificial Sequence
  Description of Artificial Sequence: Synthetic oligonucleotide
  Antisense strand to SEQ ID NO: 2190358
ucucuccgcggugaaagcu

SEQ ID NO: 2190360 - RNA, 19 nt, Artificial Sequence
  Description of Artificial Sequence: Synthetic oligonucleotide
  Sense strand starting at position 567 of SEQ ID NO: 1883385
gcuuucaccgcggagagaa

SEQ ID NO: 2190361 - RNA, 19 nt, Artificial Sequence
  Description of Artificial Sequence: Synthetic oligonucleotide
  Antisense strand to SEQ ID NO: 2190360
uucucuccgcggugaaagc

SEQ ID NO: 2190362 - RNA, 19 nt, Artificial Sequence
  Description of Artificial Sequence: Synthetic oligonucleotide
  Sense strand starting at position 701 of SEQ ID NO: 1883385
ugaggacucccaugaucuc

SEQ ID NO: 2190363 - RNA, 19 nt, Artificial Sequence
  Description of Artificial Sequence: Synthetic oligonucleotide
  Antisense strand to SEQ ID NO: 2190362
gagaucaugggaguccuca

SEQ ID NO: 2190364 - RNA, 19 nt, Artificial Sequence
  Description of Artificial Sequence: Synthetic oligonucleotide
  Sense strand starting at position 836 of SEQ ID NO: 1883385
ggacauagauguccgggaa

SEQ ID NO: 2190365 - RNA, 19 nt, Artificial Sequence
  Description of Artificial Sequence: Synthetic oligonucleotide
  Antisense strand to SEQ ID NO: 2190364
uucccggacaucuaugucc

SEQ ID NO: 2190366 - RNA, 19 nt, Artificial Sequence
  Description of Artificial Sequence: Synthetic oligonucleotide
  Sense strand starting at position 837 of SEQ ID NO: 1883385
gacauagauguccgggaau

SEQ ID NO: 2190367 - RNA, 19 nt, Artificial Sequence
  Description of Artificial Sequence: Synthetic oligonucleotide
  Antisense strand to SEQ ID NO: 2190366
auucccggacaucuauguc

SEQ ID NO: 2190368 - RNA, 19 nt, Artificial Sequence
  Description of Artificial Sequence: Synthetic oligonucleotide
  Sense strand starting at position 839 of SEQ ID NO: 1883385
cauagauguccgggaauca

SEQ ID NO: 2190369 - RNA, 19 nt, Artificial Sequence
  Description of Artificial Sequence: Synthetic oligonucleotide
  Antisense strand to SEQ ID NO: 2190368
ugauucccggacaucuaug

SEQ ID NO: 2190370 - RNA, 19 nt, Artificial Sequence
  Description of Artificial Sequence: Synthetic oligonucleotide
  Sense strand starting at position 940 of SEQ ID NO: 1883385
cgggugaguucuggaggaa

SEQ ID NO: 2190371 - RNA, 19 nt, Artificial Sequence
  Description of Artificial Sequence: Synthetic oligonucleotide
  Antisense strand to SEQ ID NO: 2190370
uuccuccagaacucacccg

SEQ ID NO: 2190372 - RNA, 19 nt, Artificial Sequence
  Description of Artificial Sequence: Synthetic oligonucleotide
  Sense strand starting at position 943 of SEQ ID NO: 1883385
gugaguucuggaggaagga

SEQ ID NO: 2190373 - RNA, 19 nt, Artificial Sequence
  Description of Artificial Sequence: Synthetic oligonucleotide
  Antisense strand to SEQ ID NO: 2190372
uccuuccuccagaacucac

SEQ ID NO: 2190374 - RNA, 19 nt, Artificial Sequence
  Description of Artificial Sequence: Synthetic oligonucleotide
  Sense strand starting at position 1132 of SEQ ID NO: 1883385
ggaugcaggcccuaagaga

SEQ ID NO: 2190375 - RNA, 19 nt, Artificial Sequence
  Description of Artificial Sequence: Synthetic oligonucleotide
  Antisense strand to SEQ ID NO: 2190374
ucucuuagggccugcaucc

SEQ ID NO: 2190376 - RNA, 19 nt, Artificial Sequence
  Description of Artificial Sequence: Synthetic oligonucleotide
  Sense strand starting at position 1162 of SEQ ID NO: 1883385
cucuuaucuggcuguuaga

SEQ ID NO: 2190377 - RNA, 19 nt, Artificial Sequence
  Description of Artificial Sequence: Synthetic oligonucleotide
  Antisense strand to SEQ ID NO: 2190376
ucuaacagccagauaagag

SEQ ID NO: 2190378 - RNA, 19 nt, Artificial Sequence
  Description of Artificial Sequence: Synthetic oligonucleotide
  Sense strand starting at position 1175 of SEQ ID NO: 1883385
guuagaaggucugagggau

SEQ ID NO: 2190379 - RNA, 19 nt, Artificial Sequence
  Description of Artificial Sequence: Synthetic oligonucleotide
  Antisense strand to SEQ ID NO: 2190378
aucccucagaccuucuaac

SEQ ID NO: 2190380 - RNA, 19 nt, Artificial Sequence
  Description of Artificial Sequence: Synthetic oligonucleotide
  Sense strand starting at position 1219 of SEQ ID NO: 1883385
ucaccuuucuggucucaga

SEQ ID NO: 2190381 - RNA, 19 nt, Artificial Sequence
  Description of Artificial Sequence: Synthetic oligonucleotide
  Antisense strand to SEQ ID NO: 2190380
ucugagaccagaaagguga

SEQ ID NO: 2190382 - RNA, 19 nt, Artificial Sequence
  Description of Artificial Sequence: Synthetic oligonucleotide
  Sense strand starting at position 1333 of SEQ ID NO: 1883385
aguucaucaguggguagau

SEQ ID NO: 2190383 - RNA, 19 nt, Artificial Sequence
  Description of Artificial Sequence: Synthetic oligonucleotide
  Antisense strand to SEQ ID NO: 2190382
aucuacccacugaugaacu

SEQ ID NO: 2190384 - RNA, 19 nt, Artificial Sequence
  Description of Artificial Sequence: Synthetic oligonucleotide
  Sense strand starting at position 1334 of SEQ ID NO: 1883385
guucaucaguggguagauu

SEQ ID NO: 2190385 - RNA, 19 nt, Artificial Sequence
  Description of Artificial Sequence: Synthetic oligonucleotide
  Antisense strand to SEQ ID NO: 2190384
aaucuacccacugaugaac

SEQ ID NO: 2190386 - RNA, 19 nt, Artificial Sequence
  Description of Artificial Sequence: Synthetic oligonucleotide
  Sense strand starting at position 1465 of SEQ ID NO: 1883385
gaaggagacuuccgaguac

SEQ ID NO: 2190387 - RNA, 19 nt, Artificial Sequence
  Description of Artificial Sequence: Synthetic oligonucleotide
  Antisense strand to SEQ ID NO: 2190386
guacucggaagucuccuuc

SEQ ID NO: 2190388 - RNA, 19 nt, Artificial Sequence
  Description of Artificial Sequence: Synthetic oligonucleotide
  Sense strand starting at position 1476 of SEQ ID NO: 1883385
ccgaguaccuggcauggaa

SEQ ID NO: 2190389 - RNA, 19 nt, Artificial Sequence
  Description of Artificial Sequence: Synthetic oligonucleotide
  Antisense strand to SEQ ID NO: 2190388
uuccaugccagguacucgg

SEQ ID NO: 2190390 - RNA, 19 nt, Artificial Sequence
  Description of Artificial Sequence: Synthetic oligonucleotide
  Sense strand starting at position 1672 of SEQ ID NO: 1883385
accacauucucaggcauga

SEQ ID NO: 2190391 - RNA, 19 nt, Artificial Sequence
  Description of Artificial Sequence: Synthetic oligonucleotide
  Antisense strand to SEQ ID NO: 2190390
ucaugccugagaauguggu

SEQ ID NO: 2190392 - RNA, 19 nt, Artificial Sequence
  Description of Artificial Sequence: Synthetic oligonucleotide
  Sense strand starting at position 2358 of SEQ ID NO: 1883385
uccugaggccauggaguua

SEQ ID NO: 2190393 - RNA, 19 nt, Artificial Sequence
  Description of Artificial Sequence: Synthetic oligonucleotide
  Antisense strand to SEQ ID NO: 2190392
uaacuccauggccucagga

SEQ ID NO: 2190394 - RNA, 19 nt, Artificial Sequence
  Description of Artificial Sequence: Synthetic oligonucleotide
  Sense strand starting at position 2369 of SEQ ID NO: 1883385
uggaguuaagucuagacuc

SEQ ID NO: 2190395 - RNA, 19 nt, Artificial Sequence
  Description of Artificial Sequence: Synthetic oligonucleotide
  Antisense strand to SEQ ID NO: 2190394
gagucuagacuuaacucca

SEQ ID NO: 2190396 - RNA, 19 nt, Artificial Sequence
  Description of Artificial Sequence: Synthetic oligonucleotide
  Sense strand starting at position 2552 of SEQ ID NO: 1883385
acucuaaagccuugggcaa

SEQ ID NO: 2190397 - RNA, 19 nt, Artificial Sequence
  Description of Artificial Sequence: Synthetic oligonucleotide
  Antisense strand to SEQ ID NO: 2190396
uugcccaaggcuuuagagu

SEQ ID NO: 2190398 - RNA, 19 nt, Artificial Sequence
  Description of Artificial Sequence: Synthetic oligonucleotide
  Sense strand starting at position 2553 of SEQ ID NO: 1883385
cucuaaagccuugggcaaa

SEQ ID NO: 2190399 - RNA, 19 nt, Artificial Sequence
  Description of Artificial Sequence: Synthetic oligonucleotide
  Antisense strand to SEQ ID NO: 2190398
uuugcccaaggcuuuagag

SEQ ID NO: 2190400 - RNA, 19 nt, Artificial Sequence
  Description of Artificial Sequence: Synthetic oligonucleotide
  Sense strand starting at position 2572 of SEQ ID NO: 1883385
ggacucaucuccucugaac

SEQ ID NO: 2190401 - RNA, 19 nt, Artificial Sequence
  Description of Artificial Sequence: Synthetic oligonucleotide
  Antisense strand to SEQ ID NO: 2190400
guucagaggagaugagucc

SEQ ID NO: 2190402 - RNA, 19 nt, Artificial Sequence
  Description of Artificial Sequence: Synthetic oligonucleotide
  Sense strand starting at position 2647 of SEQ ID NO: 1883385
uugccuucuuguccuuaga

SEQ ID NO: 2190403 - RNA, 19 nt, Artificial Sequence
  Description of Artificial Sequence: Synthetic oligonucleotide
  Antisense strand to SEQ ID NO: 2190402
ucuaaggacaagaaggcaa

SEQ ID NO: 2190404 - RNA, 19 nt, Artificial Sequence
  Description of Artificial Sequence: Synthetic oligonucleotide
  Sense strand starting at position 2649 of SEQ ID NO: 1883385
gccuucuuguccuuagaau

SEQ ID NO: 2190405 - RNA, 19 nt, Artificial Sequence
  Description of Artificial Sequence: Synthetic oligonucleotide
  Antisense strand to SEQ ID NO: 2190404
auucuaaggacaagaaggc

SEQ ID NO: 2190406 - RNA, 19 nt, Artificial Sequence
  Description of Artificial Sequence: Synthetic oligonucleotide
  Sense strand starting at position 2650 of SEQ ID NO: 1883385
ccuucuuguccuuagaaug

SEQ ID NO: 2190407 - RNA, 19 nt, Artificial Sequence
  Description of Artificial Sequence: Synthetic oligonucleotide
  Antisense strand to SEQ ID NO: 2190406
cauucuaaggacaagaagg

SEQ ID NO: 2190408 - RNA, 19 nt, Artificial Sequence
  Description of Artificial Sequence: Synthetic oligonucleotide
  Sense strand starting at position 2736 of SEQ ID NO: 1883385
ggugcagucagcugguaua

SEQ ID NO: 2190409 - RNA, 19 nt, Artificial Sequence
  Description of Artificial Sequence: Synthetic oligonucleotide
  Antisense strand to SEQ ID NO: 2190408
uauaccagcugacugcacc

SEQ ID NO: 2190410 - RNA, 19 nt, Artificial Sequence
  Description of Artificial Sequence: Synthetic oligonucleotide
  Sense strand starting at position 2772 of SEQ ID NO: 1883385
cugugauguucucccaggu

SEQ ID NO: 2190411 - RNA, 19 nt, Artificial Sequence
  Description of Artificial Sequence: Synthetic oligonucleotide
  Antisense strand to SEQ ID NO: 2190410
accugggagaacaucacag

SEQ ID NO: 2190412 - RNA, 19 nt, Artificial Sequence
  Description of Artificial Sequence: Synthetic oligonucleotide
  Sense strand starting at position 3090 of SEQ ID NO: 1883385
agaagauguccacagcggu

SEQ ID NO: 2190413 - RNA, 19 nt, Artificial Sequence
  Description of Artificial Sequence: Synthetic oligonucleotide
  Antisense strand to SEQ ID NO: 2190412
accgcuguggacaucuucu

SEQ ID NO: 2190414 - RNA, 19 nt, Artificial Sequence
  Description of Artificial Sequence: Synthetic oligonucleotide
  Sense strand starting at position 3266 of SEQ ID NO: 1883385
cggagaucaucuggaagug

SEQ ID NO: 2190415 - RNA, 19 nt, Artificial Sequence
  Description of Artificial Sequence: Synthetic oligonucleotide
  Antisense strand to SEQ ID NO: 2190414
cacuuccagaugaucuccg

SEQ ID NO: 2190416 - RNA, 19 nt, Artificial Sequence
  Description of Artificial Sequence: Synthetic oligonucleotide
  Sense strand starting at position 3347 of SEQ ID NO: 1883385
cgcacuuaccauuggagaa

SEQ ID NO: 2190417 - RNA, 19 nt, Artificial Sequence
  Description of Artificial Sequence: Synthetic oligonucleotide
  Antisense strand to SEQ ID NO: 2190416
uucuccaaugguaagugcg

SEQ ID NO: 2190418 - RNA, 19 nt, Artificial Sequence
  Description of Artificial Sequence: Synthetic oligonucleotide
  Sense strand starting at position 3348 of SEQ ID NO: 1883385
gcacuuaccauuggagaag

SEQ ID NO: 2190419 - RNA, 19 nt, Artificial Sequence
  Description of Artificial Sequence: Synthetic oligonucleotide
  Antisense strand to SEQ ID NO: 2190418
cuucuccaaugguaagugc

SEQ ID NO: 2190420 - RNA, 19 nt, Artificial Sequence
  Description of Artificial Sequence: Synthetic oligonucleotide
  Sense strand starting at position 3516 of SEQ ID NO: 1883385
ggccguugugcugaaugaa

SEQ ID NO: 2190421 - RNA, 19 nt, Artificial Sequence
  Description of Artificial Sequence: Synthetic oligonucleotide
  Antisense strand to SEQ ID NO: 2190420
uucauucagcacaacggcc

SEQ ID NO: 2190422 - RNA, 19 nt, Artificial Sequence
  Description of Artificial Sequence: Synthetic oligonucleotide
  Sense strand starting at position 3519 of SEQ ID NO: 1883385
cguugugcugaaugaagau

SEQ ID NO: 2190423 - RNA, 19 nt, Artificial Sequence
  Description of Artificial Sequence: Synthetic oligonucleotide
  Antisense strand to SEQ ID NO: 2190422
aucuucauucagcacaacg

SEQ ID NO: 2190424 - RNA, 19 nt, Artificial Sequence
  Description of Artificial Sequence: Synthetic oligonucleotide
  Sense strand starting at position 3549 of SEQ ID NO: 1883385
ucagguucccguggaugau

SEQ ID NO: 2190425 - RNA, 19 nt, Artificial Sequence
  Description of Artificial Sequence: Synthetic oligonucleotide
  Antisense strand to SEQ ID NO: 2190424
aucauccacgggaaccuga

SEQ ID NO: 2190426 - RNA, 19 nt, Artificial Sequence
  Description of Artificial Sequence: Synthetic oligonucleotide
  Sense strand starting at position 3550 of SEQ ID NO: 1883385
cagguucccguggaugauu

SEQ ID NO: 2190427 - RNA, 19 nt, Artificial Sequence
  Description of Artificial Sequence: Synthetic oligonucleotide
  Antisense strand to SEQ ID NO: 2190426
aaucauccacgggaaccug

SEQ ID NO: 2190428 - RNA, 19 nt, Artificial Sequence
  Description of Artificial Sequence: Synthetic oligonucleotide
  Sense strand starting at position 3958 of SEQ ID NO: 1883385
ugaggaauugcuugaggcu

SEQ ID NO: 2190429 - RNA, 19 nt, Artificial Sequence
  Description of Artificial Sequence: Synthetic oligonucleotide
  Antisense strand to SEQ ID NO: 2190428
agccucaagcaauuccuca

SEQ ID NO: 2190430 - RNA, 19 nt, Artificial Sequence
  Description of Artificial Sequence: Synthetic oligonucleotide
  Sense strand starting at position 3981 of SEQ ID NO: 1883385
gaugacacguacucuguga

SEQ ID NO: 2190431 - RNA, 19 nt, Artificial Sequence
  Description of Artificial Sequence: Synthetic oligonucleotide
  Antisense strand to SEQ ID NO: 2190430
ucacagaguacgugucauc

SEQ ID NO: 2190432 - RNA, 19 nt, Artificial Sequence
  Description of Artificial Sequence: Synthetic oligonucleotide
  Sense strand starting at position 184 of SEQ ID NO: 1883386
gggcacucucuggaucaca

SEQ ID NO: 2190433 - RNA, 19 nt, Artificial Sequence
  Description of Artificial Sequence: Synthetic oligonucleotide
  Antisense strand to SEQ ID NO: 2190432
ugugauccagagagugccc

SEQ ID NO: 2190434 - RNA, 19 nt, Artificial Sequence
  Description of Artificial Sequence: Synthetic oligonucleotide
  Sense strand starting at position 236 of SEQ ID NO: 1883386
gcccaagguuuguucucau

SEQ ID NO: 2190435 - RNA, 19 nt, Artificial Sequence
  Description of Artificial Sequence: Synthetic oligonucleotide
  Antisense strand to SEQ ID NO: 2190434
augagaacaaaccuugggc

SEQ ID NO: 2190436 - RNA, 19 nt, Artificial Sequence
  Description of Artificial Sequence: Synthetic oligonucleotide
  Sense strand starting at position 765 of SEQ ID NO: 1883386
accuguuacugucgaugau

SEQ ID NO: 2190437 - RNA, 19 nt, Artificial Sequence
  Description of Artificial Sequence: Synthetic oligonucleotide
  Antisense strand to SEQ ID NO: 2190436
aucaucgacaguaacaggu

SEQ ID NO: 2190438 - RNA, 19 nt, Artificial Sequence
  Description of Artificial Sequence: Synthetic oligonucleotide
  Sense strand starting at position 1106 of SEQ ID NO: 1883386
gccgcucagguaugacaaa

SEQ ID NO: 2190439 - RNA, 19 nt, Artificial Sequence
  Description of Artificial Sequence: Synthetic oligonucleotide
  Antisense strand to SEQ ID NO: 2190438
uuugucauaccugagcggc

SEQ ID NO: 2190440 - RNA, 19 nt, Artificial Sequence
  Description of Artificial Sequence: Synthetic oligonucleotide
  Sense strand starting at position 1350 of SEQ ID NO: 1883386
ggaagcucucagugcugau

SEQ ID NO: 2190441 - RNA, 19 nt, Artificial Sequence
  Description of Artificial Sequence: Synthetic oligonucleotide
  Antisense strand to SEQ ID NO: 2190440
aucagcacugagagcuucc

SEQ ID NO: 2190442 - RNA, 19 nt, Artificial Sequence
  Description of Artificial Sequence: Synthetic oligonucleotide
  Sense strand starting at position 2455 of SEQ ID NO: 1883386
cggccagauccugacucuu

SEQ ID NO: 2190443 - RNA, 19 nt, Artificial Sequence
  Description of Artificial Sequence: Synthetic oligonucleotide
  Antisense strand to SEQ ID NO: 2190442
aagagucaggaucuggccg

SEQ ID NO: 2190444 - RNA, 19 nt, Artificial Sequence
  Description of Artificial Sequence: Synthetic oligonucleotide
  Sense strand starting at position 2457 of SEQ ID NO: 1883386
gccagauccugacucuuac

SEQ ID NO: 2190445 - RNA, 19 nt, Artificial Sequence
  Description of Artificial Sequence: Synthetic oligonucleotide
  Antisense strand to SEQ ID NO: 2190444
guaagagucaggaucuggc

SEQ ID NO: 2190446 - RNA, 19 nt, Artificial Sequence
  Description of Artificial Sequence: Synthetic oligonucleotide
  Sense strand starting at position 2467 of SEQ ID NO: 1883386
gacucuuaccuuugcggua

SEQ ID NO: 2190447 - RNA, 19 nt, Artificial Sequence
  Description of Artificial Sequence: Synthetic oligonucleotide
  Antisense strand to SEQ ID NO: 2190446
uaccgcaaagguaagaguc

SEQ ID NO: 2190448 - RNA, 19 nt, Artificial Sequence
  Description of Artificial Sequence: Synthetic oligonucleotide
  Sense strand starting at position 2718 of SEQ ID NO: 1883386
cgaagacgugcucgaauuc

SEQ ID NO: 2190449 - RNA, 19 nt, Artificial Sequence
  Description of Artificial Sequence: Synthetic oligonucleotide
  Antisense strand to SEQ ID NO: 2190448
gaauucgagcacgucuucg

SEQ ID NO: 2190450 - RNA, 19 nt, Artificial Sequence
  Description of Artificial Sequence: Synthetic oligonucleotide
  Sense strand starting at position 3424 of SEQ ID NO: 1883386
ugcggaugccucgagauag

SEQ ID NO: 2190451 - RNA, 19 nt, Artificial Sequence
  Description of Artificial Sequence: Synthetic oligonucleotide
  Antisense strand to SEQ ID NO: 2190450
cuaucucgaggcauccgca

SEQ ID NO: 2190452 - RNA, 19 nt, Artificial Sequence
  Description of Artificial Sequence: Synthetic oligonucleotide
  Sense strand starting at position 3425 of SEQ ID NO: 1883386
gcggaugccucgagauagc

SEQ ID NO: 2190453 - RNA, 19 nt, Artificial Sequence
  Description of Artificial Sequence: Synthetic oligonucleotide
  Antisense strand to SEQ ID NO: 2190452
gcuaucucgaggcauccgc

SEQ ID NO: 2190454 - RNA, 19 nt, Artificial Sequence
  Description of Artificial Sequence: Synthetic oligonucleotide
  Sense strand starting at position 4 of SEQ ID NO: 1883387
uuaaauuagccaggugagu

SEQ ID NO: 2190455 - RNA, 19 nt, Artificial Sequence
  Description of Artificial Sequence: Synthetic oligonucleotide
  Antisense strand to SEQ ID NO: 2190454
acucaccuggcuaauuuaa

SEQ ID NO: 2190456 - RNA, 19 nt, Artificial Sequence
  Description of Artificial Sequence: Synthetic oligonucleotide
  Sense strand starting at position 444 of SEQ ID NO: 1883387
ucaagugauccaugagaac

SEQ ID NO: 2190457 - RNA, 19 nt, Artificial Sequence
  Description of Artificial Sequence: Synthetic oligonucleotide
  Antisense strand to SEQ ID NO: 2190456
guucucauggaucacuuga

SEQ ID NO: 2190458 - RNA, 19 nt, Artificial Sequence
  Description of Artificial Sequence: Synthetic oligonucleotide
  Sense strand starting at position 883 of SEQ ID NO: 1883387
ccagcugaguucuuccuca

SEQ ID NO: 2190459 - RNA, 19 nt, Artificial Sequence
  Description of Artificial Sequence: Synthetic oligonucleotide
  Antisense strand to SEQ ID NO: 2190458
ugaggaagaacucagcugg

SEQ ID NO: 2190460 - RNA, 19 nt, Artificial Sequence
  Description of Artificial Sequence: Synthetic oligonucleotide
  Sense strand starting at position 939 of SEQ ID NO: 1883387
guaacagauuccucagucu

SEQ ID NO: 2190461 - RNA, 19 nt, Artificial Sequence
  Description of Artificial Sequence: Synthetic oligonucleotide
  Antisense strand to SEQ ID NO: 2190460
agacugaggaaucuguuac

SEQ ID NO: 2190462 - RNA, 19 nt, Artificial Sequence
  Description of Artificial Sequence: Synthetic oligonucleotide
  Sense strand starting at position 953 of SEQ ID NO: 1883387
agucuaauggccuggcuca

SEQ ID NO: 2190463 - RNA, 19 nt, Artificial Sequence
  Description of Artificial Sequence: Synthetic oligonucleotide
  Antisense strand to SEQ ID NO: 2190462
ugagccaggccauuagacu

SEQ ID NO: 2190464 - RNA, 19 nt, Artificial Sequence
  Description of Artificial Sequence: Synthetic oligonucleotide
  Sense strand starting at position 954 of SEQ ID NO: 1883387
gucuaauggccuggcucau

SEQ ID NO: 2190465 - RNA, 19 nt, Artificial Sequence
  Description of Artificial Sequence: Synthetic oligonucleotide
  Antisense strand to SEQ ID NO: 2190464
augagccaggccauuagac

SEQ ID NO: 2190466 - RNA, 19 nt, Artificial Sequence
  Description of Artificial Sequence: Synthetic oligonucleotide
  Sense strand starting at position 1004 of SEQ ID NO: 1883387
uugaguccuuacugggaca

SEQ ID NO: 2190467 - RNA, 19 nt, Artificial Sequence
  Description of Artificial Sequence: Synthetic oligonucleotide
  Antisense strand to SEQ ID NO: 2190466
ugucccaguaaggacucaa

SEQ ID NO: 2190468 - RNA, 19 nt, Artificial Sequence
  Description of Artificial Sequence: Synthetic oligonucleotide
  Sense strand starting at position 1005 of SEQ ID NO: 1883387
ugaguccuuacugggacau

SEQ ID NO: 2190469 - RNA, 19 nt, Artificial Sequence
  Description of Artificial Sequence: Synthetic oligonucleotide
  Antisense strand to SEQ ID NO: 2190468
augucccaguaaggacuca

SEQ ID NO: 2190470 - RNA, 19 nt, Artificial Sequence
  Description of Artificial Sequence: Synthetic oligonucleotide
  Sense strand starting at position 1083 of SEQ ID NO: 1883387
ggguuugaaucaggcuaca

SEQ ID NO: 2190471 - RNA, 19 nt, Artificial Sequence
  Description of Artificial Sequence: Synthetic oligonucleotide
  Antisense strand to SEQ ID NO: 2190470
uguagccugauucaaaccc

SEQ ID NO: 2190472 - RNA, 19 nt, Artificial Sequence
  Description of Artificial Sequence: Synthetic oligonucleotide
  Sense strand starting at position 1124 of SEQ ID NO: 1883387
gggcgagggucccuaauca

SEQ ID NO: 2190473 - RNA, 19 nt, Artificial Sequence
  Description of Artificial Sequence: Synthetic oligonucleotide
  Antisense strand to SEQ ID NO: 2190472
ugauuagggacccucgccc

SEQ ID NO: 2190474 - RNA, 19 nt, Artificial Sequence
  Description of Artificial Sequence: Synthetic oligonucleotide
  Sense strand starting at position 1194 of SEQ ID NO: 1883387
aagugcuguuaggugauaa

SEQ ID NO: 2190475 - RNA, 19 nt, Artificial Sequence
  Description of Artificial Sequence: Synthetic oligonucleotide
  Antisense strand to SEQ ID NO: 2190474
uuaucaccuaacagcacuu

SEQ ID NO: 2190476 - RNA, 19 nt, Artificial Sequence
  Description of Artificial Sequence: Synthetic oligonucleotide
  Sense strand starting at position 1195 of SEQ ID NO: 1883387
agugcuguuaggugauaac

SEQ ID NO: 2190477 - RNA, 19 nt, Artificial Sequence
  Description of Artificial Sequence: Synthetic oligonucleotide
  Antisense strand to SEQ ID NO: 2190476
guuaucaccuaacagcacu

SEQ ID NO: 2190478 - RNA, 19 nt, Artificial Sequence
  Description of Artificial Sequence: Synthetic oligonucleotide
  Sense strand starting at position 1198 of SEQ ID NO: 1883387
gcuguuaggugauaacgua

SEQ ID NO: 2190479 - RNA, 19 nt, Artificial Sequence
  Description of Artificial Sequence: Synthetic oligonucleotide
  Antisense strand to SEQ ID NO: 2190478
uacguuaucaccuaacagc

SEQ ID NO: 2190480 - RNA, 19 nt, Artificial Sequence
  Description of Artificial Sequence: Synthetic oligonucleotide
  Sense strand starting at position 1719 of SEQ ID NO: 1883387
ggcucaccugcacauagau

SEQ ID NO: 2190481 - RNA, 19 nt, Artificial Sequence
  Description of Artificial Sequence: Synthetic oligonucleotide
  Antisense strand to SEQ ID NO: 2190480
aucuaugugcaggugagcc

SEQ ID NO: 2190482 - RNA, 19 nt, Artificial Sequence
  Description of Artificial Sequence: Synthetic oligonucleotide
  Sense strand starting at position 2307 of SEQ ID NO: 1883387
caaccugauuuggaguuau

SEQ ID NO: 2190483 - RNA, 19 nt, Artificial Sequence
  Description of Artificial Sequence: Synthetic oligonucleotide
  Antisense strand to SEQ ID NO: 2190482
auaacuccaaaucagguug

SEQ ID NO: 2190484 - RNA, 19 nt, Artificial Sequence
  Description of Artificial Sequence: Synthetic oligonucleotide
  Sense strand starting at position 2346 of SEQ ID NO: 1883387
gucuuucugcucugcauaa

SEQ ID NO: 2190485 - RNA, 19 nt, Artificial Sequence
  Description of Artificial Sequence: Synthetic oligonucleotide
  Antisense strand to SEQ ID NO: 2190484
uuaugcagagcagaaagac

SEQ ID NO: 2190486 - RNA, 19 nt, Artificial Sequence
  Description of Artificial Sequence: Synthetic oligonucleotide
  Sense strand starting at position 2348 of SEQ ID NO: 1883387
cuuucugcucugcauaagu

SEQ ID NO: 2190487 - RNA, 19 nt, Artificial Sequence
  Description of Artificial Sequence: Synthetic oligonucleotide
  Antisense strand to SEQ ID NO: 2190486
acuuaugcagagcagaaag

SEQ ID NO: 2190488 - RNA, 19 nt, Artificial Sequence
  Description of Artificial Sequence: Synthetic oligonucleotide
  Sense strand starting at position 2359 of SEQ ID NO: 1883387
gcauaagugccuugcuugu

SEQ ID NO: 2190489 - RNA, 19 nt, Artificial Sequence
  Description of Artificial Sequence: Synthetic oligonucleotide
  Antisense strand to SEQ ID NO: 2190488
acaagcaaggcacuuaugc

SEQ ID NO: 2190490 - RNA, 19 nt, Artificial Sequence
  Description of Artificial Sequence: Synthetic oligonucleotide
  Sense strand starting at position 2435 of SEQ ID NO: 1883387
acacucaugcgcuaagcaa

SEQ ID NO: 2190491 - RNA, 19 nt, Artificial Sequence
  Description of Artificial Sequence: Synthetic oligonucleotide
  Antisense strand to SEQ ID NO: 2190490
uugcuuagcgcaugagugu

SEQ ID NO: 2190492 - RNA, 19 nt, Artificial Sequence
  Description of Artificial Sequence: Synthetic oligonucleotide
  Sense strand starting at position 2552 of SEQ ID NO: 1883387
uuauguuccagcgaggaaa

SEQ ID NO: 2190493 - RNA, 19 nt, Artificial Sequence
  Description of Artificial Sequence: Synthetic oligonucleotide
  Antisense strand to SEQ ID NO: 2190492
uuuccucgcuggaacauaa

SEQ ID NO: 2190494 - RNA, 19 nt, Artificial Sequence
  Description of Artificial Sequence: Synthetic oligonucleotide
  Sense strand starting at position 2595 of SEQ ID NO: 1883387
auaggcauuugagauugua

SEQ ID NO: 2190495 - RNA, 19 nt, Artificial Sequence
  Description of Artificial Sequence: Synthetic oligonucleotide
  Antisense strand to SEQ ID NO: 2190494
uacaaucucaaaugccuau

SEQ ID NO: 2190496 - RNA, 19 nt, Artificial Sequence
  Description of Artificial Sequence: Synthetic oligonucleotide
  Sense strand starting at position 2603 of SEQ ID NO: 1883387
uugagauuguaggugcaca

SEQ ID NO: 2190497 - RNA, 19 nt, Artificial Sequence
  Description of Artificial Sequence: Synthetic oligonucleotide
  Antisense strand to SEQ ID NO: 2190496
ugugcaccuacaaucucaa

SEQ ID NO: 2190498 - RNA, 19 nt, Artificial Sequence
  Description of Artificial Sequence: Synthetic oligonucleotide
  Sense strand starting at position 2644 of SEQ ID NO: 1883387
cgagaaguaccgcguggau

SEQ ID NO: 2190499 - RNA, 19 nt, Artificial Sequence
  Description of Artificial Sequence: Synthetic oligonucleotide
  Antisense strand to SEQ ID NO: 2190498
auccacgcgguacuucucg

SEQ ID NO: 2190500 - RNA, 19 nt, Artificial Sequence
  Description of Artificial Sequence: Synthetic oligonucleotide
  Sense strand starting at position 2646 of SEQ ID NO: 1883387
agaaguaccgcguggauaa

SEQ ID NO: 2190501 - RNA, 19 nt, Artificial Sequence
  Description of Artificial Sequence: Synthetic oligonucleotide
  Antisense strand to SEQ ID NO: 2190500
uuauccacgcgguacuucu

SEQ ID NO: 2190502 - RNA, 19 nt, Artificial Sequence
  Description of Artificial Sequence: Synthetic oligonucleotide
  Sense strand starting at position 2647 of SEQ ID NO: 1883387
gaaguaccgcguggauaau

SEQ ID NO: 2190503 - RNA, 19 nt, Artificial Sequence
  Description of Artificial Sequence: Synthetic oligonucleotide
  Antisense strand to SEQ ID NO: 2190502
auuauccacgcgguacuuc

SEQ ID NO: 2190504 - RNA, 19 nt, Artificial Sequence
  Description of Artificial Sequence: Synthetic oligonucleotide
  Sense strand starting at position 2661 of SEQ ID NO: 1883387
auaauaaggucgucuggga

SEQ ID NO: 2190505 - RNA, 19 nt, Artificial Sequence
  Description of Artificial Sequence: Synthetic oligonucleotide
  Antisense strand to SEQ ID NO: 2190504
ucccagacgaccuuauuau

SEQ ID NO: 2190506 - RNA, 19 nt, Artificial Sequence
  Description of Artificial Sequence: Synthetic oligonucleotide
  Sense strand starting at position 2681 of SEQ ID NO: 1883387
ggagugacgucggaguaga

SEQ ID NO: 2190507 - RNA, 19 nt, Artificial Sequence
  Description of Artificial Sequence: Synthetic oligonucleotide
  Antisense strand to SEQ ID NO: 2190506
ucuacuccgacgucacucc

SEQ ID NO: 2190508 - RNA, 19 nt, Artificial Sequence
  Description of Artificial Sequence: Synthetic oligonucleotide
  Sense strand starting at position 2822 of SEQ ID NO: 1883387
uugcguuuacuccgaguga

SEQ ID NO: 2190509 - RNA, 19 nt, Artificial Sequence
  Description of Artificial Sequence: Synthetic oligonucleotide
  Antisense strand to SEQ ID NO: 2190508
ucacucggaguaaacgcaa

SEQ ID NO: 2190510 - RNA, 19 nt, Artificial Sequence
  Description of Artificial Sequence: Synthetic oligonucleotide
  Sense strand starting at position 2824 of SEQ ID NO: 1883387
gcguuuacuccgagugaga

SEQ ID NO: 2190511 - RNA, 19 nt, Artificial Sequence
  Description of Artificial Sequence: Synthetic oligonucleotide
  Antisense strand to SEQ ID NO: 2190510
ucucacucggaguaaacgc

SEQ ID NO: 2190512 - RNA, 19 nt, Artificial Sequence
  Description of Artificial Sequence: Synthetic oligonucleotide
  Sense strand starting at position 2826 of SEQ ID NO: 1883387
guuuacuccgagugagaug

SEQ ID NO: 2190513 - RNA, 19 nt, Artificial Sequence
  Description of Artificial Sequence: Synthetic oligonucleotide
  Antisense strand to SEQ ID NO: 2190512
caucucacucggaguaaac

SEQ ID NO: 2190514 - RNA, 19 nt, Artificial Sequence
  Description of Artificial Sequence: Synthetic oligonucleotide
  Sense strand starting at position 3333 of SEQ ID NO: 1883387
cacuuccuguccuggugaa

SEQ ID NO: 2190515 - RNA, 19 nt, Artificial Sequence
  Description of Artificial Sequence: Synthetic oligonucleotide
  Antisense strand to SEQ ID NO: 2190514
uucaccaggacaggaagug

SEQ ID NO: 2190516 - RNA, 19 nt, Artificial Sequence
  Description of Artificial Sequence: Synthetic oligonucleotide
  Sense strand starting at position 3518 of SEQ ID NO: 1883387
ggaggaauugcccagucac

SEQ ID NO: 2190517 - RNA, 19 nt, Artificial Sequence
  Description of Artificial Sequence: Synthetic oligonucleotide
  Antisense strand to SEQ ID NO: 2190516
gugacugggcaauuccucc

SEQ ID NO: 2190518 - RNA, 19 nt, Artificial Sequence
  Description of Artificial Sequence: Synthetic oligonucleotide
  Sense strand starting at position 3633 of SEQ ID NO: 1883387
aaggcauugagcgguccua

SEQ ID NO: 2190519 - RNA, 19 nt, Artificial Sequence
  Description of Artificial Sequence: Synthetic oligonucleotide
  Antisense strand to SEQ ID NO: 2190518
uaggaccgcucaaugccuu

SEQ ID NO: 2190520 - RNA, 19 nt, Artificial Sequence
  Description of Artificial Sequence: Synthetic oligonucleotide
  Sense strand starting at position 3806 of SEQ ID NO: 1883387
gguuguaugucuguuuauc

SEQ ID NO: 2190521 - RNA, 19 nt, Artificial Sequence
  Description of Artificial Sequence: Synthetic oligonucleotide
  Antisense strand to SEQ ID NO: 2190520
gauaaacagacauacaacc

SEQ ID NO: 2190522 - RNA, 19 nt, Artificial Sequence
  Description of Artificial Sequence: Synthetic oligonucleotide
  Sense strand starting at position 3814 of SEQ ID NO: 1883387
gucuguuuaucucuugcca

SEQ ID NO: 2190523 - RNA, 19 nt, Artificial Sequence
  Description of Artificial Sequence: Synthetic oligonucleotide
  Antisense strand to SEQ ID NO: 2190522
uggcaagagauaaacagac

SEQ ID NO: 2190524 - RNA, 19 nt, Artificial Sequence
  Description of Artificial Sequence: Synthetic oligonucleotide
  Sense strand starting at position 3818 of SEQ ID NO: 1883387
guuuaucucuugccacuua

SEQ ID NO: 2190525 - RNA, 19 nt, Artificial Sequence
  Description of Artificial Sequence: Synthetic oligonucleotide
  Antisense strand to SEQ ID NO: 2190524
uaaguggcaagagauaaac

SEQ ID NO: 2190526 - RNA, 19 nt, Artificial Sequence
  Description of Artificial Sequence: Synthetic oligonucleotide
  Sense strand starting at position 3868 of SEQ ID NO: 1883387
cuauuauuaugugcugcaa

SEQ ID NO: 2190527 - RNA, 19 nt, Artificial Sequence
  Description of Artificial Sequence: Synthetic oligonucleotide
  Antisense strand to SEQ ID NO: 2190526
uugcagcacauaauaauag

SEQ ID NO: 2190528 - RNA, 19 nt, Artificial Sequence
  Description of Artificial Sequence: Synthetic oligonucleotide
  Sense strand starting at position 3895 of SEQ ID NO: 1883387
uaucuaggcucagcuagau

SEQ ID NO: 2190529 - RNA, 19 nt, Artificial Sequence
  Description of Artificial Sequence: Synthetic oligonucleotide
  Antisense strand to SEQ ID NO: 2190528
aucuagcugagccuagaua

SEQ ID NO: 2190530 - RNA, 19 nt, Artificial Sequence
  Description of Artificial Sequence: Synthetic oligonucleotide
  Sense strand starting at position 3899 of SEQ ID NO: 1883387
uaggcucagcuagauaguu

SEQ ID NO: 2190531 - RNA, 19 nt, Artificial Sequence
  Description of Artificial Sequence: Synthetic oligonucleotide
  Antisense strand to SEQ ID NO: 2190530
aacuaucuagcugagccua

SEQ ID NO: 2190532 - RNA, 19 nt, Artificial Sequence
  Description of Artificial Sequence: Synthetic oligonucleotide
  Sense strand starting at position 3907 of SEQ ID NO: 1883387
gcuagauaguuugcacuua

SEQ ID NO: 2190533 - RNA, 19 nt, Artificial Sequence
  Description of Artificial Sequence: Synthetic oligonucleotide
  Antisense strand to SEQ ID NO: 2190532
uaagugcaaacuaucuagc

SEQ ID NO: 2190534 - RNA, 19 nt, Artificial Sequence
  Description of Artificial Sequence: Synthetic oligonucleotide
  Sense strand starting at position 471 of SEQ ID NO: 1883388
ccagguuccaagugaagga

SEQ ID NO: 2190535 - RNA, 19 nt, Artificial Sequence
  Description of Artificial Sequence: Synthetic oligonucleotide
  Antisense strand to SEQ ID NO: 2190534
uccuucacuuggaaccugg

SEQ ID NO: 2190536 - RNA, 19 nt, Artificial Sequence
  Description of Artificial Sequence: Synthetic oligonucleotide
  Sense strand starting at position 520 of SEQ ID NO: 1883388
ggcgaauagccauggacau

SEQ ID NO: 2190537 - RNA, 19 nt, Artificial Sequence
  Description of Artificial Sequence: Synthetic oligonucleotide
  Antisense strand to SEQ ID NO: 2190536
auguccauggcuauucgcc

SEQ ID NO: 2190538 - RNA, 19 nt, Artificial Sequence
  Description of Artificial Sequence: Synthetic oligonucleotide
  Sense strand starting at position 521 of SEQ ID NO: 1883388
gcgaauagccauggacaua

SEQ ID NO: 2190539 - RNA, 19 nt, Artificial Sequence
  Description of Artificial Sequence: Synthetic oligonucleotide
  Antisense strand to SEQ ID NO: 2190538
uauguccauggcuauucgc

SEQ ID NO: 2190540 - RNA, 19 nt, Artificial Sequence
  Description of Artificial Sequence: Synthetic oligonucleotide
  Sense strand starting at position 533 of SEQ ID NO: 1883388
ggacauagccauuguguac

SEQ ID NO: 2190541 - RNA, 19 nt, Artificial Sequence
  Description of Artificial Sequence: Synthetic oligonucleotide
  Antisense strand to SEQ ID NO: 2190540
guacacaauggcuaugucc

SEQ ID NO: 2190542 - RNA, 19 nt, Artificial Sequence
  Description of Artificial Sequence: Synthetic oligonucleotide
  Sense strand starting at position 1262 of SEQ ID NO: 1883388
cauaguugagcacguagua

SEQ ID NO: 2190543 - RNA, 19 nt, Artificial Sequence
  Description of Artificial Sequence: Synthetic oligonucleotide
  Antisense strand to SEQ ID NO: 2190542
uacuacgugcucaacuaug

SEQ ID NO: 2190544 - RNA, 19 nt, Artificial Sequence
  Description of Artificial Sequence: Synthetic oligonucleotide
  Sense strand starting at position 1274 of SEQ ID NO: 1883388
cguaguagucguggacgua

SEQ ID NO: 2190545 - RNA, 19 nt, Artificial Sequence
  Description of Artificial Sequence: Synthetic oligonucleotide
  Antisense strand to SEQ ID NO: 2190544
uacguccacgacuacuacg

SEQ ID NO: 2190546 - RNA, 19 nt, Artificial Sequence
  Description of Artificial Sequence: Synthetic oligonucleotide
  Sense strand starting at position 1301 of SEQ ID NO: 1883388
cggcuauuggcuguccgau

SEQ ID NO: 2190547 - RNA, 19 nt, Artificial Sequence
  Description of Artificial Sequence: Synthetic oligonucleotide
  Antisense strand to SEQ ID NO: 2190546
aucggacagccaauagccg

SEQ ID NO: 2190548 - RNA, 19 nt, Artificial Sequence
  Description of Artificial Sequence: Synthetic oligonucleotide
  Sense strand starting at position 1303 of SEQ ID NO: 1883388
gcuauuggcuguccgauga

SEQ ID NO: 2190549 - RNA, 19 nt, Artificial Sequence
  Description of Artificial Sequence: Synthetic oligonucleotide
  Antisense strand to SEQ ID NO: 2190548
ucaucggacagccaauagc

SEQ ID NO: 2190550 - RNA, 19 nt, Artificial Sequence
  Description of Artificial Sequence: Synthetic oligonucleotide
  Sense strand starting at position 1346 of SEQ ID NO: 1883388
ugccauaguugcccuggaa

SEQ ID NO: 2190551 - RNA, 19 nt, Artificial Sequence
  Description of Artificial Sequence: Synthetic oligonucleotide
  Antisense strand to SEQ ID NO: 2190550
uuccagggcaacuauggca

SEQ ID NO: 2190552 - RNA, 19 nt, Artificial Sequence
  Description of Artificial Sequence: Synthetic oligonucleotide
  Sense strand starting at position 1540 of SEQ ID NO: 1883388
gagccaucaugcccgugaa

SEQ ID NO: 2190553 - RNA, 19 nt, Artificial Sequence
  Description of Artificial Sequence: Synthetic oligonucleotide
  Antisense strand to SEQ ID NO: 2190552
uucacgggcaugauggcuc

SEQ ID NO: 2190554 - RNA, 19 nt, Artificial Sequence
  Description of Artificial Sequence: Synthetic oligonucleotide
  Sense strand starting at position 1697 of SEQ ID NO: 1883388
gagcacugaccucguggaa

SEQ ID NO: 2190555 - RNA, 19 nt, Artificial Sequence
  Description of Artificial Sequence: Synthetic oligonucleotide
  Antisense strand to SEQ ID NO: 2190554
uuccacgaggucagugcuc

SEQ ID NO: 2190556 - RNA, 19 nt, Artificial Sequence
  Description of Artificial Sequence: Synthetic oligonucleotide
  Sense strand starting at position 1700 of SEQ ID NO: 1883388
cacugaccucguggaagaa

SEQ ID NO: 2190557 - RNA, 19 nt, Artificial Sequence
  Description of Artificial Sequence: Synthetic oligonucleotide
  Antisense strand to SEQ ID NO: 2190556
uucuuccacgaggucagug

SEQ ID NO: 2190558 - RNA, 19 nt, Artificial Sequence
  Description of Artificial Sequence: Synthetic oligonucleotide
  Sense strand starting at position 1772 of SEQ ID NO: 1883388
gaagcaugggcuuguagaa

SEQ ID NO: 2190559 - RNA, 19 nt, Artificial Sequence
  Description of Artificial Sequence: Synthetic oligonucleotide
  Antisense strand to SEQ ID NO: 2190558
uucuacaagcccaugcuuc

SEQ ID NO: 2190560 - RNA, 19 nt, Artificial Sequence
  Description of Artificial Sequence: Synthetic oligonucleotide
  Sense strand starting at position 1787 of SEQ ID NO: 1883388
agaagugucugcagaggag

SEQ ID NO: 2190561 - RNA, 19 nt, Artificial Sequence
  Description of Artificial Sequence: Synthetic oligonucleotide
  Antisense strand to SEQ ID NO: 2190560
cuccucugcagacacuucu

SEQ ID NO: 2190562 - RNA, 19 nt, Artificial Sequence
  Description of Artificial Sequence: Synthetic oligonucleotide
  Sense strand starting at position 1833 of SEQ ID NO: 1883388
agccauguuccacaucaca

SEQ ID NO: 2190563 - RNA, 19 nt, Artificial Sequence
  Description of Artificial Sequence: Synthetic oligonucleotide
  Antisense strand to SEQ ID NO: 2190562
ugugauguggaacauggcu

SEQ ID NO: 2190564 - RNA, 19 nt, Artificial Sequence
  Description of Artificial Sequence: Synthetic oligonucleotide
  Sense strand starting at position 1901 of SEQ ID NO: 1883388
ccaguucugccagaaguag

SEQ ID NO: 2190565 - RNA, 19 nt, Artificial Sequence
  Description of Artificial Sequence: Synthetic oligonucleotide
  Antisense strand to SEQ ID NO: 2190564
cuacuucuggcagaacugg

SEQ ID NO: 2190566 - RNA, 19 nt, Artificial Sequence
  Description of Artificial Sequence: Synthetic oligonucleotide
  Sense strand starting at position 1909 of SEQ ID NO: 1883388
gccagaaguaggugacaga

SEQ ID NO: 2190567 - RNA, 19 nt, Artificial Sequence
  Description of Artificial Sequence: Synthetic oligonucleotide
  Antisense strand to SEQ ID NO: 2190566
ucugucaccuacuucuggc

SEQ ID NO: 2190568 - RNA, 19 nt, Artificial Sequence
  Description of Artificial Sequence: Synthetic oligonucleotide
  Sense strand starting at position 2237 of SEQ ID NO: 1883388
ucaggaggcgcucgaugau

SEQ ID NO: 2190569 - RNA, 19 nt, Artificial Sequence
  Description of Artificial Sequence: Synthetic oligonucleotide
  Antisense strand to SEQ ID NO: 2190568
aucaucgagcgccuccuga

SEQ ID NO: 2190570 - RNA, 19 nt, Artificial Sequence
  Description of Artificial Sequence: Synthetic oligonucleotide
  Sense strand starting at position 2246 of SEQ ID NO: 1883388
gcucgaugaugcgugagua

SEQ ID NO: 2190571 - RNA, 19 nt, Artificial Sequence
  Description of Artificial Sequence: Synthetic oligonucleotide
  Antisense strand to SEQ ID NO: 2190570
uacucacgcaucaucgagc

SEQ ID NO: 2190572 - RNA, 19 nt, Artificial Sequence
  Description of Artificial Sequence: Synthetic oligonucleotide
  Sense strand starting at position 2247 of SEQ ID NO: 1883388
cucgaugaugcgugaguag

SEQ ID NO: 2190573 - RNA, 19 nt, Artificial Sequence
  Description of Artificial Sequence: Synthetic oligonucleotide
  Antisense strand to SEQ ID NO: 2190572
cuacucacgcaucaucgag

SEQ ID NO: 2190574 - RNA, 19 nt, Artificial Sequence
  Description of Artificial Sequence: Synthetic oligonucleotide
  Sense strand starting at position 2248 of SEQ ID NO: 1883388
ucgaugaugcgugaguagu

SEQ ID NO: 2190575 - RNA, 19 nt, Artificial Sequence
  Description of Artificial Sequence: Synthetic oligonucleotide
  Antisense strand to SEQ ID NO: 2190574
acuacucacgcaucaucga

SEQ ID NO: 2190576 - RNA, 19 nt, Artificial Sequence
  Description of Artificial Sequence: Synthetic oligonucleotide
  Sense strand starting at position 2249 of SEQ ID NO: 1883388
cgaugaugcgugaguaguc

SEQ ID NO: 2190577 - RNA, 19 nt, Artificial Sequence
  Description of Artificial Sequence: Synthetic oligonucleotide
  Antisense strand to SEQ ID NO: 2190576
gacuacucacgcaucaucg

SEQ ID NO: 2190578 - RNA, 19 nt, Artificial Sequence
  Description of Artificial Sequence: Synthetic oligonucleotide
  Sense strand starting at position 2258 of SEQ ID NO: 1883388
gugaguaguccauguccug

SEQ ID NO: 2190579 - RNA, 19 nt, Artificial Sequence
  Description of Artificial Sequence: Synthetic oligonucleotide
  Antisense strand to SEQ ID NO: 2190578
caggacauggacuacucac

SEQ ID NO: 2190580 - RNA, 19 nt, Artificial Sequence
  Description of Artificial Sequence: Synthetic oligonucleotide
  Sense strand starting at position 2263 of SEQ ID NO: 1883388
uaguccauguccugcagaa

SEQ ID NO: 2190581 - RNA, 19 nt, Artificial Sequence
  Description of Artificial Sequence: Synthetic oligonucleotide
  Antisense strand to SEQ ID NO: 2190580
uucugcaggacauggacua

SEQ ID NO: 2190582 - RNA, 19 nt, Artificial Sequence
  Description of Artificial Sequence: Synthetic oligonucleotide
  Sense strand starting at position 2265 of SEQ ID NO: 1883388
guccauguccugcagaaac

SEQ ID NO: 2190583 - RNA, 19 nt, Artificial Sequence
  Description of Artificial Sequence: Synthetic oligonucleotide
  Antisense strand to SEQ ID NO: 2190582
guuucugcaggacauggac

SEQ ID NO: 2190584 - RNA, 19 nt, Artificial Sequence
  Description of Artificial Sequence: Synthetic oligonucleotide
  Sense strand starting at position 2267 of SEQ ID NO: 1883388
ccauguccugcagaaacaa

SEQ ID NO: 2190585 - RNA, 19 nt, Artificial Sequence
  Description of Artificial Sequence: Synthetic oligonucleotide
  Antisense strand to SEQ ID NO: 2190584
uuguuucugcaggacaugg

SEQ ID NO: 2190586 - RNA, 19 nt, Artificial Sequence
  Description of Artificial Sequence: Synthetic oligonucleotide
  Sense strand starting at position 2461 of SEQ ID NO: 1883388
ccacuuaccugcuggauca

SEQ ID NO: 2190587 - RNA, 19 nt, Artificial Sequence
  Description of Artificial Sequence: Synthetic oligonucleotide
  Antisense strand to SEQ ID NO: 2190586
ugauccagcagguaagugg

SEQ ID NO: 2190588 - RNA, 19 nt, Artificial Sequence
  Description of Artificial Sequence: Synthetic oligonucleotide
  Sense strand starting at position 2652 of SEQ ID NO: 1883388
gaaaguugagcucguagca

SEQ ID NO: 2190589 - RNA, 19 nt, Artificial Sequence
  Description of Artificial Sequence: Synthetic oligonucleotide
  Antisense strand to SEQ ID NO: 2190588
ugcuacgagcucaacuuuc

SEQ ID NO: 2190590 - RNA, 19 nt, Artificial Sequence
  Description of Artificial Sequence: Synthetic oligonucleotide
  Sense strand starting at position 2692 of SEQ ID NO: 1883388
guaguagagaucuggaaug

SEQ ID NO: 2190591 - RNA, 19 nt, Artificial Sequence
  Description of Artificial Sequence: Synthetic oligonucleotide
  Antisense strand to SEQ ID NO: 2190590
cauuccagaucucuacuac

SEQ ID NO: 2190592 - RNA, 19 nt, Artificial Sequence
  Description of Artificial Sequence: Synthetic oligonucleotide
  Sense strand starting at position 2786 of SEQ ID NO: 1883388
aggucagauuguccgggua

SEQ ID NO: 2190593 - RNA, 19 nt, Artificial Sequence
  Description of Artificial Sequence: Synthetic oligonucleotide
  Antisense strand to SEQ ID NO: 2190592
uacccggacaaucugaccu

SEQ ID NO: 2190594 - RNA, 19 nt, Artificial Sequence
  Description of Artificial Sequence: Synthetic oligonucleotide
  Sense strand starting at position 2789 of SEQ ID NO: 1883388
ucagauuguccggguagcu

SEQ ID NO: 2190595 - RNA, 19 nt, Artificial Sequence
  Description of Artificial Sequence: Synthetic oligonucleotide
  Antisense strand to SEQ ID NO: 2190594
agcuacccggacaaucuga

SEQ ID NO: 2190596 - RNA, 19 nt, Artificial Sequence
  Description of Artificial Sequence: Synthetic oligonucleotide
  Sense strand starting at position 2834 of SEQ ID NO: 1883388
uggccuucuucccugcaga

SEQ ID NO: 2190597 - RNA, 19 nt, Artificial Sequence
  Description of Artificial Sequence: Synthetic oligonucleotide
  Antisense strand to SEQ ID NO: 2190596
ucugcagggaagaaggcca

SEQ ID NO: 2190598 - RNA, 19 nt, Artificial Sequence
  Description of Artificial Sequence: Synthetic oligonucleotide
  Sense strand starting at position 2973 of SEQ ID NO: 1883388
augaguugacgucgcggua

SEQ ID NO: 2190599 - RNA, 19 nt, Artificial Sequence
  Description of Artificial Sequence: Synthetic oligonucleotide
  Antisense strand to SEQ ID NO: 2190598
uaccgcgacgucaacucau

SEQ ID NO: 2190600 - RNA, 19 nt, Artificial Sequence
  Description of Artificial Sequence: Synthetic oligonucleotide
  Sense strand starting at position 3138 of SEQ ID NO: 1883388
gggcgcaccuggagugaua

SEQ ID NO: 2190601 - RNA, 19 nt, Artificial Sequence
  Description of Artificial Sequence: Synthetic oligonucleotide
  Antisense strand to SEQ ID NO: 2190600
uaucacuccaggugcgccc

SEQ ID NO: 2190602 - RNA, 19 nt, Artificial Sequence
  Description of Artificial Sequence: Synthetic oligonucleotide
  Sense strand starting at position 3705 of SEQ ID NO: 1883388
gcacucacuugaugagguu

SEQ ID NO: 2190603 - RNA, 19 nt, Artificial Sequence
  Description of Artificial Sequence: Synthetic oligonucleotide
  Antisense strand to SEQ ID NO: 2190602
aaccucaucaagugagugc

SEQ ID NO: 2190604 - RNA, 19 nt, Artificial Sequence
  Description of Artificial Sequence: Synthetic oligonucleotide
  Sense strand starting at position 3714 of SEQ ID NO: 1883388
ugaugagguucuccagaaa

SEQ ID NO: 2190605 - RNA, 19 nt, Artificial Sequence
  Description of Artificial Sequence: Synthetic oligonucleotide
  Antisense strand to SEQ ID NO: 2190604
uuucuggagaaccucauca

SEQ ID NO: 2190606 - RNA, 19 nt, Artificial Sequence
  Description of Artificial Sequence: Synthetic oligonucleotide
  Sense strand starting at position 3729 of SEQ ID NO: 1883388
gaaauaaccgggcauugcu

SEQ ID NO: 2190607 - RNA, 19 nt, Artificial Sequence
  Description of Artificial Sequence: Synthetic oligonucleotide
  Antisense strand to SEQ ID NO: 2190606
agcaaugcccgguuauuuc

SEQ ID NO: 2190608 - RNA, 19 nt, Artificial Sequence
  Description of Artificial Sequence: Synthetic oligonucleotide
  Sense strand starting at position 3782 of SEQ ID NO: 1883388
cccuuuaguccuggccaca

SEQ ID NO: 2190609 - RNA, 19 nt, Artificial Sequence
  Description of Artificial Sequence: Synthetic oligonucleotide
  Antisense strand to SEQ ID NO: 2190608
uguggccaggacuaaaggg

SEQ ID NO: 2190610 - RNA, 19 nt, Artificial Sequence
  Description of Artificial Sequence: Synthetic oligonucleotide
  Sense strand starting at position 14 of SEQ ID NO: 1883389
cgauguucccagcaaagac

SEQ ID NO: 2190611 - RNA, 19 nt, Artificial Sequence
  Description of Artificial Sequence: Synthetic oligonucleotide
  Antisense strand to SEQ ID NO: 2190610
gucuuugcugggaacaucg

SEQ ID NO: 2190612 - RNA, 19 nt, Artificial Sequence
  Description of Artificial Sequence: Synthetic oligonucleotide
  Sense strand starting at position 455 of SEQ ID NO: 1883389
gaugacuguccacauguca

SEQ ID NO: 2190613 - RNA, 19 nt, Artificial Sequence
  Description of Artificial Sequence: Synthetic oligonucleotide
  Antisense strand to SEQ ID NO: 2190612
ugacauguggacagucauc

SEQ ID NO: 2190614 - RNA, 19 nt, Artificial Sequence
  Description of Artificial Sequence: Synthetic oligonucleotide
  Sense strand starting at position 511 of SEQ ID NO: 1883389
gccggaugcucuucuagaa

SEQ ID NO: 2190615 - RNA, 19 nt, Artificial Sequence
  Description of Artificial Sequence: Synthetic oligonucleotide
  Antisense strand to SEQ ID NO: 2190614
uucuagaagagcauccggc

SEQ ID NO: 2190616 - RNA, 19 nt, Artificial Sequence
  Description of Artificial Sequence: Synthetic oligonucleotide
  Sense strand starting at position 518 of SEQ ID NO: 1883389
gcucuucuagaaugaugau

SEQ ID NO: 2190617 - RNA, 19 nt, Artificial Sequence
  Description of Artificial Sequence: Synthetic oligonucleotide
  Antisense strand to SEQ ID NO: 2190616
aucaucauucuagaagagc

SEQ ID NO: 2190618 - RNA, 19 nt, Artificial Sequence
  Description of Artificial Sequence: Synthetic oligonucleotide
  Sense strand starting at position 1132 of SEQ ID NO: 1883389
ucgcuucuucuuugaggga

SEQ ID NO: 2190619 - RNA, 19 nt, Artificial Sequence
  Description of Artificial Sequence: Synthetic oligonucleotide
  Antisense strand to SEQ ID NO: 2190618
ucccucaaagaagaagcga

SEQ ID NO: 2190620 - RNA, 19 nt, Artificial Sequence
  Description of Artificial Sequence: Synthetic oligonucleotide
  Sense strand starting at position 1150 of SEQ ID NO: 1883389
aggcucuuccugugaggca

SEQ ID NO: 2190621 - RNA, 19 nt, Artificial Sequence
  Description of Artificial Sequence: Synthetic oligonucleotide
  Antisense strand to SEQ ID NO: 2190620
ugccucacaggaagagccu

SEQ ID NO: 2190622 - RNA, 19 nt, Artificial Sequence
  Description of Artificial Sequence: Synthetic oligonucleotide
  Sense strand starting at position 1284 of SEQ ID NO: 1883389
gcagcuucuccguguacuu

SEQ ID NO: 2190623 - RNA, 19 nt, Artificial Sequence
  Description of Artificial Sequence: Synthetic oligonucleotide
  Antisense strand to SEQ ID NO: 2190622
aaguacacggagaagcugc

SEQ ID NO: 2190624 - RNA, 19 nt, Artificial Sequence
  Description of Artificial Sequence: Synthetic oligonucleotide
  Sense strand starting at position 1311 of SEQ ID NO: 1883389
gggaauugcccaggcgaga

SEQ ID NO: 2190625 - RNA, 19 nt, Artificial Sequence
  Description of Artificial Sequence: Synthetic oligonucleotide
  Antisense strand to SEQ ID NO: 2190624
ucucgccugggcaauuccc

SEQ ID NO: 2190626 - RNA, 19 nt, Artificial Sequence
  Description of Artificial Sequence: Synthetic oligonucleotide
  Sense strand starting at position 1666 of SEQ ID NO: 1883389
agaugaccaucuugucgua

SEQ ID NO: 2190627 - RNA, 19 nt, Artificial Sequence
  Description of Artificial Sequence: Synthetic oligonucleotide
  Antisense strand to SEQ ID NO: 2190626
uacgacaagauggucaucu

SEQ ID NO: 2190628 - RNA, 19 nt, Artificial Sequence
  Description of Artificial Sequence: Synthetic oligonucleotide
  Sense strand starting at position 1671 of SEQ ID NO: 1883389
accaucuugucguaggaga

SEQ ID NO: 2190629 - RNA, 19 nt, Artificial Sequence
  Description of Artificial Sequence: Synthetic oligonucleotide
  Antisense strand to SEQ ID NO: 2190628
ucuccuacgacaagauggu

SEQ ID NO: 2190630 - RNA, 19 nt, Artificial Sequence
  Description of Artificial Sequence: Synthetic oligonucleotide
  Sense strand starting at position 1673 of SEQ ID NO: 1883389
caucuugucguaggagaug

SEQ ID NO: 2190631 - RNA, 19 nt, Artificial Sequence
  Description of Artificial Sequence: Synthetic oligonucleotide
  Antisense strand to SEQ ID NO: 2190630
caucuccuacgacaagaug

SEQ ID NO: 2190632 - RNA, 19 nt, Artificial Sequence
  Description of Artificial Sequence: Synthetic oligonucleotide
  Sense strand starting at position 1854 of SEQ ID NO: 1883389
uguugagagccacgccaua

SEQ ID NO: 2190633 - RNA, 19 nt, Artificial Sequence
  Description of Artificial Sequence: Synthetic oligonucleotide
  Antisense strand to SEQ ID NO: 2190632
uauggcguggcucucaaca

SEQ ID NO: 2190634 - RNA, 19 nt, Artificial Sequence
  Description of Artificial Sequence: Synthetic oligonucleotide
  Sense strand starting at position 1881 of SEQ ID NO: 1883389
cgcucugguucagguacaa

SEQ ID NO: 2190635 - RNA, 19 nt, Artificial Sequence
  Description of Artificial Sequence: Synthetic oligonucleotide
  Antisense strand to SEQ ID NO: 2190634
uuguaccugaaccagagcg

SEQ ID NO: 2190636 - RNA, 19 nt, Artificial Sequence
  Description of Artificial Sequence: Synthetic oligonucleotide
  Sense strand starting at position 2081 of SEQ ID NO: 1883389
gcaccuucugcgugauguu

SEQ ID NO: 2190637 - RNA, 19 nt, Artificial Sequence
  Description of Artificial Sequence: Synthetic oligonucleotide
  Antisense strand to SEQ ID NO: 2190636
aacaucacgcagaaggugc

SEQ ID NO: 2190638 - RNA, 19 nt, Artificial Sequence
  Description of Artificial Sequence: Synthetic oligonucleotide
  Sense strand starting at position 2090 of SEQ ID NO: 1883389
gcgugauguucagugagau

SEQ ID NO: 2190639 - RNA, 19 nt, Artificial Sequence
  Description of Artificial Sequence: Synthetic oligonucleotide
  Antisense strand to SEQ ID NO: 2190638
aucucacugaacaucacgc

SEQ ID NO: 2190640 - RNA, 19 nt, Artificial Sequence
  Description of Artificial Sequence: Synthetic oligonucleotide
  Sense strand starting at position 2091 of SEQ ID NO: 1883389
cgugauguucagugagaug

SEQ ID NO: 2190641 - RNA, 19 nt, Artificial Sequence
  Description of Artificial Sequence: Synthetic oligonucleotide
  Antisense strand to SEQ ID NO: 2190640
caucucacugaacaucacg

SEQ ID NO: 2190642 - RNA, 19 nt, Artificial Sequence
  Description of Artificial Sequence: Synthetic oligonucleotide
  Sense strand starting at position 2333 of SEQ ID NO: 1883389
aggucugguugggcucaaa

SEQ ID NO: 2190643 - RNA, 19 nt, Artificial Sequence
  Description of Artificial Sequence: Synthetic oligonucleotide
  Antisense strand to SEQ ID NO: 2190642
uuugagcccaaccagaccu

SEQ ID NO: 2190644 - RNA, 19 nt, Artificial Sequence
  Description of Artificial Sequence: Synthetic oligonucleotide
  Sense strand starting at position 2360 of SEQ ID NO: 1883389
ggaggguaggcucguagua

SEQ ID NO: 2190645 - RNA, 19 nt, Artificial Sequence
  Description of Artificial Sequence: Synthetic oligonucleotide
  Antisense strand to SEQ ID NO: 2190644
uacuacgagccuacccucc

SEQ ID NO: 2190646 - RNA, 19 nt, Artificial Sequence
  Description of Artificial Sequence: Synthetic oligonucleotide
  Sense strand starting at position 2705 of SEQ ID NO: 1883389
guguguacauucugcacaa

SEQ ID NO: 2190647 - RNA, 19 nt, Artificial Sequence
  Description of Artificial Sequence: Synthetic oligonucleotide
  Antisense strand to SEQ ID NO: 2190646
uugugcagaauguacacac

SEQ ID NO: 2190648 - RNA, 19 nt, Artificial Sequence
  Description of Artificial Sequence: Synthetic oligonucleotide
  Sense strand starting at position 2706 of SEQ ID NO: 1883389
uguguacauucugcacaaa

SEQ ID NO: 2190649 - RNA, 19 nt, Artificial Sequence
  Description of Artificial Sequence: Synthetic oligonucleotide
  Antisense strand to SEQ ID NO: 2190648
uuugugcagaauguacaca

SEQ ID NO: 2190650 - RNA, 19 nt, Artificial Sequence
  Description of Artificial Sequence: Synthetic oligonucleotide
  Sense strand starting at position 3150 of SEQ ID NO: 1883389
uggacaugacguugccaaa

SEQ ID NO: 2190651 - RNA, 19 nt, Artificial Sequence
  Description of Artificial Sequence: Synthetic oligonucleotide
  Antisense strand to SEQ ID NO: 2190650
uuuggcaacgucaugucca

SEQ ID NO: 2190652 - RNA, 19 nt, Artificial Sequence
  Description of Artificial Sequence: Synthetic oligonucleotide
  Sense strand starting at position 3153 of SEQ ID NO: 1883389
acaugacguugccaaagaa

SEQ ID NO: 2190653 - RNA, 19 nt, Artificial Sequence
  Description of Artificial Sequence: Synthetic oligonucleotide
  Antisense strand to SEQ ID NO: 2190652
uucuuuggcaacgucaugu

SEQ ID NO: 2190654 - RNA, 19 nt, Artificial Sequence
  Description of Artificial Sequence: Synthetic oligonucleotide
  Sense strand starting at position 3308 of SEQ ID NO: 1883389
ccugucauucuuggucaga

SEQ ID NO: 2190655 - RNA, 19 nt, Artificial Sequence
  Description of Artificial Sequence: Synthetic oligonucleotide
  Antisense strand to SEQ ID NO: 2190654
ucugaccaagaaugacagg

SEQ ID NO: 2190656 - RNA, 19 nt, Artificial Sequence
  Description of Artificial Sequence: Synthetic oligonucleotide
  Sense strand starting at position 3309 of SEQ ID NO: 1883389
cugucauucuuggucagag

SEQ ID NO: 2190657 - RNA, 19 nt, Artificial Sequence
  Description of Artificial Sequence: Synthetic oligonucleotide
  Antisense strand to SEQ ID NO: 2190656
cucugaccaagaaugacag

SEQ ID NO: 2190658 - RNA, 19 nt, Artificial Sequence
  Description of Artificial Sequence: Synthetic oligonucleotide
  Sense strand starting at position 3602 of SEQ ID NO: 1883389
gcaagcacucaggguuaga

SEQ ID NO: 2190659 - RNA, 19 nt, Artificial Sequence
  Description of Artificial Sequence: Synthetic oligonucleotide
  Antisense strand to SEQ ID NO: 2190658
ucuaacccugagugcuugc

SEQ ID NO: 2190660 - RNA, 19 nt, Artificial Sequence
  Description of Artificial Sequence: Synthetic oligonucleotide
  Sense strand starting at position 3728 of SEQ ID NO: 1883389
ggguaucuguagcuacuga

SEQ ID NO: 2190661 - RNA, 19 nt, Artificial Sequence
  Description of Artificial Sequence: Synthetic oligonucleotide
  Antisense strand to SEQ ID NO: 2190660
ucaguagcuacagauaccc

SEQ ID NO: 2190662 - RNA, 19 nt, Artificial Sequence
  Description of Artificial Sequence: Synthetic oligonucleotide
  Sense strand starting at position 3729 of SEQ ID NO: 1883389
gguaucuguagcuacugau

SEQ ID NO: 2190663 - RNA, 19 nt, Artificial Sequence
  Description of Artificial Sequence: Synthetic oligonucleotide
  Antisense strand to SEQ ID NO: 2190662
aucaguagcuacagauacc

SEQ ID NO: 2190664 - RNA, 19 nt, Artificial Sequence
  Description of Artificial Sequence: Synthetic oligonucleotide
  Sense strand starting at position 3748 of SEQ ID NO: 1883389
cugcgugccuguuagagaa

SEQ ID NO: 2190665 - RNA, 19 nt, Artificial Sequence
  Description of Artificial Sequence: Synthetic oligonucleotide
  Antisense strand to SEQ ID NO: 2190664
uucucuaacaggcacgcag

SEQ ID NO: 2190666 - RNA, 19 nt, Artificial Sequence
  Description of Artificial Sequence: Synthetic oligonucleotide
  Sense strand starting at position 3750 of SEQ ID NO: 1883389
gcgugccuguuagagaaga

SEQ ID NO: 2190667 - RNA, 19 nt, Artificial Sequence
  Description of Artificial Sequence: Synthetic oligonucleotide
  Antisense strand to SEQ ID NO: 2190666
ucuucucuaacaggcacgc

SEQ ID NO: 2190668 - RNA, 19 nt, Artificial Sequence
  Description of Artificial Sequence: Synthetic oligonucleotide
  Sense strand starting at position 3857 of SEQ ID NO: 1883389
ggcuguguguucuuugcua

SEQ ID NO: 2190669 - RNA, 19 nt, Artificial Sequence
  Description of Artificial Sequence: Synthetic oligonucleotide
  Antisense strand to SEQ ID NO: 2190668
uagcaaagaacacacagcc

SEQ ID NO: 2190670 - RNA, 19 nt, Artificial Sequence
  Description of Artificial Sequence: Synthetic oligonucleotide
  Sense strand starting at position 3859 of SEQ ID NO: 1883389
cuguguguucuuugcuacu

SEQ ID NO: 2190671 - RNA, 19 nt, Artificial Sequence
  Description of Artificial Sequence: Synthetic oligonucleotide
  Antisense strand to SEQ ID NO: 2190670
aguagcaaagaacacacag

SEQ ID NO: 2190672 - RNA, 19 nt, Artificial Sequence
  Description of Artificial Sequence: Synthetic oligonucleotide
  Sense strand starting at position 3861 of SEQ ID NO: 1883389
guguguucuuugcuacuag

SEQ ID NO: 2190673 - RNA, 19 nt, Artificial Sequence
  Description of Artificial Sequence: Synthetic oligonucleotide
  Antisense strand to SEQ ID NO: 2190672
cuaguagcaaagaacacac

SEQ ID NO: 2190674 - RNA, 19 nt, Artificial Sequence
  Description of Artificial Sequence: Synthetic oligonucleotide
  Sense strand starting at position 3876 of SEQ ID NO: 1883389
cuagguagcuaguuuaacu

SEQ ID NO: 2190675 - RNA, 19 nt, Artificial Sequence
  Description of Artificial Sequence: Synthetic oligonucleotide
  Antisense strand to SEQ ID NO: 2190674
aguuaaacuagcuaccuag

SEQ ID NO: 2190676 - RNA, 19 nt, Artificial Sequence
  Description of Artificial Sequence: Synthetic oligonucleotide
  Sense strand starting at position 3889 of SEQ ID NO: 1883389
uuaacuagcuagcagauuu

SEQ ID NO: 2190677 - RNA, 19 nt, Artificial Sequence
  Description of Artificial Sequence: Synthetic oligonucleotide
  Antisense strand to SEQ ID NO: 2190676
aaaucugcuagcuaguuaa

SEQ ID NO: 2190678 - RNA, 19 nt, Artificial Sequence
  Description of Artificial Sequence: Synthetic oligonucleotide
  Sense strand starting at position 150 of SEQ ID NO: 1883390
ccguuucuugcggagaaac

SEQ ID NO: 2190679 - RNA, 19 nt, Artificial Sequence
  Description of Artificial Sequence: Synthetic oligonucleotide
  Antisense strand to SEQ ID NO: 2190678
guuucuccgcaagaaacgg

SEQ ID NO: 2190680 - RNA, 19 nt, Artificial Sequence
  Description of Artificial Sequence: Synthetic oligonucleotide
  Sense strand starting at position 213 of SEQ ID NO: 1883390
gaucaacagucccgugacu

SEQ ID NO: 2190681 - RNA, 19 nt, Artificial Sequence
  Description of Artificial Sequence: Synthetic oligonucleotide
  Antisense strand to SEQ ID NO: 2190680
agucacgggacuguugauc

SEQ ID NO: 2190682 - RNA, 19 nt, Artificial Sequence
  Description of Artificial Sequence: Synthetic oligonucleotide
  Sense strand starting at position 342 of SEQ ID NO: 1883390
ccugcauuucuggguuacu

SEQ ID NO: 2190683 - RNA, 19 nt, Artificial Sequence
  Description of Artificial Sequence: Synthetic oligonucleotide
  Antisense strand to SEQ ID NO: 2190682
aguaacccagaaaugcagg

SEQ ID NO: 2190684 - RNA, 19 nt, Artificial Sequence
  Description of Artificial Sequence: Synthetic oligonucleotide
  Sense strand starting at position 438 of SEQ ID NO: 1883390
ucaagauggguuugucaau

SEQ ID NO: 2190685 - RNA, 19 nt, Artificial Sequence
  Description of Artificial Sequence: Synthetic oligonucleotide
  Antisense strand to SEQ ID NO: 2190684
auugacaaacccaucuuga

SEQ ID NO: 2190686 - RNA, 19 nt, Artificial Sequence
  Description of Artificial Sequence: Synthetic oligonucleotide
  Sense strand starting at position 765 of SEQ ID NO: 1883390
cacucaaccugacguaaga

SEQ ID NO: 2190687 - RNA, 19 nt, Artificial Sequence
  Description of Artificial Sequence: Synthetic oligonucleotide
  Antisense strand to SEQ ID NO: 2190686
ucuuacgucagguugagug

SEQ ID NO: 2190688 - RNA, 19 nt, Artificial Sequence
  Description of Artificial Sequence: Synthetic oligonucleotide
  Sense strand starting at position 809 of SEQ ID NO: 1883390
agcuuuacuuauuccagga

SEQ ID NO: 2190689 - RNA, 19 nt, Artificial Sequence
  Description of Artificial Sequence: Synthetic oligonucleotide
  Antisense strand to SEQ ID NO: 2190688
uccuggaauaaguaaagcu

SEQ ID NO: 2190690 - RNA, 19 nt, Artificial Sequence
  Description of Artificial Sequence: Synthetic oligonucleotide
  Sense strand starting at position 878 of SEQ ID NO: 1883390
ccaagauguucccaaacag

SEQ ID NO: 2190691 - RNA, 19 nt, Artificial Sequence
  Description of Artificial Sequence: Synthetic oligonucleotide
  Antisense strand to SEQ ID NO: 2190690
cuguuugggaacaucuugg

SEQ ID NO: 2190692 - RNA, 19 nt, Artificial Sequence
  Description of Artificial Sequence: Synthetic oligonucleotide
  Sense strand starting at position 940 of SEQ ID NO: 1883390
guaggcgucuuugagaaag

SEQ ID NO: 2190693 - RNA, 19 nt, Artificial Sequence
  Description of Artificial Sequence: Synthetic oligonucleotide
  Antisense strand to SEQ ID NO: 2190692
cuuucucaaagacgccuac

SEQ ID NO: 2190694 - RNA, 19 nt, Artificial Sequence
  Description of Artificial Sequence: Synthetic oligonucleotide
  Sense strand starting at position 1100 of SEQ ID NO: 1883390
uacuguugugccuguugua

SEQ ID NO: 2190695 - RNA, 19 nt, Artificial Sequence
  Description of Artificial Sequence: Synthetic oligonucleotide
  Antisense strand to SEQ ID NO: 2190694
uacaacaggcacaacagua

SEQ ID NO: 2190696 - RNA, 19 nt, Artificial Sequence
  Description of Artificial Sequence: Synthetic oligonucleotide
  Sense strand starting at position 1107 of SEQ ID NO: 1883390
gugccuguuguacagugau

SEQ ID NO: 2190697 - RNA, 19 nt, Artificial Sequence
  Description of Artificial Sequence: Synthetic oligonucleotide
  Antisense strand to SEQ ID NO: 2190696
aucacuguacaacaggcac

SEQ ID NO: 2190698 - RNA, 19 nt, Artificial Sequence
  Description of Artificial Sequence: Synthetic oligonucleotide
  Sense strand starting at position 1113 of SEQ ID NO: 1883390
guuguacagugaugacaac

SEQ ID NO: 2190699 - RNA, 19 nt, Artificial Sequence
  Description of Artificial Sequence: Synthetic oligonucleotide
  Antisense strand to SEQ ID NO: 2190698
guugucaucacuguacaac

SEQ ID NO: 2190700 - RNA, 19 nt, Artificial Sequence
  Description of Artificial Sequence: Synthetic oligonucleotide
  Sense strand starting at position 1186 of SEQ ID NO: 1883390
aaucgaauuccagggacca

SEQ ID NO: 2190701 - RNA, 19 nt, Artificial Sequence
  Description of Artificial Sequence: Synthetic oligonucleotide
  Antisense strand to SEQ ID NO: 2190700
uggucccuggaauucgauu

SEQ ID NO: 2190702 - RNA, 19 nt, Artificial Sequence
  Description of Artificial Sequence: Synthetic oligonucleotide
  Sense strand starting at position 1187 of SEQ ID NO: 1883390
aucgaauuccagggaccaa

SEQ ID NO: 2190703 - RNA, 19 nt, Artificial Sequence
  Description of Artificial Sequence: Synthetic oligonucleotide
  Antisense strand to SEQ ID NO: 2190702
uuggucccuggaauucgau

SEQ ID NO: 2190704 - RNA, 19 nt, Artificial Sequence
  Description of Artificial Sequence: Synthetic oligonucleotide
  Sense strand starting at position 1264 of SEQ ID NO: 1883390
ucaacugcugccugauacu

SEQ ID NO: 2190705 - RNA, 19 nt, Artificial Sequence
  Description of Artificial Sequence: Synthetic oligonucleotide
  Antisense strand to SEQ ID NO: 2190704
aguaucaggcagcaguuga

SEQ ID NO: 2190706 - RNA, 19 nt, Artificial Sequence
  Description of Artificial Sequence: Synthetic oligonucleotide
  Sense strand starting at position 1296 of SEQ ID NO: 1883390
ucuguuggcugaggagaua

SEQ ID NO: 2190707 - RNA, 19 nt, Artificial Sequence
  Description of Artificial Sequence: Synthetic oligonucleotide
  Antisense strand to SEQ ID NO: 2190706
uaucuccucagccaacaga

SEQ ID NO: 2190708 - RNA, 19 nt, Artificial Sequence
  Description of Artificial Sequence: Synthetic oligonucleotide
  Sense strand starting at position 1370 of SEQ ID NO: 1883390
gggagauaacgguggcaua

SEQ ID NO: 2190709 - RNA, 19 nt, Artificial Sequence
  Description of Artificial Sequence: Synthetic oligonucleotide
  Antisense strand to SEQ ID NO: 2190708
uaugccaccguuaucuccc

SEQ ID NO: 2190710 - RNA, 19 nt, Artificial Sequence
  Description of Artificial Sequence: Synthetic oligonucleotide
  Sense strand starting at position 1478 of SEQ ID NO: 1883390
ggagcacauugccaauguu

SEQ ID NO: 2190711 - RNA, 19 nt, Artificial Sequence
  Description of Artificial Sequence: Synthetic oligonucleotide
  Antisense strand to SEQ ID NO: 2190710
aacauuggcaaugugcucc

SEQ ID NO: 2190712 - RNA, 19 nt, Artificial Sequence
  Description of Artificial Sequence: Synthetic oligonucleotide
  Sense strand starting at position 1528 of SEQ ID NO: 1883390
ccgucagcacaguaagaaa

SEQ ID NO: 2190713 - RNA, 19 nt, Artificial Sequence
  Description of Artificial Sequence: Synthetic oligonucleotide
  Antisense strand to SEQ ID NO: 2190712
uuucuuacugugcugacgg

SEQ ID NO: 2190714 - RNA, 19 nt, Artificial Sequence
  Description of Artificial Sequence: Synthetic oligonucleotide
  Sense strand starting at position 1712 of SEQ ID NO: 1883390
gacguuaacuccucaggca

SEQ ID NO: 2190715 - RNA, 19 nt, Artificial Sequence
  Description of Artificial Sequence: Synthetic oligonucleotide
  Antisense strand to SEQ ID NO: 2190714
ugccugaggaguuaacguc

SEQ ID NO: 2190716 - RNA, 19 nt, Artificial Sequence
  Description of Artificial Sequence: Synthetic oligonucleotide
  Sense strand starting at position 1713 of SEQ ID NO: 1883390
acguuaacuccucaggcaa

SEQ ID NO: 2190717 - RNA, 19 nt, Artificial Sequence
  Description of Artificial Sequence: Synthetic oligonucleotide
  Antisense strand to SEQ ID NO: 2190716
uugccugaggaguuaacgu

SEQ ID NO: 2190718 - RNA, 19 nt, Artificial Sequence
  Description of Artificial Sequence: Synthetic oligonucleotide
  Sense strand starting at position 1715 of SEQ ID NO: 1883390
guuaacuccucaggcaaca

SEQ ID NO: 2190719 - RNA, 19 nt, Artificial Sequence
  Description of Artificial Sequence: Synthetic oligonucleotide
  Antisense strand to SEQ ID NO: 2190718
uguugccugaggaguuaac

SEQ ID NO: 2190720 - RNA, 19 nt, Artificial Sequence
  Description of Artificial Sequence: Synthetic oligonucleotide
  Sense strand starting at position 1781 of SEQ ID NO: 1883390
cccuucuugccgcaauaca

SEQ ID NO: 2190721 - RNA, 19 nt, Artificial Sequence
  Description of Artificial Sequence: Synthetic oligonucleotide
  Antisense strand to SEQ ID NO: 2190720
uguauugcggcaagaaggg

SEQ ID NO: 2190722 - RNA, 19 nt, Artificial Sequence
  Description of Artificial Sequence: Synthetic oligonucleotide
  Sense strand starting at position 1850 of SEQ ID NO: 1883390
uucuuaaaccgauacggau

SEQ ID NO: 2190723 - RNA, 19 nt, Artificial Sequence
  Description of Artificial Sequence: Synthetic oligonucleotide
  Antisense strand to SEQ ID NO: 2190722
auccguaucgguuuaagaa

SEQ ID NO: 2190724 - RNA, 19 nt, Artificial Sequence
  Description of Artificial Sequence: Synthetic oligonucleotide
  Sense strand starting at position 2003 of SEQ ID NO: 1883390
ugacgaugcccuugaugua

SEQ ID NO: 2190725 - RNA, 19 nt, Artificial Sequence
  Description of Artificial Sequence: Synthetic oligonucleotide
  Antisense strand to SEQ ID NO: 2190724
uacaucaagggcaucguca

SEQ ID NO: 2190726 - RNA, 19 nt, Artificial Sequence
  Description of Artificial Sequence: Synthetic oligonucleotide
  Sense strand starting at position 2684 of SEQ ID NO: 1883390
gcgccaagugguugaguga

SEQ ID NO: 2190727 - RNA, 19 nt, Artificial Sequence
  Description of Artificial Sequence: Synthetic oligonucleotide
  Antisense strand to SEQ ID NO: 2190726
ucacucaaccacuuggcgc

SEQ ID NO: 2190728 - RNA, 19 nt, Artificial Sequence
  Description of Artificial Sequence: Synthetic oligonucleotide
  Sense strand starting at position 2693 of SEQ ID NO: 1883390
gguugagugaccuguccag

SEQ ID NO: 2190729 - RNA, 19 nt, Artificial Sequence
  Description of Artificial Sequence: Synthetic oligonucleotide
  Antisense strand to SEQ ID NO: 2190728
cuggacaggucacucaacc

SEQ ID NO: 2190730 - RNA, 19 nt, Artificial Sequence
  Description of Artificial Sequence: Synthetic oligonucleotide
  Sense strand starting at position 2859 of SEQ ID NO: 1883390
augguuugcagguggcaaa

SEQ ID NO: 2190731 - RNA, 19 nt, Artificial Sequence
  Description of Artificial Sequence: Synthetic oligonucleotide
  Antisense strand to SEQ ID NO: 2190730
uuugccaccugcaaaccau

SEQ ID NO: 2190732 - RNA, 19 nt, Artificial Sequence
  Description of Artificial Sequence: Synthetic oligonucleotide
  Sense strand starting at position 2879 of SEQ ID NO: 1883390
guccgucucccugaugaac

SEQ ID NO: 2190733 - RNA, 19 nt, Artificial Sequence
  Description of Artificial Sequence: Synthetic oligonucleotide
  Antisense strand to SEQ ID NO: 2190732
guucaucagggagacggac

SEQ ID NO: 2190734 - RNA, 19 nt, Artificial Sequence
  Description of Artificial Sequence: Synthetic oligonucleotide
  Sense strand starting at position 3078 of SEQ ID NO: 1883390
ugcggaguggacgaauaau

SEQ ID NO: 2190735 - RNA, 19 nt, Artificial Sequence
  Description of Artificial Sequence: Synthetic oligonucleotide
  Antisense strand to SEQ ID NO: 2190734
auuauucguccacuccgca

SEQ ID NO: 2190736 - RNA, 19 nt, Artificial Sequence
  Description of Artificial Sequence: Synthetic oligonucleotide
  Sense strand starting at position 3475 of SEQ ID NO: 1883390
caggguugacaucgugaga

SEQ ID NO: 2190737 - RNA, 19 nt, Artificial Sequence
  Description of Artificial Sequence: Synthetic oligonucleotide
  Antisense strand to SEQ ID NO: 2190736
ucucacgaugucaacccug

SEQ ID NO: 2190738 - RNA, 19 nt, Artificial Sequence
  Description of Artificial Sequence: Synthetic oligonucleotide
  Sense strand starting at position 3477 of SEQ ID NO: 1883390
ggguugacaucgugagaag

SEQ ID NO: 2190739 - RNA, 19 nt, Artificial Sequence
  Description of Artificial Sequence: Synthetic oligonucleotide
  Antisense strand to SEQ ID NO: 2190738
cuucucacgaugucaaccc

SEQ ID NO: 2190740 - RNA, 19 nt, Artificial Sequence
  Description of Artificial Sequence: Synthetic oligonucleotide
  Sense strand starting at position 3735 of SEQ ID NO: 1883390
guccgucacuccugaacaa

SEQ ID NO: 2190741 - RNA, 19 nt, Artificial Sequence
  Description of Artificial Sequence: Synthetic oligonucleotide
  Antisense strand to SEQ ID NO: 2190740
uuguucaggagugacggac

SEQ ID NO: 2190742 - RNA, 19 nt, Artificial Sequence
  Description of Artificial Sequence: Synthetic oligonucleotide
  Sense strand starting at position 3736 of SEQ ID NO: 1883390
uccgucacuccugaacaaa

SEQ ID NO: 2190743 - RNA, 19 nt, Artificial Sequence
  Description of Artificial Sequence: Synthetic oligonucleotide
  Antisense strand to SEQ ID NO: 2190742
uuuguucaggagugacgga

SEQ ID NO: 2190744 - RNA, 19 nt, Artificial Sequence
  Description of Artificial Sequence: Synthetic oligonucleotide
  Sense strand starting at position 3779 of SEQ ID NO: 1883390
gagaguugggugcgggaua

SEQ ID NO: 2190745 - RNA, 19 nt, Artificial Sequence
  Description of Artificial Sequence: Synthetic oligonucleotide
  Antisense strand to SEQ ID NO: 2190744
uaucccgcacccaacucuc

SEQ ID NO: 2190746 - RNA, 19 nt, Artificial Sequence
  Description of Artificial Sequence: Synthetic oligonucleotide
  Sense strand starting at position 3802 of SEQ ID NO: 1883390
ugagaagagugcuuggaca

SEQ ID NO: 2190747 - RNA, 19 nt, Artificial Sequence
  Description of Artificial Sequence: Synthetic oligonucleotide
  Antisense strand to SEQ ID NO: 2190746
uguccaagcacucuucuca

SEQ ID NO: 2190748 - RNA, 19 nt, Artificial Sequence
  Description of Artificial Sequence: Synthetic oligonucleotide
  Sense strand starting at position 3804 of SEQ ID NO: 1883390
agaagagugcuuggacaca

SEQ ID NO: 2190749 - RNA, 19 nt, Artificial Sequence
  Description of Artificial Sequence: Synthetic oligonucleotide
  Antisense strand to SEQ ID NO: 2190748
uguguccaagcacucuucu

SEQ ID NO: 2190750 - RNA, 19 nt, Artificial Sequence
  Description of Artificial Sequence: Synthetic oligonucleotide
  Sense strand starting at position 3851 of SEQ ID NO: 1883390
acgggucucugggaugaga

SEQ ID NO: 2190751 - RNA, 19 nt, Artificial Sequence
  Description of Artificial Sequence: Synthetic oligonucleotide
  Antisense strand to SEQ ID NO: 2190750
ucucaucccagagacccgu

SEQ ID NO: 2190752 - RNA, 19 nt, Artificial Sequence
  Description of Artificial Sequence: Synthetic oligonucleotide
  Sense strand starting at position 3853 of SEQ ID NO: 1883390
gggucucugggaugagaug

SEQ ID NO: 2190753 - RNA, 19 nt, Artificial Sequence
  Description of Artificial Sequence: Synthetic oligonucleotide
  Antisense strand to SEQ ID NO: 2190752
caucucaucccagagaccc

SEQ ID NO: 2190754 - RNA, 19 nt, Artificial Sequence
  Description of Artificial Sequence: Synthetic oligonucleotide
  Sense strand starting at position 3913 of SEQ ID NO: 1883390
ccgcuuuaaggcuggaaga

SEQ ID NO: 2190755 - RNA, 19 nt, Artificial Sequence
  Description of Artificial Sequence: Synthetic oligonucleotide
  Antisense strand to SEQ ID NO: 2190754
ucuuccagccuuaaagcgg

SEQ ID NO: 2190756 - RNA, 19 nt, Artificial Sequence
  Description of Artificial Sequence: Synthetic oligonucleotide
  Sense strand starting at position 3915 of SEQ ID NO: 1883390
gcuuuaaggcuggaagaga

SEQ ID NO: 2190757 - RNA, 19 nt, Artificial Sequence
  Description of Artificial Sequence: Synthetic oligonucleotide
  Antisense strand to SEQ ID NO: 2190756
ucucuuccagccuuaaagc

SEQ ID NO: 2190758 - RNA, 19 nt, Artificial Sequence
  Description of Artificial Sequence: Synthetic oligonucleotide
  Sense strand starting at position 201 of SEQ ID NO: 1883391
aaaggugggcuguagucaa

SEQ ID NO: 2190759 - RNA, 19 nt, Artificial Sequence
  Description of Artificial Sequence: Synthetic oligonucleotide
  Antisense strand to SEQ ID NO: 2190758
uugacuacagcccaccuuu

SEQ ID NO: 2190760 - RNA, 19 nt, Artificial Sequence
  Description of Artificial Sequence: Synthetic oligonucleotide
  Sense strand starting at position 242 of SEQ ID NO: 1883391
gaacuaacgguuuagcuau

SEQ ID NO: 2190761 - RNA, 19 nt, Artificial Sequence
  Description of Artificial Sequence: Synthetic oligonucleotide
  Antisense strand to SEQ ID NO: 2190760
auagcuaaaccguuaguuc

SEQ ID NO: 2190762 - RNA, 19 nt, Artificial Sequence
  Description of Artificial Sequence: Synthetic oligonucleotide
  Sense strand starting at position 248 of SEQ ID NO: 1883391
acgguuuagcuaugggaaa

SEQ ID NO: 2190763 - RNA, 19 nt, Artificial Sequence
  Description of Artificial Sequence: Synthetic oligonucleotide
  Antisense strand to SEQ ID NO: 2190762
uuucccauagcuaaaccgu

SEQ ID NO: 2190764 - RNA, 19 nt, Artificial Sequence
  Description of Artificial Sequence: Synthetic oligonucleotide
  Sense strand starting at position 281 of SEQ ID NO: 1883391
uauccuuugguaggacaga

SEQ ID NO: 2190765 - RNA, 19 nt, Artificial Sequence
  Description of Artificial Sequence: Synthetic oligonucleotide
  Antisense strand to SEQ ID NO: 2190764
ucuguccuaccaaaggaua

SEQ ID NO: 2190766 - RNA, 19 nt, Artificial Sequence
  Description of Artificial Sequence: Synthetic oligonucleotide
  Sense strand starting at position 292 of SEQ ID NO: 1883391
aggacagaaucccaagaua

SEQ ID NO: 2190767 - RNA, 19 nt, Artificial Sequence
  Description of Artificial Sequence: Synthetic oligonucleotide
  Antisense strand to SEQ ID NO: 2190766
uaucuugggauucuguccu

SEQ ID NO: 2190768 - RNA, 19 nt, Artificial Sequence
  Description of Artificial Sequence: Synthetic oligonucleotide
  Sense strand starting at position 391 of SEQ ID NO: 1883391
agacgugguaacuauaauu

SEQ ID NO: 2190769 - RNA, 19 nt, Artificial Sequence
  Description of Artificial Sequence: Synthetic oligonucleotide
  Antisense strand to SEQ ID NO: 2190768
aauuauaguuaccacgucu

SEQ ID NO: 2190770 - RNA, 19 nt, Artificial Sequence
  Description of Artificial Sequence: Synthetic oligonucleotide
  Sense strand starting at position 453 of SEQ ID NO: 1883391
ugaacacauucugcaaagu

SEQ ID NO: 2190771 - RNA, 19 nt, Artificial Sequence
  Description of Artificial Sequence: Synthetic oligonucleotide
  Antisense strand to SEQ ID NO: 2190770
acuuugcagaauguguuca

SEQ ID NO: 2190772 - RNA, 19 nt, Artificial Sequence
  Description of Artificial Sequence: Synthetic oligonucleotide
  Sense strand starting at position 520 of SEQ ID NO: 1883391
uuucuaggacauggugaau

SEQ ID NO: 2190773 - RNA, 19 nt, Artificial Sequence
  Description of Artificial Sequence: Synthetic oligonucleotide
  Antisense strand to SEQ ID NO: 2190772
auucaccauguccuagaaa

SEQ ID NO: 2190774 - RNA, 19 nt, Artificial Sequence
  Description of Artificial Sequence: Synthetic oligonucleotide
  Sense strand starting at position 532 of SEQ ID NO: 1883391
ggugaauccagacagguuc

SEQ ID NO: 2190775 - RNA, 19 nt, Artificial Sequence
  Description of Artificial Sequence: Synthetic oligonucleotide
  Antisense strand to SEQ ID NO: 2190774
gaaccugucuggauucacc

SEQ ID NO: 2190776 - RNA, 19 nt, Artificial Sequence
  Description of Artificial Sequence: Synthetic oligonucleotide
  Sense strand starting at position 943 of SEQ ID NO: 1883391
gagaaaguaucagugucca

SEQ ID NO: 2190777 - RNA, 19 nt, Artificial Sequence
  Description of Artificial Sequence: Synthetic oligonucleotide
  Antisense strand to SEQ ID NO: 2190776
uggacacugauacuuucuc

SEQ ID NO: 2190778 - RNA, 19 nt, Artificial Sequence
  Description of Artificial Sequence: Synthetic oligonucleotide
  Sense strand starting at position 997 of SEQ ID NO: 1883391
gaaauaucagguuguuagg

SEQ ID NO: 2190779 - RNA, 19 nt, Artificial Sequence
  Description of Artificial Sequence: Synthetic oligonucleotide
  Antisense strand to SEQ ID NO: 2190778
ccuaacaaccugauauuuc

SEQ ID NO: 2190780 - RNA, 19 nt, Artificial Sequence
  Description of Artificial Sequence: Synthetic oligonucleotide
  Sense strand starting at position 1004 of SEQ ID NO: 1883391
cagguuguuaggcaucaga

SEQ ID NO: 2190781 - RNA, 19 nt, Artificial Sequence
  Description of Artificial Sequence: Synthetic oligonucleotide
  Antisense strand to SEQ ID NO: 2190780
ucugaugccuaacaaccug

SEQ ID NO: 2190782 - RNA, 19 nt, Artificial Sequence
  Description of Artificial Sequence: Synthetic oligonucleotide
  Sense strand starting at position 1007 of SEQ ID NO: 1883391
guuguuaggcaucagagga

SEQ ID NO: 2190783 - RNA, 19 nt, Artificial Sequence
  Description of Artificial Sequence: Synthetic oligonucleotide
  Antisense strand to SEQ ID NO: 2190782
uccucugaugccuaacaac

SEQ ID NO: 2190784 - RNA, 19 nt, Artificial Sequence
  Description of Artificial Sequence: Synthetic oligonucleotide
  Sense strand starting at position 1032 of SEQ ID NO: 1883391
ggaagaggugucugcauaa

SEQ ID NO: 2190785 - RNA, 19 nt, Artificial Sequence
  Description of Artificial Sequence: Synthetic oligonucleotide
  Antisense strand to SEQ ID NO: 2190784
uuaugcagacaccucuucc

SEQ ID NO: 2190786 - RNA, 19 nt, Artificial Sequence
  Description of Artificial Sequence: Synthetic oligonucleotide
  Sense strand starting at position 1060 of SEQ ID NO: 1883391
ggccuuugauucuuuauuu

SEQ ID NO: 2190787 - RNA, 19 nt, Artificial Sequence
  Description of Artificial Sequence: Synthetic oligonucleotide
  Antisense strand to SEQ ID NO: 2190786
aaauaaagaaucaaaggcc

SEQ ID NO: 2190788 - RNA, 19 nt, Artificial Sequence
  Description of Artificial Sequence: Synthetic oligonucleotide
  Sense strand starting at position 1222 of SEQ ID NO: 1883391
ucaggucuuugauucuuaa

SEQ ID NO: 2190789 - RNA, 19 nt, Artificial Sequence
  Description of Artificial Sequence: Synthetic oligonucleotide
  Antisense strand to SEQ ID NO: 2190788
uuaagaaucaaagaccuga

SEQ ID NO: 2190790 - RNA, 19 nt, Artificial Sequence
  Description of Artificial Sequence: Synthetic oligonucleotide
  Sense strand starting at position 1225 of SEQ ID NO: 1883391
ggucuuugauucuuaagaa

SEQ ID NO: 2190791 - RNA, 19 nt, Artificial Sequence
  Description of Artificial Sequence: Synthetic oligonucleotide
  Antisense strand to SEQ ID NO: 2190790
uucuuaagaaucaaagacc

SEQ ID NO: 2190792 - RNA, 19 nt, Artificial Sequence
  Description of Artificial Sequence: Synthetic oligonucleotide
  Sense strand starting at position 1691 of SEQ ID NO: 1883391
gcuggaaacuaccugagaa

SEQ ID NO: 2190793 - RNA, 19 nt, Artificial Sequence
  Description of Artificial Sequence: Synthetic oligonucleotide
  Antisense strand to SEQ ID NO: 2190792
uucucagguaguuuccagc

SEQ ID NO: 2190794 - RNA, 19 nt, Artificial Sequence
  Description of Artificial Sequence: Synthetic oligonucleotide
  Sense strand starting at position 1765 of SEQ ID NO: 1883391
ugcagcaucagugaugacu

SEQ ID NO: 2190795 - RNA, 19 nt, Artificial Sequence
  Description of Artificial Sequence: Synthetic oligonucleotide
  Antisense strand to SEQ ID NO: 2190794
agucaucacugaugcugca

SEQ ID NO: 2190796 - RNA, 19 nt, Artificial Sequence
  Description of Artificial Sequence: Synthetic oligonucleotide
  Sense strand starting at position 2117 of SEQ ID NO: 1883391
ugcgcagaugaaugaauua

SEQ ID NO: 2190797 - RNA, 19 nt, Artificial Sequence
  Description of Artificial Sequence: Synthetic oligonucleotide
  Antisense strand to SEQ ID NO: 2190796
uaauucauucaucugcgca

SEQ ID NO: 2190798 - RNA, 19 nt, Artificial Sequence
  Description of Artificial Sequence: Synthetic oligonucleotide
  Sense strand starting at position 2238 of SEQ ID NO: 1883391
cacgaaauugagggucaua

SEQ ID NO: 2190799 - RNA, 19 nt, Artificial Sequence
  Description of Artificial Sequence: Synthetic oligonucleotide
  Antisense strand to SEQ ID NO: 2190798
uaugacccucaauuucgug

SEQ ID NO: 2190800 - RNA, 19 nt, Artificial Sequence
  Description of Artificial Sequence: Synthetic oligonucleotide
  Sense strand starting at position 2378 of SEQ ID NO: 1883391
aguacaugucaaugacauu

SEQ ID NO: 2190801 - RNA, 19 nt, Artificial Sequence
  Description of Artificial Sequence: Synthetic oligonucleotide
  Antisense strand to SEQ ID NO: 2190800
aaugucauugacauguacu

SEQ ID NO: 2190802 - RNA, 19 nt, Artificial Sequence
  Description of Artificial Sequence: Synthetic oligonucleotide
  Sense strand starting at position 2429 of SEQ ID NO: 1883391
gaaaguaagguaugaccua

SEQ ID NO: 2190803 - RNA, 19 nt, Artificial Sequence
  Description of Artificial Sequence: Synthetic oligonucleotide
  Antisense strand to SEQ ID NO: 2190802
uaggucauaccuuacuuuc

SEQ ID NO: 2190804 - RNA, 19 nt, Artificial Sequence
  Description of Artificial Sequence: Synthetic oligonucleotide
  Sense strand starting at position 2444 of SEQ ID NO: 1883391
ccuauuaugucuucugaga

SEQ ID NO: 2190805 - RNA, 19 nt, Artificial Sequence
  Description of Artificial Sequence: Synthetic oligonucleotide
  Antisense strand to SEQ ID NO: 2190804
ucucagaagacauaauagg

SEQ ID NO: 2190806 - RNA, 19 nt, Artificial Sequence
  Description of Artificial Sequence: Synthetic oligonucleotide
  Sense strand starting at position 2497 of SEQ ID NO: 1883391
agguacucugaaugcuaca

SEQ ID NO: 2190807 - RNA, 19 nt, Artificial Sequence
  Description of Artificial Sequence: Synthetic oligonucleotide
  Antisense strand to SEQ ID NO: 2190806
uguagcauucagaguaccu

SEQ ID NO: 2190808 - RNA, 19 nt, Artificial Sequence
  Description of Artificial Sequence: Synthetic oligonucleotide
  Sense strand starting at position 2522 of SEQ ID NO: 1883391
acuguuaaccgugaucaca

SEQ ID NO: 2190809 - RNA, 19 nt, Artificial Sequence
  Description of Artificial Sequence: Synthetic oligonucleotide
  Antisense strand to SEQ ID NO: 2190808
ugugaucacgguuaacagu

SEQ ID NO: 2190810 - RNA, 19 nt, Artificial Sequence
  Description of Artificial Sequence: Synthetic oligonucleotide
  Sense strand starting at position 2731 of SEQ ID NO: 1883391
cuccaauugugucuuagga

SEQ ID NO: 2190811 - RNA, 19 nt, Artificial Sequence
  Description of Artificial Sequence: Synthetic oligonucleotide
  Antisense strand to SEQ ID NO: 2190810
uccuaagacacaauuggag

SEQ ID NO: 2190812 - RNA, 19 nt, Artificial Sequence
  Description of Artificial Sequence: Synthetic oligonucleotide
  Sense strand starting at position 2806 of SEQ ID NO: 1883391
aggcuacugauacgaucua

SEQ ID NO: 2190813 - RNA, 19 nt, Artificial Sequence
  Description of Artificial Sequence: Synthetic oligonucleotide
  Antisense strand to SEQ ID NO: 2190812
uagaucguaucaguagccu

SEQ ID NO: 2190814 - RNA, 19 nt, Artificial Sequence
  Description of Artificial Sequence: Synthetic oligonucleotide
  Sense strand starting at position 2872 of SEQ ID NO: 1883391
gccacucauuuguccaguu

SEQ ID NO: 2190815 - RNA, 19 nt, Artificial Sequence
  Description of Artificial Sequence: Synthetic oligonucleotide
  Antisense strand to SEQ ID NO: 2190814
aacuggacaaaugaguggc

SEQ ID NO: 2190816 - RNA, 19 nt, Artificial Sequence
  Description of Artificial Sequence: Synthetic oligonucleotide
  Sense strand starting at position 2940 of SEQ ID NO: 1883391
acucaacuuguuuaacguu

SEQ ID NO: 2190817 - RNA, 19 nt, Artificial Sequence
  Description of Artificial Sequence: Synthetic oligonucleotide
  Antisense strand to SEQ ID NO: 2190816
aacguuaaacaaguugagu

SEQ ID NO: 2190818 - RNA, 19 nt, Artificial Sequence
  Description of Artificial Sequence: Synthetic oligonucleotide
  Sense strand starting at position 2947 of SEQ ID NO: 1883391
uuguuuaacguugaggagu

SEQ ID NO: 2190819 - RNA, 19 nt, Artificial Sequence
  Description of Artificial Sequence: Synthetic oligonucleotide
  Antisense strand to SEQ ID NO: 2190818
acuccucaacguuaaacaa

SEQ ID NO: 2190820 - RNA, 19 nt, Artificial Sequence
  Description of Artificial Sequence: Synthetic oligonucleotide
  Sense strand starting at position 3077 of SEQ ID NO: 1883391
cuagcaagucuugaguuua

SEQ ID NO: 2190821 - RNA, 19 nt, Artificial Sequence
  Description of Artificial Sequence: Synthetic oligonucleotide
  Antisense strand to SEQ ID NO: 2190820
uaaacucaagacuugcuag

SEQ ID NO: 2190822 - RNA, 19 nt, Artificial Sequence
  Description of Artificial Sequence: Synthetic oligonucleotide
  Sense strand starting at position 3115 of SEQ ID NO: 1883391
ggaccuccuguuuauauca

SEQ ID NO: 2190823 - RNA, 19 nt, Artificial Sequence
  Description of Artificial Sequence: Synthetic oligonucleotide
  Antisense strand to SEQ ID NO: 2190822
ugauauaaacaggaggucc

SEQ ID NO: 2190824 - RNA, 19 nt, Artificial Sequence
  Description of Artificial Sequence: Synthetic oligonucleotide
  Sense strand starting at position 3126 of SEQ ID NO: 1883391
uuauaucagcuuugggaca

SEQ ID NO: 2190825 - RNA, 19 nt, Artificial Sequence
  Description of Artificial Sequence: Synthetic oligonucleotide
  Antisense strand to SEQ ID NO: 2190824
ugucccaaagcugauauaa

SEQ ID NO: 2190826 - RNA, 19 nt, Artificial Sequence
  Description of Artificial Sequence: Synthetic oligonucleotide
  Sense strand starting at position 3145 of SEQ ID NO: 1883391
gaaacacuugguggcuauu

SEQ ID NO: 2190827 - RNA, 19 nt, Artificial Sequence
  Description of Artificial Sequence: Synthetic oligonucleotide
  Antisense strand to SEQ ID NO: 2190826
aauagccaccaaguguuuc

SEQ ID NO: 2190828 - RNA, 19 nt, Artificial Sequence
  Description of Artificial Sequence: Synthetic oligonucleotide
  Sense strand starting at position 3154 of SEQ ID NO: 1883391
gguggcuauuugcuagacu

SEQ ID NO: 2190829 - RNA, 19 nt, Artificial Sequence
  Description of Artificial Sequence: Synthetic oligonucleotide
  Antisense strand to SEQ ID NO: 2190828
agucuagcaaauagccacc

SEQ ID NO: 2190830 - RNA, 19 nt, Artificial Sequence
  Description of Artificial Sequence: Synthetic oligonucleotide
  Sense strand starting at position 3640 of SEQ ID NO: 1883391
agacuuccaccauggucaa

SEQ ID NO: 2190831 - RNA, 19 nt, Artificial Sequence
  Description of Artificial Sequence: Synthetic oligonucleotide
  Antisense strand to SEQ ID NO: 2190830
uugaccaugguggaagucu

SEQ ID NO: 2190832 - RNA, 19 nt, Artificial Sequence
  Description of Artificial Sequence: Synthetic oligonucleotide
  Sense strand starting at position 3673 of SEQ ID NO: 1883391
ugugauaucacugaacgug

SEQ ID NO: 2190833 - RNA, 19 nt, Artificial Sequence
  Description of Artificial Sequence: Synthetic oligonucleotide
  Antisense strand to SEQ ID NO: 2190832
cacguucagugauaucaca

SEQ ID NO: 2190834 - RNA, 19 nt, Artificial Sequence
  Description of Artificial Sequence: Synthetic oligonucleotide
  Sense strand starting at position 3768 of SEQ ID NO: 1883391
aaggucaugcaauaaguau

SEQ ID NO: 2190835 - RNA, 19 nt, Artificial Sequence
  Description of Artificial Sequence: Synthetic oligonucleotide
  Antisense strand to SEQ ID NO: 2190834
auacuuauugcaugaccuu

SEQ ID NO: 2190836 - RNA, 19 nt, Artificial Sequence
  Description of Artificial Sequence: Synthetic oligonucleotide
  Sense strand starting at position 3950 of SEQ ID NO: 1883391
guuggaaauaccgagcuga

SEQ ID NO: 2190837 - RNA, 19 nt, Artificial Sequence
  Description of Artificial Sequence: Synthetic oligonucleotide
  Antisense strand to SEQ ID NO: 2190836
ucagcucgguauuuccaac

SEQ ID NO: 2190838 - RNA, 19 nt, Artificial Sequence
  Description of Artificial Sequence: Synthetic oligonucleotide
  Sense strand starting at position 132 of SEQ ID NO: 1883392
cuccaaacucuguggaaga

SEQ ID NO: 2190839 - RNA, 19 nt, Artificial Sequence
  Description of Artificial Sequence: Synthetic oligonucleotide
  Antisense strand to SEQ ID NO: 2190838
ucuuccacagaguuuggag

SEQ ID NO: 2190840 - RNA, 19 nt, Artificial Sequence
  Description of Artificial Sequence: Synthetic oligonucleotide
  Sense strand starting at position 672 of SEQ ID NO: 1883392
augugaugucaccagggua

SEQ ID NO: 2190841 - RNA, 19 nt, Artificial Sequence
  Description of Artificial Sequence: Synthetic oligonucleotide
  Antisense strand to SEQ ID NO: 2190840
uacccuggugacaucacau

SEQ ID NO: 2190842 - RNA, 19 nt, Artificial Sequence
  Description of Artificial Sequence: Synthetic oligonucleotide
  Sense strand starting at position 890 of SEQ ID NO: 1883392
gggacaagcuuucugggaa

SEQ ID NO: 2190843 - RNA, 19 nt, Artificial Sequence
  Description of Artificial Sequence: Synthetic oligonucleotide
  Antisense strand to SEQ ID NO: 2190842
uucccagaaagcuuguccc

SEQ ID NO: 2190844 - RNA, 19 nt, Artificial Sequence
  Description of Artificial Sequence: Synthetic oligonucleotide
  Sense strand starting at position 891 of SEQ ID NO: 1883392
ggacaagcuuucugggaag

SEQ ID NO: 2190845 - RNA, 19 nt, Artificial Sequence
  Description of Artificial Sequence: Synthetic oligonucleotide
  Antisense strand to SEQ ID NO: 2190844
cuucccagaaagcuugucc

SEQ ID NO: 2190846 - RNA, 19 nt, Artificial Sequence
  Description of Artificial Sequence: Synthetic oligonucleotide
  Sense strand starting at position 893 of SEQ ID NO: 1883392
acaagcuuucugggaagcu

SEQ ID NO: 2190847 - RNA, 19 nt, Artificial Sequence
  Description of Artificial Sequence: Synthetic oligonucleotide
  Antisense strand to SEQ ID NO: 2190846
agcuucccagaaagcuugu

SEQ ID NO: 2190848 - RNA, 19 nt, Artificial Sequence
  Description of Artificial Sequence: Synthetic oligonucleotide
  Sense strand starting at position 894 of SEQ ID NO: 1883392
caagcuuucugggaagcuu

SEQ ID NO: 2190849 - RNA, 19 nt, Artificial Sequence
  Description of Artificial Sequence: Synthetic oligonucleotide
  Antisense strand to SEQ ID NO: 2190848
aagcuucccagaaagcuug

SEQ ID NO: 2190850 - RNA, 19 nt, Artificial Sequence
  Description of Artificial Sequence: Synthetic oligonucleotide
  Sense strand starting at position 1399 of SEQ ID NO: 1883392
ucgucauugcucugcagca

SEQ ID NO: 2190851 - RNA, 19 nt, Artificial Sequence
  Description of Artificial Sequence: Synthetic oligonucleotide
  Antisense strand to SEQ ID NO: 2190850
ugcugcagagcaaugacga

SEQ ID NO: 2190852 - RNA, 19 nt, Artificial Sequence
  Description of Artificial Sequence: Synthetic oligonucleotide
  Sense strand starting at position 1401 of SEQ ID NO: 1883392
gucauugcucugcagcaca

SEQ ID NO: 2190853 - RNA, 19 nt, Artificial Sequence
  Description of Artificial Sequence: Synthetic oligonucleotide
  Antisense strand to SEQ ID NO: 2190852
ugugcugcagagcaaugac

SEQ ID NO: 2190854 - RNA, 19 nt, Artificial Sequence
  Description of Artificial Sequence: Synthetic oligonucleotide
  Sense strand starting at position 2675 of SEQ ID NO: 1883392
cugagaggccucugggagu

SEQ ID NO: 2190855 - RNA, 19 nt, Artificial Sequence
  Description of Artificial Sequence: Synthetic oligonucleotide
  Antisense strand to SEQ ID NO: 2190854
acucccagaggccucucag

SEQ ID NO: 2190856 - RNA, 19 nt, Artificial Sequence
  Description of Artificial Sequence: Synthetic oligonucleotide
  Sense strand starting at position 2686 of SEQ ID NO: 1883392
cugggagucuagugcuauu

SEQ ID NO: 2190857 - RNA, 19 nt, Artificial Sequence
  Description of Artificial Sequence: Synthetic oligonucleotide
  Antisense strand to SEQ ID NO: 2190856
aauagcacuagacucccag

SEQ ID NO: 2190858 - RNA, 19 nt, Artificial Sequence
  Description of Artificial Sequence: Synthetic oligonucleotide
  Sense strand starting at position 2689 of SEQ ID NO: 1883392
ggagucuagugcuauuaga

SEQ ID NO: 2190859 - RNA, 19 nt, Artificial Sequence
  Description of Artificial Sequence: Synthetic oligonucleotide
  Antisense strand to SEQ ID NO: 2190858
ucuaauagcacuagacucc

SEQ ID NO: 2190860 - RNA, 19 nt, Artificial Sequence
  Description of Artificial Sequence: Synthetic oligonucleotide
  Sense strand starting at position 2810 of SEQ ID NO: 1883392
gagaaugcguguugaggca

SEQ ID NO: 2190861 - RNA, 19 nt, Artificial Sequence
  Description of Artificial Sequence: Synthetic oligonucleotide
  Antisense strand to SEQ ID NO: 2190860
ugccucaacacgcauucuc

SEQ ID NO: 2190862 - RNA, 19 nt, Artificial Sequence
  Description of Artificial Sequence: Synthetic oligonucleotide
  Sense strand starting at position 2857 of SEQ ID NO: 1883392
gauggagcaucucccgaaa

SEQ ID NO: 2190863 - RNA, 19 nt, Artificial Sequence
  Description of Artificial Sequence: Synthetic oligonucleotide
  Antisense strand to SEQ ID NO: 2190862
uuucgggagaugcuccauc

SEQ ID NO: 2190864 - RNA, 19 nt, Artificial Sequence
  Description of Artificial Sequence: Synthetic oligonucleotide
  Sense strand starting at position 2860 of SEQ ID NO: 1883392
ggagcaucucccgaaauca

SEQ ID NO: 2190865 - RNA, 19 nt, Artificial Sequence
  Description of Artificial Sequence: Synthetic oligonucleotide
  Antisense strand to SEQ ID NO: 2190864
ugauuucgggagaugcucc

SEQ ID NO: 2190866 - RNA, 19 nt, Artificial Sequence
  Description of Artificial Sequence: Synthetic oligonucleotide
  Sense strand starting at position 3395 of SEQ ID NO: 1883392
gucccuugcucaccuagau

SEQ ID NO: 2190867 - RNA, 19 nt, Artificial Sequence
  Description of Artificial Sequence: Synthetic oligonucleotide
  Antisense strand to SEQ ID NO: 2190866
aucuaggugagcaagggac

SEQ ID NO: 2190868 - RNA, 19 nt, Artificial Sequence
  Description of Artificial Sequence: Synthetic oligonucleotide
  Sense strand starting at position 3450 of SEQ ID NO: 1883392
cacaguagucccgaggguu

SEQ ID NO: 2190869 - RNA, 19 nt, Artificial Sequence
  Description of Artificial Sequence: Synthetic oligonucleotide
  Antisense strand to SEQ ID NO: 2190868
aacccucgggacuacugug

SEQ ID NO: 2190870 - RNA, 19 nt, Artificial Sequence
  Description of Artificial Sequence: Synthetic oligonucleotide
  Sense strand starting at position 3539 of SEQ ID NO: 1883392
ccgugagcucugcagccua

SEQ ID NO: 2190871 - RNA, 19 nt, Artificial Sequence
  Description of Artificial Sequence: Synthetic oligonucleotide
  Antisense strand to SEQ ID NO: 2190870
uaggcugcagagcucacgg

SEQ ID NO: 2190872 - RNA, 19 nt, Artificial Sequence
  Description of Artificial Sequence: Synthetic oligonucleotide
  Sense strand starting at position 3628 of SEQ ID NO: 1883392
aggugucaccagugaagga

SEQ ID NO: 2190873 - RNA, 19 nt, Artificial Sequence
  Description of Artificial Sequence: Synthetic oligonucleotide
  Antisense strand to SEQ ID NO: 2190872
uccuucacuggugacaccu

SEQ ID NO: 2190874 - RNA, 19 nt, Artificial Sequence
  Description of Artificial Sequence: Synthetic oligonucleotide
  Sense strand starting at position 722 of SEQ ID NO: 1883393
accucaucgucucuaguaa

SEQ ID NO: 2190875 - RNA, 19 nt, Artificial Sequence
  Description of Artificial Sequence: Synthetic oligonucleotide
  Antisense strand to SEQ ID NO: 2190874
uuacuagagacgaugaggu

SEQ ID NO: 2190876 - RNA, 19 nt, Artificial Sequence
  Description of Artificial Sequence: Synthetic oligonucleotide
  Sense strand starting at position 723 of SEQ ID NO: 1883393
ccucaucgucucuaguaau

SEQ ID NO: 2190877 - RNA, 19 nt, Artificial Sequence
  Description of Artificial Sequence: Synthetic oligonucleotide
  Antisense strand to SEQ ID NO: 2190876
auuacuagagacgaugagg

SEQ ID NO: 2190878 - RNA, 19 nt, Artificial Sequence
  Description of Artificial Sequence: Synthetic oligonucleotide
  Sense strand starting at position 744 of SEQ ID NO: 1883393
acggaaacuucuuaacugu

SEQ ID NO: 2190879 - RNA, 19 nt, Artificial Sequence
  Description of Artificial Sequence: Synthetic oligonucleotide
  Antisense strand to SEQ ID NO: 2190878
acaguuaagaaguuuccgu

SEQ ID NO: 2190880 - RNA, 19 nt, Artificial Sequence
  Description of Artificial Sequence: Synthetic oligonucleotide
  Sense strand starting at position 1370 of SEQ ID NO: 1883393
ggguaaaggcucuguugac

SEQ ID NO: 2190881 - RNA, 19 nt, Artificial Sequence
  Description of Artificial Sequence: Synthetic oligonucleotide
  Antisense strand to SEQ ID NO: 2190880
gucaacagagccuuuaccc

SEQ ID NO: 2190882 - RNA, 19 nt, Artificial Sequence
  Description of Artificial Sequence: Synthetic oligonucleotide
  Sense strand starting at position 1371 of SEQ ID NO: 1883393
gguaaaggcucuguugacu

SEQ ID NO: 2190883 - RNA, 19 nt, Artificial Sequence
  Description of Artificial Sequence: Synthetic oligonucleotide
  Antisense strand to SEQ ID NO: 2190882
agucaacagagccuuuacc

SEQ ID NO: 2190884 - RNA, 19 nt, Artificial Sequence
  Description of Artificial Sequence: Synthetic oligonucleotide
  Sense strand starting at position 1860 of SEQ ID NO: 1883393
cuguauggcuugguggaaa

SEQ ID NO: 2190885 - RNA, 19 nt, Artificial Sequence
  Description of Artificial Sequence: Synthetic oligonucleotide
  Antisense strand to SEQ ID NO: 2190884
uuuccaccaagccauacag

SEQ ID NO: 2190886 - RNA, 19 nt, Artificial Sequence
  Description of Artificial Sequence: Synthetic oligonucleotide
  Sense strand starting at position 1863 of SEQ ID NO: 1883393
uauggcuugguggaaagau

SEQ ID NO: 2190887 - RNA, 19 nt, Artificial Sequence
  Description of Artificial Sequence: Synthetic oligonucleotide
  Antisense strand to SEQ ID NO: 2190886
aucuuuccaccaagccaua

SEQ ID NO: 2190888 - RNA, 19 nt, Artificial Sequence
  Description of Artificial Sequence: Synthetic oligonucleotide
  Sense strand starting at position 1906 of SEQ ID NO: 1883393
uaucguagcucccacagau

SEQ ID NO: 2190889 - RNA, 19 nt, Artificial Sequence
  Description of Artificial Sequence: Synthetic oligonucleotide
  Antisense strand to SEQ ID NO: 2190888
aucugugggagcuacgaua

SEQ ID NO: 2190890 - RNA, 19 nt, Artificial Sequence
  Description of Artificial Sequence: Synthetic oligonucleotide
  Sense strand starting at position 1956 of SEQ ID NO: 1883393
gcagguguucccgcucuca

SEQ ID NO: 2190891 - RNA, 19 nt, Artificial Sequence
  Description of Artificial Sequence: Synthetic oligonucleotide
  Antisense strand to SEQ ID NO: 2190890
ugagagcgggaacaccugc

SEQ ID NO: 2190892 - RNA, 19 nt, Artificial Sequence
  Description of Artificial Sequence: Synthetic oligonucleotide
  Sense strand starting at position 2305 of SEQ ID NO: 1883393
gacggcucagcuggugaau

SEQ ID NO: 2190893 - RNA, 19 nt, Artificial Sequence
  Description of Artificial Sequence: Synthetic oligonucleotide
  Antisense strand to SEQ ID NO: 2190892
auucaccagcugagccguc

SEQ ID NO: 2190894 - RNA, 19 nt, Artificial Sequence
  Description of Artificial Sequence: Synthetic oligonucleotide
  Sense strand starting at position 2307 of SEQ ID NO: 1883393
cggcucagcuggugaauca

SEQ ID NO: 2190895 - RNA, 19 nt, Artificial Sequence
  Description of Artificial Sequence: Synthetic oligonucleotide
  Antisense strand to SEQ ID NO: 2190894
ugauucaccagcugagccg

SEQ ID NO: 2190896 - RNA, 19 nt, Artificial Sequence
  Description of Artificial Sequence: Synthetic oligonucleotide
  Sense strand starting at position 2480 of SEQ ID NO: 1883393
guaccuucccguggcagau

SEQ ID NO: 2190897 - RNA, 19 nt, Artificial Sequence
  Description of Artificial Sequence: Synthetic oligonucleotide
  Antisense strand to SEQ ID NO: 2190896
aucugccacgggaagguac

SEQ ID NO: 2190898 - RNA, 19 nt, Artificial Sequence
  Description of Artificial Sequence: Synthetic oligonucleotide
  Sense strand starting at position 2656 of SEQ ID NO: 1883393
gaguccucccugugagcca

SEQ ID NO: 2190899 - RNA, 19 nt, Artificial Sequence
  Description of Artificial Sequence: Synthetic oligonucleotide
  Antisense strand to SEQ ID NO: 2190898
uggcucacagggaggacuc

SEQ ID NO: 2190900 - RNA, 19 nt, Artificial Sequence
  Description of Artificial Sequence: Synthetic oligonucleotide
  Sense strand starting at position 2808 of SEQ ID NO: 1883393
cgggaacaguccucacaca

SEQ ID NO: 2190901 - RNA, 19 nt, Artificial Sequence
  Description of Artificial Sequence: Synthetic oligonucleotide
  Antisense strand to SEQ ID NO: 2190900
ugugugaggacuguucccg

SEQ ID NO: 2190902 - RNA, 19 nt, Artificial Sequence
  Description of Artificial Sequence: Synthetic oligonucleotide
  Sense strand starting at position 2853 of SEQ ID NO: 1883393
gcagggagccgucgucaga

SEQ ID NO: 2190903 - RNA, 19 nt, Artificial Sequence
  Description of Artificial Sequence: Synthetic oligonucleotide
  Antisense strand to SEQ ID NO: 2190902
ucugacgacggcucccugc

SEQ ID NO: 2190904 - RNA, 19 nt, Artificial Sequence
  Description of Artificial Sequence: Synthetic oligonucleotide
  Sense strand starting at position 3291 of SEQ ID NO: 1883393
cgaagcguuccuggaugaa

SEQ ID NO: 2190905 - RNA, 19 nt, Artificial Sequence
  Description of Artificial Sequence: Synthetic oligonucleotide
  Antisense strand to SEQ ID NO: 2190904
uucauccaggaacgcuucg

SEQ ID NO: 2190906 - RNA, 19 nt, Artificial Sequence
  Description of Artificial Sequence: Synthetic oligonucleotide
  Sense strand starting at position 3340 of SEQ ID NO: 1883393
cgggaacuugcguggcaaa

SEQ ID NO: 2190907 - RNA, 19 nt, Artificial Sequence
  Description of Artificial Sequence: Synthetic oligonucleotide
  Antisense strand to SEQ ID NO: 2190906
uuugccacgcaaguucccg

SEQ ID NO: 2190908 - RNA, 19 nt, Artificial Sequence
  Description of Artificial Sequence: Synthetic oligonucleotide
  Sense strand starting at position 7 of SEQ ID NO: 1883394
agauaaacauuagaagaca

SEQ ID NO: 2190909 - RNA, 19 nt, Artificial Sequence
  Description of Artificial Sequence: Synthetic oligonucleotide
  Antisense strand to SEQ ID NO: 2190908
ugucuucuaauguuuaucu

SEQ ID NO: 2190910 - RNA, 19 nt, Artificial Sequence
  Description of Artificial Sequence: Synthetic oligonucleotide
  Sense strand starting at position 77 of SEQ ID NO: 1883394
uguaauauaugcccaugaa

SEQ ID NO: 2190911 - RNA, 19 nt, Artificial Sequence
  Description of Artificial Sequence: Synthetic oligonucleotide
  Antisense strand to SEQ ID NO: 2190910
uucaugggcauauauuaca

SEQ ID NO: 2190912 - RNA, 19 nt, Artificial Sequence
  Description of Artificial Sequence: Synthetic oligonucleotide
  Sense strand starting at position 78 of SEQ ID NO: 1883394
guaauauaugcccaugaau

SEQ ID NO: 2190913 - RNA, 19 nt, Artificial Sequence
  Description of Artificial Sequence: Synthetic oligonucleotide
  Antisense strand to SEQ ID NO: 2190912
auucaugggcauauauuac

SEQ ID NO: 2190914 - RNA, 19 nt, Artificial Sequence
  Description of Artificial Sequence: Synthetic oligonucleotide
  Sense strand starting at position 342 of SEQ ID NO: 1883394
ggcuuacagucuccuagaa

SEQ ID NO: 2190915 - RNA, 19 nt, Artificial Sequence
  Description of Artificial Sequence: Synthetic oligonucleotide
  Antisense strand to SEQ ID NO: 2190914
uucuaggagacuguaagcc

SEQ ID NO: 2190916 - RNA, 19 nt, Artificial Sequence
  Description of Artificial Sequence: Synthetic oligonucleotide
  Sense strand starting at position 349 of SEQ ID NO: 1883394
agucuccuagaauaauguu

SEQ ID NO: 2190917 - RNA, 19 nt, Artificial Sequence
  Description of Artificial Sequence: Synthetic oligonucleotide
  Antisense strand to SEQ ID NO: 2190916
aacauuauucuaggagacu

SEQ ID NO: 2190918 - RNA, 19 nt, Artificial Sequence
  Description of Artificial Sequence: Synthetic oligonucleotide
  Sense strand starting at position 358 of SEQ ID NO: 1883394
gaauaauguuaggacauuu

SEQ ID NO: 2190919 - RNA, 19 nt, Artificial Sequence
  Description of Artificial Sequence: Synthetic oligonucleotide
  Antisense strand to SEQ ID NO: 2190918
aaauguccuaacauuauuc

SEQ ID NO: 2190920 - RNA, 19 nt, Artificial Sequence
  Description of Artificial Sequence: Synthetic oligonucleotide
  Sense strand starting at position 443 of SEQ ID NO: 1883394
cuggaaauauaggaaagau

SEQ ID NO: 2190921 - RNA, 19 nt, Artificial Sequence
  Description of Artificial Sequence: Synthetic oligonucleotide
  Antisense strand to SEQ ID NO: 2190920
aucuuuccuauauuuccag

SEQ ID NO: 2190922 - RNA, 19 nt, Artificial Sequence
  Description of Artificial Sequence: Synthetic oligonucleotide
  Sense strand starting at position 634 of SEQ ID NO: 1883394
augaaagcugucugaucca

SEQ ID NO: 2190923 - RNA, 19 nt, Artificial Sequence
  Description of Artificial Sequence: Synthetic oligonucleotide
  Antisense strand to SEQ ID NO: 2190922
uggaucagacagcuuucau

SEQ ID NO: 2190924 - RNA, 19 nt, Artificial Sequence
  Description of Artificial Sequence: Synthetic oligonucleotide
  Sense strand starting at position 641 of SEQ ID NO: 1883394
cugucugauccacauguca

SEQ ID NO: 2190925 - RNA, 19 nt, Artificial Sequence
  Description of Artificial Sequence: Synthetic oligonucleotide
  Antisense strand to SEQ ID NO: 2190924
ugacauguggaucagacag

SEQ ID NO: 2190926 - RNA, 19 nt, Artificial Sequence
  Description of Artificial Sequence: Synthetic oligonucleotide
  Sense strand starting at position 809 of SEQ ID NO: 1883394
caaaguguuccguugcuuu

SEQ ID NO: 2190927 - RNA, 19 nt, Artificial Sequence
  Description of Artificial Sequence: Synthetic oligonucleotide
  Antisense strand to SEQ ID NO: 2190926
aaagcaacggaacacuuug

SEQ ID NO: 2190928 - RNA, 19 nt, Artificial Sequence
  Description of Artificial Sequence: Synthetic oligonucleotide
  Sense strand starting at position 811 of SEQ ID NO: 1883394
aaguguuccguugcuuuga

SEQ ID NO: 2190929 - RNA, 19 nt, Artificial Sequence
  Description of Artificial Sequence: Synthetic oligonucleotide
  Antisense strand to SEQ ID NO: 2190928
ucaaagcaacggaacacuu

SEQ ID NO: 2190930 - RNA, 19 nt, Artificial Sequence
  Description of Artificial Sequence: Synthetic oligonucleotide
  Sense strand starting at position 814 of SEQ ID NO: 1883394
uguuccguugcuuugaauu

SEQ ID NO: 2190931 - RNA, 19 nt, Artificial Sequence
  Description of Artificial Sequence: Synthetic oligonucleotide
  Antisense strand to SEQ ID NO: 2190930
aauucaaagcaacggaaca

SEQ ID NO: 2190932 - RNA, 19 nt, Artificial Sequence
  Description of Artificial Sequence: Synthetic oligonucleotide
  Sense strand starting at position 868 of SEQ ID NO: 1883394
uggauuguuagcugagaca

SEQ ID NO: 2190933 - RNA, 19 nt, Artificial Sequence
  Description of Artificial Sequence: Synthetic oligonucleotide
  Antisense strand to SEQ ID NO: 2190932
ugucucagcuaacaaucca

SEQ ID NO: 2190934 - RNA, 19 nt, Artificial Sequence
  Description of Artificial Sequence: Synthetic oligonucleotide
  Sense strand starting at position 927 of SEQ ID NO: 1883394
ucagcugucccaggagaaa

SEQ ID NO: 2190935 - RNA, 19 nt, Artificial Sequence
  Description of Artificial Sequence: Synthetic oligonucleotide
  Antisense strand to SEQ ID NO: 2190934
uuucuccugggacagcuga

SEQ ID NO: 2190936 - RNA, 19 nt, Artificial Sequence
  Description of Artificial Sequence: Synthetic oligonucleotide
  Sense strand starting at position 1218 of SEQ ID NO: 1883394
ggaaccauccuuugugguu

SEQ ID NO: 2190937 - RNA, 19 nt, Artificial Sequence
  Description of Artificial Sequence: Synthetic oligonucleotide
  Antisense strand to SEQ ID NO: 2190936
aaccacaaaggaugguucc

SEQ ID NO: 2190938 - RNA, 19 nt, Artificial Sequence
  Description of Artificial Sequence: Synthetic oligonucleotide
  Sense strand starting at position 1219 of SEQ ID NO: 1883394
gaaccauccuuugugguuu

SEQ ID NO: 2190939 - RNA, 19 nt, Artificial Sequence
  Description of Artificial Sequence: Synthetic oligonucleotide
  Antisense strand to SEQ ID NO: 2190938
aaaccacaaaggaugguuc

SEQ ID NO: 2190940 - RNA, 19 nt, Artificial Sequence
  Description of Artificial Sequence: Synthetic oligonucleotide
  Sense strand starting at position 1636 of SEQ ID NO: 1883394
auuuguauuuagggcauaa

SEQ ID NO: 2190941 - RNA, 19 nt, Artificial Sequence
  Description of Artificial Sequence: Synthetic oligonucleotide
  Antisense strand to SEQ ID NO: 2190940
uuaugcccuaaauacaaau

SEQ ID NO: 2190942 - RNA, 19 nt, Artificial Sequence
  Description of Artificial Sequence: Synthetic oligonucleotide
  Sense strand starting at position 1760 of SEQ ID NO: 1883394
cgaugaccuaaauguaagu

SEQ ID NO: 2190943 - RNA, 19 nt, Artificial Sequence
  Description of Artificial Sequence: Synthetic oligonucleotide
  Antisense strand to SEQ ID NO: 2190942
acuuacauuuaggucaucg

SEQ ID NO: 2190944 - RNA, 19 nt, Artificial Sequence
  Description of Artificial Sequence: Synthetic oligonucleotide
  Sense strand starting at position 1765 of SEQ ID NO: 1883394
accuaaauguaaguuauca

SEQ ID NO: 2190945 - RNA, 19 nt, Artificial Sequence
  Description of Artificial Sequence: Synthetic oligonucleotide
  Antisense strand to SEQ ID NO: 2190944
ugauaacuuacauuuaggu

SEQ ID NO: 2190946 - RNA, 19 nt, Artificial Sequence
  Description of Artificial Sequence: Synthetic oligonucleotide
  Sense strand starting at position 1846 of SEQ ID NO: 1883394
ccuuauuccucaguagaga

SEQ ID NO: 2190947 - RNA, 19 nt, Artificial Sequence
  Description of Artificial Sequence: Synthetic oligonucleotide
  Antisense strand to SEQ ID NO: 2190946
ucucuacugaggaauaagg

SEQ ID NO: 2190948 - RNA, 19 nt, Artificial Sequence
  Description of Artificial Sequence: Synthetic oligonucleotide
  Sense strand starting at position 1881 of SEQ ID NO: 1883394
uuagaaaugagcuggcauu

SEQ ID NO: 2190949 - RNA, 19 nt, Artificial Sequence
  Description of Artificial Sequence: Synthetic oligonucleotide
  Antisense strand to SEQ ID NO: 2190948
aaugccagcucauuucuaa

SEQ ID NO: 2190950 - RNA, 19 nt, Artificial Sequence
  Description of Artificial Sequence: Synthetic oligonucleotide
  Sense strand starting at position 1895 of SEQ ID NO: 1883394
gcauucuucgcagcacuuu

SEQ ID NO: 2190951 - RNA, 19 nt, Artificial Sequence
  Description of Artificial Sequence: Synthetic oligonucleotide
  Antisense strand to SEQ ID NO: 2190950
aaagugcugcgaagaaugc

SEQ ID NO: 2190952 - RNA, 19 nt, Artificial Sequence
  Description of Artificial Sequence: Synthetic oligonucleotide
  Sense strand starting at position 1906 of SEQ ID NO: 1883394
agcacuuugucucucagga

SEQ ID NO: 2190953 - RNA, 19 nt, Artificial Sequence
  Description of Artificial Sequence: Synthetic oligonucleotide
  Antisense strand to SEQ ID NO: 2190952
uccugagagacaaagugcu

SEQ ID NO: 2190954 - RNA, 19 nt, Artificial Sequence
  Description of Artificial Sequence: Synthetic oligonucleotide
  Sense strand starting at position 1941 of SEQ ID NO: 1883394
agcuuuaauucugcuaaag

SEQ ID NO: 2190955 - RNA, 19 nt, Artificial Sequence
  Description of Artificial Sequence: Synthetic oligonucleotide
  Antisense strand to SEQ ID NO: 2190954
cuuuagcagaauuaaagcu

SEQ ID NO: 2190956 - RNA, 19 nt, Artificial Sequence
  Description of Artificial Sequence: Synthetic oligonucleotide
  Sense strand starting at position 2095 of SEQ ID NO: 1883394
aaagaaacccagugugguu

SEQ ID NO: 2190957 - RNA, 19 nt, Artificial Sequence
  Description of Artificial Sequence: Synthetic oligonucleotide
  Antisense strand to SEQ ID NO: 2190956
aaccacacuggguuucuuu

SEQ ID NO: 2190958 - RNA, 19 nt, Artificial Sequence
  Description of Artificial Sequence: Synthetic oligonucleotide
  Sense strand starting at position 2214 of SEQ ID NO: 1883394
gucaaccugcauugagaaa

SEQ ID NO: 2190959 - RNA, 19 nt, Artificial Sequence
  Description of Artificial Sequence: Synthetic oligonucleotide
  Antisense strand to SEQ ID NO: 2190958
uuucucaaugcagguugac

SEQ ID NO: 2190960 - RNA, 19 nt, Artificial Sequence
  Description of Artificial Sequence: Synthetic oligonucleotide
  Sense strand starting at position 2239 of SEQ ID NO: 1883394
ucaauauauuguccauggu

SEQ ID NO: 2190961 - RNA, 19 nt, Artificial Sequence
  Description of Artificial Sequence: Synthetic oligonucleotide
  Antisense strand to SEQ ID NO: 2190960
accauggacaauauauuga

SEQ ID NO: 2190962 - RNA, 19 nt, Artificial Sequence
  Description of Artificial Sequence: Synthetic oligonucleotide
  Sense strand starting at position 2243 of SEQ ID NO: 1883394
uauauuguccaugguaaga

SEQ ID NO: 2190963 - RNA, 19 nt, Artificial Sequence
  Description of Artificial Sequence: Synthetic oligonucleotide
  Antisense strand to SEQ ID NO: 2190962
ucuuaccauggacaauaua

SEQ ID NO: 2190964 - RNA, 19 nt, Artificial Sequence
  Description of Artificial Sequence: Synthetic oligonucleotide
  Sense strand starting at position 2879 of SEQ ID NO: 1883394
gccaacuuugagcaaauau

SEQ ID NO: 2190965 - RNA, 19 nt, Artificial Sequence
  Description of Artificial Sequence: Synthetic oligonucleotide
  Antisense strand to SEQ ID NO: 2190964
auauuugcucaaaguuggc

SEQ ID NO: 2190966 - RNA, 19 nt, Artificial Sequence
  Description of Artificial Sequence: Synthetic oligonucleotide
  Sense strand starting at position 2888 of SEQ ID NO: 1883394
gagcaaauauuugggacaa

SEQ ID NO: 2190967 - RNA, 19 nt, Artificial Sequence
  Description of Artificial Sequence: Synthetic oligonucleotide
  Antisense strand to SEQ ID NO: 2190966
uugucccaaauauuugcuc

SEQ ID NO: 2190968 - RNA, 19 nt, Artificial Sequence
  Description of Artificial Sequence: Synthetic oligonucleotide
  Sense strand starting at position 2889 of SEQ ID NO: 1883394
agcaaauauuugggacaau

SEQ ID NO: 2190969 - RNA, 19 nt, Artificial Sequence
  Description of Artificial Sequence: Synthetic oligonucleotide
  Antisense strand to SEQ ID NO: 2190968
auugucccaaauauuugcu

SEQ ID NO: 2190970 - RNA, 19 nt, Artificial Sequence
  Description of Artificial Sequence: Synthetic oligonucleotide
  Sense strand starting at position 2890 of SEQ ID NO: 1883394
gcaaauauuugggacaaua

SEQ ID NO: 2190971 - RNA, 19 nt, Artificial Sequence
  Description of Artificial Sequence: Synthetic oligonucleotide
  Antisense strand to SEQ ID NO: 2190970
uauugucccaaauauuugc

SEQ ID NO: 2190972 - RNA, 19 nt, Artificial Sequence
  Description of Artificial Sequence: Synthetic oligonucleotide
  Sense strand starting at position 2928 of SEQ ID NO: 1883394
gucuauugaugacccuaau

SEQ ID NO: 2190973 - RNA, 19 nt, Artificial Sequence
  Description of Artificial Sequence: Synthetic oligonucleotide
  Antisense strand to SEQ ID NO: 2190972
auuagggucaucaauagac

SEQ ID NO: 2190974 - RNA, 19 nt, Artificial Sequence
  Description of Artificial Sequence: Synthetic oligonucleotide
  Sense strand starting at position 3134 of SEQ ID NO: 1883394
aggauuuccugacauugag

SEQ ID NO: 2190975 - RNA, 19 nt, Artificial Sequence
  Description of Artificial Sequence: Synthetic oligonucleotide
  Antisense strand to SEQ ID NO: 2190974
cucaaugucaggaaauccu

SEQ ID NO: 2190976 - RNA, 19 nt, Artificial Sequence
  Description of Artificial Sequence: Synthetic oligonucleotide
  Sense strand starting at position 3140 of SEQ ID NO: 1883394
uccugacauugagccaaau

SEQ ID NO: 2190977 - RNA, 19 nt, Artificial Sequence
  Description of Artificial Sequence: Synthetic oligonucleotide
  Antisense strand to SEQ ID NO: 2190976
auuuggcucaaugucagga

SEQ ID NO: 2190978 - RNA, 19 nt, Artificial Sequence
  Description of Artificial Sequence: Synthetic oligonucleotide
  Sense strand starting at position 3180 of SEQ ID NO: 1883394
gccucagaaagcgaugaaa

SEQ ID NO: 2190979 - RNA, 19 nt, Artificial Sequence
  Description of Artificial Sequence: Synthetic oligonucleotide
  Antisense strand to SEQ ID NO: 2190978
uuucaucgcuuucugaggc

SEQ ID NO: 2190980 - RNA, 19 nt, Artificial Sequence
  Description of Artificial Sequence: Synthetic oligonucleotide
  Sense strand starting at position 3379 of SEQ ID NO: 1883394
gggagugucuaaccucaca

SEQ ID NO: 2190981 - RNA, 19 nt, Artificial Sequence
  Description of Artificial Sequence: Synthetic oligonucleotide
  Antisense strand to SEQ ID NO: 2190980
ugugagguuagacacuccc

SEQ ID NO: 2190982 - RNA, 19 nt, Artificial Sequence
  Description of Artificial Sequence: Synthetic oligonucleotide
  Sense strand starting at position 3439 of SEQ ID NO: 1883394
gagauacguuugguugaca

SEQ ID NO: 2190983 - RNA, 19 nt, Artificial Sequence
  Description of Artificial Sequence: Synthetic oligonucleotide
  Antisense strand to SEQ ID NO: 2190982
ugucaaccaaacguaucuc

SEQ ID NO: 2190984 - RNA, 19 nt, Artificial Sequence
  Description of Artificial Sequence: Synthetic oligonucleotide
  Sense strand starting at position 3440 of SEQ ID NO: 1883394
agauacguuugguugacau

SEQ ID NO: 2190985 - RNA, 19 nt, Artificial Sequence
  Description of Artificial Sequence: Synthetic oligonucleotide
  Antisense strand to SEQ ID NO: 2190984
augucaaccaaacguaucu

SEQ ID NO: 2190986 - RNA, 19 nt, Artificial Sequence
  Description of Artificial Sequence: Synthetic oligonucleotide
  Sense strand starting at position 3723 of SEQ ID NO: 1883394
gucagcugugccucagcaa

SEQ ID NO: 2190987 - RNA, 19 nt, Artificial Sequence
  Description of Artificial Sequence: Synthetic oligonucleotide
  Antisense strand to SEQ ID NO: 2190986
uugcugaggcacagcugac

SEQ ID NO: 2190988 - RNA, 19 nt, Artificial Sequence
  Description of Artificial Sequence: Synthetic oligonucleotide
  Sense strand starting at position 271 of SEQ ID NO: 1883395
ggaguugacacaugguuau

SEQ ID NO: 2190989 - RNA, 19 nt, Artificial Sequence
  Description of Artificial Sequence: Synthetic oligonucleotide
  Antisense strand to SEQ ID NO: 2190988
auaaccaugugucaacucc

SEQ ID NO: 2190990 - RNA, 19 nt, Artificial Sequence
  Description of Artificial Sequence: Synthetic oligonucleotide
  Sense strand starting at position 274 of SEQ ID NO: 1883395
guugacacaugguuauaca

SEQ ID NO: 2190991 - RNA, 19 nt, Artificial Sequence
  Description of Artificial Sequence: Synthetic oligonucleotide
  Antisense strand to SEQ ID NO: 2190990
uguauaaccaugugucaac

SEQ ID NO: 2190992 - RNA, 19 nt, Artificial Sequence
  Description of Artificial Sequence: Synthetic oligonucleotide
  Sense strand starting at position 310 of SEQ ID NO: 1883395
augaaacuugugcaugaca

SEQ ID NO: 2190993 - RNA, 19 nt, Artificial Sequence
  Description of Artificial Sequence: Synthetic oligonucleotide
  Antisense strand to SEQ ID NO: 2190992
ugucaugcacaaguuucau

SEQ ID NO: 2190994 - RNA, 19 nt, Artificial Sequence
  Description of Artificial Sequence: Synthetic oligonucleotide
  Sense strand starting at position 312 of SEQ ID NO: 1883395
gaaacuugugcaugacaga

SEQ ID NO: 2190995 - RNA, 19 nt, Artificial Sequence
  Description of Artificial Sequence: Synthetic oligonucleotide
  Antisense strand to SEQ ID NO: 2190994
ucugucaugcacaaguuuc

SEQ ID NO: 2190996 - RNA, 19 nt, Artificial Sequence
  Description of Artificial Sequence: Synthetic oligonucleotide
  Sense strand starting at position 322 of SEQ ID NO: 1883395
caugacagagguugcauua

SEQ ID NO: 2190997 - RNA, 19 nt, Artificial Sequence
  Description of Artificial Sequence: Synthetic oligonucleotide
  Antisense strand to SEQ ID NO: 2190996
uaaugcaaccucugucaug

SEQ ID NO: 2190998 - RNA, 19 nt, Artificial Sequence
  Description of Artificial Sequence: Synthetic oligonucleotide
  Sense strand starting at position 381 of SEQ ID NO: 1883395
gcacaugucuuauccauau

SEQ ID NO: 2190999 - RNA, 19 nt, Artificial Sequence
  Description of Artificial Sequence: Synthetic oligonucleotide
  Antisense strand to SEQ ID NO: 2190998
auauggauaagacaugugc

SEQ ID NO: 2191000 - RNA, 19 nt, Artificial Sequence
  Description of Artificial Sequence: Synthetic oligonucleotide
  Sense strand starting at position 700 of SEQ ID NO: 1883395
auagguaaaucacagagaa

SEQ ID NO: 2191001 - RNA, 19 nt, Artificial Sequence
  Description of Artificial Sequence: Synthetic oligonucleotide
  Antisense strand to SEQ ID NO: 2191000
uucucugugauuuaccuau

SEQ ID NO: 2191002 - RNA, 19 nt, Artificial Sequence
  Description of Artificial Sequence: Synthetic oligonucleotide
  Sense strand starting at position 867 of SEQ ID NO: 1883395
ucauauucuggugugcgua

SEQ ID NO: 2191003 - RNA, 19 nt, Artificial Sequence
  Description of Artificial Sequence: Synthetic oligonucleotide
  Antisense strand to SEQ ID NO: 2191002
uacgcacaccagaauauga

SEQ ID NO: 2191004 - RNA, 19 nt, Artificial Sequence
  Description of Artificial Sequence: Synthetic oligonucleotide
  Sense strand starting at position 1061 of SEQ ID NO: 1883395
auugcaguauaguuauaca

SEQ ID NO: 2191005 - RNA, 19 nt, Artificial Sequence
  Description of Artificial Sequence: Synthetic oligonucleotide
  Antisense strand to SEQ ID NO: 2191004
uguauaacuauacugcaau

SEQ ID NO: 2191006 - RNA, 19 nt, Artificial Sequence
  Description of Artificial Sequence: Synthetic oligonucleotide
  Sense strand starting at position 1169 of SEQ ID NO: 1883395
gcuacagaaugaucucaca

SEQ ID NO: 2191007 - RNA, 19 nt, Artificial Sequence
  Description of Artificial Sequence: Synthetic oligonucleotide
  Antisense strand to SEQ ID NO: 2191006
ugugagaucauucuguagc

SEQ ID NO: 2191008 - RNA, 19 nt, Artificial Sequence
  Description of Artificial Sequence: Synthetic oligonucleotide
  Sense strand starting at position 1232 of SEQ ID NO: 1883395
aacacucagcgacaguaua

SEQ ID NO: 2191009 - RNA, 19 nt, Artificial Sequence
  Description of Artificial Sequence: Synthetic oligonucleotide
  Antisense strand to SEQ ID NO: 2191008
uauacugucgcugaguguu

SEQ ID NO: 2191010 - RNA, 19 nt, Artificial Sequence
  Description of Artificial Sequence: Synthetic oligonucleotide
  Sense strand starting at position 1345 of SEQ ID NO: 1883395
ggagguaucaacuguaucu

SEQ ID NO: 2191011 - RNA, 19 nt, Artificial Sequence
  Description of Artificial Sequence: Synthetic oligonucleotide
  Antisense strand to SEQ ID NO: 2191010
agauacaguugauaccucc

SEQ ID NO: 2191012 - RNA, 19 nt, Artificial Sequence
  Description of Artificial Sequence: Synthetic oligonucleotide
  Sense strand starting at position 1347 of SEQ ID NO: 1883395
agguaucaacuguaucuuu

SEQ ID NO: 2191013 - RNA, 19 nt, Artificial Sequence
  Description of Artificial Sequence: Synthetic oligonucleotide
  Antisense strand to SEQ ID NO: 2191012
aaagauacaguugauaccu

SEQ ID NO: 2191014 - RNA, 19 nt, Artificial Sequence
  Description of Artificial Sequence: Synthetic oligonucleotide
  Sense strand starting at position 1439 of SEQ ID NO: 1883395
uugugaguacauggauauu

SEQ ID NO: 2191015 - RNA, 19 nt, Artificial Sequence
  Description of Artificial Sequence: Synthetic oligonucleotide
  Antisense strand to SEQ ID NO: 2191014
aauauccauguacucacaa

SEQ ID NO: 2191016 - RNA, 19 nt, Artificial Sequence
  Description of Artificial Sequence: Synthetic oligonucleotide
  Sense strand starting at position 1609 of SEQ ID NO: 1883395
guaugugugauauaguuua

SEQ ID NO: 2191017 - RNA, 19 nt, Artificial Sequence
  Description of Artificial Sequence: Synthetic oligonucleotide
  Antisense strand to SEQ ID NO: 2191016
uaaacuauaucacacauac

SEQ ID NO: 2191018 - RNA, 19 nt, Artificial Sequence
  Description of Artificial Sequence: Synthetic oligonucleotide
  Sense strand starting at position 1614 of SEQ ID NO: 1883395
ugugauauaguuuauguac

SEQ ID NO: 2191019 - RNA, 19 nt, Artificial Sequence
  Description of Artificial Sequence: Synthetic oligonucleotide
  Antisense strand to SEQ ID NO: 2191018
guacauaaacuauaucaca

SEQ ID NO: 2191020 - RNA, 19 nt, Artificial Sequence
  Description of Artificial Sequence: Synthetic oligonucleotide
  Sense strand starting at position 1622 of SEQ ID NO: 1883395
aguuuauguacuggguaaa

SEQ ID NO: 2191021 - RNA, 19 nt, Artificial Sequence
  Description of Artificial Sequence: Synthetic oligonucleotide
  Antisense strand to SEQ ID NO: 2191020
uuuacccaguacauaaacu

SEQ ID NO: 2191022 - RNA, 19 nt, Artificial Sequence
  Description of Artificial Sequence: Synthetic oligonucleotide
  Sense strand starting at position 1665 of SEQ ID NO: 1883395
auguauugguaauuguaca

SEQ ID NO: 2191023 - RNA, 19 nt, Artificial Sequence
  Description of Artificial Sequence: Synthetic oligonucleotide
  Antisense strand to SEQ ID NO: 2191022
uguacaauuaccaauacau

SEQ ID NO: 2191024 - RNA, 19 nt, Artificial Sequence
  Description of Artificial Sequence: Synthetic oligonucleotide
  Sense strand starting at position 2220 of SEQ ID NO: 1883395
acaguuuaauaccuauguu

SEQ ID NO: 2191025 - RNA, 19 nt, Artificial Sequence
  Description of Artificial Sequence: Synthetic oligonucleotide
  Antisense strand to SEQ ID NO: 2191024
aacauagguauuaaacugu

SEQ ID NO: 2191026 - RNA, 19 nt, Artificial Sequence
  Description of Artificial Sequence: Synthetic oligonucleotide
  Sense strand starting at position 2257 of SEQ ID NO: 1883395
ucauuuccguauguugaaa

SEQ ID NO: 2191027 - RNA, 19 nt, Artificial Sequence
  Description of Artificial Sequence: Synthetic oligonucleotide
  Antisense strand to SEQ ID NO: 2191026
uuucaacauacggaaauga

SEQ ID NO: 2191028 - RNA, 19 nt, Artificial Sequence
  Description of Artificial Sequence: Synthetic oligonucleotide
  Sense strand starting at position 2377 of SEQ ID NO: 1883395
agcucaaacugguucuaaa

SEQ ID NO: 2191029 - RNA, 19 nt, Artificial Sequence
  Description of Artificial Sequence: Synthetic oligonucleotide
  Antisense strand to SEQ ID NO: 2191028
uuuagaaccaguuugagcu

SEQ ID NO: 2191030 - RNA, 19 nt, Artificial Sequence
  Description of Artificial Sequence: Synthetic oligonucleotide
  Sense strand starting at position 2403 of SEQ ID NO: 1883395
aaagaauucuagguauguc

SEQ ID NO: 2191031 - RNA, 19 nt, Artificial Sequence
  Description of Artificial Sequence: Synthetic oligonucleotide
  Antisense strand to SEQ ID NO: 2191030
gacauaccuagaauucuuu

SEQ ID NO: 2191032 - RNA, 19 nt, Artificial Sequence
  Description of Artificial Sequence: Synthetic oligonucleotide
  Sense strand starting at position 2460 of SEQ ID NO: 1883395
auguuugaggucugguauu

SEQ ID NO: 2191033 - RNA, 19 nt, Artificial Sequence
  Description of Artificial Sequence: Synthetic oligonucleotide
  Antisense strand to SEQ ID NO: 2191032
aauaccagaccucaaacau

SEQ ID NO: 2191034 - RNA, 19 nt, Artificial Sequence
  Description of Artificial Sequence: Synthetic oligonucleotide
  Sense strand starting at position 2658 of SEQ ID NO: 1883395
caguucuggcaagaaauug

SEQ ID NO: 2191035 - RNA, 19 nt, Artificial Sequence
  Description of Artificial Sequence: Synthetic oligonucleotide
  Antisense strand to SEQ ID NO: 2191034
caauuucuugccagaacug

SEQ ID NO: 2191036 - RNA, 19 nt, Artificial Sequence
  Description of Artificial Sequence: Synthetic oligonucleotide
  Sense strand starting at position 2700 of SEQ ID NO: 1883395
uuuccuagucucuaaguua

SEQ ID NO: 2191037 - RNA, 19 nt, Artificial Sequence
  Description of Artificial Sequence: Synthetic oligonucleotide
  Antisense strand to SEQ ID NO: 2191036
uaacuuagagacuaggaaa

SEQ ID NO: 2191038 - RNA, 19 nt, Artificial Sequence
  Description of Artificial Sequence: Synthetic oligonucleotide
  Sense strand starting at position 2703 of SEQ ID NO: 1883395
ccuagucucuaaguuauga

SEQ ID NO: 2191039 - RNA, 19 nt, Artificial Sequence
  Description of Artificial Sequence: Synthetic oligonucleotide
  Antisense strand to SEQ ID NO: 2191038
ucauaacuuagagacuagg

SEQ ID NO: 2191040 - RNA, 19 nt, Artificial Sequence
  Description of Artificial Sequence: Synthetic oligonucleotide
  Sense strand starting at position 2713 of SEQ ID NO: 1883395
aaguuaugaguugguuuau

SEQ ID NO: 2191041 - RNA, 19 nt, Artificial Sequence
  Description of Artificial Sequence: Synthetic oligonucleotide
  Antisense strand to SEQ ID NO: 2191040
auaaaccaacucauaacuu

SEQ ID NO: 2191042 - RNA, 19 nt, Artificial Sequence
  Description of Artificial Sequence: Synthetic oligonucleotide
  Sense strand starting at position 2714 of SEQ ID NO: 1883395
aguuaugaguugguuuauu

SEQ ID NO: 2191043 - RNA, 19 nt, Artificial Sequence
  Description of Artificial Sequence: Synthetic oligonucleotide
  Antisense strand to SEQ ID NO: 2191042
aauaaaccaacucauaacu

SEQ ID NO: 2191044 - RNA, 19 nt, Artificial Sequence
  Description of Artificial Sequence: Synthetic oligonucleotide
  Sense strand starting at position 2810 of SEQ ID NO: 1883395
uggcauucucagugaucaa

SEQ ID NO: 2191045 - RNA, 19 nt, Artificial Sequence
  Description of Artificial Sequence: Synthetic oligonucleotide
  Antisense strand to SEQ ID NO: 2191044
uugaucacugagaaugcca

SEQ ID NO: 2191046 - RNA, 19 nt, Artificial Sequence
  Description of Artificial Sequence: Synthetic oligonucleotide
  Sense strand starting at position 2838 of SEQ ID NO: 1883395
agcauuuauuaugugcuaa

SEQ ID NO: 2191047 - RNA, 19 nt, Artificial Sequence
  Description of Artificial Sequence: Synthetic oligonucleotide
  Antisense strand to SEQ ID NO: 2191046
uuagcacauaauaaaugcu

SEQ ID NO: 2191048 - RNA, 19 nt, Artificial Sequence
  Description of Artificial Sequence: Synthetic oligonucleotide
  Sense strand starting at position 3002 of SEQ ID NO: 1883395
uugcgaagaguucagagua

SEQ ID NO: 2191049 - RNA, 19 nt, Artificial Sequence
  Description of Artificial Sequence: Synthetic oligonucleotide
  Antisense strand to SEQ ID NO: 2191048
uacucugaacucuucgcaa

SEQ ID NO: 2191050 - RNA, 19 nt, Artificial Sequence
  Description of Artificial Sequence: Synthetic oligonucleotide
  Sense strand starting at position 3052 of SEQ ID NO: 1883395
aguuaucuguaauccuuaa

SEQ ID NO: 2191051 - RNA, 19 nt, Artificial Sequence
  Description of Artificial Sequence: Synthetic oligonucleotide
  Antisense strand to SEQ ID NO: 2191050
uuaaggauuacagauaacu

SEQ ID NO: 2191052 - RNA, 19 nt, Artificial Sequence
  Description of Artificial Sequence: Synthetic oligonucleotide
  Sense strand starting at position 3056 of SEQ ID NO: 1883395
aucuguaauccuuaaguac

SEQ ID NO: 2191053 - RNA, 19 nt, Artificial Sequence
  Description of Artificial Sequence: Synthetic oligonucleotide
  Antisense strand to SEQ ID NO: 2191052
guacuuaaggauuacagau

SEQ ID NO: 2191054 - RNA, 19 nt, Artificial Sequence
  Description of Artificial Sequence: Synthetic oligonucleotide
  Sense strand starting at position 3063 of SEQ ID NO: 1883395
auccuuaaguacgucaaua

SEQ ID NO: 2191055 - RNA, 19 nt, Artificial Sequence
  Description of Artificial Sequence: Synthetic oligonucleotide
  Antisense strand to SEQ ID NO: 2191054
uauugacguacuuaaggau

SEQ ID NO: 2191056 - RNA, 19 nt, Artificial Sequence
  Description of Artificial Sequence: Synthetic oligonucleotide
  Sense strand starting at position 3065 of SEQ ID NO: 1883395
ccuuaaguacgucaauaaa

SEQ ID NO: 2191057 - RNA, 19 nt, Artificial Sequence
  Description of Artificial Sequence: Synthetic oligonucleotide
  Antisense strand to SEQ ID NO: 2191056
uuuauugacguacuuaagg

SEQ ID NO: 2191058 - RNA, 19 nt, Artificial Sequence
  Description of Artificial Sequence: Synthetic oligonucleotide
  Sense strand starting at position 3068 of SEQ ID NO: 1883395
uaaguacgucaauaaaggu

SEQ ID NO: 2191059 - RNA, 19 nt, Artificial Sequence
  Description of Artificial Sequence: Synthetic oligonucleotide
  Antisense strand to SEQ ID NO: 2191058
accuuuauugacguacuua

SEQ ID NO: 2191060 - RNA, 19 nt, Artificial Sequence
  Description of Artificial Sequence: Synthetic oligonucleotide
  Sense strand starting at position 3487 of SEQ ID NO: 1883395
cuaguaagacucuguuucu

SEQ ID NO: 2191061 - RNA, 19 nt, Artificial Sequence
  Description of Artificial Sequence: Synthetic oligonucleotide
  Antisense strand to SEQ ID NO: 2191060
agaaacagagucuuacuag

SEQ ID NO: 2191062 - RNA, 19 nt, Artificial Sequence
  Description of Artificial Sequence: Synthetic oligonucleotide
  Sense strand starting at position 3701 of SEQ ID NO: 1883395
gguacuagauguuuaagaa

SEQ ID NO: 2191063 - RNA, 19 nt, Artificial Sequence
  Description of Artificial Sequence: Synthetic oligonucleotide
  Antisense strand to SEQ ID NO: 2191062
uucuuaaacaucuaguacc

SEQ ID NO: 2191064 - RNA, 19 nt, Artificial Sequence
  Description of Artificial Sequence: Synthetic oligonucleotide
  Sense strand starting at position 3973 of SEQ ID NO: 1883395
uuuauaaacguugguaaag

SEQ ID NO: 2191065 - RNA, 19 nt, Artificial Sequence
  Description of Artificial Sequence: Synthetic oligonucleotide
  Antisense strand to SEQ ID NO: 2191064
cuuuaccaacguuuauaaa

SEQ ID NO: 2191066 - RNA, 19 nt, Artificial Sequence
  Description of Artificial Sequence: Synthetic oligonucleotide
  Sense strand starting at position 3974 of SEQ ID NO: 1883395
uuauaaacguugguaaagu

SEQ ID NO: 2191067 - RNA, 19 nt, Artificial Sequence
  Description of Artificial Sequence: Synthetic oligonucleotide
  Antisense strand to SEQ ID NO: 2191066
acuuuaccaacguuuauaa

SEQ ID NO: 2191068 - RNA, 19 nt, Artificial Sequence
  Description of Artificial Sequence: Synthetic oligonucleotide
  Sense strand starting at position 634 of SEQ ID NO: 1883396
auucuauuggcauggaacu

SEQ ID NO: 2191069 - RNA, 19 nt, Artificial Sequence
  Description of Artificial Sequence: Synthetic oligonucleotide
  Antisense strand to SEQ ID NO: 2191068
aguuccaugccaauagaau

SEQ ID NO: 2191070 - RNA, 19 nt, Artificial Sequence
  Description of Artificial Sequence: Synthetic oligonucleotide
  Sense strand starting at position 737 of SEQ ID NO: 1883396
guguuuaugcaccaugaga

SEQ ID NO: 2191071 - RNA, 19 nt, Artificial Sequence
  Description of Artificial Sequence: Synthetic oligonucleotide
  Antisense strand to SEQ ID NO: 2191070
ucucauggugcauaaacac

SEQ ID NO: 2191072 - RNA, 19 nt, Artificial Sequence
  Description of Artificial Sequence: Synthetic oligonucleotide
  Sense strand starting at position 739 of SEQ ID NO: 1883396
guuuaugcaccaugagaua

SEQ ID NO: 2191073 - RNA, 19 nt, Artificial Sequence
  Description of Artificial Sequence: Synthetic oligonucleotide
  Antisense strand to SEQ ID NO: 2191072
uaucucauggugcauaaac

SEQ ID NO: 2191074 - RNA, 19 nt, Artificial Sequence
  Description of Artificial Sequence: Synthetic oligonucleotide
  Sense strand starting at position 751 of SEQ ID NO: 1883396
ugagauacauaggauuaaa

SEQ ID NO: 2191075 - RNA, 19 nt, Artificial Sequence
  Description of Artificial Sequence: Synthetic oligonucleotide
  Antisense strand to SEQ ID NO: 2191074
uuuaauccuauguaucuca

SEQ ID NO: 2191076 - RNA, 19 nt, Artificial Sequence
  Description of Artificial Sequence: Synthetic oligonucleotide
  Sense strand starting at position 1014 of SEQ ID NO: 1883396
agaugaucacgccacugua

SEQ ID NO: 2191077 - RNA, 19 nt, Artificial Sequence
  Description of Artificial Sequence: Synthetic oligonucleotide
  Antisense strand to SEQ ID NO: 2191076
uacaguggcgugaucaucu

SEQ ID NO: 2191078 - RNA, 19 nt, Artificial Sequence
  Description of Artificial Sequence: Synthetic oligonucleotide
  Sense strand starting at position 1143 of SEQ ID NO: 1883396
gccucagagucauuacuca

SEQ ID NO: 2191079 - RNA, 19 nt, Artificial Sequence
  Description of Artificial Sequence: Synthetic oligonucleotide
  Antisense strand to SEQ ID NO: 2191078
ugaguaaugacucugaggc

SEQ ID NO: 2191080 - RNA, 19 nt, Artificial Sequence
  Description of Artificial Sequence: Synthetic oligonucleotide
  Sense strand starting at position 1290 of SEQ ID NO: 1883396
auuugagaguccuacuaac

SEQ ID NO: 2191081 - RNA, 19 nt, Artificial Sequence
  Description of Artificial Sequence: Synthetic oligonucleotide
  Antisense strand to SEQ ID NO: 2191080
guuaguaggacucucaaau

SEQ ID NO: 2191082 - RNA, 19 nt, Artificial Sequence
  Description of Artificial Sequence: Synthetic oligonucleotide
  Sense strand starting at position 1396 of SEQ ID NO: 1883396
uaauacagaucugugguuu

SEQ ID NO: 2191083 - RNA, 19 nt, Artificial Sequence
  Description of Artificial Sequence: Synthetic oligonucleotide
  Antisense strand to SEQ ID NO: 2191082
aaaccacagaucuguauua

SEQ ID NO: 2191084 - RNA, 19 nt, Artificial Sequence
  Description of Artificial Sequence: Synthetic oligonucleotide
  Sense strand starting at position 1397 of SEQ ID NO: 1883396
aauacagaucugugguuua

SEQ ID NO: 2191085 - RNA, 19 nt, Artificial Sequence
  Description of Artificial Sequence: Synthetic oligonucleotide
  Antisense strand to SEQ ID NO: 2191084
uaaaccacagaucuguauu

SEQ ID NO: 2191086 - RNA, 19 nt, Artificial Sequence
  Description of Artificial Sequence: Synthetic oligonucleotide
  Sense strand starting at position 1408 of SEQ ID NO: 1883396
gugguuuauuugguugaua

SEQ ID NO: 2191087 - RNA, 19 nt, Artificial Sequence
  Description of Artificial Sequence: Synthetic oligonucleotide
  Antisense strand to SEQ ID NO: 2191086
uaucaaccaaauaaaccac

SEQ ID NO: 2191088 - RNA, 19 nt, Artificial Sequence
  Description of Artificial Sequence: Synthetic oligonucleotide
  Sense strand starting at position 1809 of SEQ ID NO: 1883396
uuguuuacuuuggugaaac

SEQ ID NO: 2191089 - RNA, 19 nt, Artificial Sequence
  Description of Artificial Sequence: Synthetic oligonucleotide
  Antisense strand to SEQ ID NO: 2191088
guuucaccaaaguaaacaa

SEQ ID NO: 2191090 - RNA, 19 nt, Artificial Sequence
  Description of Artificial Sequence: Synthetic oligonucleotide
  Sense strand starting at position 1811 of SEQ ID NO: 1883396
guuuacuuuggugaaacua

SEQ ID NO: 2191091 - RNA, 19 nt, Artificial Sequence
  Description of Artificial Sequence: Synthetic oligonucleotide
  Antisense strand to SEQ ID NO: 2191090
uaguuucaccaaaguaaac

SEQ ID NO: 2191092 - RNA, 19 nt, Artificial Sequence
  Description of Artificial Sequence: Synthetic oligonucleotide
  Sense strand starting at position 1819 of SEQ ID NO: 1883396
uggugaaacuaagucaaua

SEQ ID NO: 2191093 - RNA, 19 nt, Artificial Sequence
  Description of Artificial Sequence: Synthetic oligonucleotide
  Antisense strand to SEQ ID NO: 2191092
uauugacuuaguuucacca

SEQ ID NO: 2191094 - RNA, 19 nt, Artificial Sequence
  Description of Artificial Sequence: Synthetic oligonucleotide
  Sense strand starting at position 1880 of SEQ ID NO: 1883396
cgagaagauuuagaaauug

SEQ ID NO: 2191095 - RNA, 19 nt, Artificial Sequence
  Description of Artificial Sequence: Synthetic oligonucleotide
  Antisense strand to SEQ ID NO: 2191094
caauuucuaaaucuucucg

SEQ ID NO: 2191096 - RNA, 19 nt, Artificial Sequence
  Description of Artificial Sequence: Synthetic oligonucleotide
  Sense strand starting at position 2070 of SEQ ID NO: 1883396
uuuccagaagggugaaguu

SEQ ID NO: 2191097 - RNA, 19 nt, Artificial Sequence
  Description of Artificial Sequence: Synthetic oligonucleotide
  Antisense strand to SEQ ID NO: 2191096
aacuucacccuucuggaaa

SEQ ID NO: 2191098 - RNA, 19 nt, Artificial Sequence
  Description of Artificial Sequence: Synthetic oligonucleotide
  Sense strand starting at position 2113 of SEQ ID NO: 1883396
uggcuuuaccaauggaaau

SEQ ID NO: 2191099 - RNA, 19 nt, Artificial Sequence
  Description of Artificial Sequence: Synthetic oligonucleotide
  Antisense strand to SEQ ID NO: 2191098
auuuccauugguaaagcca

SEQ ID NO: 2191100 - RNA, 19 nt, Artificial Sequence
  Description of Artificial Sequence: Synthetic oligonucleotide
  Sense strand starting at position 2136 of SEQ ID NO: 1883396
aaauaaaucgagugccaag

SEQ ID NO: 2191101 - RNA, 19 nt, Artificial Sequence
  Description of Artificial Sequence: Synthetic oligonucleotide
  Antisense strand to SEQ ID NO: 2191100
cuuggcacucgauuuauuu

SEQ ID NO: 2191102 - RNA, 19 nt, Artificial Sequence
  Description of Artificial Sequence: Synthetic oligonucleotide
  Sense strand starting at position 2199 of SEQ ID NO: 1883396
aaaguuguuugguugaauu

SEQ ID NO: 2191103 - RNA, 19 nt, Artificial Sequence
  Description of Artificial Sequence: Synthetic oligonucleotide
  Antisense strand to SEQ ID NO: 2191102
aauucaaccaaacaacuuu

SEQ ID NO: 2191104 - RNA, 19 nt, Artificial Sequence
  Description of Artificial Sequence: Synthetic oligonucleotide
  Sense strand starting at position 2228 of SEQ ID NO: 1883396
uagcaaugugugcauuaaa

SEQ ID NO: 2191105 - RNA, 19 nt, Artificial Sequence
  Description of Artificial Sequence: Synthetic oligonucleotide
  Antisense strand to SEQ ID NO: 2191104
uuuaaugcacacauugcua

SEQ ID NO: 2191106 - RNA, 19 nt, Artificial Sequence
  Description of Artificial Sequence: Synthetic oligonucleotide
  Sense strand starting at position 2369 of SEQ ID NO: 1883396
aauauuaugguccagugau

SEQ ID NO: 2191107 - RNA, 19 nt, Artificial Sequence
  Description of Artificial Sequence: Synthetic oligonucleotide
  Antisense strand to SEQ ID NO: 2191106
aucacuggaccauaauauu

SEQ ID NO: 2191108 - RNA, 19 nt, Artificial Sequence
  Description of Artificial Sequence: Synthetic oligonucleotide
  Sense strand starting at position 2468 of SEQ ID NO: 1883396
uggagaagauaucauggaa

SEQ ID NO: 2191109 - RNA, 19 nt, Artificial Sequence
  Description of Artificial Sequence: Synthetic oligonucleotide
  Antisense strand to SEQ ID NO: 2191108
uuccaugauaucuucucca

SEQ ID NO: 2191110 - RNA, 19 nt, Artificial Sequence
  Description of Artificial Sequence: Synthetic oligonucleotide
  Sense strand starting at position 2518 of SEQ ID NO: 1883396
auaagacucuagcuagguu

SEQ ID NO: 2191111 - RNA, 19 nt, Artificial Sequence
  Description of Artificial Sequence: Synthetic oligonucleotide
  Antisense strand to SEQ ID NO: 2191110
aaccuagcuagagucuuau

SEQ ID NO: 2191112 - RNA, 19 nt, Artificial Sequence
  Description of Artificial Sequence: Synthetic oligonucleotide
  Sense strand starting at position 2604 of SEQ ID NO: 1883396
ggaaguucugauugcuuau

SEQ ID NO: 2191113 - RNA, 19 nt, Artificial Sequence
  Description of Artificial Sequence: Synthetic oligonucleotide
  Antisense strand to SEQ ID NO: 2191112
auaagcaaucagaacuucc

SEQ ID NO: 2191114 - RNA, 19 nt, Artificial Sequence
  Description of Artificial Sequence: Synthetic oligonucleotide
  Sense strand starting at position 2610 of SEQ ID NO: 1883396
ucugauugcuuaucugaac

SEQ ID NO: 2191115 - RNA, 19 nt, Artificial Sequence
  Description of Artificial Sequence: Synthetic oligonucleotide
  Antisense strand to SEQ ID NO: 2191114
guucagauaagcaaucaga

SEQ ID NO: 2191116 - RNA, 19 nt, Artificial Sequence
  Description of Artificial Sequence: Synthetic oligonucleotide
  Sense strand starting at position 2611 of SEQ ID NO: 1883396
cugauugcuuaucugaacu

SEQ ID NO: 2191117 - RNA, 19 nt, Artificial Sequence
  Description of Artificial Sequence: Synthetic oligonucleotide
  Antisense strand to SEQ ID NO: 2191116
aguucagauaagcaaucag

SEQ ID NO: 2191118 - RNA, 19 nt, Artificial Sequence
  Description of Artificial Sequence: Synthetic oligonucleotide
  Sense strand starting at position 2658 of SEQ ID NO: 1883396
cagggugaacccugucauc

SEQ ID NO: 2191119 - RNA, 19 nt, Artificial Sequence
  Description of Artificial Sequence: Synthetic oligonucleotide
  Antisense strand to SEQ ID NO: 2191118
gaugacaggguucacccug

SEQ ID NO: 2191120 - RNA, 19 nt, Artificial Sequence
  Description of Artificial Sequence: Synthetic oligonucleotide
  Sense strand starting at position 2762 of SEQ ID NO: 1883396
ugagaauuauguuugcaca

SEQ ID NO: 2191121 - RNA, 19 nt, Artificial Sequence
  Description of Artificial Sequence: Synthetic oligonucleotide
  Antisense strand to SEQ ID NO: 2191120
ugugcaaacauaauucuca

SEQ ID NO: 2191122 - RNA, 19 nt, Artificial Sequence
  Description of Artificial Sequence: Synthetic oligonucleotide
  Sense strand starting at position 2763 of SEQ ID NO: 1883396
gagaauuauguuugcacau

SEQ ID NO: 2191123 - RNA, 19 nt, Artificial Sequence
  Description of Artificial Sequence: Synthetic oligonucleotide
  Antisense strand to SEQ ID NO: 2191122
augugcaaacauaauucuc

SEQ ID NO: 2191124 - RNA, 19 nt, Artificial Sequence
  Description of Artificial Sequence: Synthetic oligonucleotide
  Sense strand starting at position 2764 of SEQ ID NO: 1883396
agaauuauguuugcacauu

SEQ ID NO: 2191125 - RNA, 19 nt, Artificial Sequence
  Description of Artificial Sequence: Synthetic oligonucleotide
  Antisense strand to SEQ ID NO: 2191124
aaugugcaaacauaauucu

SEQ ID NO: 2191126 - RNA, 19 nt, Artificial Sequence
  Description of Artificial Sequence: Synthetic oligonucleotide
  Sense strand starting at position 2929 of SEQ ID NO: 1883396
caggucauccuagacaugu

SEQ ID NO: 2191127 - RNA, 19 nt, Artificial Sequence
  Description of Artificial Sequence: Synthetic oligonucleotide
  Antisense strand to SEQ ID NO: 2191126
acaugucuaggaugaccug

SEQ ID NO: 2191128 - RNA, 19 nt, Artificial Sequence
  Description of Artificial Sequence: Synthetic oligonucleotide
  Sense strand starting at position 2990 of SEQ ID NO: 1883396
cuguauucaggugauguga

SEQ ID NO: 2191129 - RNA, 19 nt, Artificial Sequence
  Description of Artificial Sequence: Synthetic oligonucleotide
  Antisense strand to SEQ ID NO: 2191128
ucacaucaccugaauacag

SEQ ID NO: 2191130 - RNA, 19 nt, Artificial Sequence
  Description of Artificial Sequence: Synthetic oligonucleotide
  Sense strand starting at position 3001 of SEQ ID NO: 1883396
ugaugugaguuucucagag

SEQ ID NO: 2191131 - RNA, 19 nt, Artificial Sequence
  Description of Artificial Sequence: Synthetic oligonucleotide
  Antisense strand to SEQ ID NO: 2191130
cucugagaaacucacauca

SEQ ID NO: 2191132 - RNA, 19 nt, Artificial Sequence
  Description of Artificial Sequence: Synthetic oligonucleotide
  Sense strand starting at position 3196 of SEQ ID NO: 1883396
uuaagaaagugaccuacuu

SEQ ID NO: 2191133 - RNA, 19 nt, Artificial Sequence
  Description of Artificial Sequence: Synthetic oligonucleotide
  Antisense strand to SEQ ID NO: 2191132
aaguaggucacuuucuuaa

SEQ ID NO: 2191134 - RNA, 19 nt, Artificial Sequence
  Description of Artificial Sequence: Synthetic oligonucleotide
  Sense strand starting at position 3355 of SEQ ID NO: 1883396
uaugauugauggucuauca

SEQ ID NO: 2191135 - RNA, 19 nt, Artificial Sequence
  Description of Artificial Sequence: Synthetic oligonucleotide
  Antisense strand to SEQ ID NO: 2191134
ugauagaccaucaaucaua

SEQ ID NO: 2191136 - RNA, 19 nt, Artificial Sequence
  Description of Artificial Sequence: Synthetic oligonucleotide
  Sense strand starting at position 3630 of SEQ ID NO: 1883396
aaguaaugaugccuugaca

SEQ ID NO: 2191137 - RNA, 19 nt, Artificial Sequence
  Description of Artificial Sequence: Synthetic oligonucleotide
  Antisense strand to SEQ ID NO: 2191136
ugucaaggcaucauuacuu

SEQ ID NO: 2191138 - RNA, 19 nt, Artificial Sequence
  Description of Artificial Sequence: Synthetic oligonucleotide
  Sense strand starting at position 3653 of SEQ ID NO: 1883396
ucaauagaucuuggugaag

SEQ ID NO: 2191139 - RNA, 19 nt, Artificial Sequence
  Description of Artificial Sequence: Synthetic oligonucleotide
  Antisense strand to SEQ ID NO: 2191138
cuucaccaagaucuauuga

SEQ ID NO: 2191140 - RNA, 19 nt, Artificial Sequence
  Description of Artificial Sequence: Synthetic oligonucleotide
  Sense strand starting at position 3737 of SEQ ID NO: 1883396
gcuauccagccuguguuua

SEQ ID NO: 2191141 - RNA, 19 nt, Artificial Sequence
  Description of Artificial Sequence: Synthetic oligonucleotide
  Antisense strand to SEQ ID NO: 2191140
uaaacacaggcuggauagc

SEQ ID NO: 2191142 - RNA, 19 nt, Artificial Sequence
  Description of Artificial Sequence: Synthetic oligonucleotide
  Sense strand starting at position 3844 of SEQ ID NO: 1883396
ugugauauggugcaucaaa

SEQ ID NO: 2191143 - RNA, 19 nt, Artificial Sequence
  Description of Artificial Sequence: Synthetic oligonucleotide
  Antisense strand to SEQ ID NO: 2191142
uuugaugcaccauaucaca

SEQ ID NO: 2191144 - RNA, 19 nt, Artificial Sequence
  Description of Artificial Sequence: Synthetic oligonucleotide
  Sense strand starting at position 3959 of SEQ ID NO: 1883396
gcauauuaugcucaauagc

SEQ ID NO: 2191145 - RNA, 19 nt, Artificial Sequence
  Description of Artificial Sequence: Synthetic oligonucleotide
  Antisense strand to SEQ ID NO: 2191144
gcuauugagcauaauaugc

SEQ ID NO: 2191146 - RNA, 19 nt, Artificial Sequence
  Description of Artificial Sequence: Synthetic oligonucleotide
  Sense strand starting at position 3967 of SEQ ID NO: 1883396
ugcucaauagcugaauuaa

SEQ ID NO: 2191147 - RNA, 19 nt, Artificial Sequence
  Description of Artificial Sequence: Synthetic oligonucleotide
  Antisense strand to SEQ ID NO: 2191146
uuaauucagcuauugagca

SEQ ID NO: 2191148 - RNA, 19 nt, Artificial Sequence
  Description of Artificial Sequence: Synthetic oligonucleotide
  Sense strand starting at position 257 of SEQ ID NO: 1883397
aagggauacucgucuggga

SEQ ID NO: 2191149 - RNA, 19 nt, Artificial Sequence
  Description of Artificial Sequence: Synthetic oligonucleotide
  Antisense strand to SEQ ID NO: 2191148
ucccagacgaguaucccuu

SEQ ID NO: 2191150 - RNA, 19 nt, Artificial Sequence
  Description of Artificial Sequence: Synthetic oligonucleotide
  Sense strand starting at position 259 of SEQ ID NO: 1883397
gggauacucgucugggaag

SEQ ID NO: 2191151 - RNA, 19 nt, Artificial Sequence
  Description of Artificial Sequence: Synthetic oligonucleotide
  Antisense strand to SEQ ID NO: 2191150
cuucccagacgaguauccc

SEQ ID NO: 2191152 - RNA, 19 nt, Artificial Sequence
  Description of Artificial Sequence: Synthetic oligonucleotide
  Sense strand starting at position 313 of SEQ ID NO: 1883397
gcacacauccaugaaagca

SEQ ID NO: 2191153 - RNA, 19 nt, Artificial Sequence
  Description of Artificial Sequence: Synthetic oligonucleotide
  Antisense strand to SEQ ID NO: 2191152
ugcuuucauggaugugugc

SEQ ID NO: 2191154 - RNA, 19 nt, Artificial Sequence
  Description of Artificial Sequence: Synthetic oligonucleotide
  Sense strand starting at position 527 of SEQ ID NO: 1883397
augacuuaucuucgaaucu

SEQ ID NO: 2191155 - RNA, 19 nt, Artificial Sequence
  Description of Artificial Sequence: Synthetic oligonucleotide
  Antisense strand to SEQ ID NO: 2191154
agauucgaagauaagucau

SEQ ID NO: 2191156 - RNA, 19 nt, Artificial Sequence
  Description of Artificial Sequence: Synthetic oligonucleotide
  Sense strand starting at position 634 of SEQ ID NO: 1883397
gugugugaacuuuauagau

SEQ ID NO: 2191157 - RNA, 19 nt, Artificial Sequence
  Description of Artificial Sequence: Synthetic oligonucleotide
  Antisense strand to SEQ ID NO: 2191156
aucuauaaaguucacacac

SEQ ID NO: 2191158 - RNA, 19 nt, Artificial Sequence
  Description of Artificial Sequence: Synthetic oligonucleotide
  Sense strand starting at position 894 of SEQ ID NO: 1883397
gaguuuguauuaucuugag

SEQ ID NO: 2191159 - RNA, 19 nt, Artificial Sequence
  Description of Artificial Sequence: Synthetic oligonucleotide
  Antisense strand to SEQ ID NO: 2191158
cucaagauaauacaaacuc

SEQ ID NO: 2191160 - RNA, 19 nt, Artificial Sequence
  Description of Artificial Sequence: Synthetic oligonucleotide
  Sense strand starting at position 898 of SEQ ID NO: 1883397
uuguauuaucuugaguuuc

SEQ ID NO: 2191161 - RNA, 19 nt, Artificial Sequence
  Description of Artificial Sequence: Synthetic oligonucleotide
  Antisense strand to SEQ ID NO: 2191160
gaaacucaagauaauacaa

SEQ ID NO: 2191162 - RNA, 19 nt, Artificial Sequence
  Description of Artificial Sequence: Synthetic oligonucleotide
  Sense strand starting at position 1023 of SEQ ID NO: 1883397
uuuaaucccgaagguuaau

SEQ ID NO: 2191163 - RNA, 19 nt, Artificial Sequence
  Description of Artificial Sequence: Synthetic oligonucleotide
  Antisense strand to SEQ ID NO: 2191162
auuaaccuucgggauuaaa

SEQ ID NO: 2191164 - RNA, 19 nt, Artificial Sequence
  Description of Artificial Sequence: Synthetic oligonucleotide
  Sense strand starting at position 1049 of SEQ ID NO: 1883397
uuuguuuagcauggaauga

SEQ ID NO: 2191165 - RNA, 19 nt, Artificial Sequence
  Description of Artificial Sequence: Synthetic oligonucleotide
  Antisense strand to SEQ ID NO: 2191164
ucauuccaugcuaaacaaa

SEQ ID NO: 2191166 - RNA, 19 nt, Artificial Sequence
  Description of Artificial Sequence: Synthetic oligonucleotide
  Sense strand starting at position 1053 of SEQ ID NO: 1883397
uuuagcauggaaugagaua

SEQ ID NO: 2191167 - RNA, 19 nt, Artificial Sequence
  Description of Artificial Sequence: Synthetic oligonucleotide
  Antisense strand to SEQ ID NO: 2191166
uaucucauuccaugcuaaa

SEQ ID NO: 2191168 - RNA, 19 nt, Artificial Sequence
  Description of Artificial Sequence: Synthetic oligonucleotide
  Sense strand starting at position 1064 of SEQ ID NO: 1883397
augagauaaccacacguuu

SEQ ID NO: 2191169 - RNA, 19 nt, Artificial Sequence
  Description of Artificial Sequence: Synthetic oligonucleotide
  Antisense strand to SEQ ID NO: 2191168
aaacgugugguuaucucau

SEQ ID NO: 2191170 - RNA, 19 nt, Artificial Sequence
  Description of Artificial Sequence: Synthetic oligonucleotide
  Sense strand starting at position 1073 of SEQ ID NO: 1883397
ccacacguuuaacuuagaa

SEQ ID NO: 2191171 - RNA, 19 nt, Artificial Sequence
  Description of Artificial Sequence: Synthetic oligonucleotide
  Antisense strand to SEQ ID NO: 2191170
uucuaaguuaaacgugugg

SEQ ID NO: 2191172 - RNA, 19 nt, Artificial Sequence
  Description of Artificial Sequence: Synthetic oligonucleotide
  Sense strand starting at position 1089 of SEQ ID NO: 1883397
gaaagcuaacucuagcagu

SEQ ID NO: 2191173 - RNA, 19 nt, Artificial Sequence
  Description of Artificial Sequence: Synthetic oligonucleotide
  Antisense strand to SEQ ID NO: 2191172
acugcuagaguuagcuuuc

SEQ ID NO: 2191174 - RNA, 19 nt, Artificial Sequence
  Description of Artificial Sequence: Synthetic oligonucleotide
  Sense strand starting at position 1102 of SEQ ID NO: 1883397
agcaguaguccacagagaa

SEQ ID NO: 2191175 - RNA, 19 nt, Artificial Sequence
  Description of Artificial Sequence: Synthetic oligonucleotide
  Antisense strand to SEQ ID NO: 2191174
uucucuguggacuacugcu

SEQ ID NO: 2191176 - RNA, 19 nt, Artificial Sequence
  Description of Artificial Sequence: Synthetic oligonucleotide
  Sense strand starting at position 1112 of SEQ ID NO: 1883397
cacagagaaugaucgguua

SEQ ID NO: 2191177 - RNA, 19 nt, Artificial Sequence
  Description of Artificial Sequence: Synthetic oligonucleotide
  Antisense strand to SEQ ID NO: 2191176
uaaccgaucauucucugug

SEQ ID NO: 2191178 - RNA, 19 nt, Artificial Sequence
  Description of Artificial Sequence: Synthetic oligonucleotide
  Sense strand starting at position 1114 of SEQ ID NO: 1883397
cagagaaugaucgguuaga

SEQ ID NO: 2191179 - RNA, 19 nt, Artificial Sequence
  Description of Artificial Sequence: Synthetic oligonucleotide
  Antisense strand to SEQ ID NO: 2191178
ucuaaccgaucauucucug

SEQ ID NO: 2191180 - RNA, 19 nt, Artificial Sequence
  Description of Artificial Sequence: Synthetic oligonucleotide
  Sense strand starting at position 1184 of SEQ ID NO: 1883397
cccuauacuccaggcuaga

SEQ ID NO: 2191181 - RNA, 19 nt, Artificial Sequence
  Description of Artificial Sequence: Synthetic oligonucleotide
  Antisense strand to SEQ ID NO: 2191180
ucuagccuggaguauaggg

SEQ ID NO: 2191182 - RNA, 19 nt, Artificial Sequence
  Description of Artificial Sequence: Synthetic oligonucleotide
  Sense strand starting at position 1247 of SEQ ID NO: 1883397
uaacaaguacuuuggguau

SEQ ID NO: 2191183 - RNA, 19 nt, Artificial Sequence
  Description of Artificial Sequence: Synthetic oligonucleotide
  Antisense strand to SEQ ID NO: 2191182
auacccaaaguacuuguua

SEQ ID NO: 2191184 - RNA, 19 nt, Artificial Sequence
  Description of Artificial Sequence: Synthetic oligonucleotide
  Sense strand starting at position 1251 of SEQ ID NO: 1883397
aaguacuuuggguauuaca

SEQ ID NO: 2191185 - RNA, 19 nt, Artificial Sequence
  Description of Artificial Sequence: Synthetic oligonucleotide
  Antisense strand to SEQ ID NO: 2191184
uguaauacccaaaguacuu

SEQ ID NO: 2191186 - RNA, 19 nt, Artificial Sequence
  Description of Artificial Sequence: Synthetic oligonucleotide
  Sense strand starting at position 1308 of SEQ ID NO: 1883397
acguuacaagaauaagguu

SEQ ID NO: 2191187 - RNA, 19 nt, Artificial Sequence
  Description of Artificial Sequence: Synthetic oligonucleotide
  Antisense strand to SEQ ID NO: 2191186
aaccuuauucuuguaacgu

SEQ ID NO: 2191188 - RNA, 19 nt, Artificial Sequence
  Description of Artificial Sequence: Synthetic oligonucleotide
  Sense strand starting at position 1424 of SEQ ID NO: 1883397
cauguaaggguuuaagcua

SEQ ID NO: 2191189 - RNA, 19 nt, Artificial Sequence
  Description of Artificial Sequence: Synthetic oligonucleotide
  Antisense strand to SEQ ID NO: 2191188
uagcuuaaacccuuacaug

SEQ ID NO: 2191190 - RNA, 19 nt, Artificial Sequence
  Description of Artificial Sequence: Synthetic oligonucleotide
  Sense strand starting at position 1499 of SEQ ID NO: 1883397
uggcuuaugcaggaauaag

SEQ ID NO: 2191191 - RNA, 19 nt, Artificial Sequence
  Description of Artificial Sequence: Synthetic oligonucleotide
  Antisense strand to SEQ ID NO: 2191190
cuuauuccugcauaagcca

SEQ ID NO: 2191192 - RNA, 19 nt, Artificial Sequence
  Description of Artificial Sequence: Synthetic oligonucleotide
  Sense strand starting at position 1509 of SEQ ID NO: 1883397
aggaauaagccuuaugcuu

SEQ ID NO: 2191193 - RNA, 19 nt, Artificial Sequence
  Description of Artificial Sequence: Synthetic oligonucleotide
  Antisense strand to SEQ ID NO: 2191192
aagcauaaggcuuauuccu

SEQ ID NO: 2191194 - RNA, 19 nt, Artificial Sequence
  Description of Artificial Sequence: Synthetic oligonucleotide
  Sense strand starting at position 1527 of SEQ ID NO: 1883397
uaugcuugagcccaggaau

SEQ ID NO: 2191195 - RNA, 19 nt, Artificial Sequence
  Description of Artificial Sequence: Synthetic oligonucleotide
  Antisense strand to SEQ ID NO: 2191194
auuccugggcucaagcaua

SEQ ID NO: 2191196 - RNA, 19 nt, Artificial Sequence
  Description of Artificial Sequence: Synthetic oligonucleotide
  Sense strand starting at position 1638 of SEQ ID NO: 1883397
gucagucuuguacaugaaa

SEQ ID NO: 2191197 - RNA, 19 nt, Artificial Sequence
  Description of Artificial Sequence: Synthetic oligonucleotide
  Antisense strand to SEQ ID NO: 2191196
uuucauguacaagacugac

SEQ ID NO: 2191198 - RNA, 19 nt, Artificial Sequence
  Description of Artificial Sequence: Synthetic oligonucleotide
  Sense strand starting at position 1641 of SEQ ID NO: 1883397
agucuuguacaugaaauau

SEQ ID NO: 2191199 - RNA, 19 nt, Artificial Sequence
  Description of Artificial Sequence: Synthetic oligonucleotide
  Antisense strand to SEQ ID NO: 2191198
auauuucauguacaagacu

SEQ ID NO: 2191200 - RNA, 19 nt, Artificial Sequence
  Description of Artificial Sequence: Synthetic oligonucleotide
  Sense strand starting at position 1842 of SEQ ID NO: 1883397
ccuauuuaugcauggcaau

SEQ ID NO: 2191201 - RNA, 19 nt, Artificial Sequence
  Description of Artificial Sequence: Synthetic oligonucleotide
  Antisense strand to SEQ ID NO: 2191200
auugccaugcauaaauagg

SEQ ID NO: 2191202 - RNA, 19 nt, Artificial Sequence
  Description of Artificial Sequence: Synthetic oligonucleotide
  Sense strand starting at position 1843 of SEQ ID NO: 1883397
cuauuuaugcauggcaauu

SEQ ID NO: 2191203 - RNA, 19 nt, Artificial Sequence
  Description of Artificial Sequence: Synthetic oligonucleotide
  Antisense strand to SEQ ID NO: 2191202
aauugccaugcauaaauag

SEQ ID NO: 2191204 - RNA, 19 nt, Artificial Sequence
  Description of Artificial Sequence: Synthetic oligonucleotide
  Sense strand starting at position 2326 of SEQ ID NO: 1883397
ccugaucaaucuguaaaug

SEQ ID NO: 2191205 - RNA, 19 nt, Artificial Sequence
  Description of Artificial Sequence: Synthetic oligonucleotide
  Antisense strand to SEQ ID NO: 2191204
cauuuacagauugaucagg

SEQ ID NO: 2191206 - RNA, 19 nt, Artificial Sequence
  Description of Artificial Sequence: Synthetic oligonucleotide
  Sense strand starting at position 2327 of SEQ ID NO: 1883397
cugaucaaucuguaaaugu

SEQ ID NO: 2191207 - RNA, 19 nt, Artificial Sequence
  Description of Artificial Sequence: Synthetic oligonucleotide
  Antisense strand to SEQ ID NO: 2191206
acauuuacagauugaucag

SEQ ID NO: 2191208 - RNA, 19 nt, Artificial Sequence
  Description of Artificial Sequence: Synthetic oligonucleotide
  Sense strand starting at position 2364 of SEQ ID NO: 1883397
ccaggacuaucacuuguca

SEQ ID NO: 2191209 - RNA, 19 nt, Artificial Sequence
  Description of Artificial Sequence: Synthetic oligonucleotide
  Antisense strand to SEQ ID NO: 2191208
ugacaagugauaguccugg

SEQ ID NO: 2191210 - RNA, 19 nt, Artificial Sequence
  Description of Artificial Sequence: Synthetic oligonucleotide
  Sense strand starting at position 2368 of SEQ ID NO: 1883397
gacuaucacuugucaguag

SEQ ID NO: 2191211 - RNA, 19 nt, Artificial Sequence
  Description of Artificial Sequence: Synthetic oligonucleotide
  Antisense strand to SEQ ID NO: 2191210
cuacugacaagugauaguc

SEQ ID NO: 2191212 - RNA, 19 nt, Artificial Sequence
  Description of Artificial Sequence: Synthetic oligonucleotide
  Sense strand starting at position 2372 of SEQ ID NO: 1883397
aucacuugucaguagcaaa

SEQ ID NO: 2191213 - RNA, 19 nt, Artificial Sequence
  Description of Artificial Sequence: Synthetic oligonucleotide
  Antisense strand to SEQ ID NO: 2191212
uuugcuacugacaagugau

SEQ ID NO: 2191214 - RNA, 19 nt, Artificial Sequence
  Description of Artificial Sequence: Synthetic oligonucleotide
  Sense strand starting at position 2486 of SEQ ID NO: 1883397
uugucuugacaugguaaca

SEQ ID NO: 2191215 - RNA, 19 nt, Artificial Sequence
  Description of Artificial Sequence: Synthetic oligonucleotide
  Antisense strand to SEQ ID NO: 2191214
uguuaccaugucaagacaa

SEQ ID NO: 2191216 - RNA, 19 nt, Artificial Sequence
  Description of Artificial Sequence: Synthetic oligonucleotide
  Sense strand starting at position 3083 of SEQ ID NO: 1883397
ccaacaguuaacggguaaa

SEQ ID NO: 2191217 - RNA, 19 nt, Artificial Sequence
  Description of Artificial Sequence: Synthetic oligonucleotide
  Antisense strand to SEQ ID NO: 2191216
uuuacccguuaacuguugg

SEQ ID NO: 2191218 - RNA, 19 nt, Artificial Sequence
  Description of Artificial Sequence: Synthetic oligonucleotide
  Sense strand starting at position 3766 of SEQ ID NO: 1883397
acagguuauuaugcagacu

SEQ ID NO: 2191219 - RNA, 19 nt, Artificial Sequence
  Description of Artificial Sequence: Synthetic oligonucleotide
  Antisense strand to SEQ ID NO: 2191218
agucugcauaauaaccugu

SEQ ID NO: 2191220 - RNA, 19 nt, Artificial Sequence
  Description of Artificial Sequence: Synthetic oligonucleotide
  Sense strand starting at position 3791 of SEQ ID NO: 1883397
cuguacauggcuuauauau

SEQ ID NO: 2191221 - RNA, 19 nt, Artificial Sequence
  Description of Artificial Sequence: Synthetic oligonucleotide
  Antisense strand to SEQ ID NO: 2191220
auauauaagccauguacag

SEQ ID NO: 2191222 - RNA, 19 nt, Artificial Sequence
  Description of Artificial Sequence: Synthetic oligonucleotide
  Sense strand starting at position 3805 of SEQ ID NO: 1883397
uauauaacacgauguaagu

SEQ ID NO: 2191223 - RNA, 19 nt, Artificial Sequence
  Description of Artificial Sequence: Synthetic oligonucleotide
  Antisense strand to SEQ ID NO: 2191222
acuuacaucguguuauaua

SEQ ID NO: 2191224 - RNA, 19 nt, Artificial Sequence
  Description of Artificial Sequence: Synthetic oligonucleotide
  Sense strand starting at position 3857 of SEQ ID NO: 1883397
guaauaacuguguaagagg

SEQ ID NO: 2191225 - RNA, 19 nt, Artificial Sequence
  Description of Artificial Sequence: Synthetic oligonucleotide
  Antisense strand to SEQ ID NO: 2191224
ccucuuacacaguuauuac

SEQ ID NO: 2191226 - RNA, 19 nt, Artificial Sequence
  Description of Artificial Sequence: Synthetic oligonucleotide
  Sense strand starting at position 3871 of SEQ ID NO: 1883397
agaggcaacuugguaaaua

SEQ ID NO: 2191227 - RNA, 19 nt, Artificial Sequence
  Description of Artificial Sequence: Synthetic oligonucleotide
  Antisense strand to SEQ ID NO: 2191226
uauuuaccaaguugccucu

SEQ ID NO: 2191228 - RNA, 19 nt, Artificial Sequence
  Description of Artificial Sequence: Synthetic oligonucleotide
  Sense strand starting at position 61 of SEQ ID NO: 1883398
aguggcacucuauaacaaa

SEQ ID NO: 2191229 - RNA, 19 nt, Artificial Sequence
  Description of Artificial Sequence: Synthetic oligonucleotide
  Antisense strand to SEQ ID NO: 2191228
uuuguuauagagugccacu

SEQ ID NO: 2191230 - RNA, 19 nt, Artificial Sequence
  Description of Artificial Sequence: Synthetic oligonucleotide
  Sense strand starting at position 95 of SEQ ID NO: 1883398
auauguauggcccacuuaa

SEQ ID NO: 2191231 - RNA, 19 nt, Artificial Sequence
  Description of Artificial Sequence: Synthetic oligonucleotide
  Antisense strand to SEQ ID NO: 2191230
uuaagugggccauacauau

SEQ ID NO: 2191232 - RNA, 19 nt, Artificial Sequence
  Description of Artificial Sequence: Synthetic oligonucleotide
  Sense strand starting at position 152 of SEQ ID NO: 1883398
cccuaacuuguuuaaugua

SEQ ID NO: 2191233 - RNA, 19 nt, Artificial Sequence
  Description of Artificial Sequence: Synthetic oligonucleotide
  Antisense strand to SEQ ID NO: 2191232
uacauuaaacaaguuaggg

SEQ ID NO: 2191234 - RNA, 19 nt, Artificial Sequence
  Description of Artificial Sequence: Synthetic oligonucleotide
  Sense strand starting at position 164 of SEQ ID NO: 1883398
uaauguacacuucgagaga

SEQ ID NO: 2191235 - RNA, 19 nt, Artificial Sequence
  Description of Artificial Sequence: Synthetic oligonucleotide
  Antisense strand to SEQ ID NO: 2191234
ucucucgaaguguacauua

SEQ ID NO: 2191236 - RNA, 19 nt, Artificial Sequence
  Description of Artificial Sequence: Synthetic oligonucleotide
  Sense strand starting at position 181 of SEQ ID NO: 1883398
gagggcaaauuugagauua

SEQ ID NO: 2191237 - RNA, 19 nt, Artificial Sequence
  Description of Artificial Sequence: Synthetic oligonucleotide
  Antisense strand to SEQ ID NO: 2191236
uaaucucaaauuugcccuc

SEQ ID NO: 2191238 - RNA, 19 nt, Artificial Sequence
  Description of Artificial Sequence: Synthetic oligonucleotide
  Sense strand starting at position 316 of SEQ ID NO: 1883398
cucugcauuccagacggau

SEQ ID NO: 2191239 - RNA, 19 nt, Artificial Sequence
  Description of Artificial Sequence: Synthetic oligonucleotide
  Antisense strand to SEQ ID NO: 2191238
auccgucuggaaugcagag

SEQ ID NO: 2191240 - RNA, 19 nt, Artificial Sequence
  Description of Artificial Sequence: Synthetic oligonucleotide
  Sense strand starting at position 390 of SEQ ID NO: 1883398
guaugucucuuaccagaau

SEQ ID NO: 2191241 - RNA, 19 nt, Artificial Sequence
  Description of Artificial Sequence: Synthetic oligonucleotide
  Antisense strand to SEQ ID NO: 2191240
auucugguaagagacauac

SEQ ID NO: 2191242 - RNA, 19 nt, Artificial Sequence
  Description of Artificial Sequence: Synthetic oligonucleotide
  Sense strand starting at position 393 of SEQ ID NO: 1883398
ugucucuuaccagaauagu

SEQ ID NO: 2191243 - RNA, 19 nt, Artificial Sequence
  Description of Artificial Sequence: Synthetic oligonucleotide
  Antisense strand to SEQ ID NO: 2191242
acuauucugguaagagaca

SEQ ID NO: 2191244 - RNA, 19 nt, Artificial Sequence
  Description of Artificial Sequence: Synthetic oligonucleotide
  Sense strand starting at position 681 of SEQ ID NO: 1883398
agacccuucucuguuuaga

SEQ ID NO: 2191245 - RNA, 19 nt, Artificial Sequence
  Description of Artificial Sequence: Synthetic oligonucleotide
  Antisense strand to SEQ ID NO: 2191244
ucuaaacagagaagggucu

SEQ ID NO: 2191246 - RNA, 19 nt, Artificial Sequence
  Description of Artificial Sequence: Synthetic oligonucleotide
  Sense strand starting at position 718 of SEQ ID NO: 1883398
acugcagaaguguauuauu

SEQ ID NO: 2191247 - RNA, 19 nt, Artificial Sequence
  Description of Artificial Sequence: Synthetic oligonucleotide
  Antisense strand to SEQ ID NO: 2191246
aauaauacacuucugcagu

SEQ ID NO: 2191248 - RNA, 19 nt, Artificial Sequence
  Description of Artificial Sequence: Synthetic oligonucleotide
  Sense strand starting at position 1167 of SEQ ID NO: 1883398
ggccaaauggaaugauugu

SEQ ID NO: 2191249 - RNA, 19 nt, Artificial Sequence
  Description of Artificial Sequence: Synthetic oligonucleotide
  Antisense strand to SEQ ID NO: 2191248
acaaucauuccauuuggcc

SEQ ID NO: 2191250 - RNA, 19 nt, Artificial Sequence
  Description of Artificial Sequence: Synthetic oligonucleotide
  Sense strand starting at position 1229 of SEQ ID NO: 1883398
ggacuccuucccgaguacu

SEQ ID NO: 2191251 - RNA, 19 nt, Artificial Sequence
  Description of Artificial Sequence: Synthetic oligonucleotide
  Antisense strand to SEQ ID NO: 2191250
aguacucgggaaggagucc

SEQ ID NO: 2191252 - RNA, 19 nt, Artificial Sequence
  Description of Artificial Sequence: Synthetic oligonucleotide
  Sense strand starting at position 1239 of SEQ ID NO: 1883398
ccgaguacucuccaagaug

SEQ ID NO: 2191253 - RNA, 19 nt, Artificial Sequence
  Description of Artificial Sequence: Synthetic oligonucleotide
  Antisense strand to SEQ ID NO: 2191252
caucuuggagaguacucgg

SEQ ID NO: 2191254 - RNA, 19 nt, Artificial Sequence
  Description of Artificial Sequence: Synthetic oligonucleotide
  Sense strand starting at position 1394 of SEQ ID NO: 1883398
ucuggagaagcugagucau

SEQ ID NO: 2191255 - RNA, 19 nt, Artificial Sequence
  Description of Artificial Sequence: Synthetic oligonucleotide
  Antisense strand to SEQ ID NO: 2191254
augacucagcuucuccaga

SEQ ID NO: 2191256 - RNA, 19 nt, Artificial Sequence
  Description of Artificial Sequence: Synthetic oligonucleotide
  Sense strand starting at position 1472 of SEQ ID NO: 1883398
agagcaaugaccugauaug

SEQ ID NO: 2191257 - RNA, 19 nt, Artificial Sequence
  Description of Artificial Sequence: Synthetic oligonucleotide
  Antisense strand to SEQ ID NO: 2191256
cauaucaggucauugcucu

SEQ ID NO: 2191258 - RNA, 19 nt, Artificial Sequence
  Description of Artificial Sequence: Synthetic oligonucleotide
  Sense strand starting at position 1482 of SEQ ID NO: 1883398
ccugauauggguugguaag

SEQ ID NO: 2191259 - RNA, 19 nt, Artificial Sequence
  Description of Artificial Sequence: Synthetic oligonucleotide
  Antisense strand to SEQ ID NO: 2191258
cuuaccaacccauaucagg

SEQ ID NO: 2191260 - RNA, 19 nt, Artificial Sequence
  Description of Artificial Sequence: Synthetic oligonucleotide
  Sense strand starting at position 1483 of SEQ ID NO: 1883398
cugauauggguugguaaga

SEQ ID NO: 2191261 - RNA, 19 nt, Artificial Sequence
  Description of Artificial Sequence: Synthetic oligonucleotide
  Antisense strand to SEQ ID NO: 2191260
ucuuaccaacccauaucag

SEQ ID NO: 2191262 - RNA, 19 nt, Artificial Sequence
  Description of Artificial Sequence: Synthetic oligonucleotide
  Sense strand starting at position 1518 of SEQ ID NO: 1883398
gugccucgauuuccucaaa

SEQ ID NO: 2191263 - RNA, 19 nt, Artificial Sequence
  Description of Artificial Sequence: Synthetic oligonucleotide
  Antisense strand to SEQ ID NO: 2191262
uuugaggaaaucgaggcac

SEQ ID NO: 2191264 - RNA, 19 nt, Artificial Sequence
  Description of Artificial Sequence: Synthetic oligonucleotide
  Sense strand starting at position 1519 of SEQ ID NO: 1883398
ugccucgauuuccucaaau

SEQ ID NO: 2191265 - RNA, 19 nt, Artificial Sequence
  Description of Artificial Sequence: Synthetic oligonucleotide
  Antisense strand to SEQ ID NO: 2191264
auuugaggaaaucgaggca

SEQ ID NO: 2191266 - RNA, 19 nt, Artificial Sequence
  Description of Artificial Sequence: Synthetic oligonucleotide
  Sense strand starting at position 1630 of SEQ ID NO: 1883398
aagggagcugauugauuau

SEQ ID NO: 2191267 - RNA, 19 nt, Artificial Sequence
  Description of Artificial Sequence: Synthetic oligonucleotide
  Antisense strand to SEQ ID NO: 2191266
auaaucaaucagcucccuu

SEQ ID NO: 2191268 - RNA, 19 nt, Artificial Sequence
  Description of Artificial Sequence: Synthetic oligonucleotide
  Sense strand starting at position 1636 of SEQ ID NO: 1883398
gcugauugauuauuugcua

SEQ ID NO: 2191269 - RNA, 19 nt, Artificial Sequence
  Description of Artificial Sequence: Synthetic oligonucleotide
  Antisense strand to SEQ ID NO: 2191268
uagcaaauaaucaaucagc

SEQ ID NO: 2191270 - RNA, 19 nt, Artificial Sequence
  Description of Artificial Sequence: Synthetic oligonucleotide
  Sense strand starting at position 1674 of SEQ ID NO: 1883398
agcaauugccaugaaaucu

SEQ ID NO: 2191271 - RNA, 19 nt, Artificial Sequence
  Description of Artificial Sequence: Synthetic oligonucleotide
  Antisense strand to SEQ ID NO: 2191270
agauuucauggcaauugcu

SEQ ID NO: 2191272 - RNA, 19 nt, Artificial Sequence
  Description of Artificial Sequence: Synthetic oligonucleotide
  Sense strand starting at position 1774 of SEQ ID NO: 1883398
gggauauggccagaggcau

SEQ ID NO: 2191273 - RNA, 19 nt, Artificial Sequence
  Description of Artificial Sequence: Synthetic oligonucleotide
  Antisense strand to SEQ ID NO: 2191272
augccucuggccauauccc

SEQ ID NO: 2191274 - RNA, 19 nt, Artificial Sequence
  Description of Artificial Sequence: Synthetic oligonucleotide
  Sense strand starting at position 1820 of SEQ ID NO: 1883398
ugacccuuguccucacaca

SEQ ID NO: 2191275 - RNA, 19 nt, Artificial Sequence
  Description of Artificial Sequence: Synthetic oligonucleotide
  Antisense strand to SEQ ID NO: 2191274
ugugugaggacaaggguca

SEQ ID NO: 2191276 - RNA, 19 nt, Artificial Sequence
  Description of Artificial Sequence: Synthetic oligonucleotide
  Sense strand starting at position 1889 of SEQ ID NO: 1883398
ccguaaggucagcagaacu

SEQ ID NO: 2191277 - RNA, 19 nt, Artificial Sequence
  Description of Artificial Sequence: Synthetic oligonucleotide
  Antisense strand to SEQ ID NO: 2191276
aguucugcugaccuuacgg

SEQ ID NO: 2191278 - RNA, 19 nt, Artificial Sequence
  Description of Artificial Sequence: Synthetic oligonucleotide
  Sense strand starting at position 1928 of SEQ ID NO: 1883398
gaggguagcaagugaaaca

SEQ ID NO: 2191279 - RNA, 19 nt, Artificial Sequence
  Description of Artificial Sequence: Synthetic oligonucleotide
  Antisense strand to SEQ ID NO: 2191278
uguuucacuugcuacccuc

SEQ ID NO: 2191280 - RNA, 19 nt, Artificial Sequence
  Description of Artificial Sequence: Synthetic oligonucleotide
  Sense strand starting at position 2089 of SEQ ID NO: 1883398
uuaggaguuucuuucugag

SEQ ID NO: 2191281 - RNA, 19 nt, Artificial Sequence
  Description of Artificial Sequence: Synthetic oligonucleotide
  Antisense strand to SEQ ID NO: 2191280
cucagaaagaaacuccuaa

SEQ ID NO: 2191282 - RNA, 19 nt, Artificial Sequence
  Description of Artificial Sequence: Synthetic oligonucleotide
  Sense strand starting at position 2498 of SEQ ID NO: 1883398
uguaaaucucauggucuag

SEQ ID NO: 2191283 - RNA, 19 nt, Artificial Sequence
  Description of Artificial Sequence: Synthetic oligonucleotide
  Antisense strand to SEQ ID NO: 2191282
cuagaccaugagauuuaca

SEQ ID NO: 2191284 - RNA, 19 nt, Artificial Sequence
  Description of Artificial Sequence: Synthetic oligonucleotide
  Sense strand starting at position 2592 of SEQ ID NO: 1883398
cuugcuuugcaucaugaca

SEQ ID NO: 2191285 - RNA, 19 nt, Artificial Sequence
  Description of Artificial Sequence: Synthetic oligonucleotide
  Antisense strand to SEQ ID NO: 2191284
ugucaugaugcaaagcaag

SEQ ID NO: 2191286 - RNA, 19 nt, Artificial Sequence
  Description of Artificial Sequence: Synthetic oligonucleotide
  Sense strand starting at position 2642 of SEQ ID NO: 1883398
guacuuaaugcauaugaug

SEQ ID NO: 2191287 - RNA, 19 nt, Artificial Sequence
  Description of Artificial Sequence: Synthetic oligonucleotide
  Antisense strand to SEQ ID NO: 2191286
caucauaugcauuaaguac

SEQ ID NO: 2191288 - RNA, 19 nt, Artificial Sequence
  Description of Artificial Sequence: Synthetic oligonucleotide
  Sense strand starting at position 2700 of SEQ ID NO: 1883398
agaggacacaugugauucu

SEQ ID NO: 2191289 - RNA, 19 nt, Artificial Sequence
  Description of Artificial Sequence: Synthetic oligonucleotide
  Antisense strand to SEQ ID NO: 2191288
agaaucacauguguccucu

SEQ ID NO: 2191290 - RNA, 19 nt, Artificial Sequence
  Description of Artificial Sequence: Synthetic oligonucleotide
  Sense strand starting at position 2717 of SEQ ID NO: 1883398
cucggagcugucugauuua

SEQ ID NO: 2191291 - RNA, 19 nt, Artificial Sequence
  Description of Artificial Sequence: Synthetic oligonucleotide
  Antisense strand to SEQ ID NO: 2191290
uaaaucagacagcuccgag

SEQ ID NO: 2191292 - RNA, 19 nt, Artificial Sequence
  Description of Artificial Sequence: Synthetic oligonucleotide
  Sense strand starting at position 2720 of SEQ ID NO: 1883398
ggagcugucugauuuaguu

SEQ ID NO: 2191293 - RNA, 19 nt, Artificial Sequence
  Description of Artificial Sequence: Synthetic oligonucleotide
  Antisense strand to SEQ ID NO: 2191292
aacuaaaucagacagcucc

SEQ ID NO: 2191294 - RNA, 19 nt, Artificial Sequence
  Description of Artificial Sequence: Synthetic oligonucleotide
  Sense strand starting at position 3176 of SEQ ID NO: 1883398
uguaaugagucagccagga

SEQ ID NO: 2191295 - RNA, 19 nt, Artificial Sequence
  Description of Artificial Sequence: Synthetic oligonucleotide
  Antisense strand to SEQ ID NO: 2191294
uccuggcugacucauuaca

SEQ ID NO: 2191296 - RNA, 19 nt, Artificial Sequence
  Description of Artificial Sequence: Synthetic oligonucleotide
  Sense strand starting at position 3371 of SEQ ID NO: 1883398
gccauuaggauccggaaca

SEQ ID NO: 2191297 - RNA, 19 nt, Artificial Sequence
  Description of Artificial Sequence: Synthetic oligonucleotide
  Antisense strand to SEQ ID NO: 2191296
uguuccggauccuaauggc

SEQ ID NO: 2191298 - RNA, 19 nt, Artificial Sequence
  Description of Artificial Sequence: Synthetic oligonucleotide
  Sense strand starting at position 3511 of SEQ ID NO: 1883398
ggguuccagugauuaagua

SEQ ID NO: 2191299 - RNA, 19 nt, Artificial Sequence
  Description of Artificial Sequence: Synthetic oligonucleotide
  Antisense strand to SEQ ID NO: 2191298
uacuuaaucacuggaaccc

SEQ ID NO: 2191300 - RNA, 19 nt, Artificial Sequence
  Description of Artificial Sequence: Synthetic oligonucleotide
  Sense strand starting at position 3524 of SEQ ID NO: 1883398
uaaguaguuugcucaggaa

SEQ ID NO: 2191301 - RNA, 19 nt, Artificial Sequence
  Description of Artificial Sequence: Synthetic oligonucleotide
  Antisense strand to SEQ ID NO: 2191300
uuccugagcaaacuacuua

SEQ ID NO: 2191302 - RNA, 19 nt, Artificial Sequence
  Description of Artificial Sequence: Synthetic oligonucleotide
  Sense strand starting at position 3528 of SEQ ID NO: 1883398
uaguuugcucaggaaacca

SEQ ID NO: 2191303 - RNA, 19 nt, Artificial Sequence
  Description of Artificial Sequence: Synthetic oligonucleotide
  Antisense strand to SEQ ID NO: 2191302
ugguuuccugagcaaacua

SEQ ID NO: 2191304 - RNA, 19 nt, Artificial Sequence
  Description of Artificial Sequence: Synthetic oligonucleotide
  Sense strand starting at position 3541 of SEQ ID NO: 1883398
aaaccaugucagcaguuga

SEQ ID NO: 2191305 - RNA, 19 nt, Artificial Sequence
  Description of Artificial Sequence: Synthetic oligonucleotide
  Antisense strand to SEQ ID NO: 2191304
ucaacugcugacaugguuu

SEQ ID NO: 2191306 - RNA, 19 nt, Artificial Sequence
  Description of Artificial Sequence: Synthetic oligonucleotide
  Sense strand starting at position 3957 of SEQ ID NO: 1883398
uauguuaagggaugugauc

SEQ ID NO: 2191307 - RNA, 19 nt, Artificial Sequence
  Description of Artificial Sequence: Synthetic oligonucleotide
  Antisense strand to SEQ ID NO: 2191306
gaucacaucccuuaacaua

SEQ ID NO: 2191308 - RNA, 19 nt, Artificial Sequence
  Description of Artificial Sequence: Synthetic oligonucleotide
  Sense strand starting at position 35 of SEQ ID NO: 1883399
agcaaauuccaugagcaua

SEQ ID NO: 2191309 - RNA, 19 nt, Artificial Sequence
  Description of Artificial Sequence: Synthetic oligonucleotide
  Antisense strand to SEQ ID NO: 2191308
uaugcucauggaauuugcu

SEQ ID NO: 2191310 - RNA, 19 nt, Artificial Sequence
  Description of Artificial Sequence: Synthetic oligonucleotide
  Sense strand starting at position 50 of SEQ ID NO: 1883399
cauauauaaguguaucgga

SEQ ID NO: 2191311 - RNA, 19 nt, Artificial Sequence
  Description of Artificial Sequence: Synthetic oligonucleotide
  Antisense strand to SEQ ID NO: 2191310
uccgauacacuuauauaug

SEQ ID NO: 2191312 - RNA, 19 nt, Artificial Sequence
  Description of Artificial Sequence: Synthetic oligonucleotide
  Sense strand starting at position 64 of SEQ ID NO: 1883399
ucggaucuacuccauugau

SEQ ID NO: 2191313 - RNA, 19 nt, Artificial Sequence
  Description of Artificial Sequence: Synthetic oligonucleotide
  Antisense strand to SEQ ID NO: 2191312
aucaauggaguagauccga

SEQ ID NO: 2191314 - RNA, 19 nt, Artificial Sequence
  Description of Artificial Sequence: Synthetic oligonucleotide
  Sense strand starting at position 74 of SEQ ID NO: 1883399
uccauugaugcuggagcua

SEQ ID NO: 2191315 - RNA, 19 nt, Artificial Sequence
  Description of Artificial Sequence: Synthetic oligonucleotide
  Antisense strand to SEQ ID NO: 2191314
uagcuccagcaucaaugga

SEQ ID NO: 2191316 - RNA, 19 nt, Artificial Sequence
  Description of Artificial Sequence: Synthetic oligonucleotide
  Sense strand starting at position 184 of SEQ ID NO: 1883399
ugaugugggcuguggaauu

SEQ ID NO: 2191317 - RNA, 19 nt, Artificial Sequence
  Description of Artificial Sequence: Synthetic oligonucleotide
  Antisense strand to SEQ ID NO: 2191316
aauuccacagcccacauca

SEQ ID NO: 2191318 - RNA, 19 nt, Artificial Sequence
  Description of Artificial Sequence: Synthetic oligonucleotide
  Sense strand starting at position 305 of SEQ ID NO: 1883399
agguuauacuccucugaga

SEQ ID NO: 2191319 - RNA, 19 nt, Artificial Sequence
  Description of Artificial Sequence: Synthetic oligonucleotide
  Antisense strand to SEQ ID NO: 2191318
ucucagaggaguauaaccu

SEQ ID NO: 2191320 - RNA, 19 nt, Artificial Sequence
  Description of Artificial Sequence: Synthetic oligonucleotide
  Sense strand starting at position 307 of SEQ ID NO: 1883399
guuauacuccucugagaag

SEQ ID NO: 2191321 - RNA, 19 nt, Artificial Sequence
  Description of Artificial Sequence: Synthetic oligonucleotide
  Antisense strand to SEQ ID NO: 2191320
cuucucagaggaguauaac

SEQ ID NO: 2191322 - RNA, 19 nt, Artificial Sequence
  Description of Artificial Sequence: Synthetic oligonucleotide
  Sense strand starting at position 467 of SEQ ID NO: 1883399
ggguguguacacugaagaa

SEQ ID NO: 2191323 - RNA, 19 nt, Artificial Sequence
  Description of Artificial Sequence: Synthetic oligonucleotide
  Antisense strand to SEQ ID NO: 2191322
uucuucaguguacacaccc

SEQ ID NO: 2191324 - RNA, 19 nt, Artificial Sequence
  Description of Artificial Sequence: Synthetic oligonucleotide
  Sense strand starting at position 613 of SEQ ID NO: 1883399
cugaaauguuucccaacag

SEQ ID NO: 2191325 - RNA, 19 nt, Artificial Sequence
  Description of Artificial Sequence: Synthetic oligonucleotide
  Antisense strand to SEQ ID NO: 2191324
cuguugggaaacauuucag

SEQ ID NO: 2191326 - RNA, 19 nt, Artificial Sequence
  Description of Artificial Sequence: Synthetic oligonucleotide
  Sense strand starting at position 674 of SEQ ID NO: 1883399
gcguguuucgggaauggcu

SEQ ID NO: 2191327 - RNA, 19 nt, Artificial Sequence
  Description of Artificial Sequence: Synthetic oligonucleotide
  Antisense strand to SEQ ID NO: 2191326
agccauucccgaaacacgc

SEQ ID NO: 2191328 - RNA, 19 nt, Artificial Sequence
  Description of Artificial Sequence: Synthetic oligonucleotide
  Sense strand starting at position 682 of SEQ ID NO: 1883399
cgggaauggcucuaggaau

SEQ ID NO: 2191329 - RNA, 19 nt, Artificial Sequence
  Description of Artificial Sequence: Synthetic oligonucleotide
  Antisense strand to SEQ ID NO: 2191328
auuccuagagccauucccg

SEQ ID NO: 2191330 - RNA, 19 nt, Artificial Sequence
  Description of Artificial Sequence: Synthetic oligonucleotide
  Sense strand starting at position 847 of SEQ ID NO: 1883399
uuugcagugcauuagaauc

SEQ ID NO: 2191331 - RNA, 19 nt, Artificial Sequence
  Description of Artificial Sequence: Synthetic oligonucleotide
  Antisense strand to SEQ ID NO: 2191330
gauucuaaugcacugcaaa

SEQ ID NO: 2191332 - RNA, 19 nt, Artificial Sequence
  Description of Artificial Sequence: Synthetic oligonucleotide
  Sense strand starting at position 891 of SEQ ID NO: 1883399
aguuacuuuagugagaguu

SEQ ID NO: 2191333 - RNA, 19 nt, Artificial Sequence
  Description of Artificial Sequence: Synthetic oligonucleotide
  Antisense strand to SEQ ID NO: 2191332
aacucucacuaaaguaacu

SEQ ID NO: 2191334 - RNA, 19 nt, Artificial Sequence
  Description of Artificial Sequence: Synthetic oligonucleotide
  Sense strand starting at position 1005 of SEQ ID NO: 1883399
auuuguuuccuuggaguuu

SEQ ID NO: 2191335 - RNA, 19 nt, Artificial Sequence
  Description of Artificial Sequence: Synthetic oligonucleotide
  Antisense strand to SEQ ID NO: 2191334
aaacuccaaggaaacaaau

SEQ ID NO: 2191336 - RNA, 19 nt, Artificial Sequence
  Description of Artificial Sequence: Synthetic oligonucleotide
  Sense strand starting at position 1067 of SEQ ID NO: 1883399
gucaucaucuucucuggau

SEQ ID NO: 2191337 - RNA, 19 nt, Artificial Sequence
  Description of Artificial Sequence: Synthetic oligonucleotide
  Antisense strand to SEQ ID NO: 2191336
auccagagaagaugaugac

SEQ ID NO: 2191338 - RNA, 19 nt, Artificial Sequence
  Description of Artificial Sequence: Synthetic oligonucleotide
  Sense strand starting at position 1076 of SEQ ID NO: 1883399
uucucuggauucucagaau

SEQ ID NO: 2191339 - RNA, 19 nt, Artificial Sequence
  Description of Artificial Sequence: Synthetic oligonucleotide
  Antisense strand to SEQ ID NO: 2191338
auucugagaauccagagaa

SEQ ID NO: 2191340 - RNA, 19 nt, Artificial Sequence
  Description of Artificial Sequence: Synthetic oligonucleotide
  Sense strand starting at position 1151 of SEQ ID NO: 1883399
ggaaguaaacugcaacagu

SEQ ID NO: 2191341 - RNA, 19 nt, Artificial Sequence
  Description of Artificial Sequence: Synthetic oligonucleotide
  Antisense strand to SEQ ID NO: 2191340
acuguugcaguuuacuucc

SEQ ID NO: 2191342 - RNA, 19 nt, Artificial Sequence
  Description of Artificial Sequence: Synthetic oligonucleotide
  Sense strand starting at position 1196 of SEQ ID NO: 1883399
gucccaccucuguaauucu

SEQ ID NO: 2191343 - RNA, 19 nt, Artificial Sequence
  Description of Artificial Sequence: Synthetic oligonucleotide
  Antisense strand to SEQ ID NO: 2191342
agaauuacagaggugggac

SEQ ID NO: 2191344 - RNA, 19 nt, Artificial Sequence
  Description of Artificial Sequence: Synthetic oligonucleotide
  Sense strand starting at position 1662 of SEQ ID NO: 1883399
cguacaguucacgaggaaa

SEQ ID NO: 2191345 - RNA, 19 nt, Artificial Sequence
  Description of Artificial Sequence: Synthetic oligonucleotide
  Antisense strand to SEQ ID NO: 2191344
uuuccucgugaacuguacg

SEQ ID NO: 2191346 - RNA, 19 nt, Artificial Sequence
  Description of Artificial Sequence: Synthetic oligonucleotide
  Sense strand starting at position 1896 of SEQ ID NO: 1883399
gguacaucucaugaucacu

SEQ ID NO: 2191347 - RNA, 19 nt, Artificial Sequence
  Description of Artificial Sequence: Synthetic oligonucleotide
  Antisense strand to SEQ ID NO: 2191346
agugaucaugagauguacc

SEQ ID NO: 2191348 - RNA, 19 nt, Artificial Sequence
  Description of Artificial Sequence: Synthetic oligonucleotide
  Sense strand starting at position 2314 of SEQ ID NO: 1883399
gguugugauaaacauguua

SEQ ID NO: 2191349 - RNA, 19 nt, Artificial Sequence
  Description of Artificial Sequence: Synthetic oligonucleotide
  Antisense strand to SEQ ID NO: 2191348
uaacauguuuaucacaacc

SEQ ID NO: 2191350 - RNA, 19 nt, Artificial Sequence
  Description of Artificial Sequence: Synthetic oligonucleotide
  Sense strand starting at position 2316 of SEQ ID NO: 1883399
uugugauaaacauguuagu

SEQ ID NO: 2191351 - RNA, 19 nt, Artificial Sequence
  Description of Artificial Sequence: Synthetic oligonucleotide
  Antisense strand to SEQ ID NO: 2191350
acuaacauguuuaucacaa

SEQ ID NO: 2191352 - RNA, 19 nt, Artificial Sequence
  Description of Artificial Sequence: Synthetic oligonucleotide
  Sense strand starting at position 2555 of SEQ ID NO: 1883399
auguucucuucucuaagga

SEQ ID NO: 2191353 - RNA, 19 nt, Artificial Sequence
  Description of Artificial Sequence: Synthetic oligonucleotide
  Antisense strand to SEQ ID NO: 2191352
uccuuagagaagagaacau

SEQ ID NO: 2191354 - RNA, 19 nt, Artificial Sequence
  Description of Artificial Sequence: Synthetic oligonucleotide
  Sense strand starting at position 2556 of SEQ ID NO: 1883399
uguucucuucucuaaggau

SEQ ID NO: 2191355 - RNA, 19 nt, Artificial Sequence
  Description of Artificial Sequence: Synthetic oligonucleotide
  Antisense strand to SEQ ID NO: 2191354
auccuuagagaagagaaca

SEQ ID NO: 2191356 - RNA, 19 nt, Artificial Sequence
  Description of Artificial Sequence: Synthetic oligonucleotide
  Sense strand starting at position 2984 of SEQ ID NO: 1883399
gucucauccugaguuacug

SEQ ID NO: 2191357 - RNA, 19 nt, Artificial Sequence
  Description of Artificial Sequence: Synthetic oligonucleotide
  Antisense strand to SEQ ID NO: 2191356
caguaacucaggaugagac

SEQ ID NO: 2191358 - RNA, 19 nt, Artificial Sequence
  Description of Artificial Sequence: Synthetic oligonucleotide
  Sense strand starting at position 3004 of SEQ ID NO: 1883399
ggguuaagacaucgacaua

SEQ ID NO: 2191359 - RNA, 19 nt, Artificial Sequence
  Description of Artificial Sequence: Synthetic oligonucleotide
  Antisense strand to SEQ ID NO: 2191358
uaugucgaugucuuaaccc

SEQ ID NO: 2191360 - RNA, 19 nt, Artificial Sequence
  Description of Artificial Sequence: Synthetic oligonucleotide
  Sense strand starting at position 3086 of SEQ ID NO: 1883399
ccaagauccuuacccgacu

SEQ ID NO: 2191361 - RNA, 19 nt, Artificial Sequence
  Description of Artificial Sequence: Synthetic oligonucleotide
  Antisense strand to SEQ ID NO: 2191360
agucggguaaggaucuugg

SEQ ID NO: 2191362 - RNA, 19 nt, Artificial Sequence
  Description of Artificial Sequence: Synthetic oligonucleotide
  Sense strand starting at position 3089 of SEQ ID NO: 1883399
agauccuuacccgacuuua

SEQ ID NO: 2191363 - RNA, 19 nt, Artificial Sequence
  Description of Artificial Sequence: Synthetic oligonucleotide
  Antisense strand to SEQ ID NO: 2191362
uaaagucggguaaggaucu

SEQ ID NO: 2191364 - RNA, 19 nt, Artificial Sequence
  Description of Artificial Sequence: Synthetic oligonucleotide
  Sense strand starting at position 3098 of SEQ ID NO: 1883399
cccgacuuuagagguacau

SEQ ID NO: 2191365 - RNA, 19 nt, Artificial Sequence
  Description of Artificial Sequence: Synthetic oligonucleotide
  Antisense strand to SEQ ID NO: 2191364
auguaccucuaaagucggg

SEQ ID NO: 2191366 - RNA, 19 nt, Artificial Sequence
  Description of Artificial Sequence: Synthetic oligonucleotide
  Sense strand starting at position 3325 of SEQ ID NO: 1883399
auucguaucuaacuacgga

SEQ ID NO: 2191367 - RNA, 19 nt, Artificial Sequence
  Description of Artificial Sequence: Synthetic oligonucleotide
  Antisense strand to SEQ ID NO: 2191366
uccguaguuagauacgaau

SEQ ID NO: 2191368 - RNA, 19 nt, Artificial Sequence
  Description of Artificial Sequence: Synthetic oligonucleotide
  Sense strand starting at position 3367 of SEQ ID NO: 1883399
gacugauggucauccuuuc

SEQ ID NO: 2191369 - RNA, 19 nt, Artificial Sequence
  Description of Artificial Sequence: Synthetic oligonucleotide
  Antisense strand to SEQ ID NO: 2191368
gaaaggaugaccaucaguc

SEQ ID NO: 2191370 - RNA, 19 nt, Artificial Sequence
  Description of Artificial Sequence: Synthetic oligonucleotide
  Sense strand starting at position 3423 of SEQ ID NO: 1883399
uacucuggugcagaguaau

SEQ ID NO: 2191371 - RNA, 19 nt, Artificial Sequence
  Description of Artificial Sequence: Synthetic oligonucleotide
  Antisense strand to SEQ ID NO: 2191370
auuacucugcaccagagua

SEQ ID NO: 2191372 - RNA, 19 nt, Artificial Sequence
  Description of Artificial Sequence: Synthetic oligonucleotide
  Sense strand starting at position 3585 of SEQ ID NO: 1883399
uucugaaacagagguuguu

SEQ ID NO: 2191373 - RNA, 19 nt, Artificial Sequence
  Description of Artificial Sequence: Synthetic oligonucleotide
  Antisense strand to SEQ ID NO: 2191372
aacaaccucuguuucagaa

SEQ ID NO: 2191374 - RNA, 19 nt, Artificial Sequence
  Description of Artificial Sequence: Synthetic oligonucleotide
  Sense strand starting at position 3614 of SEQ ID NO: 1883399
ucuggagaaguguauuauc

SEQ ID NO: 2191375 - RNA, 19 nt, Artificial Sequence
  Description of Artificial Sequence: Synthetic oligonucleotide
  Antisense strand to SEQ ID NO: 2191374
gauaauacacuucuccaga

SEQ ID NO: 2191376 - RNA, 19 nt, Artificial Sequence
  Description of Artificial Sequence: Synthetic oligonucleotide
  Sense strand starting at position 3690 of SEQ ID NO: 1883399
cggaacugugcacacgauu

SEQ ID NO: 2191377 - RNA, 19 nt, Artificial Sequence
  Description of Artificial Sequence: Synthetic oligonucleotide
  Antisense strand to SEQ ID NO: 2191376
aaucgugugcacaguuccg

SEQ ID NO: 2191378 - RNA, 19 nt, Artificial Sequence
  Description of Artificial Sequence: Synthetic oligonucleotide
  Sense strand starting at position 3702 of SEQ ID NO: 1883399
cacgauugauauccacagu

SEQ ID NO: 2191379 - RNA, 19 nt, Artificial Sequence
  Description of Artificial Sequence: Synthetic oligonucleotide
  Antisense strand to SEQ ID NO: 2191378
acuguggauaucaaucgug

SEQ ID NO: 2191380 - RNA, 19 nt, Artificial Sequence
  Description of Artificial Sequence: Synthetic oligonucleotide
  Sense strand starting at position 3705 of SEQ ID NO: 1883399
gauugauauccacagugca

SEQ ID NO: 2191381 - RNA, 19 nt, Artificial Sequence
  Description of Artificial Sequence: Synthetic oligonucleotide
  Antisense strand to SEQ ID NO: 2191380
ugcacuguggauaucaauc

SEQ ID NO: 2191382 - RNA, 19 nt, Artificial Sequence
  Description of Artificial Sequence: Synthetic oligonucleotide
  Sense strand starting at position 3708 of SEQ ID NO: 1883399
ugauauccacagugcauau

SEQ ID NO: 2191383 - RNA, 19 nt, Artificial Sequence
  Description of Artificial Sequence: Synthetic oligonucleotide
  Antisense strand to SEQ ID NO: 2191382
auaugcacuguggauauca

SEQ ID NO: 2191384 - RNA, 19 nt, Artificial Sequence
  Description of Artificial Sequence: Synthetic oligonucleotide
  Sense strand starting at position 3743 of SEQ ID NO: 1883399
uggaguuugcaaagcgugu

SEQ ID NO: 2191385 - RNA, 19 nt, Artificial Sequence
  Description of Artificial Sequence: Synthetic oligonucleotide
  Antisense strand to SEQ ID NO: 2191384
acacgcuuugcaaacucca

SEQ ID NO: 2191386 - RNA, 19 nt, Artificial Sequence
  Description of Artificial Sequence: Synthetic oligonucleotide
  Sense strand starting at position 3944 of SEQ ID NO: 1883399
cugcuuaauccugaggcuu

SEQ ID NO: 2191387 - RNA, 19 nt, Artificial Sequence
  Description of Artificial Sequence: Synthetic oligonucleotide
  Antisense strand to SEQ ID NO: 2191386
aagccucaggauuaagcag

SEQ ID NO: 2191388 - RNA, 19 nt, Artificial Sequence
  Description of Artificial Sequence: Synthetic oligonucleotide
  Sense strand starting at position 12 of SEQ ID NO: 1883400
acuguaaugcuguaauaau

SEQ ID NO: 2191389 - RNA, 19 nt, Artificial Sequence
  Description of Artificial Sequence: Synthetic oligonucleotide
  Antisense strand to SEQ ID NO: 2191388
auuauuacagcauuacagu

SEQ ID NO: 2191390 - RNA, 19 nt, Artificial Sequence
  Description of Artificial Sequence: Synthetic oligonucleotide
  Sense strand starting at position 127 of SEQ ID NO: 1883400
agaauaaaugcuugauuac

SEQ ID NO: 2191391 - RNA, 19 nt, Artificial Sequence
  Description of Artificial Sequence: Synthetic oligonucleotide
  Antisense strand to SEQ ID NO: 2191390
guaaucaagcauuuauucu

SEQ ID NO: 2191392 - RNA, 19 nt, Artificial Sequence
  Description of Artificial Sequence: Synthetic oligonucleotide
  Sense strand starting at position 238 of SEQ ID NO: 1883400
cugguauugaugcagacau

SEQ ID NO: 2191393 - RNA, 19 nt, Artificial Sequence
  Description of Artificial Sequence: Synthetic oligonucleotide
  Antisense strand to SEQ ID NO: 2191392
augucugcaucaauaccag

SEQ ID NO: 2191394 - RNA, 19 nt, Artificial Sequence
  Description of Artificial Sequence: Synthetic oligonucleotide
  Sense strand starting at position 240 of SEQ ID NO: 1883400
gguauugaugcagacauac

SEQ ID NO: 2191395 - RNA, 19 nt, Artificial Sequence
  Description of Artificial Sequence: Synthetic oligonucleotide
  Antisense strand to SEQ ID NO: 2191394
guaugucugcaucaauacc

SEQ ID NO: 2191396 - RNA, 19 nt, Artificial Sequence
  Description of Artificial Sequence: Synthetic oligonucleotide
  Sense strand starting at position 584 of SEQ ID NO: 1883400
auaauauuccaucgugaua

SEQ ID NO: 2191397 - RNA, 19 nt, Artificial Sequence
  Description of Artificial Sequence: Synthetic oligonucleotide
  Antisense strand to SEQ ID NO: 2191396
uaucacgauggaauauuau

SEQ ID NO: 2191398 - RNA, 19 nt, Artificial Sequence
  Description of Artificial Sequence: Synthetic oligonucleotide
  Sense strand starting at position 607 of SEQ ID NO: 1883400
ugguucuagcaaugaggaa

SEQ ID NO: 2191399 - RNA, 19 nt, Artificial Sequence
  Description of Artificial Sequence: Synthetic oligonucleotide
  Antisense strand to SEQ ID NO: 2191398
uuccucauugcuagaacca

SEQ ID NO: 2191400 - RNA, 19 nt, Artificial Sequence
  Description of Artificial Sequence: Synthetic oligonucleotide
  Sense strand starting at position 713 of SEQ ID NO: 1883400
caacauagauguuugaguu

SEQ ID NO: 2191401 - RNA, 19 nt, Artificial Sequence
  Description of Artificial Sequence: Synthetic oligonucleotide
  Antisense strand to SEQ ID NO: 2191400
aacucaaacaucuauguug

SEQ ID NO: 2191402 - RNA, 19 nt, Artificial Sequence
  Description of Artificial Sequence: Synthetic oligonucleotide
  Sense strand starting at position 714 of SEQ ID NO: 1883400
aacauagauguuugaguug

SEQ ID NO: 2191403 - RNA, 19 nt, Artificial Sequence
  Description of Artificial Sequence: Synthetic oligonucleotide
  Antisense strand to SEQ ID NO: 2191402
caacucaaacaucuauguu

SEQ ID NO: 2191404 - RNA, 19 nt, Artificial Sequence
  Description of Artificial Sequence: Synthetic oligonucleotide
  Sense strand starting at position 794 of SEQ ID NO: 1883400
agaauaguacuuuaugcca

SEQ ID NO: 2191405 - RNA, 19 nt, Artificial Sequence
  Description of Artificial Sequence: Synthetic oligonucleotide
  Antisense strand to SEQ ID NO: 2191404
uggcauaaaguacuauucu

SEQ ID NO: 2191406 - RNA, 19 nt, Artificial Sequence
  Description of Artificial Sequence: Synthetic oligonucleotide
  Sense strand starting at position 947 of SEQ ID NO: 1883400
guguguauaauggauacau

SEQ ID NO: 2191407 - RNA, 19 nt, Artificial Sequence
  Description of Artificial Sequence: Synthetic oligonucleotide
  Antisense strand to SEQ ID NO: 2191406
auguauccauuauacacac

SEQ ID NO: 2191408 - RNA, 19 nt, Artificial Sequence
  Description of Artificial Sequence: Synthetic oligonucleotide
  Sense strand starting at position 1408 of SEQ ID NO: 1883400
cagcucucuggugaacuaa

SEQ ID NO: 2191409 - RNA, 19 nt, Artificial Sequence
  Description of Artificial Sequence: Synthetic oligonucleotide
  Antisense strand to SEQ ID NO: 2191408
uuaguucaccagagagcug

SEQ ID NO: 2191410 - RNA, 19 nt, Artificial Sequence
  Description of Artificial Sequence: Synthetic oligonucleotide
  Sense strand starting at position 1416 of SEQ ID NO: 1883400
uggugaacuaauggaguga

SEQ ID NO: 2191411 - RNA, 19 nt, Artificial Sequence
  Description of Artificial Sequence: Synthetic oligonucleotide
  Antisense strand to SEQ ID NO: 2191410
ucacuccauuaguucacca

SEQ ID NO: 2191412 - RNA, 19 nt, Artificial Sequence
  Description of Artificial Sequence: Synthetic oligonucleotide
  Sense strand starting at position 1485 of SEQ ID NO: 1883400
gucugugacccagagacuu

SEQ ID NO: 2191413 - RNA, 19 nt, Artificial Sequence
  Description of Artificial Sequence: Synthetic oligonucleotide
  Antisense strand to SEQ ID NO: 2191412
aagucucugggucacagac

SEQ ID NO: 2191414 - RNA, 19 nt, Artificial Sequence
  Description of Artificial Sequence: Synthetic oligonucleotide
  Sense strand starting at position 1684 of SEQ ID NO: 1883400
agggaaugcuuaguuaauu

SEQ ID NO: 2191415 - RNA, 19 nt, Artificial Sequence
  Description of Artificial Sequence: Synthetic oligonucleotide
  Antisense strand to SEQ ID NO: 2191414
aauuaacuaagcauucccu

SEQ ID NO: 2191416 - RNA, 19 nt, Artificial Sequence
  Description of Artificial Sequence: Synthetic oligonucleotide
  Sense strand starting at position 1705 of SEQ ID NO: 1883400
gcugcaucagaguaaauac

SEQ ID NO: 2191417 - RNA, 19 nt, Artificial Sequence
  Description of Artificial Sequence: Synthetic oligonucleotide
  Antisense strand to SEQ ID NO: 2191416
guauuuacucugaugcagc

SEQ ID NO: 2191418 - RNA, 19 nt, Artificial Sequence
  Description of Artificial Sequence: Synthetic oligonucleotide
  Sense strand starting at position 1873 of SEQ ID NO: 1883400
agacgcaggauaugaauau

SEQ ID NO: 2191419 - RNA, 19 nt, Artificial Sequence
  Description of Artificial Sequence: Synthetic oligonucleotide
  Antisense strand to SEQ ID NO: 2191418
auauucauauccugcgucu

SEQ ID NO: 2191420 - RNA, 19 nt, Artificial Sequence
  Description of Artificial Sequence: Synthetic oligonucleotide
  Sense strand starting at position 1986 of SEQ ID NO: 1883400
guauucuauuuaucugucu

SEQ ID NO: 2191421 - RNA, 19 nt, Artificial Sequence
  Description of Artificial Sequence: Synthetic oligonucleotide
  Antisense strand to SEQ ID NO: 2191420
agacagauaaauagaauac

SEQ ID NO: 2191422 - RNA, 19 nt, Artificial Sequence
  Description of Artificial Sequence: Synthetic oligonucleotide
  Sense strand starting at position 2084 of SEQ ID NO: 1883400
gagguagcauuauucugaa

SEQ ID NO: 2191423 - RNA, 19 nt, Artificial Sequence
  Description of Artificial Sequence: Synthetic oligonucleotide
  Antisense strand to SEQ ID NO: 2191422
uucagaauaaugcuaccuc

SEQ ID NO: 2191424 - RNA, 19 nt, Artificial Sequence
  Description of Artificial Sequence: Synthetic oligonucleotide
  Sense strand starting at position 2151 of SEQ ID NO: 1883400
uuggguuacauuggauaua

SEQ ID NO: 2191425 - RNA, 19 nt, Artificial Sequence
  Description of Artificial Sequence: Synthetic oligonucleotide
  Antisense strand to SEQ ID NO: 2191424
uauauccaauguaacccaa

SEQ ID NO: 2191426 - RNA, 19 nt, Artificial Sequence
  Description of Artificial Sequence: Synthetic oligonucleotide
  Sense strand starting at position 2218 of SEQ ID NO: 1883400
cugagcuaugcauaagauu

SEQ ID NO: 2191427 - RNA, 19 nt, Artificial Sequence
  Description of Artificial Sequence: Synthetic oligonucleotide
  Antisense strand to SEQ ID NO: 2191426
aaucuuaugcauagcucag

SEQ ID NO: 2191428 - RNA, 19 nt, Artificial Sequence
  Description of Artificial Sequence: Synthetic oligonucleotide
  Sense strand starting at position 2246 of SEQ ID NO: 1883400
ucccuuaaugucuauagua

SEQ ID NO: 2191429 - RNA, 19 nt, Artificial Sequence
  Description of Artificial Sequence: Synthetic oligonucleotide
  Antisense strand to SEQ ID NO: 2191428
uacuauagacauuaaggga

SEQ ID NO: 2191430 - RNA, 19 nt, Artificial Sequence
  Description of Artificial Sequence: Synthetic oligonucleotide
  Sense strand starting at position 2248 of SEQ ID NO: 1883400
ccuuaaugucuauaguaaa

SEQ ID NO: 2191431 - RNA, 19 nt, Artificial Sequence
  Description of Artificial Sequence: Synthetic oligonucleotide
  Antisense strand to SEQ ID NO: 2191430
uuuacuauagacauuaagg

SEQ ID NO: 2191432 - RNA, 19 nt, Artificial Sequence
  Description of Artificial Sequence: Synthetic oligonucleotide
  Sense strand starting at position 2277 of SEQ ID NO: 1883400
uucuucuauguauagaagu

SEQ ID NO: 2191433 - RNA, 19 nt, Artificial Sequence
  Description of Artificial Sequence: Synthetic oligonucleotide
  Antisense strand to SEQ ID NO: 2191432
acuucuauacauagaagaa

SEQ ID NO: 2191434 - RNA, 19 nt, Artificial Sequence
  Description of Artificial Sequence: Synthetic oligonucleotide
  Sense strand starting at position 2470 of SEQ ID NO: 1883400
cuuauuaaaguccaucgaa

SEQ ID NO: 2191435 - RNA, 19 nt, Artificial Sequence
  Description of Artificial Sequence: Synthetic oligonucleotide
  Antisense strand to SEQ ID NO: 2191434
uucgauggacuuuaauaag

SEQ ID NO: 2191436 - RNA, 19 nt, Artificial Sequence
  Description of Artificial Sequence: Synthetic oligonucleotide
  Sense strand starting at position 2479 of SEQ ID NO: 1883400
guccaucgaaagugauaaa

SEQ ID NO: 2191437 - RNA, 19 nt, Artificial Sequence
  Description of Artificial Sequence: Synthetic oligonucleotide
  Antisense strand to SEQ ID NO: 2191436
uuuaucacuuucgauggac

SEQ ID NO: 2191438 - RNA, 19 nt, Artificial Sequence
  Description of Artificial Sequence: Synthetic oligonucleotide
  Sense strand starting at position 2843 of SEQ ID NO: 1883400
auauaucaguguccugaga

SEQ ID NO: 2191439 - RNA, 19 nt, Artificial Sequence
  Description of Artificial Sequence: Synthetic oligonucleotide
  Antisense strand to SEQ ID NO: 2191438
ucucaggacacugauauau

SEQ ID NO: 2191440 - RNA, 19 nt, Artificial Sequence
  Description of Artificial Sequence: Synthetic oligonucleotide
  Sense strand starting at position 2953 of SEQ ID NO: 1883400
gagcaaagauuugagggaa

SEQ ID NO: 2191441 - RNA, 19 nt, Artificial Sequence
  Description of Artificial Sequence: Synthetic oligonucleotide
  Antisense strand to SEQ ID NO: 2191440
uucccucaaaucuuugcuc

SEQ ID NO: 2191442 - RNA, 19 nt, Artificial Sequence
  Description of Artificial Sequence: Synthetic oligonucleotide
  Sense strand starting at position 3008 of SEQ ID NO: 1883400
ugcucuguauuugucaaca

SEQ ID NO: 2191443 - RNA, 19 nt, Artificial Sequence
  Description of Artificial Sequence: Synthetic oligonucleotide
  Antisense strand to SEQ ID NO: 2191442
uguugacaaauacagagca

SEQ ID NO: 2191444 - RNA, 19 nt, Artificial Sequence
  Description of Artificial Sequence: Synthetic oligonucleotide
  Sense strand starting at position 3075 of SEQ ID NO: 1883400
gcaagaugccaguaucuga

SEQ ID NO: 2191445 - RNA, 19 nt, Artificial Sequence
  Description of Artificial Sequence: Synthetic oligonucleotide
  Antisense strand to SEQ ID NO: 2191444
ucagauacuggcaucuugc

SEQ ID NO: 2191446 - RNA, 19 nt, Artificial Sequence
  Description of Artificial Sequence: Synthetic oligonucleotide
  Sense strand starting at position 3193 of SEQ ID NO: 1883400
cuccuaguggaaugaucaa

SEQ ID NO: 2191447 - RNA, 19 nt, Artificial Sequence
  Description of Artificial Sequence: Synthetic oligonucleotide
  Antisense strand to SEQ ID NO: 2191446
uugaucauuccacuaggag

SEQ ID NO: 2191448 - RNA, 19 nt, Artificial Sequence
  Description of Artificial Sequence: Synthetic oligonucleotide
  Sense strand starting at position 3219 of SEQ ID NO: 1883400
agcguuggaccacagaaau

SEQ ID NO: 2191449 - RNA, 19 nt, Artificial Sequence
  Description of Artificial Sequence: Synthetic oligonucleotide
  Antisense strand to SEQ ID NO: 2191448
auuucugugguccaacgcu

SEQ ID NO: 2191450 - RNA, 19 nt, Artificial Sequence
  Description of Artificial Sequence: Synthetic oligonucleotide
  Sense strand starting at position 3511 of SEQ ID NO: 1883400
acaggugaaauauguguau

SEQ ID NO: 2191451 - RNA, 19 nt, Artificial Sequence
  Description of Artificial Sequence: Synthetic oligonucleotide
  Antisense strand to SEQ ID NO: 2191450
auacacauauuucaccugu

SEQ ID NO: 2191452 - RNA, 19 nt, Artificial Sequence
  Description of Artificial Sequence: Synthetic oligonucleotide
  Sense strand starting at position 3562 of SEQ ID NO: 1883400
uaguaaucugaggacuggu

SEQ ID NO: 2191453 - RNA, 19 nt, Artificial Sequence
  Description of Artificial Sequence: Synthetic oligonucleotide
  Antisense strand to SEQ ID NO: 2191452
accaguccucagauuacua

SEQ ID NO: 2191454 - RNA, 19 nt, Artificial Sequence
  Description of Artificial Sequence: Synthetic oligonucleotide
  Sense strand starting at position 3565 of SEQ ID NO: 1883400
uaaucugaggacugguuau

SEQ ID NO: 2191455 - RNA, 19 nt, Artificial Sequence
  Description of Artificial Sequence: Synthetic oligonucleotide
  Antisense strand to SEQ ID NO: 2191454
auaaccaguccucagauua

SEQ ID NO: 2191456 - RNA, 19 nt, Artificial Sequence
  Description of Artificial Sequence: Synthetic oligonucleotide
  Sense strand starting at position 3571 of SEQ ID NO: 1883400
gaggacugguuaucaucau

SEQ ID NO: 2191457 - RNA, 19 nt, Artificial Sequence
  Description of Artificial Sequence: Synthetic oligonucleotide
  Antisense strand to SEQ ID NO: 2191456
augaugauaaccaguccuc

SEQ ID NO: 2191458 - RNA, 19 nt, Artificial Sequence
  Description of Artificial Sequence: Synthetic oligonucleotide
  Sense strand starting at position 3636 of SEQ ID NO: 1883400
gguucauuucguggcuaga

SEQ ID NO: 2191459 - RNA, 19 nt, Artificial Sequence
  Description of Artificial Sequence: Synthetic oligonucleotide
  Antisense strand to SEQ ID NO: 2191458
ucuagccacgaaaugaacc

SEQ ID NO: 2191460 - RNA, 19 nt, Artificial Sequence
  Description of Artificial Sequence: Synthetic oligonucleotide
  Sense strand starting at position 3638 of SEQ ID NO: 1883400
uucauuucguggcuagaag

SEQ ID NO: 2191461 - RNA, 19 nt, Artificial Sequence
  Description of Artificial Sequence: Synthetic oligonucleotide
  Antisense strand to SEQ ID NO: 2191460
cuucuagccacgaaaugaa

SEQ ID NO: 2191462 - RNA, 19 nt, Artificial Sequence
  Description of Artificial Sequence: Synthetic oligonucleotide
  Sense strand starting at position 3639 of SEQ ID NO: 1883400
ucauuucguggcuagaagu

SEQ ID NO: 2191463 - RNA, 19 nt, Artificial Sequence
  Description of Artificial Sequence: Synthetic oligonucleotide
  Antisense strand to SEQ ID NO: 2191462
acuucuagccacgaaauga

SEQ ID NO: 2191464 - RNA, 19 nt, Artificial Sequence
  Description of Artificial Sequence: Synthetic oligonucleotide
  Sense strand starting at position 3647 of SEQ ID NO: 1883400
uggcuagaaguguaaccau

SEQ ID NO: 2191465 - RNA, 19 nt, Artificial Sequence
  Description of Artificial Sequence: Synthetic oligonucleotide
  Antisense strand to SEQ ID NO: 2191464
augguuacacuucuagcca

SEQ ID NO: 2191466 - RNA, 19 nt, Artificial Sequence
  Description of Artificial Sequence: Synthetic oligonucleotide
  Sense strand starting at position 3815 of SEQ ID NO: 1883400
guaggacauauggguaaau

SEQ ID NO: 2191467 - RNA, 19 nt, Artificial Sequence
  Description of Artificial Sequence: Synthetic oligonucleotide
  Antisense strand to SEQ ID NO: 2191466
auuuacccauauguccuac

SEQ ID NO: 2191468 - RNA, 19 nt, Artificial Sequence
  Description of Artificial Sequence: Synthetic oligonucleotide
  Sense strand starting at position 92 of SEQ ID NO: 1883401
gugugagaaaccuguaaau

SEQ ID NO: 2191469 - RNA, 19 nt, Artificial Sequence
  Description of Artificial Sequence: Synthetic oligonucleotide
  Antisense strand to SEQ ID NO: 2191468
auuuacagguuucucacac

SEQ ID NO: 2191470 - RNA, 19 nt, Artificial Sequence
  Description of Artificial Sequence: Synthetic oligonucleotide
  Sense strand starting at position 94 of SEQ ID NO: 1883401
gugagaaaccuguaaaugu

SEQ ID NO: 2191471 - RNA, 19 nt, Artificial Sequence
  Description of Artificial Sequence: Synthetic oligonucleotide
  Antisense strand to SEQ ID NO: 2191470
acauuuacagguuucucac

SEQ ID NO: 2191472 - RNA, 19 nt, Artificial Sequence
  Description of Artificial Sequence: Synthetic oligonucleotide
  Sense strand starting at position 107 of SEQ ID NO: 1883401
aaaugugagaagcaguguu

SEQ ID NO: 2191473 - RNA, 19 nt, Artificial Sequence
  Description of Artificial Sequence: Synthetic oligonucleotide
  Antisense strand to SEQ ID NO: 2191472
aacacugcuucucacauuu

SEQ ID NO: 2191474 - RNA, 19 nt, Artificial Sequence
  Description of Artificial Sequence: Synthetic oligonucleotide
  Sense strand starting at position 473 of SEQ ID NO: 1883401
ugaggucacuguccuagaa

SEQ ID NO: 2191475 - RNA, 19 nt, Artificial Sequence
  Description of Artificial Sequence: Synthetic oligonucleotide
  Antisense strand to SEQ ID NO: 2191474
uucuaggacagugaccuca

SEQ ID NO: 2191476 - RNA, 19 nt, Artificial Sequence
  Description of Artificial Sequence: Synthetic oligonucleotide
  Sense strand starting at position 477 of SEQ ID NO: 1883401
gucacuguccuagaauaaa

SEQ ID NO: 2191477 - RNA, 19 nt, Artificial Sequence
  Description of Artificial Sequence: Synthetic oligonucleotide
  Antisense strand to SEQ ID NO: 2191476
uuuauucuaggacagugac

SEQ ID NO: 2191478 - RNA, 19 nt, Artificial Sequence
  Description of Artificial Sequence: Synthetic oligonucleotide
  Sense strand starting at position 530 of SEQ ID NO: 1883401
acuuauccuguuugaagaa

SEQ ID NO: 2191479 - RNA, 19 nt, Artificial Sequence
  Description of Artificial Sequence: Synthetic oligonucleotide
  Antisense strand to SEQ ID NO: 2191478
uucuucaaacaggauaagu

SEQ ID NO: 2191480 - RNA, 19 nt, Artificial Sequence
  Description of Artificial Sequence: Synthetic oligonucleotide
  Sense strand starting at position 557 of SEQ ID NO: 1883401
cucugugguguagacagau

SEQ ID NO: 2191481 - RNA, 19 nt, Artificial Sequence
  Description of Artificial Sequence: Synthetic oligonucleotide
  Antisense strand to SEQ ID NO: 2191480
aucugucuacaccacagag

SEQ ID NO: 2191482 - RNA, 19 nt, Artificial Sequence
  Description of Artificial Sequence: Synthetic oligonucleotide
  Sense strand starting at position 652 of SEQ ID NO: 1883401
agcauucuacauugagaaa

SEQ ID NO: 2191483 - RNA, 19 nt, Artificial Sequence
  Description of Artificial Sequence: Synthetic oligonucleotide
  Antisense strand to SEQ ID NO: 2191482
uuucucaauguagaaugcu

SEQ ID NO: 2191484 - RNA, 19 nt, Artificial Sequence
  Description of Artificial Sequence: Synthetic oligonucleotide
  Sense strand starting at position 713 of SEQ ID NO: 1883401
gucagugcauagcuaauuu

SEQ ID NO: 2191485 - RNA, 19 nt, Artificial Sequence
  Description of Artificial Sequence: Synthetic oligonucleotide
  Antisense strand to SEQ ID NO: 2191484
aaauuagcuaugcacugac

SEQ ID NO: 2191486 - RNA, 19 nt, Artificial Sequence
  Description of Artificial Sequence: Synthetic oligonucleotide
  Sense strand starting at position 803 of SEQ ID NO: 1883401
uauacaguugaaugaaguu

SEQ ID NO: 2191487 - RNA, 19 nt, Artificial Sequence
  Description of Artificial Sequence: Synthetic oligonucleotide
  Antisense strand to SEQ ID NO: 2191486
aacuucauucaacuguaua

SEQ ID NO: 2191488 - RNA, 19 nt, Artificial Sequence
  Description of Artificial Sequence: Synthetic oligonucleotide
  Sense strand starting at position 877 of SEQ ID NO: 1883401
cucauucuagccuguauuu

SEQ ID NO: 2191489 - RNA, 19 nt, Artificial Sequence
  Description of Artificial Sequence: Synthetic oligonucleotide
  Antisense strand to SEQ ID NO: 2191488
aaauacaggcuagaaugag

SEQ ID NO: 2191490 - RNA, 19 nt, Artificial Sequence
  Description of Artificial Sequence: Synthetic oligonucleotide
  Sense strand starting at position 900 of SEQ ID NO: 1883401
gugcaaagauaaucauuau

SEQ ID NO: 2191491 - RNA, 19 nt, Artificial Sequence
  Description of Artificial Sequence: Synthetic oligonucleotide
  Antisense strand to SEQ ID NO: 2191490
auaaugauuaucuuugcac

SEQ ID NO: 2191492 - RNA, 19 nt, Artificial Sequence
  Description of Artificial Sequence: Synthetic oligonucleotide
  Sense strand starting at position 1129 of SEQ ID NO: 1883401
cccagaguggauuguaaug

SEQ ID NO: 2191493 - RNA, 19 nt, Artificial Sequence
  Description of Artificial Sequence: Synthetic oligonucleotide
  Antisense strand to SEQ ID NO: 2191492
cauuacaauccacucuggg

SEQ ID NO: 2191494 - RNA, 19 nt, Artificial Sequence
  Description of Artificial Sequence: Synthetic oligonucleotide
  Sense strand starting at position 1474 of SEQ ID NO: 1883401
ccauguaaaucucugaaug

SEQ ID NO: 2191495 - RNA, 19 nt, Artificial Sequence
  Description of Artificial Sequence: Synthetic oligonucleotide
  Antisense strand to SEQ ID NO: 2191494
cauucagagauuuacaugg

SEQ ID NO: 2191496 - RNA, 19 nt, Artificial Sequence
  Description of Artificial Sequence: Synthetic oligonucleotide
  Sense strand starting at position 1773 of SEQ ID NO: 1883401
cugucauccaaguaugggu

SEQ ID NO: 2191497 - RNA, 19 nt, Artificial Sequence
  Description of Artificial Sequence: Synthetic oligonucleotide
  Antisense strand to SEQ ID NO: 2191496
acccauacuuggaugacag

SEQ ID NO: 2191498 - RNA, 19 nt, Artificial Sequence
  Description of Artificial Sequence: Synthetic oligonucleotide
  Sense strand starting at position 1778 of SEQ ID NO: 1883401
auccaaguauggguuugau

SEQ ID NO: 2191499 - RNA, 19 nt, Artificial Sequence
  Description of Artificial Sequence: Synthetic oligonucleotide
  Antisense strand to SEQ ID NO: 2191498
aucaaacccauacuuggau

SEQ ID NO: 2191500 - RNA, 19 nt, Artificial Sequence
  Description of Artificial Sequence: Synthetic oligonucleotide
  Sense strand starting at position 1781 of SEQ ID NO: 1883401
caaguauggguuugauaaa

SEQ ID NO: 2191501 - RNA, 19 nt, Artificial Sequence
  Description of Artificial Sequence: Synthetic oligonucleotide
  Antisense strand to SEQ ID NO: 2191500
uuuaucaaacccauacuug

SEQ ID NO: 2191502 - RNA, 19 nt, Artificial Sequence
  Description of Artificial Sequence: Synthetic oligonucleotide
  Sense strand starting at position 1882 of SEQ ID NO: 1883401
auucccagucauuaaaguu

SEQ ID NO: 2191503 - RNA, 19 nt, Artificial Sequence
  Description of Artificial Sequence: Synthetic oligonucleotide
  Antisense strand to SEQ ID NO: 2191502
aacuuuaaugacugggaau

SEQ ID NO: 2191504 - RNA, 19 nt, Artificial Sequence
  Description of Artificial Sequence: Synthetic oligonucleotide
  Sense strand starting at position 1904 of SEQ ID NO: 1883401
aauagaagucacgaagcuu

SEQ ID NO: 2191505 - RNA, 19 nt, Artificial Sequence
  Description of Artificial Sequence: Synthetic oligonucleotide
  Antisense strand to SEQ ID NO: 2191504
aagcuucgugacuucuauu

SEQ ID NO: 2191506 - RNA, 19 nt, Artificial Sequence
  Description of Artificial Sequence: Synthetic oligonucleotide
  Sense strand starting at position 1932 of SEQ ID NO: 1883401
gagacacaaccucaguguu

SEQ ID NO: 2191507 - RNA, 19 nt, Artificial Sequence
  Description of Artificial Sequence: Synthetic oligonucleotide
  Antisense strand to SEQ ID NO: 2191506
aacacugagguugugucuc

SEQ ID NO: 2191508 - RNA, 19 nt, Artificial Sequence
  Description of Artificial Sequence: Synthetic oligonucleotide
  Sense strand starting at position 2033 of SEQ ID NO: 1883401
aaguaacaugcauagaguu

SEQ ID NO: 2191509 - RNA, 19 nt, Artificial Sequence
  Description of Artificial Sequence: Synthetic oligonucleotide
  Antisense strand to SEQ ID NO: 2191508
aacucuaugcauguuacuu

SEQ ID NO: 2191510 - RNA, 19 nt, Artificial Sequence
  Description of Artificial Sequence: Synthetic oligonucleotide
  Sense strand starting at position 2135 of SEQ ID NO: 1883401
ucugguaaaccaugucaaa

SEQ ID NO: 2191511 - RNA, 19 nt, Artificial Sequence
  Description of Artificial Sequence: Synthetic oligonucleotide
  Antisense strand to SEQ ID NO: 2191510
uuugacaugguuuaccaga

SEQ ID NO: 2191512 - RNA, 19 nt, Artificial Sequence
  Description of Artificial Sequence: Synthetic oligonucleotide
  Sense strand starting at position 2347 of SEQ ID NO: 1883401
uuuggaauagugcacuaaa

SEQ ID NO: 2191513 - RNA, 19 nt, Artificial Sequence
  Description of Artificial Sequence: Synthetic oligonucleotide
  Antisense strand to SEQ ID NO: 2191512
uuuagugcacuauuccaaa

SEQ ID NO: 2191514 - RNA, 19 nt, Artificial Sequence
  Description of Artificial Sequence: Synthetic oligonucleotide
  Sense strand starting at position 2427 of SEQ ID NO: 1883401
auucuagugcuguaaauau

SEQ ID NO: 2191515 - RNA, 19 nt, Artificial Sequence
  Description of Artificial Sequence: Synthetic oligonucleotide
  Antisense strand to SEQ ID NO: 2191514
auauuuacagcacuagaau

SEQ ID NO: 2191516 - RNA, 19 nt, Artificial Sequence
  Description of Artificial Sequence: Synthetic oligonucleotide
  Sense strand starting at position 2468 of SEQ ID NO: 1883401
uauggugauguaggucaaa

SEQ ID NO: 2191517 - RNA, 19 nt, Artificial Sequence
  Description of Artificial Sequence: Synthetic oligonucleotide
  Antisense strand to SEQ ID NO: 2191516
uuugaccuacaucaccaua

SEQ ID NO: 2191518 - RNA, 19 nt, Artificial Sequence
  Description of Artificial Sequence: Synthetic oligonucleotide
  Sense strand starting at position 2542 of SEQ ID NO: 1883401
cuauaacauuuauagguga

SEQ ID NO: 2191519 - RNA, 19 nt, Artificial Sequence
  Description of Artificial Sequence: Synthetic oligonucleotide
  Antisense strand to SEQ ID NO: 2191518
ucaccuauaaauguuauag

SEQ ID NO: 2191520 - RNA, 19 nt, Artificial Sequence
  Description of Artificial Sequence: Synthetic oligonucleotide
  Sense strand starting at position 2920 of SEQ ID NO: 1883401
uuuauaugaugaucagugu

SEQ ID NO: 2191521 - RNA, 19 nt, Artificial Sequence
  Description of Artificial Sequence: Synthetic oligonucleotide
  Antisense strand to SEQ ID NO: 2191520
acacugaucaucauauaaa

SEQ ID NO: 2191522 - RNA, 19 nt, Artificial Sequence
  Description of Artificial Sequence: Synthetic oligonucleotide
  Sense strand starting at position 2921 of SEQ ID NO: 1883401
uuauaugaugaucaguguu

SEQ ID NO: 2191523 - RNA, 19 nt, Artificial Sequence
  Description of Artificial Sequence: Synthetic oligonucleotide
  Antisense strand to SEQ ID NO: 2191522
aacacugaucaucauauaa

SEQ ID NO: 2191524 - RNA, 19 nt, Artificial Sequence
  Description of Artificial Sequence: Synthetic oligonucleotide
  Sense strand starting at position 2962 of SEQ ID NO: 1883401
ugugguccaggucauuaaa

SEQ ID NO: 2191525 - RNA, 19 nt, Artificial Sequence
  Description of Artificial Sequence: Synthetic oligonucleotide
  Antisense strand to SEQ ID NO: 2191524
uuuaaugaccuggaccaca

SEQ ID NO: 2191526 - RNA, 19 nt, Artificial Sequence
  Description of Artificial Sequence: Synthetic oligonucleotide
  Sense strand starting at position 2965 of SEQ ID NO: 1883401
gguccaggucauuaaaguu

SEQ ID NO: 2191527 - RNA, 19 nt, Artificial Sequence
  Description of Artificial Sequence: Synthetic oligonucleotide
  Antisense strand to SEQ ID NO: 2191526
aacuuuaaugaccuggacc

SEQ ID NO: 2191528 - RNA, 19 nt, Artificial Sequence
  Description of Artificial Sequence: Synthetic oligonucleotide
  Sense strand starting at position 3025 of SEQ ID NO: 1883401
gcauuaucauaauuaaggu

SEQ ID NO: 2191529 - RNA, 19 nt, Artificial Sequence
  Description of Artificial Sequence: Synthetic oligonucleotide
  Antisense strand to SEQ ID NO: 2191528
accuuaauuaugauaaugc

SEQ ID NO: 2191530 - RNA, 19 nt, Artificial Sequence
  Description of Artificial Sequence: Synthetic oligonucleotide
  Sense strand starting at position 3167 of SEQ ID NO: 1883401
agcauuacugucgacagau

SEQ ID NO: 2191531 - RNA, 19 nt, Artificial Sequence
  Description of Artificial Sequence: Synthetic oligonucleotide
  Antisense strand to SEQ ID NO: 2191530
aucugucgacaguaaugcu

SEQ ID NO: 2191532 - RNA, 19 nt, Artificial Sequence
  Description of Artificial Sequence: Synthetic oligonucleotide
  Sense strand starting at position 3180 of SEQ ID NO: 1883401
acagaugcucuuuagguuu

SEQ ID NO: 2191533 - RNA, 19 nt, Artificial Sequence
  Description of Artificial Sequence: Synthetic oligonucleotide
  Antisense strand to SEQ ID NO: 2191532
aaaccuaaagagcaucugu

SEQ ID NO: 2191534 - RNA, 19 nt, Artificial Sequence
  Description of Artificial Sequence: Synthetic oligonucleotide
  Sense strand starting at position 3249 of SEQ ID NO: 1883401
aauuaccuguggguauaua

SEQ ID NO: 2191535 - RNA, 19 nt, Artificial Sequence
  Description of Artificial Sequence: Synthetic oligonucleotide
  Antisense strand to SEQ ID NO: 2191534
uauauacccacagguaauu

SEQ ID NO: 2191536 - RNA, 19 nt, Artificial Sequence
  Description of Artificial Sequence: Synthetic oligonucleotide
  Sense strand starting at position 3250 of SEQ ID NO: 1883401
auuaccuguggguauauaa

SEQ ID NO: 2191537 - RNA, 19 nt, Artificial Sequence
  Description of Artificial Sequence: Synthetic oligonucleotide
  Antisense strand to SEQ ID NO: 2191536
uuauauacccacagguaau

SEQ ID NO: 2191538 - RNA, 19 nt, Artificial Sequence
  Description of Artificial Sequence: Synthetic oligonucleotide
  Sense strand starting at position 3435 of SEQ ID NO: 1883401
ccuuuaaauguuuagguuu

SEQ ID NO: 2191539 - RNA, 19 nt, Artificial Sequence
  Description of Artificial Sequence: Synthetic oligonucleotide
  Antisense strand to SEQ ID NO: 2191538
aaaccuaaacauuuaaagg

SEQ ID NO: 2191540 - RNA, 19 nt, Artificial Sequence
  Description of Artificial Sequence: Synthetic oligonucleotide
  Sense strand starting at position 3592 of SEQ ID NO: 1883401
uugacaauuugacaaugau

SEQ ID NO: 2191541 - RNA, 19 nt, Artificial Sequence
  Description of Artificial Sequence: Synthetic oligonucleotide
  Antisense strand to SEQ ID NO: 2191540
aucauugucaaauugucaa

SEQ ID NO: 2191542 - RNA, 19 nt, Artificial Sequence
  Description of Artificial Sequence: Synthetic oligonucleotide
  Sense strand starting at position 3676 of SEQ ID NO: 1883401
guuugaggguuguuuauuu

SEQ ID NO: 2191543 - RNA, 19 nt, Artificial Sequence
  Description of Artificial Sequence: Synthetic oligonucleotide
  Antisense strand to SEQ ID NO: 2191542
aaauaaacaacccucaaac

SEQ ID NO: 2191544 - RNA, 19 nt, Artificial Sequence
  Description of Artificial Sequence: Synthetic oligonucleotide
  Sense strand starting at position 3936 of SEQ ID NO: 1883401
gcuauuugcuagcuguaaa

SEQ ID NO: 2191545 - RNA, 19 nt, Artificial Sequence
  Description of Artificial Sequence: Synthetic oligonucleotide
  Antisense strand to SEQ ID NO: 2191544
uuuacagcuagcaaauagc

SEQ ID NO: 2191546 - RNA, 19 nt, Artificial Sequence
  Description of Artificial Sequence: Synthetic oligonucleotide
  Sense strand starting at position 3939 of SEQ ID NO: 1883401
auuugcuagcuguaaagcu

SEQ ID NO: 2191547 - RNA, 19 nt, Artificial Sequence
  Description of Artificial Sequence: Synthetic oligonucleotide
  Antisense strand to SEQ ID NO: 2191546
agcuuuacagcuagcaaau

SEQ ID NO: 2191548 - RNA, 19 nt, Artificial Sequence
  Description of Artificial Sequence: Synthetic oligonucleotide
  Sense strand starting at position 258 of SEQ ID NO: 1883402
ugagguuggucagcuuagu

SEQ ID NO: 2191549 - RNA, 19 nt, Artificial Sequence
  Description of Artificial Sequence: Synthetic oligonucleotide
  Antisense strand to SEQ ID NO: 2191548
acuaagcugaccaaccuca

SEQ ID NO: 2191550 - RNA, 19 nt, Artificial Sequence
  Description of Artificial Sequence: Synthetic oligonucleotide
  Sense strand starting at position 1229 of SEQ ID NO: 1883402
gcagguucuccgugaggau

SEQ ID NO: 2191551 - RNA, 19 nt, Artificial Sequence
  Description of Artificial Sequence: Synthetic oligonucleotide
  Antisense strand to SEQ ID NO: 2191550
auccucacggagaaccugc

SEQ ID NO: 2191552 - RNA, 19 nt, Artificial Sequence
  Description of Artificial Sequence: Synthetic oligonucleotide
  Sense strand starting at position 1230 of SEQ ID NO: 1883402
cagguucuccgugaggauc

SEQ ID NO: 2191553 - RNA, 19 nt, Artificial Sequence
  Description of Artificial Sequence: Synthetic oligonucleotide
  Antisense strand to SEQ ID NO: 2191552
gauccucacggagaaccug

SEQ ID NO: 2191554 - RNA, 19 nt, Artificial Sequence
  Description of Artificial Sequence: Synthetic oligonucleotide
  Sense strand starting at position 1253 of SEQ ID NO: 1883402
cagagagguucucacaguc

SEQ ID NO: 2191555 - RNA, 19 nt, Artificial Sequence
  Description of Artificial Sequence: Synthetic oligonucleotide
  Antisense strand to SEQ ID NO: 2191554
gacugugagaaccucucug

SEQ ID NO: 2191556 - RNA, 19 nt, Artificial Sequence
  Description of Artificial Sequence: Synthetic oligonucleotide
  Sense strand starting at position 1680 of SEQ ID NO: 1883402
cccuguguuccacaccaca

SEQ ID NO: 2191557 - RNA, 19 nt, Artificial Sequence
  Description of Artificial Sequence: Synthetic oligonucleotide
  Antisense strand to SEQ ID NO: 2191556
ugugguguggaacacaggg

SEQ ID NO: 2191558 - RNA, 19 nt, Artificial Sequence
  Description of Artificial Sequence: Synthetic oligonucleotide
  Sense strand starting at position 2020 of SEQ ID NO: 1883402
gccacagcucccgaagauu

SEQ ID NO: 2191559 - RNA, 19 nt, Artificial Sequence
  Description of Artificial Sequence: Synthetic oligonucleotide
  Antisense strand to SEQ ID NO: 2191558
aaucuucgggagcuguggc

SEQ ID NO: 2191560 - RNA, 19 nt, Artificial Sequence
  Description of Artificial Sequence: Synthetic oligonucleotide
  Sense strand starting at position 2114 of SEQ ID NO: 1883402
cgccgugcucaagagacua

SEQ ID NO: 2191561 - RNA, 19 nt, Artificial Sequence
  Description of Artificial Sequence: Synthetic oligonucleotide
  Antisense strand to SEQ ID NO: 2191560
uagucucuugagcacggcg

SEQ ID NO: 2191562 - RNA, 19 nt, Artificial Sequence
  Description of Artificial Sequence: Synthetic oligonucleotide
  Sense strand starting at position 2116 of SEQ ID NO: 1883402
ccgugcucaagagacuaua

SEQ ID NO: 2191563 - RNA, 19 nt, Artificial Sequence
  Description of Artificial Sequence: Synthetic oligonucleotide
  Antisense strand to SEQ ID NO: 2191562
uauagucucuugagcacgg

SEQ ID NO: 2191564 - RNA, 19 nt, Artificial Sequence
  Description of Artificial Sequence: Synthetic oligonucleotide
  Sense strand starting at position 2268 of SEQ ID NO: 1883402
ccagcacuuccagaucguu

SEQ ID NO: 2191565 - RNA, 19 nt, Artificial Sequence
  Description of Artificial Sequence: Synthetic oligonucleotide
  Antisense strand to SEQ ID NO: 2191564
aacgaucuggaagugcugg

SEQ ID NO: 2191566 - RNA, 19 nt, Artificial Sequence
  Description of Artificial Sequence: Synthetic oligonucleotide
  Sense strand starting at position 2304 of SEQ ID NO: 1883402
guuccagcuugaccagaaa

SEQ ID NO: 2191567 - RNA, 19 nt, Artificial Sequence
  Description of Artificial Sequence: Synthetic oligonucleotide
  Antisense strand to SEQ ID NO: 2191566
uuucuggucaagcuggaac

SEQ ID NO: 2191568 - RNA, 19 nt, Artificial Sequence
  Description of Artificial Sequence: Synthetic oligonucleotide
  Sense strand starting at position 2801 of SEQ ID NO: 1883402
ccgcgaucuccagagccuu

SEQ ID NO: 2191569 - RNA, 19 nt, Artificial Sequence
  Description of Artificial Sequence: Synthetic oligonucleotide
  Antisense strand to SEQ ID NO: 2191568
aaggcucuggagaucgcgg

SEQ ID NO: 2191570 - RNA, 19 nt, Artificial Sequence
  Description of Artificial Sequence: Synthetic oligonucleotide
  Sense strand starting at position 2825 of SEQ ID NO: 1883402
acuugaugcucuccgggau

SEQ ID NO: 2191571 - RNA, 19 nt, Artificial Sequence
  Description of Artificial Sequence: Synthetic oligonucleotide
  Antisense strand to SEQ ID NO: 2191570
aucccggagagcaucaagu

SEQ ID NO: 2191572 - RNA, 19 nt, Artificial Sequence
  Description of Artificial Sequence: Synthetic oligonucleotide
  Sense strand starting at position 2837 of SEQ ID NO: 1883402
ccgggaucucagggauauc

SEQ ID NO: 2191573 - RNA, 19 nt, Artificial Sequence
  Description of Artificial Sequence: Synthetic oligonucleotide
  Antisense strand to SEQ ID NO: 2191572
gauaucccugagaucccgg

SEQ ID NO: 2191574 - RNA, 19 nt, Artificial Sequence
  Description of Artificial Sequence: Synthetic oligonucleotide
  Sense strand starting at position 2847 of SEQ ID NO: 1883402
agggauaucugucacagag

SEQ ID NO: 2191575 - RNA, 19 nt, Artificial Sequence
  Description of Artificial Sequence: Synthetic oligonucleotide
  Antisense strand to SEQ ID NO: 2191574
cucugugacagauaucccu

SEQ ID NO: 2191576 - RNA, 19 nt, Artificial Sequence
  Description of Artificial Sequence: Synthetic oligonucleotide
  Sense strand starting at position 3141 of SEQ ID NO: 1883402
acacgugagugucacaagu

SEQ ID NO: 2191577 - RNA, 19 nt, Artificial Sequence
  Description of Artificial Sequence: Synthetic oligonucleotide
  Antisense strand to SEQ ID NO: 2191576
acuugugacacucacgugu

SEQ ID NO: 2191578 - RNA, 19 nt, Artificial Sequence
  Description of Artificial Sequence: Synthetic oligonucleotide
  Sense strand starting at position 3143 of SEQ ID NO: 1883402
acgugagugucacaaguca

SEQ ID NO: 2191579 - RNA, 19 nt, Artificial Sequence
  Description of Artificial Sequence: Synthetic oligonucleotide
  Antisense strand to SEQ ID NO: 2191578
ugacuugugacacucacgu

SEQ ID NO: 2191580 - RNA, 19 nt, Artificial Sequence
  Description of Artificial Sequence: Synthetic oligonucleotide
  Sense strand starting at position 3580 of SEQ ID NO: 1883402
ggucacauucuuugggaca

SEQ ID NO: 2191581 - RNA, 19 nt, Artificial Sequence
  Description of Artificial Sequence: Synthetic oligonucleotide
  Antisense strand to SEQ ID NO: 2191580
ugucccaaagaaugugacc

SEQ ID NO: 2191582 - RNA, 19 nt, Artificial Sequence
  Description of Artificial Sequence: Synthetic oligonucleotide
  Sense strand starting at position 3842 of SEQ ID NO: 1883402
ccaagaagcuaguacucau

SEQ ID NO: 2191583 - RNA, 19 nt, Artificial Sequence
  Description of Artificial Sequence: Synthetic oligonucleotide
  Antisense strand to SEQ ID NO: 2191582
augaguacuagcuucuugg

SEQ ID NO: 2191584 - RNA, 19 nt, Artificial Sequence
  Description of Artificial Sequence: Synthetic oligonucleotide
  Sense strand starting at position 1048 of SEQ ID NO: 1883403
gagguaguuccgugugcug

SEQ ID NO: 2191585 - RNA, 19 nt, Artificial Sequence
  Description of Artificial Sequence: Synthetic oligonucleotide
  Antisense strand to SEQ ID NO: 2191584
cagcacacggaacuaccuc

SEQ ID NO: 2191586 - RNA, 19 nt, Artificial Sequence
  Description of Artificial Sequence: Synthetic oligonucleotide
  Sense strand starting at position 1263 of SEQ ID NO: 1883403
gcuccauggugcucaggua

SEQ ID NO: 2191587 - RNA, 19 nt, Artificial Sequence
  Description of Artificial Sequence: Synthetic oligonucleotide
  Antisense strand to SEQ ID NO: 2191586
uaccugagcaccauggagc

SEQ ID NO: 2191588 - RNA, 19 nt, Artificial Sequence
  Description of Artificial Sequence: Synthetic oligonucleotide
  Sense strand starting at position 1659 of SEQ ID NO: 1883403
acgugaugugcuuauucuc

SEQ ID NO: 2191589 - RNA, 19 nt, Artificial Sequence
  Description of Artificial Sequence: Synthetic oligonucleotide
  Antisense strand to SEQ ID NO: 2191588
gagaauaagcacaucacgu

SEQ ID NO: 2191590 - RNA, 19 nt, Artificial Sequence
  Description of Artificial Sequence: Synthetic oligonucleotide
  Sense strand starting at position 1667 of SEQ ID NO: 1883403
ugcuuauucucccacacga

SEQ ID NO: 2191591 - RNA, 19 nt, Artificial Sequence
  Description of Artificial Sequence: Synthetic oligonucleotide
  Antisense strand to SEQ ID NO: 2191590
ucgugugggagaauaagca

SEQ ID NO: 2191592 - RNA, 19 nt, Artificial Sequence
  Description of Artificial Sequence: Synthetic oligonucleotide
  Sense strand starting at position 1793 of SEQ ID NO: 1883403
ccgaaacucuccuuggcua

SEQ ID NO: 2191593 - RNA, 19 nt, Artificial Sequence
  Description of Artificial Sequence: Synthetic oligonucleotide
  Antisense strand to SEQ ID NO: 2191592
uagccaaggagaguuucgg

SEQ ID NO: 2191594 - RNA, 19 nt, Artificial Sequence
  Description of Artificial Sequence: Synthetic oligonucleotide
  Sense strand starting at position 1895 of SEQ ID NO: 1883403
acauguacaccaugagguu

SEQ ID NO: 2191595 - RNA, 19 nt, Artificial Sequence
  Description of Artificial Sequence: Synthetic oligonucleotide
  Antisense strand to SEQ ID NO: 2191594
aaccucaugguguacaugu

SEQ ID NO: 2191596 - RNA, 19 nt, Artificial Sequence
  Description of Artificial Sequence: Synthetic oligonucleotide
  Sense strand starting at position 2020 of SEQ ID NO: 1883403
ggcauuguccaccaugaag

SEQ ID NO: 2191597 - RNA, 19 nt, Artificial Sequence
  Description of Artificial Sequence: Synthetic oligonucleotide
  Antisense strand to SEQ ID NO: 2191596
cuucaugguggacaaugcc

SEQ ID NO: 2191598 - RNA, 19 nt, Artificial Sequence
  Description of Artificial Sequence: Synthetic oligonucleotide
  Sense strand starting at position 2031 of SEQ ID NO: 1883403
ccaugaaguccacgcugua

SEQ ID NO: 2191599 - RNA, 19 nt, Artificial Sequence
  Description of Artificial Sequence: Synthetic oligonucleotide
  Antisense strand to SEQ ID NO: 2191598
uacagcguggacuucaugg

SEQ ID NO: 2191600 - RNA, 19 nt, Artificial Sequence
  Description of Artificial Sequence: Synthetic oligonucleotide
  Sense strand starting at position 2226 of SEQ ID NO: 1883403
ggaugaaguucuugacgcu

SEQ ID NO: 2191601 - RNA, 19 nt, Artificial Sequence
  Description of Artificial Sequence: Synthetic oligonucleotide
  Antisense strand to SEQ ID NO: 2191600
agcgucaagaacuucaucc

SEQ ID NO: 2191602 - RNA, 19 nt, Artificial Sequence
  Description of Artificial Sequence: Synthetic oligonucleotide
  Sense strand starting at position 2229 of SEQ ID NO: 1883403
ugaaguucuugacgcugau

SEQ ID NO: 2191603 - RNA, 19 nt, Artificial Sequence
  Description of Artificial Sequence: Synthetic oligonucleotide
  Antisense strand to SEQ ID NO: 2191602
aucagcgucaagaacuuca

SEQ ID NO: 2191604 - RNA, 19 nt, Artificial Sequence
  Description of Artificial Sequence: Synthetic oligonucleotide
  Sense strand starting at position 2232 of SEQ ID NO: 1883403
aguucuugacgcugaucau

SEQ ID NO: 2191605 - RNA, 19 nt, Artificial Sequence
  Description of Artificial Sequence: Synthetic oligonucleotide
  Antisense strand to SEQ ID NO: 2191604
augaucagcgucaagaacu

SEQ ID NO: 2191606 - RNA, 19 nt, Artificial Sequence
  Description of Artificial Sequence: Synthetic oligonucleotide
  Sense strand starting at position 2241 of SEQ ID NO: 1883403
cgcugaucaucugguguau

SEQ ID NO: 2191607 - RNA, 19 nt, Artificial Sequence
  Description of Artificial Sequence: Synthetic oligonucleotide
  Antisense strand to SEQ ID NO: 2191606
auacaccagaugaucagcg

SEQ ID NO: 2191608 - RNA, 19 nt, Artificial Sequence
  Description of Artificial Sequence: Synthetic oligonucleotide
  Sense strand starting at position 2243 of SEQ ID NO: 1883403
cugaucaucugguguaugu

SEQ ID NO: 2191609 - RNA, 19 nt, Artificial Sequence
  Description of Artificial Sequence: Synthetic oligonucleotide
  Antisense strand to SEQ ID NO: 2191608
acauacaccagaugaucag

SEQ ID NO: 2191610 - RNA, 19 nt, Artificial Sequence
  Description of Artificial Sequence: Synthetic oligonucleotide
  Sense strand starting at position 2259 of SEQ ID NO: 1883403
uguagagcugcgugucgau

SEQ ID NO: 2191611 - RNA, 19 nt, Artificial Sequence
  Description of Artificial Sequence: Synthetic oligonucleotide
  Antisense strand to SEQ ID NO: 2191610
aucgacacgcagcucuaca

SEQ ID NO: 2191612 - RNA, 19 nt, Artificial Sequence
  Description of Artificial Sequence: Synthetic oligonucleotide
  Sense strand starting at position 2262 of SEQ ID NO: 1883403
agagcugcgugucgaugaa

SEQ ID NO: 2191613 - RNA, 19 nt, Artificial Sequence
  Description of Artificial Sequence: Synthetic oligonucleotide
  Antisense strand to SEQ ID NO: 2191612
uucaucgacacgcagcucu

SEQ ID NO: 2191614 - RNA, 19 nt, Artificial Sequence
  Description of Artificial Sequence: Synthetic oligonucleotide
  Sense strand starting at position 2475 of SEQ ID NO: 1883403
uucugcuccuucucguaaa

SEQ ID NO: 2191615 - RNA, 19 nt, Artificial Sequence
  Description of Artificial Sequence: Synthetic oligonucleotide
  Antisense strand to SEQ ID NO: 2191614
uuuacgagaaggagcagaa

SEQ ID NO: 2191616 - RNA, 19 nt, Artificial Sequence
  Description of Artificial Sequence: Synthetic oligonucleotide
  Sense strand starting at position 2478 of SEQ ID NO: 1883403
ugcuccuucucguaaagga

SEQ ID NO: 2191617 - RNA, 19 nt, Artificial Sequence
  Description of Artificial Sequence: Synthetic oligonucleotide
  Antisense strand to SEQ ID NO: 2191616
uccuuuacgagaaggagca

SEQ ID NO: 2191618 - RNA, 19 nt, Artificial Sequence
  Description of Artificial Sequence: Synthetic oligonucleotide
  Sense strand starting at position 2488 of SEQ ID NO: 1883403
cguaaaggacuuugaacuu

SEQ ID NO: 2191619 - RNA, 19 nt, Artificial Sequence
  Description of Artificial Sequence: Synthetic oligonucleotide
  Antisense strand to SEQ ID NO: 2191618
aaguucaaaguccuuuacg

SEQ ID NO: 2191620 - RNA, 19 nt, Artificial Sequence
  Description of Artificial Sequence: Synthetic oligonucleotide
  Sense strand starting at position 2501 of SEQ ID NO: 1883403
gaacuuguucuuggucaag

SEQ ID NO: 2191621 - RNA, 19 nt, Artificial Sequence
  Description of Artificial Sequence: Synthetic oligonucleotide
  Antisense strand to SEQ ID NO: 2191620
cuugaccaagaacaaguuc

SEQ ID NO: 2191622 - RNA, 19 nt, Artificial Sequence
  Description of Artificial Sequence: Synthetic oligonucleotide
  Sense strand starting at position 2864 of SEQ ID NO: 1883403
ucaccuggcauugggaaua

SEQ ID NO: 2191623 - RNA, 19 nt, Artificial Sequence
  Description of Artificial Sequence: Synthetic oligonucleotide
  Antisense strand to SEQ ID NO: 2191622
uauucccaaugccagguga

SEQ ID NO: 2191624 - RNA, 19 nt, Artificial Sequence
  Description of Artificial Sequence: Synthetic oligonucleotide
  Sense strand starting at position 2991 of SEQ ID NO: 1883403
ccaagaugcggcugaggau

SEQ ID NO: 2191625 - RNA, 19 nt, Artificial Sequence
  Description of Artificial Sequence: Synthetic oligonucleotide
  Antisense strand to SEQ ID NO: 2191624
auccucagccgcaucuugg

SEQ ID NO: 2191626 - RNA, 19 nt, Artificial Sequence
  Description of Artificial Sequence: Synthetic oligonucleotide
  Sense strand starting at position 3035 of SEQ ID NO: 1883403
cucucucgauggucucaaa

SEQ ID NO: 2191627 - RNA, 19 nt, Artificial Sequence
  Description of Artificial Sequence: Synthetic oligonucleotide
  Antisense strand to SEQ ID NO: 2191626
uuugagaccaucgagagag

SEQ ID NO: 2191628 - RNA, 19 nt, Artificial Sequence
  Description of Artificial Sequence: Synthetic oligonucleotide
  Sense strand starting at position 3117 of SEQ ID NO: 1883403
agcauacaccuguggguua

SEQ ID NO: 2191629 - RNA, 19 nt, Artificial Sequence
  Description of Artificial Sequence: Synthetic oligonucleotide
  Antisense strand to SEQ ID NO: 2191628
uaacccacagguguaugcu

SEQ ID NO: 2191630 - RNA, 19 nt, Artificial Sequence
  Description of Artificial Sequence: Synthetic oligonucleotide
  Sense strand starting at position 3129 of SEQ ID NO: 1883403
uggguuagugagggucaca

SEQ ID NO: 2191631 - RNA, 19 nt, Artificial Sequence
  Description of Artificial Sequence: Synthetic oligonucleotide
  Antisense strand to SEQ ID NO: 2191630
ugugacccucacuaaccca

SEQ ID NO: 2191632 - RNA, 19 nt, Artificial Sequence
  Description of Artificial Sequence: Synthetic oligonucleotide
  Sense strand starting at position 3249 of SEQ ID NO: 1883403
gcgggaucuuccugacagg

SEQ ID NO: 2191633 - RNA, 19 nt, Artificial Sequence
  Description of Artificial Sequence: Synthetic oligonucleotide
  Antisense strand to SEQ ID NO: 2191632
ccugucaggaagaucccgc

SEQ ID NO: 2191634 - RNA, 19 nt, Artificial Sequence
  Description of Artificial Sequence: Synthetic oligonucleotide
  Sense strand starting at position 3391 of SEQ ID NO: 1883403
ccaagagcccugggauguu

SEQ ID NO: 2191635 - RNA, 19 nt, Artificial Sequence
  Description of Artificial Sequence: Synthetic oligonucleotide
  Antisense strand to SEQ ID NO: 2191634
aacaucccagggcucuugg

SEQ ID NO: 2191636 - RNA, 19 nt, Artificial Sequence
  Description of Artificial Sequence: Synthetic oligonucleotide
  Sense strand starting at position 3769 of SEQ ID NO: 1883403
gccugugugcccucccaaa

SEQ ID NO: 2191637 - RNA, 19 nt, Artificial Sequence
  Description of Artificial Sequence: Synthetic oligonucleotide
  Antisense strand to SEQ ID NO: 2191636
uuugggagggcacacaggc

SEQ ID NO: 2191638 - RNA, 19 nt, Artificial Sequence
  Description of Artificial Sequence: Synthetic oligonucleotide
  Sense strand starting at position 3821 of SEQ ID NO: 1883403
cacgucagcucuccugaga

SEQ ID NO: 2191639 - RNA, 19 nt, Artificial Sequence
  Description of Artificial Sequence: Synthetic oligonucleotide
  Antisense strand to SEQ ID NO: 2191638
ucucaggagagcugacgug

SEQ ID NO: 2191640 - RNA, 19 nt, Artificial Sequence
  Description of Artificial Sequence: Synthetic oligonucleotide
  Sense strand starting at position 3824 of SEQ ID NO: 1883403
gucagcucuccugagaagu

SEQ ID NO: 2191641 - RNA, 19 nt, Artificial Sequence
  Description of Artificial Sequence: Synthetic oligonucleotide
  Antisense strand to SEQ ID NO: 2191640
acuucucaggagagcugac

SEQ ID NO: 2191642 - RNA, 19 nt, Artificial Sequence
  Description of Artificial Sequence: Synthetic oligonucleotide
  Sense strand starting at position 3826 of SEQ ID NO: 1883403
cagcucuccugagaagugu

SEQ ID NO: 2191643 - RNA, 19 nt, Artificial Sequence
  Description of Artificial Sequence: Synthetic oligonucleotide
  Antisense strand to SEQ ID NO: 2191642
acacuucucaggagagcug

SEQ ID NO: 2191644 - RNA, 19 nt, Artificial Sequence
  Description of Artificial Sequence: Synthetic oligonucleotide
  Sense strand starting at position 313 of SEQ ID NO: 1883404
uggacauggcauugugaca

SEQ ID NO: 2191645 - RNA, 19 nt, Artificial Sequence
  Description of Artificial Sequence: Synthetic oligonucleotide
  Antisense strand to SEQ ID NO: 2191644
ugucacaaugccaugucca

SEQ ID NO: 2191646 - RNA, 19 nt, Artificial Sequence
  Description of Artificial Sequence: Synthetic oligonucleotide
  Sense strand starting at position 543 of SEQ ID NO: 1883404
guuggaguugccugagaag

SEQ ID NO: 2191647 - RNA, 19 nt, Artificial Sequence
  Description of Artificial Sequence: Synthetic oligonucleotide
  Antisense strand to SEQ ID NO: 2191646
cuucucaggcaacuccaac

SEQ ID NO: 2191648 - RNA, 19 nt, Artificial Sequence
  Description of Artificial Sequence: Synthetic oligonucleotide
  Sense strand starting at position 561 of SEQ ID NO: 1883404
gcugcauuucugcacaucu

SEQ ID NO: 2191649 - RNA, 19 nt, Artificial Sequence
  Description of Artificial Sequence: Synthetic oligonucleotide
  Antisense strand to SEQ ID NO: 2191648
agaugugcagaaaugcagc

SEQ ID NO: 2191650 - RNA, 19 nt, Artificial Sequence
  Description of Artificial Sequence: Synthetic oligonucleotide
  Sense strand starting at position 605 of SEQ ID NO: 1883404
gagccuccguccuagauau

SEQ ID NO: 2191651 - RNA, 19 nt, Artificial Sequence
  Description of Artificial Sequence: Synthetic oligonucleotide
  Antisense strand to SEQ ID NO: 2191650
auaucuaggacggaggcuc

SEQ ID NO: 2191652 - RNA, 19 nt, Artificial Sequence
  Description of Artificial Sequence: Synthetic oligonucleotide
  Sense strand starting at position 607 of SEQ ID NO: 1883404
gccuccguccuagauauca

SEQ ID NO: 2191653 - RNA, 19 nt, Artificial Sequence
  Description of Artificial Sequence: Synthetic oligonucleotide
  Antisense strand to SEQ ID NO: 2191652
ugauaucuaggacggaggc

SEQ ID NO: 2191654 - RNA, 19 nt, Artificial Sequence
  Description of Artificial Sequence: Synthetic oligonucleotide
  Sense strand starting at position 616 of SEQ ID NO: 1883404
cuagauaucacguguucug

SEQ ID NO: 2191655 - RNA, 19 nt, Artificial Sequence
  Description of Artificial Sequence: Synthetic oligonucleotide
  Antisense strand to SEQ ID NO: 2191654
cagaacacgugauaucuag

SEQ ID NO: 2191656 - RNA, 19 nt, Artificial Sequence
  Description of Artificial Sequence: Synthetic oligonucleotide
  Sense strand starting at position 619 of SEQ ID NO: 1883404
gauaucacguguucugaca

SEQ ID NO: 2191657 - RNA, 19 nt, Artificial Sequence
  Description of Artificial Sequence: Synthetic oligonucleotide
  Antisense strand to SEQ ID NO: 2191656
ugucagaacacgugauauc

SEQ ID NO: 2191658 - RNA, 19 nt, Artificial Sequence
  Description of Artificial Sequence: Synthetic oligonucleotide
  Sense strand starting at position 632 of SEQ ID NO: 1883404
cugacaucuccuggcaucu

SEQ ID NO: 2191659 - RNA, 19 nt, Artificial Sequence
  Description of Artificial Sequence: Synthetic oligonucleotide
  Antisense strand to SEQ ID NO: 2191658
agaugccaggagaugucag

SEQ ID NO: 2191660 - RNA, 19 nt, Artificial Sequence
  Description of Artificial Sequence: Synthetic oligonucleotide
  Sense strand starting at position 953 of SEQ ID NO: 1883404
cccuguggcuuccagaguu

SEQ ID NO: 2191661 - RNA, 19 nt, Artificial Sequence
  Description of Artificial Sequence: Synthetic oligonucleotide
  Antisense strand to SEQ ID NO: 2191660
aacucuggaagccacaggg

SEQ ID NO: 2191662 - RNA, 19 nt, Artificial Sequence
  Description of Artificial Sequence: Synthetic oligonucleotide
  Sense strand starting at position 1032 of SEQ ID NO: 1883404
gaguacucuuggcuuagca

SEQ ID NO: 2191663 - RNA, 19 nt, Artificial Sequence
  Description of Artificial Sequence: Synthetic oligonucleotide
  Antisense strand to SEQ ID NO: 2191662
ugcuaagccaagaguacuc

SEQ ID NO: 2191664 - RNA, 19 nt, Artificial Sequence
  Description of Artificial Sequence: Synthetic oligonucleotide
  Sense strand starting at position 1110 of SEQ ID NO: 1883404
gccggaaauaccugaguuc

SEQ ID NO: 2191665 - RNA, 19 nt, Artificial Sequence
  Description of Artificial Sequence: Synthetic oligonucleotide
  Antisense strand to SEQ ID NO: 2191664
gaacucagguauuuccggc

SEQ ID NO: 2191666 - RNA, 19 nt, Artificial Sequence
  Description of Artificial Sequence: Synthetic oligonucleotide
  Sense strand starting at position 1140 of SEQ ID NO: 1883404
ccaagacauuccuggaaca

SEQ ID NO: 2191667 - RNA, 19 nt, Artificial Sequence
  Description of Artificial Sequence: Synthetic oligonucleotide
  Antisense strand to SEQ ID NO: 2191666
uguuccaggaaugucuugg

SEQ ID NO: 2191668 - RNA, 19 nt, Artificial Sequence
  Description of Artificial Sequence: Synthetic oligonucleotide
  Sense strand starting at position 1186 of SEQ ID NO: 1883404
agggaauccugcucugaac

SEQ ID NO: 2191669 - RNA, 19 nt, Artificial Sequence
  Description of Artificial Sequence: Synthetic oligonucleotide
  Antisense strand to SEQ ID NO: 2191668
guucagagcaggauucccu

SEQ ID NO: 2191670 - RNA, 19 nt, Artificial Sequence
  Description of Artificial Sequence: Synthetic oligonucleotide
  Sense strand starting at position 1252 of SEQ ID NO: 1883404
agcagaaccugcucugagu

SEQ ID NO: 2191671 - RNA, 19 nt, Artificial Sequence
  Description of Artificial Sequence: Synthetic oligonucleotide
  Antisense strand to SEQ ID NO: 2191670
acucagagcagguucugcu

SEQ ID NO: 2191672 - RNA, 19 nt, Artificial Sequence
  Description of Artificial Sequence: Synthetic oligonucleotide
  Sense strand starting at position 1316 of SEQ ID NO: 1883404
cucugaccugcguaucaga

SEQ ID NO: 2191673 - RNA, 19 nt, Artificial Sequence
  Description of Artificial Sequence: Synthetic oligonucleotide
  Antisense strand to SEQ ID NO: 2191672
ucugauacgcaggucagag

SEQ ID NO: 2191674 - RNA, 19 nt, Artificial Sequence
  Description of Artificial Sequence: Synthetic oligonucleotide
  Sense strand starting at position 1355 of SEQ ID NO: 1883404
cuuugugucuuuccagguu

SEQ ID NO: 2191675 - RNA, 19 nt, Artificial Sequence
  Description of Artificial Sequence: Synthetic oligonucleotide
  Antisense strand to SEQ ID NO: 2191674
aaccuggaaagacacaaag

SEQ ID NO: 2191676 - RNA, 19 nt, Artificial Sequence
  Description of Artificial Sequence: Synthetic oligonucleotide
  Sense strand starting at position 1414 of SEQ ID NO: 1883404
ggaggaaccuuccuuuauu

SEQ ID NO: 2191677 - RNA, 19 nt, Artificial Sequence
  Description of Artificial Sequence: Synthetic oligonucleotide
  Antisense strand to SEQ ID NO: 2191676
aauaaaggaagguuccucc

SEQ ID NO: 2191678 - RNA, 19 nt, Artificial Sequence
  Description of Artificial Sequence: Synthetic oligonucleotide
  Sense strand starting at position 1453 of SEQ ID NO: 1883404
agaaacucuggcuguggua

SEQ ID NO: 2191679 - RNA, 19 nt, Artificial Sequence
  Description of Artificial Sequence: Synthetic oligonucleotide
  Antisense strand to SEQ ID NO: 2191678
uaccacagccagaguuucu

SEQ ID NO: 2191680 - RNA, 19 nt, Artificial Sequence
  Description of Artificial Sequence: Synthetic oligonucleotide
  Sense strand starting at position 1466 of SEQ ID NO: 1883404
gugguaucaucucaauucu

SEQ ID NO: 2191681 - RNA, 19 nt, Artificial Sequence
  Description of Artificial Sequence: Synthetic oligonucleotide
  Antisense strand to SEQ ID NO: 2191680
agaauugagaugauaccac

SEQ ID NO: 2191682 - RNA, 19 nt, Artificial Sequence
  Description of Artificial Sequence: Synthetic oligonucleotide
  Sense strand starting at position 1475 of SEQ ID NO: 1883404
ucucaauucugcugaauag

SEQ ID NO: 2191683 - RNA, 19 nt, Artificial Sequence
  Description of Artificial Sequence: Synthetic oligonucleotide
  Antisense strand to SEQ ID NO: 2191682
cuauucagcagaauugaga

SEQ ID NO: 2191684 - RNA, 19 nt, Artificial Sequence
  Description of Artificial Sequence: Synthetic oligonucleotide
  Sense strand starting at position 1476 of SEQ ID NO: 1883404
cucaauucugcugaauaga

SEQ ID NO: 2191685 - RNA, 19 nt, Artificial Sequence
  Description of Artificial Sequence: Synthetic oligonucleotide
  Antisense strand to SEQ ID NO: 2191684
ucuauucagcagaauugag

SEQ ID NO: 2191686 - RNA, 19 nt, Artificial Sequence
  Description of Artificial Sequence: Synthetic oligonucleotide
  Sense strand starting at position 1514 of SEQ ID NO: 1883404
aggugaacggucuguccau

SEQ ID NO: 2191687 - RNA, 19 nt, Artificial Sequence
  Description of Artificial Sequence: Synthetic oligonucleotide
  Antisense strand to SEQ ID NO: 2191686
auggacagaccguucaccu

SEQ ID NO: 2191688 - RNA, 19 nt, Artificial Sequence
  Description of Artificial Sequence: Synthetic oligonucleotide
  Sense strand starting at position 2228 of SEQ ID NO: 1883404
ugggccauuuguuugcuaa

SEQ ID NO: 2191689 - RNA, 19 nt, Artificial Sequence
  Description of Artificial Sequence: Synthetic oligonucleotide
  Antisense strand to SEQ ID NO: 2191688
uuagcaaacaaauggccca

SEQ ID NO: 2191690 - RNA, 19 nt, Artificial Sequence
  Description of Artificial Sequence: Synthetic oligonucleotide
  Sense strand starting at position 2229 of SEQ ID NO: 1883404
gggccauuuguuugcuaag

SEQ ID NO: 2191691 - RNA, 19 nt, Artificial Sequence
  Description of Artificial Sequence: Synthetic oligonucleotide
  Antisense strand to SEQ ID NO: 2191690
cuuagcaaacaaauggccc

SEQ ID NO: 2191692 - RNA, 19 nt, Artificial Sequence
  Description of Artificial Sequence: Synthetic oligonucleotide
  Sense strand starting at position 2230 of SEQ ID NO: 1883404
ggccauuuguuugcuaagu

SEQ ID NO: 2191693 - RNA, 19 nt, Artificial Sequence
  Description of Artificial Sequence: Synthetic oligonucleotide
  Antisense strand to SEQ ID NO: 2191692
acuuagcaaacaaauggcc

SEQ ID NO: 2191694 - RNA, 19 nt, Artificial Sequence
  Description of Artificial Sequence: Synthetic oligonucleotide
  Sense strand starting at position 2231 of SEQ ID NO: 1883404
gccauuuguuugcuaaguc

SEQ ID NO: 2191695 - RNA, 19 nt, Artificial Sequence
  Description of Artificial Sequence: Synthetic oligonucleotide
  Antisense strand to SEQ ID NO: 2191694
gacuuagcaaacaaauggc

SEQ ID NO: 2191696 - RNA, 19 nt, Artificial Sequence
  Description of Artificial Sequence: Synthetic oligonucleotide
  Sense strand starting at position 2763 of SEQ ID NO: 1883404
agcaaucagugguggagau

SEQ ID NO: 2191697 - RNA, 19 nt, Artificial Sequence
  Description of Artificial Sequence: Synthetic oligonucleotide
  Antisense strand to SEQ ID NO: 2191696
aucuccaccacugauugcu

SEQ ID NO: 2191698 - RNA, 19 nt, Artificial Sequence
  Description of Artificial Sequence: Synthetic oligonucleotide
  Sense strand starting at position 3173 of SEQ ID NO: 1883404
ccugcuguucgccugcaau

SEQ ID NO: 2191699 - RNA, 19 nt, Artificial Sequence
  Description of Artificial Sequence: Synthetic oligonucleotide
  Antisense strand to SEQ ID NO: 2191698
auugcaggcgaacagcagg

SEQ ID NO: 2191700 - RNA, 19 nt, Artificial Sequence
  Description of Artificial Sequence: Synthetic oligonucleotide
  Sense strand starting at position 3175 of SEQ ID NO: 1883404
ugcuguucgccugcaauga

SEQ ID NO: 2191701 - RNA, 19 nt, Artificial Sequence
  Description of Artificial Sequence: Synthetic oligonucleotide
  Antisense strand to SEQ ID NO: 2191700
ucauugcaggcgaacagca

SEQ ID NO: 2191702 - RNA, 19 nt, Artificial Sequence
  Description of Artificial Sequence: Synthetic oligonucleotide
  Sense strand starting at position 3292 of SEQ ID NO: 1883404
guuugaggcuuugugcagu

SEQ ID NO: 2191703 - RNA, 19 nt, Artificial Sequence
  Description of Artificial Sequence: Synthetic oligonucleotide
  Antisense strand to SEQ ID NO: 2191702
acugcacaaagccucaaac

SEQ ID NO: 2191704 - RNA, 19 nt, Artificial Sequence
  Description of Artificial Sequence: Synthetic oligonucleotide
  Sense strand starting at position 3309 of SEQ ID NO: 1883404
gugccuuccuccuggaaug

SEQ ID NO: 2191705 - RNA, 19 nt, Artificial Sequence
  Description of Artificial Sequence: Synthetic oligonucleotide
  Antisense strand to SEQ ID NO: 2191704
cauuccaggaggaaggcac

SEQ ID NO: 2191706 - RNA, 19 nt, Artificial Sequence
  Description of Artificial Sequence: Synthetic oligonucleotide
  Sense strand starting at position 3448 of SEQ ID NO: 1883404
auuuauucucgaggcgguu

SEQ ID NO: 2191707 - RNA, 19 nt, Artificial Sequence
  Description of Artificial Sequence: Synthetic oligonucleotide
  Antisense strand to SEQ ID NO: 2191706
aaccgccucgagaauaaau

SEQ ID NO: 2191708 - RNA, 19 nt, Artificial Sequence
  Description of Artificial Sequence: Synthetic oligonucleotide
  Sense strand starting at position 3513 of SEQ ID NO: 1883404
gugguuugacuggagguga

SEQ ID NO: 2191709 - RNA, 19 nt, Artificial Sequence
  Description of Artificial Sequence: Synthetic oligonucleotide
  Antisense strand to SEQ ID NO: 2191708
ucaccuccagucaaaccac

SEQ ID NO: 2191710 - RNA, 19 nt, Artificial Sequence
  Description of Artificial Sequence: Synthetic oligonucleotide
  Sense strand starting at position 3606 of SEQ ID NO: 1883404
aaggccugacucugugaau

SEQ ID NO: 2191711 - RNA, 19 nt, Artificial Sequence
  Description of Artificial Sequence: Synthetic oligonucleotide
  Antisense strand to SEQ ID NO: 2191710
auucacagagucaggccuu

SEQ ID NO: 2191712 - RNA, 19 nt, Artificial Sequence
  Description of Artificial Sequence: Synthetic oligonucleotide
  Sense strand starting at position 3607 of SEQ ID NO: 1883404
aggccugacucugugaauu

SEQ ID NO: 2191713 - RNA, 19 nt, Artificial Sequence
  Description of Artificial Sequence: Synthetic oligonucleotide
  Antisense strand to SEQ ID NO: 2191712
aauucacagagucaggccu

SEQ ID NO: 2191714 - RNA, 19 nt, Artificial Sequence
  Description of Artificial Sequence: Synthetic oligonucleotide
  Sense strand starting at position 3609 of SEQ ID NO: 1883404
gccugacucugugaauuuc

SEQ ID NO: 2191715 - RNA, 19 nt, Artificial Sequence
  Description of Artificial Sequence: Synthetic oligonucleotide
  Antisense strand to SEQ ID NO: 2191714
gaaauucacagagucaggc

SEQ ID NO: 2191716 - RNA, 19 nt, Artificial Sequence
  Description of Artificial Sequence: Synthetic oligonucleotide
  Sense strand starting at position 3725 of SEQ ID NO: 1883404
gggaaaugcuguuugacau

SEQ ID NO: 2191717 - RNA, 19 nt, Artificial Sequence
  Description of Artificial Sequence: Synthetic oligonucleotide
  Antisense strand to SEQ ID NO: 2191716
augucaaacagcauuuccc

SEQ ID NO: 2191718 - RNA, 19 nt, Artificial Sequence
  Description of Artificial Sequence: Synthetic oligonucleotide
  Sense strand starting at position 3726 of SEQ ID NO: 1883404
ggaaaugcuguuugacaug

SEQ ID NO: 2191719 - RNA, 19 nt, Artificial Sequence
  Description of Artificial Sequence: Synthetic oligonucleotide
  Antisense strand to SEQ ID NO: 2191718
caugucaaacagcauuucc

SEQ ID NO: 2191720 - RNA, 19 nt, Artificial Sequence
  Description of Artificial Sequence: Synthetic oligonucleotide
  Sense strand starting at position 3946 of SEQ ID NO: 1883404
gcugucacucaauagcaga

SEQ ID NO: 2191721 - RNA, 19 nt, Artificial Sequence
  Description of Artificial Sequence: Synthetic oligonucleotide
  Antisense strand to SEQ ID NO: 2191720
ucugcuauugagugacagc

SEQ ID NO: 2191722 - RNA, 19 nt, Artificial Sequence
  Description of Artificial Sequence: Synthetic oligonucleotide
  Sense strand starting at position 31 of SEQ ID NO: 1883405
ccugaaagaguaugcaaau

SEQ ID NO: 2191723 - RNA, 19 nt, Artificial Sequence
  Description of Artificial Sequence: Synthetic oligonucleotide
  Antisense strand to SEQ ID NO: 2191722
auuugcauacucuuucagg

SEQ ID NO: 2191724 - RNA, 19 nt, Artificial Sequence
  Description of Artificial Sequence: Synthetic oligonucleotide
  Sense strand starting at position 192 of SEQ ID NO: 1883405
ccuccuuugaagugagagu

SEQ ID NO: 2191725 - RNA, 19 nt, Artificial Sequence
  Description of Artificial Sequence: Synthetic oligonucleotide
  Antisense strand to SEQ ID NO: 2191724
acucucacuucaaaggagg

SEQ ID NO: 2191726 - RNA, 19 nt, Artificial Sequence
  Description of Artificial Sequence: Synthetic oligonucleotide
  Sense strand starting at position 193 of SEQ ID NO: 1883405
cuccuuugaagugagagua

SEQ ID NO: 2191727 - RNA, 19 nt, Artificial Sequence
  Description of Artificial Sequence: Synthetic oligonucleotide
  Antisense strand to SEQ ID NO: 2191726
uacucucacuucaaaggag

SEQ ID NO: 2191728 - RNA, 19 nt, Artificial Sequence
  Description of Artificial Sequence: Synthetic oligonucleotide
  Sense strand starting at position 203 of SEQ ID NO: 1883405
gugagaguacaucaaagca

SEQ ID NO: 2191729 - RNA, 19 nt, Artificial Sequence
  Description of Artificial Sequence: Synthetic oligonucleotide
  Antisense strand to SEQ ID NO: 2191728
ugcuuugauguacucucac

SEQ ID NO: 2191730 - RNA, 19 nt, Artificial Sequence
  Description of Artificial Sequence: Synthetic oligonucleotide
  Sense strand starting at position 225 of SEQ ID NO: 1883405
ucuucuuaccuuugggaau

SEQ ID NO: 2191731 - RNA, 19 nt, Artificial Sequence
  Description of Artificial Sequence: Synthetic oligonucleotide
  Antisense strand to SEQ ID NO: 2191730
auucccaaagguaagaaga

SEQ ID NO: 2191732 - RNA, 19 nt, Artificial Sequence
  Description of Artificial Sequence: Synthetic oligonucleotide
  Sense strand starting at position 277 of SEQ ID NO: 1883405
augggugaucagggcauaa

SEQ ID NO: 2191733 - RNA, 19 nt, Artificial Sequence
  Description of Artificial Sequence: Synthetic oligonucleotide
  Antisense strand to SEQ ID NO: 2191732
uuaugcccugaucacccau

SEQ ID NO: 2191734 - RNA, 19 nt, Artificial Sequence
  Description of Artificial Sequence: Synthetic oligonucleotide
  Sense strand starting at position 279 of SEQ ID NO: 1883405
gggugaucagggcauaauu

SEQ ID NO: 2191735 - RNA, 19 nt, Artificial Sequence
  Description of Artificial Sequence: Synthetic oligonucleotide
  Antisense strand to SEQ ID NO: 2191734
aauuaugcccugaucaccc

SEQ ID NO: 2191736 - RNA, 19 nt, Artificial Sequence
  Description of Artificial Sequence: Synthetic oligonucleotide
  Sense strand starting at position 437 of SEQ ID NO: 1883405
ugaccuguugcuugggaga

SEQ ID NO: 2191737 - RNA, 19 nt, Artificial Sequence
  Description of Artificial Sequence: Synthetic oligonucleotide
  Antisense strand to SEQ ID NO: 2191736
ucucccaagcaacagguca

SEQ ID NO: 2191738 - RNA, 19 nt, Artificial Sequence
  Description of Artificial Sequence: Synthetic oligonucleotide
  Sense strand starting at position 723 of SEQ ID NO: 1883405
auaucaucuucuguagauu

SEQ ID NO: 2191739 - RNA, 19 nt, Artificial Sequence
  Description of Artificial Sequence: Synthetic oligonucleotide
  Antisense strand to SEQ ID NO: 2191738
aaucuacagaagaugauau

SEQ ID NO: 2191740 - RNA, 19 nt, Artificial Sequence
  Description of Artificial Sequence: Synthetic oligonucleotide
  Sense strand starting at position 729 of SEQ ID NO: 1883405
ucuucuguagauugaggau

SEQ ID NO: 2191741 - RNA, 19 nt, Artificial Sequence
  Description of Artificial Sequence: Synthetic oligonucleotide
  Antisense strand to SEQ ID NO: 2191740
auccucaaucuacagaaga

SEQ ID NO: 2191742 - RNA, 19 nt, Artificial Sequence
  Description of Artificial Sequence: Synthetic oligonucleotide
  Sense strand starting at position 738 of SEQ ID NO: 1883405
gauugaggauuauuauguc

SEQ ID NO: 2191743 - RNA, 19 nt, Artificial Sequence
  Description of Artificial Sequence: Synthetic oligonucleotide
  Antisense strand to SEQ ID NO: 2191742
gacauaauaauccucaauc

SEQ ID NO: 2191744 - RNA, 19 nt, Artificial Sequence
  Description of Artificial Sequence: Synthetic oligonucleotide
  Sense strand starting at position 744 of SEQ ID NO: 1883405
ggauuauuaugucuaccuu

SEQ ID NO: 2191745 - RNA, 19 nt, Artificial Sequence
  Description of Artificial Sequence: Synthetic oligonucleotide
  Antisense strand to SEQ ID NO: 2191744
aagguagacauaauaaucc

SEQ ID NO: 2191746 - RNA, 19 nt, Artificial Sequence
  Description of Artificial Sequence: Synthetic oligonucleotide
  Sense strand starting at position 768 of SEQ ID NO: 1883405
gaucuugagugauuaagug

SEQ ID NO: 2191747 - RNA, 19 nt, Artificial Sequence
  Description of Artificial Sequence: Synthetic oligonucleotide
  Antisense strand to SEQ ID NO: 2191746
cacuuaaucacucaagauc

SEQ ID NO: 2191748 - RNA, 19 nt, Artificial Sequence
  Description of Artificial Sequence: Synthetic oligonucleotide
  Sense strand starting at position 772 of SEQ ID NO: 1883405
uugagugauuaagugaaau

SEQ ID NO: 2191749 - RNA, 19 nt, Artificial Sequence
  Description of Artificial Sequence: Synthetic oligonucleotide
  Antisense strand to SEQ ID NO: 2191748
auuucacuuaaucacucaa

SEQ ID NO: 2191750 - RNA, 19 nt, Artificial Sequence
  Description of Artificial Sequence: Synthetic oligonucleotide
  Sense strand starting at position 2140 of SEQ ID NO: 1883405
cucuucuuguucucaggau

SEQ ID NO: 2191751 - RNA, 19 nt, Artificial Sequence
  Description of Artificial Sequence: Synthetic oligonucleotide
  Antisense strand to SEQ ID NO: 2191750
auccugagaacaagaagag

SEQ ID NO: 2191752 - RNA, 19 nt, Artificial Sequence
  Description of Artificial Sequence: Synthetic oligonucleotide
  Sense strand starting at position 2156 of SEQ ID NO: 1883405
gauuucgguuaaguguauu

SEQ ID NO: 2191753 - RNA, 19 nt, Artificial Sequence
  Description of Artificial Sequence: Synthetic oligonucleotide
  Antisense strand to SEQ ID NO: 2191752
aauacacuuaaccgaaauc

SEQ ID NO: 2191754 - RNA, 19 nt, Artificial Sequence
  Description of Artificial Sequence: Synthetic oligonucleotide
  Sense strand starting at position 2166 of SEQ ID NO: 1883405
aaguguauuggaugguuau

SEQ ID NO: 2191755 - RNA, 19 nt, Artificial Sequence
  Description of Artificial Sequence: Synthetic oligonucleotide
  Antisense strand to SEQ ID NO: 2191754
auaaccauccaauacacuu

SEQ ID NO: 2191756 - RNA, 19 nt, Artificial Sequence
  Description of Artificial Sequence: Synthetic oligonucleotide
  Sense strand starting at position 2202 of SEQ ID NO: 1883405
gagcaacagugauuccaau

SEQ ID NO: 2191757 - RNA, 19 nt, Artificial Sequence
  Description of Artificial Sequence: Synthetic oligonucleotide
  Antisense strand to SEQ ID NO: 2191756
auuggaaucacuguugcuc

SEQ ID NO: 2191758 - RNA, 19 nt, Artificial Sequence
  Description of Artificial Sequence: Synthetic oligonucleotide
  Sense strand starting at position 2229 of SEQ ID NO: 1883405
ugcuguuggccuccaguua

SEQ ID NO: 2191759 - RNA, 19 nt, Artificial Sequence
  Description of Artificial Sequence: Synthetic oligonucleotide
  Antisense strand to SEQ ID NO: 2191758
uaacuggaggccaacagca

SEQ ID NO: 2191760 - RNA, 19 nt, Artificial Sequence
  Description of Artificial Sequence: Synthetic oligonucleotide
  Sense strand starting at position 2249 of SEQ ID NO: 1883405
aucagaaccgcuugagaac

SEQ ID NO: 2191761 - RNA, 19 nt, Artificial Sequence
  Description of Artificial Sequence: Synthetic oligonucleotide
  Antisense strand to SEQ ID NO: 2191760
guucucaagcgguucugau

SEQ ID NO: 2191762 - RNA, 19 nt, Artificial Sequence
  Description of Artificial Sequence: Synthetic oligonucleotide
  Sense strand starting at position 2826 of SEQ ID NO: 1883405
ucaaacuuguuguuugaaa

SEQ ID NO: 2191763 - RNA, 19 nt, Artificial Sequence
  Description of Artificial Sequence: Synthetic oligonucleotide
  Antisense strand to SEQ ID NO: 2191762
uuucaaacaacaaguuuga

SEQ ID NO: 2191764 - RNA, 19 nt, Artificial Sequence
  Description of Artificial Sequence: Synthetic oligonucleotide
  Sense strand starting at position 2840 of SEQ ID NO: 1883405
ugaaacuagcaauguuaua

SEQ ID NO: 2191765 - RNA, 19 nt, Artificial Sequence
  Description of Artificial Sequence: Synthetic oligonucleotide
  Antisense strand to SEQ ID NO: 2191764
uauaacauugcuaguuuca

SEQ ID NO: 2191766 - RNA, 19 nt, Artificial Sequence
  Description of Artificial Sequence: Synthetic oligonucleotide
  Sense strand starting at position 2938 of SEQ ID NO: 1883405
ggagcuagagugggaaaua

SEQ ID NO: 2191767 - RNA, 19 nt, Artificial Sequence
  Description of Artificial Sequence: Synthetic oligonucleotide
  Antisense strand to SEQ ID NO: 2191766
uauuucccacucuagcucc

SEQ ID NO: 2191768 - RNA, 19 nt, Artificial Sequence
  Description of Artificial Sequence: Synthetic oligonucleotide
  Sense strand starting at position 2999 of SEQ ID NO: 1883405
ugucuuauuuccucagcuu

SEQ ID NO: 2191769 - RNA, 19 nt, Artificial Sequence
  Description of Artificial Sequence: Synthetic oligonucleotide
  Antisense strand to SEQ ID NO: 2191768
aagcugaggaaauaagaca

SEQ ID NO: 2191770 - RNA, 19 nt, Artificial Sequence
  Description of Artificial Sequence: Synthetic oligonucleotide
  Sense strand starting at position 3000 of SEQ ID NO: 1883405
gucuuauuuccucagcuuc

SEQ ID NO: 2191771 - RNA, 19 nt, Artificial Sequence
  Description of Artificial Sequence: Synthetic oligonucleotide
  Antisense strand to SEQ ID NO: 2191770
gaagcugaggaaauaagac

SEQ ID NO: 2191772 - RNA, 19 nt, Artificial Sequence
  Description of Artificial Sequence: Synthetic oligonucleotide
  Sense strand starting at position 3059 of SEQ ID NO: 1883405
gggauuuauuaugauuauc

SEQ ID NO: 2191773 - RNA, 19 nt, Artificial Sequence
  Description of Artificial Sequence: Synthetic oligonucleotide
  Antisense strand to SEQ ID NO: 2191772
gauaaucauaauaaauccc

SEQ ID NO: 2191774 - RNA, 19 nt, Artificial Sequence
  Description of Artificial Sequence: Synthetic oligonucleotide
  Sense strand starting at position 3249 of SEQ ID NO: 1883405
cugacaugcagggauguuu

SEQ ID NO: 2191775 - RNA, 19 nt, Artificial Sequence
  Description of Artificial Sequence: Synthetic oligonucleotide
  Antisense strand to SEQ ID NO: 2191774
aaacaucccugcaugucag

SEQ ID NO: 2191776 - RNA, 19 nt, Artificial Sequence
  Description of Artificial Sequence: Synthetic oligonucleotide
  Sense strand starting at position 3290 of SEQ ID NO: 1883405
aaguaauggugauucgaac

SEQ ID NO: 2191777 - RNA, 19 nt, Artificial Sequence
  Description of Artificial Sequence: Synthetic oligonucleotide
  Antisense strand to SEQ ID NO: 2191776
guucgaaucaccauuacuu

SEQ ID NO: 2191778 - RNA, 19 nt, Artificial Sequence
  Description of Artificial Sequence: Synthetic oligonucleotide
  Sense strand starting at position 3335 of SEQ ID NO: 1883405
caucuuugggcucagggua

SEQ ID NO: 2191779 - RNA, 19 nt, Artificial Sequence
  Description of Artificial Sequence: Synthetic oligonucleotide
  Antisense strand to SEQ ID NO: 2191778
uacccugagcccaaagaug

SEQ ID NO: 2191780 - RNA, 19 nt, Artificial Sequence
  Description of Artificial Sequence: Synthetic oligonucleotide
  Sense strand starting at position 3348 of SEQ ID NO: 1883405
aggguaucuccacaguuac

SEQ ID NO: 2191781 - RNA, 19 nt, Artificial Sequence
  Description of Artificial Sequence: Synthetic oligonucleotide
  Antisense strand to SEQ ID NO: 2191780
guaacuguggagauacccu

SEQ ID NO: 2191782 - RNA, 19 nt, Artificial Sequence
  Description of Artificial Sequence: Synthetic oligonucleotide
  Sense strand starting at position 3410 of SEQ ID NO: 1883405
uuccaauuccacugggacu

SEQ ID NO: 2191783 - RNA, 19 nt, Artificial Sequence
  Description of Artificial Sequence: Synthetic oligonucleotide
  Antisense strand to SEQ ID NO: 2191782
agucccaguggaauuggaa

SEQ ID NO: 2191784 - RNA, 19 nt, Artificial Sequence
  Description of Artificial Sequence: Synthetic oligonucleotide
  Sense strand starting at position 3544 of SEQ ID NO: 1883405
uguuuacaauguuuaccaa

SEQ ID NO: 2191785 - RNA, 19 nt, Artificial Sequence
  Description of Artificial Sequence: Synthetic oligonucleotide
  Antisense strand to SEQ ID NO: 2191784
uugguaaacauuguaaaca

SEQ ID NO: 2191786 - RNA, 19 nt, Artificial Sequence
  Description of Artificial Sequence: Synthetic oligonucleotide
  Sense strand starting at position 3545 of SEQ ID NO: 1883405
guuuacaauguuuaccaaa

SEQ ID NO: 2191787 - RNA, 19 nt, Artificial Sequence
  Description of Artificial Sequence: Synthetic oligonucleotide
  Antisense strand to SEQ ID NO: 2191786
uuugguaaacauuguaaac

SEQ ID NO: 2191788 - RNA, 19 nt, Artificial Sequence
  Description of Artificial Sequence: Synthetic oligonucleotide
  Sense strand starting at position 3570 of SEQ ID NO: 1883405
guacuagaugugcauagua

SEQ ID NO: 2191789 - RNA, 19 nt, Artificial Sequence
  Description of Artificial Sequence: Synthetic oligonucleotide
  Antisense strand to SEQ ID NO: 2191788
uacuaugcacaucuaguac

SEQ ID NO: 2191790 - RNA, 19 nt, Artificial Sequence
  Description of Artificial Sequence: Synthetic oligonucleotide
  Sense strand starting at position 3572 of SEQ ID NO: 1883405
acuagaugugcauaguacu

SEQ ID NO: 2191791 - RNA, 19 nt, Artificial Sequence
  Description of Artificial Sequence: Synthetic oligonucleotide
  Antisense strand to SEQ ID NO: 2191790
aguacuaugcacaucuagu

SEQ ID NO: 2191792 - RNA, 19 nt, Artificial Sequence
  Description of Artificial Sequence: Synthetic oligonucleotide
  Sense strand starting at position 3630 of SEQ ID NO: 1883405
uguacaguagcauggauaa

SEQ ID NO: 2191793 - RNA, 19 nt, Artificial Sequence
  Description of Artificial Sequence: Synthetic oligonucleotide
  Antisense strand to SEQ ID NO: 2191792
uuauccaugcuacuguaca

SEQ ID NO: 2191794 - RNA, 19 nt, Artificial Sequence
  Description of Artificial Sequence: Synthetic oligonucleotide
  Sense strand starting at position 3656 of SEQ ID NO: 1883405
guaauauauuugcacagaa

SEQ ID NO: 2191795 - RNA, 19 nt, Artificial Sequence
  Description of Artificial Sequence: Synthetic oligonucleotide
  Antisense strand to SEQ ID NO: 2191794
uucugugcaaauauauuac

SEQ ID NO: 2191796 - RNA, 19 nt, Artificial Sequence
  Description of Artificial Sequence: Synthetic oligonucleotide
  Sense strand starting at position 3731 of SEQ ID NO: 1883405
ucacaagcaugaguuugaa

SEQ ID NO: 2191797 - RNA, 19 nt, Artificial Sequence
  Description of Artificial Sequence: Synthetic oligonucleotide
  Antisense strand to SEQ ID NO: 2191796
uucaaacucaugcuuguga

SEQ ID NO: 2191798 - RNA, 19 nt, Artificial Sequence
  Description of Artificial Sequence: Synthetic oligonucleotide
  Sense strand starting at position 3734 of SEQ ID NO: 1883405
caagcaugaguuugaacga

SEQ ID NO: 2191799 - RNA, 19 nt, Artificial Sequence
  Description of Artificial Sequence: Synthetic oligonucleotide
  Antisense strand to SEQ ID NO: 2191798
ucguucaaacucaugcuug

SEQ ID NO: 2191800 - RNA, 19 nt, Artificial Sequence
  Description of Artificial Sequence: Synthetic oligonucleotide
  Sense strand starting at position 3810 of SEQ ID NO: 1883405
cuaagaauuugagaucaug

SEQ ID NO: 2191801 - RNA, 19 nt, Artificial Sequence
  Description of Artificial Sequence: Synthetic oligonucleotide
  Antisense strand to SEQ ID NO: 2191800
caugaucucaaauucuuag

SEQ ID NO: 2191802 - RNA, 19 nt, Artificial Sequence
  Description of Artificial Sequence: Synthetic oligonucleotide
  Sense strand starting at position 177 of SEQ ID NO: 1883406
uggacuucugaugggugaa

SEQ ID NO: 2191803 - RNA, 19 nt, Artificial Sequence
  Description of Artificial Sequence: Synthetic oligonucleotide
  Antisense strand to SEQ ID NO: 2191802
uucacccaucagaagucca

SEQ ID NO: 2191804 - RNA, 19 nt, Artificial Sequence
  Description of Artificial Sequence: Synthetic oligonucleotide
  Sense strand starting at position 178 of SEQ ID NO: 1883406
ggacuucugaugggugaaa

SEQ ID NO: 2191805 - RNA, 19 nt, Artificial Sequence
  Description of Artificial Sequence: Synthetic oligonucleotide
  Antisense strand to SEQ ID NO: 2191804
uuucacccaucagaagucc

SEQ ID NO: 2191806 - RNA, 19 nt, Artificial Sequence
  Description of Artificial Sequence: Synthetic oligonucleotide
  Sense strand starting at position 276 of SEQ ID NO: 1883406
gaaucuacccaguaaugug

SEQ ID NO: 2191807 - RNA, 19 nt, Artificial Sequence
  Description of Artificial Sequence: Synthetic oligonucleotide
  Antisense strand to SEQ ID NO: 2191806
cacauuacuggguagauuc

SEQ ID NO: 2191808 - RNA, 19 nt, Artificial Sequence
  Description of Artificial Sequence: Synthetic oligonucleotide
  Sense strand starting at position 334 of SEQ ID NO: 1883406
agcccugauuuguacauuu

SEQ ID NO: 2191809 - RNA, 19 nt, Artificial Sequence
  Description of Artificial Sequence: Synthetic oligonucleotide
  Antisense strand to SEQ ID NO: 2191808
aaauguacaaaucagggcu

SEQ ID NO: 2191810 - RNA, 19 nt, Artificial Sequence
  Description of Artificial Sequence: Synthetic oligonucleotide
  Sense strand starting at position 569 of SEQ ID NO: 1883406
agucuugcuguggauuaua

SEQ ID NO: 2191811 - RNA, 19 nt, Artificial Sequence
  Description of Artificial Sequence: Synthetic oligonucleotide
  Antisense strand to SEQ ID NO: 2191810
uauaauccacagcaagacu

SEQ ID NO: 2191812 - RNA, 19 nt, Artificial Sequence
  Description of Artificial Sequence: Synthetic oligonucleotide
  Sense strand starting at position 572 of SEQ ID NO: 1883406
cuugcuguggauuauaaca

SEQ ID NO: 2191813 - RNA, 19 nt, Artificial Sequence
  Description of Artificial Sequence: Synthetic oligonucleotide
  Antisense strand to SEQ ID NO: 2191812
uguuauaauccacagcaag

SEQ ID NO: 2191814 - RNA, 19 nt, Artificial Sequence
  Description of Artificial Sequence: Synthetic oligonucleotide
  Sense strand starting at position 600 of SEQ ID NO: 1883406
acuauuaugugacucagca

SEQ ID NO: 2191815 - RNA, 19 nt, Artificial Sequence
  Description of Artificial Sequence: Synthetic oligonucleotide
  Antisense strand to SEQ ID NO: 2191814
ugcugagucacauaauagu

SEQ ID NO: 2191816 - RNA, 19 nt, Artificial Sequence
  Description of Artificial Sequence: Synthetic oligonucleotide
  Sense strand starting at position 604 of SEQ ID NO: 1883406
uuaugugacucagcauaaa

SEQ ID NO: 2191817 - RNA, 19 nt, Artificial Sequence
  Description of Artificial Sequence: Synthetic oligonucleotide
  Antisense strand to SEQ ID NO: 2191816
uuuaugcugagucacauaa

SEQ ID NO: 2191818 - RNA, 19 nt, Artificial Sequence
  Description of Artificial Sequence: Synthetic oligonucleotide
  Sense strand starting at position 736 of SEQ ID NO: 1883406
acaguaagaaugugagauu

SEQ ID NO: 2191819 - RNA, 19 nt, Artificial Sequence
  Description of Artificial Sequence: Synthetic oligonucleotide
  Antisense strand to SEQ ID NO: 2191818
aaucucacauucuuacugu

SEQ ID NO: 2191820 - RNA, 19 nt, Artificial Sequence
  Description of Artificial Sequence: Synthetic oligonucleotide
  Sense strand starting at position 833 of SEQ ID NO: 1883406
uuggcucuccuccaagaaa

SEQ ID NO: 2191821 - RNA, 19 nt, Artificial Sequence
  Description of Artificial Sequence: Synthetic oligonucleotide
  Antisense strand to SEQ ID NO: 2191820
uuucuuggaggagagccaa

SEQ ID NO: 2191822 - RNA, 19 nt, Artificial Sequence
  Description of Artificial Sequence: Synthetic oligonucleotide
  Sense strand starting at position 1056 of SEQ ID NO: 1883406
ugaaucucucuguagcaca

SEQ ID NO: 2191823 - RNA, 19 nt, Artificial Sequence
  Description of Artificial Sequence: Synthetic oligonucleotide
  Antisense strand to SEQ ID NO: 2191822
ugugcuacagagagauuca

SEQ ID NO: 2191824 - RNA, 19 nt, Artificial Sequence
  Description of Artificial Sequence: Synthetic oligonucleotide
  Sense strand starting at position 1151 of SEQ ID NO: 1883406
ucccuuguagugggaacua

SEQ ID NO: 2191825 - RNA, 19 nt, Artificial Sequence
  Description of Artificial Sequence: Synthetic oligonucleotide
  Antisense strand to SEQ ID NO: 2191824
uaguucccacuacaaggga

SEQ ID NO: 2191826 - RNA, 19 nt, Artificial Sequence
  Description of Artificial Sequence: Synthetic oligonucleotide
  Sense strand starting at position 1328 of SEQ ID NO: 1883406
ccauguauucuuuaaguac

SEQ ID NO: 2191827 - RNA, 19 nt, Artificial Sequence
  Description of Artificial Sequence: Synthetic oligonucleotide
  Antisense strand to SEQ ID NO: 2191826
guacuuaaagaauacaugg

SEQ ID NO: 2191828 - RNA, 19 nt, Artificial Sequence
  Description of Artificial Sequence: Synthetic oligonucleotide
  Sense strand starting at position 1383 of SEQ ID NO: 1883406
guugcuuacguguccugaa

SEQ ID NO: 2191829 - RNA, 19 nt, Artificial Sequence
  Description of Artificial Sequence: Synthetic oligonucleotide
  Antisense strand to SEQ ID NO: 2191828
uucaggacacguaagcaac

SEQ ID NO: 2191830 - RNA, 19 nt, Artificial Sequence
  Description of Artificial Sequence: Synthetic oligonucleotide
  Sense strand starting at position 1399 of SEQ ID NO: 1883406
gaauuuguuucuccagcga

SEQ ID NO: 2191831 - RNA, 19 nt, Artificial Sequence
  Description of Artificial Sequence: Synthetic oligonucleotide
  Antisense strand to SEQ ID NO: 2191830
ucgcuggagaaacaaauuc

SEQ ID NO: 2191832 - RNA, 19 nt, Artificial Sequence
  Description of Artificial Sequence: Synthetic oligonucleotide
  Sense strand starting at position 1404 of SEQ ID NO: 1883406
uguuucuccagcgauagga

SEQ ID NO: 2191833 - RNA, 19 nt, Artificial Sequence
  Description of Artificial Sequence: Synthetic oligonucleotide
  Antisense strand to SEQ ID NO: 2191832
uccuaucgcuggagaaaca

SEQ ID NO: 2191834 - RNA, 19 nt, Artificial Sequence
  Description of Artificial Sequence: Synthetic oligonucleotide
  Sense strand starting at position 1413 of SEQ ID NO: 1883406
agcgauaggacaggauaau

SEQ ID NO: 2191835 - RNA, 19 nt, Artificial Sequence
  Description of Artificial Sequence: Synthetic oligonucleotide
  Antisense strand to SEQ ID NO: 2191834
auuauccuguccuaucgcu

SEQ ID NO: 2191836 - RNA, 19 nt, Artificial Sequence
  Description of Artificial Sequence: Synthetic oligonucleotide
  Sense strand starting at position 1570 of SEQ ID NO: 1883406
gauuauuacugagccauga

SEQ ID NO: 2191837 - RNA, 19 nt, Artificial Sequence
  Description of Artificial Sequence: Synthetic oligonucleotide
  Antisense strand to SEQ ID NO: 2191836
ucauggcucaguaauaauc

SEQ ID NO: 2191838 - RNA, 19 nt, Artificial Sequence
  Description of Artificial Sequence: Synthetic oligonucleotide
  Sense strand starting at position 1574 of SEQ ID NO: 1883406
auuacugagccaugaaacu

SEQ ID NO: 2191839 - RNA, 19 nt, Artificial Sequence
  Description of Artificial Sequence: Synthetic oligonucleotide
  Antisense strand to SEQ ID NO: 2191838
aguuucauggcucaguaau

SEQ ID NO: 2191840 - RNA, 19 nt, Artificial Sequence
  Description of Artificial Sequence: Synthetic oligonucleotide
  Sense strand starting at position 1721 of SEQ ID NO: 1883406
ccuggaugcauggauguua

SEQ ID NO: 2191841 - RNA, 19 nt, Artificial Sequence
  Description of Artificial Sequence: Synthetic oligonucleotide
  Antisense strand to SEQ ID NO: 2191840
uaacauccaugcauccagg

SEQ ID NO: 2191842 - RNA, 19 nt, Artificial Sequence
  Description of Artificial Sequence: Synthetic oligonucleotide
  Sense strand starting at position 2078 of SEQ ID NO: 1883406
gaucgugaugaucaugcau

SEQ ID NO: 2191843 - RNA, 19 nt, Artificial Sequence
  Description of Artificial Sequence: Synthetic oligonucleotide
  Antisense strand to SEQ ID NO: 2191842
augcaugaucaucacgauc

SEQ ID NO: 2191844 - RNA, 19 nt, Artificial Sequence
  Description of Artificial Sequence: Synthetic oligonucleotide
  Sense strand starting at position 2158 of SEQ ID NO: 1883406
aguuacugugaauagucaa

SEQ ID NO: 2191845 - RNA, 19 nt, Artificial Sequence
  Description of Artificial Sequence: Synthetic oligonucleotide
  Antisense strand to SEQ ID NO: 2191844
uugacuauucacaguaacu

SEQ ID NO: 2191846 - RNA, 19 nt, Artificial Sequence
  Description of Artificial Sequence: Synthetic oligonucleotide
  Sense strand starting at position 2161 of SEQ ID NO: 1883406
uacugugaauagucaagau

SEQ ID NO: 2191847 - RNA, 19 nt, Artificial Sequence
  Description of Artificial Sequence: Synthetic oligonucleotide
  Antisense strand to SEQ ID NO: 2191846
aucuugacuauucacagua

SEQ ID NO: 2191848 - RNA, 19 nt, Artificial Sequence
  Description of Artificial Sequence: Synthetic oligonucleotide
  Sense strand starting at position 2206 of SEQ ID NO: 1883406
uugacuuacaauggcgaga

SEQ ID NO: 2191849 - RNA, 19 nt, Artificial Sequence
  Description of Artificial Sequence: Synthetic oligonucleotide
  Antisense strand to SEQ ID NO: 2191848
ucucgccauuguaagucaa

SEQ ID NO: 2191850 - RNA, 19 nt, Artificial Sequence
  Description of Artificial Sequence: Synthetic oligonucleotide
  Sense strand starting at position 2217 of SEQ ID NO: 1883406
uggcgagaaagauguugau

SEQ ID NO: 2191851 - RNA, 19 nt, Artificial Sequence
  Description of Artificial Sequence: Synthetic oligonucleotide
  Antisense strand to SEQ ID NO: 2191850
aucaacaucuuucucgcca

SEQ ID NO: 2191852 - RNA, 19 nt, Artificial Sequence
  Description of Artificial Sequence: Synthetic oligonucleotide
  Sense strand starting at position 2390 of SEQ ID NO: 1883406
uguauugauuccuccugag

SEQ ID NO: 2191853 - RNA, 19 nt, Artificial Sequence
  Description of Artificial Sequence: Synthetic oligonucleotide
  Antisense strand to SEQ ID NO: 2191852
cucaggaggaaucaauaca

SEQ ID NO: 2191854 - RNA, 19 nt, Artificial Sequence
  Description of Artificial Sequence: Synthetic oligonucleotide
  Sense strand starting at position 2532 of SEQ ID NO: 1883406
acagcugaccuuugaacua

SEQ ID NO: 2191855 - RNA, 19 nt, Artificial Sequence
  Description of Artificial Sequence: Synthetic oligonucleotide
  Antisense strand to SEQ ID NO: 2191854
uaguucaaaggucagcugu

SEQ ID NO: 2191856 - RNA, 19 nt, Artificial Sequence
  Description of Artificial Sequence: Synthetic oligonucleotide
  Sense strand starting at position 2858 of SEQ ID NO: 1883406
agaggagagguugguugua

SEQ ID NO: 2191857 - RNA, 19 nt, Artificial Sequence
  Description of Artificial Sequence: Synthetic oligonucleotide
  Antisense strand to SEQ ID NO: 2191856
uacaaccaaccucuccucu

SEQ ID NO: 2191858 - RNA, 19 nt, Artificial Sequence
  Description of Artificial Sequence: Synthetic oligonucleotide
  Sense strand starting at position 2860 of SEQ ID NO: 1883406
aggagagguugguuguacu

SEQ ID NO: 2191859 - RNA, 19 nt, Artificial Sequence
  Description of Artificial Sequence: Synthetic oligonucleotide
  Antisense strand to SEQ ID NO: 2191858
aguacaaccaaccucuccu

SEQ ID NO: 2191860 - RNA, 19 nt, Artificial Sequence
  Description of Artificial Sequence: Synthetic oligonucleotide
  Sense strand starting at position 2971 of SEQ ID NO: 1883406
gaggcagaggcucacuuaa

SEQ ID NO: 2191861 - RNA, 19 nt, Artificial Sequence
  Description of Artificial Sequence: Synthetic oligonucleotide
  Antisense strand to SEQ ID NO: 2191860
uuaagugagccucugccuc

SEQ ID NO: 2191862 - RNA, 19 nt, Artificial Sequence
  Description of Artificial Sequence: Synthetic oligonucleotide
  Sense strand starting at position 3390 of SEQ ID NO: 1883406
aguuauuucucgcucauau

SEQ ID NO: 2191863 - RNA, 19 nt, Artificial Sequence
  Description of Artificial Sequence: Synthetic oligonucleotide
  Antisense strand to SEQ ID NO: 2191862
auaugagcgagaaauaacu

SEQ ID NO: 2191864 - RNA, 19 nt, Artificial Sequence
  Description of Artificial Sequence: Synthetic oligonucleotide
  Sense strand starting at position 3441 of SEQ ID NO: 1883406
gcagcuuuccucuacagaa

SEQ ID NO: 2191865 - RNA, 19 nt, Artificial Sequence
  Description of Artificial Sequence: Synthetic oligonucleotide
  Antisense strand to SEQ ID NO: 2191864
uucuguagaggaaagcugc

SEQ ID NO: 2191866 - RNA, 19 nt, Artificial Sequence
  Description of Artificial Sequence: Synthetic oligonucleotide
  Sense strand starting at position 3443 of SEQ ID NO: 1883406
agcuuuccucuacagaaug

SEQ ID NO: 2191867 - RNA, 19 nt, Artificial Sequence
  Description of Artificial Sequence: Synthetic oligonucleotide
  Antisense strand to SEQ ID NO: 2191866
cauucuguagaggaaagcu

SEQ ID NO: 2191868 - RNA, 19 nt, Artificial Sequence
  Description of Artificial Sequence: Synthetic oligonucleotide
  Sense strand starting at position 3455 of SEQ ID NO: 1883406
cagaaugauccagggcuca

SEQ ID NO: 2191869 - RNA, 19 nt, Artificial Sequence
  Description of Artificial Sequence: Synthetic oligonucleotide
  Antisense strand to SEQ ID NO: 2191868
ugagcccuggaucauucug

SEQ ID NO: 2191870 - RNA, 19 nt, Artificial Sequence
  Description of Artificial Sequence: Synthetic oligonucleotide
  Sense strand starting at position 3467 of SEQ ID NO: 1883406
gggcucaaagcauaauuau

SEQ ID NO: 2191871 - RNA, 19 nt, Artificial Sequence
  Description of Artificial Sequence: Synthetic oligonucleotide
  Antisense strand to SEQ ID NO: 2191870
auaauuaugcuuugagccc

SEQ ID NO: 2191872 - RNA, 19 nt, Artificial Sequence
  Description of Artificial Sequence: Synthetic oligonucleotide
  Sense strand starting at position 3642 of SEQ ID NO: 1883406
ggcauccuacuauauugaa

SEQ ID NO: 2191873 - RNA, 19 nt, Artificial Sequence
  Description of Artificial Sequence: Synthetic oligonucleotide
  Antisense strand to SEQ ID NO: 2191872
uucaauauaguaggaugcc

SEQ ID NO: 2191874 - RNA, 19 nt, Artificial Sequence
  Description of Artificial Sequence: Synthetic oligonucleotide
  Sense strand starting at position 3654 of SEQ ID NO: 1883406
uauugaauugucugaaaug

SEQ ID NO: 2191875 - RNA, 19 nt, Artificial Sequence
  Description of Artificial Sequence: Synthetic oligonucleotide
  Antisense strand to SEQ ID NO: 2191874
cauuucagacaauucaaua

SEQ ID NO: 2191876 - RNA, 19 nt, Artificial Sequence
  Description of Artificial Sequence: Synthetic oligonucleotide
  Sense strand starting at position 3698 of SEQ ID NO: 1883406
aauagaugauugucuauga

SEQ ID NO: 2191877 - RNA, 19 nt, Artificial Sequence
  Description of Artificial Sequence: Synthetic oligonucleotide
  Antisense strand to SEQ ID NO: 2191876
ucauagacaaucaucuauu

SEQ ID NO: 2191878 - RNA, 19 nt, Artificial Sequence
  Description of Artificial Sequence: Synthetic oligonucleotide
  Sense strand starting at position 3699 of SEQ ID NO: 1883406
auagaugauugucuaugaa

SEQ ID NO: 2191879 - RNA, 19 nt, Artificial Sequence
  Description of Artificial Sequence: Synthetic oligonucleotide
  Antisense strand to SEQ ID NO: 2191878
uucauagacaaucaucuau

SEQ ID NO: 2191880 - RNA, 19 nt, Artificial Sequence
  Description of Artificial Sequence: Synthetic oligonucleotide
  Sense strand starting at position 3702 of SEQ ID NO: 1883406
gaugauugucuaugaaaua

SEQ ID NO: 2191881 - RNA, 19 nt, Artificial Sequence
  Description of Artificial Sequence: Synthetic oligonucleotide
  Antisense strand to SEQ ID NO: 2191880
uauuucauagacaaucauc

SEQ ID NO: 2191882 - RNA, 19 nt, Artificial Sequence
  Description of Artificial Sequence: Synthetic oligonucleotide
  Sense strand starting at position 85 of SEQ ID NO: 1883407
acaguaugcacuggaggaa

SEQ ID NO: 2191883 - RNA, 19 nt, Artificial Sequence
  Description of Artificial Sequence: Synthetic oligonucleotide
  Antisense strand to SEQ ID NO: 2191882
uuccuccagugcauacugu

SEQ ID NO: 2191884 - RNA, 19 nt, Artificial Sequence
  Description of Artificial Sequence: Synthetic oligonucleotide
  Sense strand starting at position 144 of SEQ ID NO: 1883407
uugucucaccagugaagaa

SEQ ID NO: 2191885 - RNA, 19 nt, Artificial Sequence
  Description of Artificial Sequence: Synthetic oligonucleotide
  Antisense strand to SEQ ID NO: 2191884
uucuucacuggugagacaa

SEQ ID NO: 2191886 - RNA, 19 nt, Artificial Sequence
  Description of Artificial Sequence: Synthetic oligonucleotide
  Sense strand starting at position 154 of SEQ ID NO: 1883407
agugaagaaucugagauuu

SEQ ID NO: 2191887 - RNA, 19 nt, Artificial Sequence
  Description of Artificial Sequence: Synthetic oligonucleotide
  Antisense strand to SEQ ID NO: 2191886
aaaucucagauucuucacu

SEQ ID NO: 2191888 - RNA, 19 nt, Artificial Sequence
  Description of Artificial Sequence: Synthetic oligonucleotide
  Sense strand starting at position 289 of SEQ ID NO: 1883407
cugagcuggcauuaccaaa

SEQ ID NO: 2191889 - RNA, 19 nt, Artificial Sequence
  Description of Artificial Sequence: Synthetic oligonucleotide
  Antisense strand to SEQ ID NO: 2191888
uuugguaaugccagcucag

SEQ ID NO: 2191890 - RNA, 19 nt, Artificial Sequence
  Description of Artificial Sequence: Synthetic oligonucleotide
  Sense strand starting at position 346 of SEQ ID NO: 1883407
uaguaaggauagcuguuau

SEQ ID NO: 2191891 - RNA, 19 nt, Artificial Sequence
  Description of Artificial Sequence: Synthetic oligonucleotide
  Antisense strand to SEQ ID NO: 2191890
auaacagcuauccuuacua

SEQ ID NO: 2191892 - RNA, 19 nt, Artificial Sequence
  Description of Artificial Sequence: Synthetic oligonucleotide
  Sense strand starting at position 358 of SEQ ID NO: 1883407
cuguuauacacggagacca

SEQ ID NO: 2191893 - RNA, 19 nt, Artificial Sequence
  Description of Artificial Sequence: Synthetic oligonucleotide
  Antisense strand to SEQ ID NO: 2191892
uggucuccguguauaacag

SEQ ID NO: 2191894 - RNA, 19 nt, Artificial Sequence
  Description of Artificial Sequence: Synthetic oligonucleotide
  Sense strand starting at position 469 of SEQ ID NO: 1883407
gucuuauagcgucuguucu

SEQ ID NO: 2191895 - RNA, 19 nt, Artificial Sequence
  Description of Artificial Sequence: Synthetic oligonucleotide
  Antisense strand to SEQ ID NO: 2191894
agaacagacgcuauaagac

SEQ ID NO: 2191896 - RNA, 19 nt, Artificial Sequence
  Description of Artificial Sequence: Synthetic oligonucleotide
  Sense strand starting at position 560 of SEQ ID NO: 1883407
gguacuucugauggcugaa

SEQ ID NO: 2191897 - RNA, 19 nt, Artificial Sequence
  Description of Artificial Sequence: Synthetic oligonucleotide
  Antisense strand to SEQ ID NO: 2191896
uucagccaucagaaguacc

SEQ ID NO: 2191898 - RNA, 19 nt, Artificial Sequence
  Description of Artificial Sequence: Synthetic oligonucleotide
  Sense strand starting at position 563 of SEQ ID NO: 1883407
acuucugauggcugaacuu

SEQ ID NO: 2191899 - RNA, 19 nt, Artificial Sequence
  Description of Artificial Sequence: Synthetic oligonucleotide
  Antisense strand to SEQ ID NO: 2191898
aaguucagccaucagaagu

SEQ ID NO: 2191900 - RNA, 19 nt, Artificial Sequence
  Description of Artificial Sequence: Synthetic oligonucleotide
  Sense strand starting at position 572 of SEQ ID NO: 1883407
ggcugaacuuccucuccaa

SEQ ID NO: 2191901 - RNA, 19 nt, Artificial Sequence
  Description of Artificial Sequence: Synthetic oligonucleotide
  Antisense strand to SEQ ID NO: 2191900
uuggagaggaaguucagcc

SEQ ID NO: 2191902 - RNA, 19 nt, Artificial Sequence
  Description of Artificial Sequence: Synthetic oligonucleotide
  Sense strand starting at position 707 of SEQ ID NO: 1883407
ccaagugccuuucuggaaa

SEQ ID NO: 2191903 - RNA, 19 nt, Artificial Sequence
  Description of Artificial Sequence: Synthetic oligonucleotide
  Antisense strand to SEQ ID NO: 2191902
uuuccagaaaggcacuugg

SEQ ID NO: 2191904 - RNA, 19 nt, Artificial Sequence
  Description of Artificial Sequence: Synthetic oligonucleotide
  Sense strand starting at position 710 of SEQ ID NO: 1883407
agugccuuucuggaaagga

SEQ ID NO: 2191905 - RNA, 19 nt, Artificial Sequence
  Description of Artificial Sequence: Synthetic oligonucleotide
  Antisense strand to SEQ ID NO: 2191904
uccuuuccagaaaggcacu

SEQ ID NO: 2191906 - RNA, 19 nt, Artificial Sequence
  Description of Artificial Sequence: Synthetic oligonucleotide
  Sense strand starting at position 796 of SEQ ID NO: 1883407
acccuuaucucuuuaguga

SEQ ID NO: 2191907 - RNA, 19 nt, Artificial Sequence
  Description of Artificial Sequence: Synthetic oligonucleotide
  Antisense strand to SEQ ID NO: 2191906
ucacuaaagagauaagggu

SEQ ID NO: 2191908 - RNA, 19 nt, Artificial Sequence
  Description of Artificial Sequence: Synthetic oligonucleotide
  Sense strand starting at position 797 of SEQ ID NO: 1883407
cccuuaucucuuuagugag

SEQ ID NO: 2191909 - RNA, 19 nt, Artificial Sequence
  Description of Artificial Sequence: Synthetic oligonucleotide
  Antisense strand to SEQ ID NO: 2191908
cucacuaaagagauaaggg

SEQ ID NO: 2191910 - RNA, 19 nt, Artificial Sequence
  Description of Artificial Sequence: Synthetic oligonucleotide
  Sense strand starting at position 803 of SEQ ID NO: 1883407
ucucuuuagugagugaaca

SEQ ID NO: 2191911 - RNA, 19 nt, Artificial Sequence
  Description of Artificial Sequence: Synthetic oligonucleotide
  Antisense strand to SEQ ID NO: 2191910
uguucacucacuaaagaga

SEQ ID NO: 2191912 - RNA, 19 nt, Artificial Sequence
  Description of Artificial Sequence: Synthetic oligonucleotide
  Sense strand starting at position 804 of SEQ ID NO: 1883407
cucuuuagugagugaacaa

SEQ ID NO: 2191913 - RNA, 19 nt, Artificial Sequence
  Description of Artificial Sequence: Synthetic oligonucleotide
  Antisense strand to SEQ ID NO: 2191912
uuguucacucacuaaagag

SEQ ID NO: 2191914 - RNA, 19 nt, Artificial Sequence
  Description of Artificial Sequence: Synthetic oligonucleotide
  Sense strand starting at position 829 of SEQ ID NO: 1883407
cacugucaucguggauaca

SEQ ID NO: 2191915 - RNA, 19 nt, Artificial Sequence
  Description of Artificial Sequence: Synthetic oligonucleotide
  Antisense strand to SEQ ID NO: 2191914
uguauccacgaugacagug

SEQ ID NO: 2191916 - RNA, 19 nt, Artificial Sequence
  Description of Artificial Sequence: Synthetic oligonucleotide
  Sense strand starting at position 830 of SEQ ID NO: 1883407
acugucaucguggauacau

SEQ ID NO: 2191917 - RNA, 19 nt, Artificial Sequence
  Description of Artificial Sequence: Synthetic oligonucleotide
  Antisense strand to SEQ ID NO: 2191916
auguauccacgaugacagu

SEQ ID NO: 2191918 - RNA, 19 nt, Artificial Sequence
  Description of Artificial Sequence: Synthetic oligonucleotide
  Sense strand starting at position 870 of SEQ ID NO: 1883407
aggagcucuccggagugaa

SEQ ID NO: 2191919 - RNA, 19 nt, Artificial Sequence
  Description of Artificial Sequence: Synthetic oligonucleotide
  Antisense strand to SEQ ID NO: 2191918
uucacuccggagagcuccu

SEQ ID NO: 2191920 - RNA, 19 nt, Artificial Sequence
  Description of Artificial Sequence: Synthetic oligonucleotide
  Sense strand starting at position 880 of SEQ ID NO: 1883407
cggagugaagagugaguaa

SEQ ID NO: 2191921 - RNA, 19 nt, Artificial Sequence
  Description of Artificial Sequence: Synthetic oligonucleotide
  Antisense strand to SEQ ID NO: 2191920
uuacucacucuucacuccg

SEQ ID NO: 2191922 - RNA, 19 nt, Artificial Sequence
  Description of Artificial Sequence: Synthetic oligonucleotide
  Sense strand starting at position 883 of SEQ ID NO: 1883407
agugaagagugaguaaaua

SEQ ID NO: 2191923 - RNA, 19 nt, Artificial Sequence
  Description of Artificial Sequence: Synthetic oligonucleotide
  Antisense strand to SEQ ID NO: 2191922
uauuuacucacucuucacu

SEQ ID NO: 2191924 - RNA, 19 nt, Artificial Sequence
  Description of Artificial Sequence: Synthetic oligonucleotide
  Sense strand starting at position 940 of SEQ ID NO: 1883407
cccaaaguuagagacguuu

SEQ ID NO: 2191925 - RNA, 19 nt, Artificial Sequence
  Description of Artificial Sequence: Synthetic oligonucleotide
  Antisense strand to SEQ ID NO: 2191924
aaacgucucuaacuuuggg

SEQ ID NO: 2191926 - RNA, 19 nt, Artificial Sequence
  Description of Artificial Sequence: Synthetic oligonucleotide
  Sense strand starting at position 946 of SEQ ID NO: 1883407
guuagagacguuucguggu

SEQ ID NO: 2191927 - RNA, 19 nt, Artificial Sequence
  Description of Artificial Sequence: Synthetic oligonucleotide
  Antisense strand to SEQ ID NO: 2191926
accacgaaacgucucuaac

SEQ ID NO: 2191928 - RNA, 19 nt, Artificial Sequence
  Description of Artificial Sequence: Synthetic oligonucleotide
  Sense strand starting at position 973 of SEQ ID NO: 1883407
cucccuacugucuaguaga

SEQ ID NO: 2191929 - RNA, 19 nt, Artificial Sequence
  Description of Artificial Sequence: Synthetic oligonucleotide
  Antisense strand to SEQ ID NO: 2191928
ucuacuagacaguagggag

SEQ ID NO: 2191930 - RNA, 19 nt, Artificial Sequence
  Description of Artificial Sequence: Synthetic oligonucleotide
  Sense strand starting at position 1153 of SEQ ID NO: 1883407
ggcucauucugggcuuuaa

SEQ ID NO: 2191931 - RNA, 19 nt, Artificial Sequence
  Description of Artificial Sequence: Synthetic oligonucleotide
  Antisense strand to SEQ ID NO: 2191930
uuaaagcccagaaugagcc

SEQ ID NO: 2191932 - RNA, 19 nt, Artificial Sequence
  Description of Artificial Sequence: Synthetic oligonucleotide
  Sense strand starting at position 1172 of SEQ ID NO: 1883407
uucccucuucgcuaaacga

SEQ ID NO: 2191933 - RNA, 19 nt, Artificial Sequence
  Description of Artificial Sequence: Synthetic oligonucleotide
  Antisense strand to SEQ ID NO: 2191932
ucguuuagcgaagagggaa

SEQ ID NO: 2191934 - RNA, 19 nt, Artificial Sequence
  Description of Artificial Sequence: Synthetic oligonucleotide
  Sense strand starting at position 1863 of SEQ ID NO: 1883407
gcaggauguccuggaugag

SEQ ID NO: 2191935 - RNA, 19 nt, Artificial Sequence
  Description of Artificial Sequence: Synthetic oligonucleotide
  Antisense strand to SEQ ID NO: 2191934
cucauccaggacauccugc

SEQ ID NO: 2191936 - RNA, 19 nt, Artificial Sequence
  Description of Artificial Sequence: Synthetic oligonucleotide
  Sense strand starting at position 2813 of SEQ ID NO: 1883407
uuggcuaaacaauggguua

SEQ ID NO: 2191937 - RNA, 19 nt, Artificial Sequence
  Description of Artificial Sequence: Synthetic oligonucleotide
  Antisense strand to SEQ ID NO: 2191936
uaacccauuguuuagccaa

SEQ ID NO: 2191938 - RNA, 19 nt, Artificial Sequence
  Description of Artificial Sequence: Synthetic oligonucleotide
  Sense strand starting at position 2824 of SEQ ID NO: 1883407
auggguuagccagauuggu

SEQ ID NO: 2191939 - RNA, 19 nt, Artificial Sequence
  Description of Artificial Sequence: Synthetic oligonucleotide
  Antisense strand to SEQ ID NO: 2191938
accaaucuggcuaacccau

SEQ ID NO: 2191940 - RNA, 19 nt, Artificial Sequence
  Description of Artificial Sequence: Synthetic oligonucleotide
  Sense strand starting at position 3086 of SEQ ID NO: 1883407
gugucaggucgaugaugga

SEQ ID NO: 2191941 - RNA, 19 nt, Artificial Sequence
  Description of Artificial Sequence: Synthetic oligonucleotide
  Antisense strand to SEQ ID NO: 2191940
uccaucaucgaccugacac

SEQ ID NO: 2191942 - RNA, 19 nt, Artificial Sequence
  Description of Artificial Sequence: Synthetic oligonucleotide
  Sense strand starting at position 3092 of SEQ ID NO: 1883407
ggucgaugauggaaguauu

SEQ ID NO: 2191943 - RNA, 19 nt, Artificial Sequence
  Description of Artificial Sequence: Synthetic oligonucleotide
  Antisense strand to SEQ ID NO: 2191942
aauacuuccaucaucgacc

SEQ ID NO: 2191944 - RNA, 19 nt, Artificial Sequence
  Description of Artificial Sequence: Synthetic oligonucleotide
  Sense strand starting at position 3128 of SEQ ID NO: 1883407
acugaaauugcacauugua

SEQ ID NO: 2191945 - RNA, 19 nt, Artificial Sequence
  Description of Artificial Sequence: Synthetic oligonucleotide
  Antisense strand to SEQ ID NO: 2191944
uacaaugugcaauuucagu

SEQ ID NO: 2191946 - RNA, 19 nt, Artificial Sequence
  Description of Artificial Sequence: Synthetic oligonucleotide
  Sense strand starting at position 3206 of SEQ ID NO: 1883407
gcacaagauuuaugaaacu

SEQ ID NO: 2191947 - RNA, 19 nt, Artificial Sequence
  Description of Artificial Sequence: Synthetic oligonucleotide
  Antisense strand to SEQ ID NO: 2191946
aguuucauaaaucuugugc

SEQ ID NO: 2191948 - RNA, 19 nt, Artificial Sequence
  Description of Artificial Sequence: Synthetic oligonucleotide
  Sense strand starting at position 3272 of SEQ ID NO: 1883407
ccauaaagccgauggguua

SEQ ID NO: 2191949 - RNA, 19 nt, Artificial Sequence
  Description of Artificial Sequence: Synthetic oligonucleotide
  Antisense strand to SEQ ID NO: 2191948
uaacccaucggcuuuaugg

SEQ ID NO: 2191950 - RNA, 19 nt, Artificial Sequence
  Description of Artificial Sequence: Synthetic oligonucleotide
  Sense strand starting at position 3297 of SEQ ID NO: 1883407
aacaguugguaaucuggaa

SEQ ID NO: 2191951 - RNA, 19 nt, Artificial Sequence
  Description of Artificial Sequence: Synthetic oligonucleotide
  Antisense strand to SEQ ID NO: 2191950
uuccagauuaccaacuguu

SEQ ID NO: 2191952 - RNA, 19 nt, Artificial Sequence
  Description of Artificial Sequence: Synthetic oligonucleotide
  Sense strand starting at position 3445 of SEQ ID NO: 1883407
gaaaguuaauagguuauug

SEQ ID NO: 2191953 - RNA, 19 nt, Artificial Sequence
  Description of Artificial Sequence: Synthetic oligonucleotide
  Antisense strand to SEQ ID NO: 2191952
caauaaccuauuaacuuuc

SEQ ID NO: 2191954 - RNA, 19 nt, Artificial Sequence
  Description of Artificial Sequence: Synthetic oligonucleotide
  Sense strand starting at position 3449 of SEQ ID NO: 1883407
guuaauagguuauugcuga

SEQ ID NO: 2191955 - RNA, 19 nt, Artificial Sequence
  Description of Artificial Sequence: Synthetic oligonucleotide
  Antisense strand to SEQ ID NO: 2191954
ucagcaauaaccuauuaac

SEQ ID NO: 2191956 - RNA, 19 nt, Artificial Sequence
  Description of Artificial Sequence: Synthetic oligonucleotide
  Sense strand starting at position 3454 of SEQ ID NO: 1883407
uagguuauugcugauaaag

SEQ ID NO: 2191957 - RNA, 19 nt, Artificial Sequence
  Description of Artificial Sequence: Synthetic oligonucleotide
  Antisense strand to SEQ ID NO: 2191956
cuuuaucagcaauaaccua

SEQ ID NO: 2191958 - RNA, 19 nt, Artificial Sequence
  Description of Artificial Sequence: Synthetic oligonucleotide
  Sense strand starting at position 3501 of SEQ ID NO: 1883407
cgggaaagacuuuggcaaa

SEQ ID NO: 2191959 - RNA, 19 nt, Artificial Sequence
  Description of Artificial Sequence: Synthetic oligonucleotide
  Antisense strand to SEQ ID NO: 2191958
uuugccaaagucuuucccg

SEQ ID NO: 2191960 - RNA, 19 nt, Artificial Sequence
  Description of Artificial Sequence: Synthetic oligonucleotide
  Sense strand starting at position 3680 of SEQ ID NO: 1883407
aauuuacguugggacauua

SEQ ID NO: 2191961 - RNA, 19 nt, Artificial Sequence
  Description of Artificial Sequence: Synthetic oligonucleotide
  Antisense strand to SEQ ID NO: 2191960
uaaugucccaacguaaauu

SEQ ID NO: 2191962 - RNA, 19 nt, Artificial Sequence
  Description of Artificial Sequence: Synthetic oligonucleotide
  Sense strand starting at position 43 of SEQ ID NO: 1883409
ccaugagagccauguucuu

SEQ ID NO: 2191963 - RNA, 19 nt, Artificial Sequence
  Description of Artificial Sequence: Synthetic oligonucleotide
  Antisense strand to SEQ ID NO: 2191962
aagaacauggcucucaugg

SEQ ID NO: 2191964 - RNA, 19 nt, Artificial Sequence
  Description of Artificial Sequence: Synthetic oligonucleotide
  Sense strand starting at position 58 of SEQ ID NO: 1883409
ucuuaaagauuugggugaa

SEQ ID NO: 2191965 - RNA, 19 nt, Artificial Sequence
  Description of Artificial Sequence: Synthetic oligonucleotide
  Antisense strand to SEQ ID NO: 2191964
uucacccaaaucuuuaaga

SEQ ID NO: 2191966 - RNA, 19 nt, Artificial Sequence
  Description of Artificial Sequence: Synthetic oligonucleotide
  Sense strand starting at position 59 of SEQ ID NO: 1883409
cuuaaagauuugggugaaa

SEQ ID NO: 2191967 - RNA, 19 nt, Artificial Sequence
  Description of Artificial Sequence: Synthetic oligonucleotide
  Antisense strand to SEQ ID NO: 2191966
uuucacccaaaucuuuaag

SEQ ID NO: 2191968 - RNA, 19 nt, Artificial Sequence
  Description of Artificial Sequence: Synthetic oligonucleotide
  Sense strand starting at position 178 of SEQ ID NO: 1883409
agaagucacugcucccuaa

SEQ ID NO: 2191969 - RNA, 19 nt, Artificial Sequence
  Description of Artificial Sequence: Synthetic oligonucleotide
  Antisense strand to SEQ ID NO: 2191968
uuagggagcagugacuucu

SEQ ID NO: 2191970 - RNA, 19 nt, Artificial Sequence
  Description of Artificial Sequence: Synthetic oligonucleotide
  Sense strand starting at position 312 of SEQ ID NO: 1883409
ugcuccuacccggaaugaa

SEQ ID NO: 2191971 - RNA, 19 nt, Artificial Sequence
  Description of Artificial Sequence: Synthetic oligonucleotide
  Antisense strand to SEQ ID NO: 2191970
uucauuccggguaggagca

SEQ ID NO: 2191972 - RNA, 19 nt, Artificial Sequence
  Description of Artificial Sequence: Synthetic oligonucleotide
  Sense strand starting at position 315 of SEQ ID NO: 1883409
uccuacccggaaugaaaua

SEQ ID NO: 2191973 - RNA, 19 nt, Artificial Sequence
  Description of Artificial Sequence: Synthetic oligonucleotide
  Antisense strand to SEQ ID NO: 2191972
uauuucauuccggguagga

SEQ ID NO: 2191974 - RNA, 19 nt, Artificial Sequence
  Description of Artificial Sequence: Synthetic oligonucleotide
  Sense strand starting at position 326 of SEQ ID NO: 1883409
augaaauaguggcuuaagu

SEQ ID NO: 2191975 - RNA, 19 nt, Artificial Sequence
  Description of Artificial Sequence: Synthetic oligonucleotide
  Antisense strand to SEQ ID NO: 2191974
acuuaagccacuauuucau

SEQ ID NO: 2191976 - RNA, 19 nt, Artificial Sequence
  Description of Artificial Sequence: Synthetic oligonucleotide
  Sense strand starting at position 328 of SEQ ID NO: 1883409
gaaauaguggcuuaagucu

SEQ ID NO: 2191977 - RNA, 19 nt, Artificial Sequence
  Description of Artificial Sequence: Synthetic oligonucleotide
  Antisense strand to SEQ ID NO: 2191976
agacuuaagccacuauuuc

SEQ ID NO: 2191978 - RNA, 19 nt, Artificial Sequence
  Description of Artificial Sequence: Synthetic oligonucleotide
  Sense strand starting at position 335 of SEQ ID NO: 1883409
uggcuuaagucucuuugaa

SEQ ID NO: 2191979 - RNA, 19 nt, Artificial Sequence
  Description of Artificial Sequence: Synthetic oligonucleotide
  Antisense strand to SEQ ID NO: 2191978
uucaaagagacuuaagcca

SEQ ID NO: 2191980 - RNA, 19 nt, Artificial Sequence
  Description of Artificial Sequence: Synthetic oligonucleotide
  Sense strand starting at position 337 of SEQ ID NO: 1883409
gcuuaagucucuuugaaga

SEQ ID NO: 2191981 - RNA, 19 nt, Artificial Sequence
  Description of Artificial Sequence: Synthetic oligonucleotide
  Antisense strand to SEQ ID NO: 2191980
ucuucaaagagacuuaagc

SEQ ID NO: 2191982 - RNA, 19 nt, Artificial Sequence
  Description of Artificial Sequence: Synthetic oligonucleotide
  Sense strand starting at position 570 of SEQ ID NO: 1883409
guucucagacuguauauua

SEQ ID NO: 2191983 - RNA, 19 nt, Artificial Sequence
  Description of Artificial Sequence: Synthetic oligonucleotide
  Antisense strand to SEQ ID NO: 2191982
uaauauacagucugagaac

SEQ ID NO: 2191984 - RNA, 19 nt, Artificial Sequence
  Description of Artificial Sequence: Synthetic oligonucleotide
  Sense strand starting at position 1146 of SEQ ID NO: 1883409
agaauuagaugauaaagga

SEQ ID NO: 2191985 - RNA, 19 nt, Artificial Sequence
  Description of Artificial Sequence: Synthetic oligonucleotide
  Antisense strand to SEQ ID NO: 2191984
uccuuuaucaucuaauucu

SEQ ID NO: 2191986 - RNA, 19 nt, Artificial Sequence
  Description of Artificial Sequence: Synthetic oligonucleotide
  Sense strand starting at position 1374 of SEQ ID NO: 1883409
guuaacagauauuccugaa

SEQ ID NO: 2191987 - RNA, 19 nt, Artificial Sequence
  Description of Artificial Sequence: Synthetic oligonucleotide
  Antisense strand to SEQ ID NO: 2191986
uucaggaauaucuguuaac

SEQ ID NO: 2191988 - RNA, 19 nt, Artificial Sequence
  Description of Artificial Sequence: Synthetic oligonucleotide
  Sense strand starting at position 1463 of SEQ ID NO: 1883409
cuaaguaaaucuuuagguu

SEQ ID NO: 2191989 - RNA, 19 nt, Artificial Sequence
  Description of Artificial Sequence: Synthetic oligonucleotide
  Antisense strand to SEQ ID NO: 2191988
aaccuaaagauuuacuuag

SEQ ID NO: 2191990 - RNA, 19 nt, Artificial Sequence
  Description of Artificial Sequence: Synthetic oligonucleotide
  Sense strand starting at position 1464 of SEQ ID NO: 1883409
uaaguaaaucuuuagguug

SEQ ID NO: 2191991 - RNA, 19 nt, Artificial Sequence
  Description of Artificial Sequence: Synthetic oligonucleotide
  Antisense strand to SEQ ID NO: 2191990
caaccuaaagauuuacuua

SEQ ID NO: 2191992 - RNA, 19 nt, Artificial Sequence
  Description of Artificial Sequence: Synthetic oligonucleotide
  Sense strand starting at position 1467 of SEQ ID NO: 1883409
guaaaucuuuagguugaag

SEQ ID NO: 2191993 - RNA, 19 nt, Artificial Sequence
  Description of Artificial Sequence: Synthetic oligonucleotide
  Antisense strand to SEQ ID NO: 2191992
cuucaaccuaaagauuuac

SEQ ID NO: 2191994 - RNA, 19 nt, Artificial Sequence
  Description of Artificial Sequence: Synthetic oligonucleotide
  Sense strand starting at position 1485 of SEQ ID NO: 1883409
ggagcacucuuucuagaaa

SEQ ID NO: 2191995 - RNA, 19 nt, Artificial Sequence
  Description of Artificial Sequence: Synthetic oligonucleotide
  Antisense strand to SEQ ID NO: 2191994
uuucuagaaagagugcucc

SEQ ID NO: 2191996 - RNA, 19 nt, Artificial Sequence
  Description of Artificial Sequence: Synthetic oligonucleotide
  Sense strand starting at position 1554 of SEQ ID NO: 1883409
uuauguguuaaggguaacu

SEQ ID NO: 2191997 - RNA, 19 nt, Artificial Sequence
  Description of Artificial Sequence: Synthetic oligonucleotide
  Antisense strand to SEQ ID NO: 2191996
aguuacccuuaacacauaa

SEQ ID NO: 2191998 - RNA, 19 nt, Artificial Sequence
  Description of Artificial Sequence: Synthetic oligonucleotide
  Sense strand starting at position 1556 of SEQ ID NO: 1883409
auguguuaaggguaacuua

SEQ ID NO: 2191999 - RNA, 19 nt, Artificial Sequence
  Description of Artificial Sequence: Synthetic oligonucleotide
  Antisense strand to SEQ ID NO: 2191998
uaaguuacccuuaacacau

SEQ ID NO: 2192000 - RNA, 19 nt, Artificial Sequence
  Description of Artificial Sequence: Synthetic oligonucleotide
  Sense strand starting at position 1605 of SEQ ID NO: 1883409
ucgccuauacgguagaaua

SEQ ID NO: 2192001 - RNA, 19 nt, Artificial Sequence
  Description of Artificial Sequence: Synthetic oligonucleotide
  Antisense strand to SEQ ID NO: 2192000
uauucuaccguauaggcga

SEQ ID NO: 2192002 - RNA, 19 nt, Artificial Sequence
  Description of Artificial Sequence: Synthetic oligonucleotide
  Sense strand starting at position 1652 of SEQ ID NO: 1883409
aguaaaguugacugcaaga

SEQ ID NO: 2192003 - RNA, 19 nt, Artificial Sequence
  Description of Artificial Sequence: Synthetic oligonucleotide
  Antisense strand to SEQ ID NO: 2192002
ucuugcagucaacuuuacu

SEQ ID NO: 2192004 - RNA, 19 nt, Artificial Sequence
  Description of Artificial Sequence: Synthetic oligonucleotide
  Sense strand starting at position 1732 of SEQ ID NO: 1883409
cgcccaaggcaugaugaaa

SEQ ID NO: 2192005 - RNA, 19 nt, Artificial Sequence
  Description of Artificial Sequence: Synthetic oligonucleotide
  Antisense strand to SEQ ID NO: 2192004
uuucaucaugccuugggcg

SEQ ID NO: 2192006 - RNA, 19 nt, Artificial Sequence
  Description of Artificial Sequence: Synthetic oligonucleotide
  Sense strand starting at position 2164 of SEQ ID NO: 1883409
gcucuaaacuuaguaaaug

SEQ ID NO: 2192007 - RNA, 19 nt, Artificial Sequence
  Description of Artificial Sequence: Synthetic oligonucleotide
  Antisense strand to SEQ ID NO: 2192006
cauuuacuaaguuuagagc

SEQ ID NO: 2192008 - RNA, 19 nt, Artificial Sequence
  Description of Artificial Sequence: Synthetic oligonucleotide
  Sense strand starting at position 2229 of SEQ ID NO: 1883409
accugagaccuguggcaau

SEQ ID NO: 2192009 - RNA, 19 nt, Artificial Sequence
  Description of Artificial Sequence: Synthetic oligonucleotide
  Antisense strand to SEQ ID NO: 2192008
auugccacaggucucaggu

SEQ ID NO: 2192010 - RNA, 19 nt, Artificial Sequence
  Description of Artificial Sequence: Synthetic oligonucleotide
  Sense strand starting at position 2562 of SEQ ID NO: 1883409
gagggagucaauugagcuu

SEQ ID NO: 2192011 - RNA, 19 nt, Artificial Sequence
  Description of Artificial Sequence: Synthetic oligonucleotide
  Antisense strand to SEQ ID NO: 2192010
aagcucaauugacucccuc

SEQ ID NO: 2192012 - RNA, 19 nt, Artificial Sequence
  Description of Artificial Sequence: Synthetic oligonucleotide
  Sense strand starting at position 2565 of SEQ ID NO: 1883409
ggagucaauugagcuugau

SEQ ID NO: 2192013 - RNA, 19 nt, Artificial Sequence
  Description of Artificial Sequence: Synthetic oligonucleotide
  Antisense strand to SEQ ID NO: 2192012
aucaagcucaauugacucc

SEQ ID NO: 2192014 - RNA, 19 nt, Artificial Sequence
  Description of Artificial Sequence: Synthetic oligonucleotide
  Sense strand starting at position 2568 of SEQ ID NO: 1883409
gucaauugagcuugauagg

SEQ ID NO: 2192015 - RNA, 19 nt, Artificial Sequence
  Description of Artificial Sequence: Synthetic oligonucleotide
  Antisense strand to SEQ ID NO: 2192014
ccuaucaagcucaauugac

SEQ ID NO: 2192016 - RNA, 19 nt, Artificial Sequence
  Description of Artificial Sequence: Synthetic oligonucleotide
  Sense strand starting at position 2569 of SEQ ID NO: 1883409
ucaauugagcuugauaggu

SEQ ID NO: 2192017 - RNA, 19 nt, Artificial Sequence
  Description of Artificial Sequence: Synthetic oligonucleotide
  Antisense strand to SEQ ID NO: 2192016
accuaucaagcucaauuga

SEQ ID NO: 2192018 - RNA, 19 nt, Artificial Sequence
  Description of Artificial Sequence: Synthetic oligonucleotide
  Sense strand starting at position 2573 of SEQ ID NO: 1883409
uugagcuugauagguuaaa

SEQ ID NO: 2192019 - RNA, 19 nt, Artificial Sequence
  Description of Artificial Sequence: Synthetic oligonucleotide
  Antisense strand to SEQ ID NO: 2192018
uuuaaccuaucaagcucaa

SEQ ID NO: 2192020 - RNA, 19 nt, Artificial Sequence
  Description of Artificial Sequence: Synthetic oligonucleotide
  Sense strand starting at position 2627 of SEQ ID NO: 1883409
ucaaguuaacuuuggaucu

SEQ ID NO: 2192021 - RNA, 19 nt, Artificial Sequence
  Description of Artificial Sequence: Synthetic oligonucleotide
  Antisense strand to SEQ ID NO: 2192020
agauccaaaguuaacuuga

SEQ ID NO: 2192022 - RNA, 19 nt, Artificial Sequence
  Description of Artificial Sequence: Synthetic oligonucleotide
  Sense strand starting at position 2680 of SEQ ID NO: 1883409
acauuuauuugaggucaau

SEQ ID NO: 2192023 - RNA, 19 nt, Artificial Sequence
  Description of Artificial Sequence: Synthetic oligonucleotide
  Antisense strand to SEQ ID NO: 2192022
auugaccucaaauaaaugu

SEQ ID NO: 2192024 - RNA, 19 nt, Artificial Sequence
  Description of Artificial Sequence: Synthetic oligonucleotide
  Sense strand starting at position 2692 of SEQ ID NO: 1883409
ggucaauaguuccucuaaa

SEQ ID NO: 2192025 - RNA, 19 nt, Artificial Sequence
  Description of Artificial Sequence: Synthetic oligonucleotide
  Antisense strand to SEQ ID NO: 2192024
uuuagaggaacuauugacc

SEQ ID NO: 2192026 - RNA, 19 nt, Artificial Sequence
  Description of Artificial Sequence: Synthetic oligonucleotide
  Sense strand starting at position 2882 of SEQ ID NO: 1883409
ucuaaugguaauugugagu

SEQ ID NO: 2192027 - RNA, 19 nt, Artificial Sequence
  Description of Artificial Sequence: Synthetic oligonucleotide
  Antisense strand to SEQ ID NO: 2192026
acucacaauuaccauuaga

SEQ ID NO: 2192028 - RNA, 19 nt, Artificial Sequence
  Description of Artificial Sequence: Synthetic oligonucleotide
  Sense strand starting at position 3018 of SEQ ID NO: 1883409
accagaugguaagucagau

SEQ ID NO: 2192029 - RNA, 19 nt, Artificial Sequence
  Description of Artificial Sequence: Synthetic oligonucleotide
  Antisense strand to SEQ ID NO: 2192028
aucugacuuaccaucuggu

SEQ ID NO: 2192030 - RNA, 19 nt, Artificial Sequence
  Description of Artificial Sequence: Synthetic oligonucleotide
  Sense strand starting at position 3110 of SEQ ID NO: 1883409
guaagaugcucccuugauc

SEQ ID NO: 2192031 - RNA, 19 nt, Artificial Sequence
  Description of Artificial Sequence: Synthetic oligonucleotide
  Antisense strand to SEQ ID NO: 2192030
gaucaagggagcaucuuac

SEQ ID NO: 2192032 - RNA, 19 nt, Artificial Sequence
  Description of Artificial Sequence: Synthetic oligonucleotide
  Sense strand starting at position 3608 of SEQ ID NO: 1883409
gugcuugguaaagaugaaa

SEQ ID NO: 2192033 - RNA, 19 nt, Artificial Sequence
  Description of Artificial Sequence: Synthetic oligonucleotide
  Antisense strand to SEQ ID NO: 2192032
uuucaucuuuaccaagcac

SEQ ID NO: 2192034 - RNA, 19 nt, Artificial Sequence
  Description of Artificial Sequence: Synthetic oligonucleotide
  Sense strand starting at position 3715 of SEQ ID NO: 1883409
auguaauauuaguuccacu

SEQ ID NO: 2192035 - RNA, 19 nt, Artificial Sequence
  Description of Artificial Sequence: Synthetic oligonucleotide
  Antisense strand to SEQ ID NO: 2192034
aguggaacuaauauuacau

SEQ ID NO: 2192036 - RNA, 19 nt, Artificial Sequence
  Description of Artificial Sequence: Synthetic oligonucleotide
  Sense strand starting at position 3733 of SEQ ID NO: 1883409
ucacgauaacuccaugcca

SEQ ID NO: 2192037 - RNA, 19 nt, Artificial Sequence
  Description of Artificial Sequence: Synthetic oligonucleotide
  Antisense strand to SEQ ID NO: 2192036
uggcauggaguuaucguga

SEQ ID NO: 2192038 - RNA, 19 nt, Artificial Sequence
  Description of Artificial Sequence: Synthetic oligonucleotide
  Sense strand starting at position 3735 of SEQ ID NO: 1883409
acgauaacuccaugccaga

SEQ ID NO: 2192039 - RNA, 19 nt, Artificial Sequence
  Description of Artificial Sequence: Synthetic oligonucleotide
  Antisense strand to SEQ ID NO: 2192038
ucuggcauggaguuaucgu

SEQ ID NO: 2192040 - RNA, 19 nt, Artificial Sequence
  Description of Artificial Sequence: Synthetic oligonucleotide
  Sense strand starting at position 3943 of SEQ ID NO: 1883409
ccuuuaauacagcagugau

SEQ ID NO: 2192041 - RNA, 19 nt, Artificial Sequence
  Description of Artificial Sequence: Synthetic oligonucleotide
  Antisense strand to SEQ ID NO: 2192040
aucacugcuguauuaaagg

SEQ ID NO: 2192042 - RNA, 19 nt, Artificial Sequence
  Description of Artificial Sequence: Synthetic oligonucleotide
  Sense strand starting at position 88 of SEQ ID NO: 1883408
guucucagacuguauauua

SEQ ID NO: 2192043 - RNA, 19 nt, Artificial Sequence
  Description of Artificial Sequence: Synthetic oligonucleotide
  Antisense strand to SEQ ID NO: 2192042
uaauauacagucugagaac

SEQ ID NO: 2192044 - RNA, 19 nt, Artificial Sequence
  Description of Artificial Sequence: Synthetic oligonucleotide
  Sense strand starting at position 664 of SEQ ID NO: 1883408
agaauuagaugauaaagga

SEQ ID NO: 2192045 - RNA, 19 nt, Artificial Sequence
  Description of Artificial Sequence: Synthetic oligonucleotide
  Antisense strand to SEQ ID NO: 2192044
uccuuuaucaucuaauucu

SEQ ID NO: 2192046 - RNA, 19 nt, Artificial Sequence
  Description of Artificial Sequence: Synthetic oligonucleotide
  Sense strand starting at position 892 of SEQ ID NO: 1883408
guuaacagauauuccugaa

SEQ ID NO: 2192047 - RNA, 19 nt, Artificial Sequence
  Description of Artificial Sequence: Synthetic oligonucleotide
  Antisense strand to SEQ ID NO: 2192046
uucaggaauaucuguuaac

SEQ ID NO: 2192048 - RNA, 19 nt, Artificial Sequence
  Description of Artificial Sequence: Synthetic oligonucleotide
  Sense strand starting at position 981 of SEQ ID NO: 1883408
cuaaguaaaucuuuagguu

SEQ ID NO: 2192049 - RNA, 19 nt, Artificial Sequence
  Description of Artificial Sequence: Synthetic oligonucleotide
  Antisense strand to SEQ ID NO: 2192048
aaccuaaagauuuacuuag

SEQ ID NO: 2192050 - RNA, 19 nt, Artificial Sequence
  Description of Artificial Sequence: Synthetic oligonucleotide
  Sense strand starting at position 982 of SEQ ID NO: 1883408
uaaguaaaucuuuagguug

SEQ ID NO: 2192051 - RNA, 19 nt, Artificial Sequence
  Description of Artificial Sequence: Synthetic oligonucleotide
  Antisense strand to SEQ ID NO: 2192050
caaccuaaagauuuacuua

SEQ ID NO: 2192052 - RNA, 19 nt, Artificial Sequence
  Description of Artificial Sequence: Synthetic oligonucleotide
  Sense strand starting at position 985 of SEQ ID NO: 1883408
guaaaucuuuagguugaag

SEQ ID NO: 2192053 - RNA, 19 nt, Artificial Sequence
  Description of Artificial Sequence: Synthetic oligonucleotide
  Antisense strand to SEQ ID NO: 2192052
cuucaaccuaaagauuuac

SEQ ID NO: 2192054 - RNA, 19 nt, Artificial Sequence
  Description of Artificial Sequence: Synthetic oligonucleotide
  Sense strand starting at position 1003 of SEQ ID NO: 1883408
ggagcacucuuucuagaaa

SEQ ID NO: 2192055 - RNA, 19 nt, Artificial Sequence
  Description of Artificial Sequence: Synthetic oligonucleotide
  Antisense strand to SEQ ID NO: 2192054
uuucuagaaagagugcucc

SEQ ID NO: 2192056 - RNA, 19 nt, Artificial Sequence
  Description of Artificial Sequence: Synthetic oligonucleotide
  Sense strand starting at position 1074 of SEQ ID NO: 1883408
auguguuaaggguaacuua

SEQ ID NO: 2192057 - RNA, 19 nt, Artificial Sequence
  Description of Artificial Sequence: Synthetic oligonucleotide
  Antisense strand to SEQ ID NO: 2192056
uaaguuacccuuaacacau

SEQ ID NO: 2192058 - RNA, 19 nt, Artificial Sequence
  Description of Artificial Sequence: Synthetic oligonucleotide
  Sense strand starting at position 1123 of SEQ ID NO: 1883408
ucgccuauacgguagaaua

SEQ ID NO: 2192059 - RNA, 19 nt, Artificial Sequence
  Description of Artificial Sequence: Synthetic oligonucleotide
  Antisense strand to SEQ ID NO: 2192058
uauucuaccguauaggcga

SEQ ID NO: 2192060 - RNA, 19 nt, Artificial Sequence
  Description of Artificial Sequence: Synthetic oligonucleotide
  Sense strand starting at position 1170 of SEQ ID NO: 1883408
aguaaaguugacugcaaga

SEQ ID NO: 2192061 - RNA, 19 nt, Artificial Sequence
  Description of Artificial Sequence: Synthetic oligonucleotide
  Antisense strand to SEQ ID NO: 2192060
ucuugcagucaacuuuacu

SEQ ID NO: 2192062 - RNA, 19 nt, Artificial Sequence
  Description of Artificial Sequence: Synthetic oligonucleotide
  Sense strand starting at position 1250 of SEQ ID NO: 1883408
cgcccaaggcaugaugaaa

SEQ ID NO: 2192063 - RNA, 19 nt, Artificial Sequence
  Description of Artificial Sequence: Synthetic oligonucleotide
  Antisense strand to SEQ ID NO: 2192062
uuucaucaugccuugggcg

SEQ ID NO: 2192064 - RNA, 19 nt, Artificial Sequence
  Description of Artificial Sequence: Synthetic oligonucleotide
  Sense strand starting at position 1682 of SEQ ID NO: 1883408
gcucuaaacuuaguaaaug

SEQ ID NO: 2192065 - RNA, 19 nt, Artificial Sequence
  Description of Artificial Sequence: Synthetic oligonucleotide
  Antisense strand to SEQ ID NO: 2192064
cauuuacuaaguuuagagc

SEQ ID NO: 2192066 - RNA, 19 nt, Artificial Sequence
  Description of Artificial Sequence: Synthetic oligonucleotide
  Sense strand starting at position 1747 of SEQ ID NO: 1883408
accugagaccuguggcaau

SEQ ID NO: 2192067 - RNA, 19 nt, Artificial Sequence
  Description of Artificial Sequence: Synthetic oligonucleotide
  Antisense strand to SEQ ID NO: 2192066
auugccacaggucucaggu

SEQ ID NO: 2192068 - RNA, 19 nt, Artificial Sequence
  Description of Artificial Sequence: Synthetic oligonucleotide
  Sense strand starting at position 2080 of SEQ ID NO: 1883408
gagggagucaauugagcuu

SEQ ID NO: 2192069 - RNA, 19 nt, Artificial Sequence
  Description of Artificial Sequence: Synthetic oligonucleotide
  Antisense strand to SEQ ID NO: 2192068
aagcucaauugacucccuc

SEQ ID NO: 2192070 - RNA, 19 nt, Artificial Sequence
  Description of Artificial Sequence: Synthetic oligonucleotide
  Sense strand starting at position 2083 of SEQ ID NO: 1883408
ggagucaauugagcuugau

SEQ ID NO: 2192071 - RNA, 19 nt, Artificial Sequence
  Description of Artificial Sequence: Synthetic oligonucleotide
  Antisense strand to SEQ ID NO: 2192070
aucaagcucaauugacucc

SEQ ID NO: 2192072 - RNA, 19 nt, Artificial Sequence
  Description of Artificial Sequence: Synthetic oligonucleotide
  Sense strand starting at position 2086 of SEQ ID NO: 1883408
gucaauugagcuugauagg

SEQ ID NO: 2192073 - RNA, 19 nt, Artificial Sequence
  Description of Artificial Sequence: Synthetic oligonucleotide
  Antisense strand to SEQ ID NO: 2192072
ccuaucaagcucaauugac

SEQ ID NO: 2192074 - RNA, 19 nt, Artificial Sequence
  Description of Artificial Sequence: Synthetic oligonucleotide
  Sense strand starting at position 2087 of SEQ ID NO: 1883408
ucaauugagcuugauaggu

SEQ ID NO: 2192075 - RNA, 19 nt, Artificial Sequence
  Description of Artificial Sequence: Synthetic oligonucleotide
  Antisense strand to SEQ ID NO: 2192074
accuaucaagcucaauuga

SEQ ID NO: 2192076 - RNA, 19 nt, Artificial Sequence
  Description of Artificial Sequence: Synthetic oligonucleotide
  Sense strand starting at position 2091 of SEQ ID NO: 1883408
uugagcuugauagguuaaa

SEQ ID NO: 2192077 - RNA, 19 nt, Artificial Sequence
  Description of Artificial Sequence: Synthetic oligonucleotide
  Antisense strand to SEQ ID NO: 2192076
uuuaaccuaucaagcucaa

SEQ ID NO: 2192078 - RNA, 19 nt, Artificial Sequence
  Description of Artificial Sequence: Synthetic oligonucleotide
  Sense strand starting at position 2145 of SEQ ID NO: 1883408
ucaaguuaacuuuggaucu

SEQ ID NO: 2192079 - RNA, 19 nt, Artificial Sequence
  Description of Artificial Sequence: Synthetic oligonucleotide
  Antisense strand to SEQ ID NO: 2192078
agauccaaaguuaacuuga

SEQ ID NO: 2192080 - RNA, 19 nt, Artificial Sequence
  Description of Artificial Sequence: Synthetic oligonucleotide
  Sense strand starting at position 2198 of SEQ ID NO: 1883408
acauuuauuugaggucaau

SEQ ID NO: 2192081 - RNA, 19 nt, Artificial Sequence
  Description of Artificial Sequence: Synthetic oligonucleotide
  Antisense strand to SEQ ID NO: 2192080
auugaccucaaauaaaugu

SEQ ID NO: 2192082 - RNA, 19 nt, Artificial Sequence
  Description of Artificial Sequence: Synthetic oligonucleotide
  Sense strand starting at position 2210 of SEQ ID NO: 1883408
ggucaauaguuccucuaaa

SEQ ID NO: 2192083 - RNA, 19 nt, Artificial Sequence
  Description of Artificial Sequence: Synthetic oligonucleotide
  Antisense strand to SEQ ID NO: 2192082
uuuagaggaacuauugacc

SEQ ID NO: 2192084 - RNA, 19 nt, Artificial Sequence
  Description of Artificial Sequence: Synthetic oligonucleotide
  Sense strand starting at position 2536 of SEQ ID NO: 1883408
accagaugguaagucagau

SEQ ID NO: 2192085 - RNA, 19 nt, Artificial Sequence
  Description of Artificial Sequence: Synthetic oligonucleotide
  Antisense strand to SEQ ID NO: 2192084
aucugacuuaccaucuggu

SEQ ID NO: 2192086 - RNA, 19 nt, Artificial Sequence
  Description of Artificial Sequence: Synthetic oligonucleotide
  Sense strand starting at position 3126 of SEQ ID NO: 1883408
gugcuugguaaagaugaaa

SEQ ID NO: 2192087 - RNA, 19 nt, Artificial Sequence
  Description of Artificial Sequence: Synthetic oligonucleotide
  Antisense strand to SEQ ID NO: 2192086
uuucaucuuuaccaagcac

SEQ ID NO: 2192088 - RNA, 19 nt, Artificial Sequence
  Description of Artificial Sequence: Synthetic oligonucleotide
  Sense strand starting at position 3233 of SEQ ID NO: 1883408
auguaauauuaguuccacu

SEQ ID NO: 2192089 - RNA, 19 nt, Artificial Sequence
  Description of Artificial Sequence: Synthetic oligonucleotide
  Antisense strand to SEQ ID NO: 2192088
aguggaacuaauauuacau

SEQ ID NO: 2192090 - RNA, 19 nt, Artificial Sequence
  Description of Artificial Sequence: Synthetic oligonucleotide
  Sense strand starting at position 3251 of SEQ ID NO: 1883408
ucacgauaacuccaugcca

SEQ ID NO: 2192091 - RNA, 19 nt, Artificial Sequence
  Description of Artificial Sequence: Synthetic oligonucleotide
  Antisense strand to SEQ ID NO: 2192090
uggcauggaguuaucguga

SEQ ID NO: 2192092 - RNA, 19 nt, Artificial Sequence
  Description of Artificial Sequence: Synthetic oligonucleotide
  Sense strand starting at position 3253 of SEQ ID NO: 1883408
acgauaacuccaugccaga

SEQ ID NO: 2192093 - RNA, 19 nt, Artificial Sequence
  Description of Artificial Sequence: Synthetic oligonucleotide
  Antisense strand to SEQ ID NO: 2192092
ucuggcauggaguuaucgu

SEQ ID NO: 2192094 - RNA, 19 nt, Artificial Sequence
  Description of Artificial Sequence: Synthetic oligonucleotide
  Sense strand starting at position 3461 of SEQ ID NO: 1883408
ccuuuaauacagcagugau

SEQ ID NO: 2192095 - RNA, 19 nt, Artificial Sequence
  Description of Artificial Sequence: Synthetic oligonucleotide
  Antisense strand to SEQ ID NO: 2192094
aucacugcuguauuaaagg

SEQ ID NO: 2192096 - RNA, 19 nt, Artificial Sequence
  Description of Artificial Sequence: Synthetic oligonucleotide
  Sense strand starting at position 3506 of SEQ ID NO: 1883408
aguauaaggcucuaacucu

SEQ ID NO: 2192097 - RNA, 19 nt, Artificial Sequence
  Description of Artificial Sequence: Synthetic oligonucleotide
  Antisense strand to SEQ ID NO: 2192096
agaguuagagccuuauacu

SEQ ID NO: 2192098 - RNA, 19 nt, Artificial Sequence
  Description of Artificial Sequence: Synthetic oligonucleotide
  Sense strand starting at position 3531 of SEQ ID NO: 1883408
ucaagacauguauguaaug

SEQ ID NO: 2192099 - RNA, 19 nt, Artificial Sequence
  Description of Artificial Sequence: Synthetic oligonucleotide
  Antisense strand to SEQ ID NO: 2192098
cauuacauacaugucuuga

SEQ ID NO: 2192100 - RNA, 19 nt, Artificial Sequence
  Description of Artificial Sequence: Synthetic oligonucleotide
  Sense strand starting at position 3538 of SEQ ID NO: 1883408
auguauguaauggaaguuu

SEQ ID NO: 2192101 - RNA, 19 nt, Artificial Sequence
  Description of Artificial Sequence: Synthetic oligonucleotide
  Antisense strand to SEQ ID NO: 2192100
aaacuuccauuacauacau

SEQ ID NO: 2192102 - RNA, 19 nt, Artificial Sequence
  Description of Artificial Sequence: Synthetic oligonucleotide
  Sense strand starting at position 3563 of SEQ ID NO: 1883408
ggaaucaaauuacuguauu

SEQ ID NO: 2192103 - RNA, 19 nt, Artificial Sequence
  Description of Artificial Sequence: Synthetic oligonucleotide
  Antisense strand to SEQ ID NO: 2192102
aauacaguaauuugauucc

SEQ ID NO: 2192104 - RNA, 19 nt, Artificial Sequence
  Description of Artificial Sequence: Synthetic oligonucleotide
  Sense strand starting at position 3576 of SEQ ID NO: 1883408
uguauuaggcaggaucaca

SEQ ID NO: 2192105 - RNA, 19 nt, Artificial Sequence
  Description of Artificial Sequence: Synthetic oligonucleotide
  Antisense strand to SEQ ID NO: 2192104
ugugauccugccuaauaca

SEQ ID NO: 2192106 - RNA, 19 nt, Artificial Sequence
  Description of Artificial Sequence: Synthetic oligonucleotide
  Sense strand starting at position 3614 of SEQ ID NO: 1883408
ugagaaacugcuuggaaac

SEQ ID NO: 2192107 - RNA, 19 nt, Artificial Sequence
  Description of Artificial Sequence: Synthetic oligonucleotide
  Antisense strand to SEQ ID NO: 2192106
guuuccaagcaguuucuca

SEQ ID NO: 2192108 - RNA, 19 nt, Artificial Sequence
  Description of Artificial Sequence: Synthetic oligonucleotide
  Sense strand starting at position 3615 of SEQ ID NO: 1883408
gagaaacugcuuggaaacu

SEQ ID NO: 2192109 - RNA, 19 nt, Artificial Sequence
  Description of Artificial Sequence: Synthetic oligonucleotide
  Antisense strand to SEQ ID NO: 2192108
aguuuccaagcaguuucuc

SEQ ID NO: 2192110 - RNA, 19 nt, Artificial Sequence
  Description of Artificial Sequence: Synthetic oligonucleotide
  Sense strand starting at position 3634 of SEQ ID NO: 1883408
acaguuuaggcagggcaau

SEQ ID NO: 2192111 - RNA, 19 nt, Artificial Sequence
  Description of Artificial Sequence: Synthetic oligonucleotide
  Antisense strand to SEQ ID NO: 2192110
auugcccugccuaaacugu

SEQ ID NO: 2192112 - RNA, 19 nt, Artificial Sequence
  Description of Artificial Sequence: Synthetic oligonucleotide
  Sense strand starting at position 3647 of SEQ ID NO: 1883408
ggcaaugaagcccaggauu

SEQ ID NO: 2192113 - RNA, 19 nt, Artificial Sequence
  Description of Artificial Sequence: Synthetic oligonucleotide
  Antisense strand to SEQ ID NO: 2192112
aauccugggcuucauugcc

SEQ ID NO: 2192114 - RNA, 19 nt, Artificial Sequence
  Description of Artificial Sequence: Synthetic oligonucleotide
  Sense strand starting at position 3887 of SEQ ID NO: 1883408
uagggagaguuacugcaaa

SEQ ID NO: 2192115 - RNA, 19 nt, Artificial Sequence
  Description of Artificial Sequence: Synthetic oligonucleotide
  Antisense strand to SEQ ID NO: 2192114
uuugcaguaacucucccua

SEQ ID NO: 2192116 - RNA, 19 nt, Artificial Sequence
  Description of Artificial Sequence: Synthetic oligonucleotide
  Sense strand starting at position 3929 of SEQ ID NO: 1883408
gucccuauuugaucguaau

SEQ ID NO: 2192117 - RNA, 19 nt, Artificial Sequence
  Description of Artificial Sequence: Synthetic oligonucleotide
  Antisense strand to SEQ ID NO: 2192116
auuacgaucaaauagggac

SEQ ID NO: 2192118 - RNA, 19 nt, Artificial Sequence
  Description of Artificial Sequence: Synthetic oligonucleotide
  Sense strand starting at position 3930 of SEQ ID NO: 1883408
ucccuauuugaucguaauu

SEQ ID NO: 2192119 - RNA, 19 nt, Artificial Sequence
  Description of Artificial Sequence: Synthetic oligonucleotide
  Antisense strand to SEQ ID NO: 2192118
aauuacgaucaaauaggga

SEQ ID NO: 2192120 - RNA, 19 nt, Artificial Sequence
  Description of Artificial Sequence: Synthetic oligonucleotide
  Sense strand starting at position 3947 of SEQ ID NO: 1883408
uuaaaugaagcuugagaau

SEQ ID NO: 2192121 - RNA, 19 nt, Artificial Sequence
  Description of Artificial Sequence: Synthetic oligonucleotide
  Antisense strand to SEQ ID NO: 2192120
auucucaagcuucauuuaa

SEQ ID NO: 2192122 - RNA, 19 nt, Artificial Sequence
  Description of Artificial Sequence: Synthetic oligonucleotide
  Sense strand starting at position 3 of SEQ ID NO: 1883410
auggcauguccucaauaca

SEQ ID NO: 2192123 - RNA, 19 nt, Artificial Sequence
  Description of Artificial Sequence: Synthetic oligonucleotide
  Antisense strand to SEQ ID NO: 2192122
uguauugaggacaugccau

SEQ ID NO: 2192124 - RNA, 19 nt, Artificial Sequence
  Description of Artificial Sequence: Synthetic oligonucleotide
  Sense strand starting at position 276 of SEQ ID NO: 1883410
uucccuguaguggaaauaa

SEQ ID NO: 2192125 - RNA, 19 nt, Artificial Sequence
  Description of Artificial Sequence: Synthetic oligonucleotide
  Antisense strand to SEQ ID NO: 2192124
uuauuuccacuacagggaa

SEQ ID NO: 2192126 - RNA, 19 nt, Artificial Sequence
  Description of Artificial Sequence: Synthetic oligonucleotide
  Sense strand starting at position 416 of SEQ ID NO: 1883410
gcucauaaugaagguaauu

SEQ ID NO: 2192127 - RNA, 19 nt, Artificial Sequence
  Description of Artificial Sequence: Synthetic oligonucleotide
  Antisense strand to SEQ ID NO: 2192126
aauuaccuucauuaugagc

SEQ ID NO: 2192128 - RNA, 19 nt, Artificial Sequence
  Description of Artificial Sequence: Synthetic oligonucleotide
  Sense strand starting at position 425 of SEQ ID NO: 1883410
gaagguaauucuuugaguc

SEQ ID NO: 2192129 - RNA, 19 nt, Artificial Sequence
  Description of Artificial Sequence: Synthetic oligonucleotide
  Antisense strand to SEQ ID NO: 2192128
gacucaaagaauuaccuuc

SEQ ID NO: 2192130 - RNA, 19 nt, Artificial Sequence
  Description of Artificial Sequence: Synthetic oligonucleotide
  Sense strand starting at position 467 of SEQ ID NO: 1883410
ggaagacagucuuugaauc

SEQ ID NO: 2192131 - RNA, 19 nt, Artificial Sequence
  Description of Artificial Sequence: Synthetic oligonucleotide
  Antisense strand to SEQ ID NO: 2192130
gauucaaagacugucuucc

SEQ ID NO: 2192132 - RNA, 19 nt, Artificial Sequence
  Description of Artificial Sequence: Synthetic oligonucleotide
  Sense strand starting at position 468 of SEQ ID NO: 1883410
gaagacagucuuugaaucu

SEQ ID NO: 2192133 - RNA, 19 nt, Artificial Sequence
  Description of Artificial Sequence: Synthetic oligonucleotide
  Antisense strand to SEQ ID NO: 2192132
agauucaaagacugucuuc

SEQ ID NO: 2192134 - RNA, 19 nt, Artificial Sequence
  Description of Artificial Sequence: Synthetic oligonucleotide
  Sense strand starting at position 477 of SEQ ID NO: 1883410
cuuugaaucuaagcagaag

SEQ ID NO: 2192135 - RNA, 19 nt, Artificial Sequence
  Description of Artificial Sequence: Synthetic oligonucleotide
  Antisense strand to SEQ ID NO: 2192134
cuucugcuuagauucaaag

SEQ ID NO: 2192136 - RNA, 19 nt, Artificial Sequence
  Description of Artificial Sequence: Synthetic oligonucleotide
  Sense strand starting at position 489 of SEQ ID NO: 1883410
gcagaagagggucaguguu

SEQ ID NO: 2192137 - RNA, 19 nt, Artificial Sequence
  Description of Artificial Sequence: Synthetic oligonucleotide
  Antisense strand to SEQ ID NO: 2192136
aacacugacccucuucugc

SEQ ID NO: 2192138 - RNA, 19 nt, Artificial Sequence
  Description of Artificial Sequence: Synthetic oligonucleotide
  Sense strand starting at position 491 of SEQ ID NO: 1883410
agaagagggucaguguuua

SEQ ID NO: 2192139 - RNA, 19 nt, Artificial Sequence
  Description of Artificial Sequence: Synthetic oligonucleotide
  Antisense strand to SEQ ID NO: 2192138
uaaacacugacccucuucu

SEQ ID NO: 2192140 - RNA, 19 nt, Artificial Sequence
  Description of Artificial Sequence: Synthetic oligonucleotide
  Sense strand starting at position 501 of SEQ ID NO: 1883410
caguguuuagguggagaaa

SEQ ID NO: 2192141 - RNA, 19 nt, Artificial Sequence
  Description of Artificial Sequence: Synthetic oligonucleotide
  Antisense strand to SEQ ID NO: 2192140
uuucuccaccuaaacacug

SEQ ID NO: 2192142 - RNA, 19 nt, Artificial Sequence
  Description of Artificial Sequence: Synthetic oligonucleotide
  Sense strand starting at position 585 of SEQ ID NO: 1883410
uguguucucccagaugaua

SEQ ID NO: 2192143 - RNA, 19 nt, Artificial Sequence
  Description of Artificial Sequence: Synthetic oligonucleotide
  Antisense strand to SEQ ID NO: 2192142
uaucaucugggagaacaca

SEQ ID NO: 2192144 - RNA, 19 nt, Artificial Sequence
  Description of Artificial Sequence: Synthetic oligonucleotide
  Sense strand starting at position 593 of SEQ ID NO: 1883410
cccagaugauagucagaug

SEQ ID NO: 2192145 - RNA, 19 nt, Artificial Sequence
  Description of Artificial Sequence: Synthetic oligonucleotide
  Antisense strand to SEQ ID NO: 2192144
caucugacuaucaucuggg

SEQ ID NO: 2192146 - RNA, 19 nt, Artificial Sequence
  Description of Artificial Sequence: Synthetic oligonucleotide
  Sense strand starting at position 680 of SEQ ID NO: 1883410
caugacacauuagugagau

SEQ ID NO: 2192147 - RNA, 19 nt, Artificial Sequence
  Description of Artificial Sequence: Synthetic oligonucleotide
  Antisense strand to SEQ ID NO: 2192146
aucucacuaaugugucaug

SEQ ID NO: 2192148 - RNA, 19 nt, Artificial Sequence
  Description of Artificial Sequence: Synthetic oligonucleotide
  Sense strand starting at position 816 of SEQ ID NO: 1883410
acaucaauucugugauacg

SEQ ID NO: 2192149 - RNA, 19 nt, Artificial Sequence
  Description of Artificial Sequence: Synthetic oligonucleotide
  Antisense strand to SEQ ID NO: 2192148
cguaucacagaauugaugu

SEQ ID NO: 2192150 - RNA, 19 nt, Artificial Sequence
  Description of Artificial Sequence: Synthetic oligonucleotide
  Sense strand starting at position 825 of SEQ ID NO: 1883410
cugugauacgguuaagaua

SEQ ID NO: 2192151 - RNA, 19 nt, Artificial Sequence
  Description of Artificial Sequence: Synthetic oligonucleotide
  Antisense strand to SEQ ID NO: 2192150
uaucuuaaccguaucacag

SEQ ID NO: 2192152 - RNA, 19 nt, Artificial Sequence
  Description of Artificial Sequence: Synthetic oligonucleotide
  Sense strand starting at position 864 of SEQ ID NO: 1883410
aaucgaguaccagaguuga

SEQ ID NO: 2192153 - RNA, 19 nt, Artificial Sequence
  Description of Artificial Sequence: Synthetic oligonucleotide
  Antisense strand to SEQ ID NO: 2192152
ucaacucugguacucgauu

SEQ ID NO: 2192154 - RNA, 19 nt, Artificial Sequence
  Description of Artificial Sequence: Synthetic oligonucleotide
  Sense strand starting at position 1869 of SEQ ID NO: 1883410
gucugaauauacguaauau

SEQ ID NO: 2192155 - RNA, 19 nt, Artificial Sequence
  Description of Artificial Sequence: Synthetic oligonucleotide
  Antisense strand to SEQ ID NO: 2192154
auauuacguauauucagac

SEQ ID NO: 2192156 - RNA, 19 nt, Artificial Sequence
  Description of Artificial Sequence: Synthetic oligonucleotide
  Sense strand starting at position 2013 of SEQ ID NO: 1883410
agucacagucuugaugagu

SEQ ID NO: 2192157 - RNA, 19 nt, Artificial Sequence
  Description of Artificial Sequence: Synthetic oligonucleotide
  Antisense strand to SEQ ID NO: 2192156
acucaucaagacugugacu

SEQ ID NO: 2192158 - RNA, 19 nt, Artificial Sequence
  Description of Artificial Sequence: Synthetic oligonucleotide
  Sense strand starting at position 2021 of SEQ ID NO: 1883410
ucuugaugaguuugugaca

SEQ ID NO: 2192159 - RNA, 19 nt, Artificial Sequence
  Description of Artificial Sequence: Synthetic oligonucleotide
  Antisense strand to SEQ ID NO: 2192158
ugucacaaacucaucaaga

SEQ ID NO: 2192160 - RNA, 19 nt, Artificial Sequence
  Description of Artificial Sequence: Synthetic oligonucleotide
  Sense strand starting at position 2022 of SEQ ID NO: 1883410
cuugaugaguuugugacau

SEQ ID NO: 2192161 - RNA, 19 nt, Artificial Sequence
  Description of Artificial Sequence: Synthetic oligonucleotide
  Antisense strand to SEQ ID NO: 2192160
augucacaaacucaucaag

SEQ ID NO: 2192162 - RNA, 19 nt, Artificial Sequence
  Description of Artificial Sequence: Synthetic oligonucleotide
  Sense strand starting at position 2095 of SEQ ID NO: 1883410
agucaucaaucaguuugau

SEQ ID NO: 2192163 - RNA, 19 nt, Artificial Sequence
  Description of Artificial Sequence: Synthetic oligonucleotide
  Antisense strand to SEQ ID NO: 2192162
aucaaacugauugaugacu

SEQ ID NO: 2192164 - RNA, 19 nt, Artificial Sequence
  Description of Artificial Sequence: Synthetic oligonucleotide
  Sense strand starting at position 2101 of SEQ ID NO: 1883410
caaucaguuugauugauga

SEQ ID NO: 2192165 - RNA, 19 nt, Artificial Sequence
  Description of Artificial Sequence: Synthetic oligonucleotide
  Antisense strand to SEQ ID NO: 2192164
ucaucaaucaaacugauug

SEQ ID NO: 2192166 - RNA, 19 nt, Artificial Sequence
  Description of Artificial Sequence: Synthetic oligonucleotide
  Sense strand starting at position 2111 of SEQ ID NO: 1883410
gauugaugacucugcuaug

SEQ ID NO: 2192167 - RNA, 19 nt, Artificial Sequence
  Description of Artificial Sequence: Synthetic oligonucleotide
  Antisense strand to SEQ ID NO: 2192166
cauagcagagucaucaauc

SEQ ID NO: 2192168 - RNA, 19 nt, Artificial Sequence
  Description of Artificial Sequence: Synthetic oligonucleotide
  Sense strand starting at position 2562 of SEQ ID NO: 1883410
uuaucaugacagugaguua

SEQ ID NO: 2192169 - RNA, 19 nt, Artificial Sequence
  Description of Artificial Sequence: Synthetic oligonucleotide
  Antisense strand to SEQ ID NO: 2192168
uaacucacugucaugauaa

SEQ ID NO: 2192170 - RNA, 19 nt, Artificial Sequence
  Description of Artificial Sequence: Synthetic oligonucleotide
  Sense strand starting at position 2565 of SEQ ID NO: 1883410
ucaugacagugaguuaucu

SEQ ID NO: 2192171 - RNA, 19 nt, Artificial Sequence
  Description of Artificial Sequence: Synthetic oligonucleotide
  Antisense strand to SEQ ID NO: 2192170
agauaacucacugucauga

SEQ ID NO: 2192172 - RNA, 19 nt, Artificial Sequence
  Description of Artificial Sequence: Synthetic oligonucleotide
  Sense strand starting at position 2575 of SEQ ID NO: 1883410
gaguuaucucgagaucuga

SEQ ID NO: 2192173 - RNA, 19 nt, Artificial Sequence
  Description of Artificial Sequence: Synthetic oligonucleotide
  Antisense strand to SEQ ID NO: 2192172
ucagaucucgagauaacuc

SEQ ID NO: 2192174 - RNA, 19 nt, Artificial Sequence
  Description of Artificial Sequence: Synthetic oligonucleotide
  Sense strand starting at position 2861 of SEQ ID NO: 1883410
gaggaugaggauugcuuga

SEQ ID NO: 2192175 - RNA, 19 nt, Artificial Sequence
  Description of Artificial Sequence: Synthetic oligonucleotide
  Antisense strand to SEQ ID NO: 2192174
ucaagcaauccucauccuc

SEQ ID NO: 2192176 - RNA, 19 nt, Artificial Sequence
  Description of Artificial Sequence: Synthetic oligonucleotide
  Sense strand starting at position 3088 of SEQ ID NO: 1883410
agugcuauuuagcuaauau

SEQ ID NO: 2192177 - RNA, 19 nt, Artificial Sequence
  Description of Artificial Sequence: Synthetic oligonucleotide
  Antisense strand to SEQ ID NO: 2192176
auauuagcuaaauagcacu

SEQ ID NO: 2192178 - RNA, 19 nt, Artificial Sequence
  Description of Artificial Sequence: Synthetic oligonucleotide
  Sense strand starting at position 3142 of SEQ ID NO: 1883410
gccuguaauguccaaagaa

SEQ ID NO: 2192179 - RNA, 19 nt, Artificial Sequence
  Description of Artificial Sequence: Synthetic oligonucleotide
  Antisense strand to SEQ ID NO: 2192178
uucuuuggacauuacaggc

SEQ ID NO: 2192180 - RNA, 19 nt, Artificial Sequence
  Description of Artificial Sequence: Synthetic oligonucleotide
  Sense strand starting at position 3190 of SEQ ID NO: 1883410
gggagcaaaggucgagauu

SEQ ID NO: 2192181 - RNA, 19 nt, Artificial Sequence
  Description of Artificial Sequence: Synthetic oligonucleotide
  Antisense strand to SEQ ID NO: 2192180
aaucucgaccuuugcuccc

SEQ ID NO: 2192182 - RNA, 19 nt, Artificial Sequence
  Description of Artificial Sequence: Synthetic oligonucleotide
  Sense strand starting at position 3196 of SEQ ID NO: 1883410
aaaggucgagauugugaca

SEQ ID NO: 2192183 - RNA, 19 nt, Artificial Sequence
  Description of Artificial Sequence: Synthetic oligonucleotide
  Antisense strand to SEQ ID NO: 2192182
ugucacaaucucgaccuuu

SEQ ID NO: 2192184 - RNA, 19 nt, Artificial Sequence
  Description of Artificial Sequence: Synthetic oligonucleotide
  Sense strand starting at position 3227 of SEQ ID NO: 1883410
uggcuugugaagggacaua

SEQ ID NO: 2192185 - RNA, 19 nt, Artificial Sequence
  Description of Artificial Sequence: Synthetic oligonucleotide
  Antisense strand to SEQ ID NO: 2192184
uaugucccuucacaagcca

SEQ ID NO: 2192186 - RNA, 19 nt, Artificial Sequence
  Description of Artificial Sequence: Synthetic oligonucleotide
  Sense strand starting at position 3342 of SEQ ID NO: 1883410
cugucaugaucuuccugga

SEQ ID NO: 2192187 - RNA, 19 nt, Artificial Sequence
  Description of Artificial Sequence: Synthetic oligonucleotide
  Antisense strand to SEQ ID NO: 2192186
uccaggaagaucaugacag

SEQ ID NO: 2192188 - RNA, 19 nt, Artificial Sequence
  Description of Artificial Sequence: Synthetic oligonucleotide
  Sense strand starting at position 3401 of SEQ ID NO: 1883410
auguaagucccugaagcaa

SEQ ID NO: 2192189 - RNA, 19 nt, Artificial Sequence
  Description of Artificial Sequence: Synthetic oligonucleotide
  Antisense strand to SEQ ID NO: 2192188
uugcuucagggacuuacau

SEQ ID NO: 2192190 - RNA, 19 nt, Artificial Sequence
  Description of Artificial Sequence: Synthetic oligonucleotide
  Sense strand starting at position 3447 of SEQ ID NO: 1883410
ccucauuccucaguacaga

SEQ ID NO: 2192191 - RNA, 19 nt, Artificial Sequence
  Description of Artificial Sequence: Synthetic oligonucleotide
  Antisense strand to SEQ ID NO: 2192190
ucuguacugaggaaugagg

SEQ ID NO: 2192192 - RNA, 19 nt, Artificial Sequence
  Description of Artificial Sequence: Synthetic oligonucleotide
  Sense strand starting at position 3599 of SEQ ID NO: 1883410
uggagauggaucugugaau

SEQ ID NO: 2192193 - RNA, 19 nt, Artificial Sequence
  Description of Artificial Sequence: Synthetic oligonucleotide
  Antisense strand to SEQ ID NO: 2192192
auucacagauccaucucca

SEQ ID NO: 2192194 - RNA, 19 nt, Artificial Sequence
  Description of Artificial Sequence: Synthetic oligonucleotide
  Sense strand starting at position 3669 of SEQ ID NO: 1883410
uuagguauuugguugccaa

SEQ ID NO: 2192195 - RNA, 19 nt, Artificial Sequence
  Description of Artificial Sequence: Synthetic oligonucleotide
  Antisense strand to SEQ ID NO: 2192194
uuggcaaccaaauaccuaa

SEQ ID NO: 2192196 - RNA, 19 nt, Artificial Sequence
  Description of Artificial Sequence: Synthetic oligonucleotide
  Sense strand starting at position 3670 of SEQ ID NO: 1883410
uagguauuugguugccaau

SEQ ID NO: 2192197 - RNA, 19 nt, Artificial Sequence
  Description of Artificial Sequence: Synthetic oligonucleotide
  Antisense strand to SEQ ID NO: 2192196
auuggcaaccaaauaccua

SEQ ID NO: 2192198 - RNA, 19 nt, Artificial Sequence
  Description of Artificial Sequence: Synthetic oligonucleotide
  Sense strand starting at position 3672 of SEQ ID NO: 1883410
gguauuugguugccaauua

SEQ ID NO: 2192199 - RNA, 19 nt, Artificial Sequence
  Description of Artificial Sequence: Synthetic oligonucleotide
  Antisense strand to SEQ ID NO: 2192198
uaauuggcaaccaaauacc

SEQ ID NO: 2192200 - RNA, 19 nt, Artificial Sequence
  Description of Artificial Sequence: Synthetic oligonucleotide
  Sense strand starting at position 3680 of SEQ ID NO: 1883410
guugccaauuaaguauaaa

SEQ ID NO: 2192201 - RNA, 19 nt, Artificial Sequence
  Description of Artificial Sequence: Synthetic oligonucleotide
  Antisense strand to SEQ ID NO: 2192200
uuuauacuuaauuggcaac

SEQ ID NO: 2192202 - RNA, 19 nt, Artificial Sequence
  Description of Artificial Sequence: Synthetic oligonucleotide
  Sense strand starting at position 51 of SEQ ID NO: 1883411
uguaucucagguuagagau

SEQ ID NO: 2192203 - RNA, 19 nt, Artificial Sequence
  Description of Artificial Sequence: Synthetic oligonucleotide
  Antisense strand to SEQ ID NO: 2192202
aucucuaaccugagauaca

SEQ ID NO: 2192204 - RNA, 19 nt, Artificial Sequence
  Description of Artificial Sequence: Synthetic oligonucleotide
  Sense strand starting at position 268 of SEQ ID NO: 1883411
augauuuacuuggaacuau

SEQ ID NO: 2192205 - RNA, 19 nt, Artificial Sequence
  Description of Artificial Sequence: Synthetic oligonucleotide
  Antisense strand to SEQ ID NO: 2192204
auaguuccaaguaaaucau

SEQ ID NO: 2192206 - RNA, 19 nt, Artificial Sequence
  Description of Artificial Sequence: Synthetic oligonucleotide
  Sense strand starting at position 358 of SEQ ID NO: 1883411
accagugauuuggaaguuu

SEQ ID NO: 2192207 - RNA, 19 nt, Artificial Sequence
  Description of Artificial Sequence: Synthetic oligonucleotide
  Antisense strand to SEQ ID NO: 2192206
aaacuuccaaaucacuggu

SEQ ID NO: 2192208 - RNA, 19 nt, Artificial Sequence
  Description of Artificial Sequence: Synthetic oligonucleotide
  Sense strand starting at position 366 of SEQ ID NO: 1883411
uuuggaaguuucuuuacag

SEQ ID NO: 2192209 - RNA, 19 nt, Artificial Sequence
  Description of Artificial Sequence: Synthetic oligonucleotide
  Antisense strand to SEQ ID NO: 2192208
cuguaaagaaacuuccaaa

SEQ ID NO: 2192210 - RNA, 19 nt, Artificial Sequence
  Description of Artificial Sequence: Synthetic oligonucleotide
  Sense strand starting at position 367 of SEQ ID NO: 1883411
uuggaaguuucuuuacagu

SEQ ID NO: 2192211 - RNA, 19 nt, Artificial Sequence
  Description of Artificial Sequence: Synthetic oligonucleotide
  Antisense strand to SEQ ID NO: 2192210
acuguaaagaaacuuccaa

SEQ ID NO: 2192212 - RNA, 19 nt, Artificial Sequence
  Description of Artificial Sequence: Synthetic oligonucleotide
  Sense strand starting at position 378 of SEQ ID NO: 1883411
uuuacaguaucaguaguaa

SEQ ID NO: 2192213 - RNA, 19 nt, Artificial Sequence
  Description of Artificial Sequence: Synthetic oligonucleotide
  Antisense strand to SEQ ID NO: 2192212
uuacuacugauacuguaaa

SEQ ID NO: 2192214 - RNA, 19 nt, Artificial Sequence
  Description of Artificial Sequence: Synthetic oligonucleotide
  Sense strand starting at position 528 of SEQ ID NO: 1883411
uuagguuuagcuuaagaac

SEQ ID NO: 2192215 - RNA, 19 nt, Artificial Sequence
  Description of Artificial Sequence: Synthetic oligonucleotide
  Antisense strand to SEQ ID NO: 2192214
guucuuaagcuaaaccuaa

SEQ ID NO: 2192216 - RNA, 19 nt, Artificial Sequence
  Description of Artificial Sequence: Synthetic oligonucleotide
  Sense strand starting at position 545 of SEQ ID NO: 1883411
acaugcguauuuguaucua

SEQ ID NO: 2192217 - RNA, 19 nt, Artificial Sequence
  Description of Artificial Sequence: Synthetic oligonucleotide
  Antisense strand to SEQ ID NO: 2192216
uagauacaaauacgcaugu

SEQ ID NO: 2192218 - RNA, 19 nt, Artificial Sequence
  Description of Artificial Sequence: Synthetic oligonucleotide
  Sense strand starting at position 549 of SEQ ID NO: 1883411
gcguauuuguaucuacaau

SEQ ID NO: 2192219 - RNA, 19 nt, Artificial Sequence
  Description of Artificial Sequence: Synthetic oligonucleotide
  Antisense strand to SEQ ID NO: 2192218
auuguagauacaaauacgc

SEQ ID NO: 2192220 - RNA, 19 nt, Artificial Sequence
  Description of Artificial Sequence: Synthetic oligonucleotide
  Sense strand starting at position 835 of SEQ ID NO: 1883411
gggaaaguucuugguugau

SEQ ID NO: 2192221 - RNA, 19 nt, Artificial Sequence
  Description of Artificial Sequence: Synthetic oligonucleotide
  Antisense strand to SEQ ID NO: 2192220
aucaaccaagaacuuuccc

SEQ ID NO: 2192222 - RNA, 19 nt, Artificial Sequence
  Description of Artificial Sequence: Synthetic oligonucleotide
  Sense strand starting at position 837 of SEQ ID NO: 1883411
gaaaguucuugguugauau

SEQ ID NO: 2192223 - RNA, 19 nt, Artificial Sequence
  Description of Artificial Sequence: Synthetic oligonucleotide
  Antisense strand to SEQ ID NO: 2192222
auaucaaccaagaacuuuc

SEQ ID NO: 2192224 - RNA, 19 nt, Artificial Sequence
  Description of Artificial Sequence: Synthetic oligonucleotide
  Sense strand starting at position 838 of SEQ ID NO: 1883411
aaaguucuugguugauaua

SEQ ID NO: 2192225 - RNA, 19 nt, Artificial Sequence
  Description of Artificial Sequence: Synthetic oligonucleotide
  Antisense strand to SEQ ID NO: 2192224
uauaucaaccaagaacuuu

SEQ ID NO: 2192226 - RNA, 19 nt, Artificial Sequence
  Description of Artificial Sequence: Synthetic oligonucleotide
  Sense strand starting at position 877 of SEQ ID NO: 1883411
cuaagaaugucuuccaguu

SEQ ID NO: 2192227 - RNA, 19 nt, Artificial Sequence
  Description of Artificial Sequence: Synthetic oligonucleotide
  Antisense strand to SEQ ID NO: 2192226
aacuggaagacauucuuag

SEQ ID NO: 2192228 - RNA, 19 nt, Artificial Sequence
  Description of Artificial Sequence: Synthetic oligonucleotide
  Sense strand starting at position 890 of SEQ ID NO: 1883411
ccaguuuccuuuguaaaga

SEQ ID NO: 2192229 - RNA, 19 nt, Artificial Sequence
  Description of Artificial Sequence: Synthetic oligonucleotide
  Antisense strand to SEQ ID NO: 2192228
ucuuuacaaaggaaacugg

SEQ ID NO: 2192230 - RNA, 19 nt, Artificial Sequence
  Description of Artificial Sequence: Synthetic oligonucleotide
  Sense strand starting at position 909 of SEQ ID NO: 1883411
aaugauaacuuggcagagu

SEQ ID NO: 2192231 - RNA, 19 nt, Artificial Sequence
  Description of Artificial Sequence: Synthetic oligonucleotide
  Antisense strand to SEQ ID NO: 2192230
acucugccaaguuaucauu

SEQ ID NO: 2192232 - RNA, 19 nt, Artificial Sequence
  Description of Artificial Sequence: Synthetic oligonucleotide
  Sense strand starting at position 917 of SEQ ID NO: 1883411
cuuggcagaguauauaauu

SEQ ID NO: 2192233 - RNA, 19 nt, Artificial Sequence
  Description of Artificial Sequence: Synthetic oligonucleotide
  Antisense strand to SEQ ID NO: 2192232
aauuauauacucugccaag

SEQ ID NO: 2192234 - RNA, 19 nt, Artificial Sequence
  Description of Artificial Sequence: Synthetic oligonucleotide
  Sense strand starting at position 965 of SEQ ID NO: 1883411
ucuagauauuguuccacug

SEQ ID NO: 2192235 - RNA, 19 nt, Artificial Sequence
  Description of Artificial Sequence: Synthetic oligonucleotide
  Antisense strand to SEQ ID NO: 2192234
caguggaacaauaucuaga

SEQ ID NO: 2192236 - RNA, 19 nt, Artificial Sequence
  Description of Artificial Sequence: Synthetic oligonucleotide
  Sense strand starting at position 992 of SEQ ID NO: 1883411
cauuuagaauugcaggaga

SEQ ID NO: 2192237 - RNA, 19 nt, Artificial Sequence
  Description of Artificial Sequence: Synthetic oligonucleotide
  Antisense strand to SEQ ID NO: 2192236
ucuccugcaauucuaaaug

SEQ ID NO: 2192238 - RNA, 19 nt, Artificial Sequence
  Description of Artificial Sequence: Synthetic oligonucleotide
  Sense strand starting at position 1062 of SEQ ID NO: 1883411
cugacuggaugcuuguaaa

SEQ ID NO: 2192239 - RNA, 19 nt, Artificial Sequence
  Description of Artificial Sequence: Synthetic oligonucleotide
  Antisense strand to SEQ ID NO: 2192238
uuuacaagcauccagucag

SEQ ID NO: 2192240 - RNA, 19 nt, Artificial Sequence
  Description of Artificial Sequence: Synthetic oligonucleotide
  Sense strand starting at position 1103 of SEQ ID NO: 1883411
aaacgucacccggauaugu

SEQ ID NO: 2192241 - RNA, 19 nt, Artificial Sequence
  Description of Artificial Sequence: Synthetic oligonucleotide
  Antisense strand to SEQ ID NO: 2192240
acauauccgggugacguuu

SEQ ID NO: 2192242 - RNA, 19 nt, Artificial Sequence
  Description of Artificial Sequence: Synthetic oligonucleotide
  Sense strand starting at position 1113 of SEQ ID NO: 1883411
cggauaugucuagaugcug

SEQ ID NO: 2192243 - RNA, 19 nt, Artificial Sequence
  Description of Artificial Sequence: Synthetic oligonucleotide
  Antisense strand to SEQ ID NO: 2192242
cagcaucuagacauauccg

SEQ ID NO: 2192244 - RNA, 19 nt, Artificial Sequence
  Description of Artificial Sequence: Synthetic oligonucleotide
  Sense strand starting at position 1148 of SEQ ID NO: 1883411
cuuuaaagguauccuauga

SEQ ID NO: 2192245 - RNA, 19 nt, Artificial Sequence
  Description of Artificial Sequence: Synthetic oligonucleotide
  Antisense strand to SEQ ID NO: 2192244
ucauaggauaccuuuaaag

SEQ ID NO: 2192246 - RNA, 19 nt, Artificial Sequence
  Description of Artificial Sequence: Synthetic oligonucleotide
  Sense strand starting at position 1152 of SEQ ID NO: 1883411
aaagguauccuaugagccu

SEQ ID NO: 2192247 - RNA, 19 nt, Artificial Sequence
  Description of Artificial Sequence: Synthetic oligonucleotide
  Antisense strand to SEQ ID NO: 2192246
aggcucauaggauaccuuu

SEQ ID NO: 2192248 - RNA, 19 nt, Artificial Sequence
  Description of Artificial Sequence: Synthetic oligonucleotide
  Sense strand starting at position 1217 of SEQ ID NO: 1883411
ucaaguagauccuuuauug

SEQ ID NO: 2192249 - RNA, 19 nt, Artificial Sequence
  Description of Artificial Sequence: Synthetic oligonucleotide
  Antisense strand to SEQ ID NO: 2192248
caauaaaggaucuacuuga

SEQ ID NO: 2192250 - RNA, 19 nt, Artificial Sequence
  Description of Artificial Sequence: Synthetic oligonucleotide
  Sense strand starting at position 1273 of SEQ ID NO: 1883411
uccuauuaugcauagauug

SEQ ID NO: 2192251 - RNA, 19 nt, Artificial Sequence
  Description of Artificial Sequence: Synthetic oligonucleotide
  Antisense strand to SEQ ID NO: 2192250
caaucuaugcauaauagga

SEQ ID NO: 2192252 - RNA, 19 nt, Artificial Sequence
  Description of Artificial Sequence: Synthetic oligonucleotide
  Sense strand starting at position 1362 of SEQ ID NO: 1883411
cugugacaauuugucguuu

SEQ ID NO: 2192253 - RNA, 19 nt, Artificial Sequence
  Description of Artificial Sequence: Synthetic oligonucleotide
  Antisense strand to SEQ ID NO: 2192252
aaacgacaaauugucacag

SEQ ID NO: 2192254 - RNA, 19 nt, Artificial Sequence
  Description of Artificial Sequence: Synthetic oligonucleotide
  Sense strand starting at position 1678 of SEQ ID NO: 1883411
gcccaaagauucccauuga

SEQ ID NO: 2192255 - RNA, 19 nt, Artificial Sequence
  Description of Artificial Sequence: Synthetic oligonucleotide
  Antisense strand to SEQ ID NO: 2192254
ucaaugggaaucuuugggc

SEQ ID NO: 2192256 - RNA, 19 nt, Artificial Sequence
  Description of Artificial Sequence: Synthetic oligonucleotide
  Sense strand starting at position 1688 of SEQ ID NO: 1883411
ucccauugauaauuaucga

SEQ ID NO: 2192257 - RNA, 19 nt, Artificial Sequence
  Description of Artificial Sequence: Synthetic oligonucleotide
  Antisense strand to SEQ ID NO: 2192256
ucgauaauuaucaauggga

SEQ ID NO: 2192258 - RNA, 19 nt, Artificial Sequence
  Description of Artificial Sequence: Synthetic oligonucleotide
  Sense strand starting at position 1701 of SEQ ID NO: 1883411
uaucgacggcuuuauuaaa

SEQ ID NO: 2192259 - RNA, 19 nt, Artificial Sequence
  Description of Artificial Sequence: Synthetic oligonucleotide
  Antisense strand to SEQ ID NO: 2192258
uuuaauaaagccgucgaua

SEQ ID NO: 2192260 - RNA, 19 nt, Artificial Sequence
  Description of Artificial Sequence: Synthetic oligonucleotide
  Sense strand starting at position 2353 of SEQ ID NO: 1883411
aucucaaggcgugacuuau

SEQ ID NO: 2192261 - RNA, 19 nt, Artificial Sequence
  Description of Artificial Sequence: Synthetic oligonucleotide
  Antisense strand to SEQ ID NO: 2192260
auaagucacgccuugagau

SEQ ID NO: 2192262 - RNA, 19 nt, Artificial Sequence
  Description of Artificial Sequence: Synthetic oligonucleotide
  Sense strand starting at position 2592 of SEQ ID NO: 1883411
cccaguuaccgauacuugu

SEQ ID NO: 2192263 - RNA, 19 nt, Artificial Sequence
  Description of Artificial Sequence: Synthetic oligonucleotide
  Antisense strand to SEQ ID NO: 2192262
acaaguaucgguaacuggg

SEQ ID NO: 2192264 - RNA, 19 nt, Artificial Sequence
  Description of Artificial Sequence: Synthetic oligonucleotide
  Sense strand starting at position 2599 of SEQ ID NO: 1883411
accgauacuugucccuaau

SEQ ID NO: 2192265 - RNA, 19 nt, Artificial Sequence
  Description of Artificial Sequence: Synthetic oligonucleotide
  Antisense strand to SEQ ID NO: 2192264
auuagggacaaguaucggu

SEQ ID NO: 2192266 - RNA, 19 nt, Artificial Sequence
  Description of Artificial Sequence: Synthetic oligonucleotide
  Sense strand starting at position 2609 of SEQ ID NO: 1883411
gucccuaauggguguauuu

SEQ ID NO: 2192267 - RNA, 19 nt, Artificial Sequence
  Description of Artificial Sequence: Synthetic oligonucleotide
  Antisense strand to SEQ ID NO: 2192266
aaauacacccauuagggac

SEQ ID NO: 2192268 - RNA, 19 nt, Artificial Sequence
  Description of Artificial Sequence: Synthetic oligonucleotide
  Sense strand starting at position 2779 of SEQ ID NO: 1883411
cagcuuuaucugggaucuu

SEQ ID NO: 2192269 - RNA, 19 nt, Artificial Sequence
  Description of Artificial Sequence: Synthetic oligonucleotide
  Antisense strand to SEQ ID NO: 2192268
aagaucccagauaaagcug

SEQ ID NO: 2192270 - RNA, 19 nt, Artificial Sequence
  Description of Artificial Sequence: Synthetic oligonucleotide
  Sense strand starting at position 3114 of SEQ ID NO: 1883411
auguuugucguugccuaca

SEQ ID NO: 2192271 - RNA, 19 nt, Artificial Sequence
  Description of Artificial Sequence: Synthetic oligonucleotide
  Antisense strand to SEQ ID NO: 2192270
uguaggcaacgacaaacau

SEQ ID NO: 2192272 - RNA, 19 nt, Artificial Sequence
  Description of Artificial Sequence: Synthetic oligonucleotide
  Sense strand starting at position 3196 of SEQ ID NO: 1883411
cggugucucgcuuugcaaa

SEQ ID NO: 2192273 - RNA, 19 nt, Artificial Sequence
  Description of Artificial Sequence: Synthetic oligonucleotide
  Antisense strand to SEQ ID NO: 2192272
uuugcaaagcgagacaccg

SEQ ID NO: 2192274 - RNA, 19 nt, Artificial Sequence
  Description of Artificial Sequence: Synthetic oligonucleotide
  Sense strand starting at position 3701 of SEQ ID NO: 1883411
gggauuguaaccugagcaa

SEQ ID NO: 2192275 - RNA, 19 nt, Artificial Sequence
  Description of Artificial Sequence: Synthetic oligonucleotide
  Antisense strand to SEQ ID NO: 2192274
uugcucagguuacaauccc

SEQ ID NO: 2192276 - RNA, 19 nt, Artificial Sequence
  Description of Artificial Sequence: Synthetic oligonucleotide
  Sense strand starting at position 3714 of SEQ ID NO: 1883411
gagcaagguuacuuaaucu

SEQ ID NO: 2192277 - RNA, 19 nt, Artificial Sequence
  Description of Artificial Sequence: Synthetic oligonucleotide
  Antisense strand to SEQ ID NO: 2192276
agauuaaguaaccuugcuc

SEQ ID NO: 2192278 - RNA, 19 nt, Artificial Sequence
  Description of Artificial Sequence: Synthetic oligonucleotide
  Sense strand starting at position 3813 of SEQ ID NO: 1883411
gaaagugaacgugaaguca

SEQ ID NO: 2192279 - RNA, 19 nt, Artificial Sequence
  Description of Artificial Sequence: Synthetic oligonucleotide
  Antisense strand to SEQ ID NO: 2192278
ugacuucacguucacuuuc

SEQ ID NO: 2192280 - RNA, 19 nt, Artificial Sequence
  Description of Artificial Sequence: Synthetic oligonucleotide
  Sense strand starting at position 3880 of SEQ ID NO: 1883411
uacugauguuucuugggua

SEQ ID NO: 2192281 - RNA, 19 nt, Artificial Sequence
  Description of Artificial Sequence: Synthetic oligonucleotide
  Antisense strand to SEQ ID NO: 2192280
uacccaagaaacaucagua

SEQ ID NO: 2192282 - RNA, 19 nt, Artificial Sequence
  Description of Artificial Sequence: Synthetic oligonucleotide
  Sense strand starting at position 99 of SEQ ID NO: 1883412
cugugcuucccuguaguau

SEQ ID NO: 2192283 - RNA, 19 nt, Artificial Sequence
  Description of Artificial Sequence: Synthetic oligonucleotide
  Antisense strand to SEQ ID NO: 2192282
auacuacagggaagcacag

SEQ ID NO: 2192284 - RNA, 19 nt, Artificial Sequence
  Description of Artificial Sequence: Synthetic oligonucleotide
  Sense strand starting at position 179 of SEQ ID NO: 1883412
uguaacuucuacuuuggaa

SEQ ID NO: 2192285 - RNA, 19 nt, Artificial Sequence
  Description of Artificial Sequence: Synthetic oligonucleotide
  Antisense strand to SEQ ID NO: 2192284
uuccaaaguagaaguuaca

SEQ ID NO: 2192286 - RNA, 19 nt, Artificial Sequence
  Description of Artificial Sequence: Synthetic oligonucleotide
  Sense strand starting at position 529 of SEQ ID NO: 1883412
gaaacuauagcgcaggagu

SEQ ID NO: 2192287 - RNA, 19 nt, Artificial Sequence
  Description of Artificial Sequence: Synthetic oligonucleotide
  Antisense strand to SEQ ID NO: 2192286
acuccugcgcuauaguuuc

SEQ ID NO: 2192288 - RNA, 19 nt, Artificial Sequence
  Description of Artificial Sequence: Synthetic oligonucleotide
  Sense strand starting at position 641 of SEQ ID NO: 1883412
acuaauauggcauagucau

SEQ ID NO: 2192289 - RNA, 19 nt, Artificial Sequence
  Description of Artificial Sequence: Synthetic oligonucleotide
  Antisense strand to SEQ ID NO: 2192288
augacuaugccauauuagu

SEQ ID NO: 2192290 - RNA, 19 nt, Artificial Sequence
  Description of Artificial Sequence: Synthetic oligonucleotide
  Sense strand starting at position 662 of SEQ ID NO: 1883412
cauugugauagaggaugua

SEQ ID NO: 2192291 - RNA, 19 nt, Artificial Sequence
  Description of Artificial Sequence: Synthetic oligonucleotide
  Antisense strand to SEQ ID NO: 2192290
uacauccucuaucacaaug

SEQ ID NO: 2192292 - RNA, 19 nt, Artificial Sequence
  Description of Artificial Sequence: Synthetic oligonucleotide
  Sense strand starting at position 706 of SEQ ID NO: 1883412
cuaucugacuuucuacgaa

SEQ ID NO: 2192293 - RNA, 19 nt, Artificial Sequence
  Description of Artificial Sequence: Synthetic oligonucleotide
  Antisense strand to SEQ ID NO: 2192292
uucguagaaagucagauag

SEQ ID NO: 2192294 - RNA, 19 nt, Artificial Sequence
  Description of Artificial Sequence: Synthetic oligonucleotide
  Sense strand starting at position 732 of SEQ ID NO: 1883412
aguggaugcuauuuaagcu

SEQ ID NO: 2192295 - RNA, 19 nt, Artificial Sequence
  Description of Artificial Sequence: Synthetic oligonucleotide
  Antisense strand to SEQ ID NO: 2192294
agcuuaaauagcauccacu

SEQ ID NO: 2192296 - RNA, 19 nt, Artificial Sequence
  Description of Artificial Sequence: Synthetic oligonucleotide
  Sense strand starting at position 772 of SEQ ID NO: 1883412
aguagaaaguaucugucaa

SEQ ID NO: 2192297 - RNA, 19 nt, Artificial Sequence
  Description of Artificial Sequence: Synthetic oligonucleotide
  Antisense strand to SEQ ID NO: 2192296
uugacagauacuuucuacu

SEQ ID NO: 2192298 - RNA, 19 nt, Artificial Sequence
  Description of Artificial Sequence: Synthetic oligonucleotide
  Sense strand starting at position 1046 of SEQ ID NO: 1883412
cuuacucuuugggugauau

SEQ ID NO: 2192299 - RNA, 19 nt, Artificial Sequence
  Description of Artificial Sequence: Synthetic oligonucleotide
  Antisense strand to SEQ ID NO: 2192298
auaucacccaaagaguaag

SEQ ID NO: 2192300 - RNA, 19 nt, Artificial Sequence
  Description of Artificial Sequence: Synthetic oligonucleotide
  Sense strand starting at position 1048 of SEQ ID NO: 1883412
uacucuuugggugauauua

SEQ ID NO: 2192301 - RNA, 19 nt, Artificial Sequence
  Description of Artificial Sequence: Synthetic oligonucleotide
  Antisense strand to SEQ ID NO: 2192300
uaauaucacccaaagagua

SEQ ID NO: 2192302 - RNA, 19 nt, Artificial Sequence
  Description of Artificial Sequence: Synthetic oligonucleotide
  Sense strand starting at position 1088 of SEQ ID NO: 1883412
agggcauauuaugcggaaa

SEQ ID NO: 2192303 - RNA, 19 nt, Artificial Sequence
  Description of Artificial Sequence: Synthetic oligonucleotide
  Antisense strand to SEQ ID NO: 2192302
uuuccgcauaauaugcccu

SEQ ID NO: 2192304 - RNA, 19 nt, Artificial Sequence
  Description of Artificial Sequence: Synthetic oligonucleotide
  Sense strand starting at position 1091 of SEQ ID NO: 1883412
gcauauuaugcggaaacag

SEQ ID NO: 2192305 - RNA, 19 nt, Artificial Sequence
  Description of Artificial Sequence: Synthetic oligonucleotide
  Antisense strand to SEQ ID NO: 2192304
cuguuuccgcauaauaugc

SEQ ID NO: 2192306 - RNA, 19 nt, Artificial Sequence
  Description of Artificial Sequence: Synthetic oligonucleotide
  Sense strand starting at position 1175 of SEQ ID NO: 1883412
uggacauugggaugaguua

SEQ ID NO: 2192307 - RNA, 19 nt, Artificial Sequence
  Description of Artificial Sequence: Synthetic oligonucleotide
  Antisense strand to SEQ ID NO: 2192306
uaacucaucccaaugucca

SEQ ID NO: 2192308 - RNA, 19 nt, Artificial Sequence
  Description of Artificial Sequence: Synthetic oligonucleotide
  Sense strand starting at position 1191 of SEQ ID NO: 1883412
uuaugacucaagcggagaa

SEQ ID NO: 2192309 - RNA, 19 nt, Artificial Sequence
  Description of Artificial Sequence: Synthetic oligonucleotide
  Antisense strand to SEQ ID NO: 2192308
uucuccgcuugagucauaa

SEQ ID NO: 2192310 - RNA, 19 nt, Artificial Sequence
  Description of Artificial Sequence: Synthetic oligonucleotide
  Sense strand starting at position 1225 of SEQ ID NO: 1883412
ugggauaccuaaguuacuu

SEQ ID NO: 2192311 - RNA, 19 nt, Artificial Sequence
  Description of Artificial Sequence: Synthetic oligonucleotide
  Antisense strand to SEQ ID NO: 2192310
aaguaacuuagguauccca

SEQ ID NO: 2192312 - RNA, 19 nt, Artificial Sequence
  Description of Artificial Sequence: Synthetic oligonucleotide
  Sense strand starting at position 1305 of SEQ ID NO: 1883412
gggaacucauccuuucuaa

SEQ ID NO: 2192313 - RNA, 19 nt, Artificial Sequence
  Description of Artificial Sequence: Synthetic oligonucleotide
  Antisense strand to SEQ ID NO: 2192312
uuagaaaggaugaguuccc

SEQ ID NO: 2192314 - RNA, 19 nt, Artificial Sequence
  Description of Artificial Sequence: Synthetic oligonucleotide
  Sense strand starting at position 2236 of SEQ ID NO: 1883412
uuuguagcucuauauagau

SEQ ID NO: 2192315 - RNA, 19 nt, Artificial Sequence
  Description of Artificial Sequence: Synthetic oligonucleotide
  Antisense strand to SEQ ID NO: 2192314
aucuauauagagcuacaaa

SEQ ID NO: 2192316 - RNA, 19 nt, Artificial Sequence
  Description of Artificial Sequence: Synthetic oligonucleotide
  Sense strand starting at position 2251 of SEQ ID NO: 1883412
agauguuuagggcacuaau

SEQ ID NO: 2192317 - RNA, 19 nt, Artificial Sequence
  Description of Artificial Sequence: Synthetic oligonucleotide
  Antisense strand to SEQ ID NO: 2192316
auuagugcccuaaacaucu

SEQ ID NO: 2192318 - RNA, 19 nt, Artificial Sequence
  Description of Artificial Sequence: Synthetic oligonucleotide
  Sense strand starting at position 2254 of SEQ ID NO: 1883412
uguuuagggcacuaaugau

SEQ ID NO: 2192319 - RNA, 19 nt, Artificial Sequence
  Description of Artificial Sequence: Synthetic oligonucleotide
  Antisense strand to SEQ ID NO: 2192318
aucauuagugcccuaaaca

SEQ ID NO: 2192320 - RNA, 19 nt, Artificial Sequence
  Description of Artificial Sequence: Synthetic oligonucleotide
  Sense strand starting at position 2329 of SEQ ID NO: 1883412
acucaagagucuguuacau

SEQ ID NO: 2192321 - RNA, 19 nt, Artificial Sequence
  Description of Artificial Sequence: Synthetic oligonucleotide
  Antisense strand to SEQ ID NO: 2192320
auguaacagacucuugagu

SEQ ID NO: 2192322 - RNA, 19 nt, Artificial Sequence
  Description of Artificial Sequence: Synthetic oligonucleotide
  Sense strand starting at position 2367 of SEQ ID NO: 1883412
cacaguuagcuagaguaug

SEQ ID NO: 2192323 - RNA, 19 nt, Artificial Sequence
  Description of Artificial Sequence: Synthetic oligonucleotide
  Antisense strand to SEQ ID NO: 2192322
cauacucuagcuaacugug

SEQ ID NO: 2192324 - RNA, 19 nt, Artificial Sequence
  Description of Artificial Sequence: Synthetic oligonucleotide
  Sense strand starting at position 2394 of SEQ ID NO: 1883412
aguccagucccaggaaaug

SEQ ID NO: 2192325 - RNA, 19 nt, Artificial Sequence
  Description of Artificial Sequence: Synthetic oligonucleotide
  Antisense strand to SEQ ID NO: 2192324
cauuuccugggacuggacu

SEQ ID NO: 2192326 - RNA, 19 nt, Artificial Sequence
  Description of Artificial Sequence: Synthetic oligonucleotide
  Sense strand starting at position 2404 of SEQ ID NO: 1883412
caggaaauguuucugcaag

SEQ ID NO: 2192327 - RNA, 19 nt, Artificial Sequence
  Description of Artificial Sequence: Synthetic oligonucleotide
  Antisense strand to SEQ ID NO: 2192326
cuugcagaaacauuuccug

SEQ ID NO: 2192328 - RNA, 19 nt, Artificial Sequence
  Description of Artificial Sequence: Synthetic oligonucleotide
  Sense strand starting at position 2406 of SEQ ID NO: 1883412
ggaaauguuucugcaagaa

SEQ ID NO: 2192329 - RNA, 19 nt, Artificial Sequence
  Description of Artificial Sequence: Synthetic oligonucleotide
  Antisense strand to SEQ ID NO: 2192328
uucuugcagaaacauuucc

SEQ ID NO: 2192330 - RNA, 19 nt, Artificial Sequence
  Description of Artificial Sequence: Synthetic oligonucleotide
  Sense strand starting at position 2462 of SEQ ID NO: 1883412
ugacgaguccuacaguuua

SEQ ID NO: 2192331 - RNA, 19 nt, Artificial Sequence
  Description of Artificial Sequence: Synthetic oligonucleotide
  Antisense strand to SEQ ID NO: 2192330
uaaacuguaggacucguca

SEQ ID NO: 2192332 - RNA, 19 nt, Artificial Sequence
  Description of Artificial Sequence: Synthetic oligonucleotide
  Sense strand starting at position 2602 of SEQ ID NO: 1883412
cucuacucgagguaugaau

SEQ ID NO: 2192333 - RNA, 19 nt, Artificial Sequence
  Description of Artificial Sequence: Synthetic oligonucleotide
  Antisense strand to SEQ ID NO: 2192332
auucauaccucgaguagag

SEQ ID NO: 2192334 - RNA, 19 nt, Artificial Sequence
  Description of Artificial Sequence: Synthetic oligonucleotide
  Sense strand starting at position 2745 of SEQ ID NO: 1883412
aucgaauaaucuuuccaag

SEQ ID NO: 2192335 - RNA, 19 nt, Artificial Sequence
  Description of Artificial Sequence: Synthetic oligonucleotide
  Antisense strand to SEQ ID NO: 2192334
cuuggaaagauuauucgau

SEQ ID NO: 2192336 - RNA, 19 nt, Artificial Sequence
  Description of Artificial Sequence: Synthetic oligonucleotide
  Sense strand starting at position 2747 of SEQ ID NO: 1883412
cgaauaaucuuuccaaggu

SEQ ID NO: 2192337 - RNA, 19 nt, Artificial Sequence
  Description of Artificial Sequence: Synthetic oligonucleotide
  Antisense strand to SEQ ID NO: 2192336
accuuggaaagauuauucg

SEQ ID NO: 2192338 - RNA, 19 nt, Artificial Sequence
  Description of Artificial Sequence: Synthetic oligonucleotide
  Sense strand starting at position 3134 of SEQ ID NO: 1883412
gcuggaaauuaacuagcau

SEQ ID NO: 2192339 - RNA, 19 nt, Artificial Sequence
  Description of Artificial Sequence: Synthetic oligonucleotide
  Antisense strand to SEQ ID NO: 2192338
augcuaguuaauuuccagc

SEQ ID NO: 2192340 - RNA, 19 nt, Artificial Sequence
  Description of Artificial Sequence: Synthetic oligonucleotide
  Sense strand starting at position 3254 of SEQ ID NO: 1883412
auuugacaguaugauugaa

SEQ ID NO: 2192341 - RNA, 19 nt, Artificial Sequence
  Description of Artificial Sequence: Synthetic oligonucleotide
  Antisense strand to SEQ ID NO: 2192340
uucaaucauacugucaaau

SEQ ID NO: 2192342 - RNA, 19 nt, Artificial Sequence
  Description of Artificial Sequence: Synthetic oligonucleotide
  Sense strand starting at position 3256 of SEQ ID NO: 1883412
uugacaguaugauugaaug

SEQ ID NO: 2192343 - RNA, 19 nt, Artificial Sequence
  Description of Artificial Sequence: Synthetic oligonucleotide
  Antisense strand to SEQ ID NO: 2192342
cauucaaucauacugucaa

SEQ ID NO: 2192344 - RNA, 19 nt, Artificial Sequence
  Description of Artificial Sequence: Synthetic oligonucleotide
  Sense strand starting at position 3266 of SEQ ID NO: 1883412
gauugaaugcugggacaac

SEQ ID NO: 2192345 - RNA, 19 nt, Artificial Sequence
  Description of Artificial Sequence: Synthetic oligonucleotide
  Antisense strand to SEQ ID NO: 2192344
guugucccagcauucaauc

SEQ ID NO: 2192346 - RNA, 19 nt, Artificial Sequence
  Description of Artificial Sequence: Synthetic oligonucleotide
  Sense strand starting at position 3320 of SEQ ID NO: 1883412
gcauguuguggugagacaa

SEQ ID NO: 2192347 - RNA, 19 nt, Artificial Sequence
  Description of Artificial Sequence: Synthetic oligonucleotide
  Antisense strand to SEQ ID NO: 2192346
uugucucaccacaacaugc

SEQ ID NO: 2192348 - RNA, 19 nt, Artificial Sequence
  Description of Artificial Sequence: Synthetic oligonucleotide
  Sense strand starting at position 3328 of SEQ ID NO: 1883412
uggugagacaauugaguaa

SEQ ID NO: 2192349 - RNA, 19 nt, Artificial Sequence
  Description of Artificial Sequence: Synthetic oligonucleotide
  Antisense strand to SEQ ID NO: 2192348
uuacucaauugucucacca

SEQ ID NO: 2192350 - RNA, 19 nt, Artificial Sequence
  Description of Artificial Sequence: Synthetic oligonucleotide
  Sense strand starting at position 3459 of SEQ ID NO: 1883412
uugggacauugguugaacu

SEQ ID NO: 2192351 - RNA, 19 nt, Artificial Sequence
  Description of Artificial Sequence: Synthetic oligonucleotide
  Antisense strand to SEQ ID NO: 2192350
aguucaaccaaugucccaa

SEQ ID NO: 2192352 - RNA, 19 nt, Artificial Sequence
  Description of Artificial Sequence: Synthetic oligonucleotide
  Sense strand starting at position 3578 of SEQ ID NO: 1883412
uauucugaacuuggugaga

SEQ ID NO: 2192353 - RNA, 19 nt, Artificial Sequence
  Description of Artificial Sequence: Synthetic oligonucleotide
  Antisense strand to SEQ ID NO: 2192352
ucucaccaaguucagaaua

SEQ ID NO: 2192354 - RNA, 19 nt, Artificial Sequence
  Description of Artificial Sequence: Synthetic oligonucleotide
  Sense strand starting at position 3591 of SEQ ID NO: 1883412
gugagaaacuuugucaagu

SEQ ID NO: 2192355 - RNA, 19 nt, Artificial Sequence
  Description of Artificial Sequence: Synthetic oligonucleotide
  Antisense strand to SEQ ID NO: 2192354
acuugacaaaguuucucac

SEQ ID NO: 2192356 - RNA, 19 nt, Artificial Sequence
  Description of Artificial Sequence: Synthetic oligonucleotide
  Sense strand starting at position 3592 of SEQ ID NO: 1883412
ugagaaacuuugucaaguu

SEQ ID NO: 2192357 - RNA, 19 nt, Artificial Sequence
  Description of Artificial Sequence: Synthetic oligonucleotide
  Antisense strand to SEQ ID NO: 2192356
aacuugacaaaguuucuca

SEQ ID NO: 2192358 - RNA, 19 nt, Artificial Sequence
  Description of Artificial Sequence: Synthetic oligonucleotide
  Sense strand starting at position 3680 of SEQ ID NO: 1883412
aaggguugaguauguuuga

SEQ ID NO: 2192359 - RNA, 19 nt, Artificial Sequence
  Description of Artificial Sequence: Synthetic oligonucleotide
  Antisense strand to SEQ ID NO: 2192358
ucaaacauacucaacccuu

SEQ ID NO: 2192360 - RNA, 19 nt, Artificial Sequence
  Description of Artificial Sequence: Synthetic oligonucleotide
  Sense strand starting at position 3681 of SEQ ID NO: 1883412
aggguugaguauguuugaa

SEQ ID NO: 2192361 - RNA, 19 nt, Artificial Sequence
  Description of Artificial Sequence: Synthetic oligonucleotide
  Antisense strand to SEQ ID NO: 2192360
uucaaacauacucaacccu

SEQ ID NO: 2192362 - RNA, 19 nt, Artificial Sequence
  Description of Artificial Sequence: Synthetic oligonucleotide
  Sense strand starting at position 1985 of SEQ ID NO: 1883414
gugggaggcugagauuuau

SEQ ID NO: 2192363 - RNA, 19 nt, Artificial Sequence
  Description of Artificial Sequence: Synthetic oligonucleotide
  Antisense strand to SEQ ID NO: 2192362
auaaaucucagccucccac

SEQ ID NO: 2192364 - RNA, 19 nt, Artificial Sequence
  Description of Artificial Sequence: Synthetic oligonucleotide
  Sense strand starting at position 1991 of SEQ ID NO: 1883414
ggcugagauuuauaguuau

SEQ ID NO: 2192365 - RNA, 19 nt, Artificial Sequence
  Description of Artificial Sequence: Synthetic oligonucleotide
  Antisense strand to SEQ ID NO: 2192364
auaacuauaaaucucagcc

SEQ ID NO: 2192366 - RNA, 19 nt, Artificial Sequence
  Description of Artificial Sequence: Synthetic oligonucleotide
  Sense strand starting at position 2024 of SEQ ID NO: 1883414
ugcuuccaauucugagaaa

SEQ ID NO: 2192367 - RNA, 19 nt, Artificial Sequence
  Description of Artificial Sequence: Synthetic oligonucleotide
  Antisense strand to SEQ ID NO: 2192366
uuucucagaauuggaagca

SEQ ID NO: 2192368 - RNA, 19 nt, Artificial Sequence
  Description of Artificial Sequence: Synthetic oligonucleotide
  Sense strand starting at position 2058 of SEQ ID NO: 1883414
ucugaauauuuacagaaug

SEQ ID NO: 2192369 - RNA, 19 nt, Artificial Sequence
  Description of Artificial Sequence: Synthetic oligonucleotide
  Antisense strand to SEQ ID NO: 2192368
cauucuguaaauauucaga

SEQ ID NO: 2192370 - RNA, 19 nt, Artificial Sequence
  Description of Artificial Sequence: Synthetic oligonucleotide
  Sense strand starting at position 2117 of SEQ ID NO: 1883414
ugaagaaauuaucggguga

SEQ ID NO: 2192371 - RNA, 19 nt, Artificial Sequence
  Description of Artificial Sequence: Synthetic oligonucleotide
  Antisense strand to SEQ ID NO: 2192370
ucacccgauaauuucuuca

SEQ ID NO: 2192372 - RNA, 19 nt, Artificial Sequence
  Description of Artificial Sequence: Synthetic oligonucleotide
  Sense strand starting at position 2118 of SEQ ID NO: 1883414
gaagaaauuaucgggugag

SEQ ID NO: 2192373 - RNA, 19 nt, Artificial Sequence
  Description of Artificial Sequence: Synthetic oligonucleotide
  Antisense strand to SEQ ID NO: 2192372
cucacccgauaauuucuuc

SEQ ID NO: 2192374 - RNA, 19 nt, Artificial Sequence
  Description of Artificial Sequence: Synthetic oligonucleotide
  Sense strand starting at position 2121 of SEQ ID NO: 1883414
gaaauuaucgggugaguga

SEQ ID NO: 2192375 - RNA, 19 nt, Artificial Sequence
  Description of Artificial Sequence: Synthetic oligonucleotide
  Antisense strand to SEQ ID NO: 2192374
ucacucacccgauaauuuc

SEQ ID NO: 2192376 - RNA, 19 nt, Artificial Sequence
  Description of Artificial Sequence: Synthetic oligonucleotide
  Sense strand starting at position 2122 of SEQ ID NO: 1883414
aaauuaucgggugagugaa

SEQ ID NO: 2192377 - RNA, 19 nt, Artificial Sequence
  Description of Artificial Sequence: Synthetic oligonucleotide
  Antisense strand to SEQ ID NO: 2192376
uucacucacccgauaauuu

SEQ ID NO: 2192378 - RNA, 19 nt, Artificial Sequence
  Description of Artificial Sequence: Synthetic oligonucleotide
  Sense strand starting at position 2129 of SEQ ID NO: 1883414
cgggugagugaauggauau

SEQ ID NO: 2192379 - RNA, 19 nt, Artificial Sequence
  Description of Artificial Sequence: Synthetic oligonucleotide
  Antisense strand to SEQ ID NO: 2192378
auauccauucacucacccg

SEQ ID NO: 2192380 - RNA, 19 nt, Artificial Sequence
  Description of Artificial Sequence: Synthetic oligonucleotide
  Sense strand starting at position 2130 of SEQ ID NO: 1883414
gggugagugaauggauaua

SEQ ID NO: 2192381 - RNA, 19 nt, Artificial Sequence
  Description of Artificial Sequence: Synthetic oligonucleotide
  Antisense strand to SEQ ID NO: 2192380
uauauccauucacucaccc

SEQ ID NO: 2192382 - RNA, 19 nt, Artificial Sequence
  Description of Artificial Sequence: Synthetic oligonucleotide
  Sense strand starting at position 2323 of SEQ ID NO: 1883414
ucaccaguacuaugccauu

SEQ ID NO: 2192383 - RNA, 19 nt, Artificial Sequence
  Description of Artificial Sequence: Synthetic oligonucleotide
  Antisense strand to SEQ ID NO: 2192382
aauggcauaguacugguga

SEQ ID NO: 2192384 - RNA, 19 nt, Artificial Sequence
  Description of Artificial Sequence: Synthetic oligonucleotide
  Sense strand starting at position 2399 of SEQ ID NO: 1883414
uuguucuuauggcucaaga

SEQ ID NO: 2192385 - RNA, 19 nt, Artificial Sequence
  Description of Artificial Sequence: Synthetic oligonucleotide
  Antisense strand to SEQ ID NO: 2192384
ucuugagccauaagaacaa

SEQ ID NO: 2192386 - RNA, 19 nt, Artificial Sequence
  Description of Artificial Sequence: Synthetic oligonucleotide
  Sense strand starting at position 2401 of SEQ ID NO: 1883414
guucuuauggcucaagauu

SEQ ID NO: 2192387 - RNA, 19 nt, Artificial Sequence
  Description of Artificial Sequence: Synthetic oligonucleotide
  Antisense strand to SEQ ID NO: 2192386
aaucuugagccauaagaac

SEQ ID NO: 2192388 - RNA, 19 nt, Artificial Sequence
  Description of Artificial Sequence: Synthetic oligonucleotide
  Sense strand starting at position 2409 of SEQ ID NO: 1883414
ggcucaagauugcuuuguu

SEQ ID NO: 2192389 - RNA, 19 nt, Artificial Sequence
  Description of Artificial Sequence: Synthetic oligonucleotide
  Antisense strand to SEQ ID NO: 2192388
aacaaagcaaucuugagcc

SEQ ID NO: 2192390 - RNA, 19 nt, Artificial Sequence
  Description of Artificial Sequence: Synthetic oligonucleotide
  Sense strand starting at position 2412 of SEQ ID NO: 1883414
ucaagauugcuuuguuuau

SEQ ID NO: 2192391 - RNA, 19 nt, Artificial Sequence
  Description of Artificial Sequence: Synthetic oligonucleotide
  Antisense strand to SEQ ID NO: 2192390
auaaacaaagcaaucuuga

SEQ ID NO: 2192392 - RNA, 19 nt, Artificial Sequence
  Description of Artificial Sequence: Synthetic oligonucleotide
  Sense strand starting at position 2517 of SEQ ID NO: 1883414
auggacucuuuagaucaca

SEQ ID NO: 2192393 - RNA, 19 nt, Artificial Sequence
  Description of Artificial Sequence: Synthetic oligonucleotide
  Antisense strand to SEQ ID NO: 2192392
ugugaucuaaagaguccau

SEQ ID NO: 2192394 - RNA, 19 nt, Artificial Sequence
  Description of Artificial Sequence: Synthetic oligonucleotide
  Sense strand starting at position 2570 of SEQ ID NO: 1883414
acuuauggauaugagacau

SEQ ID NO: 2192395 - RNA, 19 nt, Artificial Sequence
  Description of Artificial Sequence: Synthetic oligonucleotide
  Antisense strand to SEQ ID NO: 2192394
augucucauauccauaagu

SEQ ID NO: 2192396 - RNA, 19 nt, Artificial Sequence
  Description of Artificial Sequence: Synthetic oligonucleotide
  Sense strand starting at position 2658 of SEQ ID NO: 1883414
uccauauucuugcuugguu

SEQ ID NO: 2192397 - RNA, 19 nt, Artificial Sequence
  Description of Artificial Sequence: Synthetic oligonucleotide
  Antisense strand to SEQ ID NO: 2192396
aaccaagcaagaauaugga

SEQ ID NO: 2192398 - RNA, 19 nt, Artificial Sequence
  Description of Artificial Sequence: Synthetic oligonucleotide
  Sense strand starting at position 2659 of SEQ ID NO: 1883414
ccauauucuugcuugguua

SEQ ID NO: 2192399 - RNA, 19 nt, Artificial Sequence
  Description of Artificial Sequence: Synthetic oligonucleotide
  Antisense strand to SEQ ID NO: 2192398
uaaccaagcaagaauaugg

SEQ ID NO: 2192400 - RNA, 19 nt, Artificial Sequence
  Description of Artificial Sequence: Synthetic oligonucleotide
  Sense strand starting at position 2661 of SEQ ID NO: 1883414
auauucuugcuugguuaaa

SEQ ID NO: 2192401 - RNA, 19 nt, Artificial Sequence
  Description of Artificial Sequence: Synthetic oligonucleotide
  Antisense strand to SEQ ID NO: 2192400
uuuaaccaagcaagaauau

SEQ ID NO: 2192402 - RNA, 19 nt, Artificial Sequence
  Description of Artificial Sequence: Synthetic oligonucleotide
  Sense strand starting at position 2663 of SEQ ID NO: 1883414
auucuugcuugguuaaauu

SEQ ID NO: 2192403 - RNA, 19 nt, Artificial Sequence
  Description of Artificial Sequence: Synthetic oligonucleotide
  Antisense strand to SEQ ID NO: 2192402
aauuuaaccaagcaagaau

SEQ ID NO: 2192404 - RNA, 19 nt, Artificial Sequence
  Description of Artificial Sequence: Synthetic oligonucleotide
  Sense strand starting at position 2673 of SEQ ID NO: 1883414
gguuaaauuuaccacuaag

SEQ ID NO: 2192405 - RNA, 19 nt, Artificial Sequence
  Description of Artificial Sequence: Synthetic oligonucleotide
  Antisense strand to SEQ ID NO: 2192404
cuuagugguaaauuuaacc

SEQ ID NO: 2192406 - RNA, 19 nt, Artificial Sequence
  Description of Artificial Sequence: Synthetic oligonucleotide
  Sense strand starting at position 2744 of SEQ ID NO: 1883414
aguucauugucaguguaug

SEQ ID NO: 2192407 - RNA, 19 nt, Artificial Sequence
  Description of Artificial Sequence: Synthetic oligonucleotide
  Antisense strand to SEQ ID NO: 2192406
cauacacugacaaugaacu

SEQ ID NO: 2192408 - RNA, 19 nt, Artificial Sequence
  Description of Artificial Sequence: Synthetic oligonucleotide
  Sense strand starting at position 2745 of SEQ ID NO: 1883414
guucauugucaguguauga

SEQ ID NO: 2192409 - RNA, 19 nt, Artificial Sequence
  Description of Artificial Sequence: Synthetic oligonucleotide
  Antisense strand to SEQ ID NO: 2192408
ucauacacugacaaugaac

SEQ ID NO: 2192410 - RNA, 19 nt, Artificial Sequence
  Description of Artificial Sequence: Synthetic oligonucleotide
  Sense strand starting at position 2980 of SEQ ID NO: 1883414
acacacugaucuggacaaa

SEQ ID NO: 2192411 - RNA, 19 nt, Artificial Sequence
  Description of Artificial Sequence: Synthetic oligonucleotide
  Antisense strand to SEQ ID NO: 2192410
uuuguccagaucagugugu

SEQ ID NO: 2192412 - RNA, 19 nt, Artificial Sequence
  Description of Artificial Sequence: Synthetic oligonucleotide
  Sense strand starting at position 3299 of SEQ ID NO: 1883414
uggccaguggguuauuaau

SEQ ID NO: 2192413 - RNA, 19 nt, Artificial Sequence
  Description of Artificial Sequence: Synthetic oligonucleotide
  Antisense strand to SEQ ID NO: 2192412
auuaauaacccacuggcca

SEQ ID NO: 2192414 - RNA, 19 nt, Artificial Sequence
  Description of Artificial Sequence: Synthetic oligonucleotide
  Sense strand starting at position 3301 of SEQ ID NO: 1883414
gccaguggguuauuaauaa

SEQ ID NO: 2192415 - RNA, 19 nt, Artificial Sequence
  Description of Artificial Sequence: Synthetic oligonucleotide
  Antisense strand to SEQ ID NO: 2192414
uuauuaauaacccacuggc

SEQ ID NO: 2192416 - RNA, 19 nt, Artificial Sequence
  Description of Artificial Sequence: Synthetic oligonucleotide
  Sense strand starting at position 3305 of SEQ ID NO: 1883414
guggguuauuaauaacaaa

SEQ ID NO: 2192417 - RNA, 19 nt, Artificial Sequence
  Description of Artificial Sequence: Synthetic oligonucleotide
  Antisense strand to SEQ ID NO: 2192416
uuuguuauuaauaacccac

SEQ ID NO: 2192418 - RNA, 19 nt, Artificial Sequence
  Description of Artificial Sequence: Synthetic oligonucleotide
  Sense strand starting at position 3542 of SEQ ID NO: 1883414
gaacuaccaugugauuuag

SEQ ID NO: 2192419 - RNA, 19 nt, Artificial Sequence
  Description of Artificial Sequence: Synthetic oligonucleotide
  Antisense strand to SEQ ID NO: 2192418
cuaaaucacaugguaguuc

SEQ ID NO: 2192420 - RNA, 19 nt, Artificial Sequence
  Description of Artificial Sequence: Synthetic oligonucleotide
  Sense strand starting at position 3590 of SEQ ID NO: 1883414
gcaugaaauuaguauguca

SEQ ID NO: 2192421 - RNA, 19 nt, Artificial Sequence
  Description of Artificial Sequence: Synthetic oligonucleotide
  Antisense strand to SEQ ID NO: 2192420
ugacauacuaauuucaugc

SEQ ID NO: 2192422 - RNA, 19 nt, Artificial Sequence
  Description of Artificial Sequence: Synthetic oligonucleotide
  Sense strand starting at position 3610 of SEQ ID NO: 1883414
agagauaccuguucuucua

SEQ ID NO: 2192423 - RNA, 19 nt, Artificial Sequence
  Description of Artificial Sequence: Synthetic oligonucleotide
  Antisense strand to SEQ ID NO: 2192422
uagaagaacagguaucucu

SEQ ID NO: 2192424 - RNA, 19 nt, Artificial Sequence
  Description of Artificial Sequence: Synthetic oligonucleotide
  Sense strand starting at position 3635 of SEQ ID NO: 1883414
uugcaacauuacucgcaau

SEQ ID NO: 2192425 - RNA, 19 nt, Artificial Sequence
  Description of Artificial Sequence: Synthetic oligonucleotide
  Antisense strand to SEQ ID NO: 2192424
auugcgaguaauguugcaa

SEQ ID NO: 2192426 - RNA, 19 nt, Artificial Sequence
  Description of Artificial Sequence: Synthetic oligonucleotide
  Sense strand starting at position 3648 of SEQ ID NO: 1883414
cgcaauacccaagacauga

SEQ ID NO: 2192427 - RNA, 19 nt, Artificial Sequence
  Description of Artificial Sequence: Synthetic oligonucleotide
  Antisense strand to SEQ ID NO: 2192426
ucaugucuuggguauugcg

SEQ ID NO: 2192428 - RNA, 19 nt, Artificial Sequence
  Description of Artificial Sequence: Synthetic oligonucleotide
  Sense strand starting at position 3710 of SEQ ID NO: 1883414
ugugguauauauuugcaau

SEQ ID NO: 2192429 - RNA, 19 nt, Artificial Sequence
  Description of Artificial Sequence: Synthetic oligonucleotide
  Antisense strand to SEQ ID NO: 2192428
auugcaaauauauaccaca

SEQ ID NO: 2192430 - RNA, 19 nt, Artificial Sequence
  Description of Artificial Sequence: Synthetic oligonucleotide
  Sense strand starting at position 3713 of SEQ ID NO: 1883414
gguauauauuugcaaugga

SEQ ID NO: 2192431 - RNA, 19 nt, Artificial Sequence
  Description of Artificial Sequence: Synthetic oligonucleotide
  Antisense strand to SEQ ID NO: 2192430
uccauugcaaauauauacc

SEQ ID NO: 2192432 - RNA, 19 nt, Artificial Sequence
  Description of Artificial Sequence: Synthetic oligonucleotide
  Sense strand starting at position 3783 of SEQ ID NO: 1883414
auugauaaaccuggugaac

SEQ ID NO: 2192433 - RNA, 19 nt, Artificial Sequence
  Description of Artificial Sequence: Synthetic oligonucleotide
  Antisense strand to SEQ ID NO: 2192432
guucaccagguuuaucaau

SEQ ID NO: 2192434 - RNA, 19 nt, Artificial Sequence
  Description of Artificial Sequence: Synthetic oligonucleotide
  Sense strand starting at position 3785 of SEQ ID NO: 1883414
ugauaaaccuggugaacau

SEQ ID NO: 2192435 - RNA, 19 nt, Artificial Sequence
  Description of Artificial Sequence: Synthetic oligonucleotide
  Antisense strand to SEQ ID NO: 2192434
auguucaccagguuuauca

SEQ ID NO: 2192436 - RNA, 19 nt, Artificial Sequence
  Description of Artificial Sequence: Synthetic oligonucleotide
  Sense strand starting at position 3792 of SEQ ID NO: 1883414
ccuggugaacauuaugcua

SEQ ID NO: 2192437 - RNA, 19 nt, Artificial Sequence
  Description of Artificial Sequence: Synthetic oligonucleotide
  Antisense strand to SEQ ID NO: 2192436
uagcauaauguucaccagg

SEQ ID NO: 2192438 - RNA, 19 nt, Artificial Sequence
  Description of Artificial Sequence: Synthetic oligonucleotide
  Sense strand starting at position 3795 of SEQ ID NO: 1883414
ggugaacauuaugcuaagu

SEQ ID NO: 2192439 - RNA, 19 nt, Artificial Sequence
  Description of Artificial Sequence: Synthetic oligonucleotide
  Antisense strand to SEQ ID NO: 2192438
acuuagcauaauguucacc

SEQ ID NO: 2192440 - RNA, 19 nt, Artificial Sequence
  Description of Artificial Sequence: Synthetic oligonucleotide
  Sense strand starting at position 3938 of SEQ ID NO: 1883414
cagggagguauugggcaaa

SEQ ID NO: 2192441 - RNA, 19 nt, Artificial Sequence
  Description of Artificial Sequence: Synthetic oligonucleotide
  Antisense strand to SEQ ID NO: 2192440
uuugcccaauaccucccug

SEQ ID NO: 2192442 - RNA, 19 nt, Artificial Sequence
  Description of Artificial Sequence: Synthetic oligonucleotide
  Sense strand starting at position 119 of SEQ ID NO: 1883415
gaggcugagccugagugaa

SEQ ID NO: 2192443 - RNA, 19 nt, Artificial Sequence
  Description of Artificial Sequence: Synthetic oligonucleotide
  Antisense strand to SEQ ID NO: 2192442
uucacucaggcucagccuc

SEQ ID NO: 2192444 - RNA, 19 nt, Artificial Sequence
  Description of Artificial Sequence: Synthetic oligonucleotide
  Sense strand starting at position 121 of SEQ ID NO: 1883415
ggcugagccugagugaaua

SEQ ID NO: 2192445 - RNA, 19 nt, Artificial Sequence
  Description of Artificial Sequence: Synthetic oligonucleotide
  Antisense strand to SEQ ID NO: 2192444
uauucacucaggcucagcc

SEQ ID NO: 2192446 - RNA, 19 nt, Artificial Sequence
  Description of Artificial Sequence: Synthetic oligonucleotide
  Sense strand starting at position 216 of SEQ ID NO: 1883415
agagacauuggcuagcaca

SEQ ID NO: 2192447 - RNA, 19 nt, Artificial Sequence
  Description of Artificial Sequence: Synthetic oligonucleotide
  Antisense strand to SEQ ID NO: 2192446
ugugcuagccaaugucucu

SEQ ID NO: 2192448 - RNA, 19 nt, Artificial Sequence
  Description of Artificial Sequence: Synthetic oligonucleotide
  Sense strand starting at position 277 of SEQ ID NO: 1883415
gaauuuggucguugccagu

SEQ ID NO: 2192449 - RNA, 19 nt, Artificial Sequence
  Description of Artificial Sequence: Synthetic oligonucleotide
  Antisense strand to SEQ ID NO: 2192448
acuggcaacgaccaaauuc

SEQ ID NO: 2192450 - RNA, 19 nt, Artificial Sequence
  Description of Artificial Sequence: Synthetic oligonucleotide
  Sense strand starting at position 283 of SEQ ID NO: 1883415
ggucguugccaguguugga

SEQ ID NO: 2192451 - RNA, 19 nt, Artificial Sequence
  Description of Artificial Sequence: Synthetic oligonucleotide
  Antisense strand to SEQ ID NO: 2192450
uccaacacuggcaacgacc

SEQ ID NO: 2192452 - RNA, 19 nt, Artificial Sequence
  Description of Artificial Sequence: Synthetic oligonucleotide
  Sense strand starting at position 284 of SEQ ID NO: 1883415
gucguugccaguguuggau

SEQ ID NO: 2192453 - RNA, 19 nt, Artificial Sequence
  Description of Artificial Sequence: Synthetic oligonucleotide
  Antisense strand to SEQ ID NO: 2192452
auccaacacuggcaacgac

SEQ ID NO: 2192454 - RNA, 19 nt, Artificial Sequence
  Description of Artificial Sequence: Synthetic oligonucleotide
  Sense strand starting at position 288 of SEQ ID NO: 1883415
uugccaguguuggauggua

SEQ ID NO: 2192455 - RNA, 19 nt, Artificial Sequence
  Description of Artificial Sequence: Synthetic oligonucleotide
  Antisense strand to SEQ ID NO: 2192454
uaccauccaacacuggcaa

SEQ ID NO: 2192456 - RNA, 19 nt, Artificial Sequence
  Description of Artificial Sequence: Synthetic oligonucleotide
  Sense strand starting at position 290 of SEQ ID NO: 1883415
gccaguguuggaugguauu

SEQ ID NO: 2192457 - RNA, 19 nt, Artificial Sequence
  Description of Artificial Sequence: Synthetic oligonucleotide
  Antisense strand to SEQ ID NO: 2192456
aauaccauccaacacuggc

SEQ ID NO: 2192458 - RNA, 19 nt, Artificial Sequence
  Description of Artificial Sequence: Synthetic oligonucleotide
  Sense strand starting at position 293 of SEQ ID NO: 1883415
aguguuggaugguauuuaa

SEQ ID NO: 2192459 - RNA, 19 nt, Artificial Sequence
  Description of Artificial Sequence: Synthetic oligonucleotide
  Antisense strand to SEQ ID NO: 2192458
uuaaauaccauccaacacu

SEQ ID NO: 2192460 - RNA, 19 nt, Artificial Sequence
  Description of Artificial Sequence: Synthetic oligonucleotide
  Sense strand starting at position 370 of SEQ ID NO: 1883415
aaagaauggccuggucagu

SEQ ID NO: 2192461 - RNA, 19 nt, Artificial Sequence
  Description of Artificial Sequence: Synthetic oligonucleotide
  Antisense strand to SEQ ID NO: 2192460
acugaccaggccauucuuu

SEQ ID NO: 2192462 - RNA, 19 nt, Artificial Sequence
  Description of Artificial Sequence: Synthetic oligonucleotide
  Sense strand starting at position 376 of SEQ ID NO: 1883415
uggccuggucaguaaggaa

SEQ ID NO: 2192463 - RNA, 19 nt, Artificial Sequence
  Description of Artificial Sequence: Synthetic oligonucleotide
  Antisense strand to SEQ ID NO: 2192462
uuccuuacugaccaggcca

SEQ ID NO: 2192464 - RNA, 19 nt, Artificial Sequence
  Description of Artificial Sequence: Synthetic oligonucleotide
  Sense strand starting at position 470 of SEQ ID NO: 1883415
ggaugagugagcuggcaca

SEQ ID NO: 2192465 - RNA, 19 nt, Artificial Sequence
  Description of Artificial Sequence: Synthetic oligonucleotide
  Antisense strand to SEQ ID NO: 2192464
ugugccagcucacucaucc

SEQ ID NO: 2192466 - RNA, 19 nt, Artificial Sequence
  Description of Artificial Sequence: Synthetic oligonucleotide
  Sense strand starting at position 780 of SEQ ID NO: 1883415
guuuauuauugcuguccua

SEQ ID NO: 2192467 - RNA, 19 nt, Artificial Sequence
  Description of Artificial Sequence: Synthetic oligonucleotide
  Antisense strand to SEQ ID NO: 2192466
uaggacagcaauaauaaac

SEQ ID NO: 2192468 - RNA, 19 nt, Artificial Sequence
  Description of Artificial Sequence: Synthetic oligonucleotide
  Sense strand starting at position 804 of SEQ ID NO: 1883415
uuaccauaaacguggugau

SEQ ID NO: 2192469 - RNA, 19 nt, Artificial Sequence
  Description of Artificial Sequence: Synthetic oligonucleotide
  Antisense strand to SEQ ID NO: 2192468
aucaccacguuuaugguaa

SEQ ID NO: 2192470 - RNA, 19 nt, Artificial Sequence
  Description of Artificial Sequence: Synthetic oligonucleotide
  Sense strand starting at position 807 of SEQ ID NO: 1883415
ccauaaacguggugaucca

SEQ ID NO: 2192471 - RNA, 19 nt, Artificial Sequence
  Description of Artificial Sequence: Synthetic oligonucleotide
  Antisense strand to SEQ ID NO: 2192470
uggaucaccacguuuaugg

SEQ ID NO: 2192472 - RNA, 19 nt, Artificial Sequence
  Description of Artificial Sequence: Synthetic oligonucleotide
  Sense strand starting at position 860 of SEQ ID NO: 1883415
ucagaagucuaauggcaca

SEQ ID NO: 2192473 - RNA, 19 nt, Artificial Sequence
  Description of Artificial Sequence: Synthetic oligonucleotide
  Antisense strand to SEQ ID NO: 2192472
ugugccauuagacuucuga

SEQ ID NO: 2192474 - RNA, 19 nt, Artificial Sequence
  Description of Artificial Sequence: Synthetic oligonucleotide
  Sense strand starting at position 877 of SEQ ID NO: 1883415
caaugagugucaugggcua

SEQ ID NO: 2192475 - RNA, 19 nt, Artificial Sequence
  Description of Artificial Sequence: Synthetic oligonucleotide
  Antisense strand to SEQ ID NO: 2192474
uagcccaugacacucauug

SEQ ID NO: 2192476 - RNA, 19 nt, Artificial Sequence
  Description of Artificial Sequence: Synthetic oligonucleotide
  Sense strand starting at position 879 of SEQ ID NO: 1883415
augagugucaugggcuaag

SEQ ID NO: 2192477 - RNA, 19 nt, Artificial Sequence
  Description of Artificial Sequence: Synthetic oligonucleotide
  Antisense strand to SEQ ID NO: 2192476
cuuagcccaugacacucau

SEQ ID NO: 2192478 - RNA, 19 nt, Artificial Sequence
  Description of Artificial Sequence: Synthetic oligonucleotide
  Sense strand starting at position 1037 of SEQ ID NO: 1883415
cccugugucuguugucaca

SEQ ID NO: 2192479 - RNA, 19 nt, Artificial Sequence
  Description of Artificial Sequence: Synthetic oligonucleotide
  Antisense strand to SEQ ID NO: 2192478
ugugacaacagacacaggg

SEQ ID NO: 2192480 - RNA, 19 nt, Artificial Sequence
  Description of Artificial Sequence: Synthetic oligonucleotide
  Sense strand starting at position 1039 of SEQ ID NO: 1883415
cugugucuguugucacauu

SEQ ID NO: 2192481 - RNA, 19 nt, Artificial Sequence
  Description of Artificial Sequence: Synthetic oligonucleotide
  Antisense strand to SEQ ID NO: 2192480
aaugugacaacagacacag

SEQ ID NO: 2192482 - RNA, 19 nt, Artificial Sequence
  Description of Artificial Sequence: Synthetic oligonucleotide
  Sense strand starting at position 1287 of SEQ ID NO: 1883415
uagcgcuuacauuguauua

SEQ ID NO: 2192483 - RNA, 19 nt, Artificial Sequence
  Description of Artificial Sequence: Synthetic oligonucleotide
  Antisense strand to SEQ ID NO: 2192482
uaauacaauguaagcgcua

SEQ ID NO: 2192484 - RNA, 19 nt, Artificial Sequence
  Description of Artificial Sequence: Synthetic oligonucleotide
  Sense strand starting at position 1321 of SEQ ID NO: 1883415
cuagaagugacuuaacgua

SEQ ID NO: 2192485 - RNA, 19 nt, Artificial Sequence
  Description of Artificial Sequence: Synthetic oligonucleotide
  Antisense strand to SEQ ID NO: 2192484
uacguuaagucacuucuag

SEQ ID NO: 2192486 - RNA, 19 nt, Artificial Sequence
  Description of Artificial Sequence: Synthetic oligonucleotide
  Sense strand starting at position 1328 of SEQ ID NO: 1883415
ugacuuaacguauacggga

SEQ ID NO: 2192487 - RNA, 19 nt, Artificial Sequence
  Description of Artificial Sequence: Synthetic oligonucleotide
  Antisense strand to SEQ ID NO: 2192486
ucccguauacguuaaguca

SEQ ID NO: 2192488 - RNA, 19 nt, Artificial Sequence
  Description of Artificial Sequence: Synthetic oligonucleotide
  Sense strand starting at position 1342 of SEQ ID NO: 1883415
cgggaagauguguguaggu

SEQ ID NO: 2192489 - RNA, 19 nt, Artificial Sequence
  Description of Artificial Sequence: Synthetic oligonucleotide
  Antisense strand to SEQ ID NO: 2192488
accuacacacaucuucccg

SEQ ID NO: 2192490 - RNA, 19 nt, Artificial Sequence
  Description of Artificial Sequence: Synthetic oligonucleotide
  Sense strand starting at position 1411 of SEQ ID NO: 1883415
uuuagcauccuugagaagu

SEQ ID NO: 2192491 - RNA, 19 nt, Artificial Sequence
  Description of Artificial Sequence: Synthetic oligonucleotide
  Antisense strand to SEQ ID NO: 2192490
acuucucaaggaugcuaaa

SEQ ID NO: 2192492 - RNA, 19 nt, Artificial Sequence
  Description of Artificial Sequence: Synthetic oligonucleotide
  Sense strand starting at position 1421 of SEQ ID NO: 1883415
uugagaagugcuggaacca

SEQ ID NO: 2192493 - RNA, 19 nt, Artificial Sequence
  Description of Artificial Sequence: Synthetic oligonucleotide
  Antisense strand to SEQ ID NO: 2192492
ugguuccagcacuucucaa

SEQ ID NO: 2192494 - RNA, 19 nt, Artificial Sequence
  Description of Artificial Sequence: Synthetic oligonucleotide
  Sense strand starting at position 1472 of SEQ ID NO: 1883415
uugggcucacccugauaaa

SEQ ID NO: 2192495 - RNA, 19 nt, Artificial Sequence
  Description of Artificial Sequence: Synthetic oligonucleotide
  Antisense strand to SEQ ID NO: 2192494
uuuaucagggugagcccaa

SEQ ID NO: 2192496 - RNA, 19 nt, Artificial Sequence
  Description of Artificial Sequence: Synthetic oligonucleotide
  Sense strand starting at position 1473 of SEQ ID NO: 1883415
ugggcucacccugauaaac

SEQ ID NO: 2192497 - RNA, 19 nt, Artificial Sequence
  Description of Artificial Sequence: Synthetic oligonucleotide
  Antisense strand to SEQ ID NO: 2192496
guuuaucagggugagccca

SEQ ID NO: 2192498 - RNA, 19 nt, Artificial Sequence
  Description of Artificial Sequence: Synthetic oligonucleotide
  Sense strand starting at position 1475 of SEQ ID NO: 1883415
ggcucacccugauaaacau

SEQ ID NO: 2192499 - RNA, 19 nt, Artificial Sequence
  Description of Artificial Sequence: Synthetic oligonucleotide
  Antisense strand to SEQ ID NO: 2192498
auguuuaucagggugagcc

SEQ ID NO: 2192500 - RNA, 19 nt, Artificial Sequence
  Description of Artificial Sequence: Synthetic oligonucleotide
  Sense strand starting at position 1548 of SEQ ID NO: 1883415
ccauguaaguaauguauuc

SEQ ID NO: 2192501 - RNA, 19 nt, Artificial Sequence
  Description of Artificial Sequence: Synthetic oligonucleotide
  Antisense strand to SEQ ID NO: 2192500
gaauacauuacuuacaugg

SEQ ID NO: 2192502 - RNA, 19 nt, Artificial Sequence
  Description of Artificial Sequence: Synthetic oligonucleotide
  Sense strand starting at position 1728 of SEQ ID NO: 1883415
gguccauacucacuuaagu

SEQ ID NO: 2192503 - RNA, 19 nt, Artificial Sequence
  Description of Artificial Sequence: Synthetic oligonucleotide
  Antisense strand to SEQ ID NO: 2192502
acuuaagugaguauggacc

SEQ ID NO: 2192504 - RNA, 19 nt, Artificial Sequence
  Description of Artificial Sequence: Synthetic oligonucleotide
  Sense strand starting at position 1991 of SEQ ID NO: 1883415
gguucacugucaugaaagg

SEQ ID NO: 2192505 - RNA, 19 nt, Artificial Sequence
  Description of Artificial Sequence: Synthetic oligonucleotide
  Antisense strand to SEQ ID NO: 2192504
ccuuucaugacagugaacc

SEQ ID NO: 2192506 - RNA, 19 nt, Artificial Sequence
  Description of Artificial Sequence: Synthetic oligonucleotide
  Sense strand starting at position 2796 of SEQ ID NO: 1883415
guucuugucccagacugaa

SEQ ID NO: 2192507 - RNA, 19 nt, Artificial Sequence
  Description of Artificial Sequence: Synthetic oligonucleotide
  Antisense strand to SEQ ID NO: 2192506
uucagucugggacaagaac

SEQ ID NO: 2192508 - RNA, 19 nt, Artificial Sequence
  Description of Artificial Sequence: Synthetic oligonucleotide
  Sense strand starting at position 3275 of SEQ ID NO: 1883415
aggagaauugcacguuuca

SEQ ID NO: 2192509 - RNA, 19 nt, Artificial Sequence
  Description of Artificial Sequence: Synthetic oligonucleotide
  Antisense strand to SEQ ID NO: 2192508
ugaaacgugcaauucuccu

SEQ ID NO: 2192510 - RNA, 19 nt, Artificial Sequence
  Description of Artificial Sequence: Synthetic oligonucleotide
  Sense strand starting at position 3611 of SEQ ID NO: 1883415
gugucauccugcuacaccu

SEQ ID NO: 2192511 - RNA, 19 nt, Artificial Sequence
  Description of Artificial Sequence: Synthetic oligonucleotide
  Antisense strand to SEQ ID NO: 2192510
agguguagcaggaugacac

SEQ ID NO: 2192512 - RNA, 19 nt, Artificial Sequence
  Description of Artificial Sequence: Synthetic oligonucleotide
  Sense strand starting at position 3714 of SEQ ID NO: 1883415
cccaguuagucccucauaa

SEQ ID NO: 2192513 - RNA, 19 nt, Artificial Sequence
  Description of Artificial Sequence: Synthetic oligonucleotide
  Antisense strand to SEQ ID NO: 2192512
uuaugagggacuaacuggg

SEQ ID NO: 2192514 - RNA, 19 nt, Artificial Sequence
  Description of Artificial Sequence: Synthetic oligonucleotide
  Sense strand starting at position 3718 of SEQ ID NO: 1883415
guuagucccucauaagcua

SEQ ID NO: 2192515 - RNA, 19 nt, Artificial Sequence
  Description of Artificial Sequence: Synthetic oligonucleotide
  Antisense strand to SEQ ID NO: 2192514
uagcuuaugagggacuaac

SEQ ID NO: 2192516 - RNA, 19 nt, Artificial Sequence
  Description of Artificial Sequence: Synthetic oligonucleotide
  Sense strand starting at position 3835 of SEQ ID NO: 1883415
gugagaugcacauagcuca

SEQ ID NO: 2192517 - RNA, 19 nt, Artificial Sequence
  Description of Artificial Sequence: Synthetic oligonucleotide
  Antisense strand to SEQ ID NO: 2192516
ugagcuaugugcaucucac

SEQ ID NO: 2192518 - RNA, 19 nt, Artificial Sequence
  Description of Artificial Sequence: Synthetic oligonucleotide
  Sense strand starting at position 2 of SEQ ID NO: 1883416
acagcaauacuccgucaaa

SEQ ID NO: 2192519 - RNA, 19 nt, Artificial Sequence
  Description of Artificial Sequence: Synthetic oligonucleotide
  Antisense strand to SEQ ID NO: 2192518
uuugacggaguauugcugu

SEQ ID NO: 2192520 - RNA, 19 nt, Artificial Sequence
  Description of Artificial Sequence: Synthetic oligonucleotide
  Sense strand starting at position 54 of SEQ ID NO: 1883416
ugcuguuauugauuccuaa

SEQ ID NO: 2192521 - RNA, 19 nt, Artificial Sequence
  Description of Artificial Sequence: Synthetic oligonucleotide
  Antisense strand to SEQ ID NO: 2192520
uuaggaaucaauaacagca

SEQ ID NO: 2192522 - RNA, 19 nt, Artificial Sequence
  Description of Artificial Sequence: Synthetic oligonucleotide
  Sense strand starting at position 165 of SEQ ID NO: 1883416
ugaauaucuuguguacaca

SEQ ID NO: 2192523 - RNA, 19 nt, Artificial Sequence
  Description of Artificial Sequence: Synthetic oligonucleotide
  Antisense strand to SEQ ID NO: 2192522
uguguacacaagauauuca

SEQ ID NO: 2192524 - RNA, 19 nt, Artificial Sequence
  Description of Artificial Sequence: Synthetic oligonucleotide
  Sense strand starting at position 173 of SEQ ID NO: 1883416
uuguguacacauggaaagu

SEQ ID NO: 2192525 - RNA, 19 nt, Artificial Sequence
  Description of Artificial Sequence: Synthetic oligonucleotide
  Antisense strand to SEQ ID NO: 2192524
acuuuccauguguacacaa

SEQ ID NO: 2192526 - RNA, 19 nt, Artificial Sequence
  Description of Artificial Sequence: Synthetic oligonucleotide
  Sense strand starting at position 174 of SEQ ID NO: 1883416
uguguacacauggaaagua

SEQ ID NO: 2192527 - RNA, 19 nt, Artificial Sequence
  Description of Artificial Sequence: Synthetic oligonucleotide
  Antisense strand to SEQ ID NO: 2192526
uacuuuccauguguacaca

SEQ ID NO: 2192528 - RNA, 19 nt, Artificial Sequence
  Description of Artificial Sequence: Synthetic oligonucleotide
  Sense strand starting at position 468 of SEQ ID NO: 1883416
cgagauugcaacugcauuu

SEQ ID NO: 2192529 - RNA, 19 nt, Artificial Sequence
  Description of Artificial Sequence: Synthetic oligonucleotide
  Antisense strand to SEQ ID NO: 2192528
aaaugcaguugcaaucucg

SEQ ID NO: 2192530 - RNA, 19 nt, Artificial Sequence
  Description of Artificial Sequence: Synthetic oligonucleotide
  Sense strand starting at position 547 of SEQ ID NO: 1883416
ucucaagaugguuaauagu

SEQ ID NO: 2192531 - RNA, 19 nt, Artificial Sequence
  Description of Artificial Sequence: Synthetic oligonucleotide
  Antisense strand to SEQ ID NO: 2192530
acuauuaaccaucuugaga

SEQ ID NO: 2192532 - RNA, 19 nt, Artificial Sequence
  Description of Artificial Sequence: Synthetic oligonucleotide
  Sense strand starting at position 571 of SEQ ID NO: 1883416
uuaggucuucuauauacuu

SEQ ID NO: 2192533 - RNA, 19 nt, Artificial Sequence
  Description of Artificial Sequence: Synthetic oligonucleotide
  Antisense strand to SEQ ID NO: 2192532
aaguauauagaagaccuaa

SEQ ID NO: 2192534 - RNA, 19 nt, Artificial Sequence
  Description of Artificial Sequence: Synthetic oligonucleotide
  Sense strand starting at position 603 of SEQ ID NO: 1883416
cuacuuguguuauuaugaa

SEQ ID NO: 2192535 - RNA, 19 nt, Artificial Sequence
  Description of Artificial Sequence: Synthetic oligonucleotide
  Antisense strand to SEQ ID NO: 2192534
uucauaauaacacaaguag

SEQ ID NO: 2192536 - RNA, 19 nt, Artificial Sequence
  Description of Artificial Sequence: Synthetic oligonucleotide
  Sense strand starting at position 656 of SEQ ID NO: 1883416
gugucuauuucuucuugaa

SEQ ID NO: 2192537 - RNA, 19 nt, Artificial Sequence
  Description of Artificial Sequence: Synthetic oligonucleotide
  Antisense strand to SEQ ID NO: 2192536
uucaagaagaaauagacac

SEQ ID NO: 2192538 - RNA, 19 nt, Artificial Sequence
  Description of Artificial Sequence: Synthetic oligonucleotide
  Sense strand starting at position 708 of SEQ ID NO: 1883416
ucuguuauuagguacguaa

SEQ ID NO: 2192539 - RNA, 19 nt, Artificial Sequence
  Description of Artificial Sequence: Synthetic oligonucleotide
  Antisense strand to SEQ ID NO: 2192538
uuacguaccuaauaacaga

SEQ ID NO: 2192540 - RNA, 19 nt, Artificial Sequence
  Description of Artificial Sequence: Synthetic oligonucleotide
  Sense strand starting at position 711 of SEQ ID NO: 1883416
guuauuagguacguaaaca

SEQ ID NO: 2192541 - RNA, 19 nt, Artificial Sequence
  Description of Artificial Sequence: Synthetic oligonucleotide
  Antisense strand to SEQ ID NO: 2192540
uguuuacguaccuaauaac

SEQ ID NO: 2192542 - RNA, 19 nt, Artificial Sequence
  Description of Artificial Sequence: Synthetic oligonucleotide
  Sense strand starting at position 740 of SEQ ID NO: 1883416
uuguguccucuugauaaau

SEQ ID NO: 2192543 - RNA, 19 nt, Artificial Sequence
  Description of Artificial Sequence: Synthetic oligonucleotide
  Antisense strand to SEQ ID NO: 2192542
auuuaucaagaggacacaa

SEQ ID NO: 2192544 - RNA, 19 nt, Artificial Sequence
  Description of Artificial Sequence: Synthetic oligonucleotide
  Sense strand starting at position 788 of SEQ ID NO: 1883416
cucuuuccacgguaauauu

SEQ ID NO: 2192545 - RNA, 19 nt, Artificial Sequence
  Description of Artificial Sequence: Synthetic oligonucleotide
  Antisense strand to SEQ ID NO: 2192544
aauauuaccguggaaagag

SEQ ID NO: 2192546 - RNA, 19 nt, Artificial Sequence
  Description of Artificial Sequence: Synthetic oligonucleotide
  Sense strand starting at position 797 of SEQ ID NO: 1883416
cgguaauauuauuugcuuu

SEQ ID NO: 2192547 - RNA, 19 nt, Artificial Sequence
  Description of Artificial Sequence: Synthetic oligonucleotide
  Antisense strand to SEQ ID NO: 2192546
aaagcaaauaauauuaccg

SEQ ID NO: 2192548 - RNA, 19 nt, Artificial Sequence
  Description of Artificial Sequence: Synthetic oligonucleotide
  Sense strand starting at position 813 of SEQ ID NO: 1883416
uuugaaacguucuugauau

SEQ ID NO: 2192549 - RNA, 19 nt, Artificial Sequence
  Description of Artificial Sequence: Synthetic oligonucleotide
  Antisense strand to SEQ ID NO: 2192548
auaucaagaacguuucaaa

SEQ ID NO: 2192550 - RNA, 19 nt, Artificial Sequence
  Description of Artificial Sequence: Synthetic oligonucleotide
  Sense strand starting at position 815 of SEQ ID NO: 1883416
ugaaacguucuugauauau

SEQ ID NO: 2192551 - RNA, 19 nt, Artificial Sequence
  Description of Artificial Sequence: Synthetic oligonucleotide
  Antisense strand to SEQ ID NO: 2192550
auauaucaagaacguuuca

SEQ ID NO: 2192552 - RNA, 19 nt, Artificial Sequence
  Description of Artificial Sequence: Synthetic oligonucleotide
  Sense strand starting at position 1218 of SEQ ID NO: 1883416
uggauuaagcauuauuauc

SEQ ID NO: 2192553 - RNA, 19 nt, Artificial Sequence
  Description of Artificial Sequence: Synthetic oligonucleotide
  Antisense strand to SEQ ID NO: 2192552
gauaauaaugcuuaaucca

SEQ ID NO: 2192554 - RNA, 19 nt, Artificial Sequence
  Description of Artificial Sequence: Synthetic oligonucleotide
  Sense strand starting at position 1392 of SEQ ID NO: 1883416
uuaaauaucuaugucagag

SEQ ID NO: 2192555 - RNA, 19 nt, Artificial Sequence
  Description of Artificial Sequence: Synthetic oligonucleotide
  Antisense strand to SEQ ID NO: 2192554
cucugacauagauauuuaa

SEQ ID NO: 2192556 - RNA, 19 nt, Artificial Sequence
  Description of Artificial Sequence: Synthetic oligonucleotide
  Sense strand starting at position 1436 of SEQ ID NO: 1883416
gggucaacagaaugcuuaa

SEQ ID NO: 2192557 - RNA, 19 nt, Artificial Sequence
  Description of Artificial Sequence: Synthetic oligonucleotide
  Antisense strand to SEQ ID NO: 2192556
uuaagcauucuguugaccc

SEQ ID NO: 2192558 - RNA, 19 nt, Artificial Sequence
  Description of Artificial Sequence: Synthetic oligonucleotide
  Sense strand starting at position 1622 of SEQ ID NO: 1883416
ucucgaagccuagaggauu

SEQ ID NO: 2192559 - RNA, 19 nt, Artificial Sequence
  Description of Artificial Sequence: Synthetic oligonucleotide
  Antisense strand to SEQ ID NO: 2192558
aauccucuaggcuucgaga

SEQ ID NO: 2192560 - RNA, 19 nt, Artificial Sequence
  Description of Artificial Sequence: Synthetic oligonucleotide
  Sense strand starting at position 1664 of SEQ ID NO: 1883416
cuggauagccaucaucuga

SEQ ID NO: 2192561 - RNA, 19 nt, Artificial Sequence
  Description of Artificial Sequence: Synthetic oligonucleotide
  Antisense strand to SEQ ID NO: 2192560
ucagaugauggcuauccag

SEQ ID NO: 2192562 - RNA, 19 nt, Artificial Sequence
  Description of Artificial Sequence: Synthetic oligonucleotide
  Sense strand starting at position 1708 of SEQ ID NO: 1883416
acagucuucucagucaucu

SEQ ID NO: 2192563 - RNA, 19 nt, Artificial Sequence
  Description of Artificial Sequence: Synthetic oligonucleotide
  Antisense strand to SEQ ID NO: 2192562
agaugacugagaagacugu

SEQ ID NO: 2192564 - RNA, 19 nt, Artificial Sequence
  Description of Artificial Sequence: Synthetic oligonucleotide
  Sense strand starting at position 1763 of SEQ ID NO: 1883416
guccauuggucuuuacuga

SEQ ID NO: 2192565 - RNA, 19 nt, Artificial Sequence
  Description of Artificial Sequence: Synthetic oligonucleotide
  Antisense strand to SEQ ID NO: 2192564
ucaguaaagaccaauggac

SEQ ID NO: 2192566 - RNA, 19 nt, Artificial Sequence
  Description of Artificial Sequence: Synthetic oligonucleotide
  Sense strand starting at position 1821 of SEQ ID NO: 1883416
gguagcuuuagguaaggau

SEQ ID NO: 2192567 - RNA, 19 nt, Artificial Sequence
  Description of Artificial Sequence: Synthetic oligonucleotide
  Antisense strand to SEQ ID NO: 2192566
auccuuaccuaaagcuacc

SEQ ID NO: 2192568 - RNA, 19 nt, Artificial Sequence
  Description of Artificial Sequence: Synthetic oligonucleotide
  Sense strand starting at position 1982 of SEQ ID NO: 1883416
cauagaucagaguagccau

SEQ ID NO: 2192569 - RNA, 19 nt, Artificial Sequence
  Description of Artificial Sequence: Synthetic oligonucleotide
  Antisense strand to SEQ ID NO: 2192568
auggcuacucugaucuaug

SEQ ID NO: 2192570 - RNA, 19 nt, Artificial Sequence
  Description of Artificial Sequence: Synthetic oligonucleotide
  Sense strand starting at position 1993 of SEQ ID NO: 1883416
guagccauucuggauuauu

SEQ ID NO: 2192571 - RNA, 19 nt, Artificial Sequence
  Description of Artificial Sequence: Synthetic oligonucleotide
  Antisense strand to SEQ ID NO: 2192570
aauaauccagaauggcuac

SEQ ID NO: 2192572 - RNA, 19 nt, Artificial Sequence
  Description of Artificial Sequence: Synthetic oligonucleotide
  Sense strand starting at position 2216 of SEQ ID NO: 1883416
acuauucuuguuuguuaac

SEQ ID NO: 2192573 - RNA, 19 nt, Artificial Sequence
  Description of Artificial Sequence: Synthetic oligonucleotide
  Antisense strand to SEQ ID NO: 2192572
guuaacaaacaagaauagu

SEQ ID NO: 2192574 - RNA, 19 nt, Artificial Sequence
  Description of Artificial Sequence: Synthetic oligonucleotide
  Sense strand starting at position 2358 of SEQ ID NO: 1883416
aagggcuuccuugaauguu

SEQ ID NO: 2192575 - RNA, 19 nt, Artificial Sequence
  Description of Artificial Sequence: Synthetic oligonucleotide
  Antisense strand to SEQ ID NO: 2192574
aacauucaaggaagcccuu

SEQ ID NO: 2192576 - RNA, 19 nt, Artificial Sequence
  Description of Artificial Sequence: Synthetic oligonucleotide
  Sense strand starting at position 2381 of SEQ ID NO: 1883416
guuguaugagucuacuggu

SEQ ID NO: 2192577 - RNA, 19 nt, Artificial Sequence
  Description of Artificial Sequence: Synthetic oligonucleotide
  Antisense strand to SEQ ID NO: 2192576
accaguagacucauacaac

SEQ ID NO: 2192578 - RNA, 19 nt, Artificial Sequence
  Description of Artificial Sequence: Synthetic oligonucleotide
  Sense strand starting at position 2387 of SEQ ID NO: 1883416
ugagucuacugguuaugaa

SEQ ID NO: 2192579 - RNA, 19 nt, Artificial Sequence
  Description of Artificial Sequence: Synthetic oligonucleotide
  Antisense strand to SEQ ID NO: 2192578
uucauaaccaguagacuca

SEQ ID NO: 2192580 - RNA, 19 nt, Artificial Sequence
  Description of Artificial Sequence: Synthetic oligonucleotide
  Sense strand starting at position 2388 of SEQ ID NO: 1883416
gagucuacugguuaugaau

SEQ ID NO: 2192581 - RNA, 19 nt, Artificial Sequence
  Description of Artificial Sequence: Synthetic oligonucleotide
  Antisense strand to SEQ ID NO: 2192580
auucauaaccaguagacuc

SEQ ID NO: 2192582 - RNA, 19 nt, Artificial Sequence
  Description of Artificial Sequence: Synthetic oligonucleotide
  Sense strand starting at position 2824 of SEQ ID NO: 1883416
ccuacaaguguugagauua

SEQ ID NO: 2192583 - RNA, 19 nt, Artificial Sequence
  Description of Artificial Sequence: Synthetic oligonucleotide
  Antisense strand to SEQ ID NO: 2192582
uaaucucaacacuuguagg

SEQ ID NO: 2192584 - RNA, 19 nt, Artificial Sequence
  Description of Artificial Sequence: Synthetic oligonucleotide
  Sense strand starting at position 2871 of SEQ ID NO: 1883416
uguacuauuucugaugaga

SEQ ID NO: 2192585 - RNA, 19 nt, Artificial Sequence
  Description of Artificial Sequence: Synthetic oligonucleotide
  Antisense strand to SEQ ID NO: 2192584
ucucaucagaaauaguaca

SEQ ID NO: 2192586 - RNA, 19 nt, Artificial Sequence
  Description of Artificial Sequence: Synthetic oligonucleotide
  Sense strand starting at position 3040 of SEQ ID NO: 1883416
acuugucagaucugugagu

SEQ ID NO: 2192587 - RNA, 19 nt, Artificial Sequence
  Description of Artificial Sequence: Synthetic oligonucleotide
  Antisense strand to SEQ ID NO: 2192586
acucacagaucugacaagu

SEQ ID NO: 2192588 - RNA, 19 nt, Artificial Sequence
  Description of Artificial Sequence: Synthetic oligonucleotide
  Sense strand starting at position 3068 of SEQ ID NO: 1883416
ucaucuaauuugggaauau

SEQ ID NO: 2192589 - RNA, 19 nt, Artificial Sequence
  Description of Artificial Sequence: Synthetic oligonucleotide
  Antisense strand to SEQ ID NO: 2192588
auauucccaaauuagauga

SEQ ID NO: 2192590 - RNA, 19 nt, Artificial Sequence
  Description of Artificial Sequence: Synthetic oligonucleotide
  Sense strand starting at position 3079 of SEQ ID NO: 1883416
gggaauaugucagccauga

SEQ ID NO: 2192591 - RNA, 19 nt, Artificial Sequence
  Description of Artificial Sequence: Synthetic oligonucleotide
  Antisense strand to SEQ ID NO: 2192590
ucauggcugacauauuccc

SEQ ID NO: 2192592 - RNA, 19 nt, Artificial Sequence
  Description of Artificial Sequence: Synthetic oligonucleotide
  Sense strand starting at position 3154 of SEQ ID NO: 1883416
cagggaaucuaauugcaag

SEQ ID NO: 2192593 - RNA, 19 nt, Artificial Sequence
  Description of Artificial Sequence: Synthetic oligonucleotide
  Antisense strand to SEQ ID NO: 2192592
cuugcaauuagauucccug

SEQ ID NO: 2192594 - RNA, 19 nt, Artificial Sequence
  Description of Artificial Sequence: Synthetic oligonucleotide
  Sense strand starting at position 3155 of SEQ ID NO: 1883416
agggaaucuaauugcaagu

SEQ ID NO: 2192595 - RNA, 19 nt, Artificial Sequence
  Description of Artificial Sequence: Synthetic oligonucleotide
  Antisense strand to SEQ ID NO: 2192594
acuugcaauuagauucccu

SEQ ID NO: 2192596 - RNA, 19 nt, Artificial Sequence
  Description of Artificial Sequence: Synthetic oligonucleotide
  Sense strand starting at position 3586 of SEQ ID NO: 1883416
uucuguaaugucuaaucuu

SEQ ID NO: 2192597 - RNA, 19 nt, Artificial Sequence
  Description of Artificial Sequence: Synthetic oligonucleotide
  Antisense strand to SEQ ID NO: 2192596
aagauuagacauuacagaa

SEQ ID NO: 2192598 - RNA, 19 nt, Artificial Sequence
  Description of Artificial Sequence: Synthetic oligonucleotide
  Sense strand starting at position 23 of SEQ ID NO: 1883417
cugucuucuccuggauaaa

SEQ ID NO: 2192599 - RNA, 19 nt, Artificial Sequence
  Description of Artificial Sequence: Synthetic oligonucleotide
  Antisense strand to SEQ ID NO: 2192598
uuuauccaggagaagacag

SEQ ID NO: 2192600 - RNA, 19 nt, Artificial Sequence
  Description of Artificial Sequence: Synthetic oligonucleotide
  Sense strand starting at position 24 of SEQ ID NO: 1883417
ugucuucuccuggauaaau

SEQ ID NO: 2192601 - RNA, 19 nt, Artificial Sequence
  Description of Artificial Sequence: Synthetic oligonucleotide
  Antisense strand to SEQ ID NO: 2192600
auuuauccaggagaagaca

SEQ ID NO: 2192602 - RNA, 19 nt, Artificial Sequence
  Description of Artificial Sequence: Synthetic oligonucleotide
  Sense strand starting at position 80 of SEQ ID NO: 1883417
ggcgcucaacuguauaaug

SEQ ID NO: 2192603 - RNA, 19 nt, Artificial Sequence
  Description of Artificial Sequence: Synthetic oligonucleotide
  Antisense strand to SEQ ID NO: 2192602
cauuauacaguugagcgcc

SEQ ID NO: 2192604 - RNA, 19 nt, Artificial Sequence
  Description of Artificial Sequence: Synthetic oligonucleotide
  Sense strand starting at position 82 of SEQ ID NO: 1883417
cgcucaacuguauaaugga

SEQ ID NO: 2192605 - RNA, 19 nt, Artificial Sequence
  Description of Artificial Sequence: Synthetic oligonucleotide
  Antisense strand to SEQ ID NO: 2192604
uccauuauacaguugagcg

SEQ ID NO: 2192606 - RNA, 19 nt, Artificial Sequence
  Description of Artificial Sequence: Synthetic oligonucleotide
  Sense strand starting at position 119 of SEQ ID NO: 1883417
gugggauugcugggcuaag

SEQ ID NO: 2192607 - RNA, 19 nt, Artificial Sequence
  Description of Artificial Sequence: Synthetic oligonucleotide
  Antisense strand to SEQ ID NO: 2192606
cuuagcccagcaaucccac

SEQ ID NO: 2192608 - RNA, 19 nt, Artificial Sequence
  Description of Artificial Sequence: Synthetic oligonucleotide
  Sense strand starting at position 206 of SEQ ID NO: 1883417
cacggagagucaccauauu

SEQ ID NO: 2192609 - RNA, 19 nt, Artificial Sequence
  Description of Artificial Sequence: Synthetic oligonucleotide
  Antisense strand to SEQ ID NO: 2192608
aauauggugacucuccgug

SEQ ID NO: 2192610 - RNA, 19 nt, Artificial Sequence
  Description of Artificial Sequence: Synthetic oligonucleotide
  Sense strand starting at position 320 of SEQ ID NO: 1883417
uacuuucuagugugagaga

SEQ ID NO: 2192611 - RNA, 19 nt, Artificial Sequence
  Description of Artificial Sequence: Synthetic oligonucleotide
  Antisense strand to SEQ ID NO: 2192610
ucucucacacuagaaagua

SEQ ID NO: 2192612 - RNA, 19 nt, Artificial Sequence
  Description of Artificial Sequence: Synthetic oligonucleotide
  Sense strand starting at position 386 of SEQ ID NO: 1883417
acaucuaagagcuaugggu

SEQ ID NO: 2192613 - RNA, 19 nt, Artificial Sequence
  Description of Artificial Sequence: Synthetic oligonucleotide
  Antisense strand to SEQ ID NO: 2192612
acccauagcucuuagaugu

SEQ ID NO: 2192614 - RNA, 19 nt, Artificial Sequence
  Description of Artificial Sequence: Synthetic oligonucleotide
  Sense strand starting at position 388 of SEQ ID NO: 1883417
aucuaagagcuauggguga

SEQ ID NO: 2192615 - RNA, 19 nt, Artificial Sequence
  Description of Artificial Sequence: Synthetic oligonucleotide
  Antisense strand to SEQ ID NO: 2192614
ucacccauagcucuuagau

SEQ ID NO: 2192616 - RNA, 19 nt, Artificial Sequence
  Description of Artificial Sequence: Synthetic oligonucleotide
  Sense strand starting at position 390 of SEQ ID NO: 1883417
cuaagagcuaugggugaga

SEQ ID NO: 2192617 - RNA, 19 nt, Artificial Sequence
  Description of Artificial Sequence: Synthetic oligonucleotide
  Antisense strand to SEQ ID NO: 2192616
ucucacccauagcucuuag

SEQ ID NO: 2192618 - RNA, 19 nt, Artificial Sequence
  Description of Artificial Sequence: Synthetic oligonucleotide
  Sense strand starting at position 453 of SEQ ID NO: 1883417
agggaagccugucugagaa

SEQ ID NO: 2192619 - RNA, 19 nt, Artificial Sequence
  Description of Artificial Sequence: Synthetic oligonucleotide
  Antisense strand to SEQ ID NO: 2192618
uucucagacaggcuucccu

SEQ ID NO: 2192620 - RNA, 19 nt, Artificial Sequence
  Description of Artificial Sequence: Synthetic oligonucleotide
  Sense strand starting at position 564 of SEQ ID NO: 1883417
ggccucaaguggucugaga

SEQ ID NO: 2192621 - RNA, 19 nt, Artificial Sequence
  Description of Artificial Sequence: Synthetic oligonucleotide
  Antisense strand to SEQ ID NO: 2192620
ucucagaccacuugaggcc

SEQ ID NO: 2192622 - RNA, 19 nt, Artificial Sequence
  Description of Artificial Sequence: Synthetic oligonucleotide
  Sense strand starting at position 700 of SEQ ID NO: 1883417
acuugucagcugcagaacu

SEQ ID NO: 2192623 - RNA, 19 nt, Artificial Sequence
  Description of Artificial Sequence: Synthetic oligonucleotide
  Antisense strand to SEQ ID NO: 2192622
aguucugcagcugacaagu

SEQ ID NO: 2192624 - RNA, 19 nt, Artificial Sequence
  Description of Artificial Sequence: Synthetic oligonucleotide
  Sense strand starting at position 826 of SEQ ID NO: 1883417
gggaaacugugaccuuuaa

SEQ ID NO: 2192625 - RNA, 19 nt, Artificial Sequence
  Description of Artificial Sequence: Synthetic oligonucleotide
  Antisense strand to SEQ ID NO: 2192624
uuaaaggucacaguuuccc

SEQ ID NO: 2192626 - RNA, 19 nt, Artificial Sequence
  Description of Artificial Sequence: Synthetic oligonucleotide
  Sense strand starting at position 1115 of SEQ ID NO: 1883417
guauguguuaaagagucau

SEQ ID NO: 2192627 - RNA, 19 nt, Artificial Sequence
  Description of Artificial Sequence: Synthetic oligonucleotide
  Antisense strand to SEQ ID NO: 2192626
augacucuuuaacacauac

SEQ ID NO: 2192628 - RNA, 19 nt, Artificial Sequence
  Description of Artificial Sequence: Synthetic oligonucleotide
  Sense strand starting at position 1309 of SEQ ID NO: 1883417
cccuuucugcagcaugaga

SEQ ID NO: 2192629 - RNA, 19 nt, Artificial Sequence
  Description of Artificial Sequence: Synthetic oligonucleotide
  Antisense strand to SEQ ID NO: 2192628
ucucaugcugcagaaaggg

SEQ ID NO: 2192630 - RNA, 19 nt, Artificial Sequence
  Description of Artificial Sequence: Synthetic oligonucleotide
  Sense strand starting at position 1311 of SEQ ID NO: 1883417
cuuucugcagcaugagaga

SEQ ID NO: 2192631 - RNA, 19 nt, Artificial Sequence
  Description of Artificial Sequence: Synthetic oligonucleotide
  Antisense strand to SEQ ID NO: 2192630
ucucucaugcugcagaaag

SEQ ID NO: 2192632 - RNA, 19 nt, Artificial Sequence
  Description of Artificial Sequence: Synthetic oligonucleotide
  Sense strand starting at position 1322 of SEQ ID NO: 1883417
augagagacugugccaaau

SEQ ID NO: 2192633 - RNA, 19 nt, Artificial Sequence
  Description of Artificial Sequence: Synthetic oligonucleotide
  Antisense strand to SEQ ID NO: 2192632
auuuggcacagucucucau

SEQ ID NO: 2192634 - RNA, 19 nt, Artificial Sequence
  Description of Artificial Sequence: Synthetic oligonucleotide
  Sense strand starting at position 1398 of SEQ ID NO: 1883417
gauggugacagauacguaa

SEQ ID NO: 2192635 - RNA, 19 nt, Artificial Sequence
  Description of Artificial Sequence: Synthetic oligonucleotide
  Antisense strand to SEQ ID NO: 2192634
uuacguaucugucaccauc

SEQ ID NO: 2192636 - RNA, 19 nt, Artificial Sequence
  Description of Artificial Sequence: Synthetic oligonucleotide
  Sense strand starting at position 1402 of SEQ ID NO: 1883417
gugacagauacguaaacug

SEQ ID NO: 2192637 - RNA, 19 nt, Artificial Sequence
  Description of Artificial Sequence: Synthetic oligonucleotide
  Antisense strand to SEQ ID NO: 2192636
caguuuacguaucugucac

SEQ ID NO: 2192638 - RNA, 19 nt, Artificial Sequence
  Description of Artificial Sequence: Synthetic oligonucleotide
  Sense strand starting at position 1409 of SEQ ID NO: 1883417
auacguaaacugggaacau

SEQ ID NO: 2192639 - RNA, 19 nt, Artificial Sequence
  Description of Artificial Sequence: Synthetic oligonucleotide
  Antisense strand to SEQ ID NO: 2192638
auguucccaguuuacguau

SEQ ID NO: 2192640 - RNA, 19 nt, Artificial Sequence
  Description of Artificial Sequence: Synthetic oligonucleotide
  Sense strand starting at position 1544 of SEQ ID NO: 1883417
cacagagggugcucauuaa

SEQ ID NO: 2192641 - RNA, 19 nt, Artificial Sequence
  Description of Artificial Sequence: Synthetic oligonucleotide
  Antisense strand to SEQ ID NO: 2192640
uuaaugagcacccucugug

SEQ ID NO: 2192642 - RNA, 19 nt, Artificial Sequence
  Description of Artificial Sequence: Synthetic oligonucleotide
  Sense strand starting at position 1562 of SEQ ID NO: 1883417
aaugccaccucguugagaa

SEQ ID NO: 2192643 - RNA, 19 nt, Artificial Sequence
  Description of Artificial Sequence: Synthetic oligonucleotide
  Antisense strand to SEQ ID NO: 2192642
uucucaacgagguggcauu

SEQ ID NO: 2192644 - RNA, 19 nt, Artificial Sequence
  Description of Artificial Sequence: Synthetic oligonucleotide
  Sense strand starting at position 2081 of SEQ ID NO: 1883417
acugacucagagcaguauu

SEQ ID NO: 2192645 - RNA, 19 nt, Artificial Sequence
  Description of Artificial Sequence: Synthetic oligonucleotide
  Antisense strand to SEQ ID NO: 2192644
aauacugcucugagucagu

SEQ ID NO: 2192646 - RNA, 19 nt, Artificial Sequence
  Description of Artificial Sequence: Synthetic oligonucleotide
  Sense strand starting at position 2118 of SEQ ID NO: 1883417
uguguuuggcccuaacaga

SEQ ID NO: 2192647 - RNA, 19 nt, Artificial Sequence
  Description of Artificial Sequence: Synthetic oligonucleotide
  Antisense strand to SEQ ID NO: 2192646
ucuguuagggccaaacaca

SEQ ID NO: 2192648 - RNA, 19 nt, Artificial Sequence
  Description of Artificial Sequence: Synthetic oligonucleotide
  Sense strand starting at position 2126 of SEQ ID NO: 1883417
gcccuaacagaguguaacu

SEQ ID NO: 2192649 - RNA, 19 nt, Artificial Sequence
  Description of Artificial Sequence: Synthetic oligonucleotide
  Antisense strand to SEQ ID NO: 2192648
aguuacacucuguuagggc

SEQ ID NO: 2192650 - RNA, 19 nt, Artificial Sequence
  Description of Artificial Sequence: Synthetic oligonucleotide
  Sense strand starting at position 2334 of SEQ ID NO: 1883417
aggagaauguuugugacug

SEQ ID NO: 2192651 - RNA, 19 nt, Artificial Sequence
  Description of Artificial Sequence: Synthetic oligonucleotide
  Antisense strand to SEQ ID NO: 2192650
cagucacaaacauucuccu

SEQ ID NO: 2192652 - RNA, 19 nt, Artificial Sequence
  Description of Artificial Sequence: Synthetic oligonucleotide
  Sense strand starting at position 2342 of SEQ ID NO: 1883417
guuugugacuggcuuagaa

SEQ ID NO: 2192653 - RNA, 19 nt, Artificial Sequence
  Description of Artificial Sequence: Synthetic oligonucleotide
  Antisense strand to SEQ ID NO: 2192652
uucuaagccagucacaaac

SEQ ID NO: 2192654 - RNA, 19 nt, Artificial Sequence
  Description of Artificial Sequence: Synthetic oligonucleotide
  Sense strand starting at position 2344 of SEQ ID NO: 1883417
uugugacuggcuuagaaag

SEQ ID NO: 2192655 - RNA, 19 nt, Artificial Sequence
  Description of Artificial Sequence: Synthetic oligonucleotide
  Antisense strand to SEQ ID NO: 2192654
cuuucuaagccagucacaa

SEQ ID NO: 2192656 - RNA, 19 nt, Artificial Sequence
  Description of Artificial Sequence: Synthetic oligonucleotide
  Sense strand starting at position 2558 of SEQ ID NO: 1883417
aggaccuguucuguucuua

SEQ ID NO: 2192657 - RNA, 19 nt, Artificial Sequence
  Description of Artificial Sequence: Synthetic oligonucleotide
  Antisense strand to SEQ ID NO: 2192656
uaagaacagaacagguccu

SEQ ID NO: 2192658 - RNA, 19 nt, Artificial Sequence
  Description of Artificial Sequence: Synthetic oligonucleotide
  Sense strand starting at position 2651 of SEQ ID NO: 1883417
uucccaauccaguguauuu

SEQ ID NO: 2192659 - RNA, 19 nt, Artificial Sequence
  Description of Artificial Sequence: Synthetic oligonucleotide
  Antisense strand to SEQ ID NO: 2192658
aaauacacuggauugggaa

SEQ ID NO: 2192660 - RNA, 19 nt, Artificial Sequence
  Description of Artificial Sequence: Synthetic oligonucleotide
  Sense strand starting at position 2780 of SEQ ID NO: 1883417
cuaugauguaucggcuaaa

SEQ ID NO: 2192661 - RNA, 19 nt, Artificial Sequence
  Description of Artificial Sequence: Synthetic oligonucleotide
  Antisense strand to SEQ ID NO: 2192660
uuuagccgauacaucauag

SEQ ID NO: 2192662 - RNA, 19 nt, Artificial Sequence
  Description of Artificial Sequence: Synthetic oligonucleotide
  Sense strand starting at position 2954 of SEQ ID NO: 1883417
cccugauccgccgcucuaa

SEQ ID NO: 2192663 - RNA, 19 nt, Artificial Sequence
  Description of Artificial Sequence: Synthetic oligonucleotide
  Antisense strand to SEQ ID NO: 2192662
uuagagcggcggaucaggg

SEQ ID NO: 2192664 - RNA, 19 nt, Artificial Sequence
  Description of Artificial Sequence: Synthetic oligonucleotide
  Sense strand starting at position 2984 of SEQ ID NO: 1883417
agggauuccugcccagaau

SEQ ID NO: 2192665 - RNA, 19 nt, Artificial Sequence
  Description of Artificial Sequence: Synthetic oligonucleotide
  Antisense strand to SEQ ID NO: 2192664
auucugggcaggaaucccu

SEQ ID NO: 2192666 - RNA, 19 nt, Artificial Sequence
  Description of Artificial Sequence: Synthetic oligonucleotide
  Sense strand starting at position 2985 of SEQ ID NO: 1883417
gggauuccugcccagaaug

SEQ ID NO: 2192667 - RNA, 19 nt, Artificial Sequence
  Description of Artificial Sequence: Synthetic oligonucleotide
  Antisense strand to SEQ ID NO: 2192666
cauucugggcaggaauccc

SEQ ID NO: 2192668 - RNA, 19 nt, Artificial Sequence
  Description of Artificial Sequence: Synthetic oligonucleotide
  Sense strand starting at position 3071 of SEQ ID NO: 1883417
cuaugaguuguagauuauu

SEQ ID NO: 2192669 - RNA, 19 nt, Artificial Sequence
  Description of Artificial Sequence: Synthetic oligonucleotide
  Antisense strand to SEQ ID NO: 2192668
aauaaucuacaacucauag

SEQ ID NO: 2192670 - RNA, 19 nt, Artificial Sequence
  Description of Artificial Sequence: Synthetic oligonucleotide
  Sense strand starting at position 3074 of SEQ ID NO: 1883417
ugaguuguagauuauuguu

SEQ ID NO: 2192671 - RNA, 19 nt, Artificial Sequence
  Description of Artificial Sequence: Synthetic oligonucleotide
  Antisense strand to SEQ ID NO: 2192670
aacaauaaucuacaacuca

SEQ ID NO: 2192672 - RNA, 19 nt, Artificial Sequence
  Description of Artificial Sequence: Synthetic oligonucleotide
  Sense strand starting at position 3083 of SEQ ID NO: 1883417
gauuauuguuaaccgacuu

SEQ ID NO: 2192673 - RNA, 19 nt, Artificial Sequence
  Description of Artificial Sequence: Synthetic oligonucleotide
  Antisense strand to SEQ ID NO: 2192672
aagucgguuaacaauaauc

SEQ ID NO: 2192674 - RNA, 19 nt, Artificial Sequence
  Description of Artificial Sequence: Synthetic oligonucleotide
  Sense strand starting at position 3090 of SEQ ID NO: 1883417
guuaaccgacuuuagagau

SEQ ID NO: 2192675 - RNA, 19 nt, Artificial Sequence
  Description of Artificial Sequence: Synthetic oligonucleotide
  Antisense strand to SEQ ID NO: 2192674
aucucuaaagucgguuaac

SEQ ID NO: 2192676 - RNA, 19 nt, Artificial Sequence
  Description of Artificial Sequence: Synthetic oligonucleotide
  Sense strand starting at position 3859 of SEQ ID NO: 1883417
gagggaauguguuuccuug

SEQ ID NO: 2192677 - RNA, 19 nt, Artificial Sequence
  Description of Artificial Sequence: Synthetic oligonucleotide
  Antisense strand to SEQ ID NO: 2192676
caaggaaacacauucccuc

SEQ ID NO: 2192678 - RNA, 19 nt, Artificial Sequence
  Description of Artificial Sequence: Synthetic oligonucleotide
  Sense strand starting at position 247 of SEQ ID NO: 1883418
agguaaucagaguguguag

SEQ ID NO: 2192679 - RNA, 19 nt, Artificial Sequence
  Description of Artificial Sequence: Synthetic oligonucleotide
  Antisense strand to SEQ ID NO: 2192678
cuacacacucugauuaccu

SEQ ID NO: 2192680 - RNA, 19 nt, Artificial Sequence
  Description of Artificial Sequence: Synthetic oligonucleotide
  Sense strand starting at position 312 of SEQ ID NO: 1883418
agacauucgggucagcauu

SEQ ID NO: 2192681 - RNA, 19 nt, Artificial Sequence
  Description of Artificial Sequence: Synthetic oligonucleotide
  Antisense strand to SEQ ID NO: 2192680
aaugcugacccgaaugucu

SEQ ID NO: 2192682 - RNA, 19 nt, Artificial Sequence
  Description of Artificial Sequence: Synthetic oligonucleotide
  Sense strand starting at position 545 of SEQ ID NO: 1883418
ggaucacagucauuaaagu

SEQ ID NO: 2192683 - RNA, 19 nt, Artificial Sequence
  Description of Artificial Sequence: Synthetic oligonucleotide
  Antisense strand to SEQ ID NO: 2192682
acuuuaaugacugugaucc

SEQ ID NO: 2192684 - RNA, 19 nt, Artificial Sequence
  Description of Artificial Sequence: Synthetic oligonucleotide
  Sense strand starting at position 559 of SEQ ID NO: 1883418
aaaguaagaugcucacuga

SEQ ID NO: 2192685 - RNA, 19 nt, Artificial Sequence
  Description of Artificial Sequence: Synthetic oligonucleotide
  Antisense strand to SEQ ID NO: 2192684
ucagugagcaucuuacuuu

SEQ ID NO: 2192686 - RNA, 19 nt, Artificial Sequence
  Description of Artificial Sequence: Synthetic oligonucleotide
  Sense strand starting at position 562 of SEQ ID NO: 1883418
guaagaugcucacugagac

SEQ ID NO: 2192687 - RNA, 19 nt, Artificial Sequence
  Description of Artificial Sequence: Synthetic oligonucleotide
  Antisense strand to SEQ ID NO: 2192686
gucucagugagcaucuuac

SEQ ID NO: 2192688 - RNA, 19 nt, Artificial Sequence
  Description of Artificial Sequence: Synthetic oligonucleotide
  Sense strand starting at position 1133 of SEQ ID NO: 1883418
gguccacucccagguuaau

SEQ ID NO: 2192689 - RNA, 19 nt, Artificial Sequence
  Description of Artificial Sequence: Synthetic oligonucleotide
  Antisense strand to SEQ ID NO: 2192688
auuaaccugggaguggacc

SEQ ID NO: 2192690 - RNA, 19 nt, Artificial Sequence
  Description of Artificial Sequence: Synthetic oligonucleotide
  Sense strand starting at position 1144 of SEQ ID NO: 1883418
agguuaaucgcggauuaac

SEQ ID NO: 2192691 - RNA, 19 nt, Artificial Sequence
  Description of Artificial Sequence: Synthetic oligonucleotide
  Antisense strand to SEQ ID NO: 2192690
guuaauccgcgauuaaccu

SEQ ID NO: 2192692 - RNA, 19 nt, Artificial Sequence
  Description of Artificial Sequence: Synthetic oligonucleotide
  Sense strand starting at position 1200 of SEQ ID NO: 1883418
cugcaaaggaucugagcau

SEQ ID NO: 2192693 - RNA, 19 nt, Artificial Sequence
  Description of Artificial Sequence: Synthetic oligonucleotide
  Antisense strand to SEQ ID NO: 2192692
augcucagauccuuugcag

SEQ ID NO: 2192694 - RNA, 19 nt, Artificial Sequence
  Description of Artificial Sequence: Synthetic oligonucleotide
  Sense strand starting at position 1330 of SEQ ID NO: 1883418
uggcguuauaaagacuaaa

SEQ ID NO: 2192695 - RNA, 19 nt, Artificial Sequence
  Description of Artificial Sequence: Synthetic oligonucleotide
  Antisense strand to SEQ ID NO: 2192694
uuuagucuuuauaacgcca

SEQ ID NO: 2192696 - RNA, 19 nt, Artificial Sequence
  Description of Artificial Sequence: Synthetic oligonucleotide
  Sense strand starting at position 1448 of SEQ ID NO: 1883418
acaugagccuacuuugaca

SEQ ID NO: 2192697 - RNA, 19 nt, Artificial Sequence
  Description of Artificial Sequence: Synthetic oligonucleotide
  Antisense strand to SEQ ID NO: 2192696
ugucaaaguaggcucaugu

SEQ ID NO: 2192698 - RNA, 19 nt, Artificial Sequence
  Description of Artificial Sequence: Synthetic oligonucleotide
  Sense strand starting at position 1577 of SEQ ID NO: 1883418
ggugggagagccuguaaga

SEQ ID NO: 2192699 - RNA, 19 nt, Artificial Sequence
  Description of Artificial Sequence: Synthetic oligonucleotide
  Antisense strand to SEQ ID NO: 2192698
ucuuacaggcucucccacc

SEQ ID NO: 2192700 - RNA, 19 nt, Artificial Sequence
  Description of Artificial Sequence: Synthetic oligonucleotide
  Sense strand starting at position 2068 of SEQ ID NO: 1883418
ggagagugcguguucuugu

SEQ ID NO: 2192701 - RNA, 19 nt, Artificial Sequence
  Description of Artificial Sequence: Synthetic oligonucleotide
  Antisense strand to SEQ ID NO: 2192700
acaagaacacgcacucucc

SEQ ID NO: 2192702 - RNA, 19 nt, Artificial Sequence
  Description of Artificial Sequence: Synthetic oligonucleotide
  Sense strand starting at position 2137 of SEQ ID NO: 1883418
gagugacacgacuagcuuu

SEQ ID NO: 2192703 - RNA, 19 nt, Artificial Sequence
  Description of Artificial Sequence: Synthetic oligonucleotide
  Antisense strand to SEQ ID NO: 2192702
aaagcuagucgugucacuc

SEQ ID NO: 2192704 - RNA, 19 nt, Artificial Sequence
  Description of Artificial Sequence: Synthetic oligonucleotide
  Sense strand starting at position 2188 of SEQ ID NO: 1883418
ugaaauaacuugccucaag

SEQ ID NO: 2192705 - RNA, 19 nt, Artificial Sequence
  Description of Artificial Sequence: Synthetic oligonucleotide
  Antisense strand to SEQ ID NO: 2192704
cuugaggcaaguuauuuca

SEQ ID NO: 2192706 - RNA, 19 nt, Artificial Sequence
  Description of Artificial Sequence: Synthetic oligonucleotide
  Sense strand starting at position 2202 of SEQ ID NO: 1883418
ucaaguugcacagauggua

SEQ ID NO: 2192707 - RNA, 19 nt, Artificial Sequence
  Description of Artificial Sequence: Synthetic oligonucleotide
  Antisense strand to SEQ ID NO: 2192706
uaccaucugugcaacuuga

SEQ ID NO: 2192708 - RNA, 19 nt, Artificial Sequence
  Description of Artificial Sequence: Synthetic oligonucleotide
  Sense strand starting at position 2216 of SEQ ID NO: 1883418
ugguacauucuagagucuu

SEQ ID NO: 2192709 - RNA, 19 nt, Artificial Sequence
  Description of Artificial Sequence: Synthetic oligonucleotide
  Antisense strand to SEQ ID NO: 2192708
aagacucuagaauguacca

SEQ ID NO: 2192710 - RNA, 19 nt, Artificial Sequence
  Description of Artificial Sequence: Synthetic oligonucleotide
  Sense strand starting at position 2224 of SEQ ID NO: 1883418
ucuagagucuuacuuugag

SEQ ID NO: 2192711 - RNA, 19 nt, Artificial Sequence
  Description of Artificial Sequence: Synthetic oligonucleotide
  Antisense strand to SEQ ID NO: 2192710
cucaaaguaagacucuaga

SEQ ID NO: 2192712 - RNA, 19 nt, Artificial Sequence
  Description of Artificial Sequence: Synthetic oligonucleotide
  Sense strand starting at position 2227 of SEQ ID NO: 1883418
agagucuuacuuugagcaa

SEQ ID NO: 2192713 - RNA, 19 nt, Artificial Sequence
  Description of Artificial Sequence: Synthetic oligonucleotide
  Antisense strand to SEQ ID NO: 2192712
uugcucaaaguaagacucu

SEQ ID NO: 2192714 - RNA, 19 nt, Artificial Sequence
  Description of Artificial Sequence: Synthetic oligonucleotide
  Sense strand starting at position 2240 of SEQ ID NO: 1883418
gagcaaagauaggucugau

SEQ ID NO: 2192715 - RNA, 19 nt, Artificial Sequence
  Description of Artificial Sequence: Synthetic oligonucleotide
  Antisense strand to SEQ ID NO: 2192714
aucagaccuaucuuugcuc

SEQ ID NO: 2192716 - RNA, 19 nt, Artificial Sequence
  Description of Artificial Sequence: Synthetic oligonucleotide
  Sense strand starting at position 2416 of SEQ ID NO: 1883418
cuaauagcacuguaagcua

SEQ ID NO: 2192717 - RNA, 19 nt, Artificial Sequence
  Description of Artificial Sequence: Synthetic oligonucleotide
  Antisense strand to SEQ ID NO: 2192716
uagcuuacagugcuauuag

SEQ ID NO: 2192718 - RNA, 19 nt, Artificial Sequence
  Description of Artificial Sequence: Synthetic oligonucleotide
  Sense strand starting at position 2507 of SEQ ID NO: 1883418
ggaaguuucugagcaccag

SEQ ID NO: 2192719 - RNA, 19 nt, Artificial Sequence
  Description of Artificial Sequence: Synthetic oligonucleotide
  Antisense strand to SEQ ID NO: 2192718
cuggugcucagaaacuucc

SEQ ID NO: 2192720 - RNA, 19 nt, Artificial Sequence
  Description of Artificial Sequence: Synthetic oligonucleotide
  Sense strand starting at position 2508 of SEQ ID NO: 1883418
gaaguuucugagcaccaga

SEQ ID NO: 2192721 - RNA, 19 nt, Artificial Sequence
  Description of Artificial Sequence: Synthetic oligonucleotide
  Antisense strand to SEQ ID NO: 2192720
ucuggugcucagaaacuuc

SEQ ID NO: 2192722 - RNA, 19 nt, Artificial Sequence
  Description of Artificial Sequence: Synthetic oligonucleotide
  Sense strand starting at position 2511 of SEQ ID NO: 1883418
guuucugagcaccagauau

SEQ ID NO: 2192723 - RNA, 19 nt, Artificial Sequence
  Description of Artificial Sequence: Synthetic oligonucleotide
  Antisense strand to SEQ ID NO: 2192722
auaucuggugcucagaaac

SEQ ID NO: 2192724 - RNA, 19 nt, Artificial Sequence
  Description of Artificial Sequence: Synthetic oligonucleotide
  Sense strand starting at position 2762 of SEQ ID NO: 1883418
gccugugggauggaugauu

SEQ ID NO: 2192725 - RNA, 19 nt, Artificial Sequence
  Description of Artificial Sequence: Synthetic oligonucleotide
  Antisense strand to SEQ ID NO: 2192724
aaucauccaucccacaggc

SEQ ID NO: 2192726 - RNA, 19 nt, Artificial Sequence
  Description of Artificial Sequence: Synthetic oligonucleotide
  Sense strand starting at position 2778 of SEQ ID NO: 1883418
auuauaaucuaggagacca

SEQ ID NO: 2192727 - RNA, 19 nt, Artificial Sequence
  Description of Artificial Sequence: Synthetic oligonucleotide
  Antisense strand to SEQ ID NO: 2192726
uggucuccuagauuauaau

SEQ ID NO: 2192728 - RNA, 19 nt, Artificial Sequence
  Description of Artificial Sequence: Synthetic oligonucleotide
  Sense strand starting at position 2838 of SEQ ID NO: 1883418
gucccuuggucacucugaa

SEQ ID NO: 2192729 - RNA, 19 nt, Artificial Sequence
  Description of Artificial Sequence: Synthetic oligonucleotide
  Antisense strand to SEQ ID NO: 2192728
uucagagugaccaagggac

SEQ ID NO: 2192730 - RNA, 19 nt, Artificial Sequence
  Description of Artificial Sequence: Synthetic oligonucleotide
  Sense strand starting at position 2916 of SEQ ID NO: 1883418
cugagugggcucugacaua

SEQ ID NO: 2192731 - RNA, 19 nt, Artificial Sequence
  Description of Artificial Sequence: Synthetic oligonucleotide
  Antisense strand to SEQ ID NO: 2192730
uaugucagagcccacucag

SEQ ID NO: 2192732 - RNA, 19 nt, Artificial Sequence
  Description of Artificial Sequence: Synthetic oligonucleotide
  Sense strand starting at position 3210 of SEQ ID NO: 1883418
augguugugagaggaguuu

SEQ ID NO: 2192733 - RNA, 19 nt, Artificial Sequence
  Description of Artificial Sequence: Synthetic oligonucleotide
  Antisense strand to SEQ ID NO: 2192732
aaacuccucucacaaccau

SEQ ID NO: 2192734 - RNA, 19 nt, Artificial Sequence
  Description of Artificial Sequence: Synthetic oligonucleotide
  Sense strand starting at position 3450 of SEQ ID NO: 1883418
accacaugcugucucugaa

SEQ ID NO: 2192735 - RNA, 19 nt, Artificial Sequence
  Description of Artificial Sequence: Synthetic oligonucleotide
  Antisense strand to SEQ ID NO: 2192734
uucagagacagcauguggu

SEQ ID NO: 2192736 - RNA, 19 nt, Artificial Sequence
  Description of Artificial Sequence: Synthetic oligonucleotide
  Sense strand starting at position 3558 of SEQ ID NO: 1883418
ccucuuuagagcuggguca

SEQ ID NO: 2192737 - RNA, 19 nt, Artificial Sequence
  Description of Artificial Sequence: Synthetic oligonucleotide
  Antisense strand to SEQ ID NO: 2192736
ugacccagcucuaaagagg

SEQ ID NO: 2192738 - RNA, 19 nt, Artificial Sequence
  Description of Artificial Sequence: Synthetic oligonucleotide
  Sense strand starting at position 3559 of SEQ ID NO: 1883418
cucuuuagagcugggucau

SEQ ID NO: 2192739 - RNA, 19 nt, Artificial Sequence
  Description of Artificial Sequence: Synthetic oligonucleotide
  Antisense strand to SEQ ID NO: 2192738
augacccagcucuaaagag

SEQ ID NO: 2192740 - RNA, 19 nt, Artificial Sequence
  Description of Artificial Sequence: Synthetic oligonucleotide
  Sense strand starting at position 3634 of SEQ ID NO: 1883418
gaaggcuguccaggaaucu

SEQ ID NO: 2192741 - RNA, 19 nt, Artificial Sequence
  Description of Artificial Sequence: Synthetic oligonucleotide
  Antisense strand to SEQ ID NO: 2192740
agauuccuggacagccuuc

SEQ ID NO: 2192742 - RNA, 19 nt, Artificial Sequence
  Description of Artificial Sequence: Synthetic oligonucleotide
  Sense strand starting at position 3635 of SEQ ID NO: 1883418
aaggcuguccaggaaucua

SEQ ID NO: 2192743 - RNA, 19 nt, Artificial Sequence
  Description of Artificial Sequence: Synthetic oligonucleotide
  Antisense strand to SEQ ID NO: 2192742
uagauuccuggacagccuu

SEQ ID NO: 2192744 - RNA, 19 nt, Artificial Sequence
  Description of Artificial Sequence: Synthetic oligonucleotide
  Sense strand starting at position 3643 of SEQ ID NO: 1883418
ccaggaaucuaguuucuac

SEQ ID NO: 2192745 - RNA, 19 nt, Artificial Sequence
  Description of Artificial Sequence: Synthetic oligonucleotide
  Antisense strand to SEQ ID NO: 2192744
guagaaacuagauuccugg

SEQ ID NO: 2192746 - RNA, 19 nt, Artificial Sequence
  Description of Artificial Sequence: Synthetic oligonucleotide
  Sense strand starting at position 3646 of SEQ ID NO: 1883418
ggaaucuaguuucuaccaa

SEQ ID NO: 2192747 - RNA, 19 nt, Artificial Sequence
  Description of Artificial Sequence: Synthetic oligonucleotide
  Antisense strand to SEQ ID NO: 2192746
uugguagaaacuagauucc

SEQ ID NO: 2192748 - RNA, 19 nt, Artificial Sequence
  Description of Artificial Sequence: Synthetic oligonucleotide
  Sense strand starting at position 3674 of SEQ ID NO: 1883418
aggcaacucagagguuaaa

SEQ ID NO: 2192749 - RNA, 19 nt, Artificial Sequence
  Description of Artificial Sequence: Synthetic oligonucleotide
  Antisense strand to SEQ ID NO: 2192748
uuuaaccucugaguugccu

SEQ ID NO: 2192750 - RNA, 19 nt, Artificial Sequence
  Description of Artificial Sequence: Synthetic oligonucleotide
  Sense strand starting at position 3722 of SEQ ID NO: 1883418
ccaucauggguggauguua

SEQ ID NO: 2192751 - RNA, 19 nt, Artificial Sequence
  Description of Artificial Sequence: Synthetic oligonucleotide
  Antisense strand to SEQ ID NO: 2192750
uaacauccacccaugaugg

SEQ ID NO: 2192752 - RNA, 19 nt, Artificial Sequence
  Description of Artificial Sequence: Synthetic oligonucleotide
  Sense strand starting at position 3730 of SEQ ID NO: 1883418
gguggauguuaucuagaga

SEQ ID NO: 2192753 - RNA, 19 nt, Artificial Sequence
  Description of Artificial Sequence: Synthetic oligonucleotide
  Antisense strand to SEQ ID NO: 2192752
ucucuagauaacauccacc

SEQ ID NO: 2192754 - RNA, 19 nt, Artificial Sequence
  Description of Artificial Sequence: Synthetic oligonucleotide
  Sense strand starting at position 3731 of SEQ ID NO: 1883418
guggauguuaucuagagau

SEQ ID NO: 2192755 - RNA, 19 nt, Artificial Sequence
  Description of Artificial Sequence: Synthetic oligonucleotide
  Antisense strand to SEQ ID NO: 2192754
aucucuagauaacauccac

SEQ ID NO: 2192756 - RNA, 19 nt, Artificial Sequence
  Description of Artificial Sequence: Synthetic oligonucleotide
  Sense strand starting at position 3831 of SEQ ID NO: 1883418
caucaaaggugaguaaaug

SEQ ID NO: 2192757 - RNA, 19 nt, Artificial Sequence
  Description of Artificial Sequence: Synthetic oligonucleotide
  Antisense strand to SEQ ID NO: 2192756
cauuuacucaccuuugaug

SEQ ID NO: 2192758 - RNA, 19 nt, Artificial Sequence
  Description of Artificial Sequence: Synthetic oligonucleotide
  Sense strand starting at position 1020 of SEQ ID NO: 1883419
aaguaaauuucuucguggu

SEQ ID NO: 2192759 - RNA, 19 nt, Artificial Sequence
  Description of Artificial Sequence: Synthetic oligonucleotide
  Antisense strand to SEQ ID NO: 2192758
accacgaagaaauuuacuu

SEQ ID NO: 2192760 - RNA, 19 nt, Artificial Sequence
  Description of Artificial Sequence: Synthetic oligonucleotide
  Sense strand starting at position 1021 of SEQ ID NO: 1883419
aguaaauuucuucguggua

SEQ ID NO: 2192761 - RNA, 19 nt, Artificial Sequence
  Description of Artificial Sequence: Synthetic oligonucleotide
  Antisense strand to SEQ ID NO: 2192760
uaccacgaagaaauuuacu

SEQ ID NO: 2192762 - RNA, 19 nt, Artificial Sequence
  Description of Artificial Sequence: Synthetic oligonucleotide
  Sense strand starting at position 1022 of SEQ ID NO: 1883419
guaaauuucuucgugguac

SEQ ID NO: 2192763 - RNA, 19 nt, Artificial Sequence
  Description of Artificial Sequence: Synthetic oligonucleotide
  Antisense strand to SEQ ID NO: 2192762
guaccacgaagaaauuuac

SEQ ID NO: 2192764 - RNA, 19 nt, Artificial Sequence
  Description of Artificial Sequence: Synthetic oligonucleotide
  Sense strand starting at position 1172 of SEQ ID NO: 1883419
ucuauaauauagguugacu

SEQ ID NO: 2192765 - RNA, 19 nt, Artificial Sequence
  Description of Artificial Sequence: Synthetic oligonucleotide
  Antisense strand to SEQ ID NO: 2192764
agucaaccuauauuauaga

SEQ ID NO: 2192766 - RNA, 19 nt, Artificial Sequence
  Description of Artificial Sequence: Synthetic oligonucleotide
  Sense strand starting at position 1174 of SEQ ID NO: 1883419
uauaauauagguugacuga

SEQ ID NO: 2192767 - RNA, 19 nt, Artificial Sequence
  Description of Artificial Sequence: Synthetic oligonucleotide
  Antisense strand to SEQ ID NO: 2192766
ucagucaaccuauauuaua

SEQ ID NO: 2192768 - RNA, 19 nt, Artificial Sequence
  Description of Artificial Sequence: Synthetic oligonucleotide
  Sense strand starting at position 1214 of SEQ ID NO: 1883419
auggaauuaguuugagguu

SEQ ID NO: 2192769 - RNA, 19 nt, Artificial Sequence
  Description of Artificial Sequence: Synthetic oligonucleotide
  Antisense strand to SEQ ID NO: 2192768
aaccucaaacuaauuccau

SEQ ID NO: 2192770 - RNA, 19 nt, Artificial Sequence
  Description of Artificial Sequence: Synthetic oligonucleotide
  Sense strand starting at position 2062 of SEQ ID NO: 1883419
gguaacaaaugauucugau

SEQ ID NO: 2192771 - RNA, 19 nt, Artificial Sequence
  Description of Artificial Sequence: Synthetic oligonucleotide
  Antisense strand to SEQ ID NO: 2192770
aucagaaucauuuguuacc

SEQ ID NO: 2192772 - RNA, 19 nt, Artificial Sequence
  Description of Artificial Sequence: Synthetic oligonucleotide
  Sense strand starting at position 2529 of SEQ ID NO: 1883419
cugaucauucuuuaaagug

SEQ ID NO: 2192773 - RNA, 19 nt, Artificial Sequence
  Description of Artificial Sequence: Synthetic oligonucleotide
  Antisense strand to SEQ ID NO: 2192772
cacuuuaaagaaugaucag

SEQ ID NO: 2192774 - RNA, 19 nt, Artificial Sequence
  Description of Artificial Sequence: Synthetic oligonucleotide
  Sense strand starting at position 2537 of SEQ ID NO: 1883419
ucuuuaaagugauuaagga

SEQ ID NO: 2192775 - RNA, 19 nt, Artificial Sequence
  Description of Artificial Sequence: Synthetic oligonucleotide
  Antisense strand to SEQ ID NO: 2192774
uccuuaaucacuuuaaaga

SEQ ID NO: 2192776 - RNA, 19 nt, Artificial Sequence
  Description of Artificial Sequence: Synthetic oligonucleotide
  Sense strand starting at position 2710 of SEQ ID NO: 1883419
ucaaauuuguaagagggaa

SEQ ID NO: 2192777 - RNA, 19 nt, Artificial Sequence
  Description of Artificial Sequence: Synthetic oligonucleotide
  Antisense strand to SEQ ID NO: 2192776
uucccucuuacaaauuuga

SEQ ID NO: 2192778 - RNA, 19 nt, Artificial Sequence
  Description of Artificial Sequence: Synthetic oligonucleotide
  Sense strand starting at position 2748 of SEQ ID NO: 1883419
gucacucugauuuguuagu

SEQ ID NO: 2192779 - RNA, 19 nt, Artificial Sequence
  Description of Artificial Sequence: Synthetic oligonucleotide
  Antisense strand to SEQ ID NO: 2192778
acuaacaaaucagagugac

SEQ ID NO: 2192780 - RNA, 19 nt, Artificial Sequence
  Description of Artificial Sequence: Synthetic oligonucleotide
  Sense strand starting at position 2753 of SEQ ID NO: 1883419
ucugauuuguuagugucuu

SEQ ID NO: 2192781 - RNA, 19 nt, Artificial Sequence
  Description of Artificial Sequence: Synthetic oligonucleotide
  Antisense strand to SEQ ID NO: 2192780
aagacacuaacaaaucaga

SEQ ID NO: 2192782 - RNA, 19 nt, Artificial Sequence
  Description of Artificial Sequence: Synthetic oligonucleotide
  Sense strand starting at position 2790 of SEQ ID NO: 1883419
agcguuugugcgaagaguu

SEQ ID NO: 2192783 - RNA, 19 nt, Artificial Sequence
  Description of Artificial Sequence: Synthetic oligonucleotide
  Antisense strand to SEQ ID NO: 2192782
aacucuucgcacaaacgcu

SEQ ID NO: 2192784 - RNA, 19 nt, Artificial Sequence
  Description of Artificial Sequence: Synthetic oligonucleotide
  Sense strand starting at position 2822 of SEQ ID NO: 1883419
uguguuuaucggcuucuuu

SEQ ID NO: 2192785 - RNA, 19 nt, Artificial Sequence
  Description of Artificial Sequence: Synthetic oligonucleotide
  Antisense strand to SEQ ID NO: 2192784
aaagaagccgauaaacaca

SEQ ID NO: 2192786 - RNA, 19 nt, Artificial Sequence
  Description of Artificial Sequence: Synthetic oligonucleotide
  Sense strand starting at position 2846 of SEQ ID NO: 1883419
agggaaaguuaaucuuugu

SEQ ID NO: 2192787 - RNA, 19 nt, Artificial Sequence
  Description of Artificial Sequence: Synthetic oligonucleotide
  Antisense strand to SEQ ID NO: 2192786
acaaagauuaacuuucccu

SEQ ID NO: 2192788 - RNA, 19 nt, Artificial Sequence
  Description of Artificial Sequence: Synthetic oligonucleotide
  Sense strand starting at position 2867 of SEQ ID NO: 1883419
ucauuauacugguuagaag

SEQ ID NO: 2192789 - RNA, 19 nt, Artificial Sequence
  Description of Artificial Sequence: Synthetic oligonucleotide
  Antisense strand to SEQ ID NO: 2192788
cuucuaaccaguauaauga

SEQ ID NO: 2192790 - RNA, 19 nt, Artificial Sequence
  Description of Artificial Sequence: Synthetic oligonucleotide
  Sense strand starting at position 2879 of SEQ ID NO: 1883419
uuagaagaguaauugguuu

SEQ ID NO: 2192791 - RNA, 19 nt, Artificial Sequence
  Description of Artificial Sequence: Synthetic oligonucleotide
  Antisense strand to SEQ ID NO: 2192790
aaaccaauuacucuucuaa

SEQ ID NO: 2192792 - RNA, 19 nt, Artificial Sequence
  Description of Artificial Sequence: Synthetic oligonucleotide
  Sense strand starting at position 2917 of SEQ ID NO: 1883419
uucuuaaauuggguguaaa

SEQ ID NO: 2192793 - RNA, 19 nt, Artificial Sequence
  Description of Artificial Sequence: Synthetic oligonucleotide
  Antisense strand to SEQ ID NO: 2192792
uuuacacccaauuuaagaa

SEQ ID NO: 2192794 - RNA, 19 nt, Artificial Sequence
  Description of Artificial Sequence: Synthetic oligonucleotide
  Sense strand starting at position 2918 of SEQ ID NO: 1883419
ucuuaaauuggguguaaau

SEQ ID NO: 2192795 - RNA, 19 nt, Artificial Sequence
  Description of Artificial Sequence: Synthetic oligonucleotide
  Antisense strand to SEQ ID NO: 2192794
auuuacacccaauuuaaga

SEQ ID NO: 2192796 - RNA, 19 nt, Artificial Sequence
  Description of Artificial Sequence: Synthetic oligonucleotide
  Sense strand starting at position 2942 of SEQ ID NO: 1883419
cgggcagugcgagucuaua

SEQ ID NO: 2192797 - RNA, 19 nt, Artificial Sequence
  Description of Artificial Sequence: Synthetic oligonucleotide
  Antisense strand to SEQ ID NO: 2192796
uauagacucgcacugcccg

SEQ ID NO: 2192798 - RNA, 19 nt, Artificial Sequence
  Description of Artificial Sequence: Synthetic oligonucleotide
  Sense strand starting at position 2988 of SEQ ID NO: 1883419
uucucaaaucgugaaguca

SEQ ID NO: 2192799 - RNA, 19 nt, Artificial Sequence
  Description of Artificial Sequence: Synthetic oligonucleotide
  Antisense strand to SEQ ID NO: 2192798
ugacuucacgauuugagaa

SEQ ID NO: 2192800 - RNA, 19 nt, Artificial Sequence
  Description of Artificial Sequence: Synthetic oligonucleotide
  Sense strand starting at position 2996 of SEQ ID NO: 1883419
ucgugaagucauuaaauac

SEQ ID NO: 2192801 - RNA, 19 nt, Artificial Sequence
  Description of Artificial Sequence: Synthetic oligonucleotide
  Antisense strand to SEQ ID NO: 2192800
guauuuaaugacuucacga

SEQ ID NO: 2192802 - RNA, 19 nt, Artificial Sequence
  Description of Artificial Sequence: Synthetic oligonucleotide
  Sense strand starting at position 3025 of SEQ ID NO: 1883419
gucggaggcaacuaauuau

SEQ ID NO: 2192803 - RNA, 19 nt, Artificial Sequence
  Description of Artificial Sequence: Synthetic oligonucleotide
  Antisense strand to SEQ ID NO: 2192802
auaauuaguugccuccgac

SEQ ID NO: 2192804 - RNA, 19 nt, Artificial Sequence
  Description of Artificial Sequence: Synthetic oligonucleotide
  Sense strand starting at position 3064 of SEQ ID NO: 1883419
ggacauacgccauaucuga

SEQ ID NO: 2192805 - RNA, 19 nt, Artificial Sequence
  Description of Artificial Sequence: Synthetic oligonucleotide
  Antisense strand to SEQ ID NO: 2192804
ucagauauggcguaugucc

SEQ ID NO: 2192806 - RNA, 19 nt, Artificial Sequence
  Description of Artificial Sequence: Synthetic oligonucleotide
  Sense strand starting at position 3092 of SEQ ID NO: 1883419
aaguuaacaguuuguauag

SEQ ID NO: 2192807 - RNA, 19 nt, Artificial Sequence
  Description of Artificial Sequence: Synthetic oligonucleotide
  Antisense strand to SEQ ID NO: 2192806
cuauacaaacuguuaacuu

SEQ ID NO: 2192808 - RNA, 19 nt, Artificial Sequence
  Description of Artificial Sequence: Synthetic oligonucleotide
  Sense strand starting at position 3101 of SEQ ID NO: 1883419
guuuguauaguugagguga

SEQ ID NO: 2192809 - RNA, 19 nt, Artificial Sequence
  Description of Artificial Sequence: Synthetic oligonucleotide
  Antisense strand to SEQ ID NO: 2192808
ucaccucaacuauacaaac

SEQ ID NO: 2192810 - RNA, 19 nt, Artificial Sequence
  Description of Artificial Sequence: Synthetic oligonucleotide
  Sense strand starting at position 3118 of SEQ ID NO: 1883419
gacagcagugcauaacuaa

SEQ ID NO: 2192811 - RNA, 19 nt, Artificial Sequence
  Description of Artificial Sequence: Synthetic oligonucleotide
  Antisense strand to SEQ ID NO: 2192810
uuaguuaugcacugcuguc

SEQ ID NO: 2192812 - RNA, 19 nt, Artificial Sequence
  Description of Artificial Sequence: Synthetic oligonucleotide
  Sense strand starting at position 3305 of SEQ ID NO: 1883419
agaguuguuaggcaugauu

SEQ ID NO: 2192813 - RNA, 19 nt, Artificial Sequence
  Description of Artificial Sequence: Synthetic oligonucleotide
  Antisense strand to SEQ ID NO: 2192812
aaucaugccuaacaacucu

SEQ ID NO: 2192814 - RNA, 19 nt, Artificial Sequence
  Description of Artificial Sequence: Synthetic oligonucleotide
  Sense strand starting at position 3308 of SEQ ID NO: 1883419
guuguuaggcaugauuaua

SEQ ID NO: 2192815 - RNA, 19 nt, Artificial Sequence
  Description of Artificial Sequence: Synthetic oligonucleotide
  Antisense strand to SEQ ID NO: 2192814
uauaaucaugccuaacaac

SEQ ID NO: 2192816 - RNA, 19 nt, Artificial Sequence
  Description of Artificial Sequence: Synthetic oligonucleotide
  Sense strand starting at position 3446 of SEQ ID NO: 1883419
cccaguuuauaguugagaa

SEQ ID NO: 2192817 - RNA, 19 nt, Artificial Sequence
  Description of Artificial Sequence: Synthetic oligonucleotide
  Antisense strand to SEQ ID NO: 2192816
uucucaacuauaaacuggg

SEQ ID NO: 2192818 - RNA, 19 nt, Artificial Sequence
  Description of Artificial Sequence: Synthetic oligonucleotide
  Sense strand starting at position 3447 of SEQ ID NO: 1883419
ccaguuuauaguugagaag

SEQ ID NO: 2192819 - RNA, 19 nt, Artificial Sequence
  Description of Artificial Sequence: Synthetic oligonucleotide
  Antisense strand to SEQ ID NO: 2192818
cuucucaacuauaaacugg

SEQ ID NO: 2192820 - RNA, 19 nt, Artificial Sequence
  Description of Artificial Sequence: Synthetic oligonucleotide
  Sense strand starting at position 3448 of SEQ ID NO: 1883419
caguuuauaguugagaagu

SEQ ID NO: 2192821 - RNA, 19 nt, Artificial Sequence
  Description of Artificial Sequence: Synthetic oligonucleotide
  Antisense strand to SEQ ID NO: 2192820
acuucucaacuauaaacug

SEQ ID NO: 2192822 - RNA, 19 nt, Artificial Sequence
  Description of Artificial Sequence: Synthetic oligonucleotide
  Sense strand starting at position 3503 of SEQ ID NO: 1883419
ggagcuuaauuugaaccua

SEQ ID NO: 2192823 - RNA, 19 nt, Artificial Sequence
  Description of Artificial Sequence: Synthetic oligonucleotide
  Antisense strand to SEQ ID NO: 2192822
uagguucaaauuaagcucc

SEQ ID NO: 2192824 - RNA, 19 nt, Artificial Sequence
  Description of Artificial Sequence: Synthetic oligonucleotide
  Sense strand starting at position 3544 of SEQ ID NO: 1883419
uuggucaaaggauguuaga

SEQ ID NO: 2192825 - RNA, 19 nt, Artificial Sequence
  Description of Artificial Sequence: Synthetic oligonucleotide
  Antisense strand to SEQ ID NO: 2192824
ucuaacauccuuugaccaa

SEQ ID NO: 2192826 - RNA, 19 nt, Artificial Sequence
  Description of Artificial Sequence: Synthetic oligonucleotide
  Sense strand starting at position 3649 of SEQ ID NO: 1883419
ucugaucugaguuagguau

SEQ ID NO: 2192827 - RNA, 19 nt, Artificial Sequence
  Description of Artificial Sequence: Synthetic oligonucleotide
  Antisense strand to SEQ ID NO: 2192826
auaccuaacucagaucaga

SEQ ID NO: 2192828 - RNA, 19 nt, Artificial Sequence
  Description of Artificial Sequence: Synthetic oligonucleotide
  Sense strand starting at position 3653 of SEQ ID NO: 1883419
aucugaguuagguauugac

SEQ ID NO: 2192829 - RNA, 19 nt, Artificial Sequence
  Description of Artificial Sequence: Synthetic oligonucleotide
  Antisense strand to SEQ ID NO: 2192828
gucaauaccuaacucagau

SEQ ID NO: 2192830 - RNA, 19 nt, Artificial Sequence
  Description of Artificial Sequence: Synthetic oligonucleotide
  Sense strand starting at position 3771 of SEQ ID NO: 1883419
augacaauagcaggauuau

SEQ ID NO: 2192831 - RNA, 19 nt, Artificial Sequence
  Description of Artificial Sequence: Synthetic oligonucleotide
  Antisense strand to SEQ ID NO: 2192830
auaauccugcuauugucau

SEQ ID NO: 2192832 - RNA, 19 nt, Artificial Sequence
  Description of Artificial Sequence: Synthetic oligonucleotide
  Sense strand starting at position 3782 of SEQ ID NO: 1883419
aggauuaugucuuuacuuc

SEQ ID NO: 2192833 - RNA, 19 nt, Artificial Sequence
  Description of Artificial Sequence: Synthetic oligonucleotide
  Antisense strand to SEQ ID NO: 2192832
gaaguaaagacauaauccu

SEQ ID NO: 2192834 - RNA, 19 nt, Artificial Sequence
  Description of Artificial Sequence: Synthetic oligonucleotide
  Sense strand starting at position 3783 of SEQ ID NO: 1883419
ggauuaugucuuuacuucu

SEQ ID NO: 2192835 - RNA, 19 nt, Artificial Sequence
  Description of Artificial Sequence: Synthetic oligonucleotide
  Antisense strand to SEQ ID NO: 2192834
agaaguaaagacauaaucc

SEQ ID NO: 2192836 - RNA, 19 nt, Artificial Sequence
  Description of Artificial Sequence: Synthetic oligonucleotide
  Sense strand starting at position 3833 of SEQ ID NO: 1883419
guacauuuaugucccgagu

SEQ ID NO: 2192837 - RNA, 19 nt, Artificial Sequence
  Description of Artificial Sequence: Synthetic oligonucleotide
  Antisense strand to SEQ ID NO: 2192836
acucgggacauaaauguac

SEQ ID NO: 2192838 - RNA, 19 nt, Artificial Sequence
  Description of Artificial Sequence: Synthetic oligonucleotide
  Sense strand starting at position 13 of SEQ ID NO: 1883420
uucugucaucuguaacaau

SEQ ID NO: 2192839 - RNA, 19 nt, Artificial Sequence
  Description of Artificial Sequence: Synthetic oligonucleotide
  Antisense strand to SEQ ID NO: 2192838
auuguuacagaugacagaa

SEQ ID NO: 2192840 - RNA, 19 nt, Artificial Sequence
  Description of Artificial Sequence: Synthetic oligonucleotide
  Sense strand starting at position 170 of SEQ ID NO: 1883420
gcaggcaucacagaguaca

SEQ ID NO: 2192841 - RNA, 19 nt, Artificial Sequence
  Description of Artificial Sequence: Synthetic oligonucleotide
  Antisense strand to SEQ ID NO: 2192840
uguacucugugaugccugc

SEQ ID NO: 2192842 - RNA, 19 nt, Artificial Sequence
  Description of Artificial Sequence: Synthetic oligonucleotide
  Sense strand starting at position 181 of SEQ ID NO: 1883420
agaguacaccuguaauagu

SEQ ID NO: 2192843 - RNA, 19 nt, Artificial Sequence
  Description of Artificial Sequence: Synthetic oligonucleotide
  Antisense strand to SEQ ID NO: 2192842
acuauuacagguguacucu

SEQ ID NO: 2192844 - RNA, 19 nt, Artificial Sequence
  Description of Artificial Sequence: Synthetic oligonucleotide
  Sense strand starting at position 831 of SEQ ID NO: 1883420
aaaguuuguccgccguacu

SEQ ID NO: 2192845 - RNA, 19 nt, Artificial Sequence
  Description of Artificial Sequence: Synthetic oligonucleotide
  Antisense strand to SEQ ID NO: 2192844
aguacggcggacaaacuuu

SEQ ID NO: 2192846 - RNA, 19 nt, Artificial Sequence
  Description of Artificial Sequence: Synthetic oligonucleotide
  Sense strand starting at position 912 of SEQ ID NO: 1883420
aauuucucccguugaaagu

SEQ ID NO: 2192847 - RNA, 19 nt, Artificial Sequence
  Description of Artificial Sequence: Synthetic oligonucleotide
  Antisense strand to SEQ ID NO: 2192846
acuuucaacgggagaaauu

SEQ ID NO: 2192848 - RNA, 19 nt, Artificial Sequence
  Description of Artificial Sequence: Synthetic oligonucleotide
  Sense strand starting at position 2024 of SEQ ID NO: 1883420
gugaauaugcuacaucaug

SEQ ID NO: 2192849 - RNA, 19 nt, Artificial Sequence
  Description of Artificial Sequence: Synthetic oligonucleotide
  Antisense strand to SEQ ID NO: 2192848
caugauguagcauauucac

SEQ ID NO: 2192850 - RNA, 19 nt, Artificial Sequence
  Description of Artificial Sequence: Synthetic oligonucleotide
  Sense strand starting at position 2056 of SEQ ID NO: 1883420
cgaaguagucgcagaguua

SEQ ID NO: 2192851 - RNA, 19 nt, Artificial Sequence
  Description of Artificial Sequence: Synthetic oligonucleotide
  Antisense strand to SEQ ID NO: 2192850
uaacucugcgacuacuucg

SEQ ID NO: 2192852 - RNA, 19 nt, Artificial Sequence
  Description of Artificial Sequence: Synthetic oligonucleotide
  Sense strand starting at position 2199 of SEQ ID NO: 1883420
cccuuaagucuugauuaga

SEQ ID NO: 2192853 - RNA, 19 nt, Artificial Sequence
  Description of Artificial Sequence: Synthetic oligonucleotide
  Antisense strand to SEQ ID NO: 2192852
ucuaaucaagacuuaaggg

SEQ ID NO: 2192854 - RNA, 19 nt, Artificial Sequence
  Description of Artificial Sequence: Synthetic oligonucleotide
  Sense strand starting at position 2222 of SEQ ID NO: 1883420
gcacguuacguauuguuua

SEQ ID NO: 2192855 - RNA, 19 nt, Artificial Sequence
  Description of Artificial Sequence: Synthetic oligonucleotide
  Antisense strand to SEQ ID NO: 2192854
uaaacaauacguaacgugc

SEQ ID NO: 2192856 - RNA, 19 nt, Artificial Sequence
  Description of Artificial Sequence: Synthetic oligonucleotide
  Sense strand starting at position 2242 of SEQ ID NO: 1883420
uuauaauggugauuaagug

SEQ ID NO: 2192857 - RNA, 19 nt, Artificial Sequence
  Description of Artificial Sequence: Synthetic oligonucleotide
  Antisense strand to SEQ ID NO: 2192856
cacuuaaucaccauuauaa

SEQ ID NO: 2192858 - RNA, 19 nt, Artificial Sequence
  Description of Artificial Sequence: Synthetic oligonucleotide
  Sense strand starting at position 2248 of SEQ ID NO: 1883420
uggugauuaagugggauga

SEQ ID NO: 2192859 - RNA, 19 nt, Artificial Sequence
  Description of Artificial Sequence: Synthetic oligonucleotide
  Antisense strand to SEQ ID NO: 2192858
ucaucccacuuaaucacca

SEQ ID NO: 2192860 - RNA, 19 nt, Artificial Sequence
  Description of Artificial Sequence: Synthetic oligonucleotide
  Sense strand starting at position 2249 of SEQ ID NO: 1883420
ggugauuaagugggaugaa

SEQ ID NO: 2192861 - RNA, 19 nt, Artificial Sequence
  Description of Artificial Sequence: Synthetic oligonucleotide
  Antisense strand to SEQ ID NO: 2192860
uucaucccacuuaaucacc

SEQ ID NO: 2192862 - RNA, 19 nt, Artificial Sequence
  Description of Artificial Sequence: Synthetic oligonucleotide
  Sense strand starting at position 2259 of SEQ ID NO: 1883420
ugggaugaaucguuggaua

SEQ ID NO: 2192863 - RNA, 19 nt, Artificial Sequence
  Description of Artificial Sequence: Synthetic oligonucleotide
  Antisense strand to SEQ ID NO: 2192862
uauccaacgauucauccca

SEQ ID NO: 2192864 - RNA, 19 nt, Artificial Sequence
  Description of Artificial Sequence: Synthetic oligonucleotide
  Sense strand starting at position 2261 of SEQ ID NO: 1883420
ggaugaaucguuggauaaa

SEQ ID NO: 2192865 - RNA, 19 nt, Artificial Sequence
  Description of Artificial Sequence: Synthetic oligonucleotide
  Antisense strand to SEQ ID NO: 2192864
uuuauccaacgauucaucc

SEQ ID NO: 2192866 - RNA, 19 nt, Artificial Sequence
  Description of Artificial Sequence: Synthetic oligonucleotide
  Sense strand starting at position 2484 of SEQ ID NO: 1883420
uguaauuuaguguguuaag

SEQ ID NO: 2192867 - RNA, 19 nt, Artificial Sequence
  Description of Artificial Sequence: Synthetic oligonucleotide
  Antisense strand to SEQ ID NO: 2192866
cuuaacacacuaaauuaca

SEQ ID NO: 2192868 - RNA, 19 nt, Artificial Sequence
  Description of Artificial Sequence: Synthetic oligonucleotide
  Sense strand starting at position 2530 of SEQ ID NO: 1883420
ggaaauauagcauguugga

SEQ ID NO: 2192869 - RNA, 19 nt, Artificial Sequence
  Description of Artificial Sequence: Synthetic oligonucleotide
  Antisense strand to SEQ ID NO: 2192868
uccaacaugcuauauuucc

SEQ ID NO: 2192870 - RNA, 19 nt, Artificial Sequence
  Description of Artificial Sequence: Synthetic oligonucleotide
  Sense strand starting at position 2648 of SEQ ID NO: 1883420
gguagagaaguuuaagcau

SEQ ID NO: 2192871 - RNA, 19 nt, Artificial Sequence
  Description of Artificial Sequence: Synthetic oligonucleotide
  Antisense strand to SEQ ID NO: 2192870
augcuuaaacuucucuacc

SEQ ID NO: 2192872 - RNA, 19 nt, Artificial Sequence
  Description of Artificial Sequence: Synthetic oligonucleotide
  Sense strand starting at position 2651 of SEQ ID NO: 1883420
agagaaguuuaagcauuag

SEQ ID NO: 2192873 - RNA, 19 nt, Artificial Sequence
  Description of Artificial Sequence: Synthetic oligonucleotide
  Antisense strand to SEQ ID NO: 2192872
cuaaugcuuaaacuucucu

SEQ ID NO: 2192874 - RNA, 19 nt, Artificial Sequence
  Description of Artificial Sequence: Synthetic oligonucleotide
  Sense strand starting at position 2744 of SEQ ID NO: 1883420
ucaugaaacuacuugguua

SEQ ID NO: 2192875 - RNA, 19 nt, Artificial Sequence
  Description of Artificial Sequence: Synthetic oligonucleotide
  Antisense strand to SEQ ID NO: 2192874
uaaccaaguaguuucauga

SEQ ID NO: 2192876 - RNA, 19 nt, Artificial Sequence
  Description of Artificial Sequence: Synthetic oligonucleotide
  Sense strand starting at position 2820 of SEQ ID NO: 1883420
auaauuauuccuugaaacg

SEQ ID NO: 2192877 - RNA, 19 nt, Artificial Sequence
  Description of Artificial Sequence: Synthetic oligonucleotide
  Antisense strand to SEQ ID NO: 2192876
cguuucaaggaauaauuau

SEQ ID NO: 2192878 - RNA, 19 nt, Artificial Sequence
  Description of Artificial Sequence: Synthetic oligonucleotide
  Sense strand starting at position 2838 of SEQ ID NO: 1883420
gucucuaauuucucuugua

SEQ ID NO: 2192879 - RNA, 19 nt, Artificial Sequence
  Description of Artificial Sequence: Synthetic oligonucleotide
  Antisense strand to SEQ ID NO: 2192878
uacaagagaaauuagagac

SEQ ID NO: 2192880 - RNA, 19 nt, Artificial Sequence
  Description of Artificial Sequence: Synthetic oligonucleotide
  Sense strand starting at position 3016 of SEQ ID NO: 1883420
guaaguauuccagaagcca

SEQ ID NO: 2192881 - RNA, 19 nt, Artificial Sequence
  Description of Artificial Sequence: Synthetic oligonucleotide
  Antisense strand to SEQ ID NO: 2192880
uggcuucuggaauacuuac

SEQ ID NO: 2192882 - RNA, 19 nt, Artificial Sequence
  Description of Artificial Sequence: Synthetic oligonucleotide
  Sense strand starting at position 3063 of SEQ ID NO: 1883420
ggauauugguuuguugaag

SEQ ID NO: 2192883 - RNA, 19 nt, Artificial Sequence
  Description of Artificial Sequence: Synthetic oligonucleotide
  Antisense strand to SEQ ID NO: 2192882
cuucaacaaaccaauaucc

SEQ ID NO: 2192884 - RNA, 19 nt, Artificial Sequence
  Description of Artificial Sequence: Synthetic oligonucleotide
  Sense strand starting at position 3064 of SEQ ID NO: 1883420
gauauugguuuguugaaga

SEQ ID NO: 2192885 - RNA, 19 nt, Artificial Sequence
  Description of Artificial Sequence: Synthetic oligonucleotide
  Antisense strand to SEQ ID NO: 2192884
ucuucaacaaaccaauauc

SEQ ID NO: 2192886 - RNA, 19 nt, Artificial Sequence
  Description of Artificial Sequence: Synthetic oligonucleotide
  Sense strand starting at position 3151 of SEQ ID NO: 1883420
agauguagaaugugugaag

SEQ ID NO: 2192887 - RNA, 19 nt, Artificial Sequence
  Description of Artificial Sequence: Synthetic oligonucleotide
  Antisense strand to SEQ ID NO: 2192886
cuucacacauucuacaucu

SEQ ID NO: 2192888 - RNA, 19 nt, Artificial Sequence
  Description of Artificial Sequence: Synthetic oligonucleotide
  Sense strand starting at position 3172 of SEQ ID NO: 1883420
auuugaugucuuugcuagu

SEQ ID NO: 2192889 - RNA, 19 nt, Artificial Sequence
  Description of Artificial Sequence: Synthetic oligonucleotide
  Antisense strand to SEQ ID NO: 2192888
acuagcaaagacaucaaau

SEQ ID NO: 2192890 - RNA, 19 nt, Artificial Sequence
  Description of Artificial Sequence: Synthetic oligonucleotide
  Sense strand starting at position 3230 of SEQ ID NO: 1883420
aacagaccucagugaaugu

SEQ ID NO: 2192891 - RNA, 19 nt, Artificial Sequence
  Description of Artificial Sequence: Synthetic oligonucleotide
  Antisense strand to SEQ ID NO: 2192890
acauucacugaggucuguu

SEQ ID NO: 2192892 - RNA, 19 nt, Artificial Sequence
  Description of Artificial Sequence: Synthetic oligonucleotide
  Sense strand starting at position 3643 of SEQ ID NO: 1883420
caaagaaagugaguguaaa

SEQ ID NO: 2192893 - RNA, 19 nt, Artificial Sequence
  Description of Artificial Sequence: Synthetic oligonucleotide
  Antisense strand to SEQ ID NO: 2192892
uuuacacucacuuucuuug

SEQ ID NO: 2192894 - RNA, 19 nt, Artificial Sequence
  Description of Artificial Sequence: Synthetic oligonucleotide
  Sense strand starting at position 3644 of SEQ ID NO: 1883420
aaagaaagugaguguaaau

SEQ ID NO: 2192895 - RNA, 19 nt, Artificial Sequence
  Description of Artificial Sequence: Synthetic oligonucleotide
  Antisense strand to SEQ ID NO: 2192894
auuuacacucacuuucuuu

SEQ ID NO: 2192896 - RNA, 19 nt, Artificial Sequence
  Description of Artificial Sequence: Synthetic oligonucleotide
  Sense strand starting at position 3668 of SEQ ID NO: 1883420
uuauuuauuuggcaagucu

SEQ ID NO: 2192897 - RNA, 19 nt, Artificial Sequence
  Description of Artificial Sequence: Synthetic oligonucleotide
  Antisense strand to SEQ ID NO: 2192896
agacuugccaaauaaauaa

SEQ ID NO: 2192898 - RNA, 19 nt, Artificial Sequence
  Description of Artificial Sequence: Synthetic oligonucleotide
  Sense strand starting at position 3688 of SEQ ID NO: 1883420
caugaaauaguuuggguau

SEQ ID NO: 2192899 - RNA, 19 nt, Artificial Sequence
  Description of Artificial Sequence: Synthetic oligonucleotide
  Antisense strand to SEQ ID NO: 2192898
auacccaaacuauuucaug

SEQ ID NO: 2192900 - RNA, 19 nt, Artificial Sequence
  Description of Artificial Sequence: Synthetic oligonucleotide
  Sense strand starting at position 3699 of SEQ ID NO: 1883420
uuggguaucccugaaagua

SEQ ID NO: 2192901 - RNA, 19 nt, Artificial Sequence
  Description of Artificial Sequence: Synthetic oligonucleotide
  Antisense strand to SEQ ID NO: 2192900
uacuuucagggauacccaa

SEQ ID NO: 2192902 - RNA, 19 nt, Artificial Sequence
  Description of Artificial Sequence: Synthetic oligonucleotide
  Sense strand starting at position 3766 of SEQ ID NO: 1883420
ggguaaucccaguauucca

SEQ ID NO: 2192903 - RNA, 19 nt, Artificial Sequence
  Description of Artificial Sequence: Synthetic oligonucleotide
  Antisense strand to SEQ ID NO: 2192902
uggaauacugggauuaccc

SEQ ID NO: 2192904 - RNA, 19 nt, Artificial Sequence
  Description of Artificial Sequence: Synthetic oligonucleotide
  Sense strand starting at position 3829 of SEQ ID NO: 1883420
cuuaguagagugcagaaua

SEQ ID NO: 2192905 - RNA, 19 nt, Artificial Sequence
  Description of Artificial Sequence: Synthetic oligonucleotide
  Antisense strand to SEQ ID NO: 2192904
uauucugcacucuacuaag

SEQ ID NO: 2192906 - RNA, 19 nt, Artificial Sequence
  Description of Artificial Sequence: Synthetic oligonucleotide
  Sense strand starting at position 3841 of SEQ ID NO: 1883420
cagaauaguuguuugaaau

SEQ ID NO: 2192907 - RNA, 19 nt, Artificial Sequence
  Description of Artificial Sequence: Synthetic oligonucleotide
  Antisense strand to SEQ ID NO: 2192906
auuucaaacaacuauucug

SEQ ID NO: 2192908 - RNA, 19 nt, Artificial Sequence
  Description of Artificial Sequence: Synthetic oligonucleotide
  Sense strand starting at position 3842 of SEQ ID NO: 1883420
agaauaguuguuugaaaug

SEQ ID NO: 2192909 - RNA, 19 nt, Artificial Sequence
  Description of Artificial Sequence: Synthetic oligonucleotide
  Antisense strand to SEQ ID NO: 2192908
cauuucaaacaacuauucu

SEQ ID NO: 2192910 - RNA, 19 nt, Artificial Sequence
  Description of Artificial Sequence: Synthetic oligonucleotide
  Sense strand starting at position 3848 of SEQ ID NO: 1883420
guuguuugaaauggaaauc

SEQ ID NO: 2192911 - RNA, 19 nt, Artificial Sequence
  Description of Artificial Sequence: Synthetic oligonucleotide
  Antisense strand to SEQ ID NO: 2192910
gauuuccauuucaaacaac

SEQ ID NO: 2192912 - RNA, 19 nt, Artificial Sequence
  Description of Artificial Sequence: Synthetic oligonucleotide
  Sense strand starting at position 3906 of SEQ ID NO: 1883420
uuuggcuugagaugaauug

SEQ ID NO: 2192913 - RNA, 19 nt, Artificial Sequence
  Description of Artificial Sequence: Synthetic oligonucleotide
  Antisense strand to SEQ ID NO: 2192912
caauucaucucaagccaaa

SEQ ID NO: 2192914 - RNA, 19 nt, Artificial Sequence
  Description of Artificial Sequence: Synthetic oligonucleotide
  Sense strand starting at position 3980 of SEQ ID NO: 1883420
auuguaguauuugccuuaa

SEQ ID NO: 2192915 - RNA, 19 nt, Artificial Sequence
  Description of Artificial Sequence: Synthetic oligonucleotide
  Antisense strand to SEQ ID NO: 2192914
uuaaggcaaauacuacaau

SEQ ID NO: 2192916 - RNA, 19 nt, Artificial Sequence
  Description of Artificial Sequence: Synthetic oligonucleotide
  Sense strand starting at position 3982 of SEQ ID NO: 1883420
uguaguauuugccuuaauu

SEQ ID NO: 2192917 - RNA, 19 nt, Artificial Sequence
  Description of Artificial Sequence: Synthetic oligonucleotide
  Antisense strand to SEQ ID NO: 2192916
aauuaaggcaaauacuaca

SEQ ID NO: 2192918 - RNA, 19 nt, Artificial Sequence
  Description of Artificial Sequence: Synthetic oligonucleotide
  Sense strand starting at position 365 of SEQ ID NO: 1883421
uuuaaauagccgugggauu

SEQ ID NO: 2192919 - RNA, 19 nt, Artificial Sequence
  Description of Artificial Sequence: Synthetic oligonucleotide
  Antisense strand to SEQ ID NO: 2192918
aaucccacggcuauuuaaa

SEQ ID NO: 2192920 - RNA, 19 nt, Artificial Sequence
  Description of Artificial Sequence: Synthetic oligonucleotide
  Sense strand starting at position 366 of SEQ ID NO: 1883421
uuaaauagccgugggauua

SEQ ID NO: 2192921 - RNA, 19 nt, Artificial Sequence
  Description of Artificial Sequence: Synthetic oligonucleotide
  Antisense strand to SEQ ID NO: 2192920
uaaucccacggcuauuuaa

SEQ ID NO: 2192922 - RNA, 19 nt, Artificial Sequence
  Description of Artificial Sequence: Synthetic oligonucleotide
  Sense strand starting at position 367 of SEQ ID NO: 1883421
uaaauagccgugggauuaa

SEQ ID NO: 2192923 - RNA, 19 nt, Artificial Sequence
  Description of Artificial Sequence: Synthetic oligonucleotide
  Antisense strand to SEQ ID NO: 2192922
uuaaucccacggcuauuua

SEQ ID NO: 2192924 - RNA, 19 nt, Artificial Sequence
  Description of Artificial Sequence: Synthetic oligonucleotide
  Sense strand starting at position 2007 of SEQ ID NO: 1883421
cuuuguuugcccgggauuu

SEQ ID NO: 2192925 - RNA, 19 nt, Artificial Sequence
  Description of Artificial Sequence: Synthetic oligonucleotide
  Antisense strand to SEQ ID NO: 2192924
aaaucccgggcaaacaaag

SEQ ID NO: 2192926 - RNA, 19 nt, Artificial Sequence
  Description of Artificial Sequence: Synthetic oligonucleotide
  Sense strand starting at position 2008 of SEQ ID NO: 1883421
uuuguuugcccgggauuua

SEQ ID NO: 2192927 - RNA, 19 nt, Artificial Sequence
  Description of Artificial Sequence: Synthetic oligonucleotide
  Antisense strand to SEQ ID NO: 2192926
uaaaucccgggcaaacaaa

SEQ ID NO: 2192928 - RNA, 19 nt, Artificial Sequence
  Description of Artificial Sequence: Synthetic oligonucleotide
  Sense strand starting at position 2009 of SEQ ID NO: 1883421
uuguuugcccgggauuuau

SEQ ID NO: 2192929 - RNA, 19 nt, Artificial Sequence
  Description of Artificial Sequence: Synthetic oligonucleotide
  Antisense strand to SEQ ID NO: 2192928
auaaaucccgggcaaacaa

SEQ ID NO: 2192930 - RNA, 19 nt, Artificial Sequence
  Description of Artificial Sequence: Synthetic oligonucleotide
  Sense strand starting at position 2101 of SEQ ID NO: 1883421
gcuggaaauuguguaugga

SEQ ID NO: 2192931 - RNA, 19 nt, Artificial Sequence
  Description of Artificial Sequence: Synthetic oligonucleotide
  Antisense strand to SEQ ID NO: 2192930
uccauacacaauuuccagc

SEQ ID NO: 2192932 - RNA, 19 nt, Artificial Sequence
  Description of Artificial Sequence: Synthetic oligonucleotide
  Sense strand starting at position 2102 of SEQ ID NO: 1883421
cuggaaauuguguauggau

SEQ ID NO: 2192933 - RNA, 19 nt, Artificial Sequence
  Description of Artificial Sequence: Synthetic oligonucleotide
  Antisense strand to SEQ ID NO: 2192932
auccauacacaauuuccag

SEQ ID NO: 2192934 - RNA, 19 nt, Artificial Sequence
  Description of Artificial Sequence: Synthetic oligonucleotide
  Sense strand starting at position 2104 of SEQ ID NO: 1883421
ggaaauuguguauggauuc

SEQ ID NO: 2192935 - RNA, 19 nt, Artificial Sequence
  Description of Artificial Sequence: Synthetic oligonucleotide
  Antisense strand to SEQ ID NO: 2192934
gaauccauacacaauuucc

SEQ ID NO: 2192936 - RNA, 19 nt, Artificial Sequence
  Description of Artificial Sequence: Synthetic oligonucleotide
  Sense strand starting at position 2225 of SEQ ID NO: 1883421
ggugaaauaucuuucuagc

SEQ ID NO: 2192937 - RNA, 19 nt, Artificial Sequence
  Description of Artificial Sequence: Synthetic oligonucleotide
  Antisense strand to SEQ ID NO: 2192936
gcuagaaagauauuucacc

SEQ ID NO: 2192938 - RNA, 19 nt, Artificial Sequence
  Description of Artificial Sequence: Synthetic oligonucleotide
  Sense strand starting at position 2315 of SEQ ID NO: 1883421
ggcggugaacgcuugugau

SEQ ID NO: 2192939 - RNA, 19 nt, Artificial Sequence
  Description of Artificial Sequence: Synthetic oligonucleotide
  Antisense strand to SEQ ID NO: 2192938
aucacaagcguucaccgcc

SEQ ID NO: 2192940 - RNA, 19 nt, Artificial Sequence
  Description of Artificial Sequence: Synthetic oligonucleotide
  Sense strand starting at position 2395 of SEQ ID NO: 1883421
aaugcucaucgaggguauu

SEQ ID NO: 2192941 - RNA, 19 nt, Artificial Sequence
  Description of Artificial Sequence: Synthetic oligonucleotide
  Antisense strand to SEQ ID NO: 2192940
aauacccucgaugagcauu

SEQ ID NO: 2192942 - RNA, 19 nt, Artificial Sequence
  Description of Artificial Sequence: Synthetic oligonucleotide
  Sense strand starting at position 2396 of SEQ ID NO: 1883421
augcucaucgaggguauuu

SEQ ID NO: 2192943 - RNA, 19 nt, Artificial Sequence
  Description of Artificial Sequence: Synthetic oligonucleotide
  Antisense strand to SEQ ID NO: 2192942
aaauacccucgaugagcau

SEQ ID NO: 2192944 - RNA, 19 nt, Artificial Sequence
  Description of Artificial Sequence: Synthetic oligonucleotide
  Sense strand starting at position 2425 of SEQ ID NO: 1883421
uugacuucugagcaugcau

SEQ ID NO: 2192945 - RNA, 19 nt, Artificial Sequence
  Description of Artificial Sequence: Synthetic oligonucleotide
  Antisense strand to SEQ ID NO: 2192944
augcaugcucagaagucaa

SEQ ID NO: 2192946 - RNA, 19 nt, Artificial Sequence
  Description of Artificial Sequence: Synthetic oligonucleotide
  Sense strand starting at position 2427 of SEQ ID NO: 1883421
gacuucugagcaugcauuu

SEQ ID NO: 2192947 - RNA, 19 nt, Artificial Sequence
  Description of Artificial Sequence: Synthetic oligonucleotide
  Antisense strand to SEQ ID NO: 2192946
aaaugcaugcucagaaguc

SEQ ID NO: 2192948 - RNA, 19 nt, Artificial Sequence
  Description of Artificial Sequence: Synthetic oligonucleotide
  Sense strand starting at position 2450 of SEQ ID NO: 1883421
uggugcguccguaaucaug

SEQ ID NO: 2192949 - RNA, 19 nt, Artificial Sequence
  Description of Artificial Sequence: Synthetic oligonucleotide
  Antisense strand to SEQ ID NO: 2192948
caugauuacggacgcacca

SEQ ID NO: 2192950 - RNA, 19 nt, Artificial Sequence
  Description of Artificial Sequence: Synthetic oligonucleotide
  Sense strand starting at position 2459 of SEQ ID NO: 1883421
cguaaucaugaugaaaguu

SEQ ID NO: 2192951 - RNA, 19 nt, Artificial Sequence
  Description of Artificial Sequence: Synthetic oligonucleotide
  Antisense strand to SEQ ID NO: 2192950
aacuuucaucaugauuacg

SEQ ID NO: 2192952 - RNA, 19 nt, Artificial Sequence
  Description of Artificial Sequence: Synthetic oligonucleotide
  Sense strand starting at position 2493 of SEQ ID NO: 1883421
guuccuucgguggaaacaa

SEQ ID NO: 2192953 - RNA, 19 nt, Artificial Sequence
  Description of Artificial Sequence: Synthetic oligonucleotide
  Antisense strand to SEQ ID NO: 2192952
uuguuuccaccgaaggaac

SEQ ID NO: 2192954 - RNA, 19 nt, Artificial Sequence
  Description of Artificial Sequence: Synthetic oligonucleotide
  Sense strand starting at position 2613 of SEQ ID NO: 1883421
guacguuaucuggagucca

SEQ ID NO: 2192955 - RNA, 19 nt, Artificial Sequence
  Description of Artificial Sequence: Synthetic oligonucleotide
  Antisense strand to SEQ ID NO: 2192954
uggacuccagauaacguac

SEQ ID NO: 2192956 - RNA, 19 nt, Artificial Sequence
  Description of Artificial Sequence: Synthetic oligonucleotide
  Sense strand starting at position 2663 of SEQ ID NO: 1883421
ccacacaguugaguucuua

SEQ ID NO: 2192957 - RNA, 19 nt, Artificial Sequence
  Description of Artificial Sequence: Synthetic oligonucleotide
  Antisense strand to SEQ ID NO: 2192956
uaagaacucaacugugugg

SEQ ID NO: 2192958 - RNA, 19 nt, Artificial Sequence
  Description of Artificial Sequence: Synthetic oligonucleotide
  Sense strand starting at position 2667 of SEQ ID NO: 1883421
acaguugaguucuuaaaca

SEQ ID NO: 2192959 - RNA, 19 nt, Artificial Sequence
  Description of Artificial Sequence: Synthetic oligonucleotide
  Antisense strand to SEQ ID NO: 2192958
uguuuaagaacucaacugu

SEQ ID NO: 2192960 - RNA, 19 nt, Artificial Sequence
  Description of Artificial Sequence: Synthetic oligonucleotide
  Sense strand starting at position 2707 of SEQ ID NO: 1883421
uguguagaugcaggaaagu

SEQ ID NO: 2192961 - RNA, 19 nt, Artificial Sequence
  Description of Artificial Sequence: Synthetic oligonucleotide
  Antisense strand to SEQ ID NO: 2192960
acuuuccugcaucuacaca

SEQ ID NO: 2192962 - RNA, 19 nt, Artificial Sequence
  Description of Artificial Sequence: Synthetic oligonucleotide
  Sense strand starting at position 2717 of SEQ ID NO: 1883421
caggaaagugcacgucuaa

SEQ ID NO: 2192963 - RNA, 19 nt, Artificial Sequence
  Description of Artificial Sequence: Synthetic oligonucleotide
  Antisense strand to SEQ ID NO: 2192962
uuagacgugcacuuuccug

SEQ ID NO: 2192964 - RNA, 19 nt, Artificial Sequence
  Description of Artificial Sequence: Synthetic oligonucleotide
  Sense strand starting at position 2730 of SEQ ID NO: 1883421
gucuaaauaugacccgaaa

SEQ ID NO: 2192965 - RNA, 19 nt, Artificial Sequence
  Description of Artificial Sequence: Synthetic oligonucleotide
  Antisense strand to SEQ ID NO: 2192964
uuucgggucauauuuagac

SEQ ID NO: 2192966 - RNA, 19 nt, Artificial Sequence
  Description of Artificial Sequence: Synthetic oligonucleotide
  Sense strand starting at position 2801 of SEQ ID NO: 1883421
auucuaaagcguuagaaug

SEQ ID NO: 2192967 - RNA, 19 nt, Artificial Sequence
  Description of Artificial Sequence: Synthetic oligonucleotide
  Antisense strand to SEQ ID NO: 2192966
cauucuaacgcuuuagaau

SEQ ID NO: 2192968 - RNA, 19 nt, Artificial Sequence
  Description of Artificial Sequence: Synthetic oligonucleotide
  Sense strand starting at position 2815 of SEQ ID NO: 1883421
gaauguugagaucauuguu

SEQ ID NO: 2192969 - RNA, 19 nt, Artificial Sequence
  Description of Artificial Sequence: Synthetic oligonucleotide
  Antisense strand to SEQ ID NO: 2192968
aacaaugaucucaacauuc

SEQ ID NO: 2192970 - RNA, 19 nt, Artificial Sequence
  Description of Artificial Sequence: Synthetic oligonucleotide
  Sense strand starting at position 2818 of SEQ ID NO: 1883421
uguugagaucauuguugag

SEQ ID NO: 2192971 - RNA, 19 nt, Artificial Sequence
  Description of Artificial Sequence: Synthetic oligonucleotide
  Antisense strand to SEQ ID NO: 2192970
cucaacaaugaucucaaca

SEQ ID NO: 2192972 - RNA, 19 nt, Artificial Sequence
  Description of Artificial Sequence: Synthetic oligonucleotide
  Sense strand starting at position 2820 of SEQ ID NO: 1883421
uugagaucauuguugagac

SEQ ID NO: 2192973 - RNA, 19 nt, Artificial Sequence
  Description of Artificial Sequence: Synthetic oligonucleotide
  Antisense strand to SEQ ID NO: 2192972
gucucaacaaugaucucaa

SEQ ID NO: 2192974 - RNA, 19 nt, Artificial Sequence
  Description of Artificial Sequence: Synthetic oligonucleotide
  Sense strand starting at position 3113 of SEQ ID NO: 1883421
uuugaagaguuguuuacuu

SEQ ID NO: 2192975 - RNA, 19 nt, Artificial Sequence
  Description of Artificial Sequence: Synthetic oligonucleotide
  Antisense strand to SEQ ID NO: 2192974
aaguaaacaacucuucaaa

SEQ ID NO: 2192976 - RNA, 19 nt, Artificial Sequence
  Description of Artificial Sequence: Synthetic oligonucleotide
  Sense strand starting at position 3117 of SEQ ID NO: 1883421
aagaguuguuuacuugcau

SEQ ID NO: 2192977 - RNA, 19 nt, Artificial Sequence
  Description of Artificial Sequence: Synthetic oligonucleotide
  Antisense strand to SEQ ID NO: 2192976
augcaaguaaacaacucuu

SEQ ID NO: 2192978 - RNA, 19 nt, Artificial Sequence
  Description of Artificial Sequence: Synthetic oligonucleotide
  Sense strand starting at position 3380 of SEQ ID NO: 1883421
augugcaaucuguuugcuu

SEQ ID NO: 2192979 - RNA, 19 nt, Artificial Sequence
  Description of Artificial Sequence: Synthetic oligonucleotide
  Antisense strand to SEQ ID NO: 2192978
aagcaaacagauugcacau

SEQ ID NO: 2192980 - RNA, 19 nt, Artificial Sequence
  Description of Artificial Sequence: Synthetic oligonucleotide
  Sense strand starting at position 3392 of SEQ ID NO: 1883421
uuugcuucucaggguuaga

SEQ ID NO: 2192981 - RNA, 19 nt, Artificial Sequence
  Description of Artificial Sequence: Synthetic oligonucleotide
  Antisense strand to SEQ ID NO: 2192980
ucuaacccugagaagcaaa

SEQ ID NO: 2192982 - RNA, 19 nt, Artificial Sequence
  Description of Artificial Sequence: Synthetic oligonucleotide
  Sense strand starting at position 3395 of SEQ ID NO: 1883421
gcuucucaggguuagaaua

SEQ ID NO: 2192983 - RNA, 19 nt, Artificial Sequence
  Description of Artificial Sequence: Synthetic oligonucleotide
  Antisense strand to SEQ ID NO: 2192982
uauucuaacccugagaagc

SEQ ID NO: 2192984 - RNA, 19 nt, Artificial Sequence
  Description of Artificial Sequence: Synthetic oligonucleotide
  Sense strand starting at position 3622 of SEQ ID NO: 1883421
ugagguuguguauaauaau

SEQ ID NO: 2192985 - RNA, 19 nt, Artificial Sequence
  Description of Artificial Sequence: Synthetic oligonucleotide
  Antisense strand to SEQ ID NO: 2192984
auuauuauacacaaccuca

SEQ ID NO: 2192986 - RNA, 19 nt, Artificial Sequence
  Description of Artificial Sequence: Synthetic oligonucleotide
  Sense strand starting at position 3737 of SEQ ID NO: 1883421
cuagaaaguaucggucuuu

SEQ ID NO: 2192987 - RNA, 19 nt, Artificial Sequence
  Description of Artificial Sequence: Synthetic oligonucleotide
  Antisense strand to SEQ ID NO: 2192986
aaagaccgauacuuucuag

SEQ ID NO: 2192988 - RNA, 19 nt, Artificial Sequence
  Description of Artificial Sequence: Synthetic oligonucleotide
  Sense strand starting at position 3808 of SEQ ID NO: 1883421
gaacccaaguuguccaaga

SEQ ID NO: 2192989 - RNA, 19 nt, Artificial Sequence
  Description of Artificial Sequence: Synthetic oligonucleotide
  Antisense strand to SEQ ID NO: 2192988
ucuuggacaacuuggguuc

SEQ ID NO: 2192990 - RNA, 19 nt, Artificial Sequence
  Description of Artificial Sequence: Synthetic oligonucleotide
  Sense strand starting at position 3845 of SEQ ID NO: 1883421
caguuaagaccgugaagag

SEQ ID NO: 2192991 - RNA, 19 nt, Artificial Sequence
  Description of Artificial Sequence: Synthetic oligonucleotide
  Antisense strand to SEQ ID NO: 2192990
cucuucacggucuuaacug

SEQ ID NO: 2192992 - RNA, 19 nt, Artificial Sequence
  Description of Artificial Sequence: Synthetic oligonucleotide
  Sense strand starting at position 3898 of SEQ ID NO: 1883421
aaacuaagguggccugaau

SEQ ID NO: 2192993 - RNA, 19 nt, Artificial Sequence
  Description of Artificial Sequence: Synthetic oligonucleotide
  Antisense strand to SEQ ID NO: 2192992
auucaggccaccuuaguuu

SEQ ID NO: 2192994 - RNA, 19 nt, Artificial Sequence
  Description of Artificial Sequence: Synthetic oligonucleotide
  Sense strand starting at position 3909 of SEQ ID NO: 1883421
gccugaaugauccagguaa

SEQ ID NO: 2192995 - RNA, 19 nt, Artificial Sequence
  Description of Artificial Sequence: Synthetic oligonucleotide
  Antisense strand to SEQ ID NO: 2192994
uuaccuggaucauucaggc

SEQ ID NO: 2192996 - RNA, 19 nt, Artificial Sequence
  Description of Artificial Sequence: Synthetic oligonucleotide
  Sense strand starting at position 3911 of SEQ ID NO: 1883421
cugaaugauccagguaauu

SEQ ID NO: 2192997 - RNA, 19 nt, Artificial Sequence
  Description of Artificial Sequence: Synthetic oligonucleotide
  Antisense strand to SEQ ID NO: 2192996
aauuaccuggaucauucag

SEQ ID NO: 2192998 - RNA, 19 nt, Artificial Sequence
  Description of Artificial Sequence: Synthetic oligonucleotide
  Sense strand starting at position 71 of SEQ ID NO: 1883423
ggucuaguuugauugcaau

SEQ ID NO: 2192999 - RNA, 19 nt, Artificial Sequence
  Description of Artificial Sequence: Synthetic oligonucleotide
  Antisense strand to SEQ ID NO: 2192998
auugcaaucaaacuagacc

SEQ ID NO: 2193000 - RNA, 19 nt, Artificial Sequence
  Description of Artificial Sequence: Synthetic oligonucleotide
  Sense strand starting at position 627 of SEQ ID NO: 1883423
uggcuagugguguaaagac

SEQ ID NO: 2193001 - RNA, 19 nt, Artificial Sequence
  Description of Artificial Sequence: Synthetic oligonucleotide
  Antisense strand to SEQ ID NO: 2193000
gucuuuacaccacuagcca

SEQ ID NO: 2193002 - RNA, 19 nt, Artificial Sequence
  Description of Artificial Sequence: Synthetic oligonucleotide
  Sense strand starting at position 44 of SEQ ID NO: 1883424
uugagugacuuucucaauc

SEQ ID NO: 2193003 - RNA, 19 nt, Artificial Sequence
  Description of Artificial Sequence: Synthetic oligonucleotide
  Antisense strand to SEQ ID NO: 2193002
gauugagaaagucacucaa

SEQ ID NO: 2193004 - RNA, 19 nt, Artificial Sequence
  Description of Artificial Sequence: Synthetic oligonucleotide
  Sense strand starting at position 2062 of SEQ ID NO: 1883424
acacucuucggugaacagu

SEQ ID NO: 2193005 - RNA, 19 nt, Artificial Sequence
  Description of Artificial Sequence: Synthetic oligonucleotide
  Antisense strand to SEQ ID NO: 2193004
acuguucaccgaagagugu

SEQ ID NO: 2193006 - RNA, 19 nt, Artificial Sequence
  Description of Artificial Sequence: Synthetic oligonucleotide
  Sense strand starting at position 2070 of SEQ ID NO: 1883424
cggugaacaguuggagaua

SEQ ID NO: 2193007 - RNA, 19 nt, Artificial Sequence
  Description of Artificial Sequence: Synthetic oligonucleotide
  Antisense strand to SEQ ID NO: 2193006
uaucuccaacuguucaccg

SEQ ID NO: 2193008 - RNA, 19 nt, Artificial Sequence
  Description of Artificial Sequence: Synthetic oligonucleotide
  Sense strand starting at position 2070 of SEQ ID NO: 1883425
cggugaacagcuggagaua

SEQ ID NO: 2193009 - RNA, 19 nt, Artificial Sequence
  Description of Artificial Sequence: Synthetic oligonucleotide
  Antisense strand to SEQ ID NO: 2193008
uaucuccagcuguucaccg

SEQ ID NO: 2193010 - RNA, 19 nt, Artificial Sequence
  Description of Artificial Sequence: Synthetic oligonucleotide
  Sense strand starting at position 3058 of SEQ ID NO: 1883425
gccacuugucgccuuuaua

SEQ ID NO: 2193011 - RNA, 19 nt, Artificial Sequence
  Description of Artificial Sequence: Synthetic oligonucleotide
  Antisense strand to SEQ ID NO: 2193010
uauaaaggcgacaaguggc

SEQ ID NO: 2193012 - RNA, 19 nt, Artificial Sequence
  Description of Artificial Sequence: Synthetic oligonucleotide
  Sense strand starting at position 3099 of SEQ ID NO: 1883425
ggacuucuccuugauaggu

SEQ ID NO: 2193013 - RNA, 19 nt, Artificial Sequence
  Description of Artificial Sequence: Synthetic oligonucleotide
  Antisense strand to SEQ ID NO: 2193012
accuaucaaggagaagucc

SEQ ID NO: 2193014 - RNA, 19 nt, Artificial Sequence
  Description of Artificial Sequence: Synthetic oligonucleotide
  Sense strand starting at position 3107 of SEQ ID NO: 1883425
ccuugauagguuggugcuu

SEQ ID NO: 2193015 - RNA, 19 nt, Artificial Sequence
  Description of Artificial Sequence: Synthetic oligonucleotide
  Antisense strand to SEQ ID NO: 2193014
aagcaccaaccuaucaagg

SEQ ID NO: 2193016 - RNA, 19 nt, Artificial Sequence
  Description of Artificial Sequence: Synthetic oligonucleotide
  Sense strand starting at position 3206 of SEQ ID NO: 1883425
ggaacucccgguugcuaaa

SEQ ID NO: 2193017 - RNA, 19 nt, Artificial Sequence
  Description of Artificial Sequence: Synthetic oligonucleotide
  Antisense strand to SEQ ID NO: 2193016
uuuagcaaccgggaguucc

SEQ ID NO: 2193018 - RNA, 19 nt, Artificial Sequence
  Description of Artificial Sequence: Synthetic oligonucleotide
  Sense strand starting at position 3216 of SEQ ID NO: 1883425
guugcuaaacuuggagcua

SEQ ID NO: 2193019 - RNA, 19 nt, Artificial Sequence
  Description of Artificial Sequence: Synthetic oligonucleotide
  Antisense strand to SEQ ID NO: 2193018
uagcuccaaguuuagcaac

SEQ ID NO: 2193020 - RNA, 19 nt, Artificial Sequence
  Description of Artificial Sequence: Synthetic oligonucleotide
  Sense strand starting at position 3296 of SEQ ID NO: 1883425
uugggcuaccuaggauuaa

SEQ ID NO: 2193021 - RNA, 19 nt, Artificial Sequence
  Description of Artificial Sequence: Synthetic oligonucleotide
  Antisense strand to SEQ ID NO: 2193020
uuaauccuagguagcccaa

SEQ ID NO: 2193022 - RNA, 19 nt, Artificial Sequence
  Description of Artificial Sequence: Synthetic oligonucleotide
  Sense strand starting at position 3297 of SEQ ID NO: 1883425
ugggcuaccuaggauuaaa

SEQ ID NO: 2193023 - RNA, 19 nt, Artificial Sequence
  Description of Artificial Sequence: Synthetic oligonucleotide
  Antisense strand to SEQ ID NO: 2193022
uuuaauccuagguagccca

SEQ ID NO: 2193024 - RNA, 19 nt, Artificial Sequence
  Description of Artificial Sequence: Synthetic oligonucleotide
  Sense strand starting at position 3324 of SEQ ID NO: 1883425
cagggagguuggucaacuu

SEQ ID NO: 2193025 - RNA, 19 nt, Artificial Sequence
  Description of Artificial Sequence: Synthetic oligonucleotide
  Antisense strand to SEQ ID NO: 2193024
aaguugaccaaccucccug

SEQ ID NO: 2193026 - RNA, 19 nt, Artificial Sequence
  Description of Artificial Sequence: Synthetic oligonucleotide
  Sense strand starting at position 3500 of SEQ ID NO: 1883425
ccaggacuugggcaauguu

SEQ ID NO: 2193027 - RNA, 19 nt, Artificial Sequence
  Description of Artificial Sequence: Synthetic oligonucleotide
  Antisense strand to SEQ ID NO: 2193026
aacauugcccaaguccugg

SEQ ID NO: 2193028 - RNA, 19 nt, Artificial Sequence
  Description of Artificial Sequence: Synthetic oligonucleotide
  Sense strand starting at position 3637 of SEQ ID NO: 1883425
cuagaucuaguuugaggca

SEQ ID NO: 2193029 - RNA, 19 nt, Artificial Sequence
  Description of Artificial Sequence: Synthetic oligonucleotide
  Antisense strand to SEQ ID NO: 2193028
ugccucaaacuagaucuag

SEQ ID NO: 2193030 - RNA, 19 nt, Artificial Sequence
  Description of Artificial Sequence: Synthetic oligonucleotide
  Sense strand starting at position 3826 of SEQ ID NO: 1883425
acucuuuacgaauguauag

SEQ ID NO: 2193031 - RNA, 19 nt, Artificial Sequence
  Description of Artificial Sequence: Synthetic oligonucleotide
  Antisense strand to SEQ ID NO: 2193030
cuauacauucguaaagagu

SEQ ID NO: 2193032 - RNA, 19 nt, Artificial Sequence
  Description of Artificial Sequence: Synthetic oligonucleotide
  Sense strand starting at position 3861 of SEQ ID NO: 1883425
gugagaagauguggaagau

SEQ ID NO: 2193033 - RNA, 19 nt, Artificial Sequence
  Description of Artificial Sequence: Synthetic oligonucleotide
  Antisense strand to SEQ ID NO: 2193032
aucuuccacaucuucucac

SEQ ID NO: 2193034 - RNA, 19 nt, Artificial Sequence
  Description of Artificial Sequence: Synthetic oligonucleotide
  Sense strand starting at position 3883 of SEQ ID NO: 1883425
uccugcaguggcugugaaa

SEQ ID NO: 2193035 - RNA, 19 nt, Artificial Sequence
  Description of Artificial Sequence: Synthetic oligonucleotide
  Antisense strand to SEQ ID NO: 2193034
uuucacagccacugcagga

SEQ ID NO: 2193036 - RNA, 19 nt, Artificial Sequence
  Description of Artificial Sequence: Synthetic oligonucleotide
  Sense strand starting at position 2782 of SEQ ID NO: 1883431
ucgcgcaucgccuuuauau

SEQ ID NO: 2193037 - RNA, 19 nt, Artificial Sequence
  Description of Artificial Sequence: Synthetic oligonucleotide
  Antisense strand to SEQ ID NO: 2193036
auauaaaggcgaugcgcga

SEQ ID NO: 2193038 - RNA, 19 nt, Artificial Sequence
  Description of Artificial Sequence: Synthetic oligonucleotide
  Sense strand starting at position 2783 of SEQ ID NO: 1883431
cgcgcaucgccuuuauaua

SEQ ID NO: 2193039 - RNA, 19 nt, Artificial Sequence
  Description of Artificial Sequence: Synthetic oligonucleotide
  Antisense strand to SEQ ID NO: 2193038
uauauaaaggcgaugcgcg

SEQ ID NO: 2193040 - RNA, 19 nt, Artificial Sequence
  Description of Artificial Sequence: Synthetic oligonucleotide
  Sense strand starting at position 2784 of SEQ ID NO: 1883431
gcgcaucgccuuuauauag

SEQ ID NO: 2193041 - RNA, 19 nt, Artificial Sequence
  Description of Artificial Sequence: Synthetic oligonucleotide
  Antisense strand to SEQ ID NO: 2193040
cuauauaaaggcgaugcgc

SEQ ID NO: 2193042 - RNA, 19 nt, Artificial Sequence
  Description of Artificial Sequence: Synthetic oligonucleotide
  Sense strand starting at position 2794 of SEQ ID NO: 1883431
uuuauauaggcauggguca

SEQ ID NO: 2193043 - RNA, 19 nt, Artificial Sequence
  Description of Artificial Sequence: Synthetic oligonucleotide
  Antisense strand to SEQ ID NO: 2193042
ugacccaugccuauauaaa

SEQ ID NO: 2193044 - RNA, 19 nt, Artificial Sequence
  Description of Artificial Sequence: Synthetic oligonucleotide
  Sense strand starting at position 2824 of SEQ ID NO: 1883431
gcuucuucuugauuacguu

SEQ ID NO: 2193045 - RNA, 19 nt, Artificial Sequence
  Description of Artificial Sequence: Synthetic oligonucleotide
  Antisense strand to SEQ ID NO: 2193044
aacguaaucaagaagaagc

SEQ ID NO: 2193046 - RNA, 19 nt, Artificial Sequence
  Description of Artificial Sequence: Synthetic oligonucleotide
  Sense strand starting at position 2828 of SEQ ID NO: 1883431
cuucuugauuacguuggua

SEQ ID NO: 2193047 - RNA, 19 nt, Artificial Sequence
  Description of Artificial Sequence: Synthetic oligonucleotide
  Antisense strand to SEQ ID NO: 2193046
uaccaacguaaucaagaag

SEQ ID NO: 2193048 - RNA, 19 nt, Artificial Sequence
  Description of Artificial Sequence: Synthetic oligonucleotide
  Sense strand starting at position 2830 of SEQ ID NO: 1883431
ucuugauuacguugguacu

SEQ ID NO: 2193049 - RNA, 19 nt, Artificial Sequence
  Description of Artificial Sequence: Synthetic oligonucleotide
  Antisense strand to SEQ ID NO: 2193048
aguaccaacguaaucaaga

SEQ ID NO: 2193050 - RNA, 19 nt, Artificial Sequence
  Description of Artificial Sequence: Synthetic oligonucleotide
  Sense strand starting at position 2840 of SEQ ID NO: 1883431
guugguacuuuauucuaau

SEQ ID NO: 2193051 - RNA, 19 nt, Artificial Sequence
  Description of Artificial Sequence: Synthetic oligonucleotide
  Antisense strand to SEQ ID NO: 2193050
auuagaauaaaguaccaac

SEQ ID NO: 2193052 - RNA, 19 nt, Artificial Sequence
  Description of Artificial Sequence: Synthetic oligonucleotide
  Sense strand starting at position 2929 of SEQ ID NO: 1883431
uggaucuccugguugcuaa

SEQ ID NO: 2193053 - RNA, 19 nt, Artificial Sequence
  Description of Artificial Sequence: Synthetic oligonucleotide
  Antisense strand to SEQ ID NO: 2193052
uuagcaaccaggagaucca

SEQ ID NO: 2193054 - RNA, 19 nt, Artificial Sequence
  Description of Artificial Sequence: Synthetic oligonucleotide
  Sense strand starting at position 2940 of SEQ ID NO: 1883431
guugcuaaccuuggagcua

SEQ ID NO: 2193055 - RNA, 19 nt, Artificial Sequence
  Description of Artificial Sequence: Synthetic oligonucleotide
  Antisense strand to SEQ ID NO: 2193054
uagcuccaagguuagcaac

SEQ ID NO: 2193056 - RNA, 19 nt, Artificial Sequence
  Description of Artificial Sequence: Synthetic oligonucleotide
  Sense strand starting at position 3227 of SEQ ID NO: 1883431
ggacaugggcaauguugaa

SEQ ID NO: 2193057 - RNA, 19 nt, Artificial Sequence
  Description of Artificial Sequence: Synthetic oligonucleotide
  Antisense strand to SEQ ID NO: 2193056
uucaacauugcccaugucc

SEQ ID NO: 2193058 - RNA, 19 nt, Artificial Sequence
  Description of Artificial Sequence: Synthetic oligonucleotide
  Sense strand starting at position 3354 of SEQ ID NO: 1883431
uucugaacuagacguaguu

SEQ ID NO: 2193059 - RNA, 19 nt, Artificial Sequence
  Description of Artificial Sequence: Synthetic oligonucleotide
  Antisense strand to SEQ ID NO: 2193058
aacuacgucuaguucagaa

SEQ ID NO: 2193060 - RNA, 19 nt, Artificial Sequence
  Description of Artificial Sequence: Synthetic oligonucleotide
  Sense strand starting at position 3366 of SEQ ID NO: 1883431
cguaguuugaggcauaaag

SEQ ID NO: 2193061 - RNA, 19 nt, Artificial Sequence
  Description of Artificial Sequence: Synthetic oligonucleotide
  Antisense strand to SEQ ID NO: 2193060
cuuuaugccucaaacuacg

SEQ ID NO: 2193062 - RNA, 19 nt, Artificial Sequence
  Description of Artificial Sequence: Synthetic oligonucleotide
  Sense strand starting at position 3426 of SEQ ID NO: 1883431
caugaauuccgcuaaaguu

SEQ ID NO: 2193063 - RNA, 19 nt, Artificial Sequence
  Description of Artificial Sequence: Synthetic oligonucleotide
  Antisense strand to SEQ ID NO: 2193062
aacuuuagcggaauucaug

SEQ ID NO: 2193064 - RNA, 19 nt, Artificial Sequence
  Description of Artificial Sequence: Synthetic oligonucleotide
  Sense strand starting at position 3471 of SEQ ID NO: 1883431
ggugaagcuugaguggaau

SEQ ID NO: 2193065 - RNA, 19 nt, Artificial Sequence
  Description of Artificial Sequence: Synthetic oligonucleotide
  Antisense strand to SEQ ID NO: 2193064
auuccacucaagcuucacc

SEQ ID NO: 2193066 - RNA, 19 nt, Artificial Sequence
  Description of Artificial Sequence: Synthetic oligonucleotide
  Sense strand starting at position 3473 of SEQ ID NO: 1883431
ugaagcuugaguggaauaa

SEQ ID NO: 2193067 - RNA, 19 nt, Artificial Sequence
  Description of Artificial Sequence: Synthetic oligonucleotide
  Antisense strand to SEQ ID NO: 2193066
uuauuccacucaagcuuca

SEQ ID NO: 2193068 - RNA, 19 nt, Artificial Sequence
  Description of Artificial Sequence: Synthetic oligonucleotide
  Sense strand starting at position 3477 of SEQ ID NO: 1883431
gcuugaguggaauaaugua

SEQ ID NO: 2193069 - RNA, 19 nt, Artificial Sequence
  Description of Artificial Sequence: Synthetic oligonucleotide
  Antisense strand to SEQ ID NO: 2193068
uacauuauuccacucaagc

SEQ ID NO: 2193070 - RNA, 19 nt, Artificial Sequence
  Description of Artificial Sequence: Synthetic oligonucleotide
  Sense strand starting at position 3551 of SEQ ID NO: 1883431
gccguuuaccaauguagag

SEQ ID NO: 2193071 - RNA, 19 nt, Artificial Sequence
  Description of Artificial Sequence: Synthetic oligonucleotide
  Antisense strand to SEQ ID NO: 2193070
cucuacauugguaaacggc

SEQ ID NO: 2193072 - RNA, 19 nt, Artificial Sequence
  Description of Artificial Sequence: Synthetic oligonucleotide
  Sense strand starting at position 3553 of SEQ ID NO: 1883431
cguuuaccaauguagaguu

SEQ ID NO: 2193073 - RNA, 19 nt, Artificial Sequence
  Description of Artificial Sequence: Synthetic oligonucleotide
  Antisense strand to SEQ ID NO: 2193072
aacucuacauugguaaacg

SEQ ID NO: 2193074 - RNA, 19 nt, Artificial Sequence
  Description of Artificial Sequence: Synthetic oligonucleotide
  Sense strand starting at position 3608 of SEQ ID NO: 1883431
uucugcaguggcugugaaa

SEQ ID NO: 2193075 - RNA, 19 nt, Artificial Sequence
  Description of Artificial Sequence: Synthetic oligonucleotide
  Antisense strand to SEQ ID NO: 2193074
uuucacagccacugcagaa

SEQ ID NO: 2193076 - RNA, 19 nt, Artificial Sequence
  Description of Artificial Sequence: Synthetic oligonucleotide
  Sense strand starting at position 3703 of SEQ ID NO: 1883431
gagagaucaugguccuguc

SEQ ID NO: 2193077 - RNA, 19 nt, Artificial Sequence
  Description of Artificial Sequence: Synthetic oligonucleotide
  Antisense strand to SEQ ID NO: 2193076
gacaggaccaugaucucuc

SEQ ID NO: 2193078 - RNA, 19 nt, Artificial Sequence
  Description of Artificial Sequence: Synthetic oligonucleotide
  Sense strand starting at position 9 of SEQ ID NO: 1883432
gcuggagacugaugcagaa

SEQ ID NO: 2193079 - RNA, 19 nt, Artificial Sequence
  Description of Artificial Sequence: Synthetic oligonucleotide
  Antisense strand to SEQ ID NO: 2193078
uucugcaucagucuccagc

SEQ ID NO: 2193080 - RNA, 19 nt, Artificial Sequence
  Description of Artificial Sequence: Synthetic oligonucleotide
  Sense strand starting at position 75 of SEQ ID NO: 1883432
ugccuaauuccgcuagcca

SEQ ID NO: 2193081 - RNA, 19 nt, Artificial Sequence
  Description of Artificial Sequence: Synthetic oligonucleotide
  Antisense strand to SEQ ID NO: 2193080
uggcuagcggaauuaggca

SEQ ID NO: 2193082 - RNA, 19 nt, Artificial Sequence
  Description of Artificial Sequence: Synthetic oligonucleotide
  Sense strand starting at position 187 of SEQ ID NO: 1883432
gacaaagagcgauaggcuu

SEQ ID NO: 2193083 - RNA, 19 nt, Artificial Sequence
  Description of Artificial Sequence: Synthetic oligonucleotide
  Antisense strand to SEQ ID NO: 2193082
aagccuaucgcucuuuguc

SEQ ID NO: 2193084 - RNA, 19 nt, Artificial Sequence
  Description of Artificial Sequence: Synthetic oligonucleotide
  Sense strand starting at position 1061 of SEQ ID NO: 1883432
ccggguuuguuccaggaaa

SEQ ID NO: 2193085 - RNA, 19 nt, Artificial Sequence
  Description of Artificial Sequence: Synthetic oligonucleotide
  Antisense strand to SEQ ID NO: 2193084
uuuccuggaacaaacccgg

SEQ ID NO: 2193086 - RNA, 19 nt, Artificial Sequence
  Description of Artificial Sequence: Synthetic oligonucleotide
  Sense strand starting at position 1376 of SEQ ID NO: 1883432
cucccuaucccgugagaaa

SEQ ID NO: 2193087 - RNA, 19 nt, Artificial Sequence
  Description of Artificial Sequence: Synthetic oligonucleotide
  Antisense strand to SEQ ID NO: 2193086
uuucucacgggauagggag

SEQ ID NO: 2193088 - RNA, 19 nt, Artificial Sequence
  Description of Artificial Sequence: Synthetic oligonucleotide
  Sense strand starting at position 1377 of SEQ ID NO: 1883432
ucccuaucccgugagaaag

SEQ ID NO: 2193089 - RNA, 19 nt, Artificial Sequence
  Description of Artificial Sequence: Synthetic oligonucleotide
  Antisense strand to SEQ ID NO: 2193088
cuuucucacgggauaggga

SEQ ID NO: 2193090 - RNA, 19 nt, Artificial Sequence
  Description of Artificial Sequence: Synthetic oligonucleotide
  Sense strand starting at position 1412 of SEQ ID NO: 1883432
ccuggucuuuccgaaauac

SEQ ID NO: 2193091 - RNA, 19 nt, Artificial Sequence
  Description of Artificial Sequence: Synthetic oligonucleotide
  Antisense strand to SEQ ID NO: 2193090
guauuucggaaagaccagg

SEQ ID NO: 2193092 - RNA, 19 nt, Artificial Sequence
  Description of Artificial Sequence: Synthetic oligonucleotide
  Sense strand starting at position 1428 of SEQ ID NO: 1883432
uacgcuucggguggucaau

SEQ ID NO: 2193093 - RNA, 19 nt, Artificial Sequence
  Description of Artificial Sequence: Synthetic oligonucleotide
  Antisense strand to SEQ ID NO: 2193092
auugaccacccgaagcgua

SEQ ID NO: 2193094 - RNA, 19 nt, Artificial Sequence
  Description of Artificial Sequence: Synthetic oligonucleotide
  Sense strand starting at position 1434 of SEQ ID NO: 1883432
ucggguggucaaugcgauu

SEQ ID NO: 2193095 - RNA, 19 nt, Artificial Sequence
  Description of Artificial Sequence: Synthetic oligonucleotide
  Antisense strand to SEQ ID NO: 2193094
aaucgcauugaccacccga

SEQ ID NO: 2193096 - RNA, 19 nt, Artificial Sequence
  Description of Artificial Sequence: Synthetic oligonucleotide
  Sense strand starting at position 1445 of SEQ ID NO: 1883432
augcgauuucuagggucua

SEQ ID NO: 2193097 - RNA, 19 nt, Artificial Sequence
  Description of Artificial Sequence: Synthetic oligonucleotide
  Antisense strand to SEQ ID NO: 2193096
uagacccuagaaaucgcau

SEQ ID NO: 2193098 - RNA, 19 nt, Artificial Sequence
  Description of Artificial Sequence: Synthetic oligonucleotide
  Sense strand starting at position 1446 of SEQ ID NO: 1883432
ugcgauuucuagggucuaa

SEQ ID NO: 2193099 - RNA, 19 nt, Artificial Sequence
  Description of Artificial Sequence: Synthetic oligonucleotide
  Antisense strand to SEQ ID NO: 2193098
uuagacccuagaaaucgca

SEQ ID NO: 2193100 - RNA, 19 nt, Artificial Sequence
  Description of Artificial Sequence: Synthetic oligonucleotide
  Sense strand starting at position 1760 of SEQ ID NO: 1883432
aagagaguucgaggaacug

SEQ ID NO: 2193101 - RNA, 19 nt, Artificial Sequence
  Description of Artificial Sequence: Synthetic oligonucleotide
  Antisense strand to SEQ ID NO: 2193100
caguuccucgaacucucuu

SEQ ID NO: 2193102 - RNA, 19 nt, Artificial Sequence
  Description of Artificial Sequence: Synthetic oligonucleotide
  Sense strand starting at position 2291 of SEQ ID NO: 1883432
gugcucggaccucgugaau

SEQ ID NO: 2193103 - RNA, 19 nt, Artificial Sequence
  Description of Artificial Sequence: Synthetic oligonucleotide
  Antisense strand to SEQ ID NO: 2193102
auucacgagguccgagcac

SEQ ID NO: 2193104 - RNA, 19 nt, Artificial Sequence
  Description of Artificial Sequence: Synthetic oligonucleotide
  Sense strand starting at position 2294 of SEQ ID NO: 1883432
cucggaccucgugaaugaa

SEQ ID NO: 2193105 - RNA, 19 nt, Artificial Sequence
  Description of Artificial Sequence: Synthetic oligonucleotide
  Antisense strand to SEQ ID NO: 2193104
uucauucacgagguccgag

SEQ ID NO: 2193106 - RNA, 19 nt, Artificial Sequence
  Description of Artificial Sequence: Synthetic oligonucleotide
  Sense strand starting at position 3680 of SEQ ID NO: 1883432
ggcucuuuacuacagaauu

SEQ ID NO: 2193107 - RNA, 19 nt, Artificial Sequence
  Description of Artificial Sequence: Synthetic oligonucleotide
  Antisense strand to SEQ ID NO: 2193106
aauucuguaguaaagagcc

SEQ ID NO: 2193108 - RNA, 19 nt, Artificial Sequence
  Description of Artificial Sequence: Synthetic oligonucleotide
  Sense strand starting at position 3748 of SEQ ID NO: 1883432
aaaggccuauaguuagauu

SEQ ID NO: 2193109 - RNA, 19 nt, Artificial Sequence
  Description of Artificial Sequence: Synthetic oligonucleotide
  Antisense strand to SEQ ID NO: 2193108
aaucuaacuauaggccuuu

SEQ ID NO: 2193110 - RNA, 19 nt, Artificial Sequence
  Description of Artificial Sequence: Synthetic oligonucleotide
  Sense strand starting at position 3751 of SEQ ID NO: 1883432
ggccuauaguuagauucuu

SEQ ID NO: 2193111 - RNA, 19 nt, Artificial Sequence
  Description of Artificial Sequence: Synthetic oligonucleotide
  Antisense strand to SEQ ID NO: 2193110
aagaaucuaacuauaggcc

SEQ ID NO: 2193112 - RNA, 19 nt, Artificial Sequence
  Description of Artificial Sequence: Synthetic oligonucleotide
  Sense strand starting at position 3847 of SEQ ID NO: 1883432
aggagcuuguuagaaauaa

SEQ ID NO: 2193113 - RNA, 19 nt, Artificial Sequence
  Description of Artificial Sequence: Synthetic oligonucleotide
  Antisense strand to SEQ ID NO: 2193112
uuauuucuaacaagcuccu

SEQ ID NO: 2193114 - RNA, 19 nt, Artificial Sequence
  Description of Artificial Sequence: Synthetic oligonucleotide
  Sense strand starting at position 3895 of SEQ ID NO: 1883432
ucggaaucugcaugguaac

SEQ ID NO: 2193115 - RNA, 19 nt, Artificial Sequence
  Description of Artificial Sequence: Synthetic oligonucleotide
  Antisense strand to SEQ ID NO: 2193114
guuaccaugcagauuccga

SEQ ID NO: 2193116 - RNA, 19 nt, Artificial Sequence
  Description of Artificial Sequence: Synthetic oligonucleotide
  Sense strand starting at position 3896 of SEQ ID NO: 1883432
cggaaucugcaugguaaca

SEQ ID NO: 2193117 - RNA, 19 nt, Artificial Sequence
  Description of Artificial Sequence: Synthetic oligonucleotide
  Antisense strand to SEQ ID NO: 2193116
uguuaccaugcagauuccg

SEQ ID NO: 2193118 - RNA, 19 nt, Artificial Sequence
  Description of Artificial Sequence: Synthetic oligonucleotide
  Sense strand starting at position 3898 of SEQ ID NO: 1883432
gaaucugcaugguaacauu

SEQ ID NO: 2193119 - RNA, 19 nt, Artificial Sequence
  Description of Artificial Sequence: Synthetic oligonucleotide
  Antisense strand to SEQ ID NO: 2193118
aauguuaccaugcagauuc

SEQ ID NO: 2193120 - RNA, 19 nt, Artificial Sequence
  Description of Artificial Sequence: Synthetic oligonucleotide
  Sense strand starting at position 3938 of SEQ ID NO: 1883432
cugaaugugacaugcggua

SEQ ID NO: 2193121 - RNA, 19 nt, Artificial Sequence
  Description of Artificial Sequence: Synthetic oligonucleotide
  Antisense strand to SEQ ID NO: 2193120
uaccgcaugucacauucag

SEQ ID NO: 2193122 - RNA, 19 nt, Artificial Sequence
  Description of Artificial Sequence: Synthetic oligonucleotide
  Sense strand starting at position 3958 of SEQ ID NO: 1883432
gcagaagggucuguguuca

SEQ ID NO: 2193123 - RNA, 19 nt, Artificial Sequence
  Description of Artificial Sequence: Synthetic oligonucleotide
  Antisense strand to SEQ ID NO: 2193122
ugaacacagacccuucugc

SEQ ID NO: 2193124 - RNA, 19 nt, Artificial Sequence
  Description of Artificial Sequence: Synthetic oligonucleotide
  Sense strand starting at position 78 of SEQ ID NO: 1883433
uugagagccucucuuaacu

SEQ ID NO: 2193125 - RNA, 19 nt, Artificial Sequence
  Description of Artificial Sequence: Synthetic oligonucleotide
  Antisense strand to SEQ ID NO: 2193124
aguuaagagaggcucucaa

SEQ ID NO: 2193126 - RNA, 19 nt, Artificial Sequence
  Description of Artificial Sequence: Synthetic oligonucleotide
  Sense strand starting at position 179 of SEQ ID NO: 1883433
ugcugacagucacugauau

SEQ ID NO: 2193127 - RNA, 19 nt, Artificial Sequence
  Description of Artificial Sequence: Synthetic oligonucleotide
  Antisense strand to SEQ ID NO: 2193126
auaucagugacugucagca

SEQ ID NO: 2193128 - RNA, 19 nt, Artificial Sequence
  Description of Artificial Sequence: Synthetic oligonucleotide
  Sense strand starting at position 180 of SEQ ID NO: 1883433
gcugacagucacugauaug

SEQ ID NO: 2193129 - RNA, 19 nt, Artificial Sequence
  Description of Artificial Sequence: Synthetic oligonucleotide
  Antisense strand to SEQ ID NO: 2193128
cauaucagugacugucagc

SEQ ID NO: 2193130 - RNA, 19 nt, Artificial Sequence
  Description of Artificial Sequence: Synthetic oligonucleotide
  Sense strand starting at position 183 of SEQ ID NO: 1883433
gacagucacugauauggua

SEQ ID NO: 2193131 - RNA, 19 nt, Artificial Sequence
  Description of Artificial Sequence: Synthetic oligonucleotide
  Antisense strand to SEQ ID NO: 2193130
uaccauaucagugacuguc

SEQ ID NO: 2193132 - RNA, 19 nt, Artificial Sequence
  Description of Artificial Sequence: Synthetic oligonucleotide
  Sense strand starting at position 217 of SEQ ID NO: 1883433
auagcugacucugaagacu

SEQ ID NO: 2193133 - RNA, 19 nt, Artificial Sequence
  Description of Artificial Sequence: Synthetic oligonucleotide
  Antisense strand to SEQ ID NO: 2193132
agucuucagagucagcuau

SEQ ID NO: 2193134 - RNA, 19 nt, Artificial Sequence
  Description of Artificial Sequence: Synthetic oligonucleotide
  Sense strand starting at position 284 of SEQ ID NO: 1883433
ggagaugacucacauggaa

SEQ ID NO: 2193135 - RNA, 19 nt, Artificial Sequence
  Description of Artificial Sequence: Synthetic oligonucleotide
  Antisense strand to SEQ ID NO: 2193134
uuccaugugagucaucucc

SEQ ID NO: 2193136 - RNA, 19 nt, Artificial Sequence
  Description of Artificial Sequence: Synthetic oligonucleotide
  Sense strand starting at position 324 of SEQ ID NO: 1883433
gugugaacuuuggaagcau

SEQ ID NO: 2193137 - RNA, 19 nt, Artificial Sequence
  Description of Artificial Sequence: Synthetic oligonucleotide
  Antisense strand to SEQ ID NO: 2193136
augcuuccaaaguucacac

SEQ ID NO: 2193138 - RNA, 19 nt, Artificial Sequence
  Description of Artificial Sequence: Synthetic oligonucleotide
  Sense strand starting at position 430 of SEQ ID NO: 1883433
gggugaaggucucauguag

SEQ ID NO: 2193139 - RNA, 19 nt, Artificial Sequence
  Description of Artificial Sequence: Synthetic oligonucleotide
  Antisense strand to SEQ ID NO: 2193138
cuacaugagaccuucaccc

SEQ ID NO: 2193140 - RNA, 19 nt, Artificial Sequence
  Description of Artificial Sequence: Synthetic oligonucleotide
  Sense strand starting at position 439 of SEQ ID NO: 1883433
ucucauguagccuguguga

SEQ ID NO: 2193141 - RNA, 19 nt, Artificial Sequence
  Description of Artificial Sequence: Synthetic oligonucleotide
  Antisense strand to SEQ ID NO: 2193140
ucacacaggcuacaugaga

SEQ ID NO: 2193142 - RNA, 19 nt, Artificial Sequence
  Description of Artificial Sequence: Synthetic oligonucleotide
  Sense strand starting at position 441 of SEQ ID NO: 1883433
ucauguagccugugugauu

SEQ ID NO: 2193143 - RNA, 19 nt, Artificial Sequence
  Description of Artificial Sequence: Synthetic oligonucleotide
  Antisense strand to SEQ ID NO: 2193142
aaucacacaggcuacauga

SEQ ID NO: 2193144 - RNA, 19 nt, Artificial Sequence
  Description of Artificial Sequence: Synthetic oligonucleotide
  Sense strand starting at position 450 of SEQ ID NO: 1883433
cugugugauucaggcagaa

SEQ ID NO: 2193145 - RNA, 19 nt, Artificial Sequence
  Description of Artificial Sequence: Synthetic oligonucleotide
  Antisense strand to SEQ ID NO: 2193144
uucugccugaaucacacag

SEQ ID NO: 2193146 - RNA, 19 nt, Artificial Sequence
  Description of Artificial Sequence: Synthetic oligonucleotide
  Sense strand starting at position 454 of SEQ ID NO: 1883433
gugauucaggcagaaguga

SEQ ID NO: 2193147 - RNA, 19 nt, Artificial Sequence
  Description of Artificial Sequence: Synthetic oligonucleotide
  Antisense strand to SEQ ID NO: 2193146
ucacuucugccugaaucac

SEQ ID NO: 2193148 - RNA, 19 nt, Artificial Sequence
  Description of Artificial Sequence: Synthetic oligonucleotide
  Sense strand starting at position 918 of SEQ ID NO: 1883433
gccuuaugagaaggcuguu

SEQ ID NO: 2193149 - RNA, 19 nt, Artificial Sequence
  Description of Artificial Sequence: Synthetic oligonucleotide
  Antisense strand to SEQ ID NO: 2193148
aacagccuucucauaaggc

SEQ ID NO: 2193150 - RNA, 19 nt, Artificial Sequence
  Description of Artificial Sequence: Synthetic oligonucleotide
  Sense strand starting at position 1415 of SEQ ID NO: 1883433
uaggucaguccaggaaaca

SEQ ID NO: 2193151 - RNA, 19 nt, Artificial Sequence
  Description of Artificial Sequence: Synthetic oligonucleotide
  Antisense strand to SEQ ID NO: 2193150
uguuuccuggacugaccua

SEQ ID NO: 2193152 - RNA, 19 nt, Artificial Sequence
  Description of Artificial Sequence: Synthetic oligonucleotide
  Sense strand starting at position 1427 of SEQ ID NO: 1883433
ggaaacaagcucuggaagu

SEQ ID NO: 2193153 - RNA, 19 nt, Artificial Sequence
  Description of Artificial Sequence: Synthetic oligonucleotide
  Antisense strand to SEQ ID NO: 2193152
acuuccagagcuuguuucc

SEQ ID NO: 2193154 - RNA, 19 nt, Artificial Sequence
  Description of Artificial Sequence: Synthetic oligonucleotide
  Sense strand starting at position 1445 of SEQ ID NO: 1883433
uaaagagauucggaaagca

SEQ ID NO: 2193155 - RNA, 19 nt, Artificial Sequence
  Description of Artificial Sequence: Synthetic oligonucleotide
  Antisense strand to SEQ ID NO: 2193154
ugcuuuccgaaucucuuua

SEQ ID NO: 2193156 - RNA, 19 nt, Artificial Sequence
  Description of Artificial Sequence: Synthetic oligonucleotide
  Sense strand starting at position 1462 of SEQ ID NO: 1883433
cagguucguucuggaaaca

SEQ ID NO: 2193157 - RNA, 19 nt, Artificial Sequence
  Description of Artificial Sequence: Synthetic oligonucleotide
  Antisense strand to SEQ ID NO: 2193156
uguuuccagaacgaaccug

SEQ ID NO: 2193158 - RNA, 19 nt, Artificial Sequence
  Description of Artificial Sequence: Synthetic oligonucleotide
  Sense strand starting at position 1463 of SEQ ID NO: 1883433
agguucguucuggaaacaa

SEQ ID NO: 2193159 - RNA, 19 nt, Artificial Sequence
  Description of Artificial Sequence: Synthetic oligonucleotide
  Antisense strand to SEQ ID NO: 2193158
uuguuuccagaacgaaccu

SEQ ID NO: 2193160 - RNA, 19 nt, Artificial Sequence
  Description of Artificial Sequence: Synthetic oligonucleotide
  Sense strand starting at position 1474 of SEQ ID NO: 1883433
ggaaacaaguucuacaaac

SEQ ID NO: 2193161 - RNA, 19 nt, Artificial Sequence
  Description of Artificial Sequence: Synthetic oligonucleotide
  Antisense strand to SEQ ID NO: 2193160
guuuguagaacuuguuucc

SEQ ID NO: 2193162 - RNA, 19 nt, Artificial Sequence
  Description of Artificial Sequence: Synthetic oligonucleotide
  Sense strand starting at position 1491 of SEQ ID NO: 1883433
acagguaguucugaaagca

SEQ ID NO: 2193163 - RNA, 19 nt, Artificial Sequence
  Description of Artificial Sequence: Synthetic oligonucleotide
  Antisense strand to SEQ ID NO: 2193162
ugcuuucagaacuaccugu

SEQ ID NO: 2193164 - RNA, 19 nt, Artificial Sequence
  Description of Artificial Sequence: Synthetic oligonucleotide
  Sense strand starting at position 1704 of SEQ ID NO: 1883433
caggcauugucggaggacu

SEQ ID NO: 2193165 - RNA, 19 nt, Artificial Sequence
  Description of Artificial Sequence: Synthetic oligonucleotide
  Antisense strand to SEQ ID NO: 2193164
aguccuccgacaaugccug

SEQ ID NO: 2193166 - RNA, 19 nt, Artificial Sequence
  Description of Artificial Sequence: Synthetic oligonucleotide
  Sense strand starting at position 1706 of SEQ ID NO: 1883433
ggcauugucggaggacuca

SEQ ID NO: 2193167 - RNA, 19 nt, Artificial Sequence
  Description of Artificial Sequence: Synthetic oligonucleotide
  Antisense strand to SEQ ID NO: 2193166
ugaguccuccgacaaugcc

SEQ ID NO: 2193168 - RNA, 19 nt, Artificial Sequence
  Description of Artificial Sequence: Synthetic oligonucleotide
  Sense strand starting at position 1915 of SEQ ID NO: 1883433
uugggacguuccguauagu

SEQ ID NO: 2193169 - RNA, 19 nt, Artificial Sequence
  Description of Artificial Sequence: Synthetic oligonucleotide
  Antisense strand to SEQ ID NO: 2193168
acuauacggaacgucccaa

SEQ ID NO: 2193170 - RNA, 19 nt, Artificial Sequence
  Description of Artificial Sequence: Synthetic oligonucleotide
  Sense strand starting at position 1916 of SEQ ID NO: 1883433
ugggacguuccguauaguu

SEQ ID NO: 2193171 - RNA, 19 nt, Artificial Sequence
  Description of Artificial Sequence: Synthetic oligonucleotide
  Antisense strand to SEQ ID NO: 2193170
aacuauacggaacguccca

SEQ ID NO: 2193172 - RNA, 19 nt, Artificial Sequence
  Description of Artificial Sequence: Synthetic oligonucleotide
  Sense strand starting at position 2093 of SEQ ID NO: 1883433
gaacucugguuggcugaua

SEQ ID NO: 2193173 - RNA, 19 nt, Artificial Sequence
  Description of Artificial Sequence: Synthetic oligonucleotide
  Antisense strand to SEQ ID NO: 2193172
uaucagccaaccagaguuc

SEQ ID NO: 2193174 - RNA, 19 nt, Artificial Sequence
  Description of Artificial Sequence: Synthetic oligonucleotide
  Sense strand starting at position 2094 of SEQ ID NO: 1883433
aacucugguuggcugauau

SEQ ID NO: 2193175 - RNA, 19 nt, Artificial Sequence
  Description of Artificial Sequence: Synthetic oligonucleotide
  Antisense strand to SEQ ID NO: 2193174
auaucagccaaccagaguu

SEQ ID NO: 2193176 - RNA, 19 nt, Artificial Sequence
  Description of Artificial Sequence: Synthetic oligonucleotide
  Sense strand starting at position 2104 of SEQ ID NO: 1883433
ggcugauauagcuguccgu

SEQ ID NO: 2193177 - RNA, 19 nt, Artificial Sequence
  Description of Artificial Sequence: Synthetic oligonucleotide
  Antisense strand to SEQ ID NO: 2193176
acggacagcuauaucagcc

SEQ ID NO: 2193178 - RNA, 19 nt, Artificial Sequence
  Description of Artificial Sequence: Synthetic oligonucleotide
  Sense strand starting at position 2107 of SEQ ID NO: 1883433
ugauauagcuguccgucga

SEQ ID NO: 2193179 - RNA, 19 nt, Artificial Sequence
  Description of Artificial Sequence: Synthetic oligonucleotide
  Antisense strand to SEQ ID NO: 2193178
ucgacggacagcuauauca

SEQ ID NO: 2193180 - RNA, 19 nt, Artificial Sequence
  Description of Artificial Sequence: Synthetic oligonucleotide
  Sense strand starting at position 2108 of SEQ ID NO: 1883433
gauauagcuguccgucgaa

SEQ ID NO: 2193181 - RNA, 19 nt, Artificial Sequence
  Description of Artificial Sequence: Synthetic oligonucleotide
  Antisense strand to SEQ ID NO: 2193180
uucgacggacagcuauauc

SEQ ID NO: 2193182 - RNA, 19 nt, Artificial Sequence
  Description of Artificial Sequence: Synthetic oligonucleotide
  Sense strand starting at position 2596 of SEQ ID NO: 1883433
acucaugugagccgggaaa

SEQ ID NO: 2193183 - RNA, 19 nt, Artificial Sequence
  Description of Artificial Sequence: Synthetic oligonucleotide
  Antisense strand to SEQ ID NO: 2193182
uuucccggcucacaugagu

SEQ ID NO: 2193184 - RNA, 19 nt, Artificial Sequence
  Description of Artificial Sequence: Synthetic oligonucleotide
  Sense strand starting at position 2598 of SEQ ID NO: 1883433
ucaugugagccgggaaaug

SEQ ID NO: 2193185 - RNA, 19 nt, Artificial Sequence
  Description of Artificial Sequence: Synthetic oligonucleotide
  Antisense strand to SEQ ID NO: 2193184
cauuucccggcucacauga

SEQ ID NO: 2193186 - RNA, 19 nt, Artificial Sequence
  Description of Artificial Sequence: Synthetic oligonucleotide
  Sense strand starting at position 2621 of SEQ ID NO: 1883433
cagccaaagucuggaucau

SEQ ID NO: 2193187 - RNA, 19 nt, Artificial Sequence
  Description of Artificial Sequence: Synthetic oligonucleotide
  Antisense strand to SEQ ID NO: 2193186
augauccagacuuuggcug

SEQ ID NO: 2193188 - RNA, 19 nt, Artificial Sequence
  Description of Artificial Sequence: Synthetic oligonucleotide
  Sense strand starting at position 2622 of SEQ ID NO: 1883433
agccaaagucuggaucauc

SEQ ID NO: 2193189 - RNA, 19 nt, Artificial Sequence
  Description of Artificial Sequence: Synthetic oligonucleotide
  Antisense strand to SEQ ID NO: 2193188
gaugauccagacuuuggcu

SEQ ID NO: 2193190 - RNA, 19 nt, Artificial Sequence
  Description of Artificial Sequence: Synthetic oligonucleotide
  Sense strand starting at position 3274 of SEQ ID NO: 1883433
ggugcuaucagccaggguu

SEQ ID NO: 2193191 - RNA, 19 nt, Artificial Sequence
  Description of Artificial Sequence: Synthetic oligonucleotide
  Antisense strand to SEQ ID NO: 2193190
aacccuggcugauagcacc

SEQ ID NO: 2193192 - RNA, 19 nt, Artificial Sequence
  Description of Artificial Sequence: Synthetic oligonucleotide
  Sense strand starting at position 3425 of SEQ ID NO: 1883433
cuaugaacuugcucuguca

SEQ ID NO: 2193193 - RNA, 19 nt, Artificial Sequence
  Description of Artificial Sequence: Synthetic oligonucleotide
  Antisense strand to SEQ ID NO: 2193192
ugacagagcaaguucauag

SEQ ID NO: 2193194 - RNA, 19 nt, Artificial Sequence
  Description of Artificial Sequence: Synthetic oligonucleotide
  Sense strand starting at position 3494 of SEQ ID NO: 1883433
gaauguuugggaggcugua

SEQ ID NO: 2193195 - RNA, 19 nt, Artificial Sequence
  Description of Artificial Sequence: Synthetic oligonucleotide
  Antisense strand to SEQ ID NO: 2193194
uacagccucccaaacauuc

SEQ ID NO: 2193196 - RNA, 19 nt, Artificial Sequence
  Description of Artificial Sequence: Synthetic oligonucleotide
  Sense strand starting at position 3647 of SEQ ID NO: 1883433
ucucacagcguccagaaau

SEQ ID NO: 2193197 - RNA, 19 nt, Artificial Sequence
  Description of Artificial Sequence: Synthetic oligonucleotide
  Antisense strand to SEQ ID NO: 2193196
auuucuggacgcugugaga

SEQ ID NO: 2193198 - RNA, 19 nt, Artificial Sequence
  Description of Artificial Sequence: Synthetic oligonucleotide
  Sense strand starting at position 3799 of SEQ ID NO: 1883433
uagagugaggccuguucca

SEQ ID NO: 2193199 - RNA, 19 nt, Artificial Sequence
  Description of Artificial Sequence: Synthetic oligonucleotide
  Antisense strand to SEQ ID NO: 2193198
uggaacaggccucacucua

SEQ ID NO: 2193200 - RNA, 19 nt, Artificial Sequence
  Description of Artificial Sequence: Synthetic oligonucleotide
  Sense strand starting at position 3843 of SEQ ID NO: 1883433
ggcccuaaagcucagaguu

SEQ ID NO: 2193201 - RNA, 19 nt, Artificial Sequence
  Description of Artificial Sequence: Synthetic oligonucleotide
  Antisense strand to SEQ ID NO: 2193200
aacucugagcuuuagggcc

SEQ ID NO: 2193202 - RNA, 19 nt, Artificial Sequence
  Description of Artificial Sequence: Synthetic oligonucleotide
  Sense strand starting at position 3853 of SEQ ID NO: 1883433
cucagaguucaguggguca

SEQ ID NO: 2193203 - RNA, 19 nt, Artificial Sequence
  Description of Artificial Sequence: Synthetic oligonucleotide
  Antisense strand to SEQ ID NO: 2193202
ugacccacugaacucugag

SEQ ID NO: 2193204 - RNA, 19 nt, Artificial Sequence
  Description of Artificial Sequence: Synthetic oligonucleotide
  Sense strand starting at position 62 of SEQ ID NO: 1883435
uggacaaguuuggcagaga

SEQ ID NO: 2193205 - RNA, 19 nt, Artificial Sequence
  Description of Artificial Sequence: Synthetic oligonucleotide
  Antisense strand to SEQ ID NO: 2193204
ucucugccaaacuugucca

SEQ ID NO: 2193206 - RNA, 19 nt, Artificial Sequence
  Description of Artificial Sequence: Synthetic oligonucleotide
  Sense strand starting at position 432 of SEQ ID NO: 1883435
gugcaaucagggcagaaua

SEQ ID NO: 2193207 - RNA, 19 nt, Artificial Sequence
  Description of Artificial Sequence: Synthetic oligonucleotide
  Antisense strand to SEQ ID NO: 2193206
uauucugcccugauugcac

SEQ ID NO: 2193208 - RNA, 19 nt, Artificial Sequence
  Description of Artificial Sequence: Synthetic oligonucleotide
  Sense strand starting at position 453 of SEQ ID NO: 1883435
agauauguugaguagcuaa

SEQ ID NO: 2193209 - RNA, 19 nt, Artificial Sequence
  Description of Artificial Sequence: Synthetic oligonucleotide
  Antisense strand to SEQ ID NO: 2193208
uuagcuacucaacauaucu

SEQ ID NO: 2193210 - RNA, 19 nt, Artificial Sequence
  Description of Artificial Sequence: Synthetic oligonucleotide
  Sense strand starting at position 456 of SEQ ID NO: 1883435
uauguugaguagcuaauuu

SEQ ID NO: 2193211 - RNA, 19 nt, Artificial Sequence
  Description of Artificial Sequence: Synthetic oligonucleotide
  Antisense strand to SEQ ID NO: 2193210
aaauuagcuacucaacaua

SEQ ID NO: 2193212 - RNA, 19 nt, Artificial Sequence
  Description of Artificial Sequence: Synthetic oligonucleotide
  Sense strand starting at position 561 of SEQ ID NO: 1883435
cugucauaaccacaagguu

SEQ ID NO: 2193213 - RNA, 19 nt, Artificial Sequence
  Description of Artificial Sequence: Synthetic oligonucleotide
  Antisense strand to SEQ ID NO: 2193212
aaccuugugguuaugacag

SEQ ID NO: 2193214 - RNA, 19 nt, Artificial Sequence
  Description of Artificial Sequence: Synthetic oligonucleotide
  Sense strand starting at position 601 of SEQ ID NO: 1883435
gggaaauuaacccggcagu

SEQ ID NO: 2193215 - RNA, 19 nt, Artificial Sequence
  Description of Artificial Sequence: Synthetic oligonucleotide
  Antisense strand to SEQ ID NO: 2193214
acugccggguuaauuuccc

SEQ ID NO: 2193216 - RNA, 19 nt, Artificial Sequence
  Description of Artificial Sequence: Synthetic oligonucleotide
  Sense strand starting at position 602 of SEQ ID NO: 1883435
ggaaauuaacccggcagua

SEQ ID NO: 2193217 - RNA, 19 nt, Artificial Sequence
  Description of Artificial Sequence: Synthetic oligonucleotide
  Antisense strand to SEQ ID NO: 2193216
uacugccggguuaauuucc

SEQ ID NO: 2193218 - RNA, 19 nt, Artificial Sequence
  Description of Artificial Sequence: Synthetic oligonucleotide
  Sense strand starting at position 604 of SEQ ID NO: 1883435
aaauuaacccggcaguagu

SEQ ID NO: 2193219 - RNA, 19 nt, Artificial Sequence
  Description of Artificial Sequence: Synthetic oligonucleotide
  Antisense strand to SEQ ID NO: 2193218
acuacugccggguuaauuu

SEQ ID NO: 2193220 - RNA, 19 nt, Artificial Sequence
  Description of Artificial Sequence: Synthetic oligonucleotide
  Sense strand starting at position 651 of SEQ ID NO: 1883435
ucguaauaaggauauucca

SEQ ID NO: 2193221 - RNA, 19 nt, Artificial Sequence
  Description of Artificial Sequence: Synthetic oligonucleotide
  Antisense strand to SEQ ID NO: 2193220
uggaauauccuuauuacga

SEQ ID NO: 2193222 - RNA, 19 nt, Artificial Sequence
  Description of Artificial Sequence: Synthetic oligonucleotide
  Sense strand starting at position 778 of SEQ ID NO: 1883435
aagaauuggcuguggguga

SEQ ID NO: 2193223 - RNA, 19 nt, Artificial Sequence
  Description of Artificial Sequence: Synthetic oligonucleotide
  Antisense strand to SEQ ID NO: 2193222
ucacccacagccaauucuu

SEQ ID NO: 2193224 - RNA, 19 nt, Artificial Sequence
  Description of Artificial Sequence: Synthetic oligonucleotide
  Sense strand starting at position 806 of SEQ ID NO: 1883435
aucaaagaugccugaaguu

SEQ ID NO: 2193225 - RNA, 19 nt, Artificial Sequence
  Description of Artificial Sequence: Synthetic oligonucleotide
  Antisense strand to SEQ ID NO: 2193224
aacuucaggcaucuuugau

SEQ ID NO: 2193226 - RNA, 19 nt, Artificial Sequence
  Description of Artificial Sequence: Synthetic oligonucleotide
  Sense strand starting at position 842 of SEQ ID NO: 1883435
cugaguuuauaauccuagu

SEQ ID NO: 2193227 - RNA, 19 nt, Artificial Sequence
  Description of Artificial Sequence: Synthetic oligonucleotide
  Antisense strand to SEQ ID NO: 2193226
acuaggauuauaaacucag

SEQ ID NO: 2193228 - RNA, 19 nt, Artificial Sequence
  Description of Artificial Sequence: Synthetic oligonucleotide
  Sense strand starting at position 1037 of SEQ ID NO: 1883435
uccauuaagcaguagauaa

SEQ ID NO: 2193229 - RNA, 19 nt, Artificial Sequence
  Description of Artificial Sequence: Synthetic oligonucleotide
  Antisense strand to SEQ ID NO: 2193228
uuaucuacugcuuaaugga

SEQ ID NO: 2193230 - RNA, 19 nt, Artificial Sequence
  Description of Artificial Sequence: Synthetic oligonucleotide
  Sense strand starting at position 1055 of SEQ ID NO: 1883435
aaugauggcggucauuauu

SEQ ID NO: 2193231 - RNA, 19 nt, Artificial Sequence
  Description of Artificial Sequence: Synthetic oligonucleotide
  Antisense strand to SEQ ID NO: 2193230
aauaaugaccgccaucauu

SEQ ID NO: 2193232 - RNA, 19 nt, Artificial Sequence
  Description of Artificial Sequence: Synthetic oligonucleotide
  Sense strand starting at position 1356 of SEQ ID NO: 1883435
cuaggauagcuaggucuau

SEQ ID NO: 2193233 - RNA, 19 nt, Artificial Sequence
  Description of Artificial Sequence: Synthetic oligonucleotide
  Antisense strand to SEQ ID NO: 2193232
auagaccuagcuauccuag

SEQ ID NO: 2193234 - RNA, 19 nt, Artificial Sequence
  Description of Artificial Sequence: Synthetic oligonucleotide
  Sense strand starting at position 1357 of SEQ ID NO: 1883435
uaggauagcuaggucuaua

SEQ ID NO: 2193235 - RNA, 19 nt, Artificial Sequence
  Description of Artificial Sequence: Synthetic oligonucleotide
  Antisense strand to SEQ ID NO: 2193234
uauagaccuagcuauccua

SEQ ID NO: 2193236 - RNA, 19 nt, Artificial Sequence
  Description of Artificial Sequence: Synthetic oligonucleotide
  Sense strand starting at position 1512 of SEQ ID NO: 1883435
guguacuuaccucaaagau

SEQ ID NO: 2193237 - RNA, 19 nt, Artificial Sequence
  Description of Artificial Sequence: Synthetic oligonucleotide
  Antisense strand to SEQ ID NO: 2193236
aucuuugagguaaguacac

SEQ ID NO: 2193238 - RNA, 19 nt, Artificial Sequence
  Description of Artificial Sequence: Synthetic oligonucleotide
  Sense strand starting at position 1821 of SEQ ID NO: 1883435
ugggauaaaucgagagggu

SEQ ID NO: 2193239 - RNA, 19 nt, Artificial Sequence
  Description of Artificial Sequence: Synthetic oligonucleotide
  Antisense strand to SEQ ID NO: 2193238
acccucucgauuuauccca

SEQ ID NO: 2193240 - RNA, 19 nt, Artificial Sequence
  Description of Artificial Sequence: Synthetic oligonucleotide
  Sense strand starting at position 1958 of SEQ ID NO: 1883435
gccgaaucugcgaggguga

SEQ ID NO: 2193241 - RNA, 19 nt, Artificial Sequence
  Description of Artificial Sequence: Synthetic oligonucleotide
  Antisense strand to SEQ ID NO: 2193240
ucacccucgcagauucggc

SEQ ID NO: 2193242 - RNA, 19 nt, Artificial Sequence
  Description of Artificial Sequence: Synthetic oligonucleotide
  Sense strand starting at position 2119 of SEQ ID NO: 1883435
ggauuaugacgcuggauua

SEQ ID NO: 2193243 - RNA, 19 nt, Artificial Sequence
  Description of Artificial Sequence: Synthetic oligonucleotide
  Antisense strand to SEQ ID NO: 2193242
uaauccagcgucauaaucc

SEQ ID NO: 2193244 - RNA, 19 nt, Artificial Sequence
  Description of Artificial Sequence: Synthetic oligonucleotide
  Sense strand starting at position 2120 of SEQ ID NO: 1883435
gauuaugacgcuggauuau

SEQ ID NO: 2193245 - RNA, 19 nt, Artificial Sequence
  Description of Artificial Sequence: Synthetic oligonucleotide
  Antisense strand to SEQ ID NO: 2193244
auaauccagcgucauaauc

SEQ ID NO: 2193246 - RNA, 19 nt, Artificial Sequence
  Description of Artificial Sequence: Synthetic oligonucleotide
  Sense strand starting at position 2826 of SEQ ID NO: 1883435
gucuuugggaacuacaguu

SEQ ID NO: 2193247 - RNA, 19 nt, Artificial Sequence
  Description of Artificial Sequence: Synthetic oligonucleotide
  Antisense strand to SEQ ID NO: 2193246
aacuguaguucccaaagac

SEQ ID NO: 2193248 - RNA, 19 nt, Artificial Sequence
  Description of Artificial Sequence: Synthetic oligonucleotide
  Sense strand starting at position 2886 of SEQ ID NO: 1883435
ggagaugauacuugucuga

SEQ ID NO: 2193249 - RNA, 19 nt, Artificial Sequence
  Description of Artificial Sequence: Synthetic oligonucleotide
  Antisense strand to SEQ ID NO: 2193248
ucagacaaguaucaucucc

SEQ ID NO: 2193250 - RNA, 19 nt, Artificial Sequence
  Description of Artificial Sequence: Synthetic oligonucleotide
  Sense strand starting at position 2888 of SEQ ID NO: 1883435
agaugauacuugucugagu

SEQ ID NO: 2193251 - RNA, 19 nt, Artificial Sequence
  Description of Artificial Sequence: Synthetic oligonucleotide
  Antisense strand to SEQ ID NO: 2193250
acucagacaaguaucaucu

SEQ ID NO: 2193252 - RNA, 19 nt, Artificial Sequence
  Description of Artificial Sequence: Synthetic oligonucleotide
  Sense strand starting at position 2889 of SEQ ID NO: 1883435
gaugauacuugucugaguu

SEQ ID NO: 2193253 - RNA, 19 nt, Artificial Sequence
  Description of Artificial Sequence: Synthetic oligonucleotide
  Antisense strand to SEQ ID NO: 2193252
aacucagacaaguaucauc

SEQ ID NO: 2193254 - RNA, 19 nt, Artificial Sequence
  Description of Artificial Sequence: Synthetic oligonucleotide
  Sense strand starting at position 2890 of SEQ ID NO: 1883435
augauacuugucugaguug

SEQ ID NO: 2193255 - RNA, 19 nt, Artificial Sequence
  Description of Artificial Sequence: Synthetic oligonucleotide
  Antisense strand to SEQ ID NO: 2193254
caacucagacaaguaucau

SEQ ID NO: 2193256 - RNA, 19 nt, Artificial Sequence
  Description of Artificial Sequence: Synthetic oligonucleotide
  Sense strand starting at position 2893 of SEQ ID NO: 1883435
auacuugucugaguugaca

SEQ ID NO: 2193257 - RNA, 19 nt, Artificial Sequence
  Description of Artificial Sequence: Synthetic oligonucleotide
  Antisense strand to SEQ ID NO: 2193256
ugucaacucagacaaguau

SEQ ID NO: 2193258 - RNA, 19 nt, Artificial Sequence
  Description of Artificial Sequence: Synthetic oligonucleotide
  Sense strand starting at position 2939 of SEQ ID NO: 1883435
aguguuguaccugagugag

SEQ ID NO: 2193259 - RNA, 19 nt, Artificial Sequence
  Description of Artificial Sequence: Synthetic oligonucleotide
  Antisense strand to SEQ ID NO: 2193258
cucacucagguacaacacu

SEQ ID NO: 2193260 - RNA, 19 nt, Artificial Sequence
  Description of Artificial Sequence: Synthetic oligonucleotide
  Sense strand starting at position 3140 of SEQ ID NO: 1883435
ugccgaguacuuguauguu

SEQ ID NO: 2193261 - RNA, 19 nt, Artificial Sequence
  Description of Artificial Sequence: Synthetic oligonucleotide
  Antisense strand to SEQ ID NO: 2193260
aacauacaaguacucggca

SEQ ID NO: 2193262 - RNA, 19 nt, Artificial Sequence
  Description of Artificial Sequence: Synthetic oligonucleotide
  Sense strand starting at position 3152 of SEQ ID NO: 1883435
guauguugucacuucugcu

SEQ ID NO: 2193263 - RNA, 19 nt, Artificial Sequence
  Description of Artificial Sequence: Synthetic oligonucleotide
  Antisense strand to SEQ ID NO: 2193262
agcagaagugacaacauac

SEQ ID NO: 2193264 - RNA, 19 nt, Artificial Sequence
  Description of Artificial Sequence: Synthetic oligonucleotide
  Sense strand starting at position 3196 of SEQ ID NO: 1883435
aagugucugcaguaaauga

SEQ ID NO: 2193265 - RNA, 19 nt, Artificial Sequence
  Description of Artificial Sequence: Synthetic oligonucleotide
  Antisense strand to SEQ ID NO: 2193264
ucauuuacugcagacacuu

SEQ ID NO: 2193266 - RNA, 19 nt, Artificial Sequence
  Description of Artificial Sequence: Synthetic oligonucleotide
  Sense strand starting at position 3207 of SEQ ID NO: 1883435
guaaaugacauccaagcga

SEQ ID NO: 2193267 - RNA, 19 nt, Artificial Sequence
  Description of Artificial Sequence: Synthetic oligonucleotide
  Antisense strand to SEQ ID NO: 2193266
ucgcuuggaugucauuuac

SEQ ID NO: 2193268 - RNA, 19 nt, Artificial Sequence
  Description of Artificial Sequence: Synthetic oligonucleotide
  Sense strand starting at position 3285 of SEQ ID NO: 1883435
ggcgaugcuuaaaucgagu

SEQ ID NO: 2193269 - RNA, 19 nt, Artificial Sequence
  Description of Artificial Sequence: Synthetic oligonucleotide
  Antisense strand to SEQ ID NO: 2193268
acucgauuuaagcaucgcc

SEQ ID NO: 2193270 - RNA, 19 nt, Artificial Sequence
  Description of Artificial Sequence: Synthetic oligonucleotide
  Sense strand starting at position 3332 of SEQ ID NO: 1883435
gguauugaaagugacugua

SEQ ID NO: 2193271 - RNA, 19 nt, Artificial Sequence
  Description of Artificial Sequence: Synthetic oligonucleotide
  Antisense strand to SEQ ID NO: 2193270
uacagucacuuucaauacc

SEQ ID NO: 2193272 - RNA, 19 nt, Artificial Sequence
  Description of Artificial Sequence: Synthetic oligonucleotide
  Sense strand starting at position 3334 of SEQ ID NO: 1883435
uauugaaagugacuguaaa

SEQ ID NO: 2193273 - RNA, 19 nt, Artificial Sequence
  Description of Artificial Sequence: Synthetic oligonucleotide
  Antisense strand to SEQ ID NO: 2193272
uuuacagucacuuucaaua

SEQ ID NO: 2193274 - RNA, 19 nt, Artificial Sequence
  Description of Artificial Sequence: Synthetic oligonucleotide
  Sense strand starting at position 3477 of SEQ ID NO: 1883435
agaugcauuuaugcguaaa

SEQ ID NO: 2193275 - RNA, 19 nt, Artificial Sequence
  Description of Artificial Sequence: Synthetic oligonucleotide
  Antisense strand to SEQ ID NO: 2193274
uuuacgcauaaaugcaucu

SEQ ID NO: 2193276 - RNA, 19 nt, Artificial Sequence
  Description of Artificial Sequence: Synthetic oligonucleotide
  Sense strand starting at position 3603 of SEQ ID NO: 1883435
uggugaggucuuuaccaag

SEQ ID NO: 2193277 - RNA, 19 nt, Artificial Sequence
  Description of Artificial Sequence: Synthetic oligonucleotide
  Antisense strand to SEQ ID NO: 2193276
cuugguaaagaccucacca

SEQ ID NO: 2193278 - RNA, 19 nt, Artificial Sequence
  Description of Artificial Sequence: Synthetic oligonucleotide
  Sense strand starting at position 3691 of SEQ ID NO: 1883435
uguucuuagcaauaaauag

SEQ ID NO: 2193279 - RNA, 19 nt, Artificial Sequence
  Description of Artificial Sequence: Synthetic oligonucleotide
  Antisense strand to SEQ ID NO: 2193278
cuauuuauugcuaagaaca

SEQ ID NO: 2193280 - RNA, 19 nt, Artificial Sequence
  Description of Artificial Sequence: Synthetic oligonucleotide
  Sense strand starting at position 3839 of SEQ ID NO: 1883435
ggucauagagguuaagugu

SEQ ID NO: 2193281 - RNA, 19 nt, Artificial Sequence
  Description of Artificial Sequence: Synthetic oligonucleotide
  Antisense strand to SEQ ID NO: 2193280
acacuuaaccucuaugacc

SEQ ID NO: 2193282 - RNA, 19 nt, Artificial Sequence
  Description of Artificial Sequence: Synthetic oligonucleotide
  Sense strand starting at position 3962 of SEQ ID NO: 1883435
uacagaaugcaguaguaau

SEQ ID NO: 2193283 - RNA, 19 nt, Artificial Sequence
  Description of Artificial Sequence: Synthetic oligonucleotide
  Antisense strand to SEQ ID NO: 2193282
auuacuacugcauucugua

SEQ ID NO: 2193284 - RNA, 19 nt, Artificial Sequence
  Description of Artificial Sequence: Synthetic oligonucleotide
  Sense strand starting at position 137 of SEQ ID NO: 1883434
cugguugggucaguaaaua

SEQ ID NO: 2193285 - RNA, 19 nt, Artificial Sequence
  Description of Artificial Sequence: Synthetic oligonucleotide
  Antisense strand to SEQ ID NO: 2193284
uauuuacugacccaaccag

SEQ ID NO: 2193286 - RNA, 19 nt, Artificial Sequence
  Description of Artificial Sequence: Synthetic oligonucleotide
  Sense strand starting at position 173 of SEQ ID NO: 1883434
uccgcuuaucacuagaaac

SEQ ID NO: 2193287 - RNA, 19 nt, Artificial Sequence
  Description of Artificial Sequence: Synthetic oligonucleotide
  Antisense strand to SEQ ID NO: 2193286
guuucuagugauaagcgga

SEQ ID NO: 2193288 - RNA, 19 nt, Artificial Sequence
  Description of Artificial Sequence: Synthetic oligonucleotide
  Sense strand starting at position 175 of SEQ ID NO: 1883434
cgcuuaucacuagaaacag

SEQ ID NO: 2193289 - RNA, 19 nt, Artificial Sequence
  Description of Artificial Sequence: Synthetic oligonucleotide
  Antisense strand to SEQ ID NO: 2193288
cuguuucuagugauaagcg

SEQ ID NO: 2193290 - RNA, 19 nt, Artificial Sequence
  Description of Artificial Sequence: Synthetic oligonucleotide
  Sense strand starting at position 271 of SEQ ID NO: 1883434
uggacaaguuuggcagaga

SEQ ID NO: 2193291 - RNA, 19 nt, Artificial Sequence
  Description of Artificial Sequence: Synthetic oligonucleotide
  Antisense strand to SEQ ID NO: 2193290
ucucugccaaacuugucca

SEQ ID NO: 2193292 - RNA, 19 nt, Artificial Sequence
  Description of Artificial Sequence: Synthetic oligonucleotide
  Sense strand starting at position 641 of SEQ ID NO: 1883434
gugcaaucagggcagaaua

SEQ ID NO: 2193293 - RNA, 19 nt, Artificial Sequence
  Description of Artificial Sequence: Synthetic oligonucleotide
  Antisense strand to SEQ ID NO: 2193292
uauucugcccugauugcac

SEQ ID NO: 2193294 - RNA, 19 nt, Artificial Sequence
  Description of Artificial Sequence: Synthetic oligonucleotide
  Sense strand starting at position 662 of SEQ ID NO: 1883434
agauauguugaguagcuaa

SEQ ID NO: 2193295 - RNA, 19 nt, Artificial Sequence
  Description of Artificial Sequence: Synthetic oligonucleotide
  Antisense strand to SEQ ID NO: 2193294
uuagcuacucaacauaucu

SEQ ID NO: 2193296 - RNA, 19 nt, Artificial Sequence
  Description of Artificial Sequence: Synthetic oligonucleotide
  Sense strand starting at position 665 of SEQ ID NO: 1883434
uauguugaguagcuaauuu

SEQ ID NO: 2193297 - RNA, 19 nt, Artificial Sequence
  Description of Artificial Sequence: Synthetic oligonucleotide
  Antisense strand to SEQ ID NO: 2193296
aaauuagcuacucaacaua

SEQ ID NO: 2193298 - RNA, 19 nt, Artificial Sequence
  Description of Artificial Sequence: Synthetic oligonucleotide
  Sense strand starting at position 770 of SEQ ID NO: 1883434
cugucauaaccacaagguu

SEQ ID NO: 2193299 - RNA, 19 nt, Artificial Sequence
  Description of Artificial Sequence: Synthetic oligonucleotide
  Antisense strand to SEQ ID NO: 2193298
aaccuugugguuaugacag

SEQ ID NO: 2193300 - RNA, 19 nt, Artificial Sequence
  Description of Artificial Sequence: Synthetic oligonucleotide
  Sense strand starting at position 810 of SEQ ID NO: 1883434
gggaaauuaacccggcagu

SEQ ID NO: 2193301 - RNA, 19 nt, Artificial Sequence
  Description of Artificial Sequence: Synthetic oligonucleotide
  Antisense strand to SEQ ID NO: 2193300
acugccggguuaauuuccc

SEQ ID NO: 2193302 - RNA, 19 nt, Artificial Sequence
  Description of Artificial Sequence: Synthetic oligonucleotide
  Sense strand starting at position 811 of SEQ ID NO: 1883434
ggaaauuaacccggcagua

SEQ ID NO: 2193303 - RNA, 19 nt, Artificial Sequence
  Description of Artificial Sequence: Synthetic oligonucleotide
  Antisense strand to SEQ ID NO: 2193302
uacugccggguuaauuucc

SEQ ID NO: 2193304 - RNA, 19 nt, Artificial Sequence
  Description of Artificial Sequence: Synthetic oligonucleotide
  Sense strand starting at position 813 of SEQ ID NO: 1883434
aaauuaacccggcaguagu

SEQ ID NO: 2193305 - RNA, 19 nt, Artificial Sequence
  Description of Artificial Sequence: Synthetic oligonucleotide
  Antisense strand to SEQ ID NO: 2193304
acuacugccggguuaauuu

SEQ ID NO: 2193306 - RNA, 19 nt, Artificial Sequence
  Description of Artificial Sequence: Synthetic oligonucleotide
  Sense strand starting at position 860 of SEQ ID NO: 1883434
ucguaauaaggauauucca

SEQ ID NO: 2193307 - RNA, 19 nt, Artificial Sequence
  Description of Artificial Sequence: Synthetic oligonucleotide
  Antisense strand to SEQ ID NO: 2193306
uggaauauccuuauuacga

SEQ ID NO: 2193308 - RNA, 19 nt, Artificial Sequence
  Description of Artificial Sequence: Synthetic oligonucleotide
  Sense strand starting at position 987 of SEQ ID NO: 1883434
aagaauuggcuguggguga

SEQ ID NO: 2193309 - RNA, 19 nt, Artificial Sequence
  Description of Artificial Sequence: Synthetic oligonucleotide
  Antisense strand to SEQ ID NO: 2193308
ucacccacagccaauucuu

SEQ ID NO: 2193310 - RNA, 19 nt, Artificial Sequence
  Description of Artificial Sequence: Synthetic oligonucleotide
  Sense strand starting at position 1015 of SEQ ID NO: 1883434
aucaaagaugccugaaguu

SEQ ID NO: 2193311 - RNA, 19 nt, Artificial Sequence
  Description of Artificial Sequence: Synthetic oligonucleotide
  Antisense strand to SEQ ID NO: 2193310
aacuucaggcaucuuugau

SEQ ID NO: 2193312 - RNA, 19 nt, Artificial Sequence
  Description of Artificial Sequence: Synthetic oligonucleotide
  Sense strand starting at position 1246 of SEQ ID NO: 1883434
uccauuaagcaguagauaa

SEQ ID NO: 2193313 - RNA, 19 nt, Artificial Sequence
  Description of Artificial Sequence: Synthetic oligonucleotide
  Antisense strand to SEQ ID NO: 2193312
uuaucuacugcuuaaugga

SEQ ID NO: 2193314 - RNA, 19 nt, Artificial Sequence
  Description of Artificial Sequence: Synthetic oligonucleotide
  Sense strand starting at position 1264 of SEQ ID NO: 1883434
aaugauggcggucauuauu

SEQ ID NO: 2193315 - RNA, 19 nt, Artificial Sequence
  Description of Artificial Sequence: Synthetic oligonucleotide
  Antisense strand to SEQ ID NO: 2193314
aauaaugaccgccaucauu

SEQ ID NO: 2193316 - RNA, 19 nt, Artificial Sequence
  Description of Artificial Sequence: Synthetic oligonucleotide
  Sense strand starting at position 1565 of SEQ ID NO: 1883434
cuaggauagcuaggucuau

SEQ ID NO: 2193317 - RNA, 19 nt, Artificial Sequence
  Description of Artificial Sequence: Synthetic oligonucleotide
  Antisense strand to SEQ ID NO: 2193316
auagaccuagcuauccuag

SEQ ID NO: 2193318 - RNA, 19 nt, Artificial Sequence
  Description of Artificial Sequence: Synthetic oligonucleotide
  Sense strand starting at position 1566 of SEQ ID NO: 1883434
uaggauagcuaggucuaua

SEQ ID NO: 2193319 - RNA, 19 nt, Artificial Sequence
  Description of Artificial Sequence: Synthetic oligonucleotide
  Antisense strand to SEQ ID NO: 2193318
uauagaccuagcuauccua

SEQ ID NO: 2193320 - RNA, 19 nt, Artificial Sequence
  Description of Artificial Sequence: Synthetic oligonucleotide
  Sense strand starting at position 1721 of SEQ ID NO: 1883434
guguacuuaccucaaagau

SEQ ID NO: 2193321 - RNA, 19 nt, Artificial Sequence
  Description of Artificial Sequence: Synthetic oligonucleotide
  Antisense strand to SEQ ID NO: 2193320
aucuuugagguaaguacac

SEQ ID NO: 2193322 - RNA, 19 nt, Artificial Sequence
  Description of Artificial Sequence: Synthetic oligonucleotide
  Sense strand starting at position 2030 of SEQ ID NO: 1883434
ugggauaaaucgagagggu

SEQ ID NO: 2193323 - RNA, 19 nt, Artificial Sequence
  Description of Artificial Sequence: Synthetic oligonucleotide
  Antisense strand to SEQ ID NO: 2193322
acccucucgauuuauccca

SEQ ID NO: 2193324 - RNA, 19 nt, Artificial Sequence
  Description of Artificial Sequence: Synthetic oligonucleotide
  Sense strand starting at position 2167 of SEQ ID NO: 1883434
gccgaaucugcgaggguga

SEQ ID NO: 2193325 - RNA, 19 nt, Artificial Sequence
  Description of Artificial Sequence: Synthetic oligonucleotide
  Antisense strand to SEQ ID NO: 2193324
ucacccucgcagauucggc

SEQ ID NO: 2193326 - RNA, 19 nt, Artificial Sequence
  Description of Artificial Sequence: Synthetic oligonucleotide
  Sense strand starting at position 2328 of SEQ ID NO: 1883434
ggauuaugacgcuggauua

SEQ ID NO: 2193327 - RNA, 19 nt, Artificial Sequence
  Description of Artificial Sequence: Synthetic oligonucleotide
  Antisense strand to SEQ ID NO: 2193326
uaauccagcgucauaaucc

SEQ ID NO: 2193328 - RNA, 19 nt, Artificial Sequence
  Description of Artificial Sequence: Synthetic oligonucleotide
  Sense strand starting at position 2329 of SEQ ID NO: 1883434
gauuaugacgcuggauuau

SEQ ID NO: 2193329 - RNA, 19 nt, Artificial Sequence
  Description of Artificial Sequence: Synthetic oligonucleotide
  Antisense strand to SEQ ID NO: 2193328
auaauccagcgucauaauc

SEQ ID NO: 2193330 - RNA, 19 nt, Artificial Sequence
  Description of Artificial Sequence: Synthetic oligonucleotide
  Sense strand starting at position 3035 of SEQ ID NO: 1883434
gucuuugggaacuacaguu

SEQ ID NO: 2193331 - RNA, 19 nt, Artificial Sequence
  Description of Artificial Sequence: Synthetic oligonucleotide
  Antisense strand to SEQ ID NO: 2193330
aacuguaguucccaaagac

SEQ ID NO: 2193332 - RNA, 19 nt, Artificial Sequence
  Description of Artificial Sequence: Synthetic oligonucleotide
  Sense strand starting at position 3095 of SEQ ID NO: 1883434
ggagaugauacuugucuga

SEQ ID NO: 2193333 - RNA, 19 nt, Artificial Sequence
  Description of Artificial Sequence: Synthetic oligonucleotide
  Antisense strand to SEQ ID NO: 2193332
ucagacaaguaucaucucc

SEQ ID NO: 2193334 - RNA, 19 nt, Artificial Sequence
  Description of Artificial Sequence: Synthetic oligonucleotide
  Sense strand starting at position 3097 of SEQ ID NO: 1883434
agaugauacuugucugagu

SEQ ID NO: 2193335 - RNA, 19 nt, Artificial Sequence
  Description of Artificial Sequence: Synthetic oligonucleotide
  Antisense strand to SEQ ID NO: 2193334
acucagacaaguaucaucu

SEQ ID NO: 2193336 - RNA, 19 nt, Artificial Sequence
  Description of Artificial Sequence: Synthetic oligonucleotide
  Sense strand starting at position 3098 of SEQ ID NO: 1883434
gaugauacuugucugaguu

SEQ ID NO: 2193337 - RNA, 19 nt, Artificial Sequence
  Description of Artificial Sequence: Synthetic oligonucleotide
  Antisense strand to SEQ ID NO: 2193336
aacucagacaaguaucauc

SEQ ID NO: 2193338 - RNA, 19 nt, Artificial Sequence
  Description of Artificial Sequence: Synthetic oligonucleotide
  Sense strand starting at position 3099 of SEQ ID NO: 1883434
augauacuugucugaguug

SEQ ID NO: 2193339 - RNA, 19 nt, Artificial Sequence
  Description of Artificial Sequence: Synthetic oligonucleotide
  Antisense strand to SEQ ID NO: 2193338
caacucagacaaguaucau

SEQ ID NO: 2193340 - RNA, 19 nt, Artificial Sequence
  Description of Artificial Sequence: Synthetic oligonucleotide
  Sense strand starting at position 3102 of SEQ ID NO: 1883434
auacuugucugaguugaca

SEQ ID NO: 2193341 - RNA, 19 nt, Artificial Sequence
  Description of Artificial Sequence: Synthetic oligonucleotide
  Antisense strand to SEQ ID NO: 2193340
ugucaacucagacaaguau

SEQ ID NO: 2193342 - RNA, 19 nt, Artificial Sequence
  Description of Artificial Sequence: Synthetic oligonucleotide
  Sense strand starting at position 3148 of SEQ ID NO: 1883434
aguguuguaccugagugag

SEQ ID NO: 2193343 - RNA, 19 nt, Artificial Sequence
  Description of Artificial Sequence: Synthetic oligonucleotide
  Antisense strand to SEQ ID NO: 2193342
cucacucagguacaacacu

SEQ ID NO: 2193344 - RNA, 19 nt, Artificial Sequence
  Description of Artificial Sequence: Synthetic oligonucleotide
  Sense strand starting at position 3349 of SEQ ID NO: 1883434
ugccgaguacuuguauguu

SEQ ID NO: 2193345 - RNA, 19 nt, Artificial Sequence
  Description of Artificial Sequence: Synthetic oligonucleotide
  Antisense strand to SEQ ID NO: 2193344
aacauacaaguacucggca

SEQ ID NO: 2193346 - RNA, 19 nt, Artificial Sequence
  Description of Artificial Sequence: Synthetic oligonucleotide
  Sense strand starting at position 3361 of SEQ ID NO: 1883434
guauguugucacuucugcu

SEQ ID NO: 2193347 - RNA, 19 nt, Artificial Sequence
  Description of Artificial Sequence: Synthetic oligonucleotide
  Antisense strand to SEQ ID NO: 2193346
agcagaagugacaacauac

SEQ ID NO: 2193348 - RNA, 19 nt, Artificial Sequence
  Description of Artificial Sequence: Synthetic oligonucleotide
  Sense strand starting at position 3405 of SEQ ID NO: 1883434
aagugucugcaguaaauga

SEQ ID NO: 2193349 - RNA, 19 nt, Artificial Sequence
  Description of Artificial Sequence: Synthetic oligonucleotide
  Antisense strand to SEQ ID NO: 2193348
ucauuuacugcagacacuu

SEQ ID NO: 2193350 - RNA, 19 nt, Artificial Sequence
  Description of Artificial Sequence: Synthetic oligonucleotide
  Sense strand starting at position 3416 of SEQ ID NO: 1883434
guaaaugacauccaagcga

SEQ ID NO: 2193351 - RNA, 19 nt, Artificial Sequence
  Description of Artificial Sequence: Synthetic oligonucleotide
  Antisense strand to SEQ ID NO: 2193350
ucgcuuggaugucauuuac

SEQ ID NO: 2193352 - RNA, 19 nt, Artificial Sequence
  Description of Artificial Sequence: Synthetic oligonucleotide
  Sense strand starting at position 3494 of SEQ ID NO: 1883434
ggcgaugcuuaaaucgagu

SEQ ID NO: 2193353 - RNA, 19 nt, Artificial Sequence
  Description of Artificial Sequence: Synthetic oligonucleotide
  Antisense strand to SEQ ID NO: 2193352
acucgauuuaagcaucgcc

SEQ ID NO: 2193354 - RNA, 19 nt, Artificial Sequence
  Description of Artificial Sequence: Synthetic oligonucleotide
  Sense strand starting at position 3541 of SEQ ID NO: 1883434
gguauugaaagugacugua

SEQ ID NO: 2193355 - RNA, 19 nt, Artificial Sequence
  Description of Artificial Sequence: Synthetic oligonucleotide
  Antisense strand to SEQ ID NO: 2193354
uacagucacuuucaauacc

SEQ ID NO: 2193356 - RNA, 19 nt, Artificial Sequence
  Description of Artificial Sequence: Synthetic oligonucleotide
  Sense strand starting at position 3543 of SEQ ID NO: 1883434
uauugaaagugacuguaaa

SEQ ID NO: 2193357 - RNA, 19 nt, Artificial Sequence
  Description of Artificial Sequence: Synthetic oligonucleotide
  Antisense strand to SEQ ID NO: 2193356
uuuacagucacuuucaaua

SEQ ID NO: 2193358 - RNA, 19 nt, Artificial Sequence
  Description of Artificial Sequence: Synthetic oligonucleotide
  Sense strand starting at position 3686 of SEQ ID NO: 1883434
agaugcauuuaugcguaaa

SEQ ID NO: 2193359 - RNA, 19 nt, Artificial Sequence
  Description of Artificial Sequence: Synthetic oligonucleotide
  Antisense strand to SEQ ID NO: 2193358
uuuacgcauaaaugcaucu

SEQ ID NO: 2193360 - RNA, 19 nt, Artificial Sequence
  Description of Artificial Sequence: Synthetic oligonucleotide
  Sense strand starting at position 3812 of SEQ ID NO: 1883434
uggugaggucuuuaccaag

SEQ ID NO: 2193361 - RNA, 19 nt, Artificial Sequence
  Description of Artificial Sequence: Synthetic oligonucleotide
  Antisense strand to SEQ ID NO: 2193360
cuugguaaagaccucacca

SEQ ID NO: 2193362 - RNA, 19 nt, Artificial Sequence
  Description of Artificial Sequence: Synthetic oligonucleotide
  Sense strand starting at position 3900 of SEQ ID NO: 1883434
uguucuuagcaauaaauag

SEQ ID NO: 2193363 - RNA, 19 nt, Artificial Sequence
  Description of Artificial Sequence: Synthetic oligonucleotide
  Antisense strand to SEQ ID NO: 2193362
cuauuuauugcuaagaaca

SEQ ID NO: 2193364 - RNA, 19 nt, Artificial Sequence
  Description of Artificial Sequence: Synthetic oligonucleotide
  Sense strand starting at position 127 of SEQ ID NO: 1883436
ggccacguauguguaauuu

SEQ ID NO: 2193365 - RNA, 19 nt, Artificial Sequence
  Description of Artificial Sequence: Synthetic oligonucleotide
  Antisense strand to SEQ ID NO: 2193364
aaauuacacauacguggcc

SEQ ID NO: 2193366 - RNA, 19 nt, Artificial Sequence
  Description of Artificial Sequence: Synthetic oligonucleotide
  Sense strand starting at position 131 of SEQ ID NO: 1883436
acguauguguaauuucuaa

SEQ ID NO: 2193367 - RNA, 19 nt, Artificial Sequence
  Description of Artificial Sequence: Synthetic oligonucleotide
  Antisense strand to SEQ ID NO: 2193366
uuagaaauuacacauacgu

SEQ ID NO: 2193368 - RNA, 19 nt, Artificial Sequence
  Description of Artificial Sequence: Synthetic oligonucleotide
  Sense strand starting at position 135 of SEQ ID NO: 1883436
auguguaauuucuaaaggu

SEQ ID NO: 2193369 - RNA, 19 nt, Artificial Sequence
  Description of Artificial Sequence: Synthetic oligonucleotide
  Antisense strand to SEQ ID NO: 2193368
accuuuagaaauuacacau

SEQ ID NO: 2193370 - RNA, 19 nt, Artificial Sequence
  Description of Artificial Sequence: Synthetic oligonucleotide
  Sense strand starting at position 270 of SEQ ID NO: 1883436
agugguacucuguaaggca

SEQ ID NO: 2193371 - RNA, 19 nt, Artificial Sequence
  Description of Artificial Sequence: Synthetic oligonucleotide
  Antisense strand to SEQ ID NO: 2193370
ugccuuacagaguaccacu

SEQ ID NO: 2193372 - RNA, 19 nt, Artificial Sequence
  Description of Artificial Sequence: Synthetic oligonucleotide
  Sense strand starting at position 717 of SEQ ID NO: 1883436
uugggaaguuagcuuuguu

SEQ ID NO: 2193373 - RNA, 19 nt, Artificial Sequence
  Description of Artificial Sequence: Synthetic oligonucleotide
  Antisense strand to SEQ ID NO: 2193372
aacaaagcuaacuucccaa

SEQ ID NO: 2193374 - RNA, 19 nt, Artificial Sequence
  Description of Artificial Sequence: Synthetic oligonucleotide
  Sense strand starting at position 759 of SEQ ID NO: 1883436
uugggugguaguuaugcau

SEQ ID NO: 2193375 - RNA, 19 nt, Artificial Sequence
  Description of Artificial Sequence: Synthetic oligonucleotide
  Antisense strand to SEQ ID NO: 2193374
augcauaacuaccacccaa

SEQ ID NO: 2193376 - RNA, 19 nt, Artificial Sequence
  Description of Artificial Sequence: Synthetic oligonucleotide
  Sense strand starting at position 787 of SEQ ID NO: 1883436
aucgacaauucucuaagga

SEQ ID NO: 2193377 - RNA, 19 nt, Artificial Sequence
  Description of Artificial Sequence: Synthetic oligonucleotide
  Antisense strand to SEQ ID NO: 2193376
uccuuagagaauugucgau

SEQ ID NO: 2193378 - RNA, 19 nt, Artificial Sequence
  Description of Artificial Sequence: Synthetic oligonucleotide
  Sense strand starting at position 812 of SEQ ID NO: 1883436
agugcauguccuggaaauu

SEQ ID NO: 2193379 - RNA, 19 nt, Artificial Sequence
  Description of Artificial Sequence: Synthetic oligonucleotide
  Antisense strand to SEQ ID NO: 2193378
aauuuccaggacaugcacu

SEQ ID NO: 2193380 - RNA, 19 nt, Artificial Sequence
  Description of Artificial Sequence: Synthetic oligonucleotide
  Sense strand starting at position 813 of SEQ ID NO: 1883436
gugcauguccuggaaauuc

SEQ ID NO: 2193381 - RNA, 19 nt, Artificial Sequence
  Description of Artificial Sequence: Synthetic oligonucleotide
  Antisense strand to SEQ ID NO: 2193380
gaauuuccaggacaugcac

SEQ ID NO: 2193382 - RNA, 19 nt, Artificial Sequence
  Description of Artificial Sequence: Synthetic oligonucleotide
  Sense strand starting at position 852 of SEQ ID NO: 1883436
ccagguacacuagaauguu

SEQ ID NO: 2193383 - RNA, 19 nt, Artificial Sequence
  Description of Artificial Sequence: Synthetic oligonucleotide
  Antisense strand to SEQ ID NO: 2193382
aacauucuaguguaccugg

SEQ ID NO: 2193384 - RNA, 19 nt, Artificial Sequence
  Description of Artificial Sequence: Synthetic oligonucleotide
  Sense strand starting at position 855 of SEQ ID NO: 1883436
gguacacuagaauguuuau

SEQ ID NO: 2193385 - RNA, 19 nt, Artificial Sequence
  Description of Artificial Sequence: Synthetic oligonucleotide
  Antisense strand to SEQ ID NO: 2193384
auaaacauucuaguguacc

SEQ ID NO: 2193386 - RNA, 19 nt, Artificial Sequence
  Description of Artificial Sequence: Synthetic oligonucleotide
  Sense strand starting at position 864 of SEQ ID NO: 1883436
gaauguuuauagccauguu

SEQ ID NO: 2193387 - RNA, 19 nt, Artificial Sequence
  Description of Artificial Sequence: Synthetic oligonucleotide
  Antisense strand to SEQ ID NO: 2193386
aacauggcuauaaacauuc

SEQ ID NO: 2193388 - RNA, 19 nt, Artificial Sequence
  Description of Artificial Sequence: Synthetic oligonucleotide
  Sense strand starting at position 1268 of SEQ ID NO: 1883436
gcguaugcuauaucuguua

SEQ ID NO: 2193389 - RNA, 19 nt, Artificial Sequence
  Description of Artificial Sequence: Synthetic oligonucleotide
  Antisense strand to SEQ ID NO: 2193388
uaacagauauagcauacgc

SEQ ID NO: 2193390 - RNA, 19 nt, Artificial Sequence
  Description of Artificial Sequence: Synthetic oligonucleotide
  Sense strand starting at position 1310 of SEQ ID NO: 1883436
acagauucgugccucuaaa

SEQ ID NO: 2193391 - RNA, 19 nt, Artificial Sequence
  Description of Artificial Sequence: Synthetic oligonucleotide
  Antisense strand to SEQ ID NO: 2193390
uuuagaggcacgaaucugu

SEQ ID NO: 2193392 - RNA, 19 nt, Artificial Sequence
  Description of Artificial Sequence: Synthetic oligonucleotide
  Sense strand starting at position 1332 of SEQ ID NO: 1883436
guggaagcuccagaacgau

SEQ ID NO: 2193393 - RNA, 19 nt, Artificial Sequence
  Description of Artificial Sequence: Synthetic oligonucleotide
  Antisense strand to SEQ ID NO: 2193392
aucguucuggagcuuccac

SEQ ID NO: 2193394 - RNA, 19 nt, Artificial Sequence
  Description of Artificial Sequence: Synthetic oligonucleotide
  Sense strand starting at position 1344 of SEQ ID NO: 1883436
gaacgauccgccucgccau

SEQ ID NO: 2193395 - RNA, 19 nt, Artificial Sequence
  Description of Artificial Sequence: Synthetic oligonucleotide
  Antisense strand to SEQ ID NO: 2193394
auggcgaggcggaucguuc

SEQ ID NO: 2193396 - RNA, 19 nt, Artificial Sequence
  Description of Artificial Sequence: Synthetic oligonucleotide
  Sense strand starting at position 1456 of SEQ ID NO: 1883436
uaaggagaguucucagggu

SEQ ID NO: 2193397 - RNA, 19 nt, Artificial Sequence
  Description of Artificial Sequence: Synthetic oligonucleotide
  Antisense strand to SEQ ID NO: 2193396
acccugagaacucuccuua

SEQ ID NO: 2193398 - RNA, 19 nt, Artificial Sequence
  Description of Artificial Sequence: Synthetic oligonucleotide
  Sense strand starting at position 2965 of SEQ ID NO: 1883436
cgggcagacguuuaaagga

SEQ ID NO: 2193399 - RNA, 19 nt, Artificial Sequence
  Description of Artificial Sequence: Synthetic oligonucleotide
  Antisense strand to SEQ ID NO: 2193398
uccuuuaaacgucugcccg

SEQ ID NO: 2193400 - RNA, 19 nt, Artificial Sequence
  Description of Artificial Sequence: Synthetic oligonucleotide
  Sense strand starting at position 2967 of SEQ ID NO: 1883436
ggcagacguuuaaaggagu

SEQ ID NO: 2193401 - RNA, 19 nt, Artificial Sequence
  Description of Artificial Sequence: Synthetic oligonucleotide
  Antisense strand to SEQ ID NO: 2193400
acuccuuuaaacgucugcc

SEQ ID NO: 2193402 - RNA, 19 nt, Artificial Sequence
  Description of Artificial Sequence: Synthetic oligonucleotide
  Sense strand starting at position 3031 of SEQ ID NO: 1883436
gacagagucgugggauucu

SEQ ID NO: 2193403 - RNA, 19 nt, Artificial Sequence
  Description of Artificial Sequence: Synthetic oligonucleotide
  Antisense strand to SEQ ID NO: 2193402
agaaucccacgacucuguc

SEQ ID NO: 2193404 - RNA, 19 nt, Artificial Sequence
  Description of Artificial Sequence: Synthetic oligonucleotide
  Sense strand starting at position 3274 of SEQ ID NO: 1883436
cauugcugagaauguuaau

SEQ ID NO: 2193405 - RNA, 19 nt, Artificial Sequence
  Description of Artificial Sequence: Synthetic oligonucleotide
  Antisense strand to SEQ ID NO: 2193404
auuaacauucucagcaaug

SEQ ID NO: 2193406 - RNA, 19 nt, Artificial Sequence
  Description of Artificial Sequence: Synthetic oligonucleotide
  Sense strand starting at position 3301 of SEQ ID NO: 1883436
uacggauguguuuaugaag

SEQ ID NO: 2193407 - RNA, 19 nt, Artificial Sequence
  Description of Artificial Sequence: Synthetic oligonucleotide
  Antisense strand to SEQ ID NO: 2193406
cuucauaaacacauccgua

SEQ ID NO: 2193408 - RNA, 19 nt, Artificial Sequence
  Description of Artificial Sequence: Synthetic oligonucleotide
  Sense strand starting at position 3307 of SEQ ID NO: 1883436
uguguuuaugaaggcuacu

SEQ ID NO: 2193409 - RNA, 19 nt, Artificial Sequence
  Description of Artificial Sequence: Synthetic oligonucleotide
  Antisense strand to SEQ ID NO: 2193408
aguagccuucauaaacaca

SEQ ID NO: 2193410 - RNA, 19 nt, Artificial Sequence
  Description of Artificial Sequence: Synthetic oligonucleotide
  Sense strand starting at position 3310 of SEQ ID NO: 1883436
guuuaugaaggcuacuaca

SEQ ID NO: 2193411 - RNA, 19 nt, Artificial Sequence
  Description of Artificial Sequence: Synthetic oligonucleotide
  Antisense strand to SEQ ID NO: 2193410
uguaguagccuucauaaac

SEQ ID NO: 2193412 - RNA, 19 nt, Artificial Sequence
  Description of Artificial Sequence: Synthetic oligonucleotide
  Sense strand starting at position 3367 of SEQ ID NO: 1883436
gagaaauucucuuuagcgg

SEQ ID NO: 2193413 - RNA, 19 nt, Artificial Sequence
  Description of Artificial Sequence: Synthetic oligonucleotide
  Antisense strand to SEQ ID NO: 2193412
ccgcuaaagagaauuucuc

SEQ ID NO: 2193414 - RNA, 19 nt, Artificial Sequence
  Description of Artificial Sequence: Synthetic oligonucleotide
  Sense strand starting at position 3368 of SEQ ID NO: 1883436
agaaauucucuuuagcggu

SEQ ID NO: 2193415 - RNA, 19 nt, Artificial Sequence
  Description of Artificial Sequence: Synthetic oligonucleotide
  Antisense strand to SEQ ID NO: 2193414
accgcuaaagagaauuucu

SEQ ID NO: 2193416 - RNA, 19 nt, Artificial Sequence
  Description of Artificial Sequence: Synthetic oligonucleotide
  Sense strand starting at position 3402 of SEQ ID NO: 1883436
ucaggaucccuggagugua

SEQ ID NO: 2193417 - RNA, 19 nt, Artificial Sequence
  Description of Artificial Sequence: Synthetic oligonucleotide
  Antisense strand to SEQ ID NO: 2193416
uacacuccagggauccuga

SEQ ID NO: 2193418 - RNA, 19 nt, Artificial Sequence
  Description of Artificial Sequence: Synthetic oligonucleotide
  Sense strand starting at position 3464 of SEQ ID NO: 1883436
gaaguauugccuuacguug

SEQ ID NO: 2193419 - RNA, 19 nt, Artificial Sequence
  Description of Artificial Sequence: Synthetic oligonucleotide
  Antisense strand to SEQ ID NO: 2193418
caacguaaggcaauacuuc

SEQ ID NO: 2193420 - RNA, 19 nt, Artificial Sequence
  Description of Artificial Sequence: Synthetic oligonucleotide
  Sense strand starting at position 3527 of SEQ ID NO: 1883436
uggcuacgucacgaaucaa

SEQ ID NO: 2193421 - RNA, 19 nt, Artificial Sequence
  Description of Artificial Sequence: Synthetic oligonucleotide
  Antisense strand to SEQ ID NO: 2193420
uugauucgugacguagcca

SEQ ID NO: 2193422 - RNA, 19 nt, Artificial Sequence
  Description of Artificial Sequence: Synthetic oligonucleotide
  Sense strand starting at position 3582 of SEQ ID NO: 1883436
uagccaguugcauaucaga

SEQ ID NO: 2193423 - RNA, 19 nt, Artificial Sequence
  Description of Artificial Sequence: Synthetic oligonucleotide
  Antisense strand to SEQ ID NO: 2193422
ucugauaugcaacuggcua

SEQ ID NO: 2193424 - RNA, 19 nt, Artificial Sequence
  Description of Artificial Sequence: Synthetic oligonucleotide
  Sense strand starting at position 3609 of SEQ ID NO: 1883436
gggauuucagaucguuagc

SEQ ID NO: 2193425 - RNA, 19 nt, Artificial Sequence
  Description of Artificial Sequence: Synthetic oligonucleotide
  Antisense strand to SEQ ID NO: 2193424
gcuaacgaucugaaauccc

SEQ ID NO: 2193426 - RNA, 19 nt, Artificial Sequence
  Description of Artificial Sequence: Synthetic oligonucleotide
  Sense strand starting at position 3618 of SEQ ID NO: 1883436
gaucguuagcaguaguaug

SEQ ID NO: 2193427 - RNA, 19 nt, Artificial Sequence
  Description of Artificial Sequence: Synthetic oligonucleotide
  Antisense strand to SEQ ID NO: 2193426
cauacuacugcuaacgauc

SEQ ID NO: 2193428 - RNA, 19 nt, Artificial Sequence
  Description of Artificial Sequence: Synthetic oligonucleotide
  Sense strand starting at position 3620 of SEQ ID NO: 1883436
ucguuagcaguaguaugua

SEQ ID NO: 2193429 - RNA, 19 nt, Artificial Sequence
  Description of Artificial Sequence: Synthetic oligonucleotide
  Antisense strand to SEQ ID NO: 2193428
uacauacuacugcuaacga

SEQ ID NO: 2193430 - RNA, 19 nt, Artificial Sequence
  Description of Artificial Sequence: Synthetic oligonucleotide
  Sense strand starting at position 3665 of SEQ ID NO: 1883436
gaguucucccuccaggcaa

SEQ ID NO: 2193431 - RNA, 19 nt, Artificial Sequence
  Description of Artificial Sequence: Synthetic oligonucleotide
  Antisense strand to SEQ ID NO: 2193430
uugccuggagggagaacuc

SEQ ID NO: 2193432 - RNA, 19 nt, Artificial Sequence
  Description of Artificial Sequence: Synthetic oligonucleotide
  Sense strand starting at position 3719 of SEQ ID NO: 1883436
gaagacugguaaguuguau

SEQ ID NO: 2193433 - RNA, 19 nt, Artificial Sequence
  Description of Artificial Sequence: Synthetic oligonucleotide
  Antisense strand to SEQ ID NO: 2193432
auacaacuuaccagucuuc

SEQ ID NO: 2193434 - RNA, 19 nt, Artificial Sequence
  Description of Artificial Sequence: Synthetic oligonucleotide
  Sense strand starting at position 3746 of SEQ ID NO: 1883436
ugagguuucugacuaggca

SEQ ID NO: 2193435 - RNA, 19 nt, Artificial Sequence
  Description of Artificial Sequence: Synthetic oligonucleotide
  Antisense strand to SEQ ID NO: 2193434
ugccuagucagaaaccuca

SEQ ID NO: 2193436 - RNA, 19 nt, Artificial Sequence
  Description of Artificial Sequence: Synthetic oligonucleotide
  Sense strand starting at position 3813 of SEQ ID NO: 1883436
aggaauagauuuggcagaa

SEQ ID NO: 2193437 - RNA, 19 nt, Artificial Sequence
  Description of Artificial Sequence: Synthetic oligonucleotide
  Antisense strand to SEQ ID NO: 2193436
uucugccaaaucuauuccu

SEQ ID NO: 2193438 - RNA, 19 nt, Artificial Sequence
  Description of Artificial Sequence: Synthetic oligonucleotide
  Sense strand starting at position 3831 of SEQ ID NO: 1883436
aucuguacaucuguaaaca

SEQ ID NO: 2193439 - RNA, 19 nt, Artificial Sequence
  Description of Artificial Sequence: Synthetic oligonucleotide
  Antisense strand to SEQ ID NO: 2193438
uguuuacagauguacagau

SEQ ID NO: 2193440 - RNA, 19 nt, Artificial Sequence
  Description of Artificial Sequence: Synthetic oligonucleotide
  Sense strand starting at position 3832 of SEQ ID NO: 1883436
ucuguacaucuguaaacag

SEQ ID NO: 2193441 - RNA, 19 nt, Artificial Sequence
  Description of Artificial Sequence: Synthetic oligonucleotide
  Antisense strand to SEQ ID NO: 2193440
cuguuuacagauguacaga

SEQ ID NO: 2193442 - RNA, 19 nt, Artificial Sequence
  Description of Artificial Sequence: Synthetic oligonucleotide
  Sense strand starting at position 3889 of SEQ ID NO: 1883436
gcaaguagugcuucccuuu

SEQ ID NO: 2193443 - RNA, 19 nt, Artificial Sequence
  Description of Artificial Sequence: Synthetic oligonucleotide
  Antisense strand to SEQ ID NO: 2193442
aaagggaagcacuacuugc

SEQ ID NO: 2193444 - RNA, 19 nt, Artificial Sequence
  Description of Artificial Sequence: Synthetic oligonucleotide
  Sense strand starting at position 66 of SEQ ID NO: 1883437
gguuccauauuuccugcaa

SEQ ID NO: 2193445 - RNA, 19 nt, Artificial Sequence
  Description of Artificial Sequence: Synthetic oligonucleotide
  Antisense strand to SEQ ID NO: 2193444
uugcaggaaauauggaacc

SEQ ID NO: 2193446 - RNA, 19 nt, Artificial Sequence
  Description of Artificial Sequence: Synthetic oligonucleotide
  Sense strand starting at position 67 of SEQ ID NO: 1883437
guuccauauuuccugcaag

SEQ ID NO: 2193447 - RNA, 19 nt, Artificial Sequence
  Description of Artificial Sequence: Synthetic oligonucleotide
  Antisense strand to SEQ ID NO: 2193446
cuugcaggaaauauggaac

SEQ ID NO: 2193448 - RNA, 19 nt, Artificial Sequence
  Description of Artificial Sequence: Synthetic oligonucleotide
  Sense strand starting at position 313 of SEQ ID NO: 1883437
cuguguuucuucuugacag

SEQ ID NO: 2193449 - RNA, 19 nt, Artificial Sequence
  Description of Artificial Sequence: Synthetic oligonucleotide
  Antisense strand to SEQ ID NO: 2193448
cugucaagaagaaacacag

SEQ ID NO: 2193450 - RNA, 19 nt, Artificial Sequence
  Description of Artificial Sequence: Synthetic oligonucleotide
  Sense strand starting at position 315 of SEQ ID NO: 1883437
guguuucuucuugacagac

SEQ ID NO: 2193451 - RNA, 19 nt, Artificial Sequence
  Description of Artificial Sequence: Synthetic oligonucleotide
  Antisense strand to SEQ ID NO: 2193450
gucugucaagaagaaacac

SEQ ID NO: 2193452 - RNA, 19 nt, Artificial Sequence
  Description of Artificial Sequence: Synthetic oligonucleotide
  Sense strand starting at position 619 of SEQ ID NO: 1883437
cccacauaauguuuguauu

SEQ ID NO: 2193453 - RNA, 19 nt, Artificial Sequence
  Description of Artificial Sequence: Synthetic oligonucleotide
  Antisense strand to SEQ ID NO: 2193452
aauacaaacauuauguggg

SEQ ID NO: 2193454 - RNA, 19 nt, Artificial Sequence
  Description of Artificial Sequence: Synthetic oligonucleotide
  Sense strand starting at position 825 of SEQ ID NO: 1883437
uacuauuucgugcaugcaa

SEQ ID NO: 2193455 - RNA, 19 nt, Artificial Sequence
  Description of Artificial Sequence: Synthetic oligonucleotide
  Antisense strand to SEQ ID NO: 2193454
uugcaugcacgaaauagua

SEQ ID NO: 2193456 - RNA, 19 nt, Artificial Sequence
  Description of Artificial Sequence: Synthetic oligonucleotide
  Sense strand starting at position 872 of SEQ ID NO: 1883437
gauucuaauugaguuguuu

SEQ ID NO: 2193457 - RNA, 19 nt, Artificial Sequence
  Description of Artificial Sequence: Synthetic oligonucleotide
  Antisense strand to SEQ ID NO: 2193456
aaacaacucaauuagaauc

SEQ ID NO: 2193458 - RNA, 19 nt, Artificial Sequence
  Description of Artificial Sequence: Synthetic oligonucleotide
  Sense strand starting at position 1184 of SEQ ID NO: 1883437
agaauuaaacaacguuacu

SEQ ID NO: 2193459 - RNA, 19 nt, Artificial Sequence
  Description of Artificial Sequence: Synthetic oligonucleotide
  Antisense strand to SEQ ID NO: 2193458
aguaacguuguuuaauucu

SEQ ID NO: 2193460 - RNA, 19 nt, Artificial Sequence
  Description of Artificial Sequence: Synthetic oligonucleotide
  Sense strand starting at position 1260 of SEQ ID NO: 1883437
ccaggccuuccuggagaau

SEQ ID NO: 2193461 - RNA, 19 nt, Artificial Sequence
  Description of Artificial Sequence: Synthetic oligonucleotide
  Antisense strand to SEQ ID NO: 2193460
auucuccaggaaggccugg

SEQ ID NO: 2193462 - RNA, 19 nt, Artificial Sequence
  Description of Artificial Sequence: Synthetic oligonucleotide
  Sense strand starting at position 1289 of SEQ ID NO: 1883437
ggccuuagccaacagaaau

SEQ ID NO: 2193463 - RNA, 19 nt, Artificial Sequence
  Description of Artificial Sequence: Synthetic oligonucleotide
  Antisense strand to SEQ ID NO: 2193462
auuucuguuggcuaaggcc

SEQ ID NO: 2193464 - RNA, 19 nt, Artificial Sequence
  Description of Artificial Sequence: Synthetic oligonucleotide
  Sense strand starting at position 1477 of SEQ ID NO: 1883437
gggugacccugucccagau

SEQ ID NO: 2193465 - RNA, 19 nt, Artificial Sequence
  Description of Artificial Sequence: Synthetic oligonucleotide
  Antisense strand to SEQ ID NO: 2193464
aucugggacagggucaccc

SEQ ID NO: 2193466 - RNA, 19 nt, Artificial Sequence
  Description of Artificial Sequence: Synthetic oligonucleotide
  Sense strand starting at position 1839 of SEQ ID NO: 1883437
ccgagcagucuccaaacau

SEQ ID NO: 2193467 - RNA, 19 nt, Artificial Sequence
  Description of Artificial Sequence: Synthetic oligonucleotide
  Antisense strand to SEQ ID NO: 2193466
auguuuggagacugcucgg

SEQ ID NO: 2193468 - RNA, 19 nt, Artificial Sequence
  Description of Artificial Sequence: Synthetic oligonucleotide
  Sense strand starting at position 2150 of SEQ ID NO: 1883437
uggucugugucacuccaaa

SEQ ID NO: 2193469 - RNA, 19 nt, Artificial Sequence
  Description of Artificial Sequence: Synthetic oligonucleotide
  Antisense strand to SEQ ID NO: 2193468
uuuggagugacacagacca

SEQ ID NO: 2193470 - RNA, 19 nt, Artificial Sequence
  Description of Artificial Sequence: Synthetic oligonucleotide
  Sense strand starting at position 2170 of SEQ ID NO: 1883437
agccucauucugugaaaua

SEQ ID NO: 2193471 - RNA, 19 nt, Artificial Sequence
  Description of Artificial Sequence: Synthetic oligonucleotide
  Antisense strand to SEQ ID NO: 2193470
uauuucacagaaugaggcu

SEQ ID NO: 2193472 - RNA, 19 nt, Artificial Sequence
  Description of Artificial Sequence: Synthetic oligonucleotide
  Sense strand starting at position 2179 of SEQ ID NO: 1883437
cugugaaauauauggugga

SEQ ID NO: 2193473 - RNA, 19 nt, Artificial Sequence
  Description of Artificial Sequence: Synthetic oligonucleotide
  Antisense strand to SEQ ID NO: 2193472
uccaccauauauuucacag

SEQ ID NO: 2193474 - RNA, 19 nt, Artificial Sequence
  Description of Artificial Sequence: Synthetic oligonucleotide
  Sense strand starting at position 2231 of SEQ ID NO: 1883437
agccuugcuuccuuggaga

SEQ ID NO: 2193475 - RNA, 19 nt, Artificial Sequence
  Description of Artificial Sequence: Synthetic oligonucleotide
  Antisense strand to SEQ ID NO: 2193474
ucuccaaggaagcaaggcu

SEQ ID NO: 2193476 - RNA, 19 nt, Artificial Sequence
  Description of Artificial Sequence: Synthetic oligonucleotide
  Sense strand starting at position 2233 of SEQ ID NO: 1883437
ccuugcuuccuuggagaaa

SEQ ID NO: 2193477 - RNA, 19 nt, Artificial Sequence
  Description of Artificial Sequence: Synthetic oligonucleotide
  Antisense strand to SEQ ID NO: 2193476
uuucuccaaggaagcaagg

SEQ ID NO: 2193478 - RNA, 19 nt, Artificial Sequence
  Description of Artificial Sequence: Synthetic oligonucleotide
  Sense strand starting at position 2236 of SEQ ID NO: 1883437
ugcuuccuuggagaaaguu

SEQ ID NO: 2193479 - RNA, 19 nt, Artificial Sequence
  Description of Artificial Sequence: Synthetic oligonucleotide
  Antisense strand to SEQ ID NO: 2193478
aacuuucuccaaggaagca

SEQ ID NO: 2193480 - RNA, 19 nt, Artificial Sequence
  Description of Artificial Sequence: Synthetic oligonucleotide
  Sense strand starting at position 2244 of SEQ ID NO: 1883437
uggagaaaguuuccugaug

SEQ ID NO: 2193481 - RNA, 19 nt, Artificial Sequence
  Description of Artificial Sequence: Synthetic oligonucleotide
  Antisense strand to SEQ ID NO: 2193480
caucaggaaacuuucucca

SEQ ID NO: 2193482 - RNA, 19 nt, Artificial Sequence
  Description of Artificial Sequence: Synthetic oligonucleotide
  Sense strand starting at position 2245 of SEQ ID NO: 1883437
ggagaaaguuuccugaugu

SEQ ID NO: 2193483 - RNA, 19 nt, Artificial Sequence
  Description of Artificial Sequence: Synthetic oligonucleotide
  Antisense strand to SEQ ID NO: 2193482
acaucaggaaacuuucucc

SEQ ID NO: 2193484 - RNA, 19 nt, Artificial Sequence
  Description of Artificial Sequence: Synthetic oligonucleotide
  Sense strand starting at position 2253 of SEQ ID NO: 1883437
uuuccugaugucugacacu

SEQ ID NO: 2193485 - RNA, 19 nt, Artificial Sequence
  Description of Artificial Sequence: Synthetic oligonucleotide
  Antisense strand to SEQ ID NO: 2193484
agugucagacaucaggaaa

SEQ ID NO: 2193486 - RNA, 19 nt, Artificial Sequence
  Description of Artificial Sequence: Synthetic oligonucleotide
  Sense strand starting at position 2291 of SEQ ID NO: 1883437
uauugagauugucugagga

SEQ ID NO: 2193487 - RNA, 19 nt, Artificial Sequence
  Description of Artificial Sequence: Synthetic oligonucleotide
  Antisense strand to SEQ ID NO: 2193486
uccucagacaaucucaaua

SEQ ID NO: 2193488 - RNA, 19 nt, Artificial Sequence
  Description of Artificial Sequence: Synthetic oligonucleotide
  Sense strand starting at position 2305 of SEQ ID NO: 1883437
gaggauggaugccaacaaa

SEQ ID NO: 2193489 - RNA, 19 nt, Artificial Sequence
  Description of Artificial Sequence: Synthetic oligonucleotide
  Antisense strand to SEQ ID NO: 2193488
uuuguuggcauccauccuc

SEQ ID NO: 2193490 - RNA, 19 nt, Artificial Sequence
  Description of Artificial Sequence: Synthetic oligonucleotide
  Sense strand starting at position 2528 of SEQ ID NO: 1883437
cauuauaacugguuagaug

SEQ ID NO: 2193491 - RNA, 19 nt, Artificial Sequence
  Description of Artificial Sequence: Synthetic oligonucleotide
  Antisense strand to SEQ ID NO: 2193490
caucuaaccaguuauaaug

SEQ ID NO: 2193492 - RNA, 19 nt, Artificial Sequence
  Description of Artificial Sequence: Synthetic oligonucleotide
  Sense strand starting at position 2548 of SEQ ID NO: 1883437
aggagucugaacuguugaa

SEQ ID NO: 2193493 - RNA, 19 nt, Artificial Sequence
  Description of Artificial Sequence: Synthetic oligonucleotide
  Antisense strand to SEQ ID NO: 2193492
uucaacaguucagacuccu

SEQ ID NO: 2193494 - RNA, 19 nt, Artificial Sequence
  Description of Artificial Sequence: Synthetic oligonucleotide
  Sense strand starting at position 2552 of SEQ ID NO: 1883437
gucugaacuguugaagugu

SEQ ID NO: 2193495 - RNA, 19 nt, Artificial Sequence
  Description of Artificial Sequence: Synthetic oligonucleotide
  Antisense strand to SEQ ID NO: 2193494
acacuucaacaguucagac

SEQ ID NO: 2193496 - RNA, 19 nt, Artificial Sequence
  Description of Artificial Sequence: Synthetic oligonucleotide
  Sense strand starting at position 2570 of SEQ ID NO: 1883437
ugagcuugcaaugguauga

SEQ ID NO: 2193497 - RNA, 19 nt, Artificial Sequence
  Description of Artificial Sequence: Synthetic oligonucleotide
  Antisense strand to SEQ ID NO: 2193496
ucauaccauugcaagcuca

SEQ ID NO: 2193498 - RNA, 19 nt, Artificial Sequence
  Description of Artificial Sequence: Synthetic oligonucleotide
  Sense strand starting at position 2575 of SEQ ID NO: 1883437
uugcaaugguaugauuuau

SEQ ID NO: 2193499 - RNA, 19 nt, Artificial Sequence
  Description of Artificial Sequence: Synthetic oligonucleotide
  Antisense strand to SEQ ID NO: 2193498
auaaaucauaccauugcaa

SEQ ID NO: 2193500 - RNA, 19 nt, Artificial Sequence
  Description of Artificial Sequence: Synthetic oligonucleotide
  Sense strand starting at position 2654 of SEQ ID NO: 1883437
cccuaaugcuuccuuggau

SEQ ID NO: 2193501 - RNA, 19 nt, Artificial Sequence
  Description of Artificial Sequence: Synthetic oligonucleotide
  Antisense strand to SEQ ID NO: 2193500
auccaaggaagcauuaggg

SEQ ID NO: 2193502 - RNA, 19 nt, Artificial Sequence
  Description of Artificial Sequence: Synthetic oligonucleotide
  Sense strand starting at position 2713 of SEQ ID NO: 1883437
gucucauuccagcaguuaa

SEQ ID NO: 2193503 - RNA, 19 nt, Artificial Sequence
  Description of Artificial Sequence: Synthetic oligonucleotide
  Antisense strand to SEQ ID NO: 2193502
uuaacugcuggaaugagac

SEQ ID NO: 2193504 - RNA, 19 nt, Artificial Sequence
  Description of Artificial Sequence: Synthetic oligonucleotide
  Sense strand starting at position 3082 of SEQ ID NO: 1883437
ugguuuagguguccuacua

SEQ ID NO: 2193505 - RNA, 19 nt, Artificial Sequence
  Description of Artificial Sequence: Synthetic oligonucleotide
  Antisense strand to SEQ ID NO: 2193504
uaguaggacaccuaaacca

SEQ ID NO: 2193506 - RNA, 19 nt, Artificial Sequence
  Description of Artificial Sequence: Synthetic oligonucleotide
  Sense strand starting at position 3393 of SEQ ID NO: 1883437
ggcuucuuccugcacaacu

SEQ ID NO: 2193507 - RNA, 19 nt, Artificial Sequence
  Description of Artificial Sequence: Synthetic oligonucleotide
  Antisense strand to SEQ ID NO: 2193506
aguugugcaggaagaagcc

SEQ ID NO: 2193508 - RNA, 19 nt, Artificial Sequence
  Description of Artificial Sequence: Synthetic oligonucleotide
  Sense strand starting at position 3475 of SEQ ID NO: 1883437
uucuaaguggucuaugcua

SEQ ID NO: 2193509 - RNA, 19 nt, Artificial Sequence
  Description of Artificial Sequence: Synthetic oligonucleotide
  Antisense strand to SEQ ID NO: 2193508
uagcauagaccacuuagaa

SEQ ID NO: 2193510 - RNA, 19 nt, Artificial Sequence
  Description of Artificial Sequence: Synthetic oligonucleotide
  Sense strand starting at position 3477 of SEQ ID NO: 1883437
cuaaguggucuaugcuaca

SEQ ID NO: 2193511 - RNA, 19 nt, Artificial Sequence
  Description of Artificial Sequence: Synthetic oligonucleotide
  Antisense strand to SEQ ID NO: 2193510
uguagcauagaccacuuag

SEQ ID NO: 2193512 - RNA, 19 nt, Artificial Sequence
  Description of Artificial Sequence: Synthetic oligonucleotide
  Sense strand starting at position 3569 of SEQ ID NO: 1883437
guauguguuaugggaugug

SEQ ID NO: 2193513 - RNA, 19 nt, Artificial Sequence
  Description of Artificial Sequence: Synthetic oligonucleotide
  Antisense strand to SEQ ID NO: 2193512
cacaucccauaacacauac

SEQ ID NO: 2193514 - RNA, 19 nt, Artificial Sequence
  Description of Artificial Sequence: Synthetic oligonucleotide
  Sense strand starting at position 3651 of SEQ ID NO: 1883437
uggguuguugcagauauaa

SEQ ID NO: 2193515 - RNA, 19 nt, Artificial Sequence
  Description of Artificial Sequence: Synthetic oligonucleotide
  Antisense strand to SEQ ID NO: 2193514
uuauaucugcaacaaccca

SEQ ID NO: 2193516 - RNA, 19 nt, Artificial Sequence
  Description of Artificial Sequence: Synthetic oligonucleotide
  Sense strand starting at position 3653 of SEQ ID NO: 1883437
gguuguugcagauauaaug

SEQ ID NO: 2193517 - RNA, 19 nt, Artificial Sequence
  Description of Artificial Sequence: Synthetic oligonucleotide
  Antisense strand to SEQ ID NO: 2193516
cauuauaucugcaacaacc

SEQ ID NO: 2193518 - RNA, 19 nt, Artificial Sequence
  Description of Artificial Sequence: Synthetic oligonucleotide
  Sense strand starting at position 3796 of SEQ ID NO: 1883437
gaggcagagguuggaauau

SEQ ID NO: 2193519 - RNA, 19 nt, Artificial Sequence
  Description of Artificial Sequence: Synthetic oligonucleotide
  Antisense strand to SEQ ID NO: 2193518
auauuccaaccucugccuc

SEQ ID NO: 2193520 - RNA, 19 nt, Artificial Sequence
  Description of Artificial Sequence: Synthetic oligonucleotide
  Sense strand starting at position 3950 of SEQ ID NO: 1883437
agaacuaugugacaaggaa

SEQ ID NO: 2193521 - RNA, 19 nt, Artificial Sequence
  Description of Artificial Sequence: Synthetic oligonucleotide
  Antisense strand to SEQ ID NO: 2193520
uuccuugucacauaguucu

SEQ ID NO: 2193522 - RNA, 19 nt, Artificial Sequence
  Description of Artificial Sequence: Synthetic oligonucleotide
  Sense strand starting at position 3962 of SEQ ID NO: 1883437
caaggaaucucugcuguuu

SEQ ID NO: 2193523 - RNA, 19 nt, Artificial Sequence
  Description of Artificial Sequence: Synthetic oligonucleotide
  Antisense strand to SEQ ID NO: 2193522
aaacagcagagauuccuug

SEQ ID NO: 2193524 - RNA, 19 nt, Artificial Sequence
  Description of Artificial Sequence: Synthetic oligonucleotide
  Sense strand starting at position 84 of SEQ ID NO: 1883438
ucuaucaaggaggguuaua

SEQ ID NO: 2193525 - RNA, 19 nt, Artificial Sequence
  Description of Artificial Sequence: Synthetic oligonucleotide
  Antisense strand to SEQ ID NO: 2193524
uauaacccuccuugauaga

SEQ ID NO: 2193526 - RNA, 19 nt, Artificial Sequence
  Description of Artificial Sequence: Synthetic oligonucleotide
  Sense strand starting at position 93 of SEQ ID NO: 1883438
gaggguuauagcuggucaa

SEQ ID NO: 2193527 - RNA, 19 nt, Artificial Sequence
  Description of Artificial Sequence: Synthetic oligonucleotide
  Antisense strand to SEQ ID NO: 2193526
uugaccagcuauaacccuc

SEQ ID NO: 2193528 - RNA, 19 nt, Artificial Sequence
  Description of Artificial Sequence: Synthetic oligonucleotide
  Sense strand starting at position 94 of SEQ ID NO: 1883438
aggguuauagcuggucaaa

SEQ ID NO: 2193529 - RNA, 19 nt, Artificial Sequence
  Description of Artificial Sequence: Synthetic oligonucleotide
  Antisense strand to SEQ ID NO: 2193528
uuugaccagcuauaacccu

SEQ ID NO: 2193530 - RNA, 19 nt, Artificial Sequence
  Description of Artificial Sequence: Synthetic oligonucleotide
  Sense strand starting at position 96 of SEQ ID NO: 1883438
gguuauagcuggucaaaga

SEQ ID NO: 2193531 - RNA, 19 nt, Artificial Sequence
  Description of Artificial Sequence: Synthetic oligonucleotide
  Antisense strand to SEQ ID NO: 2193530
ucuuugaccagcuauaacc

SEQ ID NO: 2193532 - RNA, 19 nt, Artificial Sequence
  Description of Artificial Sequence: Synthetic oligonucleotide
  Sense strand starting at position 97 of SEQ ID NO: 1883438
guuauagcuggucaaagag

SEQ ID NO: 2193533 - RNA, 19 nt, Artificial Sequence
  Description of Artificial Sequence: Synthetic oligonucleotide
  Antisense strand to SEQ ID NO: 2193532
cucuuugaccagcuauaac

SEQ ID NO: 2193534 - RNA, 19 nt, Artificial Sequence
  Description of Artificial Sequence: Synthetic oligonucleotide
  Sense strand starting at position 181 of SEQ ID NO: 1883438
cuugaugaccugugcucaa

SEQ ID NO: 2193535 - RNA, 19 nt, Artificial Sequence
  Description of Artificial Sequence: Synthetic oligonucleotide
  Antisense strand to SEQ ID NO: 2193534
uugagcacaggucaucaag

SEQ ID NO: 2193536 - RNA, 19 nt, Artificial Sequence
  Description of Artificial Sequence: Synthetic oligonucleotide
  Sense strand starting at position 184 of SEQ ID NO: 1883438
gaugaccugugcucaauaa

SEQ ID NO: 2193537 - RNA, 19 nt, Artificial Sequence
  Description of Artificial Sequence: Synthetic oligonucleotide
  Antisense strand to SEQ ID NO: 2193536
uuauugagcacaggucauc

SEQ ID NO: 2193538 - RNA, 19 nt, Artificial Sequence
  Description of Artificial Sequence: Synthetic oligonucleotide
  Sense strand starting at position 185 of SEQ ID NO: 1883438
augaccugugcucaauaau

SEQ ID NO: 2193539 - RNA, 19 nt, Artificial Sequence
  Description of Artificial Sequence: Synthetic oligonucleotide
  Antisense strand to SEQ ID NO: 2193538
auuauugagcacaggucau

SEQ ID NO: 2193540 - RNA, 19 nt, Artificial Sequence
  Description of Artificial Sequence: Synthetic oligonucleotide
  Sense strand starting at position 188 of SEQ ID NO: 1883438
accugugcucaauaauguu

SEQ ID NO: 2193541 - RNA, 19 nt, Artificial Sequence
  Description of Artificial Sequence: Synthetic oligonucleotide
  Antisense strand to SEQ ID NO: 2193540
aacauuauugagcacaggu

SEQ ID NO: 2193542 - RNA, 19 nt, Artificial Sequence
  Description of Artificial Sequence: Synthetic oligonucleotide
  Sense strand starting at position 332 of SEQ ID NO: 1883438
agaugaacccaguguaaua

SEQ ID NO: 2193543 - RNA, 19 nt, Artificial Sequence
  Description of Artificial Sequence: Synthetic oligonucleotide
  Antisense strand to SEQ ID NO: 2193542
uauuacacuggguucaucu

SEQ ID NO: 2193544 - RNA, 19 nt, Artificial Sequence
  Description of Artificial Sequence: Synthetic oligonucleotide
  Sense strand starting at position 483 of SEQ ID NO: 1883438
aggucuacccagugccaaa

SEQ ID NO: 2193545 - RNA, 19 nt, Artificial Sequence
  Description of Artificial Sequence: Synthetic oligonucleotide
  Antisense strand to SEQ ID NO: 2193544
uuuggcacuggguagaccu

SEQ ID NO: 2193546 - RNA, 19 nt, Artificial Sequence
  Description of Artificial Sequence: Synthetic oligonucleotide
  Sense strand starting at position 596 of SEQ ID NO: 1883438
cuauaauuagcugaugcuu

SEQ ID NO: 2193547 - RNA, 19 nt, Artificial Sequence
  Description of Artificial Sequence: Synthetic oligonucleotide
  Antisense strand to SEQ ID NO: 2193546
aagcaucagcuaauuauag

SEQ ID NO: 2193548 - RNA, 19 nt, Artificial Sequence
  Description of Artificial Sequence: Synthetic oligonucleotide
  Sense strand starting at position 1105 of SEQ ID NO: 1883438
gauugugcucccuaauugu

SEQ ID NO: 2193549 - RNA, 19 nt, Artificial Sequence
  Description of Artificial Sequence: Synthetic oligonucleotide
  Antisense strand to SEQ ID NO: 2193548
acaauuagggagcacaauc

SEQ ID NO: 2193550 - RNA, 19 nt, Artificial Sequence
  Description of Artificial Sequence: Synthetic oligonucleotide
  Sense strand starting at position 1217 of SEQ ID NO: 1883438
aaaugugcuccauagguaa

SEQ ID NO: 2193551 - RNA, 19 nt, Artificial Sequence
  Description of Artificial Sequence: Synthetic oligonucleotide
  Antisense strand to SEQ ID NO: 2193550
uuaccuauggagcacauuu

SEQ ID NO: 2193552 - RNA, 19 nt, Artificial Sequence
  Description of Artificial Sequence: Synthetic oligonucleotide
  Sense strand starting at position 1219 of SEQ ID NO: 1883438
augugcuccauagguaaag

SEQ ID NO: 2193553 - RNA, 19 nt, Artificial Sequence
  Description of Artificial Sequence: Synthetic oligonucleotide
  Antisense strand to SEQ ID NO: 2193552
cuuuaccuauggagcacau

SEQ ID NO: 2193554 - RNA, 19 nt, Artificial Sequence
  Description of Artificial Sequence: Synthetic oligonucleotide
  Sense strand starting at position 1221 of SEQ ID NO: 1883438
gugcuccauagguaaagua

SEQ ID NO: 2193555 - RNA, 19 nt, Artificial Sequence
  Description of Artificial Sequence: Synthetic oligonucleotide
  Antisense strand to SEQ ID NO: 2193554
uacuuuaccuauggagcac

SEQ ID NO: 2193556 - RNA, 19 nt, Artificial Sequence
  Description of Artificial Sequence: Synthetic oligonucleotide
  Sense strand starting at position 1371 of SEQ ID NO: 1883438
gacgaugaagcuuaauguu

SEQ ID NO: 2193557 - RNA, 19 nt, Artificial Sequence
  Description of Artificial Sequence: Synthetic oligonucleotide
  Antisense strand to SEQ ID NO: 2193556
aacauuaagcuucaucguc

SEQ ID NO: 2193558 - RNA, 19 nt, Artificial Sequence
  Description of Artificial Sequence: Synthetic oligonucleotide
  Sense strand starting at position 1428 of SEQ ID NO: 1883438
gugaguuccuacucauacu

SEQ ID NO: 2193559 - RNA, 19 nt, Artificial Sequence
  Description of Artificial Sequence: Synthetic oligonucleotide
  Antisense strand to SEQ ID NO: 2193558
aguaugaguaggaacucac

SEQ ID NO: 2193560 - RNA, 19 nt, Artificial Sequence
  Description of Artificial Sequence: Synthetic oligonucleotide
  Sense strand starting at position 1456 of SEQ ID NO: 1883438
cggaaucucuguucuuaac

SEQ ID NO: 2193561 - RNA, 19 nt, Artificial Sequence
  Description of Artificial Sequence: Synthetic oligonucleotide
  Antisense strand to SEQ ID NO: 2193560
guuaagaacagagauuccg

SEQ ID NO: 2193562 - RNA, 19 nt, Artificial Sequence
  Description of Artificial Sequence: Synthetic oligonucleotide
  Sense strand starting at position 1551 of SEQ ID NO: 1883438
gugucaaguaccugacaca

SEQ ID NO: 2193563 - RNA, 19 nt, Artificial Sequence
  Description of Artificial Sequence: Synthetic oligonucleotide
  Antisense strand to SEQ ID NO: 2193562
ugugucagguacuugacac

SEQ ID NO: 2193564 - RNA, 19 nt, Artificial Sequence
  Description of Artificial Sequence: Synthetic oligonucleotide
  Sense strand starting at position 1722 of SEQ ID NO: 1883438
ucacuuguugucuaucaca

SEQ ID NO: 2193565 - RNA, 19 nt, Artificial Sequence
  Description of Artificial Sequence: Synthetic oligonucleotide
  Antisense strand to SEQ ID NO: 2193564
ugugauagacaacaaguga

SEQ ID NO: 2193566 - RNA, 19 nt, Artificial Sequence
  Description of Artificial Sequence: Synthetic oligonucleotide
  Sense strand starting at position 2028 of SEQ ID NO: 1883438
caagguuuguguucuaaac

SEQ ID NO: 2193567 - RNA, 19 nt, Artificial Sequence
  Description of Artificial Sequence: Synthetic oligonucleotide
  Antisense strand to SEQ ID NO: 2193566
guuuagaacacaaaccuug

SEQ ID NO: 2193568 - RNA, 19 nt, Artificial Sequence
  Description of Artificial Sequence: Synthetic oligonucleotide
  Sense strand starting at position 2116 of SEQ ID NO: 1883438
gcagucaaauuccuggaga

SEQ ID NO: 2193569 - RNA, 19 nt, Artificial Sequence
  Description of Artificial Sequence: Synthetic oligonucleotide
  Antisense strand to SEQ ID NO: 2193568
ucuccaggaauuugacugc

SEQ ID NO: 2193570 - RNA, 19 nt, Artificial Sequence
  Description of Artificial Sequence: Synthetic oligonucleotide
  Sense strand starting at position 2118 of SEQ ID NO: 1883438
agucaaauuccuggagacu

SEQ ID NO: 2193571 - RNA, 19 nt, Artificial Sequence
  Description of Artificial Sequence: Synthetic oligonucleotide
  Antisense strand to SEQ ID NO: 2193570
agucuccaggaauuugacu

SEQ ID NO: 2193572 - RNA, 19 nt, Artificial Sequence
  Description of Artificial Sequence: Synthetic oligonucleotide
  Sense strand starting at position 2175 of SEQ ID NO: 1883438
agaccaggcuucguaauca

SEQ ID NO: 2193573 - RNA, 19 nt, Artificial Sequence
  Description of Artificial Sequence: Synthetic oligonucleotide
  Antisense strand to SEQ ID NO: 2193572
ugauuacgaagccuggucu

SEQ ID NO: 2193574 - RNA, 19 nt, Artificial Sequence
  Description of Artificial Sequence: Synthetic oligonucleotide
  Sense strand starting at position 2179 of SEQ ID NO: 1883438
caggcuucguaaucagaca

SEQ ID NO: 2193575 - RNA, 19 nt, Artificial Sequence
  Description of Artificial Sequence: Synthetic oligonucleotide
  Antisense strand to SEQ ID NO: 2193574
ugucugauuacgaagccug

SEQ ID NO: 2193576 - RNA, 19 nt, Artificial Sequence
  Description of Artificial Sequence: Synthetic oligonucleotide
  Sense strand starting at position 2241 of SEQ ID NO: 1883438
gugugaacuuaaguuacuu

SEQ ID NO: 2193577 - RNA, 19 nt, Artificial Sequence
  Description of Artificial Sequence: Synthetic oligonucleotide
  Antisense strand to SEQ ID NO: 2193576
aaguaacuuaaguucacac

SEQ ID NO: 2193578 - RNA, 19 nt, Artificial Sequence
  Description of Artificial Sequence: Synthetic oligonucleotide
  Sense strand starting at position 2263 of SEQ ID NO: 1883438
uaaccuuucugaguugguu

SEQ ID NO: 2193579 - RNA, 19 nt, Artificial Sequence
  Description of Artificial Sequence: Synthetic oligonucleotide
  Antisense strand to SEQ ID NO: 2193578
aaccaacucagaaagguua

SEQ ID NO: 2193580 - RNA, 19 nt, Artificial Sequence
  Description of Artificial Sequence: Synthetic oligonucleotide
  Sense strand starting at position 2277 of SEQ ID NO: 1883438
ugguuuccucaguauccau

SEQ ID NO: 2193581 - RNA, 19 nt, Artificial Sequence
  Description of Artificial Sequence: Synthetic oligonucleotide
  Antisense strand to SEQ ID NO: 2193580
auggauacugaggaaacca

SEQ ID NO: 2193582 - RNA, 19 nt, Artificial Sequence
  Description of Artificial Sequence: Synthetic oligonucleotide
  Sense strand starting at position 2321 of SEQ ID NO: 1883438
ugauguuugcacugaauau

SEQ ID NO: 2193583 - RNA, 19 nt, Artificial Sequence
  Description of Artificial Sequence: Synthetic oligonucleotide
  Antisense strand to SEQ ID NO: 2193582
auauucagugcaaacauca

SEQ ID NO: 2193584 - RNA, 19 nt, Artificial Sequence
  Description of Artificial Sequence: Synthetic oligonucleotide
  Sense strand starting at position 2343 of SEQ ID NO: 1883438
augggcauugauugccaaa

SEQ ID NO: 2193585 - RNA, 19 nt, Artificial Sequence
  Description of Artificial Sequence: Synthetic oligonucleotide
  Antisense strand to SEQ ID NO: 2193584
uuuggcaaucaaugcccau

SEQ ID NO: 2193586 - RNA, 19 nt, Artificial Sequence
  Description of Artificial Sequence: Synthetic oligonucleotide
  Sense strand starting at position 2345 of SEQ ID NO: 1883438
gggcauugauugccaaauu

SEQ ID NO: 2193587 - RNA, 19 nt, Artificial Sequence
  Description of Artificial Sequence: Synthetic oligonucleotide
  Antisense strand to SEQ ID NO: 2193586
aauuuggcaaucaaugccc

SEQ ID NO: 2193588 - RNA, 19 nt, Artificial Sequence
  Description of Artificial Sequence: Synthetic oligonucleotide
  Sense strand starting at position 2898 of SEQ ID NO: 1883438
acccguuaggauuacuauu

SEQ ID NO: 2193589 - RNA, 19 nt, Artificial Sequence
  Description of Artificial Sequence: Synthetic oligonucleotide
  Antisense strand to SEQ ID NO: 2193588
aauaguaauccuaacgggu

SEQ ID NO: 2193590 - RNA, 19 nt, Artificial Sequence
  Description of Artificial Sequence: Synthetic oligonucleotide
  Sense strand starting at position 2980 of SEQ ID NO: 1883438
cuguacauugcuggugaga

SEQ ID NO: 2193591 - RNA, 19 nt, Artificial Sequence
  Description of Artificial Sequence: Synthetic oligonucleotide
  Antisense strand to SEQ ID NO: 2193590
ucucaccagcaauguacag

SEQ ID NO: 2193592 - RNA, 19 nt, Artificial Sequence
  Description of Artificial Sequence: Synthetic oligonucleotide
  Sense strand starting at position 3312 of SEQ ID NO: 1883438
ggacauagugcugagcgaa

SEQ ID NO: 2193593 - RNA, 19 nt, Artificial Sequence
  Description of Artificial Sequence: Synthetic oligonucleotide
  Antisense strand to SEQ ID NO: 2193592
uucgcucagcacuaugucc

SEQ ID NO: 2193594 - RNA, 19 nt, Artificial Sequence
  Description of Artificial Sequence: Synthetic oligonucleotide
  Sense strand starting at position 3325 of SEQ ID NO: 1883438
agcgaaaucagccagucaa

SEQ ID NO: 2193595 - RNA, 19 nt, Artificial Sequence
  Description of Artificial Sequence: Synthetic oligonucleotide
  Antisense strand to SEQ ID NO: 2193594
uugacuggcugauuucgcu

SEQ ID NO: 2193596 - RNA, 19 nt, Artificial Sequence
  Description of Artificial Sequence: Synthetic oligonucleotide
  Sense strand starting at position 3377 of SEQ ID NO: 1883438
ggguaccucgaguacucaa

SEQ ID NO: 2193597 - RNA, 19 nt, Artificial Sequence
  Description of Artificial Sequence: Synthetic oligonucleotide
  Antisense strand to SEQ ID NO: 2193596
uugaguacucgagguaccc

SEQ ID NO: 2193598 - RNA, 19 nt, Artificial Sequence
  Description of Artificial Sequence: Synthetic oligonucleotide
  Sense strand starting at position 3477 of SEQ ID NO: 1883438
gagagucagcuugggaaga

SEQ ID NO: 2193599 - RNA, 19 nt, Artificial Sequence
  Description of Artificial Sequence: Synthetic oligonucleotide
  Antisense strand to SEQ ID NO: 2193598
ucuucccaagcugacucuc

SEQ ID NO: 2193600 - RNA, 19 nt, Artificial Sequence
  Description of Artificial Sequence: Synthetic oligonucleotide
  Sense strand starting at position 3857 of SEQ ID NO: 1883438
agagaagccuucccucaca

SEQ ID NO: 2193601 - RNA, 19 nt, Artificial Sequence
  Description of Artificial Sequence: Synthetic oligonucleotide
  Antisense strand to SEQ ID NO: 2193600
ugugagggaaggcuucucu

SEQ ID NO: 2193602 - RNA, 19 nt, Artificial Sequence
  Description of Artificial Sequence: Synthetic oligonucleotide
  Sense strand starting at position 3967 of SEQ ID NO: 1883438
gaaagcugccucguucuuu

SEQ ID NO: 2193603 - RNA, 19 nt, Artificial Sequence
  Description of Artificial Sequence: Synthetic oligonucleotide
  Antisense strand to SEQ ID NO: 2193602
aaagaacgaggcagcuuuc

SEQ ID NO: 2193604 - RNA, 19 nt, Artificial Sequence
  Description of Artificial Sequence: Synthetic oligonucleotide
  Sense strand starting at position 560 of SEQ ID NO: 1883439
agaccaugccauugugaca

SEQ ID NO: 2193605 - RNA, 19 nt, Artificial Sequence
  Description of Artificial Sequence: Synthetic oligonucleotide
  Antisense strand to SEQ ID NO: 2193604
ugucacaauggcauggucu

SEQ ID NO: 2193606 - RNA, 19 nt, Artificial Sequence
  Description of Artificial Sequence: Synthetic oligonucleotide
  Sense strand starting at position 658 of SEQ ID NO: 1883439
cuauguagcugaguaguca

SEQ ID NO: 2193607 - RNA, 19 nt, Artificial Sequence
  Description of Artificial Sequence: Synthetic oligonucleotide
  Antisense strand to SEQ ID NO: 2193606
ugacuacucagcuacauag

SEQ ID NO: 2193608 - RNA, 19 nt, Artificial Sequence
  Description of Artificial Sequence: Synthetic oligonucleotide
  Sense strand starting at position 662 of SEQ ID NO: 1883439
guagcugaguagucacuaa

SEQ ID NO: 2193609 - RNA, 19 nt, Artificial Sequence
  Description of Artificial Sequence: Synthetic oligonucleotide
  Antisense strand to SEQ ID NO: 2193608
uuagugacuacucagcuac

SEQ ID NO: 2193610 - RNA, 19 nt, Artificial Sequence
  Description of Artificial Sequence: Synthetic oligonucleotide
  Sense strand starting at position 669 of SEQ ID NO: 1883439
aguagucacuaauaaacua

SEQ ID NO: 2193611 - RNA, 19 nt, Artificial Sequence
  Description of Artificial Sequence: Synthetic oligonucleotide
  Antisense strand to SEQ ID NO: 2193610
uaguuuauuagugacuacu

SEQ ID NO: 2193612 - RNA, 19 nt, Artificial Sequence
  Description of Artificial Sequence: Synthetic oligonucleotide
  Sense strand starting at position 826 of SEQ ID NO: 1883439
agcuaugugaccuugcguu

SEQ ID NO: 2193613 - RNA, 19 nt, Artificial Sequence
  Description of Artificial Sequence: Synthetic oligonucleotide
  Antisense strand to SEQ ID NO: 2193612
aacgcaaggucacauagcu

SEQ ID NO: 2193614 - RNA, 19 nt, Artificial Sequence
  Description of Artificial Sequence: Synthetic oligonucleotide
  Sense strand starting at position 839 of SEQ ID NO: 1883439
ugcguuuggccaugaguuu

SEQ ID NO: 2193615 - RNA, 19 nt, Artificial Sequence
  Description of Artificial Sequence: Synthetic oligonucleotide
  Antisense strand to SEQ ID NO: 2193614
aaacucauggccaaacgca

SEQ ID NO: 2193616 - RNA, 19 nt, Artificial Sequence
  Description of Artificial Sequence: Synthetic oligonucleotide
  Sense strand starting at position 916 of SEQ ID NO: 1883439
uauguuccauuggcuaaga

SEQ ID NO: 2193617 - RNA, 19 nt, Artificial Sequence
  Description of Artificial Sequence: Synthetic oligonucleotide
  Antisense strand to SEQ ID NO: 2193616
ucuuagccaauggaacaua

SEQ ID NO: 2193618 - RNA, 19 nt, Artificial Sequence
  Description of Artificial Sequence: Synthetic oligonucleotide
  Sense strand starting at position 918 of SEQ ID NO: 1883439
uguuccauuggcuaagaga

SEQ ID NO: 2193619 - RNA, 19 nt, Artificial Sequence
  Description of Artificial Sequence: Synthetic oligonucleotide
  Antisense strand to SEQ ID NO: 2193618
ucucuuagccaauggaaca

SEQ ID NO: 2193620 - RNA, 19 nt, Artificial Sequence
  Description of Artificial Sequence: Synthetic oligonucleotide
  Sense strand starting at position 1258 of SEQ ID NO: 1883439
ccaccuauguccugaacag

SEQ ID NO: 2193621 - RNA, 19 nt, Artificial Sequence
  Description of Artificial Sequence: Synthetic oligonucleotide
  Antisense strand to SEQ ID NO: 2193620
cuguucaggacauaggugg

SEQ ID NO: 2193622 - RNA, 19 nt, Artificial Sequence
  Description of Artificial Sequence: Synthetic oligonucleotide
  Sense strand starting at position 1283 of SEQ ID NO: 1883439
cuuuacgagccucauuaua

SEQ ID NO: 2193623 - RNA, 19 nt, Artificial Sequence
  Description of Artificial Sequence: Synthetic oligonucleotide
  Antisense strand to SEQ ID NO: 2193622
uauaaugaggcucguaaag

SEQ ID NO: 2193624 - RNA, 19 nt, Artificial Sequence
  Description of Artificial Sequence: Synthetic oligonucleotide
  Sense strand starting at position 1285 of SEQ ID NO: 1883439
uuacgagccucauuauaug

SEQ ID NO: 2193625 - RNA, 19 nt, Artificial Sequence
  Description of Artificial Sequence: Synthetic oligonucleotide
  Antisense strand to SEQ ID NO: 2193624
cauauaaugaggcucguaa

SEQ ID NO: 2193626 - RNA, 19 nt, Artificial Sequence
  Description of Artificial Sequence: Synthetic oligonucleotide
  Sense strand starting at position 1294 of SEQ ID NO: 1883439
ucauuauauguacgagaua

SEQ ID NO: 2193627 - RNA, 19 nt, Artificial Sequence
  Description of Artificial Sequence: Synthetic oligonucleotide
  Antisense strand to SEQ ID NO: 2193626
uaucucguacauauaauga

SEQ ID NO: 2193628 - RNA, 19 nt, Artificial Sequence
  Description of Artificial Sequence: Synthetic oligonucleotide
  Sense strand starting at position 1295 of SEQ ID NO: 1883439
cauuauauguacgagauaa

SEQ ID NO: 2193629 - RNA, 19 nt, Artificial Sequence
  Description of Artificial Sequence: Synthetic oligonucleotide
  Antisense strand to SEQ ID NO: 2193628
uuaucucguacauauaaug

SEQ ID NO: 2193630 - RNA, 19 nt, Artificial Sequence
  Description of Artificial Sequence: Synthetic oligonucleotide
  Sense strand starting at position 1377 of SEQ ID NO: 1883439
uuuagauagugguauguau

SEQ ID NO: 2193631 - RNA, 19 nt, Artificial Sequence
  Description of Artificial Sequence: Synthetic oligonucleotide
  Antisense strand to SEQ ID NO: 2193630
auacauaccacuaucuaaa

SEQ ID NO: 2193632 - RNA, 19 nt, Artificial Sequence
  Description of Artificial Sequence: Synthetic oligonucleotide
  Sense strand starting at position 1379 of SEQ ID NO: 1883439
uagauagugguauguauua

SEQ ID NO: 2193633 - RNA, 19 nt, Artificial Sequence
  Description of Artificial Sequence: Synthetic oligonucleotide
  Antisense strand to SEQ ID NO: 2193632
uaauacauaccacuaucua

SEQ ID NO: 2193634 - RNA, 19 nt, Artificial Sequence
  Description of Artificial Sequence: Synthetic oligonucleotide
  Sense strand starting at position 2989 of SEQ ID NO: 1883439
ccaaauucuuuagaugguu

SEQ ID NO: 2193635 - RNA, 19 nt, Artificial Sequence
  Description of Artificial Sequence: Synthetic oligonucleotide
  Antisense strand to SEQ ID NO: 2193634
aaccaucuaaagaauuugg

SEQ ID NO: 2193636 - RNA, 19 nt, Artificial Sequence
  Description of Artificial Sequence: Synthetic oligonucleotide
  Sense strand starting at position 3143 of SEQ ID NO: 1883439
ugcacuucguaaggauaau

SEQ ID NO: 2193637 - RNA, 19 nt, Artificial Sequence
  Description of Artificial Sequence: Synthetic oligonucleotide
  Antisense strand to SEQ ID NO: 2193636
auuauccuuacgaagugca

SEQ ID NO: 2193638 - RNA, 19 nt, Artificial Sequence
  Description of Artificial Sequence: Synthetic oligonucleotide
  Sense strand starting at position 3144 of SEQ ID NO: 1883439
gcacuucguaaggauaaug

SEQ ID NO: 2193639 - RNA, 19 nt, Artificial Sequence
  Description of Artificial Sequence: Synthetic oligonucleotide
  Antisense strand to SEQ ID NO: 2193638
cauuauccuuacgaagugc

SEQ ID NO: 2193640 - RNA, 19 nt, Artificial Sequence
  Description of Artificial Sequence: Synthetic oligonucleotide
  Sense strand starting at position 3149 of SEQ ID NO: 1883439
ucguaaggauaaugaugau

SEQ ID NO: 2193641 - RNA, 19 nt, Artificial Sequence
  Description of Artificial Sequence: Synthetic oligonucleotide
  Antisense strand to SEQ ID NO: 2193640
aucaucauuauccuuacga

SEQ ID NO: 2193642 - RNA, 19 nt, Artificial Sequence
  Description of Artificial Sequence: Synthetic oligonucleotide
  Sense strand starting at position 3445 of SEQ ID NO: 1883439
gacuuaaugugauguucug

SEQ ID NO: 2193643 - RNA, 19 nt, Artificial Sequence
  Description of Artificial Sequence: Synthetic oligonucleotide
  Antisense strand to SEQ ID NO: 2193642
cagaacaucacauuaaguc

SEQ ID NO: 2193644 - RNA, 19 nt, Artificial Sequence
  Description of Artificial Sequence: Synthetic oligonucleotide
  Sense strand starting at position 3451 of SEQ ID NO: 1883439
augugauguucuggagaag

SEQ ID NO: 2193645 - RNA, 19 nt, Artificial Sequence
  Description of Artificial Sequence: Synthetic oligonucleotide
  Antisense strand to SEQ ID NO: 2193644
cuucuccagaacaucacau

SEQ ID NO: 2193646 - RNA, 19 nt, Artificial Sequence
  Description of Artificial Sequence: Synthetic oligonucleotide
  Sense strand starting at position 3505 of SEQ ID NO: 1883439
aagacaaaucgcuguuacu

SEQ ID NO: 2193647 - RNA, 19 nt, Artificial Sequence
  Description of Artificial Sequence: Synthetic oligonucleotide
  Antisense strand to SEQ ID NO: 2193646
aguaacagcgauuugucuu

SEQ ID NO: 2193648 - RNA, 19 nt, Artificial Sequence
  Description of Artificial Sequence: Synthetic oligonucleotide
  Sense strand starting at position 3508 of SEQ ID NO: 1883439
acaaaucgcuguuacuuaa

SEQ ID NO: 2193649 - RNA, 19 nt, Artificial Sequence
  Description of Artificial Sequence: Synthetic oligonucleotide
  Antisense strand to SEQ ID NO: 2193648
uuaaguaacagcgauuugu

SEQ ID NO: 2193650 - RNA, 19 nt, Artificial Sequence
  Description of Artificial Sequence: Synthetic oligonucleotide
  Sense strand starting at position 3512 of SEQ ID NO: 1883439
aucgcuguuacuuaagagu

SEQ ID NO: 2193651 - RNA, 19 nt, Artificial Sequence
  Description of Artificial Sequence: Synthetic oligonucleotide
  Antisense strand to SEQ ID NO: 2193650
acucuuaaguaacagcgau

SEQ ID NO: 2193652 - RNA, 19 nt, Artificial Sequence
  Description of Artificial Sequence: Synthetic oligonucleotide
  Sense strand starting at position 3518 of SEQ ID NO: 1883439
guuacuuaagagugugaca

SEQ ID NO: 2193653 - RNA, 19 nt, Artificial Sequence
  Description of Artificial Sequence: Synthetic oligonucleotide
  Antisense strand to SEQ ID NO: 2193652
ugucacacucuuaaguaac

SEQ ID NO: 2193654 - RNA, 19 nt, Artificial Sequence
  Description of Artificial Sequence: Synthetic oligonucleotide
  Sense strand starting at position 3520 of SEQ ID NO: 1883439
uacuuaagagugugacaua

SEQ ID NO: 2193655 - RNA, 19 nt, Artificial Sequence
  Description of Artificial Sequence: Synthetic oligonucleotide
  Antisense strand to SEQ ID NO: 2193654
uaugucacacucuuaagua

SEQ ID NO: 2193656 - RNA, 19 nt, Artificial Sequence
  Description of Artificial Sequence: Synthetic oligonucleotide
  Sense strand starting at position 3521 of SEQ ID NO: 1883439
acuuaagagugugacauau

SEQ ID NO: 2193657 - RNA, 19 nt, Artificial Sequence
  Description of Artificial Sequence: Synthetic oligonucleotide
  Antisense strand to SEQ ID NO: 2193656
auaugucacacucuuaagu

SEQ ID NO: 2193658 - RNA, 19 nt, Artificial Sequence
  Description of Artificial Sequence: Synthetic oligonucleotide
  Sense strand starting at position 3523 of SEQ ID NO: 1883439
uuaagagugugacauauga

SEQ ID NO: 2193659 - RNA, 19 nt, Artificial Sequence
  Description of Artificial Sequence: Synthetic oligonucleotide
  Antisense strand to SEQ ID NO: 2193658
ucauaugucacacucuuaa

SEQ ID NO: 2193660 - RNA, 19 nt, Artificial Sequence
  Description of Artificial Sequence: Synthetic oligonucleotide
  Sense strand starting at position 3527 of SEQ ID NO: 1883439
gagugugacauaugaucug

SEQ ID NO: 2193661 - RNA, 19 nt, Artificial Sequence
  Description of Artificial Sequence: Synthetic oligonucleotide
  Antisense strand to SEQ ID NO: 2193660
cagaucauaugucacacuc

SEQ ID NO: 2193662 - RNA, 19 nt, Artificial Sequence
  Description of Artificial Sequence: Synthetic oligonucleotide
  Sense strand starting at position 3530 of SEQ ID NO: 1883439
ugugacauaugaucugaaa

SEQ ID NO: 2193663 - RNA, 19 nt, Artificial Sequence
  Description of Artificial Sequence: Synthetic oligonucleotide
  Antisense strand to SEQ ID NO: 2193662
uuucagaucauaugucaca

SEQ ID NO: 2193664 - RNA, 19 nt, Artificial Sequence
  Description of Artificial Sequence: Synthetic oligonucleotide
  Sense strand starting at position 3579 of SEQ ID NO: 1883439
cugccacuaucguauuaag

SEQ ID NO: 2193665 - RNA, 19 nt, Artificial Sequence
  Description of Artificial Sequence: Synthetic oligonucleotide
  Antisense strand to SEQ ID NO: 2193664
cuuaauacgauaguggcag

SEQ ID NO: 2193666 - RNA, 19 nt, Artificial Sequence
  Description of Artificial Sequence: Synthetic oligonucleotide
  Sense strand starting at position 3590 of SEQ ID NO: 1883439
guauuaaggucaugccauu

SEQ ID NO: 2193667 - RNA, 19 nt, Artificial Sequence
  Description of Artificial Sequence: Synthetic oligonucleotide
  Antisense strand to SEQ ID NO: 2193666
aauggcaugaccuuaauac

SEQ ID NO: 2193668 - RNA, 19 nt, Artificial Sequence
  Description of Artificial Sequence: Synthetic oligonucleotide
  Sense strand starting at position 3601 of SEQ ID NO: 1883439
augccauuccugugaagcu

SEQ ID NO: 2193669 - RNA, 19 nt, Artificial Sequence
  Description of Artificial Sequence: Synthetic oligonucleotide
  Antisense strand to SEQ ID NO: 2193668
agcuucacaggaauggcau

SEQ ID NO: 2193670 - RNA, 19 nt, Artificial Sequence
  Description of Artificial Sequence: Synthetic oligonucleotide
  Sense strand starting at position 3739 of SEQ ID NO: 1883439
aagguaucuuucuaaugag

SEQ ID NO: 2193671 - RNA, 19 nt, Artificial Sequence
  Description of Artificial Sequence: Synthetic oligonucleotide
  Antisense strand to SEQ ID NO: 2193670
cucauuagaaagauaccuu

SEQ ID NO: 2193672 - RNA, 19 nt, Artificial Sequence
  Description of Artificial Sequence: Synthetic oligonucleotide
  Sense strand starting at position 3742 of SEQ ID NO: 1883439
guaucuuucuaaugaggag

SEQ ID NO: 2193673 - RNA, 19 nt, Artificial Sequence
  Description of Artificial Sequence: Synthetic oligonucleotide
  Antisense strand to SEQ ID NO: 2193672
cuccucauuagaaagauac

SEQ ID NO: 2193674 - RNA, 19 nt, Artificial Sequence
  Description of Artificial Sequence: Synthetic oligonucleotide
  Sense strand starting at position 3762 of SEQ ID NO: 1883439
agguguugguucugggaag

SEQ ID NO: 2193675 - RNA, 19 nt, Artificial Sequence
  Description of Artificial Sequence: Synthetic oligonucleotide
  Antisense strand to SEQ ID NO: 2193674
cuucccagaaccaacaccu

SEQ ID NO: 2193676 - RNA, 19 nt, Artificial Sequence
  Description of Artificial Sequence: Synthetic oligonucleotide
  Sense strand starting at position 3764 of SEQ ID NO: 1883439
guguugguucugggaagga

SEQ ID NO: 2193677 - RNA, 19 nt, Artificial Sequence
  Description of Artificial Sequence: Synthetic oligonucleotide
  Antisense strand to SEQ ID NO: 2193676
uccuucccagaaccaacac

SEQ ID NO: 2193678 - RNA, 19 nt, Artificial Sequence
  Description of Artificial Sequence: Synthetic oligonucleotide
  Sense strand starting at position 3949 of SEQ ID NO: 1883439
acagcugccauguaaggau

SEQ ID NO: 2193679 - RNA, 19 nt, Artificial Sequence
  Description of Artificial Sequence: Synthetic oligonucleotide
  Antisense strand to SEQ ID NO: 2193678
auccuuacauggcagcugu

SEQ ID NO: 2193680 - RNA, 19 nt, Artificial Sequence
  Description of Artificial Sequence: Synthetic oligonucleotide
  Sense strand starting at position 1 of SEQ ID NO: 1883440
cccaguauuccauaagguc

SEQ ID NO: 2193681 - RNA, 19 nt, Artificial Sequence
  Description of Artificial Sequence: Synthetic oligonucleotide
  Antisense strand to SEQ ID NO: 2193680
gaccuuauggaauacuggg

SEQ ID NO: 2193682 - RNA, 19 nt, Artificial Sequence
  Description of Artificial Sequence: Synthetic oligonucleotide
  Sense strand starting at position 20 of SEQ ID NO: 1883440
ucaguuaucuuugcaccua

SEQ ID NO: 2193683 - RNA, 19 nt, Artificial Sequence
  Description of Artificial Sequence: Synthetic oligonucleotide
  Antisense strand to SEQ ID NO: 2193682
uaggugcaaagauaacuga

SEQ ID NO: 2193684 - RNA, 19 nt, Artificial Sequence
  Description of Artificial Sequence: Synthetic oligonucleotide
  Sense strand starting at position 173 of SEQ ID NO: 1883440
caaggcaguuagcuaauau

SEQ ID NO: 2193685 - RNA, 19 nt, Artificial Sequence
  Description of Artificial Sequence: Synthetic oligonucleotide
  Antisense strand to SEQ ID NO: 2193684
auauuagcuaacugccuug

SEQ ID NO: 2193686 - RNA, 19 nt, Artificial Sequence
  Description of Artificial Sequence: Synthetic oligonucleotide
  Sense strand starting at position 182 of SEQ ID NO: 1883440
uagcuaauauggucuuuga

SEQ ID NO: 2193687 - RNA, 19 nt, Artificial Sequence
  Description of Artificial Sequence: Synthetic oligonucleotide
  Antisense strand to SEQ ID NO: 2193686
ucaaagaccauauuagcua

SEQ ID NO: 2193688 - RNA, 19 nt, Artificial Sequence
  Description of Artificial Sequence: Synthetic oligonucleotide
  Sense strand starting at position 228 of SEQ ID NO: 1883440
auguuaaagccuugaugcu

SEQ ID NO: 2193689 - RNA, 19 nt, Artificial Sequence
  Description of Artificial Sequence: Synthetic oligonucleotide
  Antisense strand to SEQ ID NO: 2193688
agcaucaaggcuuuaacau

SEQ ID NO: 2193690 - RNA, 19 nt, Artificial Sequence
  Description of Artificial Sequence: Synthetic oligonucleotide
  Sense strand starting at position 235 of SEQ ID NO: 1883440
agccuugaugcugaauguu

SEQ ID NO: 2193691 - RNA, 19 nt, Artificial Sequence
  Description of Artificial Sequence: Synthetic oligonucleotide
  Antisense strand to SEQ ID NO: 2193690
aacauucagcaucaaggcu

SEQ ID NO: 2193692 - RNA, 19 nt, Artificial Sequence
  Description of Artificial Sequence: Synthetic oligonucleotide
  Sense strand starting at position 238 of SEQ ID NO: 1883440
cuugaugcugaauguuaaa

SEQ ID NO: 2193693 - RNA, 19 nt, Artificial Sequence
  Description of Artificial Sequence: Synthetic oligonucleotide
  Antisense strand to SEQ ID NO: 2193692
uuuaacauucagcaucaag

SEQ ID NO: 2193694 - RNA, 19 nt, Artificial Sequence
  Description of Artificial Sequence: Synthetic oligonucleotide
  Sense strand starting at position 294 of SEQ ID NO: 1883440
aaugcuucuggaugagaaa

SEQ ID NO: 2193695 - RNA, 19 nt, Artificial Sequence
  Description of Artificial Sequence: Synthetic oligonucleotide
  Antisense strand to SEQ ID NO: 2193694
uuucucauccagaagcauu

SEQ ID NO: 2193696 - RNA, 19 nt, Artificial Sequence
  Description of Artificial Sequence: Synthetic oligonucleotide
  Sense strand starting at position 337 of SEQ ID NO: 1883440
cugagucuauuugcuaauu

SEQ ID NO: 2193697 - RNA, 19 nt, Artificial Sequence
  Description of Artificial Sequence: Synthetic oligonucleotide
  Antisense strand to SEQ ID NO: 2193696
aauuagcaaauagacucag

SEQ ID NO: 2193698 - RNA, 19 nt, Artificial Sequence
  Description of Artificial Sequence: Synthetic oligonucleotide
  Sense strand starting at position 373 of SEQ ID NO: 1883440
auugguuaauucuccagca

SEQ ID NO: 2193699 - RNA, 19 nt, Artificial Sequence
  Description of Artificial Sequence: Synthetic oligonucleotide
  Antisense strand to SEQ ID NO: 2193698
ugcuggagaauuaaccaau

SEQ ID NO: 2193700 - RNA, 19 nt, Artificial Sequence
  Description of Artificial Sequence: Synthetic oligonucleotide
  Sense strand starting at position 374 of SEQ ID NO: 1883440
uugguuaauucuccagcau

SEQ ID NO: 2193701 - RNA, 19 nt, Artificial Sequence
  Description of Artificial Sequence: Synthetic oligonucleotide
  Antisense strand to SEQ ID NO: 2193700
augcuggagaauuaaccaa

SEQ ID NO: 2193702 - RNA, 19 nt, Artificial Sequence
  Description of Artificial Sequence: Synthetic oligonucleotide
  Sense strand starting at position 375 of SEQ ID NO: 1883440
ugguuaauucuccagcaua

SEQ ID NO: 2193703 - RNA, 19 nt, Artificial Sequence
  Description of Artificial Sequence: Synthetic oligonucleotide
  Antisense strand to SEQ ID NO: 2193702
uaugcuggagaauuaacca

SEQ ID NO: 2193704 - RNA, 19 nt, Artificial Sequence
  Description of Artificial Sequence: Synthetic oligonucleotide
  Sense strand starting at position 479 of SEQ ID NO: 1883440
uguacauccuagucaccua

SEQ ID NO: 2193705 - RNA, 19 nt, Artificial Sequence
  Description of Artificial Sequence: Synthetic oligonucleotide
  Antisense strand to SEQ ID NO: 2193704
uaggugacuaggauguaca

SEQ ID NO: 2193706 - RNA, 19 nt, Artificial Sequence
  Description of Artificial Sequence: Synthetic oligonucleotide
  Sense strand starting at position 536 of SEQ ID NO: 1883440
uagagugaggccugacguu

SEQ ID NO: 2193707 - RNA, 19 nt, Artificial Sequence
  Description of Artificial Sequence: Synthetic oligonucleotide
  Antisense strand to SEQ ID NO: 2193706
aacgucaggccucacucua

SEQ ID NO: 2193708 - RNA, 19 nt, Artificial Sequence
  Description of Artificial Sequence: Synthetic oligonucleotide
  Sense strand starting at position 618 of SEQ ID NO: 1883440
guaucaagagcuuggacga

SEQ ID NO: 2193709 - RNA, 19 nt, Artificial Sequence
  Description of Artificial Sequence: Synthetic oligonucleotide
  Antisense strand to SEQ ID NO: 2193708
ucguccaagcucuugauac

SEQ ID NO: 2193710 - RNA, 19 nt, Artificial Sequence
  Description of Artificial Sequence: Synthetic oligonucleotide
  Sense strand starting at position 671 of SEQ ID NO: 1883440
gaguuaagauaucucuugu

SEQ ID NO: 2193711 - RNA, 19 nt, Artificial Sequence
  Description of Artificial Sequence: Synthetic oligonucleotide
  Antisense strand to SEQ ID NO: 2193710
acaagagauaucuuaacuc

SEQ ID NO: 2193712 - RNA, 19 nt, Artificial Sequence
  Description of Artificial Sequence: Synthetic oligonucleotide
  Sense strand starting at position 677 of SEQ ID NO: 1883440
agauaucucuuguucuuau

SEQ ID NO: 2193713 - RNA, 19 nt, Artificial Sequence
  Description of Artificial Sequence: Synthetic oligonucleotide
  Antisense strand to SEQ ID NO: 2193712
auaagaacaagagauaucu

SEQ ID NO: 2193714 - RNA, 19 nt, Artificial Sequence
  Description of Artificial Sequence: Synthetic oligonucleotide
  Sense strand starting at position 823 of SEQ ID NO: 1883440
gaguucuuaccauguagca

SEQ ID NO: 2193715 - RNA, 19 nt, Artificial Sequence
  Description of Artificial Sequence: Synthetic oligonucleotide
  Antisense strand to SEQ ID NO: 2193714
ugcuacaugguaagaacuc

SEQ ID NO: 2193716 - RNA, 19 nt, Artificial Sequence
  Description of Artificial Sequence: Synthetic oligonucleotide
  Sense strand starting at position 825 of SEQ ID NO: 1883440
guucuuaccauguagcagu

SEQ ID NO: 2193717 - RNA, 19 nt, Artificial Sequence
  Description of Artificial Sequence: Synthetic oligonucleotide
  Antisense strand to SEQ ID NO: 2193716
acugcuacaugguaagaac

SEQ ID NO: 2193718 - RNA, 19 nt, Artificial Sequence
  Description of Artificial Sequence: Synthetic oligonucleotide
  Sense strand starting at position 901 of SEQ ID NO: 1883440
aaguaauggugaccugaua

SEQ ID NO: 2193719 - RNA, 19 nt, Artificial Sequence
  Description of Artificial Sequence: Synthetic oligonucleotide
  Antisense strand to SEQ ID NO: 2193718
uaucaggucaccauuacuu

SEQ ID NO: 2193720 - RNA, 19 nt, Artificial Sequence
  Description of Artificial Sequence: Synthetic oligonucleotide
  Sense strand starting at position 930 of SEQ ID NO: 1883440
ggccguuugacucauacuu

SEQ ID NO: 2193721 - RNA, 19 nt, Artificial Sequence
  Description of Artificial Sequence: Synthetic oligonucleotide
  Antisense strand to SEQ ID NO: 2193720
aaguaugagucaaacggcc

SEQ ID NO: 2193722 - RNA, 19 nt, Artificial Sequence
  Description of Artificial Sequence: Synthetic oligonucleotide
  Sense strand starting at position 967 of SEQ ID NO: 1883440
ccucccagagccuaugaaa

SEQ ID NO: 2193723 - RNA, 19 nt, Artificial Sequence
  Description of Artificial Sequence: Synthetic oligonucleotide
  Antisense strand to SEQ ID NO: 2193722
uuucauaggcucugggagg

SEQ ID NO: 2193724 - RNA, 19 nt, Artificial Sequence
  Description of Artificial Sequence: Synthetic oligonucleotide
  Sense strand starting at position 1053 of SEQ ID NO: 1883440
ccucccuuggacgauauua

SEQ ID NO: 2193725 - RNA, 19 nt, Artificial Sequence
  Description of Artificial Sequence: Synthetic oligonucleotide
  Antisense strand to SEQ ID NO: 2193724
uaauaucguccaagggagg

SEQ ID NO: 2193726 - RNA, 19 nt, Artificial Sequence
  Description of Artificial Sequence: Synthetic oligonucleotide
  Sense strand starting at position 1055 of SEQ ID NO: 1883440
ucccuuggacgauauuaac

SEQ ID NO: 2193727 - RNA, 19 nt, Artificial Sequence
  Description of Artificial Sequence: Synthetic oligonucleotide
  Antisense strand to SEQ ID NO: 2193726
guuaauaucguccaaggga

SEQ ID NO: 2193728 - RNA, 19 nt, Artificial Sequence
  Description of Artificial Sequence: Synthetic oligonucleotide
  Sense strand starting at position 1225 of SEQ ID NO: 1883440
agcacuguacuagauuaau

SEQ ID NO: 2193729 - RNA, 19 nt, Artificial Sequence
  Description of Artificial Sequence: Synthetic oligonucleotide
  Antisense strand to SEQ ID NO: 2193728
auuaaucuaguacagugcu

SEQ ID NO: 2193730 - RNA, 19 nt, Artificial Sequence
  Description of Artificial Sequence: Synthetic oligonucleotide
  Sense strand starting at position 1231 of SEQ ID NO: 1883440
guacuagauuaauugaacu

SEQ ID NO: 2193731 - RNA, 19 nt, Artificial Sequence
  Description of Artificial Sequence: Synthetic oligonucleotide
  Antisense strand to SEQ ID NO: 2193730
aguucaauuaaucuaguac

SEQ ID NO: 2193732 - RNA, 19 nt, Artificial Sequence
  Description of Artificial Sequence: Synthetic oligonucleotide
  Sense strand starting at position 1255 of SEQ ID NO: 1883440
agguucuguaacugcagaa

SEQ ID NO: 2193733 - RNA, 19 nt, Artificial Sequence
  Description of Artificial Sequence: Synthetic oligonucleotide
  Antisense strand to SEQ ID NO: 2193732
uucugcaguuacagaaccu

SEQ ID NO: 2193734 - RNA, 19 nt, Artificial Sequence
  Description of Artificial Sequence: Synthetic oligonucleotide
  Sense strand starting at position 1392 of SEQ ID NO: 1883440
cuauguguaucuuugggau

SEQ ID NO: 2193735 - RNA, 19 nt, Artificial Sequence
  Description of Artificial Sequence: Synthetic oligonucleotide
  Antisense strand to SEQ ID NO: 2193734
aucccaaagauacacauag

SEQ ID NO: 2193736 - RNA, 19 nt, Artificial Sequence
  Description of Artificial Sequence: Synthetic oligonucleotide
  Sense strand starting at position 1398 of SEQ ID NO: 1883440
guaucuuugggauguuauc

SEQ ID NO: 2193737 - RNA, 19 nt, Artificial Sequence
  Description of Artificial Sequence: Synthetic oligonucleotide
  Antisense strand to SEQ ID NO: 2193736
gauaacaucccaaagauac

SEQ ID NO: 2193738 - RNA, 19 nt, Artificial Sequence
  Description of Artificial Sequence: Synthetic oligonucleotide
  Sense strand starting at position 1452 of SEQ ID NO: 1883440
cuaugacuccagugaaacu

SEQ ID NO: 2193739 - RNA, 19 nt, Artificial Sequence
  Description of Artificial Sequence: Synthetic oligonucleotide
  Antisense strand to SEQ ID NO: 2193738
aguuucacuggagucauag

SEQ ID NO: 2193740 - RNA, 19 nt, Artificial Sequence
  Description of Artificial Sequence: Synthetic oligonucleotide
  Sense strand starting at position 1475 of SEQ ID NO: 1883440
ggcccuaagaagggugauu

SEQ ID NO: 2193741 - RNA, 19 nt, Artificial Sequence
  Description of Artificial Sequence: Synthetic oligonucleotide
  Antisense strand to SEQ ID NO: 2193740
aaucacccuucuuagggcc

SEQ ID NO: 2193742 - RNA, 19 nt, Artificial Sequence
  Description of Artificial Sequence: Synthetic oligonucleotide
  Sense strand starting at position 1477 of SEQ ID NO: 1883440
cccuaagaagggugauugu

SEQ ID NO: 2193743 - RNA, 19 nt, Artificial Sequence
  Description of Artificial Sequence: Synthetic oligonucleotide
  Antisense strand to SEQ ID NO: 2193742
acaaucacccuucuuaggg

SEQ ID NO: 2193744 - RNA, 19 nt, Artificial Sequence
  Description of Artificial Sequence: Synthetic oligonucleotide
  Sense strand starting at position 1480 of SEQ ID NO: 1883440
uaagaagggugauugucua

SEQ ID NO: 2193745 - RNA, 19 nt, Artificial Sequence
  Description of Artificial Sequence: Synthetic oligonucleotide
  Antisense strand to SEQ ID NO: 2193744
uagacaaucacccuucuua

SEQ ID NO: 2193746 - RNA, 19 nt, Artificial Sequence
  Description of Artificial Sequence: Synthetic oligonucleotide
  Sense strand starting at position 1484 of SEQ ID NO: 1883440
aagggugauugucuaaaca

SEQ ID NO: 2193747 - RNA, 19 nt, Artificial Sequence
  Description of Artificial Sequence: Synthetic oligonucleotide
  Antisense strand to SEQ ID NO: 2193746
uguuuagacaaucacccuu

SEQ ID NO: 2193748 - RNA, 19 nt, Artificial Sequence
  Description of Artificial Sequence: Synthetic oligonucleotide
  Sense strand starting at position 1847 of SEQ ID NO: 1883440
ugggaaucguagucccaau

SEQ ID NO: 2193749 - RNA, 19 nt, Artificial Sequence
  Description of Artificial Sequence: Synthetic oligonucleotide
  Antisense strand to SEQ ID NO: 2193748
auugggacuacgauuccca

SEQ ID NO: 2193750 - RNA, 19 nt, Artificial Sequence
  Description of Artificial Sequence: Synthetic oligonucleotide
  Sense strand starting at position 1859 of SEQ ID NO: 1883440
ucccaauccugcucuggaa

SEQ ID NO: 2193751 - RNA, 19 nt, Artificial Sequence
  Description of Artificial Sequence: Synthetic oligonucleotide
  Antisense strand to SEQ ID NO: 2193750
uuccagagcaggauuggga

SEQ ID NO: 2193752 - RNA, 19 nt, Artificial Sequence
  Description of Artificial Sequence: Synthetic oligonucleotide
  Sense strand starting at position 3759 of SEQ ID NO: 1883440
uucugacuacuggguagaa

SEQ ID NO: 2193753 - RNA, 19 nt, Artificial Sequence
  Description of Artificial Sequence: Synthetic oligonucleotide
  Antisense strand to SEQ ID NO: 2193752
uucuacccaguagucagaa

SEQ ID NO: 2193754 - RNA, 19 nt, Artificial Sequence
  Description of Artificial Sequence: Synthetic oligonucleotide
  Sense strand starting at position 3760 of SEQ ID NO: 1883440
ucugacuacuggguagaaa

SEQ ID NO: 2193755 - RNA, 19 nt, Artificial Sequence
  Description of Artificial Sequence: Synthetic oligonucleotide
  Antisense strand to SEQ ID NO: 2193754
uuucuacccaguagucaga

SEQ ID NO: 2193756 - RNA, 19 nt, Artificial Sequence
  Description of Artificial Sequence: Synthetic oligonucleotide
  Sense strand starting at position 3768 of SEQ ID NO: 1883440
cuggguagaaauuguacuu

SEQ ID NO: 2193757 - RNA, 19 nt, Artificial Sequence
  Description of Artificial Sequence: Synthetic oligonucleotide
  Antisense strand to SEQ ID NO: 2193756
aaguacaauuucuacccag

SEQ ID NO: 2193758 - RNA, 19 nt, Artificial Sequence
  Description of Artificial Sequence: Synthetic oligonucleotide
  Sense strand starting at position 3864 of SEQ ID NO: 1883440
ggcucacuccuguagaguc

SEQ ID NO: 2193759 - RNA, 19 nt, Artificial Sequence
  Description of Artificial Sequence: Synthetic oligonucleotide
  Antisense strand to SEQ ID NO: 2193758
gacucuacaggagugagcc

SEQ ID NO: 2193760 - RNA, 19 nt, Artificial Sequence
  Description of Artificial Sequence: Synthetic oligonucleotide
  Sense strand starting at position 249 of SEQ ID NO: 1883441
gagagaucauaaucagugu

SEQ ID NO: 2193761 - RNA, 19 nt, Artificial Sequence
  Description of Artificial Sequence: Synthetic oligonucleotide
  Antisense strand to SEQ ID NO: 2193760
acacugauuaugaucucuc

SEQ ID NO: 2193762 - RNA, 19 nt, Artificial Sequence
  Description of Artificial Sequence: Synthetic oligonucleotide
  Sense strand starting at position 258 of SEQ ID NO: 1883441
uaaucagugucaccugaug

SEQ ID NO: 2193763 - RNA, 19 nt, Artificial Sequence
  Description of Artificial Sequence: Synthetic oligonucleotide
  Antisense strand to SEQ ID NO: 2193762
caucaggugacacugauua

SEQ ID NO: 2193764 - RNA, 19 nt, Artificial Sequence
  Description of Artificial Sequence: Synthetic oligonucleotide
  Sense strand starting at position 267 of SEQ ID NO: 1883441
ucaccugaugggugacaua

SEQ ID NO: 2193765 - RNA, 19 nt, Artificial Sequence
  Description of Artificial Sequence: Synthetic oligonucleotide
  Antisense strand to SEQ ID NO: 2193764
uaugucacccaucagguga

SEQ ID NO: 2193766 - RNA, 19 nt, Artificial Sequence
  Description of Artificial Sequence: Synthetic oligonucleotide
  Sense strand starting at position 372 of SEQ ID NO: 1883441
aucugaagucuugacuauc

SEQ ID NO: 2193767 - RNA, 19 nt, Artificial Sequence
  Description of Artificial Sequence: Synthetic oligonucleotide
  Antisense strand to SEQ ID NO: 2193766
gauagucaagacuucagau

SEQ ID NO: 2193768 - RNA, 19 nt, Artificial Sequence
  Description of Artificial Sequence: Synthetic oligonucleotide
  Sense strand starting at position 638 of SEQ ID NO: 1883441
gguuguuaagacagucguu

SEQ ID NO: 2193769 - RNA, 19 nt, Artificial Sequence
  Description of Artificial Sequence: Synthetic oligonucleotide
  Antisense strand to SEQ ID NO: 2193768
aacgacugucuuaacaacc

SEQ ID NO: 2193770 - RNA, 19 nt, Artificial Sequence
  Description of Artificial Sequence: Synthetic oligonucleotide
  Sense strand starting at position 643 of SEQ ID NO: 1883441
uuaagacagucguuauaag

SEQ ID NO: 2193771 - RNA, 19 nt, Artificial Sequence
  Description of Artificial Sequence: Synthetic oligonucleotide
  Antisense strand to SEQ ID NO: 2193770
cuuauaacgacugucuuaa

SEQ ID NO: 2193772 - RNA, 19 nt, Artificial Sequence
  Description of Artificial Sequence: Synthetic oligonucleotide
  Sense strand starting at position 1001 of SEQ ID NO: 1883441
aaggaaguuuguguuccaa

SEQ ID NO: 2193773 - RNA, 19 nt, Artificial Sequence
  Description of Artificial Sequence: Synthetic oligonucleotide
  Antisense strand to SEQ ID NO: 2193772
uuggaacacaaacuuccuu

SEQ ID NO: 2193774 - RNA, 19 nt, Artificial Sequence
  Description of Artificial Sequence: Synthetic oligonucleotide
  Sense strand starting at position 1003 of SEQ ID NO: 1883441
ggaaguuuguguuccaagg

SEQ ID NO: 2193775 - RNA, 19 nt, Artificial Sequence
  Description of Artificial Sequence: Synthetic oligonucleotide
  Antisense strand to SEQ ID NO: 2193774
ccuuggaacacaaacuucc

SEQ ID NO: 2193776 - RNA, 19 nt, Artificial Sequence
  Description of Artificial Sequence: Synthetic oligonucleotide
  Sense strand starting at position 1897 of SEQ ID NO: 1883441
ucucgcuuucgccuaaaua

SEQ ID NO: 2193777 - RNA, 19 nt, Artificial Sequence
  Description of Artificial Sequence: Synthetic oligonucleotide
  Antisense strand to SEQ ID NO: 2193776
uauuuaggcgaaagcgaga

SEQ ID NO: 2193778 - RNA, 19 nt, Artificial Sequence
  Description of Artificial Sequence: Synthetic oligonucleotide
  Sense strand starting at position 2260 of SEQ ID NO: 1883441
agaguagggacccgugauu

SEQ ID NO: 2193779 - RNA, 19 nt, Artificial Sequence
  Description of Artificial Sequence: Synthetic oligonucleotide
  Antisense strand to SEQ ID NO: 2193778
aaucacgggucccuacucu

SEQ ID NO: 2193780 - RNA, 19 nt, Artificial Sequence
  Description of Artificial Sequence: Synthetic oligonucleotide
  Sense strand starting at position 2526 of SEQ ID NO: 1883441
cccugagauguauggguuu

SEQ ID NO: 2193781 - RNA, 19 nt, Artificial Sequence
  Description of Artificial Sequence: Synthetic oligonucleotide
  Antisense strand to SEQ ID NO: 2193780
aaacccauacaucucaggg

SEQ ID NO: 2193782 - RNA, 19 nt, Artificial Sequence
  Description of Artificial Sequence: Synthetic oligonucleotide
  Sense strand starting at position 2550 of SEQ ID NO: 1883441
gggaauuccgacgguugau

SEQ ID NO: 2193783 - RNA, 19 nt, Artificial Sequence
  Description of Artificial Sequence: Synthetic oligonucleotide
  Antisense strand to SEQ ID NO: 2193782
aucaaccgucggaauuccc

SEQ ID NO: 2193784 - RNA, 19 nt, Artificial Sequence
  Description of Artificial Sequence: Synthetic oligonucleotide
  Sense strand starting at position 2569 of SEQ ID NO: 1883441
acaguugucuuauccuaca

SEQ ID NO: 2193785 - RNA, 19 nt, Artificial Sequence
  Description of Artificial Sequence: Synthetic oligonucleotide
  Antisense strand to SEQ ID NO: 2193784
uguaggauaagacaacugu

SEQ ID NO: 2193786 - RNA, 19 nt, Artificial Sequence
  Description of Artificial Sequence: Synthetic oligonucleotide
  Sense strand starting at position 2791 of SEQ ID NO: 1883441
ugugauagggccuaauaau

SEQ ID NO: 2193787 - RNA, 19 nt, Artificial Sequence
  Description of Artificial Sequence: Synthetic oligonucleotide
  Antisense strand to SEQ ID NO: 2193786
auuauuaggcccuaucaca

SEQ ID NO: 2193788 - RNA, 19 nt, Artificial Sequence
  Description of Artificial Sequence: Synthetic oligonucleotide
  Sense strand starting at position 2808 of SEQ ID NO: 1883441
auuaacagugccugagaau

SEQ ID NO: 2193789 - RNA, 19 nt, Artificial Sequence
  Description of Artificial Sequence: Synthetic oligonucleotide
  Antisense strand to SEQ ID NO: 2193788
auucucaggcacuguuaau

SEQ ID NO: 2193790 - RNA, 19 nt, Artificial Sequence
  Description of Artificial Sequence: Synthetic oligonucleotide
  Sense strand starting at position 2809 of SEQ ID NO: 1883441
uuaacagugccugagaauc

SEQ ID NO: 2193791 - RNA, 19 nt, Artificial Sequence
  Description of Artificial Sequence: Synthetic oligonucleotide
  Antisense strand to SEQ ID NO: 2193790
gauucucaggcacuguuaa

SEQ ID NO: 2193792 - RNA, 19 nt, Artificial Sequence
  Description of Artificial Sequence: Synthetic oligonucleotide
  Sense strand starting at position 2873 of SEQ ID NO: 1883441
ggaugcuauaagcagacau

SEQ ID NO: 2193793 - RNA, 19 nt, Artificial Sequence
  Description of Artificial Sequence: Synthetic oligonucleotide
  Antisense strand to SEQ ID NO: 2193792
augucugcuuauagcaucc

SEQ ID NO: 2193794 - RNA, 19 nt, Artificial Sequence
  Description of Artificial Sequence: Synthetic oligonucleotide
  Sense strand starting at position 2875 of SEQ ID NO: 1883441
augcuauaagcagacauga

SEQ ID NO: 2193795 - RNA, 19 nt, Artificial Sequence
  Description of Artificial Sequence: Synthetic oligonucleotide
  Antisense strand to SEQ ID NO: 2193794
ucaugucugcuuauagcau

SEQ ID NO: 2193796 - RNA, 19 nt, Artificial Sequence
  Description of Artificial Sequence: Synthetic oligonucleotide
  Sense strand starting at position 2896 of SEQ ID NO: 1883441
augggaaucacguggauag

SEQ ID NO: 2193797 - RNA, 19 nt, Artificial Sequence
  Description of Artificial Sequence: Synthetic oligonucleotide
  Antisense strand to SEQ ID NO: 2193796
cuauccacgugauucccau

SEQ ID NO: 2193798 - RNA, 19 nt, Artificial Sequence
  Description of Artificial Sequence: Synthetic oligonucleotide
  Sense strand starting at position 2900 of SEQ ID NO: 1883441
gaaucacguggauagcaau

SEQ ID NO: 2193799 - RNA, 19 nt, Artificial Sequence
  Description of Artificial Sequence: Synthetic oligonucleotide
  Antisense strand to SEQ ID NO: 2193798
auugcuauccacgugauuc

SEQ ID NO: 2193800 - RNA, 19 nt, Artificial Sequence
  Description of Artificial Sequence: Synthetic oligonucleotide
  Sense strand starting at position 2906 of SEQ ID NO: 1883441
cguggauagcaauacaauu

SEQ ID NO: 2193801 - RNA, 19 nt, Artificial Sequence
  Description of Artificial Sequence: Synthetic oligonucleotide
  Antisense strand to SEQ ID NO: 2193800
aauuguauugcuauccacg

SEQ ID NO: 2193802 - RNA, 19 nt, Artificial Sequence
  Description of Artificial Sequence: Synthetic oligonucleotide
  Sense strand starting at position 3005 of SEQ ID NO: 1883441
agggaauagccucgggaau

SEQ ID NO: 2193803 - RNA, 19 nt, Artificial Sequence
  Description of Artificial Sequence: Synthetic oligonucleotide
  Antisense strand to SEQ ID NO: 2193802
auucccgaggcuauucccu

SEQ ID NO: 2193804 - RNA, 19 nt, Artificial Sequence
  Description of Artificial Sequence: Synthetic oligonucleotide
  Sense strand starting at position 3006 of SEQ ID NO: 1883441
gggaauagccucgggaaua

SEQ ID NO: 2193805 - RNA, 19 nt, Artificial Sequence
  Description of Artificial Sequence: Synthetic oligonucleotide
  Antisense strand to SEQ ID NO: 2193804
uauucccgaggcuauuccc

SEQ ID NO: 2193806 - RNA, 19 nt, Artificial Sequence
  Description of Artificial Sequence: Synthetic oligonucleotide
  Sense strand starting at position 3017 of SEQ ID NO: 1883441
cgggaauaaaucuggcuca

SEQ ID NO: 2193807 - RNA, 19 nt, Artificial Sequence
  Description of Artificial Sequence: Synthetic oligonucleotide
  Antisense strand to SEQ ID NO: 2193806
ugagccagauuuauucccg

SEQ ID NO: 2193808 - RNA, 19 nt, Artificial Sequence
  Description of Artificial Sequence: Synthetic oligonucleotide
  Sense strand starting at position 3033 of SEQ ID NO: 1883441
ucaagacuggauugacuuu

SEQ ID NO: 2193809 - RNA, 19 nt, Artificial Sequence
  Description of Artificial Sequence: Synthetic oligonucleotide
  Antisense strand to SEQ ID NO: 2193808
aaagucaauccagucuuga

SEQ ID NO: 2193810 - RNA, 19 nt, Artificial Sequence
  Description of Artificial Sequence: Synthetic oligonucleotide
  Sense strand starting at position 3144 of SEQ ID NO: 1883441
aucggauucuucccaugau

SEQ ID NO: 2193811 - RNA, 19 nt, Artificial Sequence
  Description of Artificial Sequence: Synthetic oligonucleotide
  Antisense strand to SEQ ID NO: 2193810
aucaugggaagaauccgau

SEQ ID NO: 2193812 - RNA, 19 nt, Artificial Sequence
  Description of Artificial Sequence: Synthetic oligonucleotide
  Sense strand starting at position 3184 of SEQ ID NO: 1883441
ugucuuggucaucagcaaa

SEQ ID NO: 2193813 - RNA, 19 nt, Artificial Sequence
  Description of Artificial Sequence: Synthetic oligonucleotide
  Antisense strand to SEQ ID NO: 2193812
uuugcugaugaccaagaca

SEQ ID NO: 2193814 - RNA, 19 nt, Artificial Sequence
  Description of Artificial Sequence: Synthetic oligonucleotide
  Sense strand starting at position 3375 of SEQ ID NO: 1883441
cuuuaauucugaguccaug

SEQ ID NO: 2193815 - RNA, 19 nt, Artificial Sequence
  Description of Artificial Sequence: Synthetic oligonucleotide
  Antisense strand to SEQ ID NO: 2193814
cauggacucagaauuaaag

SEQ ID NO: 2193816 - RNA, 19 nt, Artificial Sequence
  Description of Artificial Sequence: Synthetic oligonucleotide
  Sense strand starting at position 3390 of SEQ ID NO: 1883441
cauggagcuguguacaagu

SEQ ID NO: 2193817 - RNA, 19 nt, Artificial Sequence
  Description of Artificial Sequence: Synthetic oligonucleotide
  Antisense strand to SEQ ID NO: 2193816
acuuguacacagcuccaug

SEQ ID NO: 2193818 - RNA, 19 nt, Artificial Sequence
  Description of Artificial Sequence: Synthetic oligonucleotide
  Sense strand starting at position 3458 of SEQ ID NO: 1883441
agacauaauuuccauggga

SEQ ID NO: 2193819 - RNA, 19 nt, Artificial Sequence
  Description of Artificial Sequence: Synthetic oligonucleotide
  Antisense strand to SEQ ID NO: 2193818
ucccauggaaauuaugucu

SEQ ID NO: 2193820 - RNA, 19 nt, Artificial Sequence
  Description of Artificial Sequence: Synthetic oligonucleotide
  Sense strand starting at position 3528 of SEQ ID NO: 1883441
aacugaaauccaggugcuu

SEQ ID NO: 2193821 - RNA, 19 nt, Artificial Sequence
  Description of Artificial Sequence: Synthetic oligonucleotide
  Antisense strand to SEQ ID NO: 2193820
aagcaccuggauuucaguu

SEQ ID NO: 2193822 - RNA, 19 nt, Artificial Sequence
  Description of Artificial Sequence: Synthetic oligonucleotide
  Sense strand starting at position 3732 of SEQ ID NO: 1883441
gguagaggcacucagguuu

SEQ ID NO: 2193823 - RNA, 19 nt, Artificial Sequence
  Description of Artificial Sequence: Synthetic oligonucleotide
  Antisense strand to SEQ ID NO: 2193822
aaaccugagugccucuacc

SEQ ID NO: 2193824 - RNA, 19 nt, Artificial Sequence
  Description of Artificial Sequence: Synthetic oligonucleotide
  Sense strand starting at position 3773 of SEQ ID NO: 1883441
gucuucauugagggugaaa

SEQ ID NO: 2193825 - RNA, 19 nt, Artificial Sequence
  Description of Artificial Sequence: Synthetic oligonucleotide
  Antisense strand to SEQ ID NO: 2193824
uuucacccucaaugaagac

SEQ ID NO: 2193826 - RNA, 19 nt, Artificial Sequence
  Description of Artificial Sequence: Synthetic oligonucleotide
  Sense strand starting at position 3814 of SEQ ID NO: 1883441
uuuaaauaucugggugaua

SEQ ID NO: 2193827 - RNA, 19 nt, Artificial Sequence
  Description of Artificial Sequence: Synthetic oligonucleotide
  Antisense strand to SEQ ID NO: 2193826
uaucacccagauauuuaaa

SEQ ID NO: 2193828 - RNA, 19 nt, Artificial Sequence
  Description of Artificial Sequence: Synthetic oligonucleotide
  Sense strand starting at position 3816 of SEQ ID NO: 1883441
uaaauaucugggugauaua

SEQ ID NO: 2193829 - RNA, 19 nt, Artificial Sequence
  Description of Artificial Sequence: Synthetic oligonucleotide
  Antisense strand to SEQ ID NO: 2193828
uauaucacccagauauuua

SEQ ID NO: 2193830 - RNA, 19 nt, Artificial Sequence
  Description of Artificial Sequence: Synthetic oligonucleotide
  Sense strand starting at position 3848 of SEQ ID NO: 1883441
cauugaaaucugugguuaa

SEQ ID NO: 2193831 - RNA, 19 nt, Artificial Sequence
  Description of Artificial Sequence: Synthetic oligonucleotide
  Antisense strand to SEQ ID NO: 2193830
uuaaccacagauuucaaug

SEQ ID NO: 2193832 - RNA, 19 nt, Artificial Sequence
  Description of Artificial Sequence: Synthetic oligonucleotide
  Sense strand starting at position 3904 of SEQ ID NO: 1883441
cccagugaugugcauucua

SEQ ID NO: 2193833 - RNA, 19 nt, Artificial Sequence
  Description of Artificial Sequence: Synthetic oligonucleotide
  Antisense strand to SEQ ID NO: 2193832
uagaaugcacaucacuggg

SEQ ID NO: 2193834 - RNA, 19 nt, Artificial Sequence
  Description of Artificial Sequence: Synthetic oligonucleotide
  Sense strand starting at position 3951 of SEQ ID NO: 1883441
augugaaggagauguuagu

SEQ ID NO: 2193835 - RNA, 19 nt, Artificial Sequence
  Description of Artificial Sequence: Synthetic oligonucleotide
  Antisense strand to SEQ ID NO: 2193834
acuaacaucuccuucacau

SEQ ID NO: 2193836 - RNA, 19 nt, Artificial Sequence
  Description of Artificial Sequence: Synthetic oligonucleotide
  Sense strand starting at position 3957 of SEQ ID NO: 1883441
aggagauguuaguuucuac

SEQ ID NO: 2193837 - RNA, 19 nt, Artificial Sequence
  Description of Artificial Sequence: Synthetic oligonucleotide
  Antisense strand to SEQ ID NO: 2193836
guagaaacuaacaucuccu

SEQ ID NO: 2193838 - RNA, 19 nt, Artificial Sequence
  Description of Artificial Sequence: Synthetic oligonucleotide
  Sense strand starting at position 3960 of SEQ ID NO: 1883441
agauguuaguuucuaccau

SEQ ID NO: 2193839 - RNA, 19 nt, Artificial Sequence
  Description of Artificial Sequence: Synthetic oligonucleotide
  Antisense strand to SEQ ID NO: 2193838
augguagaaacuaacaucu

SEQ ID NO: 2193840 - RNA, 19 nt, Artificial Sequence
  Description of Artificial Sequence: Synthetic oligonucleotide
  Sense strand starting at position 100 of SEQ ID NO: 1883442
cgugauucccauuaucaug

SEQ ID NO: 2193841 - RNA, 19 nt, Artificial Sequence
  Description of Artificial Sequence: Synthetic oligonucleotide
  Antisense strand to SEQ ID NO: 2193840
caugauaaugggaaucacg

SEQ ID NO: 2193842 - RNA, 19 nt, Artificial Sequence
  Description of Artificial Sequence: Synthetic oligonucleotide
  Sense strand starting at position 181 of SEQ ID NO: 1883442
auucucaggcacuguuaau

SEQ ID NO: 2193843 - RNA, 19 nt, Artificial Sequence
  Description of Artificial Sequence: Synthetic oligonucleotide
  Antisense strand to SEQ ID NO: 2193842
auuaacagugccugagaau

SEQ ID NO: 2193844 - RNA, 19 nt, Artificial Sequence
  Description of Artificial Sequence: Synthetic oligonucleotide
  Sense strand starting at position 230 of SEQ ID NO: 1883442
cuccaagucuaggcaaauu

SEQ ID NO: 2193845 - RNA, 19 nt, Artificial Sequence
  Description of Artificial Sequence: Synthetic oligonucleotide
  Antisense strand to SEQ ID NO: 2193844
aauuugccuagacuuggag

SEQ ID NO: 2193846 - RNA, 19 nt, Artificial Sequence
  Description of Artificial Sequence: Synthetic oligonucleotide
  Sense strand starting at position 1075 of SEQ ID NO: 1883442
agcagauaagcgcagaaua

SEQ ID NO: 2193847 - RNA, 19 nt, Artificial Sequence
  Description of Artificial Sequence: Synthetic oligonucleotide
  Antisense strand to SEQ ID NO: 2193846
uauucugcgcuuaucugcu

SEQ ID NO: 2193848 - RNA, 19 nt, Artificial Sequence
  Description of Artificial Sequence: Synthetic oligonucleotide
  Sense strand starting at position 1077 of SEQ ID NO: 1883442
cagauaagcgcagaauauu

SEQ ID NO: 2193849 - RNA, 19 nt, Artificial Sequence
  Description of Artificial Sequence: Synthetic oligonucleotide
  Antisense strand to SEQ ID NO: 2193848
aauauucugcgcuuaucug

SEQ ID NO: 2193850 - RNA, 19 nt, Artificial Sequence
  Description of Artificial Sequence: Synthetic oligonucleotide
  Sense strand starting at position 1132 of SEQ ID NO: 1883442
ggaggaguaccucggccaa

SEQ ID NO: 2193851 - RNA, 19 nt, Artificial Sequence
  Description of Artificial Sequence: Synthetic oligonucleotide
  Antisense strand to SEQ ID NO: 2193850
uuggccgagguacuccucc

SEQ ID NO: 2193852 - RNA, 19 nt, Artificial Sequence
  Description of Artificial Sequence: Synthetic oligonucleotide
  Sense strand starting at position 1134 of SEQ ID NO: 1883442
aggaguaccucggccaaga

SEQ ID NO: 2193853 - RNA, 19 nt, Artificial Sequence
  Description of Artificial Sequence: Synthetic oligonucleotide
  Antisense strand to SEQ ID NO: 2193852
ucuuggccgagguacuccu

SEQ ID NO: 2193854 - RNA, 19 nt, Artificial Sequence
  Description of Artificial Sequence: Synthetic oligonucleotide
  Sense strand starting at position 1136 of SEQ ID NO: 1883442
gaguaccucggccaagaaa

SEQ ID NO: 2193855 - RNA, 19 nt, Artificial Sequence
  Description of Artificial Sequence: Synthetic oligonucleotide
  Antisense strand to SEQ ID NO: 2193854
uuucuuggccgagguacuc

SEQ ID NO: 2193856 - RNA, 19 nt, Artificial Sequence
  Description of Artificial Sequence: Synthetic oligonucleotide
  Sense strand starting at position 1156 of SEQ ID NO: 1883442
uuaugcaugcguuagggaa

SEQ ID NO: 2193857 - RNA, 19 nt, Artificial Sequence
  Description of Artificial Sequence: Synthetic oligonucleotide
  Antisense strand to SEQ ID NO: 2193856
uucccuaacgcaugcauaa

SEQ ID NO: 2193858 - RNA, 19 nt, Artificial Sequence
  Description of Artificial Sequence: Synthetic oligonucleotide
  Sense strand starting at position 1455 of SEQ ID NO: 1883442
gcgaaacgauauccuggaa

SEQ ID NO: 2193859 - RNA, 19 nt, Artificial Sequence
  Description of Artificial Sequence: Synthetic oligonucleotide
  Antisense strand to SEQ ID NO: 2193858
uuccaggauaucguuucgc

SEQ ID NO: 2193860 - RNA, 19 nt, Artificial Sequence
  Description of Artificial Sequence: Synthetic oligonucleotide
  Sense strand starting at position 1632 of SEQ ID NO: 1883442
ggaagcuuggacugggauu

SEQ ID NO: 2193861 - RNA, 19 nt, Artificial Sequence
  Description of Artificial Sequence: Synthetic oligonucleotide
  Antisense strand to SEQ ID NO: 2193860
aaucccaguccaagcuucc

SEQ ID NO: 2193862 - RNA, 19 nt, Artificial Sequence
  Description of Artificial Sequence: Synthetic oligonucleotide
  Sense strand starting at position 2076 of SEQ ID NO: 1883442
caagcugugccugaaugau

SEQ ID NO: 2193863 - RNA, 19 nt, Artificial Sequence
  Description of Artificial Sequence: Synthetic oligonucleotide
  Antisense strand to SEQ ID NO: 2193862
aucauucaggcacagcuug

SEQ ID NO: 2193864 - RNA, 19 nt, Artificial Sequence
  Description of Artificial Sequence: Synthetic oligonucleotide
  Sense strand starting at position 2080 of SEQ ID NO: 1883442
cugugccugaaugaugaaa

SEQ ID NO: 2193865 - RNA, 19 nt, Artificial Sequence
  Description of Artificial Sequence: Synthetic oligonucleotide
  Antisense strand to SEQ ID NO: 2193864
uuucaucauucaggcacag

SEQ ID NO: 2193866 - RNA, 19 nt, Artificial Sequence
  Description of Artificial Sequence: Synthetic oligonucleotide
  Sense strand starting at position 2098 of SEQ ID NO: 1883442
augauugugggacgaaaug

SEQ ID NO: 2193867 - RNA, 19 nt, Artificial Sequence
  Description of Artificial Sequence: Synthetic oligonucleotide
  Antisense strand to SEQ ID NO: 2193866
cauuucgucccacaaucau

SEQ ID NO: 2193868 - RNA, 19 nt, Artificial Sequence
  Description of Artificial Sequence: Synthetic oligonucleotide
  Sense strand starting at position 2230 of SEQ ID NO: 1883442
gggaaaucagccuauuccu

SEQ ID NO: 2193869 - RNA, 19 nt, Artificial Sequence
  Description of Artificial Sequence: Synthetic oligonucleotide
  Antisense strand to SEQ ID NO: 2193868
aggaauaggcugauuuccc

SEQ ID NO: 2193870 - RNA, 19 nt, Artificial Sequence
  Description of Artificial Sequence: Synthetic oligonucleotide
  Sense strand starting at position 2345 of SEQ ID NO: 1883442
ccuuauaacgacugucuua

SEQ ID NO: 2193871 - RNA, 19 nt, Artificial Sequence
  Description of Artificial Sequence: Synthetic oligonucleotide
  Antisense strand to SEQ ID NO: 2193870
uaagacagucguuauaagg

SEQ ID NO: 2193872 - RNA, 19 nt, Artificial Sequence
  Description of Artificial Sequence: Synthetic oligonucleotide
  Sense strand starting at position 2557 of SEQ ID NO: 1883442
guaccaguagggugagaau

SEQ ID NO: 2193873 - RNA, 19 nt, Artificial Sequence
  Description of Artificial Sequence: Synthetic oligonucleotide
  Antisense strand to SEQ ID NO: 2193872
auucucacccuacugguac

SEQ ID NO: 2193874 - RNA, 19 nt, Artificial Sequence
  Description of Artificial Sequence: Synthetic oligonucleotide
  Sense strand starting at position 2610 of SEQ ID NO: 1883442
uaugcuugauagucaagac

SEQ ID NO: 2193875 - RNA, 19 nt, Artificial Sequence
  Description of Artificial Sequence: Synthetic oligonucleotide
  Antisense strand to SEQ ID NO: 2193874
gucuugacuaucaagcaua

SEQ ID NO: 2193876 - RNA, 19 nt, Artificial Sequence
  Description of Artificial Sequence: Synthetic oligonucleotide
  Sense strand starting at position 2677 of SEQ ID NO: 1883442
gcuugagaccaaggauaug

SEQ ID NO: 2193877 - RNA, 19 nt, Artificial Sequence
  Description of Artificial Sequence: Synthetic oligonucleotide
  Antisense strand to SEQ ID NO: 2193876
cauauccuuggucucaagc

SEQ ID NO: 2193878 - RNA, 19 nt, Artificial Sequence
  Description of Artificial Sequence: Synthetic oligonucleotide
  Sense strand starting at position 2697 of SEQ ID NO: 1883442
ugaccuacuccuuaagugu

SEQ ID NO: 2193879 - RNA, 19 nt, Artificial Sequence
  Description of Artificial Sequence: Synthetic oligonucleotide
  Antisense strand to SEQ ID NO: 2193878
acacuuaaggaguagguca

SEQ ID NO: 2193880 - RNA, 19 nt, Artificial Sequence
  Description of Artificial Sequence: Synthetic oligonucleotide
  Sense strand starting at position 2708 of SEQ ID NO: 1883442
uuaaguguccguucuaugu

SEQ ID NO: 2193881 - RNA, 19 nt, Artificial Sequence
  Description of Artificial Sequence: Synthetic oligonucleotide
  Antisense strand to SEQ ID NO: 2193880
acauagaacggacacuuaa

SEQ ID NO: 2193882 - RNA, 19 nt, Artificial Sequence
  Description of Artificial Sequence: Synthetic oligonucleotide
  Sense strand starting at position 2735 of SEQ ID NO: 1883442
aggugacacugauuaugau

SEQ ID NO: 2193883 - RNA, 19 nt, Artificial Sequence
  Description of Artificial Sequence: Synthetic oligonucleotide
  Antisense strand to SEQ ID NO: 2193882
aucauaaucagugucaccu

SEQ ID NO: 2193884 - RNA, 19 nt, Artificial Sequence
  Description of Artificial Sequence: Synthetic oligonucleotide
  Sense strand starting at position 2835 of SEQ ID NO: 1883442
ucuuguucccuguaagaag

SEQ ID NO: 2193885 - RNA, 19 nt, Artificial Sequence
  Description of Artificial Sequence: Synthetic oligonucleotide
  Antisense strand to SEQ ID NO: 2193884
cuucuuacagggaacaaga

SEQ ID NO: 2193886 - RNA, 19 nt, Artificial Sequence
  Description of Artificial Sequence: Synthetic oligonucleotide
  Sense strand starting at position 2964 of SEQ ID NO: 1883442
ucuagugacuugguuaaag

SEQ ID NO: 2193887 - RNA, 19 nt, Artificial Sequence
  Description of Artificial Sequence: Synthetic oligonucleotide
  Antisense strand to SEQ ID NO: 2193886
cuuuaaccaagucacuaga

SEQ ID NO: 2193888 - RNA, 19 nt, Artificial Sequence
  Description of Artificial Sequence: Synthetic oligonucleotide
  Sense strand starting at position 2966 of SEQ ID NO: 1883442
uagugacuugguuaaagua

SEQ ID NO: 2193889 - RNA, 19 nt, Artificial Sequence
  Description of Artificial Sequence: Synthetic oligonucleotide
  Antisense strand to SEQ ID NO: 2193888
uacuuuaaccaagucacua

SEQ ID NO: 2193890 - RNA, 19 nt, Artificial Sequence
  Description of Artificial Sequence: Synthetic oligonucleotide
  Sense strand starting at position 2974 of SEQ ID NO: 1883442
ugguuaaaguaccugucua

SEQ ID NO: 2193891 - RNA, 19 nt, Artificial Sequence
  Description of Artificial Sequence: Synthetic oligonucleotide
  Antisense strand to SEQ ID NO: 2193890
uagacagguacuuuaacca

SEQ ID NO: 2193892 - RNA, 19 nt, Artificial Sequence
  Description of Artificial Sequence: Synthetic oligonucleotide
  Sense strand starting at position 2975 of SEQ ID NO: 1883442
gguuaaaguaccugucuag

SEQ ID NO: 2193893 - RNA, 19 nt, Artificial Sequence
  Description of Artificial Sequence: Synthetic oligonucleotide
  Antisense strand to SEQ ID NO: 2193892
cuagacagguacuuuaacc

SEQ ID NO: 2193894 - RNA, 19 nt, Artificial Sequence
  Description of Artificial Sequence: Synthetic oligonucleotide
  Sense strand starting at position 3002 of SEQ ID NO: 1883442
agauccugaguuugaauca

SEQ ID NO: 2193895 - RNA, 19 nt, Artificial Sequence
  Description of Artificial Sequence: Synthetic oligonucleotide
  Antisense strand to SEQ ID NO: 2193894
ugauucaaacucaggaucu

SEQ ID NO: 2193896 - RNA, 19 nt, Artificial Sequence
  Description of Artificial Sequence: Synthetic oligonucleotide
  Sense strand starting at position 3350 of SEQ ID NO: 1883442
guacuuugcccauaauagg

SEQ ID NO: 2193897 - RNA, 19 nt, Artificial Sequence
  Description of Artificial Sequence: Synthetic oligonucleotide
  Antisense strand to SEQ ID NO: 2193896
ccuauuaugggcaaaguac

SEQ ID NO: 2193898 - RNA, 19 nt, Artificial Sequence
  Description of Artificial Sequence: Synthetic oligonucleotide
  Sense strand starting at position 3367 of SEQ ID NO: 1883442
gguacucaaugcucaugaa

SEQ ID NO: 2193899 - RNA, 19 nt, Artificial Sequence
  Description of Artificial Sequence: Synthetic oligonucleotide
  Antisense strand to SEQ ID NO: 2193898
uucaugagcauugaguacc

SEQ ID NO: 2193900 - RNA, 19 nt, Artificial Sequence
  Description of Artificial Sequence: Synthetic oligonucleotide
  Sense strand starting at position 3368 of SEQ ID NO: 1883442
guacucaaugcucaugaau

SEQ ID NO: 2193901 - RNA, 19 nt, Artificial Sequence
  Description of Artificial Sequence: Synthetic oligonucleotide
  Antisense strand to SEQ ID NO: 2193900
auucaugagcauugaguac

SEQ ID NO: 2193902 - RNA, 19 nt, Artificial Sequence
  Description of Artificial Sequence: Synthetic oligonucleotide
  Sense strand starting at position 3379 of SEQ ID NO: 1883442
ucaugaauugcauggcaaa

SEQ ID NO: 2193903 - RNA, 19 nt, Artificial Sequence
  Description of Artificial Sequence: Synthetic oligonucleotide
  Antisense strand to SEQ ID NO: 2193902
uuugccaugcaauucauga

SEQ ID NO: 2193904 - RNA, 19 nt, Artificial Sequence
  Description of Artificial Sequence: Synthetic oligonucleotide
  Sense strand starting at position 3421 of SEQ ID NO: 1883442
ugguucuauaaggguacau

SEQ ID NO: 2193905 - RNA, 19 nt, Artificial Sequence
  Description of Artificial Sequence: Synthetic oligonucleotide
  Antisense strand to SEQ ID NO: 2193904
auguacccuuauagaacca

SEQ ID NO: 2193906 - RNA, 19 nt, Artificial Sequence
  Description of Artificial Sequence: Synthetic oligonucleotide
  Sense strand starting at position 3463 of SEQ ID NO: 1883442
gugauacaauaagggauuu

SEQ ID NO: 2193907 - RNA, 19 nt, Artificial Sequence
  Description of Artificial Sequence: Synthetic oligonucleotide
  Antisense strand to SEQ ID NO: 2193906
aaaucccuuauuguaucac

SEQ ID NO: 2193908 - RNA, 19 nt, Artificial Sequence
  Description of Artificial Sequence: Synthetic oligonucleotide
  Sense strand starting at position 3832 of SEQ ID NO: 1883442
gugacauugucccuggaca

SEQ ID NO: 2193909 - RNA, 19 nt, Artificial Sequence
  Description of Artificial Sequence: Synthetic oligonucleotide
  Antisense strand to SEQ ID NO: 2193908
uguccagggacaaugucac

SEQ ID NO: 2193910 - RNA, 19 nt, Artificial Sequence
  Description of Artificial Sequence: Synthetic oligonucleotide
  Sense strand starting at position 3833 of SEQ ID NO: 1883442
ugacauugucccuggacac

SEQ ID NO: 2193911 - RNA, 19 nt, Artificial Sequence
  Description of Artificial Sequence: Synthetic oligonucleotide
  Antisense strand to SEQ ID NO: 2193910
guguccagggacaauguca

SEQ ID NO: 2193912 - RNA, 19 nt, Artificial Sequence
  Description of Artificial Sequence: Synthetic oligonucleotide
  Sense strand starting at position 3834 of SEQ ID NO: 1883442
gacauugucccuggacaca

SEQ ID NO: 2193913 - RNA, 19 nt, Artificial Sequence
  Description of Artificial Sequence: Synthetic oligonucleotide
  Antisense strand to SEQ ID NO: 2193912
uguguccagggacaauguc

SEQ ID NO: 2193914 - RNA, 19 nt, Artificial Sequence
  Description of Artificial Sequence: Synthetic oligonucleotide
  Sense strand starting at position 3846 of SEQ ID NO: 1883442
ggacacauuugggauaugu

SEQ ID NO: 2193915 - RNA, 19 nt, Artificial Sequence
  Description of Artificial Sequence: Synthetic oligonucleotide
  Antisense strand to SEQ ID NO: 2193914
acauaucccaaaugugucc

SEQ ID NO: 2193916 - RNA, 19 nt, Artificial Sequence
  Description of Artificial Sequence: Synthetic oligonucleotide
  Sense strand starting at position 3900 of SEQ ID NO: 1883442
ugcccauggccacagauaa

SEQ ID NO: 2193917 - RNA, 19 nt, Artificial Sequence
  Description of Artificial Sequence: Synthetic oligonucleotide
  Antisense strand to SEQ ID NO: 2193916
uuaucuguggccaugggca

SEQ ID NO: 2193918 - RNA, 19 nt, Artificial Sequence
  Description of Artificial Sequence: Synthetic oligonucleotide
  Sense strand starting at position 3969 of SEQ ID NO: 1883442
ccaaguaaugaucaguuua

SEQ ID NO: 2193919 - RNA, 19 nt, Artificial Sequence
  Description of Artificial Sequence: Synthetic oligonucleotide
  Antisense strand to SEQ ID NO: 2193918
uaaacugaucauuacuugg

SEQ ID NO: 2193920 - RNA, 19 nt, Artificial Sequence
  Description of Artificial Sequence: Synthetic oligonucleotide
  Sense strand starting at position 393 of SEQ ID NO: 1883443
gcauguugugcaucgccaa

SEQ ID NO: 2193921 - RNA, 19 nt, Artificial Sequence
  Description of Artificial Sequence: Synthetic oligonucleotide
  Antisense strand to SEQ ID NO: 2193920
uuggcgaugcacaacaugc

SEQ ID NO: 2193922 - RNA, 19 nt, Artificial Sequence
  Description of Artificial Sequence: Synthetic oligonucleotide
  Sense strand starting at position 450 of SEQ ID NO: 1883443
ccaguucuuggaugugaug

SEQ ID NO: 2193923 - RNA, 19 nt, Artificial Sequence
  Description of Artificial Sequence: Synthetic oligonucleotide
  Antisense strand to SEQ ID NO: 2193922
caucacauccaagaacugg

SEQ ID NO: 2193924 - RNA, 19 nt, Artificial Sequence
  Description of Artificial Sequence: Synthetic oligonucleotide
  Sense strand starting at position 452 of SEQ ID NO: 1883443
aguucuuggaugugaugca

SEQ ID NO: 2193925 - RNA, 19 nt, Artificial Sequence
  Description of Artificial Sequence: Synthetic oligonucleotide
  Antisense strand to SEQ ID NO: 2193924
ugcaucacauccaagaacu

SEQ ID NO: 2193926 - RNA, 19 nt, Artificial Sequence
  Description of Artificial Sequence: Synthetic oligonucleotide
  Sense strand starting at position 459 of SEQ ID NO: 1883443
ggaugugaugcaggacuca

SEQ ID NO: 2193927 - RNA, 19 nt, Artificial Sequence
  Description of Artificial Sequence: Synthetic oligonucleotide
  Antisense strand to SEQ ID NO: 2193926
ugaguccugcaucacaucc

SEQ ID NO: 2193928 - RNA, 19 nt, Artificial Sequence
  Description of Artificial Sequence: Synthetic oligonucleotide
  Sense strand starting at position 614 of SEQ ID NO: 1883443
aggaaaucguccuccacca

SEQ ID NO: 2193929 - RNA, 19 nt, Artificial Sequence
  Description of Artificial Sequence: Synthetic oligonucleotide
  Antisense strand to SEQ ID NO: 2193928
ugguggaggacgauuuccu

SEQ ID NO: 2193930 - RNA, 19 nt, Artificial Sequence
  Description of Artificial Sequence: Synthetic oligonucleotide
  Sense strand starting at position 1327 of SEQ ID NO: 1883443
gucagcagguucccaauua

SEQ ID NO: 2193931 - RNA, 19 nt, Artificial Sequence
  Description of Artificial Sequence: Synthetic oligonucleotide
  Antisense strand to SEQ ID NO: 2193930
uaauugggaaccugcugac

SEQ ID NO: 2193932 - RNA, 19 nt, Artificial Sequence
  Description of Artificial Sequence: Synthetic oligonucleotide
  Sense strand starting at position 1340 of SEQ ID NO: 1883443
caauuacguucccugggaa

SEQ ID NO: 2193933 - RNA, 19 nt, Artificial Sequence
  Description of Artificial Sequence: Synthetic oligonucleotide
  Antisense strand to SEQ ID NO: 2193932
uucccagggaacguaauug

SEQ ID NO: 2193934 - RNA, 19 nt, Artificial Sequence
  Description of Artificial Sequence: Synthetic oligonucleotide
  Sense strand starting at position 1458 of SEQ ID NO: 1883443
ggcaaacaucugggcagau

SEQ ID NO: 2193935 - RNA, 19 nt, Artificial Sequence
  Description of Artificial Sequence: Synthetic oligonucleotide
  Antisense strand to SEQ ID NO: 2193934
aucugcccagauguuugcc

SEQ ID NO: 2193936 - RNA, 19 nt, Artificial Sequence
  Description of Artificial Sequence: Synthetic oligonucleotide
  Sense strand starting at position 1644 of SEQ ID NO: 1883443
gauuccucucgggacacau

SEQ ID NO: 2193937 - RNA, 19 nt, Artificial Sequence
  Description of Artificial Sequence: Synthetic oligonucleotide
  Antisense strand to SEQ ID NO: 2193936
augugucccgagaggaauc

SEQ ID NO: 2193938 - RNA, 19 nt, Artificial Sequence
  Description of Artificial Sequence: Synthetic oligonucleotide
  Sense strand starting at position 1713 of SEQ ID NO: 1883443
aguccuucuccgggaagaa

SEQ ID NO: 2193939 - RNA, 19 nt, Artificial Sequence
  Description of Artificial Sequence: Synthetic oligonucleotide
  Antisense strand to SEQ ID NO: 2193938
uucuucccggagaaggacu

SEQ ID NO: 2193940 - RNA, 19 nt, Artificial Sequence
  Description of Artificial Sequence: Synthetic oligonucleotide
  Sense strand starting at position 1714 of SEQ ID NO: 1883443
guccuucuccgggaagaac

SEQ ID NO: 2193941 - RNA, 19 nt, Artificial Sequence
  Description of Artificial Sequence: Synthetic oligonucleotide
  Antisense strand to SEQ ID NO: 2193940
guucuucccggagaaggac

SEQ ID NO: 2193942 - RNA, 19 nt, Artificial Sequence
  Description of Artificial Sequence: Synthetic oligonucleotide
  Sense strand starting at position 1792 of SEQ ID NO: 1883443
caggaaguagucugugauc

SEQ ID NO: 2193943 - RNA, 19 nt, Artificial Sequence
  Description of Artificial Sequence: Synthetic oligonucleotide
  Antisense strand to SEQ ID NO: 2193942
gaucacagacuacuuccug

SEQ ID NO: 2193944 - RNA, 19 nt, Artificial Sequence
  Description of Artificial Sequence: Synthetic oligonucleotide
  Sense strand starting at position 2318 of SEQ ID NO: 1883443
uagcgagauccuggauaug

SEQ ID NO: 2193945 - RNA, 19 nt, Artificial Sequence
  Description of Artificial Sequence: Synthetic oligonucleotide
  Antisense strand to SEQ ID NO: 2193944
cauauccaggaucucgcua

SEQ ID NO: 2193946 - RNA, 19 nt, Artificial Sequence
  Description of Artificial Sequence: Synthetic oligonucleotide
  Sense strand starting at position 2345 of SEQ ID NO: 1883443
acaguaggauuagauaaga

SEQ ID NO: 2193947 - RNA, 19 nt, Artificial Sequence
  Description of Artificial Sequence: Synthetic oligonucleotide
  Antisense strand to SEQ ID NO: 2193946
ucuuaucuaauccuacugu

SEQ ID NO: 2193948 - RNA, 19 nt, Artificial Sequence
  Description of Artificial Sequence: Synthetic oligonucleotide
  Sense strand starting at position 2371 of SEQ ID NO: 1883443
acauuucuggccugcagau

SEQ ID NO: 2193949 - RNA, 19 nt, Artificial Sequence
  Description of Artificial Sequence: Synthetic oligonucleotide
  Antisense strand to SEQ ID NO: 2193948
aucugcaggccagaaaugu

SEQ ID NO: 2193950 - RNA, 19 nt, Artificial Sequence
  Description of Artificial Sequence: Synthetic oligonucleotide
  Sense strand starting at position 2396 of SEQ ID NO: 1883443
ugcauuugugcaggugaga

SEQ ID NO: 2193951 - RNA, 19 nt, Artificial Sequence
  Description of Artificial Sequence: Synthetic oligonucleotide
  Antisense strand to SEQ ID NO: 2193950
ucucaccugcacaaaugca

SEQ ID NO: 2193952 - RNA, 19 nt, Artificial Sequence
  Description of Artificial Sequence: Synthetic oligonucleotide
  Sense strand starting at position 2460 of SEQ ID NO: 1883443
augggaggacucugaaugu

SEQ ID NO: 2193953 - RNA, 19 nt, Artificial Sequence
  Description of Artificial Sequence: Synthetic oligonucleotide
  Antisense strand to SEQ ID NO: 2193952
acauucagaguccucccau

SEQ ID NO: 2193954 - RNA, 19 nt, Artificial Sequence
  Description of Artificial Sequence: Synthetic oligonucleotide
  Sense strand starting at position 2464 of SEQ ID NO: 1883443
gaggacucugaaugugcuu

SEQ ID NO: 2193955 - RNA, 19 nt, Artificial Sequence
  Description of Artificial Sequence: Synthetic oligonucleotide
  Antisense strand to SEQ ID NO: 2193954
aagcacauucagaguccuc

SEQ ID NO: 2193956 - RNA, 19 nt, Artificial Sequence
  Description of Artificial Sequence: Synthetic oligonucleotide
  Sense strand starting at position 2469 of SEQ ID NO: 1883443
cucugaaugugcuuccuga

SEQ ID NO: 2193957 - RNA, 19 nt, Artificial Sequence
  Description of Artificial Sequence: Synthetic oligonucleotide
  Antisense strand to SEQ ID NO: 2193956
ucaggaagcacauucagag

SEQ ID NO: 2193958 - RNA, 19 nt, Artificial Sequence
  Description of Artificial Sequence: Synthetic oligonucleotide
  Sense strand starting at position 2517 of SEQ ID NO: 1883443
ggagcuuuauggguucaag

SEQ ID NO: 2193959 - RNA, 19 nt, Artificial Sequence
  Description of Artificial Sequence: Synthetic oligonucleotide
  Antisense strand to SEQ ID NO: 2193958
cuugaacccauaaagcucc

SEQ ID NO: 2193960 - RNA, 19 nt, Artificial Sequence
  Description of Artificial Sequence: Synthetic oligonucleotide
  Sense strand starting at position 2528 of SEQ ID NO: 1883443
gguucaaggugcuugagaa

SEQ ID NO: 2193961 - RNA, 19 nt, Artificial Sequence
  Description of Artificial Sequence: Synthetic oligonucleotide
  Antisense strand to SEQ ID NO: 2193960
uucucaagcaccuugaacc

SEQ ID NO: 2193962 - RNA, 19 nt, Artificial Sequence
  Description of Artificial Sequence: Synthetic oligonucleotide
  Sense strand starting at position 2529 of SEQ ID NO: 1883443
guucaaggugcuugagaaa

SEQ ID NO: 2193963 - RNA, 19 nt, Artificial Sequence
  Description of Artificial Sequence: Synthetic oligonucleotide
  Antisense strand to SEQ ID NO: 2193962
uuucucaagcaccuugaac

SEQ ID NO: 2193964 - RNA, 19 nt, Artificial Sequence
  Description of Artificial Sequence: Synthetic oligonucleotide
  Sense strand starting at position 2552 of SEQ ID NO: 1883443
uggccaaaucuugacugau

SEQ ID NO: 2193965 - RNA, 19 nt, Artificial Sequence
  Description of Artificial Sequence: Synthetic oligonucleotide
  Antisense strand to SEQ ID NO: 2193964
aucagucaagauuuggcca

SEQ ID NO: 2193966 - RNA, 19 nt, Artificial Sequence
  Description of Artificial Sequence: Synthetic oligonucleotide
  Sense strand starting at position 2554 of SEQ ID NO: 1883443
gccaaaucuugacugaucu

SEQ ID NO: 2193967 - RNA, 19 nt, Artificial Sequence
  Description of Artificial Sequence: Synthetic oligonucleotide
  Antisense strand to SEQ ID NO: 2193966
agaucagucaagauuuggc

SEQ ID NO: 2193968 - RNA, 19 nt, Artificial Sequence
  Description of Artificial Sequence: Synthetic oligonucleotide
  Sense strand starting at position 2561 of SEQ ID NO: 1883443
cuugacugaucucugaguu

SEQ ID NO: 2193969 - RNA, 19 nt, Artificial Sequence
  Description of Artificial Sequence: Synthetic oligonucleotide
  Antisense strand to SEQ ID NO: 2193968
aacucagagaucagucaag

SEQ ID NO: 2193970 - RNA, 19 nt, Artificial Sequence
  Description of Artificial Sequence: Synthetic oligonucleotide
  Sense strand starting at position 2562 of SEQ ID NO: 1883443
uugacugaucucugaguua

SEQ ID NO: 2193971 - RNA, 19 nt, Artificial Sequence
  Description of Artificial Sequence: Synthetic oligonucleotide
  Antisense strand to SEQ ID NO: 2193970
uaacucagagaucagucaa

SEQ ID NO: 2193972 - RNA, 19 nt, Artificial Sequence
  Description of Artificial Sequence: Synthetic oligonucleotide
  Sense strand starting at position 2567 of SEQ ID NO: 1883443
ugaucucugaguuaugcag

SEQ ID NO: 2193973 - RNA, 19 nt, Artificial Sequence
  Description of Artificial Sequence: Synthetic oligonucleotide
  Antisense strand to SEQ ID NO: 2193972
cugcauaacucagagauca

SEQ ID NO: 2193974 - RNA, 19 nt, Artificial Sequence
  Description of Artificial Sequence: Synthetic oligonucleotide
  Sense strand starting at position 2769 of SEQ ID NO: 1883443
aggaaagugugauccauac

SEQ ID NO: 2193975 - RNA, 19 nt, Artificial Sequence
  Description of Artificial Sequence: Synthetic oligonucleotide
  Antisense strand to SEQ ID NO: 2193974
guauggaucacacuuuccu

SEQ ID NO: 2193976 - RNA, 19 nt, Artificial Sequence
  Description of Artificial Sequence: Synthetic oligonucleotide
  Sense strand starting at position 2773 of SEQ ID NO: 1883443
aagugugauccauacucag

SEQ ID NO: 2193977 - RNA, 19 nt, Artificial Sequence
  Description of Artificial Sequence: Synthetic oligonucleotide
  Antisense strand to SEQ ID NO: 2193976
cugaguauggaucacacuu

SEQ ID NO: 2193978 - RNA, 19 nt, Artificial Sequence
  Description of Artificial Sequence: Synthetic oligonucleotide
  Sense strand starting at position 2776 of SEQ ID NO: 1883443
ugugauccauacucaggaa

SEQ ID NO: 2193979 - RNA, 19 nt, Artificial Sequence
  Description of Artificial Sequence: Synthetic oligonucleotide
  Antisense strand to SEQ ID NO: 2193978
uuccugaguauggaucaca

SEQ ID NO: 2193980 - RNA, 19 nt, Artificial Sequence
  Description of Artificial Sequence: Synthetic oligonucleotide
  Sense strand starting at position 3172 of SEQ ID NO: 1883443
agaugauauauguggcaaa

SEQ ID NO: 2193981 - RNA, 19 nt, Artificial Sequence
  Description of Artificial Sequence: Synthetic oligonucleotide
  Antisense strand to SEQ ID NO: 2193980
uuugccacauauaucaucu

SEQ ID NO: 2193982 - RNA, 19 nt, Artificial Sequence
  Description of Artificial Sequence: Synthetic oligonucleotide
  Sense strand starting at position 3199 of SEQ ID NO: 1883443
uaaugaaacgcaugauguc

SEQ ID NO: 2193983 - RNA, 19 nt, Artificial Sequence
  Description of Artificial Sequence: Synthetic oligonucleotide
  Antisense strand to SEQ ID NO: 2193982
gacaucaugcguuucauua

SEQ ID NO: 2193984 - RNA, 19 nt, Artificial Sequence
  Description of Artificial Sequence: Synthetic oligonucleotide
  Sense strand starting at position 3205 of SEQ ID NO: 1883443
aacgcaugaugucuaugau

SEQ ID NO: 2193985 - RNA, 19 nt, Artificial Sequence
  Description of Artificial Sequence: Synthetic oligonucleotide
  Antisense strand to SEQ ID NO: 2193984
aucauagacaucaugcguu

SEQ ID NO: 2193986 - RNA, 19 nt, Artificial Sequence
  Description of Artificial Sequence: Synthetic oligonucleotide
  Sense strand starting at position 3206 of SEQ ID NO: 1883443
acgcaugaugucuaugauu

SEQ ID NO: 2193987 - RNA, 19 nt, Artificial Sequence
  Description of Artificial Sequence: Synthetic oligonucleotide
  Antisense strand to SEQ ID NO: 2193986
aaucauagacaucaugcgu

SEQ ID NO: 2193988 - RNA, 19 nt, Artificial Sequence
  Description of Artificial Sequence: Synthetic oligonucleotide
  Sense strand starting at position 3208 of SEQ ID NO: 1883443
gcaugaugucuaugauucc

SEQ ID NO: 2193989 - RNA, 19 nt, Artificial Sequence
  Description of Artificial Sequence: Synthetic oligonucleotide
  Antisense strand to SEQ ID NO: 2193988
ggaaucauagacaucaugc

SEQ ID NO: 2193990 - RNA, 19 nt, Artificial Sequence
  Description of Artificial Sequence: Synthetic oligonucleotide
  Sense strand starting at position 3211 of SEQ ID NO: 1883443
ugaugucuaugauuccaua

SEQ ID NO: 2193991 - RNA, 19 nt, Artificial Sequence
  Description of Artificial Sequence: Synthetic oligonucleotide
  Antisense strand to SEQ ID NO: 2193990
uauggaaucauagacauca

SEQ ID NO: 2193992 - RNA, 19 nt, Artificial Sequence
  Description of Artificial Sequence: Synthetic oligonucleotide
  Sense strand starting at position 3485 of SEQ ID NO: 1883443
augugaaauaagggucuca

SEQ ID NO: 2193993 - RNA, 19 nt, Artificial Sequence
  Description of Artificial Sequence: Synthetic oligonucleotide
  Antisense strand to SEQ ID NO: 2193992
ugagacccuuauuucacau

SEQ ID NO: 2193994 - RNA, 19 nt, Artificial Sequence
  Description of Artificial Sequence: Synthetic oligonucleotide
  Sense strand starting at position 3576 of SEQ ID NO: 1883443
augaaaggcugucuacaaa

SEQ ID NO: 2193995 - RNA, 19 nt, Artificial Sequence
  Description of Artificial Sequence: Synthetic oligonucleotide
  Antisense strand to SEQ ID NO: 2193994
uuuguagacagccuuucau

SEQ ID NO: 2193996 - RNA, 19 nt, Artificial Sequence
  Description of Artificial Sequence: Synthetic oligonucleotide
  Sense strand starting at position 3622 of SEQ ID NO: 1883443
ggauaaacauaucagaauu

SEQ ID NO: 2193997 - RNA, 19 nt, Artificial Sequence
  Description of Artificial Sequence: Synthetic oligonucleotide
  Antisense strand to SEQ ID NO: 2193996
aauucugauauguuuaucc

SEQ ID NO: 2193998 - RNA, 19 nt, Artificial Sequence
  Description of Artificial Sequence: Synthetic oligonucleotide
  Sense strand starting at position 3738 of SEQ ID NO: 1883443
ugauuaauagcugacuuau

SEQ ID NO: 2193999 - RNA, 19 nt, Artificial Sequence
  Description of Artificial Sequence: Synthetic oligonucleotide
  Antisense strand to SEQ ID NO: 2193998
auaagucagcuauuaauca

SEQ ID NO: 2194000 - RNA, 19 nt, Artificial Sequence
  Description of Artificial Sequence: Synthetic oligonucleotide
  Sense strand starting at position 168 of SEQ ID NO: 1883444
ugaacccucuuaguggaaa

SEQ ID NO: 2194001 - RNA, 19 nt, Artificial Sequence
  Description of Artificial Sequence: Synthetic oligonucleotide
  Antisense strand to SEQ ID NO: 2194000
uuuccacuaagaggguuca

SEQ ID NO: 2194002 - RNA, 19 nt, Artificial Sequence
  Description of Artificial Sequence: Synthetic oligonucleotide
  Sense strand starting at position 180 of SEQ ID NO: 1883444
guggaaacaucucugguaa

SEQ ID NO: 2194003 - RNA, 19 nt, Artificial Sequence
  Description of Artificial Sequence: Synthetic oligonucleotide
  Antisense strand to SEQ ID NO: 2194002
uuaccagagauguuuccac

SEQ ID NO: 2194004 - RNA, 19 nt, Artificial Sequence
  Description of Artificial Sequence: Synthetic oligonucleotide
  Sense strand starting at position 181 of SEQ ID NO: 1883444
uggaaacaucucugguaac

SEQ ID NO: 2194005 - RNA, 19 nt, Artificial Sequence
  Description of Artificial Sequence: Synthetic oligonucleotide
  Antisense strand to SEQ ID NO: 2194004
guuaccagagauguuucca

SEQ ID NO: 2194006 - RNA, 19 nt, Artificial Sequence
  Description of Artificial Sequence: Synthetic oligonucleotide
  Sense strand starting at position 248 of SEQ ID NO: 1883444
ggagguagccuuuaggcau

SEQ ID NO: 2194007 - RNA, 19 nt, Artificial Sequence
  Description of Artificial Sequence: Synthetic oligonucleotide
  Antisense strand to SEQ ID NO: 2194006
augccuaaaggcuaccucc

SEQ ID NO: 2194008 - RNA, 19 nt, Artificial Sequence
  Description of Artificial Sequence: Synthetic oligonucleotide
  Sense strand starting at position 787 of SEQ ID NO: 1883444
acuccugagccaugaauua

SEQ ID NO: 2194009 - RNA, 19 nt, Artificial Sequence
  Description of Artificial Sequence: Synthetic oligonucleotide
  Antisense strand to SEQ ID NO: 2194008
uaauucauggcucaggagu

SEQ ID NO: 2194010 - RNA, 19 nt, Artificial Sequence
  Description of Artificial Sequence: Synthetic oligonucleotide
  Sense strand starting at position 974 of SEQ ID NO: 1883444
aauaguggugauugugauu

SEQ ID NO: 2194011 - RNA, 19 nt, Artificial Sequence
  Description of Artificial Sequence: Synthetic oligonucleotide
  Antisense strand to SEQ ID NO: 2194010
aaucacaaucaccacuauu

SEQ ID NO: 2194012 - RNA, 19 nt, Artificial Sequence
  Description of Artificial Sequence: Synthetic oligonucleotide
  Sense strand starting at position 1142 of SEQ ID NO: 1883444
guauuuaggugggaagauu

SEQ ID NO: 2194013 - RNA, 19 nt, Artificial Sequence
  Description of Artificial Sequence: Synthetic oligonucleotide
  Antisense strand to SEQ ID NO: 2194012
aaucuucccaccuaaauac

SEQ ID NO: 2194014 - RNA, 19 nt, Artificial Sequence
  Description of Artificial Sequence: Synthetic oligonucleotide
  Sense strand starting at position 1170 of SEQ ID NO: 1883444
cuaauaagucuugggaaca

SEQ ID NO: 2194015 - RNA, 19 nt, Artificial Sequence
  Description of Artificial Sequence: Synthetic oligonucleotide
  Antisense strand to SEQ ID NO: 2194014
uguucccaagacuuauuag

SEQ ID NO: 2194016 - RNA, 19 nt, Artificial Sequence
  Description of Artificial Sequence: Synthetic oligonucleotide
  Sense strand starting at position 1219 of SEQ ID NO: 1883444
cucugauaauuuggaagaa

SEQ ID NO: 2194017 - RNA, 19 nt, Artificial Sequence
  Description of Artificial Sequence: Synthetic oligonucleotide
  Antisense strand to SEQ ID NO: 2194016
uucuuccaaauuaucagag

SEQ ID NO: 2194018 - RNA, 19 nt, Artificial Sequence
  Description of Artificial Sequence: Synthetic oligonucleotide
  Sense strand starting at position 1309 of SEQ ID NO: 1883444
cccaaaugguauguuuaua

SEQ ID NO: 2194019 - RNA, 19 nt, Artificial Sequence
  Description of Artificial Sequence: Synthetic oligonucleotide
  Antisense strand to SEQ ID NO: 2194018
uauaaacauaccauuuggg

SEQ ID NO: 2194020 - RNA, 19 nt, Artificial Sequence
  Description of Artificial Sequence: Synthetic oligonucleotide
  Sense strand starting at position 1450 of SEQ ID NO: 1883444
uccaccaugugaucuggaa

SEQ ID NO: 2194021 - RNA, 19 nt, Artificial Sequence
  Description of Artificial Sequence: Synthetic oligonucleotide
  Antisense strand to SEQ ID NO: 2194020
uuccagaucacauggugga

SEQ ID NO: 2194022 - RNA, 19 nt, Artificial Sequence
  Description of Artificial Sequence: Synthetic oligonucleotide
  Sense strand starting at position 1490 of SEQ ID NO: 1883444
ugacuaagucagcauuguu

SEQ ID NO: 2194023 - RNA, 19 nt, Artificial Sequence
  Description of Artificial Sequence: Synthetic oligonucleotide
  Antisense strand to SEQ ID NO: 2194022
aacaaugcugacuuaguca

SEQ ID NO: 2194024 - RNA, 19 nt, Artificial Sequence
  Description of Artificial Sequence: Synthetic oligonucleotide
  Sense strand starting at position 1502 of SEQ ID NO: 1883444
cauuguuaacgaggauggu

SEQ ID NO: 2194025 - RNA, 19 nt, Artificial Sequence
  Description of Artificial Sequence: Synthetic oligonucleotide
  Antisense strand to SEQ ID NO: 2194024
accauccucguuaacaaug

SEQ ID NO: 2194026 - RNA, 19 nt, Artificial Sequence
  Description of Artificial Sequence: Synthetic oligonucleotide
  Sense strand starting at position 2211 of SEQ ID NO: 1883444
gucugaugccugcuucugu

SEQ ID NO: 2194027 - RNA, 19 nt, Artificial Sequence
  Description of Artificial Sequence: Synthetic oligonucleotide
  Antisense strand to SEQ ID NO: 2194026
acagaagcaggcaucagac

SEQ ID NO: 2194028 - RNA, 19 nt, Artificial Sequence
  Description of Artificial Sequence: Synthetic oligonucleotide
  Sense strand starting at position 2242 of SEQ ID NO: 1883444
cccuacuucucucugagga

SEQ ID NO: 2194029 - RNA, 19 nt, Artificial Sequence
  Description of Artificial Sequence: Synthetic oligonucleotide
  Antisense strand to SEQ ID NO: 2194028
uccucagagagaaguaggg

SEQ ID NO: 2194030 - RNA, 19 nt, Artificial Sequence
  Description of Artificial Sequence: Synthetic oligonucleotide
  Sense strand starting at position 2346 of SEQ ID NO: 1883444
gauggacuuccauguuucu

SEQ ID NO: 2194031 - RNA, 19 nt, Artificial Sequence
  Description of Artificial Sequence: Synthetic oligonucleotide
  Antisense strand to SEQ ID NO: 2194030
agaaacauggaaguccauc

SEQ ID NO: 2194032 - RNA, 19 nt, Artificial Sequence
  Description of Artificial Sequence: Synthetic oligonucleotide
  Sense strand starting at position 2397 of SEQ ID NO: 1883444
gaauuacucucugugacug

SEQ ID NO: 2194033 - RNA, 19 nt, Artificial Sequence
  Description of Artificial Sequence: Synthetic oligonucleotide
  Antisense strand to SEQ ID NO: 2194032
cagucacagagaguaauuc

SEQ ID NO: 2194034 - RNA, 19 nt, Artificial Sequence
  Description of Artificial Sequence: Synthetic oligonucleotide
  Sense strand starting at position 2443 of SEQ ID NO: 1883444
cgcuauugugccuccuaag

SEQ ID NO: 2194035 - RNA, 19 nt, Artificial Sequence
  Description of Artificial Sequence: Synthetic oligonucleotide
  Antisense strand to SEQ ID NO: 2194034
cuuaggaggcacaauagcg

SEQ ID NO: 2194036 - RNA, 19 nt, Artificial Sequence
  Description of Artificial Sequence: Synthetic oligonucleotide
  Sense strand starting at position 2444 of SEQ ID NO: 1883444
gcuauugugccuccuaagu

SEQ ID NO: 2194037 - RNA, 19 nt, Artificial Sequence
  Description of Artificial Sequence: Synthetic oligonucleotide
  Antisense strand to SEQ ID NO: 2194036
acuuaggaggcacaauagc

SEQ ID NO: 2194038 - RNA, 19 nt, Artificial Sequence
  Description of Artificial Sequence: Synthetic oligonucleotide
  Sense strand starting at position 2549 of SEQ ID NO: 1883444
agaagaguaugcuccagga

SEQ ID NO: 2194039 - RNA, 19 nt, Artificial Sequence
  Description of Artificial Sequence: Synthetic oligonucleotide
  Antisense strand to SEQ ID NO: 2194038
uccuggagcauacucuucu

SEQ ID NO: 2194040 - RNA, 19 nt, Artificial Sequence
  Description of Artificial Sequence: Synthetic oligonucleotide
  Sense strand starting at position 2553 of SEQ ID NO: 1883444
gaguaugcuccaggaaaca

SEQ ID NO: 2194041 - RNA, 19 nt, Artificial Sequence
  Description of Artificial Sequence: Synthetic oligonucleotide
  Antisense strand to SEQ ID NO: 2194040
uguuuccuggagcauacuc

SEQ ID NO: 2194042 - RNA, 19 nt, Artificial Sequence
  Description of Artificial Sequence: Synthetic oligonucleotide
  Sense strand starting at position 2618 of SEQ ID NO: 1883444
augacuuuguaggugacau

SEQ ID NO: 2194043 - RNA, 19 nt, Artificial Sequence
  Description of Artificial Sequence: Synthetic oligonucleotide
  Antisense strand to SEQ ID NO: 2194042
augucaccuacaaagucau

SEQ ID NO: 2194044 - RNA, 19 nt, Artificial Sequence
  Description of Artificial Sequence: Synthetic oligonucleotide
  Sense strand starting at position 2821 of SEQ ID NO: 1883444
auaacacgauuuggagaau

SEQ ID NO: 2194045 - RNA, 19 nt, Artificial Sequence
  Description of Artificial Sequence: Synthetic oligonucleotide
  Antisense strand to SEQ ID NO: 2194044
auucuccaaaucguguuau

SEQ ID NO: 2194046 - RNA, 19 nt, Artificial Sequence
  Description of Artificial Sequence: Synthetic oligonucleotide
  Sense strand starting at position 2822 of SEQ ID NO: 1883444
uaacacgauuuggagaaua

SEQ ID NO: 2194047 - RNA, 19 nt, Artificial Sequence
  Description of Artificial Sequence: Synthetic oligonucleotide
  Antisense strand to SEQ ID NO: 2194046
uauucuccaaaucguguua

SEQ ID NO: 2194048 - RNA, 19 nt, Artificial Sequence
  Description of Artificial Sequence: Synthetic oligonucleotide
  Sense strand starting at position 3092 of SEQ ID NO: 1883444
cuuaauacguuccugaaca

SEQ ID NO: 2194049 - RNA, 19 nt, Artificial Sequence
  Description of Artificial Sequence: Synthetic oligonucleotide
  Antisense strand to SEQ ID NO: 2194048
uguucaggaacguauuaag

SEQ ID NO: 2194050 - RNA, 19 nt, Artificial Sequence
  Description of Artificial Sequence: Synthetic oligonucleotide
  Sense strand starting at position 3128 of SEQ ID NO: 1883444
ggcugcugucaugcaguuu

SEQ ID NO: 2194051 - RNA, 19 nt, Artificial Sequence
  Description of Artificial Sequence: Synthetic oligonucleotide
  Antisense strand to SEQ ID NO: 2194050
aaacugcaugacagcagcc

SEQ ID NO: 2194052 - RNA, 19 nt, Artificial Sequence
  Description of Artificial Sequence: Synthetic oligonucleotide
  Sense strand starting at position 3192 of SEQ ID NO: 1883444
uuuagaucaugggauuuaa

SEQ ID NO: 2194053 - RNA, 19 nt, Artificial Sequence
  Description of Artificial Sequence: Synthetic oligonucleotide
  Antisense strand to SEQ ID NO: 2194052
uuaaaucccaugaucuaaa

SEQ ID NO: 2194054 - RNA, 19 nt, Artificial Sequence
  Description of Artificial Sequence: Synthetic oligonucleotide
  Sense strand starting at position 3234 of SEQ ID NO: 1883444
agucuagggaggcaucauu

SEQ ID NO: 2194055 - RNA, 19 nt, Artificial Sequence
  Description of Artificial Sequence: Synthetic oligonucleotide
  Antisense strand to SEQ ID NO: 2194054
aaugaugccucccuagacu

SEQ ID NO: 2194056 - RNA, 19 nt, Artificial Sequence
  Description of Artificial Sequence: Synthetic oligonucleotide
  Sense strand starting at position 3242 of SEQ ID NO: 1883444
gaggcaucauuauccuagu

SEQ ID NO: 2194057 - RNA, 19 nt, Artificial Sequence
  Description of Artificial Sequence: Synthetic oligonucleotide
  Antisense strand to SEQ ID NO: 2194056
acuaggauaaugaugccuc

SEQ ID NO: 2194058 - RNA, 19 nt, Artificial Sequence
  Description of Artificial Sequence: Synthetic oligonucleotide
  Sense strand starting at position 3243 of SEQ ID NO: 1883444
aggcaucauuauccuagua

SEQ ID NO: 2194059 - RNA, 19 nt, Artificial Sequence
  Description of Artificial Sequence: Synthetic oligonucleotide
  Antisense strand to SEQ ID NO: 2194058
uacuaggauaaugaugccu

SEQ ID NO: 2194060 - RNA, 19 nt, Artificial Sequence
  Description of Artificial Sequence: Synthetic oligonucleotide
  Sense strand starting at position 3407 of SEQ ID NO: 1883444
ugauuauugcuguaacaag

SEQ ID NO: 2194061 - RNA, 19 nt, Artificial Sequence
  Description of Artificial Sequence: Synthetic oligonucleotide
  Antisense strand to SEQ ID NO: 2194060
cuuguuacagcaauaauca

SEQ ID NO: 2194062 - RNA, 19 nt, Artificial Sequence
  Description of Artificial Sequence: Synthetic oligonucleotide
  Sense strand starting at position 3490 of SEQ ID NO: 1883444
uugauuggaccuggacauu

SEQ ID NO: 2194063 - RNA, 19 nt, Artificial Sequence
  Description of Artificial Sequence: Synthetic oligonucleotide
  Antisense strand to SEQ ID NO: 2194062
aauguccagguccaaucaa

SEQ ID NO: 2194064 - RNA, 19 nt, Artificial Sequence
  Description of Artificial Sequence: Synthetic oligonucleotide
  Sense strand starting at position 3594 of SEQ ID NO: 1883444
uugggaaguuaauuaccau

SEQ ID NO: 2194065 - RNA, 19 nt, Artificial Sequence
  Description of Artificial Sequence: Synthetic oligonucleotide
  Antisense strand to SEQ ID NO: 2194064
augguaauuaacuucccaa

SEQ ID NO: 2194066 - RNA, 19 nt, Artificial Sequence
  Description of Artificial Sequence: Synthetic oligonucleotide
  Sense strand starting at position 3597 of SEQ ID NO: 1883444
ggaaguuaauuaccaugca

SEQ ID NO: 2194067 - RNA, 19 nt, Artificial Sequence
  Description of Artificial Sequence: Synthetic oligonucleotide
  Antisense strand to SEQ ID NO: 2194066
ugcaugguaauuaacuucc

SEQ ID NO: 2194068 - RNA, 19 nt, Artificial Sequence
  Description of Artificial Sequence: Synthetic oligonucleotide
  Sense strand starting at position 3678 of SEQ ID NO: 1883444
gugguuuguugaacgucuu

SEQ ID NO: 2194069 - RNA, 19 nt, Artificial Sequence
  Description of Artificial Sequence: Synthetic oligonucleotide
  Antisense strand to SEQ ID NO: 2194068
aagacguucaacaaaccac

SEQ ID NO: 2194070 - RNA, 19 nt, Artificial Sequence
  Description of Artificial Sequence: Synthetic oligonucleotide
  Sense strand starting at position 3707 of SEQ ID NO: 1883444
ccuaguauuuagguuucuu

SEQ ID NO: 2194071 - RNA, 19 nt, Artificial Sequence
  Description of Artificial Sequence: Synthetic oligonucleotide
  Antisense strand to SEQ ID NO: 2194070
aagaaaccuaaauacuagg

SEQ ID NO: 2194072 - RNA, 19 nt, Artificial Sequence
  Description of Artificial Sequence: Synthetic oligonucleotide
  Sense strand starting at position 3730 of SEQ ID NO: 1883444
guugcuacauaauugaaau

SEQ ID NO: 2194073 - RNA, 19 nt, Artificial Sequence
  Description of Artificial Sequence: Synthetic oligonucleotide
  Antisense strand to SEQ ID NO: 2194072
auuucaauuauguagcaac

SEQ ID NO: 2194074 - RNA, 19 nt, Artificial Sequence
  Description of Artificial Sequence: Synthetic oligonucleotide
  Sense strand starting at position 3766 of SEQ ID NO: 1883444
uaaaguaguuggcugagaa

SEQ ID NO: 2194075 - RNA, 19 nt, Artificial Sequence
  Description of Artificial Sequence: Synthetic oligonucleotide
  Antisense strand to SEQ ID NO: 2194074
uucucagccaacuacuuua

SEQ ID NO: 2194076 - RNA, 19 nt, Artificial Sequence
  Description of Artificial Sequence: Synthetic oligonucleotide
  Sense strand starting at position 3767 of SEQ ID NO: 1883444
aaaguaguuggcugagaaa

SEQ ID NO: 2194077 - RNA, 19 nt, Artificial Sequence
  Description of Artificial Sequence: Synthetic oligonucleotide
  Antisense strand to SEQ ID NO: 2194076
uuucucagccaacuacuuu

SEQ ID NO: 2194078 - RNA, 19 nt, Artificial Sequence
  Description of Artificial Sequence: Synthetic oligonucleotide
  Sense strand starting at position 3858 of SEQ ID NO: 1883444
gguuucuacuaaguaacaa

SEQ ID NO: 2194079 - RNA, 19 nt, Artificial Sequence
  Description of Artificial Sequence: Synthetic oligonucleotide
  Antisense strand to SEQ ID NO: 2194078
uuguuacuuaguagaaacc

SEQ ID NO: 2194080 - RNA, 19 nt, Artificial Sequence
  Description of Artificial Sequence: Synthetic oligonucleotide
  Sense strand starting at position 407 of SEQ ID NO: 1883445
acugcagaacucugucuua

SEQ ID NO: 2194081 - RNA, 19 nt, Artificial Sequence
  Description of Artificial Sequence: Synthetic oligonucleotide
  Antisense strand to SEQ ID NO: 2194080
uaagacagaguucugcagu

SEQ ID NO: 2194082 - RNA, 19 nt, Artificial Sequence
  Description of Artificial Sequence: Synthetic oligonucleotide
  Sense strand starting at position 410 of SEQ ID NO: 1883445
gcagaacucugucuuaagc

SEQ ID NO: 2194083 - RNA, 19 nt, Artificial Sequence
  Description of Artificial Sequence: Synthetic oligonucleotide
  Antisense strand to SEQ ID NO: 2194082
gcuuaagacagaguucugc

SEQ ID NO: 2194084 - RNA, 19 nt, Artificial Sequence
  Description of Artificial Sequence: Synthetic oligonucleotide
  Sense strand starting at position 418 of SEQ ID NO: 1883445
cugucuuaagcaggaggua

SEQ ID NO: 2194085 - RNA, 19 nt, Artificial Sequence
  Description of Artificial Sequence: Synthetic oligonucleotide
  Antisense strand to SEQ ID NO: 2194084
uaccuccugcuuaagacag

SEQ ID NO: 2194086 - RNA, 19 nt, Artificial Sequence
  Description of Artificial Sequence: Synthetic oligonucleotide
  Sense strand starting at position 419 of SEQ ID NO: 1883445
ugucuuaagcaggagguau

SEQ ID NO: 2194087 - RNA, 19 nt, Artificial Sequence
  Description of Artificial Sequence: Synthetic oligonucleotide
  Antisense strand to SEQ ID NO: 2194086
auaccuccugcuuaagaca

SEQ ID NO: 2194088 - RNA, 19 nt, Artificial Sequence
  Description of Artificial Sequence: Synthetic oligonucleotide
  Sense strand starting at position 427 of SEQ ID NO: 1883445
gcaggagguaucugagucu

SEQ ID NO: 2194089 - RNA, 19 nt, Artificial Sequence
  Description of Artificial Sequence: Synthetic oligonucleotide
  Antisense strand to SEQ ID NO: 2194088
agacucagauaccuccugc

SEQ ID NO: 2194090 - RNA, 19 nt, Artificial Sequence
  Description of Artificial Sequence: Synthetic oligonucleotide
  Sense strand starting at position 430 of SEQ ID NO: 1883445
ggagguaucugagucuguc

SEQ ID NO: 2194091 - RNA, 19 nt, Artificial Sequence
  Description of Artificial Sequence: Synthetic oligonucleotide
  Antisense strand to SEQ ID NO: 2194090
gacagacucagauaccucc

SEQ ID NO: 2194092 - RNA, 19 nt, Artificial Sequence
  Description of Artificial Sequence: Synthetic oligonucleotide
  Sense strand starting at position 481 of SEQ ID NO: 1883445
uugggaugaugucuucuca

SEQ ID NO: 2194093 - RNA, 19 nt, Artificial Sequence
  Description of Artificial Sequence: Synthetic oligonucleotide
  Antisense strand to SEQ ID NO: 2194092
ugagaagacaucaucccaa

SEQ ID NO: 2194094 - RNA, 19 nt, Artificial Sequence
  Description of Artificial Sequence: Synthetic oligonucleotide
  Sense strand starting at position 545 of SEQ ID NO: 1883445
cauccuuccugaggguuaa

SEQ ID NO: 2194095 - RNA, 19 nt, Artificial Sequence
  Description of Artificial Sequence: Synthetic oligonucleotide
  Antisense strand to SEQ ID NO: 2194094
uuaacccucaggaaggaug

SEQ ID NO: 2194096 - RNA, 19 nt, Artificial Sequence
  Description of Artificial Sequence: Synthetic oligonucleotide
  Sense strand starting at position 780 of SEQ ID NO: 1883445
uccaaauuguaauuguauc

SEQ ID NO: 2194097 - RNA, 19 nt, Artificial Sequence
  Description of Artificial Sequence: Synthetic oligonucleotide
  Antisense strand to SEQ ID NO: 2194096
gauacaauuacaauuugga

SEQ ID NO: 2194098 - RNA, 19 nt, Artificial Sequence
  Description of Artificial Sequence: Synthetic oligonucleotide
  Sense strand starting at position 786 of SEQ ID NO: 1883445
uuguaauuguauccauuac

SEQ ID NO: 2194099 - RNA, 19 nt, Artificial Sequence
  Description of Artificial Sequence: Synthetic oligonucleotide
  Antisense strand to SEQ ID NO: 2194098
guaauggauacaauuacaa

SEQ ID NO: 2194100 - RNA, 19 nt, Artificial Sequence
  Description of Artificial Sequence: Synthetic oligonucleotide
  Sense strand starting at position 863 of SEQ ID NO: 1883445
ugagcuuccugaggguuga

SEQ ID NO: 2194101 - RNA, 19 nt, Artificial Sequence
  Description of Artificial Sequence: Synthetic oligonucleotide
  Antisense strand to SEQ ID NO: 2194100
ucaacccucaggaagcuca

SEQ ID NO: 2194102 - RNA, 19 nt, Artificial Sequence
  Description of Artificial Sequence: Synthetic oligonucleotide
  Sense strand starting at position 867 of SEQ ID NO: 1883445
cuuccugaggguugaggaa

SEQ ID NO: 2194103 - RNA, 19 nt, Artificial Sequence
  Description of Artificial Sequence: Synthetic oligonucleotide
  Antisense strand to SEQ ID NO: 2194102
uuccucaacccucaggaag

SEQ ID NO: 2194104 - RNA, 19 nt, Artificial Sequence
  Description of Artificial Sequence: Synthetic oligonucleotide
  Sense strand starting at position 1098 of SEQ ID NO: 1883445
cuguacgccuaucaucaaa

SEQ ID NO: 2194105 - RNA, 19 nt, Artificial Sequence
  Description of Artificial Sequence: Synthetic oligonucleotide
  Antisense strand to SEQ ID NO: 2194104
uuugaugauaggcguacag

SEQ ID NO: 2194106 - RNA, 19 nt, Artificial Sequence
  Description of Artificial Sequence: Synthetic oligonucleotide
  Sense strand starting at position 1120 of SEQ ID NO: 1883445
ucacaauagcccuguaaag

SEQ ID NO: 2194107 - RNA, 19 nt, Artificial Sequence
  Description of Artificial Sequence: Synthetic oligonucleotide
  Antisense strand to SEQ ID NO: 2194106
cuuuacagggcuauuguga

SEQ ID NO: 2194108 - RNA, 19 nt, Artificial Sequence
  Description of Artificial Sequence: Synthetic oligonucleotide
  Sense strand starting at position 1122 of SEQ ID NO: 1883445
acaauagcccuguaaagua

SEQ ID NO: 2194109 - RNA, 19 nt, Artificial Sequence
  Description of Artificial Sequence: Synthetic oligonucleotide
  Antisense strand to SEQ ID NO: 2194108
uacuuuacagggcuauugu

SEQ ID NO: 2194110 - RNA, 19 nt, Artificial Sequence
  Description of Artificial Sequence: Synthetic oligonucleotide
  Sense strand starting at position 1686 of SEQ ID NO: 1883445
gcuggcuuugcccacaaau

SEQ ID NO: 2194111 - RNA, 19 nt, Artificial Sequence
  Description of Artificial Sequence: Synthetic oligonucleotide
  Antisense strand to SEQ ID NO: 2194110
auuugugggcaaagccagc

SEQ ID NO: 2194112 - RNA, 19 nt, Artificial Sequence
  Description of Artificial Sequence: Synthetic oligonucleotide
  Sense strand starting at position 1786 of SEQ ID NO: 1883445
ucacguuagagcuggucuu

SEQ ID NO: 2194113 - RNA, 19 nt, Artificial Sequence
  Description of Artificial Sequence: Synthetic oligonucleotide
  Antisense strand to SEQ ID NO: 2194112
aagaccagcucuaacguga

SEQ ID NO: 2194114 - RNA, 19 nt, Artificial Sequence
  Description of Artificial Sequence: Synthetic oligonucleotide
  Sense strand starting at position 1787 of SEQ ID NO: 1883445
cacguuagagcuggucuuu

SEQ ID NO: 2194115 - RNA, 19 nt, Artificial Sequence
  Description of Artificial Sequence: Synthetic oligonucleotide
  Antisense strand to SEQ ID NO: 2194114
aaagaccagcucuaacgug

SEQ ID NO: 2194116 - RNA, 19 nt, Artificial Sequence
  Description of Artificial Sequence: Synthetic oligonucleotide
  Sense strand starting at position 2098 of SEQ ID NO: 1883445
gcggguuaguacgacgaga

SEQ ID NO: 2194117 - RNA, 19 nt, Artificial Sequence
  Description of Artificial Sequence: Synthetic oligonucleotide
  Antisense strand to SEQ ID NO: 2194116
ucucgucguacuaacccgc

SEQ ID NO: 2194118 - RNA, 19 nt, Artificial Sequence
  Description of Artificial Sequence: Synthetic oligonucleotide
  Sense strand starting at position 2100 of SEQ ID NO: 1883445
ggguuaguacgacgagaag

SEQ ID NO: 2194119 - RNA, 19 nt, Artificial Sequence
  Description of Artificial Sequence: Synthetic oligonucleotide
  Antisense strand to SEQ ID NO: 2194118
cuucucgucguacuaaccc

SEQ ID NO: 2194120 - RNA, 19 nt, Artificial Sequence
  Description of Artificial Sequence: Synthetic oligonucleotide
  Sense strand starting at position 2101 of SEQ ID NO: 1883445
gguuaguacgacgagaaga

SEQ ID NO: 2194121 - RNA, 19 nt, Artificial Sequence
  Description of Artificial Sequence: Synthetic oligonucleotide
  Antisense strand to SEQ ID NO: 2194120
ucuucucgucguacuaacc

SEQ ID NO: 2194122 - RNA, 19 nt, Artificial Sequence
  Description of Artificial Sequence: Synthetic oligonucleotide
  Sense strand starting at position 2701 of SEQ ID NO: 1883445
ccuccugggauuuguaguu

SEQ ID NO: 2194123 - RNA, 19 nt, Artificial Sequence
  Description of Artificial Sequence: Synthetic oligonucleotide
  Antisense strand to SEQ ID NO: 2194122
aacuacaaaucccaggagg

SEQ ID NO: 2194124 - RNA, 19 nt, Artificial Sequence
  Description of Artificial Sequence: Synthetic oligonucleotide
  Sense strand starting at position 2805 of SEQ ID NO: 1883445
cuccuaggcgucuggagaa

SEQ ID NO: 2194125 - RNA, 19 nt, Artificial Sequence
  Description of Artificial Sequence: Synthetic oligonucleotide
  Antisense strand to SEQ ID NO: 2194124
uucuccagacgccuaggag

SEQ ID NO: 2194126 - RNA, 19 nt, Artificial Sequence
  Description of Artificial Sequence: Synthetic oligonucleotide
  Sense strand starting at position 2846 of SEQ ID NO: 1883445
aguggaggaaccuguaguu

SEQ ID NO: 2194127 - RNA, 19 nt, Artificial Sequence
  Description of Artificial Sequence: Synthetic oligonucleotide
  Antisense strand to SEQ ID NO: 2194126
aacuacagguuccuccacu

SEQ ID NO: 2194128 - RNA, 19 nt, Artificial Sequence
  Description of Artificial Sequence: Synthetic oligonucleotide
  Sense strand starting at position 3010 of SEQ ID NO: 1883445
gcaggagucacgucccguu

SEQ ID NO: 2194129 - RNA, 19 nt, Artificial Sequence
  Description of Artificial Sequence: Synthetic oligonucleotide
  Antisense strand to SEQ ID NO: 2194128
aacgggacgugacuccugc

SEQ ID NO: 2194130 - RNA, 19 nt, Artificial Sequence
  Description of Artificial Sequence: Synthetic oligonucleotide
  Sense strand starting at position 3093 of SEQ ID NO: 1883445
ugggaauguugagcaacaa

SEQ ID NO: 2194131 - RNA, 19 nt, Artificial Sequence
  Description of Artificial Sequence: Synthetic oligonucleotide
  Antisense strand to SEQ ID NO: 2194130
uuguugcucaacauuccca

SEQ ID NO: 2194132 - RNA, 19 nt, Artificial Sequence
  Description of Artificial Sequence: Synthetic oligonucleotide
  Sense strand starting at position 3150 of SEQ ID NO: 1883445
ggucuagucuagucccaga

SEQ ID NO: 2194133 - RNA, 19 nt, Artificial Sequence
  Description of Artificial Sequence: Synthetic oligonucleotide
  Antisense strand to SEQ ID NO: 2194132
ucugggacuagacuagacc

SEQ ID NO: 2194134 - RNA, 19 nt, Artificial Sequence
  Description of Artificial Sequence: Synthetic oligonucleotide
  Sense strand starting at position 3153 of SEQ ID NO: 1883445
cuagucuagucccagaacu

SEQ ID NO: 2194135 - RNA, 19 nt, Artificial Sequence
  Description of Artificial Sequence: Synthetic oligonucleotide
  Antisense strand to SEQ ID NO: 2194134
aguucugggacuagacuag

SEQ ID NO: 2194136 - RNA, 19 nt, Artificial Sequence
  Description of Artificial Sequence: Synthetic oligonucleotide
  Sense strand starting at position 3163 of SEQ ID NO: 1883445
cccagaacucgcguguucu

SEQ ID NO: 2194137 - RNA, 19 nt, Artificial Sequence
  Description of Artificial Sequence: Synthetic oligonucleotide
  Antisense strand to SEQ ID NO: 2194136
agaacacgcgaguucuggg

SEQ ID NO: 2194138 - RNA, 19 nt, Artificial Sequence
  Description of Artificial Sequence: Synthetic oligonucleotide
  Sense strand starting at position 3164 of SEQ ID NO: 1883445
ccagaacucgcguguucug

SEQ ID NO: 2194139 - RNA, 19 nt, Artificial Sequence
  Description of Artificial Sequence: Synthetic oligonucleotide
  Antisense strand to SEQ ID NO: 2194138
cagaacacgcgaguucugg

SEQ ID NO: 2194140 - RNA, 19 nt, Artificial Sequence
  Description of Artificial Sequence: Synthetic oligonucleotide
  Sense strand starting at position 3370 of SEQ ID NO: 1883445
gauagauacccauggucug

SEQ ID NO: 2194141 - RNA, 19 nt, Artificial Sequence
  Description of Artificial Sequence: Synthetic oligonucleotide
  Antisense strand to SEQ ID NO: 2194140
cagaccauggguaucuauc

SEQ ID NO: 2194142 - RNA, 19 nt, Artificial Sequence
  Description of Artificial Sequence: Synthetic oligonucleotide
  Sense strand starting at position 3598 of SEQ ID NO: 1883445
ggaagcaugcuucaugguu

SEQ ID NO: 2194143 - RNA, 19 nt, Artificial Sequence
  Description of Artificial Sequence: Synthetic oligonucleotide
  Antisense strand to SEQ ID NO: 2194142
aaccaugaagcaugcuucc

SEQ ID NO: 2194144 - RNA, 19 nt, Artificial Sequence
  Description of Artificial Sequence: Synthetic oligonucleotide
  Sense strand starting at position 3823 of SEQ ID NO: 1883445
augguucugucugugcaga

SEQ ID NO: 2194145 - RNA, 19 nt, Artificial Sequence
  Description of Artificial Sequence: Synthetic oligonucleotide
  Antisense strand to SEQ ID NO: 2194144
ucugcacagacagaaccau

SEQ ID NO: 2194146 - RNA, 19 nt, Artificial Sequence
  Description of Artificial Sequence: Synthetic oligonucleotide
  Sense strand starting at position 3825 of SEQ ID NO: 1883445
gguucugucugugcagacu

SEQ ID NO: 2194147 - RNA, 19 nt, Artificial Sequence
  Description of Artificial Sequence: Synthetic oligonucleotide
  Antisense strand to SEQ ID NO: 2194146
agucugcacagacagaacc

SEQ ID NO: 2194148 - RNA, 19 nt, Artificial Sequence
  Description of Artificial Sequence: Synthetic oligonucleotide
  Sense strand starting at position 27 of SEQ ID NO: 1883446
gguacuuauagagguaaua

SEQ ID NO: 2194149 - RNA, 19 nt, Artificial Sequence
  Description of Artificial Sequence: Synthetic oligonucleotide
  Antisense strand to SEQ ID NO: 2194148
uauuaccucuauaaguacc

SEQ ID NO: 2194150 - RNA, 19 nt, Artificial Sequence
  Description of Artificial Sequence: Synthetic oligonucleotide
  Sense strand starting at position 68 of SEQ ID NO: 1883446
ggguuccagaguuagauua

SEQ ID NO: 2194151 - RNA, 19 nt, Artificial Sequence
  Description of Artificial Sequence: Synthetic oligonucleotide
  Antisense strand to SEQ ID NO: 2194150
uaaucuaacucuggaaccc

SEQ ID NO: 2194152 - RNA, 19 nt, Artificial Sequence
  Description of Artificial Sequence: Synthetic oligonucleotide
  Sense strand starting at position 79 of SEQ ID NO: 1883446
uuagauuaccuggguuuaa

SEQ ID NO: 2194153 - RNA, 19 nt, Artificial Sequence
  Description of Artificial Sequence: Synthetic oligonucleotide
  Antisense strand to SEQ ID NO: 2194152
uuaaacccagguaaucuaa

SEQ ID NO: 2194154 - RNA, 19 nt, Artificial Sequence
  Description of Artificial Sequence: Synthetic oligonucleotide
  Sense strand starting at position 80 of SEQ ID NO: 1883446
uagauuaccuggguuuaaa

SEQ ID NO: 2194155 - RNA, 19 nt, Artificial Sequence
  Description of Artificial Sequence: Synthetic oligonucleotide
  Antisense strand to SEQ ID NO: 2194154
uuuaaacccagguaaucua

SEQ ID NO: 2194156 - RNA, 19 nt, Artificial Sequence
  Description of Artificial Sequence: Synthetic oligonucleotide
  Sense strand starting at position 154 of SEQ ID NO: 1883446
uccucaucuguauagcaga

SEQ ID NO: 2194157 - RNA, 19 nt, Artificial Sequence
  Description of Artificial Sequence: Synthetic oligonucleotide
  Antisense strand to SEQ ID NO: 2194156
ucugcuauacagaugagga

SEQ ID NO: 2194158 - RNA, 19 nt, Artificial Sequence
  Description of Artificial Sequence: Synthetic oligonucleotide
  Sense strand starting at position 159 of SEQ ID NO: 1883446
aucuguauagcagauauca

SEQ ID NO: 2194159 - RNA, 19 nt, Artificial Sequence
  Description of Artificial Sequence: Synthetic oligonucleotide
  Antisense strand to SEQ ID NO: 2194158
ugauaucugcuauacagau

SEQ ID NO: 2194160 - RNA, 19 nt, Artificial Sequence
  Description of Artificial Sequence: Synthetic oligonucleotide
  Sense strand starting at position 185 of SEQ ID NO: 1883446
acaggauuguuccugugaa

SEQ ID NO: 2194161 - RNA, 19 nt, Artificial Sequence
  Description of Artificial Sequence: Synthetic oligonucleotide
  Antisense strand to SEQ ID NO: 2194160
uucacaggaacaauccugu

SEQ ID NO: 2194162 - RNA, 19 nt, Artificial Sequence
  Description of Artificial Sequence: Synthetic oligonucleotide
  Sense strand starting at position 262 of SEQ ID NO: 1883446
ccuaguaaauacucgauaa

SEQ ID NO: 2194163 - RNA, 19 nt, Artificial Sequence
  Description of Artificial Sequence: Synthetic oligonucleotide
  Antisense strand to SEQ ID NO: 2194162
uuaucgaguauuuacuagg

SEQ ID NO: 2194164 - RNA, 19 nt, Artificial Sequence
  Description of Artificial Sequence: Synthetic oligonucleotide
  Sense strand starting at position 275 of SEQ ID NO: 1883446
cgauaaagauuacuuguca

SEQ ID NO: 2194165 - RNA, 19 nt, Artificial Sequence
  Description of Artificial Sequence: Synthetic oligonucleotide
  Antisense strand to SEQ ID NO: 2194164
ugacaaguaaucuuuaucg

SEQ ID NO: 2194166 - RNA, 19 nt, Artificial Sequence
  Description of Artificial Sequence: Synthetic oligonucleotide
  Sense strand starting at position 299 of SEQ ID NO: 1883446
auaauuauuugugcaugca

SEQ ID NO: 2194167 - RNA, 19 nt, Artificial Sequence
  Description of Artificial Sequence: Synthetic oligonucleotide
  Antisense strand to SEQ ID NO: 2194166
ugcaugcacaaauaauuau

SEQ ID NO: 2194168 - RNA, 19 nt, Artificial Sequence
  Description of Artificial Sequence: Synthetic oligonucleotide
  Sense strand starting at position 302 of SEQ ID NO: 1883446
auuauuugugcaugcauca

SEQ ID NO: 2194169 - RNA, 19 nt, Artificial Sequence
  Description of Artificial Sequence: Synthetic oligonucleotide
  Antisense strand to SEQ ID NO: 2194168
ugaugcaugcacaaauaau

SEQ ID NO: 2194170 - RNA, 19 nt, Artificial Sequence
  Description of Artificial Sequence: Synthetic oligonucleotide
  Sense strand starting at position 438 of SEQ ID NO: 1883446
uuagcccuucuaugggaaa

SEQ ID NO: 2194171 - RNA, 19 nt, Artificial Sequence
  Description of Artificial Sequence: Synthetic oligonucleotide
  Antisense strand to SEQ ID NO: 2194170
uuucccauagaagggcuaa

SEQ ID NO: 2194172 - RNA, 19 nt, Artificial Sequence
  Description of Artificial Sequence: Synthetic oligonucleotide
  Sense strand starting at position 495 of SEQ ID NO: 1883446
cauggccaucaguaaugua

SEQ ID NO: 2194173 - RNA, 19 nt, Artificial Sequence
  Description of Artificial Sequence: Synthetic oligonucleotide
  Antisense strand to SEQ ID NO: 2194172
uacauuacugauggccaug

SEQ ID NO: 2194174 - RNA, 19 nt, Artificial Sequence
  Description of Artificial Sequence: Synthetic oligonucleotide
  Sense strand starting at position 568 of SEQ ID NO: 1883446
uuauguugucuagaauuac

SEQ ID NO: 2194175 - RNA, 19 nt, Artificial Sequence
  Description of Artificial Sequence: Synthetic oligonucleotide
  Antisense strand to SEQ ID NO: 2194174
guaauucuagacaacauaa

SEQ ID NO: 2194176 - RNA, 19 nt, Artificial Sequence
  Description of Artificial Sequence: Synthetic oligonucleotide
  Sense strand starting at position 602 of SEQ ID NO: 1883446
gucuaacgccuacaauuaa

SEQ ID NO: 2194177 - RNA, 19 nt, Artificial Sequence
  Description of Artificial Sequence: Synthetic oligonucleotide
  Antisense strand to SEQ ID NO: 2194176
uuaauuguaggcguuagac

SEQ ID NO: 2194178 - RNA, 19 nt, Artificial Sequence
  Description of Artificial Sequence: Synthetic oligonucleotide
  Sense strand starting at position 639 of SEQ ID NO: 1883446
gcaagaacuuuauuagaua

SEQ ID NO: 2194179 - RNA, 19 nt, Artificial Sequence
  Description of Artificial Sequence: Synthetic oligonucleotide
  Antisense strand to SEQ ID NO: 2194178
uaucuaauaaaguucuugc

SEQ ID NO: 2194180 - RNA, 19 nt, Artificial Sequence
  Description of Artificial Sequence: Synthetic oligonucleotide
  Sense strand starting at position 751 of SEQ ID NO: 1883446
uuuaauucucaaggcugaa

SEQ ID NO: 2194181 - RNA, 19 nt, Artificial Sequence
  Description of Artificial Sequence: Synthetic oligonucleotide
  Antisense strand to SEQ ID NO: 2194180
uucagccuugagaauuaaa

SEQ ID NO: 2194182 - RNA, 19 nt, Artificial Sequence
  Description of Artificial Sequence: Synthetic oligonucleotide
  Sense strand starting at position 763 of SEQ ID NO: 1883446
ggcugaacuuaacuuguaa

SEQ ID NO: 2194183 - RNA, 19 nt, Artificial Sequence
  Description of Artificial Sequence: Synthetic oligonucleotide
  Antisense strand to SEQ ID NO: 2194182
uuacaaguuaaguucagcc

SEQ ID NO: 2194184 - RNA, 19 nt, Artificial Sequence
  Description of Artificial Sequence: Synthetic oligonucleotide
  Sense strand starting at position 848 of SEQ ID NO: 1883446
gacuuuaguguugaguuua

SEQ ID NO: 2194185 - RNA, 19 nt, Artificial Sequence
  Description of Artificial Sequence: Synthetic oligonucleotide
  Antisense strand to SEQ ID NO: 2194184
uaaacucaacacuaaaguc

SEQ ID NO: 2194186 - RNA, 19 nt, Artificial Sequence
  Description of Artificial Sequence: Synthetic oligonucleotide
  Sense strand starting at position 1109 of SEQ ID NO: 1883446
gagugaaugauuugcacgu

SEQ ID NO: 2194187 - RNA, 19 nt, Artificial Sequence
  Description of Artificial Sequence: Synthetic oligonucleotide
  Antisense strand to SEQ ID NO: 2194186
acgugcaaaucauucacuc

SEQ ID NO: 2194188 - RNA, 19 nt, Artificial Sequence
  Description of Artificial Sequence: Synthetic oligonucleotide
  Sense strand starting at position 1113 of SEQ ID NO: 1883446
gaaugauuugcacguguga

SEQ ID NO: 2194189 - RNA, 19 nt, Artificial Sequence
  Description of Artificial Sequence: Synthetic oligonucleotide
  Antisense strand to SEQ ID NO: 2194188
ucacacgugcaaaucauuc

SEQ ID NO: 2194190 - RNA, 19 nt, Artificial Sequence
  Description of Artificial Sequence: Synthetic oligonucleotide
  Sense strand starting at position 2179 of SEQ ID NO: 1883446
gagguaagauaaguuggua

SEQ ID NO: 2194191 - RNA, 19 nt, Artificial Sequence
  Description of Artificial Sequence: Synthetic oligonucleotide
  Antisense strand to SEQ ID NO: 2194190
uaccaacuuaucuuaccuc

SEQ ID NO: 2194192 - RNA, 19 nt, Artificial Sequence
  Description of Artificial Sequence: Synthetic oligonucleotide
  Sense strand starting at position 2394 of SEQ ID NO: 1883446
ucuaguggugagugggaaa

SEQ ID NO: 2194193 - RNA, 19 nt, Artificial Sequence
  Description of Artificial Sequence: Synthetic oligonucleotide
  Antisense strand to SEQ ID NO: 2194192
uuucccacucaccacuaga

SEQ ID NO: 2194194 - RNA, 19 nt, Artificial Sequence
  Description of Artificial Sequence: Synthetic oligonucleotide
  Sense strand starting at position 2407 of SEQ ID NO: 1883446
gggaaacaguugucuauag

SEQ ID NO: 2194195 - RNA, 19 nt, Artificial Sequence
  Description of Artificial Sequence: Synthetic oligonucleotide
  Antisense strand to SEQ ID NO: 2194194
cuauagacaacuguuuccc

SEQ ID NO: 2194196 - RNA, 19 nt, Artificial Sequence
  Description of Artificial Sequence: Synthetic oligonucleotide
  Sense strand starting at position 2409 of SEQ ID NO: 1883446
gaaacaguugucuauagug

SEQ ID NO: 2194197 - RNA, 19 nt, Artificial Sequence
  Description of Artificial Sequence: Synthetic oligonucleotide
  Antisense strand to SEQ ID NO: 2194196
cacuauagacaacuguuuc

SEQ ID NO: 2194198 - RNA, 19 nt, Artificial Sequence
  Description of Artificial Sequence: Synthetic oligonucleotide
  Sense strand starting at position 2411 of SEQ ID NO: 1883446
aacaguugucuauagugga

SEQ ID NO: 2194199 - RNA, 19 nt, Artificial Sequence
  Description of Artificial Sequence: Synthetic oligonucleotide
  Antisense strand to SEQ ID NO: 2194198
uccacuauagacaacuguu

SEQ ID NO: 2194200 - RNA, 19 nt, Artificial Sequence
  Description of Artificial Sequence: Synthetic oligonucleotide
  Sense strand starting at position 2415 of SEQ ID NO: 1883446
guugucuauaguggagaaa

SEQ ID NO: 2194201 - RNA, 19 nt, Artificial Sequence
  Description of Artificial Sequence: Synthetic oligonucleotide
  Antisense strand to SEQ ID NO: 2194200
uuucuccacuauagacaac

SEQ ID NO: 2194202 - RNA, 19 nt, Artificial Sequence
  Description of Artificial Sequence: Synthetic oligonucleotide
  Sense strand starting at position 2509 of SEQ ID NO: 1883446
gguugaagggcugagaguu

SEQ ID NO: 2194203 - RNA, 19 nt, Artificial Sequence
  Description of Artificial Sequence: Synthetic oligonucleotide
  Antisense strand to SEQ ID NO: 2194202
aacucucagcccuucaacc

SEQ ID NO: 2194204 - RNA, 19 nt, Artificial Sequence
  Description of Artificial Sequence: Synthetic oligonucleotide
  Sense strand starting at position 2556 of SEQ ID NO: 1883446
ucuucuugccgcuuuacua

SEQ ID NO: 2194205 - RNA, 19 nt, Artificial Sequence
  Description of Artificial Sequence: Synthetic oligonucleotide
  Antisense strand to SEQ ID NO: 2194204
uaguaaagcggcaagaaga

SEQ ID NO: 2194206 - RNA, 19 nt, Artificial Sequence
  Description of Artificial Sequence: Synthetic oligonucleotide
  Sense strand starting at position 2878 of SEQ ID NO: 1883446
gaguaagcgagaugagaug

SEQ ID NO: 2194207 - RNA, 19 nt, Artificial Sequence
  Description of Artificial Sequence: Synthetic oligonucleotide
  Antisense strand to SEQ ID NO: 2194206
caucucaucucgcuuacuc

SEQ ID NO: 2194208 - RNA, 19 nt, Artificial Sequence
  Description of Artificial Sequence: Synthetic oligonucleotide
  Sense strand starting at position 2920 of SEQ ID NO: 1883446
uuugguugaguaggagaua

SEQ ID NO: 2194209 - RNA, 19 nt, Artificial Sequence
  Description of Artificial Sequence: Synthetic oligonucleotide
  Antisense strand to SEQ ID NO: 2194208
uaucuccuacucaaccaaa

SEQ ID NO: 2194210 - RNA, 19 nt, Artificial Sequence
  Description of Artificial Sequence: Synthetic oligonucleotide
  Sense strand starting at position 2934 of SEQ ID NO: 1883446
agauauuaucaacaugugu

SEQ ID NO: 2194211 - RNA, 19 nt, Artificial Sequence
  Description of Artificial Sequence: Synthetic oligonucleotide
  Antisense strand to SEQ ID NO: 2194210
acacauguugauaauaucu

SEQ ID NO: 2194212 - RNA, 19 nt, Artificial Sequence
  Description of Artificial Sequence: Synthetic oligonucleotide
  Sense strand starting at position 3119 of SEQ ID NO: 1883446
ccacaagugguuuaguauu

SEQ ID NO: 2194213 - RNA, 19 nt, Artificial Sequence
  Description of Artificial Sequence: Synthetic oligonucleotide
  Antisense strand to SEQ ID NO: 2194212
aauacuaaaccacuugugg

SEQ ID NO: 2194214 - RNA, 19 nt, Artificial Sequence
  Description of Artificial Sequence: Synthetic oligonucleotide
  Sense strand starting at position 3363 of SEQ ID NO: 1883446
agucuuucccaucagacuu

SEQ ID NO: 2194215 - RNA, 19 nt, Artificial Sequence
  Description of Artificial Sequence: Synthetic oligonucleotide
  Antisense strand to SEQ ID NO: 2194214
aagucugaugggaaagacu

SEQ ID NO: 2194216 - RNA, 19 nt, Artificial Sequence
  Description of Artificial Sequence: Synthetic oligonucleotide
  Sense strand starting at position 3690 of SEQ ID NO: 1883446
gccaauuauggacauuauc

SEQ ID NO: 2194217 - RNA, 19 nt, Artificial Sequence
  Description of Artificial Sequence: Synthetic oligonucleotide
  Antisense strand to SEQ ID NO: 2194216
gauaauguccauaauuggc

SEQ ID NO: 2194218 - RNA, 19 nt, Artificial Sequence
  Description of Artificial Sequence: Synthetic oligonucleotide
  Sense strand starting at position 3795 of SEQ ID NO: 1883446
gguuuacagugauugaaau

SEQ ID NO: 2194219 - RNA, 19 nt, Artificial Sequence
  Description of Artificial Sequence: Synthetic oligonucleotide
  Antisense strand to SEQ ID NO: 2194218
auuucaaucacuguaaacc

SEQ ID NO: 2194220 - RNA, 19 nt, Artificial Sequence
  Description of Artificial Sequence: Synthetic oligonucleotide
  Sense strand starting at position 3796 of SEQ ID NO: 1883446
guuuacagugauugaaauc

SEQ ID NO: 2194221 - RNA, 19 nt, Artificial Sequence
  Description of Artificial Sequence: Synthetic oligonucleotide
  Antisense strand to SEQ ID NO: 2194220
gauuucaaucacuguaaac

SEQ ID NO: 2194222 - RNA, 19 nt, Artificial Sequence
  Description of Artificial Sequence: Synthetic oligonucleotide
  Sense strand starting at position 3817 of SEQ ID NO: 1883446
aucuguuaaccacgaaacu

SEQ ID NO: 2194223 - RNA, 19 nt, Artificial Sequence
  Description of Artificial Sequence: Synthetic oligonucleotide
  Antisense strand to SEQ ID NO: 2194222
aguuucgugguuaacagau

SEQ ID NO: 2194224 - RNA, 19 nt, Artificial Sequence
  Description of Artificial Sequence: Synthetic oligonucleotide
  Sense strand starting at position 3818 of SEQ ID NO: 1883446
ucuguuaaccacgaaacuu

SEQ ID NO: 2194225 - RNA, 19 nt, Artificial Sequence
  Description of Artificial Sequence: Synthetic oligonucleotide
  Antisense strand to SEQ ID NO: 2194224
aaguuucgugguuaacaga

SEQ ID NO: 2194226 - RNA, 19 nt, Artificial Sequence
  Description of Artificial Sequence: Synthetic oligonucleotide
  Sense strand starting at position 3898 of SEQ ID NO: 1883446
gugaguacugcuugaauuu

SEQ ID NO: 2194227 - RNA, 19 nt, Artificial Sequence
  Description of Artificial Sequence: Synthetic oligonucleotide
  Antisense strand to SEQ ID NO: 2194226
aaauucaagcaguacucac

SEQ ID NO: 2194228 - RNA, 19 nt, Artificial Sequence
  Description of Artificial Sequence: Synthetic oligonucleotide
  Sense strand starting at position 5 of SEQ ID NO: 1883447
agcagaaugucagggcuga

SEQ ID NO: 2194229 - RNA, 19 nt, Artificial Sequence
  Description of Artificial Sequence: Synthetic oligonucleotide
  Antisense strand to SEQ ID NO: 2194228
ucagcccugacauucugcu

SEQ ID NO: 2194230 - RNA, 19 nt, Artificial Sequence
  Description of Artificial Sequence: Synthetic oligonucleotide
  Sense strand starting at position 988 of SEQ ID NO: 1883447
ggucaugaugcccaaggga

SEQ ID NO: 2194231 - RNA, 19 nt, Artificial Sequence
  Description of Artificial Sequence: Synthetic oligonucleotide
  Antisense strand to SEQ ID NO: 2194230
ucccuugggcaucaugacc

SEQ ID NO: 2194232 - RNA, 19 nt, Artificial Sequence
  Description of Artificial Sequence: Synthetic oligonucleotide
  Sense strand starting at position 1389 of SEQ ID NO: 1883447
cuucuucuagcuugaaaga

SEQ ID NO: 2194233 - RNA, 19 nt, Artificial Sequence
  Description of Artificial Sequence: Synthetic oligonucleotide
  Antisense strand to SEQ ID NO: 2194232
ucuuucaagcuagaagaag

SEQ ID NO: 2194234 - RNA, 19 nt, Artificial Sequence
  Description of Artificial Sequence: Synthetic oligonucleotide
  Sense strand starting at position 1390 of SEQ ID NO: 1883447
uucuucuagcuugaaagaa

SEQ ID NO: 2194235 - RNA, 19 nt, Artificial Sequence
  Description of Artificial Sequence: Synthetic oligonucleotide
  Antisense strand to SEQ ID NO: 2194234
uucuuucaagcuagaagaa

SEQ ID NO: 2194236 - RNA, 19 nt, Artificial Sequence
  Description of Artificial Sequence: Synthetic oligonucleotide
  Sense strand starting at position 2472 of SEQ ID NO: 1883447
accgcauucccuuggaaau

SEQ ID NO: 2194237 - RNA, 19 nt, Artificial Sequence
  Description of Artificial Sequence: Synthetic oligonucleotide
  Antisense strand to SEQ ID NO: 2194236
auuuccaagggaaugcggu

SEQ ID NO: 2194238 - RNA, 19 nt, Artificial Sequence
  Description of Artificial Sequence: Synthetic oligonucleotide
  Sense strand starting at position 2473 of SEQ ID NO: 1883447
ccgcauucccuuggaaauc

SEQ ID NO: 2194239 - RNA, 19 nt, Artificial Sequence
  Description of Artificial Sequence: Synthetic oligonucleotide
  Antisense strand to SEQ ID NO: 2194238
gauuuccaagggaaugcgg

SEQ ID NO: 2194240 - RNA, 19 nt, Artificial Sequence
  Description of Artificial Sequence: Synthetic oligonucleotide
  Sense strand starting at position 3028 of SEQ ID NO: 1883447
gaaggacucgugugggaac

SEQ ID NO: 2194241 - RNA, 19 nt, Artificial Sequence
  Description of Artificial Sequence: Synthetic oligonucleotide
  Antisense strand to SEQ ID NO: 2194240
guucccacacgaguccuuc

SEQ ID NO: 2194242 - RNA, 19 nt, Artificial Sequence
  Description of Artificial Sequence: Synthetic oligonucleotide
  Sense strand starting at position 3030 of SEQ ID NO: 1883447
aggacucgugugggaacau

SEQ ID NO: 2194243 - RNA, 19 nt, Artificial Sequence
  Description of Artificial Sequence: Synthetic oligonucleotide
  Antisense strand to SEQ ID NO: 2194242
auguucccacacgaguccu

SEQ ID NO: 2194244 - RNA, 19 nt, Artificial Sequence
  Description of Artificial Sequence: Synthetic oligonucleotide
  Sense strand starting at position 3031 of SEQ ID NO: 1883447
ggacucgugugggaacauu

SEQ ID NO: 2194245 - RNA, 19 nt, Artificial Sequence
  Description of Artificial Sequence: Synthetic oligonucleotide
  Antisense strand to SEQ ID NO: 2194244
aauguucccacacgagucc

SEQ ID NO: 2194246 - RNA, 19 nt, Artificial Sequence
  Description of Artificial Sequence: Synthetic oligonucleotide
  Sense strand starting at position 3165 of SEQ ID NO: 1883447
gcacaucagcugugacacu

SEQ ID NO: 2194247 - RNA, 19 nt, Artificial Sequence
  Description of Artificial Sequence: Synthetic oligonucleotide
  Antisense strand to SEQ ID NO: 2194246
agugucacagcugaugugc

SEQ ID NO: 2194248 - RNA, 19 nt, Artificial Sequence
  Description of Artificial Sequence: Synthetic oligonucleotide
  Sense strand starting at position 3683 of SEQ ID NO: 1883447
uggugagcuucuuggagga

SEQ ID NO: 2194249 - RNA, 19 nt, Artificial Sequence
  Description of Artificial Sequence: Synthetic oligonucleotide
  Antisense strand to SEQ ID NO: 2194248
uccuccaagaagcucacca

SEQ ID NO: 2194250 - RNA, 19 nt, Artificial Sequence
  Description of Artificial Sequence: Synthetic oligonucleotide
  Sense strand starting at position 3719 of SEQ ID NO: 1883447
gcaaguuguggcugaccua

SEQ ID NO: 2194251 - RNA, 19 nt, Artificial Sequence
  Description of Artificial Sequence: Synthetic oligonucleotide
  Antisense strand to SEQ ID NO: 2194250
uaggucagccacaacuugc

SEQ ID NO: 2194252 - RNA, 19 nt, Artificial Sequence
  Description of Artificial Sequence: Synthetic oligonucleotide
  Sense strand starting at position 3763 of SEQ ID NO: 1883447
ggcgcacugcugguaaguu

SEQ ID NO: 2194253 - RNA, 19 nt, Artificial Sequence
  Description of Artificial Sequence: Synthetic oligonucleotide
  Antisense strand to SEQ ID NO: 2194252
aacuuaccagcagugcgcc

SEQ ID NO: 2194254 - RNA, 19 nt, Artificial Sequence
  Description of Artificial Sequence: Synthetic oligonucleotide
  Sense strand starting at position 3908 of SEQ ID NO: 1883447
accggcaucaaccguaaua

SEQ ID NO: 2194255 - RNA, 19 nt, Artificial Sequence
  Description of Artificial Sequence: Synthetic oligonucleotide
  Antisense strand to SEQ ID NO: 2194254
uauuacgguugaugccggu

SEQ ID NO: 2194256 - RNA, 19 nt, Artificial Sequence
  Description of Artificial Sequence: Synthetic oligonucleotide
  Sense strand starting at position 3946 of SEQ ID NO: 1883447
ugucgaggcucugcagaaa

SEQ ID NO: 2194257 - RNA, 19 nt, Artificial Sequence
  Description of Artificial Sequence: Synthetic oligonucleotide
  Antisense strand to SEQ ID NO: 2194256
uuucugcagagccucgaca

SEQ ID NO: 2194258 - RNA, 19 nt, Artificial Sequence
  Description of Artificial Sequence: Synthetic oligonucleotide
  Sense strand starting at position 321 of SEQ ID NO: 1883448
gcacgacaggaaugagaau

SEQ ID NO: 2194259 - RNA, 19 nt, Artificial Sequence
  Description of Artificial Sequence: Synthetic oligonucleotide
  Antisense strand to SEQ ID NO: 2194258
auucucauuccugucgugc

SEQ ID NO: 2194260 - RNA, 19 nt, Artificial Sequence
  Description of Artificial Sequence: Synthetic oligonucleotide
  Sense strand starting at position 481 of SEQ ID NO: 1883448
acccuaguauugguaauau

SEQ ID NO: 2194261 - RNA, 19 nt, Artificial Sequence
  Description of Artificial Sequence: Synthetic oligonucleotide
  Antisense strand to SEQ ID NO: 2194260
auauuaccaauacuagggu

SEQ ID NO: 2194262 - RNA, 19 nt, Artificial Sequence
  Description of Artificial Sequence: Synthetic oligonucleotide
  Sense strand starting at position 507 of SEQ ID NO: 1883448
cucaaauguaucgguggau

SEQ ID NO: 2194263 - RNA, 19 nt, Artificial Sequence
  Description of Artificial Sequence: Synthetic oligonucleotide
  Antisense strand to SEQ ID NO: 2194262
auccaccgauacauuugag

SEQ ID NO: 2194264 - RNA, 19 nt, Artificial Sequence
  Description of Artificial Sequence: Synthetic oligonucleotide
  Sense strand starting at position 508 of SEQ ID NO: 1883448
ucaaauguaucgguggauu

SEQ ID NO: 2194265 - RNA, 19 nt, Artificial Sequence
  Description of Artificial Sequence: Synthetic oligonucleotide
  Antisense strand to SEQ ID NO: 2194264
aauccaccgauacauuuga

SEQ ID NO: 2194266 - RNA, 19 nt, Artificial Sequence
  Description of Artificial Sequence: Synthetic oligonucleotide
  Sense strand starting at position 510 of SEQ ID NO: 1883448
aaauguaucgguggauucu

SEQ ID NO: 2194267 - RNA, 19 nt, Artificial Sequence
  Description of Artificial Sequence: Synthetic oligonucleotide
  Antisense strand to SEQ ID NO: 2194266
agaauccaccgauacauuu

SEQ ID NO: 2194268 - RNA, 19 nt, Artificial Sequence
  Description of Artificial Sequence: Synthetic oligonucleotide
  Sense strand starting at position 511 of SEQ ID NO: 1883448
aauguaucgguggauucuu

SEQ ID NO: 2194269 - RNA, 19 nt, Artificial Sequence
  Description of Artificial Sequence: Synthetic oligonucleotide
  Antisense strand to SEQ ID NO: 2194268
aagaauccaccgauacauu

SEQ ID NO: 2194270 - RNA, 19 nt, Artificial Sequence
  Description of Artificial Sequence: Synthetic oligonucleotide
  Sense strand starting at position 688 of SEQ ID NO: 1883448
auucgucuucuugacaguu

SEQ ID NO: 2194271 - RNA, 19 nt, Artificial Sequence
  Description of Artificial Sequence: Synthetic oligonucleotide
  Antisense strand to SEQ ID NO: 2194270
aacugucaagaagacgaau

SEQ ID NO: 2194272 - RNA, 19 nt, Artificial Sequence
  Description of Artificial Sequence: Synthetic oligonucleotide
  Sense strand starting at position 763 of SEQ ID NO: 1883448
uacgaagucucacugauga

SEQ ID NO: 2194273 - RNA, 19 nt, Artificial Sequence
  Description of Artificial Sequence: Synthetic oligonucleotide
  Antisense strand to SEQ ID NO: 2194272
ucaucagugagacuucgua

SEQ ID NO: 2194274 - RNA, 19 nt, Artificial Sequence
  Description of Artificial Sequence: Synthetic oligonucleotide
  Sense strand starting at position 1163 of SEQ ID NO: 1883448
ucuguauuauguccagaaa

SEQ ID NO: 2194275 - RNA, 19 nt, Artificial Sequence
  Description of Artificial Sequence: Synthetic oligonucleotide
  Antisense strand to SEQ ID NO: 2194274
uuucuggacauaauacaga

SEQ ID NO: 2194276 - RNA, 19 nt, Artificial Sequence
  Description of Artificial Sequence: Synthetic oligonucleotide
  Sense strand starting at position 1164 of SEQ ID NO: 1883448
cuguauuauguccagaaau

SEQ ID NO: 2194277 - RNA, 19 nt, Artificial Sequence
  Description of Artificial Sequence: Synthetic oligonucleotide
  Antisense strand to SEQ ID NO: 2194276
auuucuggacauaauacag

SEQ ID NO: 2194278 - RNA, 19 nt, Artificial Sequence
  Description of Artificial Sequence: Synthetic oligonucleotide
  Sense strand starting at position 1166 of SEQ ID NO: 1883448
guauuauguccagaaauac

SEQ ID NO: 2194279 - RNA, 19 nt, Artificial Sequence
  Description of Artificial Sequence: Synthetic oligonucleotide
  Antisense strand to SEQ ID NO: 2194278
guauuucuggacauaauac

SEQ ID NO: 2194280 - RNA, 19 nt, Artificial Sequence
  Description of Artificial Sequence: Synthetic oligonucleotide
  Sense strand starting at position 1322 of SEQ ID NO: 1883448
acugacuagcucuacgaau

SEQ ID NO: 2194281 - RNA, 19 nt, Artificial Sequence
  Description of Artificial Sequence: Synthetic oligonucleotide
  Antisense strand to SEQ ID NO: 2194280
auucguagagcuagucagu

SEQ ID NO: 2194282 - RNA, 19 nt, Artificial Sequence
  Description of Artificial Sequence: Synthetic oligonucleotide
  Sense strand starting at position 1333 of SEQ ID NO: 1883448
cuacgaaugggucgagacu

SEQ ID NO: 2194283 - RNA, 19 nt, Artificial Sequence
  Description of Artificial Sequence: Synthetic oligonucleotide
  Antisense strand to SEQ ID NO: 2194282
agucucgacccauucguag

SEQ ID NO: 2194284 - RNA, 19 nt, Artificial Sequence
  Description of Artificial Sequence: Synthetic oligonucleotide
  Sense strand starting at position 1334 of SEQ ID NO: 1883448
uacgaaugggucgagacua

SEQ ID NO: 2194285 - RNA, 19 nt, Artificial Sequence
  Description of Artificial Sequence: Synthetic oligonucleotide
  Antisense strand to SEQ ID NO: 2194284
uagucucgacccauucgua

SEQ ID NO: 2194286 - RNA, 19 nt, Artificial Sequence
  Description of Artificial Sequence: Synthetic oligonucleotide
  Sense strand starting at position 1339 of SEQ ID NO: 1883448
augggucgagacuaguaau

SEQ ID NO: 2194287 - RNA, 19 nt, Artificial Sequence
  Description of Artificial Sequence: Synthetic oligonucleotide
  Antisense strand to SEQ ID NO: 2194286
auuacuagucucgacccau

SEQ ID NO: 2194288 - RNA, 19 nt, Artificial Sequence
  Description of Artificial Sequence: Synthetic oligonucleotide
  Sense strand starting at position 1352 of SEQ ID NO: 1883448
aguaaugacucaguaaacu

SEQ ID NO: 2194289 - RNA, 19 nt, Artificial Sequence
  Description of Artificial Sequence: Synthetic oligonucleotide
  Antisense strand to SEQ ID NO: 2194288
aguuuacugagucauuacu

SEQ ID NO: 2194290 - RNA, 19 nt, Artificial Sequence
  Description of Artificial Sequence: Synthetic oligonucleotide
  Sense strand starting at position 1625 of SEQ ID NO: 1883448
ccaguuucugagcagagga

SEQ ID NO: 2194291 - RNA, 19 nt, Artificial Sequence
  Description of Artificial Sequence: Synthetic oligonucleotide
  Antisense strand to SEQ ID NO: 2194290
uccucugcucagaaacugg

SEQ ID NO: 2194292 - RNA, 19 nt, Artificial Sequence
  Description of Artificial Sequence: Synthetic oligonucleotide
  Sense strand starting at position 1650 of SEQ ID NO: 1883448
accgguguugacggagaaa

SEQ ID NO: 2194293 - RNA, 19 nt, Artificial Sequence
  Description of Artificial Sequence: Synthetic oligonucleotide
  Antisense strand to SEQ ID NO: 2194292
uuucuccgucaacaccggu

SEQ ID NO: 2194294 - RNA, 19 nt, Artificial Sequence
  Description of Artificial Sequence: Synthetic oligonucleotide
  Sense strand starting at position 1653 of SEQ ID NO: 1883448
gguguugacggagaaaggu

SEQ ID NO: 2194295 - RNA, 19 nt, Artificial Sequence
  Description of Artificial Sequence: Synthetic oligonucleotide
  Antisense strand to SEQ ID NO: 2194294
accuuucuccgucaacacc

SEQ ID NO: 2194296 - RNA, 19 nt, Artificial Sequence
  Description of Artificial Sequence: Synthetic oligonucleotide
  Sense strand starting at position 1684 of SEQ ID NO: 1883448
ccaggugguuacucacaaa

SEQ ID NO: 2194297 - RNA, 19 nt, Artificial Sequence
  Description of Artificial Sequence: Synthetic oligonucleotide
  Antisense strand to SEQ ID NO: 2194296
uuugugaguaaccaccugg

SEQ ID NO: 2194298 - RNA, 19 nt, Artificial Sequence
  Description of Artificial Sequence: Synthetic oligonucleotide
  Sense strand starting at position 2242 of SEQ ID NO: 1883448
aggaguaacucugcuagag

SEQ ID NO: 2194299 - RNA, 19 nt, Artificial Sequence
  Description of Artificial Sequence: Synthetic oligonucleotide
  Antisense strand to SEQ ID NO: 2194298
cucuagcagaguuacuccu

SEQ ID NO: 2194300 - RNA, 19 nt, Artificial Sequence
  Description of Artificial Sequence: Synthetic oligonucleotide
  Sense strand starting at position 2257 of SEQ ID NO: 1883448
agagcuagucaauguuuaa

SEQ ID NO: 2194301 - RNA, 19 nt, Artificial Sequence
  Description of Artificial Sequence: Synthetic oligonucleotide
  Antisense strand to SEQ ID NO: 2194300
uuaaacauugacuagcucu

SEQ ID NO: 2194302 - RNA, 19 nt, Artificial Sequence
  Description of Artificial Sequence: Synthetic oligonucleotide
  Sense strand starting at position 2260 of SEQ ID NO: 1883448
gcuagucaauguuuaauuu

SEQ ID NO: 2194303 - RNA, 19 nt, Artificial Sequence
  Description of Artificial Sequence: Synthetic oligonucleotide
  Antisense strand to SEQ ID NO: 2194302
aaauuaaacauugacuagc

SEQ ID NO: 2194304 - RNA, 19 nt, Artificial Sequence
  Description of Artificial Sequence: Synthetic oligonucleotide
  Sense strand starting at position 2293 of SEQ ID NO: 1883448
gaugcaaacgagcagaaua

SEQ ID NO: 2194305 - RNA, 19 nt, Artificial Sequence
  Description of Artificial Sequence: Synthetic oligonucleotide
  Antisense strand to SEQ ID NO: 2194304
uauucugcucguuugcauc

SEQ ID NO: 2194306 - RNA, 19 nt, Artificial Sequence
  Description of Artificial Sequence: Synthetic oligonucleotide
  Sense strand starting at position 2648 of SEQ ID NO: 1883448
uuaccuaccuuguuuauga

SEQ ID NO: 2194307 - RNA, 19 nt, Artificial Sequence
  Description of Artificial Sequence: Synthetic oligonucleotide
  Antisense strand to SEQ ID NO: 2194306
ucauaaacaagguagguaa

SEQ ID NO: 2194308 - RNA, 19 nt, Artificial Sequence
  Description of Artificial Sequence: Synthetic oligonucleotide
  Sense strand starting at position 2656 of SEQ ID NO: 1883448
cuuguuuaugaacauguua

SEQ ID NO: 2194309 - RNA, 19 nt, Artificial Sequence
  Description of Artificial Sequence: Synthetic oligonucleotide
  Antisense strand to SEQ ID NO: 2194308
uaacauguucauaaacaag

SEQ ID NO: 2194310 - RNA, 19 nt, Artificial Sequence
  Description of Artificial Sequence: Synthetic oligonucleotide
  Sense strand starting at position 2670 of SEQ ID NO: 1883448
uguuauaauuugcuguuga

SEQ ID NO: 2194311 - RNA, 19 nt, Artificial Sequence
  Description of Artificial Sequence: Synthetic oligonucleotide
  Antisense strand to SEQ ID NO: 2194310
ucaacagcaaauuauaaca

SEQ ID NO: 2194312 - RNA, 19 nt, Artificial Sequence
  Description of Artificial Sequence: Synthetic oligonucleotide
  Sense strand starting at position 2765 of SEQ ID NO: 1883448
agcagaaaggcuuaugauc

SEQ ID NO: 2194313 - RNA, 19 nt, Artificial Sequence
  Description of Artificial Sequence: Synthetic oligonucleotide
  Antisense strand to SEQ ID NO: 2194312
gaucauaagccuuucugcu

SEQ ID NO: 2194314 - RNA, 19 nt, Artificial Sequence
  Description of Artificial Sequence: Synthetic oligonucleotide
  Sense strand starting at position 2778 of SEQ ID NO: 1883448
augaucuuguugccagaaa

SEQ ID NO: 2194315 - RNA, 19 nt, Artificial Sequence
  Description of Artificial Sequence: Synthetic oligonucleotide
  Antisense strand to SEQ ID NO: 2194314
uuucuggcaacaagaucau

SEQ ID NO: 2194316 - RNA, 19 nt, Artificial Sequence
  Description of Artificial Sequence: Synthetic oligonucleotide
  Sense strand starting at position 3305 of SEQ ID NO: 1883448
cucagucuugaguagcuaa

SEQ ID NO: 2194317 - RNA, 19 nt, Artificial Sequence
  Description of Artificial Sequence: Synthetic oligonucleotide
  Antisense strand to SEQ ID NO: 2194316
uuagcuacucaagacugag

SEQ ID NO: 2194318 - RNA, 19 nt, Artificial Sequence
  Description of Artificial Sequence: Synthetic oligonucleotide
  Sense strand starting at position 3308 of SEQ ID NO: 1883448
agucuugaguagcuaaaug

SEQ ID NO: 2194319 - RNA, 19 nt, Artificial Sequence
  Description of Artificial Sequence: Synthetic oligonucleotide
  Antisense strand to SEQ ID NO: 2194318
cauuuagcuacucaagacu

SEQ ID NO: 2194320 - RNA, 19 nt, Artificial Sequence
  Description of Artificial Sequence: Synthetic oligonucleotide
  Sense strand starting at position 3354 of SEQ ID NO: 1883448
aaacguuucguagaaaugc

SEQ ID NO: 2194321 - RNA, 19 nt, Artificial Sequence
  Description of Artificial Sequence: Synthetic oligonucleotide
  Antisense strand to SEQ ID NO: 2194320
gcauuucuacgaaacguuu

SEQ ID NO: 2194322 - RNA, 19 nt, Artificial Sequence
  Description of Artificial Sequence: Synthetic oligonucleotide
  Sense strand starting at position 3491 of SEQ ID NO: 1883448
uccuuuagacaccggaaau

SEQ ID NO: 2194323 - RNA, 19 nt, Artificial Sequence
  Description of Artificial Sequence: Synthetic oligonucleotide
  Antisense strand to SEQ ID NO: 2194322
auuuccggugucuaaagga

SEQ ID NO: 2194324 - RNA, 19 nt, Artificial Sequence
  Description of Artificial Sequence: Synthetic oligonucleotide
  Sense strand starting at position 3569 of SEQ ID NO: 1883448
augaauaucuaagccuagu

SEQ ID NO: 2194325 - RNA, 19 nt, Artificial Sequence
  Description of Artificial Sequence: Synthetic oligonucleotide
  Antisense strand to SEQ ID NO: 2194324
acuaggcuuagauauucau

SEQ ID NO: 2194326 - RNA, 19 nt, Artificial Sequence
  Description of Artificial Sequence: Synthetic oligonucleotide
  Sense strand starting at position 3600 of SEQ ID NO: 1883448
acaaauugugauuguaccu

SEQ ID NO: 2194327 - RNA, 19 nt, Artificial Sequence
  Description of Artificial Sequence: Synthetic oligonucleotide
  Antisense strand to SEQ ID NO: 2194326
agguacaaucacaauuugu

SEQ ID NO: 2194328 - RNA, 19 nt, Artificial Sequence
  Description of Artificial Sequence: Synthetic oligonucleotide
  Sense strand starting at position 3687 of SEQ ID NO: 1883448
gccguuucuccuguuaagu

SEQ ID NO: 2194329 - RNA, 19 nt, Artificial Sequence
  Description of Artificial Sequence: Synthetic oligonucleotide
  Antisense strand to SEQ ID NO: 2194328
acuuaacaggagaaacggc

SEQ ID NO: 2194330 - RNA, 19 nt, Artificial Sequence
  Description of Artificial Sequence: Synthetic oligonucleotide
  Sense strand starting at position 3725 of SEQ ID NO: 1883448
ugcuucuuggacuaagauu

SEQ ID NO: 2194331 - RNA, 19 nt, Artificial Sequence
  Description of Artificial Sequence: Synthetic oligonucleotide
  Antisense strand to SEQ ID NO: 2194330
aaucuuaguccaagaagca

SEQ ID NO: 2194332 - RNA, 19 nt, Artificial Sequence
  Description of Artificial Sequence: Synthetic oligonucleotide
  Sense strand starting at position 3737 of SEQ ID NO: 1883448
uaagauuccuggcuggaug

SEQ ID NO: 2194333 - RNA, 19 nt, Artificial Sequence
  Description of Artificial Sequence: Synthetic oligonucleotide
  Antisense strand to SEQ ID NO: 2194332
cauccagccaggaaucuua

SEQ ID NO: 2194334 - RNA, 19 nt, Artificial Sequence
  Description of Artificial Sequence: Synthetic oligonucleotide
  Sense strand starting at position 3842 of SEQ ID NO: 1883448
aagugagaguuaguuugga

SEQ ID NO: 2194335 - RNA, 19 nt, Artificial Sequence
  Description of Artificial Sequence: Synthetic oligonucleotide
  Antisense strand to SEQ ID NO: 2194334
uccaaacuaacucucacuu

SEQ ID NO: 2194336 - RNA, 19 nt, Artificial Sequence
  Description of Artificial Sequence: Synthetic oligonucleotide
  Sense strand starting at position 3915 of SEQ ID NO: 1883448
agugcagggccauaugaua

SEQ ID NO: 2194337 - RNA, 19 nt, Artificial Sequence
  Description of Artificial Sequence: Synthetic oligonucleotide
  Antisense strand to SEQ ID NO: 2194336
uaucauauggcccugcacu

SEQ ID NO: 2194338 - RNA, 19 nt, Artificial Sequence
  Description of Artificial Sequence: Synthetic oligonucleotide
  Sense strand starting at position 41 of SEQ ID NO: 1883449
ugcaguaaaugcuugauuu

SEQ ID NO: 2194339 - RNA, 19 nt, Artificial Sequence
  Description of Artificial Sequence: Synthetic oligonucleotide
  Antisense strand to SEQ ID NO: 2194338
aaaucaagcauuuacugca

SEQ ID NO: 2194340 - RNA, 19 nt, Artificial Sequence
  Description of Artificial Sequence: Synthetic oligonucleotide
  Sense strand starting at position 63 of SEQ ID NO: 1883449
gcauacuauuuagaaggca

SEQ ID NO: 2194341 - RNA, 19 nt, Artificial Sequence
  Description of Artificial Sequence: Synthetic oligonucleotide
  Antisense strand to SEQ ID NO: 2194340
ugccuucuaaauaguaugc

SEQ ID NO: 2194342 - RNA, 19 nt, Artificial Sequence
  Description of Artificial Sequence: Synthetic oligonucleotide
  Sense strand starting at position 261 of SEQ ID NO: 1883449
cucuguaaauuaguaucua

SEQ ID NO: 2194343 - RNA, 19 nt, Artificial Sequence
  Description of Artificial Sequence: Synthetic oligonucleotide
  Antisense strand to SEQ ID NO: 2194342
uagauacuaauuuacagag

SEQ ID NO: 2194344 - RNA, 19 nt, Artificial Sequence
  Description of Artificial Sequence: Synthetic oligonucleotide
  Sense strand starting at position 370 of SEQ ID NO: 1883449
gaugcaguauaguuuccaa

SEQ ID NO: 2194345 - RNA, 19 nt, Artificial Sequence
  Description of Artificial Sequence: Synthetic oligonucleotide
  Antisense strand to SEQ ID NO: 2194344
uuggaaacuauacugcauc

SEQ ID NO: 2194346 - RNA, 19 nt, Artificial Sequence
  Description of Artificial Sequence: Synthetic oligonucleotide
  Sense strand starting at position 389 of SEQ ID NO: 1883449
aaaugugaauacuuaacgu

SEQ ID NO: 2194347 - RNA, 19 nt, Artificial Sequence
  Description of Artificial Sequence: Synthetic oligonucleotide
  Antisense strand to SEQ ID NO: 2194346
acguuaaguauucacauuu

SEQ ID NO: 2194348 - RNA, 19 nt, Artificial Sequence
  Description of Artificial Sequence: Synthetic oligonucleotide
  Sense strand starting at position 612 of SEQ ID NO: 1883449
acucaaauuugguaaauug

SEQ ID NO: 2194349 - RNA, 19 nt, Artificial Sequence
  Description of Artificial Sequence: Synthetic oligonucleotide
  Antisense strand to SEQ ID NO: 2194348
caauuuaccaaauuugagu

SEQ ID NO: 2194350 - RNA, 19 nt, Artificial Sequence
  Description of Artificial Sequence: Synthetic oligonucleotide
  Sense strand starting at position 690 of SEQ ID NO: 1883449
auguccugagaauggaauu

SEQ ID NO: 2194351 - RNA, 19 nt, Artificial Sequence
  Description of Artificial Sequence: Synthetic oligonucleotide
  Antisense strand to SEQ ID NO: 2194350
aauuccauucucaggacau

SEQ ID NO: 2194352 - RNA, 19 nt, Artificial Sequence
  Description of Artificial Sequence: Synthetic oligonucleotide
  Sense strand starting at position 691 of SEQ ID NO: 1883449
uguccugagaauggaauua

SEQ ID NO: 2194353 - RNA, 19 nt, Artificial Sequence
  Description of Artificial Sequence: Synthetic oligonucleotide
  Antisense strand to SEQ ID NO: 2194352
uaauuccauucucaggaca

SEQ ID NO: 2194354 - RNA, 19 nt, Artificial Sequence
  Description of Artificial Sequence: Synthetic oligonucleotide
  Sense strand starting at position 949 of SEQ ID NO: 1883449
gucccuguuacucaggaga

SEQ ID NO: 2194355 - RNA, 19 nt, Artificial Sequence
  Description of Artificial Sequence: Synthetic oligonucleotide
  Antisense strand to SEQ ID NO: 2194354
ucuccugaguaacagggac

SEQ ID NO: 2194356 - RNA, 19 nt, Artificial Sequence
  Description of Artificial Sequence: Synthetic oligonucleotide
  Sense strand starting at position 1104 of SEQ ID NO: 1883449
cagaaaucaggauguguaa

SEQ ID NO: 2194357 - RNA, 19 nt, Artificial Sequence
  Description of Artificial Sequence: Synthetic oligonucleotide
  Antisense strand to SEQ ID NO: 2194356
uuacacauccugauuucug

SEQ ID NO: 2194358 - RNA, 19 nt, Artificial Sequence
  Description of Artificial Sequence: Synthetic oligonucleotide
  Sense strand starting at position 1107 of SEQ ID NO: 1883449
aaaucaggauguguaacuu

SEQ ID NO: 2194359 - RNA, 19 nt, Artificial Sequence
  Description of Artificial Sequence: Synthetic oligonucleotide
  Antisense strand to SEQ ID NO: 2194358
aaguuacacauccugauuu

SEQ ID NO: 2194360 - RNA, 19 nt, Artificial Sequence
  Description of Artificial Sequence: Synthetic oligonucleotide
  Sense strand starting at position 1383 of SEQ ID NO: 1883449
caggauguguaacucuuua

SEQ ID NO: 2194361 - RNA, 19 nt, Artificial Sequence
  Description of Artificial Sequence: Synthetic oligonucleotide
  Antisense strand to SEQ ID NO: 2194360
uaaagaguuacacauccug

SEQ ID NO: 2194362 - RNA, 19 nt, Artificial Sequence
  Description of Artificial Sequence: Synthetic oligonucleotide
  Sense strand starting at position 1387 of SEQ ID NO: 1883449
auguguaacucuuuacuga

SEQ ID NO: 2194363 - RNA, 19 nt, Artificial Sequence
  Description of Artificial Sequence: Synthetic oligonucleotide
  Antisense strand to SEQ ID NO: 2194362
ucaguaaagaguuacacau

SEQ ID NO: 2194364 - RNA, 19 nt, Artificial Sequence
  Description of Artificial Sequence: Synthetic oligonucleotide
  Sense strand starting at position 1388 of SEQ ID NO: 1883449
uguguaacucuuuacugaa

SEQ ID NO: 2194365 - RNA, 19 nt, Artificial Sequence
  Description of Artificial Sequence: Synthetic oligonucleotide
  Antisense strand to SEQ ID NO: 2194364
uucaguaaagaguuacaca

SEQ ID NO: 2194366 - RNA, 19 nt, Artificial Sequence
  Description of Artificial Sequence: Synthetic oligonucleotide
  Sense strand starting at position 1713 of SEQ ID NO: 1883449
guuaucccuucuguagaca

SEQ ID NO: 2194367 - RNA, 19 nt, Artificial Sequence
  Description of Artificial Sequence: Synthetic oligonucleotide
  Antisense strand to SEQ ID NO: 2194366
ugucuacagaagggauaac

SEQ ID NO: 2194368 - RNA, 19 nt, Artificial Sequence
  Description of Artificial Sequence: Synthetic oligonucleotide
  Sense strand starting at position 1724 of SEQ ID NO: 1883449
uguagacaauggucugcaa

SEQ ID NO: 2194369 - RNA, 19 nt, Artificial Sequence
  Description of Artificial Sequence: Synthetic oligonucleotide
  Antisense strand to SEQ ID NO: 2194368
uugcagaccauugucuaca

SEQ ID NO: 2194370 - RNA, 19 nt, Artificial Sequence
  Description of Artificial Sequence: Synthetic oligonucleotide
  Sense strand starting at position 1726 of SEQ ID NO: 1883449
uagacaauggucugcaaau

SEQ ID NO: 2194371 - RNA, 19 nt, Artificial Sequence
  Description of Artificial Sequence: Synthetic oligonucleotide
  Antisense strand to SEQ ID NO: 2194370
auuugcagaccauugucua

SEQ ID NO: 2194372 - RNA, 19 nt, Artificial Sequence
  Description of Artificial Sequence: Synthetic oligonucleotide
  Sense strand starting at position 1727 of SEQ ID NO: 1883449
agacaauggucugcaaauu

SEQ ID NO: 2194373 - RNA, 19 nt, Artificial Sequence
  Description of Artificial Sequence: Synthetic oligonucleotide
  Antisense strand to SEQ ID NO: 2194372
aauuugcagaccauugucu

SEQ ID NO: 2194374 - RNA, 19 nt, Artificial Sequence
  Description of Artificial Sequence: Synthetic oligonucleotide
  Sense strand starting at position 1739 of SEQ ID NO: 1883449
gcaaauuagcacugacuuu

SEQ ID NO: 2194375 - RNA, 19 nt, Artificial Sequence
  Description of Artificial Sequence: Synthetic oligonucleotide
  Antisense strand to SEQ ID NO: 2194374
aaagucagugcuaauuugc

SEQ ID NO: 2194376 - RNA, 19 nt, Artificial Sequence
  Description of Artificial Sequence: Synthetic oligonucleotide
  Sense strand starting at position 1794 of SEQ ID NO: 1883449
ucuuaagguugaccaaaga

SEQ ID NO: 2194377 - RNA, 19 nt, Artificial Sequence
  Description of Artificial Sequence: Synthetic oligonucleotide
  Antisense strand to SEQ ID NO: 2194376
ucuuuggucaaccuuaaga

SEQ ID NO: 2194378 - RNA, 19 nt, Artificial Sequence
  Description of Artificial Sequence: Synthetic oligonucleotide
  Sense strand starting at position 1920 of SEQ ID NO: 1883449
ggacacaugcauggucuua

SEQ ID NO: 2194379 - RNA, 19 nt, Artificial Sequence
  Description of Artificial Sequence: Synthetic oligonucleotide
  Antisense strand to SEQ ID NO: 2194378
uaagaccaugcaugugucc

SEQ ID NO: 2194380 - RNA, 19 nt, Artificial Sequence
  Description of Artificial Sequence: Synthetic oligonucleotide
  Sense strand starting at position 1922 of SEQ ID NO: 1883449
acacaugcauggucuuaau

SEQ ID NO: 2194381 - RNA, 19 nt, Artificial Sequence
  Description of Artificial Sequence: Synthetic oligonucleotide
  Antisense strand to SEQ ID NO: 2194380
auuaagaccaugcaugugu

SEQ ID NO: 2194382 - RNA, 19 nt, Artificial Sequence
  Description of Artificial Sequence: Synthetic oligonucleotide
  Sense strand starting at position 1930 of SEQ ID NO: 1883449
auggucuuaauauagcgaa

SEQ ID NO: 2194383 - RNA, 19 nt, Artificial Sequence
  Description of Artificial Sequence: Synthetic oligonucleotide
  Antisense strand to SEQ ID NO: 2194382
uucgcuauauuaagaccau

SEQ ID NO: 2194384 - RNA, 19 nt, Artificial Sequence
  Description of Artificial Sequence: Synthetic oligonucleotide
  Sense strand starting at position 1937 of SEQ ID NO: 1883449
uaauauagcgaauguuuag

SEQ ID NO: 2194385 - RNA, 19 nt, Artificial Sequence
  Description of Artificial Sequence: Synthetic oligonucleotide
  Antisense strand to SEQ ID NO: 2194384
cuaaacauucgcuauauua

SEQ ID NO: 2194386 - RNA, 19 nt, Artificial Sequence
  Description of Artificial Sequence: Synthetic oligonucleotide
  Sense strand starting at position 1974 of SEQ ID NO: 1883449
aaaucagaacagcgagaau

SEQ ID NO: 2194387 - RNA, 19 nt, Artificial Sequence
  Description of Artificial Sequence: Synthetic oligonucleotide
  Antisense strand to SEQ ID NO: 2194386
auucucgcuguucugauuu

SEQ ID NO: 2194388 - RNA, 19 nt, Artificial Sequence
  Description of Artificial Sequence: Synthetic oligonucleotide
  Sense strand starting at position 1989 of SEQ ID NO: 1883449
gaauauucgcaguauucua

SEQ ID NO: 2194389 - RNA, 19 nt, Artificial Sequence
  Description of Artificial Sequence: Synthetic oligonucleotide
  Antisense strand to SEQ ID NO: 2194388
uagaauacugcgaauauuc

SEQ ID NO: 2194390 - RNA, 19 nt, Artificial Sequence
  Description of Artificial Sequence: Synthetic oligonucleotide
  Sense strand starting at position 1996 of SEQ ID NO: 1883449
cgcaguauucuaugaauca

SEQ ID NO: 2194391 - RNA, 19 nt, Artificial Sequence
  Description of Artificial Sequence: Synthetic oligonucleotide
  Antisense strand to SEQ ID NO: 2194390
ugauucauagaauacugcg

SEQ ID NO: 2194392 - RNA, 19 nt, Artificial Sequence
  Description of Artificial Sequence: Synthetic oligonucleotide
  Sense strand starting at position 2081 of SEQ ID NO: 1883449
uuacaugucuguucucaag

SEQ ID NO: 2194393 - RNA, 19 nt, Artificial Sequence
  Description of Artificial Sequence: Synthetic oligonucleotide
  Antisense strand to SEQ ID NO: 2194392
cuugagaacagacauguaa

SEQ ID NO: 2194394 - RNA, 19 nt, Artificial Sequence
  Description of Artificial Sequence: Synthetic oligonucleotide
  Sense strand starting at position 2083 of SEQ ID NO: 1883449
acaugucuguucucaagaa

SEQ ID NO: 2194395 - RNA, 19 nt, Artificial Sequence
  Description of Artificial Sequence: Synthetic oligonucleotide
  Antisense strand to SEQ ID NO: 2194394
uucuugagaacagacaugu

SEQ ID NO: 2194396 - RNA, 19 nt, Artificial Sequence
  Description of Artificial Sequence: Synthetic oligonucleotide
  Sense strand starting at position 2087 of SEQ ID NO: 1883449
gucuguucucaagaagcaa

SEQ ID NO: 2194397 - RNA, 19 nt, Artificial Sequence
  Description of Artificial Sequence: Synthetic oligonucleotide
  Antisense strand to SEQ ID NO: 2194396
uugcuucuugagaacagac

SEQ ID NO: 2194398 - RNA, 19 nt, Artificial Sequence
  Description of Artificial Sequence: Synthetic oligonucleotide
  Sense strand starting at position 2294 of SEQ ID NO: 1883449
cacgauaugccuugcuaga

SEQ ID NO: 2194399 - RNA, 19 nt, Artificial Sequence
  Description of Artificial Sequence: Synthetic oligonucleotide
  Antisense strand to SEQ ID NO: 2194398
ucuagcaaggcauaucgug

SEQ ID NO: 2194400 - RNA, 19 nt, Artificial Sequence
  Description of Artificial Sequence: Synthetic oligonucleotide
  Sense strand starting at position 2323 of SEQ ID NO: 1883449
aucugaauuuaggaaccaa

SEQ ID NO: 2194401 - RNA, 19 nt, Artificial Sequence
  Description of Artificial Sequence: Synthetic oligonucleotide
  Antisense strand to SEQ ID NO: 2194400
uugguuccuaaauucagau

SEQ ID NO: 2194402 - RNA, 19 nt, Artificial Sequence
  Description of Artificial Sequence: Synthetic oligonucleotide
  Sense strand starting at position 2344 of SEQ ID NO: 1883449
acauuugcguaguaagaaa

SEQ ID NO: 2194403 - RNA, 19 nt, Artificial Sequence
  Description of Artificial Sequence: Synthetic oligonucleotide
  Antisense strand to SEQ ID NO: 2194402
uuucuuacuacgcaaaugu

SEQ ID NO: 2194404 - RNA, 19 nt, Artificial Sequence
  Description of Artificial Sequence: Synthetic oligonucleotide
  Sense strand starting at position 2351 of SEQ ID NO: 1883449
cguaguaagaaauacuugu

SEQ ID NO: 2194405 - RNA, 19 nt, Artificial Sequence
  Description of Artificial Sequence: Synthetic oligonucleotide
  Antisense strand to SEQ ID NO: 2194404
acaaguauuucuuacuacg

SEQ ID NO: 2194406 - RNA, 19 nt, Artificial Sequence
  Description of Artificial Sequence: Synthetic oligonucleotide
  Sense strand starting at position 2552 of SEQ ID NO: 1883449
agauuuccuuugggaacca

SEQ ID NO: 2194407 - RNA, 19 nt, Artificial Sequence
  Description of Artificial Sequence: Synthetic oligonucleotide
  Antisense strand to SEQ ID NO: 2194406
ugguucccaaaggaaaucu

SEQ ID NO: 2194408 - RNA, 19 nt, Artificial Sequence
  Description of Artificial Sequence: Synthetic oligonucleotide
  Sense strand starting at position 2786 of SEQ ID NO: 1883449
uguuuaagacaguaucaau

SEQ ID NO: 2194409 - RNA, 19 nt, Artificial Sequence
  Description of Artificial Sequence: Synthetic oligonucleotide
  Antisense strand to SEQ ID NO: 2194408
auugauacugucuuaaaca

SEQ ID NO: 2194410 - RNA, 19 nt, Artificial Sequence
  Description of Artificial Sequence: Synthetic oligonucleotide
  Sense strand starting at position 2893 of SEQ ID NO: 1883449
aucucuaaaguagguauua

SEQ ID NO: 2194411 - RNA, 19 nt, Artificial Sequence
  Description of Artificial Sequence: Synthetic oligonucleotide
  Antisense strand to SEQ ID NO: 2194410
uaauaccuacuuuagagau

SEQ ID NO: 2194412 - RNA, 19 nt, Artificial Sequence
  Description of Artificial Sequence: Synthetic oligonucleotide
  Sense strand starting at position 2894 of SEQ ID NO: 1883449
ucucuaaaguagguauuau

SEQ ID NO: 2194413 - RNA, 19 nt, Artificial Sequence
  Description of Artificial Sequence: Synthetic oligonucleotide
  Antisense strand to SEQ ID NO: 2194412
auaauaccuacuuuagaga

SEQ ID NO: 2194414 - RNA, 19 nt, Artificial Sequence
  Description of Artificial Sequence: Synthetic oligonucleotide
  Sense strand starting at position 3486 of SEQ ID NO: 1883449
agcgucaaauuaguagaua

SEQ ID NO: 2194415 - RNA, 19 nt, Artificial Sequence
  Description of Artificial Sequence: Synthetic oligonucleotide
  Antisense strand to SEQ ID NO: 2194414
uaucuacuaauuugacgcu

SEQ ID NO: 2194416 - RNA, 19 nt, Artificial Sequence
  Description of Artificial Sequence: Synthetic oligonucleotide
  Sense strand starting at position 3575 of SEQ ID NO: 1883449
gcaauagugcuacaaugua

SEQ ID NO: 2194417 - RNA, 19 nt, Artificial Sequence
  Description of Artificial Sequence: Synthetic oligonucleotide
  Antisense strand to SEQ ID NO: 2194416
uacauuguagcacuauugc

SEQ ID NO: 2194418 - RNA, 19 nt, Artificial Sequence
  Description of Artificial Sequence: Synthetic oligonucleotide
  Sense strand starting at position 39 of SEQ ID NO: 1883450
cgagauuagccuggguaau

SEQ ID NO: 2194419 - RNA, 19 nt, Artificial Sequence
  Description of Artificial Sequence: Synthetic oligonucleotide
  Antisense strand to SEQ ID NO: 2194418
auuacccaggcuaaucucg

SEQ ID NO: 2194420 - RNA, 19 nt, Artificial Sequence
  Description of Artificial Sequence: Synthetic oligonucleotide
  Sense strand starting at position 40 of SEQ ID NO: 1883450
gagauuagccuggguaaua

SEQ ID NO: 2194421 - RNA, 19 nt, Artificial Sequence
  Description of Artificial Sequence: Synthetic oligonucleotide
  Antisense strand to SEQ ID NO: 2194420
uauuacccaggcuaaucuc

SEQ ID NO: 2194422 - RNA, 19 nt, Artificial Sequence
  Description of Artificial Sequence: Synthetic oligonucleotide
  Sense strand starting at position 41 of SEQ ID NO: 1883450
agauuagccuggguaauac

SEQ ID NO: 2194423 - RNA, 19 nt, Artificial Sequence
  Description of Artificial Sequence: Synthetic oligonucleotide
  Antisense strand to SEQ ID NO: 2194422
guauuacccaggcuaaucu

SEQ ID NO: 2194424 - RNA, 19 nt, Artificial Sequence
  Description of Artificial Sequence: Synthetic oligonucleotide
  Sense strand starting at position 591 of SEQ ID NO: 1883450
gcgcaauugacgccuuaga

SEQ ID NO: 2194425 - RNA, 19 nt, Artificial Sequence
  Description of Artificial Sequence: Synthetic oligonucleotide
  Antisense strand to SEQ ID NO: 2194424
ucuaaggcgucaauugcgc

SEQ ID NO: 2194426 - RNA, 19 nt, Artificial Sequence
  Description of Artificial Sequence: Synthetic oligonucleotide
  Sense strand starting at position 602 of SEQ ID NO: 1883450
gccuuagaggcugaauaag

SEQ ID NO: 2194427 - RNA, 19 nt, Artificial Sequence
  Description of Artificial Sequence: Synthetic oligonucleotide
  Antisense strand to SEQ ID NO: 2194426
cuuauucagccucuaaggc

SEQ ID NO: 2194428 - RNA, 19 nt, Artificial Sequence
  Description of Artificial Sequence: Synthetic oligonucleotide
  Sense strand starting at position 734 of SEQ ID NO: 1883450
aaccguggaagcuaugaga

SEQ ID NO: 2194429 - RNA, 19 nt, Artificial Sequence
  Description of Artificial Sequence: Synthetic oligonucleotide
  Antisense strand to SEQ ID NO: 2194428
ucucauagcuuccacgguu

SEQ ID NO: 2194430 - RNA, 19 nt, Artificial Sequence
  Description of Artificial Sequence: Synthetic oligonucleotide
  Sense strand starting at position 901 of SEQ ID NO: 1883450
cuucucgcgccuucucaaa

SEQ ID NO: 2194431 - RNA, 19 nt, Artificial Sequence
  Description of Artificial Sequence: Synthetic oligonucleotide
  Antisense strand to SEQ ID NO: 2194430
uuugagaaggcgcgagaag

SEQ ID NO: 2194432 - RNA, 19 nt, Artificial Sequence
  Description of Artificial Sequence: Synthetic oligonucleotide
  Sense strand starting at position 1140 of SEQ ID NO: 1883450
cuaccuugacgcuagaauu

SEQ ID NO: 2194433 - RNA, 19 nt, Artificial Sequence
  Description of Artificial Sequence: Synthetic oligonucleotide
  Antisense strand to SEQ ID NO: 2194432
aauucuagcgucaagguag

SEQ ID NO: 2194434 - RNA, 19 nt, Artificial Sequence
  Description of Artificial Sequence: Synthetic oligonucleotide
  Sense strand starting at position 1619 of SEQ ID NO: 1883450
guaggacaaucucucgaaa

SEQ ID NO: 2194435 - RNA, 19 nt, Artificial Sequence
  Description of Artificial Sequence: Synthetic oligonucleotide
  Antisense strand to SEQ ID NO: 2194434
uuucgagagauuguccuac

SEQ ID NO: 2194436 - RNA, 19 nt, Artificial Sequence
  Description of Artificial Sequence: Synthetic oligonucleotide
  Sense strand starting at position 1876 of SEQ ID NO: 1883450
uuaaaucgauccuugaagu

SEQ ID NO: 2194437 - RNA, 19 nt, Artificial Sequence
  Description of Artificial Sequence: Synthetic oligonucleotide
  Antisense strand to SEQ ID NO: 2194436
acuucaaggaucgauuuaa

SEQ ID NO: 2194438 - RNA, 19 nt, Artificial Sequence
  Description of Artificial Sequence: Synthetic oligonucleotide
  Sense strand starting at position 1877 of SEQ ID NO: 1883450
uaaaucgauccuugaaguu

SEQ ID NO: 2194439 - RNA, 19 nt, Artificial Sequence
  Description of Artificial Sequence: Synthetic oligonucleotide
  Antisense strand to SEQ ID NO: 2194438
aacuucaaggaucgauuua

SEQ ID NO: 2194440 - RNA, 19 nt, Artificial Sequence
  Description of Artificial Sequence: Synthetic oligonucleotide
  Sense strand starting at position 2000 of SEQ ID NO: 1883450
aucaucuuauaguugacau

SEQ ID NO: 2194441 - RNA, 19 nt, Artificial Sequence
  Description of Artificial Sequence: Synthetic oligonucleotide
  Antisense strand to SEQ ID NO: 2194440
augucaacuauaagaugau

SEQ ID NO: 2194442 - RNA, 19 nt, Artificial Sequence
  Description of Artificial Sequence: Synthetic oligonucleotide
  Sense strand starting at position 2121 of SEQ ID NO: 1883450
cacugagauucugugauua

SEQ ID NO: 2194443 - RNA, 19 nt, Artificial Sequence
  Description of Artificial Sequence: Synthetic oligonucleotide
  Antisense strand to SEQ ID NO: 2194442
uaaucacagaaucucagug

SEQ ID NO: 2194444 - RNA, 19 nt, Artificial Sequence
  Description of Artificial Sequence: Synthetic oligonucleotide
  Sense strand starting at position 2125 of SEQ ID NO: 1883450
gagauucugugauuauucu

SEQ ID NO: 2194445 - RNA, 19 nt, Artificial Sequence
  Description of Artificial Sequence: Synthetic oligonucleotide
  Antisense strand to SEQ ID NO: 2194444
agaauaaucacagaaucuc

SEQ ID NO: 2194446 - RNA, 19 nt, Artificial Sequence
  Description of Artificial Sequence: Synthetic oligonucleotide
  Sense strand starting at position 2126 of SEQ ID NO: 1883450
agauucugugauuauucuu

SEQ ID NO: 2194447 - RNA, 19 nt, Artificial Sequence
  Description of Artificial Sequence: Synthetic oligonucleotide
  Antisense strand to SEQ ID NO: 2194446
aagaauaaucacagaaucu

SEQ ID NO: 2194448 - RNA, 19 nt, Artificial Sequence
  Description of Artificial Sequence: Synthetic oligonucleotide
  Sense strand starting at position 2182 of SEQ ID NO: 1883450
uagcgagcggauuauuaua

SEQ ID NO: 2194449 - RNA, 19 nt, Artificial Sequence
  Description of Artificial Sequence: Synthetic oligonucleotide
  Antisense strand to SEQ ID NO: 2194448
uauaauaauccgcucgcua

SEQ ID NO: 2194450 - RNA, 19 nt, Artificial Sequence
  Description of Artificial Sequence: Synthetic oligonucleotide
  Sense strand starting at position 2271 of SEQ ID NO: 1883450
accauacgucgugaaauaa

SEQ ID NO: 2194451 - RNA, 19 nt, Artificial Sequence
  Description of Artificial Sequence: Synthetic oligonucleotide
  Antisense strand to SEQ ID NO: 2194450
uuauuucacgacguauggu

SEQ ID NO: 2194452 - RNA, 19 nt, Artificial Sequence
  Description of Artificial Sequence: Synthetic oligonucleotide
  Sense strand starting at position 2416 of SEQ ID NO: 1883450
ggugacauggcucagaagu

SEQ ID NO: 2194453 - RNA, 19 nt, Artificial Sequence
  Description of Artificial Sequence: Synthetic oligonucleotide
  Antisense strand to SEQ ID NO: 2194452
acuucugagccaugucacc

SEQ ID NO: 2194454 - RNA, 19 nt, Artificial Sequence
  Description of Artificial Sequence: Synthetic oligonucleotide
  Sense strand starting at position 2559 of SEQ ID NO: 1883450
gcguccuuuccucuuuauu

SEQ ID NO: 2194455 - RNA, 19 nt, Artificial Sequence
  Description of Artificial Sequence: Synthetic oligonucleotide
  Antisense strand to SEQ ID NO: 2194454
aauaaagaggaaaggacgc

SEQ ID NO: 2194456 - RNA, 19 nt, Artificial Sequence
  Description of Artificial Sequence: Synthetic oligonucleotide
  Sense strand starting at position 2943 of SEQ ID NO: 1883450
acaggccuucuccaagauu

SEQ ID NO: 2194457 - RNA, 19 nt, Artificial Sequence
  Description of Artificial Sequence: Synthetic oligonucleotide
  Antisense strand to SEQ ID NO: 2194456
aaucuuggagaaggccugu

SEQ ID NO: 2194458 - RNA, 19 nt, Artificial Sequence
  Description of Artificial Sequence: Synthetic oligonucleotide
  Sense strand starting at position 3015 of SEQ ID NO: 1883450
ucuuaaagaccucggugau

SEQ ID NO: 2194459 - RNA, 19 nt, Artificial Sequence
  Description of Artificial Sequence: Synthetic oligonucleotide
  Antisense strand to SEQ ID NO: 2194458
aucaccgaggucuuuaaga

SEQ ID NO: 2194460 - RNA, 19 nt, Artificial Sequence
  Description of Artificial Sequence: Synthetic oligonucleotide
  Sense strand starting at position 3016 of SEQ ID NO: 1883450
cuuaaagaccucggugauc

SEQ ID NO: 2194461 - RNA, 19 nt, Artificial Sequence
  Description of Artificial Sequence: Synthetic oligonucleotide
  Antisense strand to SEQ ID NO: 2194460
gaucaccgaggucuuuaag

SEQ ID NO: 2194462 - RNA, 19 nt, Artificial Sequence
  Description of Artificial Sequence: Synthetic oligonucleotide
  Sense strand starting at position 3018 of SEQ ID NO: 1883450
uaaagaccucggugaucua

SEQ ID NO: 2194463 - RNA, 19 nt, Artificial Sequence
  Description of Artificial Sequence: Synthetic oligonucleotide
  Antisense strand to SEQ ID NO: 2194462
uagaucaccgaggucuuua

SEQ ID NO: 2194464 - RNA, 19 nt, Artificial Sequence
  Description of Artificial Sequence: Synthetic oligonucleotide
  Sense strand starting at position 3021 of SEQ ID NO: 1883450
agaccucggugaucuaaua

SEQ ID NO: 2194465 - RNA, 19 nt, Artificial Sequence
  Description of Artificial Sequence: Synthetic oligonucleotide
  Antisense strand to SEQ ID NO: 2194464
uauuagaucaccgaggucu

SEQ ID NO: 2194466 - RNA, 19 nt, Artificial Sequence
  Description of Artificial Sequence: Synthetic oligonucleotide
  Sense strand starting at position 3045 of SEQ ID NO: 1883450
cacagaauuugauagguua

SEQ ID NO: 2194467 - RNA, 19 nt, Artificial Sequence
  Description of Artificial Sequence: Synthetic oligonucleotide
  Antisense strand to SEQ ID NO: 2194466
uaaccuaucaaauucugug

SEQ ID NO: 2194468 - RNA, 19 nt, Artificial Sequence
  Description of Artificial Sequence: Synthetic oligonucleotide
  Sense strand starting at position 3211 of SEQ ID NO: 1883450
ggguuacuguuucuuaaac

SEQ ID NO: 2194469 - RNA, 19 nt, Artificial Sequence
  Description of Artificial Sequence: Synthetic oligonucleotide
  Antisense strand to SEQ ID NO: 2194468
guuuaagaaacaguaaccc

SEQ ID NO: 2194470 - RNA, 19 nt, Artificial Sequence
  Description of Artificial Sequence: Synthetic oligonucleotide
  Sense strand starting at position 3212 of SEQ ID NO: 1883450
gguuacuguuucuuaaacu

SEQ ID NO: 2194471 - RNA, 19 nt, Artificial Sequence
  Description of Artificial Sequence: Synthetic oligonucleotide
  Antisense strand to SEQ ID NO: 2194470
aguuuaagaaacaguaacc

SEQ ID NO: 2194472 - RNA, 19 nt, Artificial Sequence
  Description of Artificial Sequence: Synthetic oligonucleotide
  Sense strand starting at position 3237 of SEQ ID NO: 1883450
gaaaguugagacugcuaag

SEQ ID NO: 2194473 - RNA, 19 nt, Artificial Sequence
  Description of Artificial Sequence: Synthetic oligonucleotide
  Antisense strand to SEQ ID NO: 2194472
cuuagcagucucaacuuuc

SEQ ID NO: 2194474 - RNA, 19 nt, Artificial Sequence
  Description of Artificial Sequence: Synthetic oligonucleotide
  Sense strand starting at position 3356 of SEQ ID NO: 1883450
cuccgagaucucgggaagu

SEQ ID NO: 2194475 - RNA, 19 nt, Artificial Sequence
  Description of Artificial Sequence: Synthetic oligonucleotide
  Antisense strand to SEQ ID NO: 2194474
acuucccgagaucucggag

SEQ ID NO: 2194476 - RNA, 19 nt, Artificial Sequence
  Description of Artificial Sequence: Synthetic oligonucleotide
  Sense strand starting at position 3358 of SEQ ID NO: 1883450
ccgagaucucgggaaguug

SEQ ID NO: 2194477 - RNA, 19 nt, Artificial Sequence
  Description of Artificial Sequence: Synthetic oligonucleotide
  Antisense strand to SEQ ID NO: 2194476
caacuucccgagaucucgg

SEQ ID NO: 2194478 - RNA, 19 nt, Artificial Sequence
  Description of Artificial Sequence: Synthetic oligonucleotide
  Sense strand starting at position 3463 of SEQ ID NO: 1883450
gggagacuuucggugauac

SEQ ID NO: 2194479 - RNA, 19 nt, Artificial Sequence
  Description of Artificial Sequence: Synthetic oligonucleotide
  Antisense strand to SEQ ID NO: 2194478
guaucaccgaaagucuccc

SEQ ID NO: 2194480 - RNA, 19 nt, Artificial Sequence
  Description of Artificial Sequence: Synthetic oligonucleotide
  Sense strand starting at position 3464 of SEQ ID NO: 1883450
ggagacuuucggugauacu

SEQ ID NO: 2194481 - RNA, 19 nt, Artificial Sequence
  Description of Artificial Sequence: Synthetic oligonucleotide
  Antisense strand to SEQ ID NO: 2194480
aguaucaccgaaagucucc

SEQ ID NO: 2194482 - RNA, 19 nt, Artificial Sequence
  Description of Artificial Sequence: Synthetic oligonucleotide
  Sense strand starting at position 3465 of SEQ ID NO: 1883450
gagacuuucggugauacua

SEQ ID NO: 2194483 - RNA, 19 nt, Artificial Sequence
  Description of Artificial Sequence: Synthetic oligonucleotide
  Antisense strand to SEQ ID NO: 2194482
uaguaucaccgaaagucuc

SEQ ID NO: 2194484 - RNA, 19 nt, Artificial Sequence
  Description of Artificial Sequence: Synthetic oligonucleotide
  Sense strand starting at position 3495 of SEQ ID NO: 1883450
acccgacuuguauaaguga

SEQ ID NO: 2194485 - RNA, 19 nt, Artificial Sequence
  Description of Artificial Sequence: Synthetic oligonucleotide
  Antisense strand to SEQ ID NO: 2194484
ucacuuauacaagucgggu

SEQ ID NO: 2194486 - RNA, 19 nt, Artificial Sequence
  Description of Artificial Sequence: Synthetic oligonucleotide
  Sense strand starting at position 3500 of SEQ ID NO: 1883450
acuuguauaagugaguacu

SEQ ID NO: 2194487 - RNA, 19 nt, Artificial Sequence
  Description of Artificial Sequence: Synthetic oligonucleotide
  Antisense strand to SEQ ID NO: 2194486
aguacucacuuauacaagu

SEQ ID NO: 2194488 - RNA, 19 nt, Artificial Sequence
  Description of Artificial Sequence: Synthetic oligonucleotide
  Sense strand starting at position 3503 of SEQ ID NO: 1883450
uguauaagugaguacuccu

SEQ ID NO: 2194489 - RNA, 19 nt, Artificial Sequence
  Description of Artificial Sequence: Synthetic oligonucleotide
  Antisense strand to SEQ ID NO: 2194488
aggaguacucacuuauaca

SEQ ID NO: 2194490 - RNA, 19 nt, Artificial Sequence
  Description of Artificial Sequence: Synthetic oligonucleotide
  Sense strand starting at position 3534 of SEQ ID NO: 1883450
cgacuugagccucacaguu

SEQ ID NO: 2194491 - RNA, 19 nt, Artificial Sequence
  Description of Artificial Sequence: Synthetic oligonucleotide
  Antisense strand to SEQ ID NO: 2194490
aacugugaggcucaagucg

SEQ ID NO: 2194492 - RNA, 19 nt, Artificial Sequence
  Description of Artificial Sequence: Synthetic oligonucleotide
  Sense strand starting at position 3680 of SEQ ID NO: 1883450
cugugucagccuucggagu

SEQ ID NO: 2194493 - RNA, 19 nt, Artificial Sequence
  Description of Artificial Sequence: Synthetic oligonucleotide
  Antisense strand to SEQ ID NO: 2194492
acuccgaaggcugacacag

SEQ ID NO: 2194494 - RNA, 19 nt, Artificial Sequence
  Description of Artificial Sequence: Synthetic oligonucleotide
  Sense strand starting at position 3887 of SEQ ID NO: 1883450
agcguuauaccucaaagga

SEQ ID NO: 2194495 - RNA, 19 nt, Artificial Sequence
  Description of Artificial Sequence: Synthetic oligonucleotide
  Antisense strand to SEQ ID NO: 2194494
uccuuugagguauaacgcu

SEQ ID NO: 2194496 - RNA, 19 nt, Artificial Sequence
  Description of Artificial Sequence: Synthetic oligonucleotide
  Sense strand starting at position 3969 of SEQ ID NO: 1883450
cguugugauuugcuauaaa

SEQ ID NO: 2194497 - RNA, 19 nt, Artificial Sequence
  Description of Artificial Sequence: Synthetic oligonucleotide
  Antisense strand to SEQ ID NO: 2194496
uuuauagcaaaucacaacg

SEQ ID NO: 2194498 - RNA, 19 nt, Artificial Sequence
  Description of Artificial Sequence: Synthetic oligonucleotide
  Sense strand starting at position 94 of SEQ ID NO: 1883451
aguuuaguaggcuaacaca

SEQ ID NO: 2194499 - RNA, 19 nt, Artificial Sequence
  Description of Artificial Sequence: Synthetic oligonucleotide
  Antisense strand to SEQ ID NO: 2194498
uguguuagccuacuaaacu

SEQ ID NO: 2194500 - RNA, 19 nt, Artificial Sequence
  Description of Artificial Sequence: Synthetic oligonucleotide
  Sense strand starting at position 791 of SEQ ID NO: 1883451
ggacguuaaacuugguuaa

SEQ ID NO: 2194501 - RNA, 19 nt, Artificial Sequence
  Description of Artificial Sequence: Synthetic oligonucleotide
  Antisense strand to SEQ ID NO: 2194500
uuaaccaaguuuaacgucc

SEQ ID NO: 2194502 - RNA, 19 nt, Artificial Sequence
  Description of Artificial Sequence: Synthetic oligonucleotide
  Sense strand starting at position 794 of SEQ ID NO: 1883451
cguuaaacuugguuaauuu

SEQ ID NO: 2194503 - RNA, 19 nt, Artificial Sequence
  Description of Artificial Sequence: Synthetic oligonucleotide
  Antisense strand to SEQ ID NO: 2194502
aaauuaaccaaguuuaacg

SEQ ID NO: 2194504 - RNA, 19 nt, Artificial Sequence
  Description of Artificial Sequence: Synthetic oligonucleotide
  Sense strand starting at position 926 of SEQ ID NO: 1883451
uuaucuagaguaugccaaa

SEQ ID NO: 2194505 - RNA, 19 nt, Artificial Sequence
  Description of Artificial Sequence: Synthetic oligonucleotide
  Antisense strand to SEQ ID NO: 2194504
uuuggcauacucuagauaa

SEQ ID NO: 2194506 - RNA, 19 nt, Artificial Sequence
  Description of Artificial Sequence: Synthetic oligonucleotide
  Sense strand starting at position 952 of SEQ ID NO: 1883451
acugccaguguccaauaaa

SEQ ID NO: 2194507 - RNA, 19 nt, Artificial Sequence
  Description of Artificial Sequence: Synthetic oligonucleotide
  Antisense strand to SEQ ID NO: 2194506
uuuauuggacacuggcagu

SEQ ID NO: 2194508 - RNA, 19 nt, Artificial Sequence
  Description of Artificial Sequence: Synthetic oligonucleotide
  Sense strand starting at position 982 of SEQ ID NO: 1883451
cucacauauuauguaguua

SEQ ID NO: 2194509 - RNA, 19 nt, Artificial Sequence
  Description of Artificial Sequence: Synthetic oligonucleotide
  Antisense strand to SEQ ID NO: 2194508
uaacuacauaauaugugag

SEQ ID NO: 2194510 - RNA, 19 nt, Artificial Sequence
  Description of Artificial Sequence: Synthetic oligonucleotide
  Sense strand starting at position 987 of SEQ ID NO: 1883451
auauuauguaguuaacgga

SEQ ID NO: 2194511 - RNA, 19 nt, Artificial Sequence
  Description of Artificial Sequence: Synthetic oligonucleotide
  Antisense strand to SEQ ID NO: 2194510
uccguuaacuacauaauau

SEQ ID NO: 2194512 - RNA, 19 nt, Artificial Sequence
  Description of Artificial Sequence: Synthetic oligonucleotide
  Sense strand starting at position 1152 of SEQ ID NO: 1883451
guuaacaacuggucaucaa

SEQ ID NO: 2194513 - RNA, 19 nt, Artificial Sequence
  Description of Artificial Sequence: Synthetic oligonucleotide
  Antisense strand to SEQ ID NO: 2194512
uugaugaccaguuguuaac

SEQ ID NO: 2194514 - RNA, 19 nt, Artificial Sequence
  Description of Artificial Sequence: Synthetic oligonucleotide
  Sense strand starting at position 1361 of SEQ ID NO: 1883451
auucucaaagucuguaaca

SEQ ID NO: 2194515 - RNA, 19 nt, Artificial Sequence
  Description of Artificial Sequence: Synthetic oligonucleotide
  Antisense strand to SEQ ID NO: 2194514
uguuacagacuuugagaau

SEQ ID NO: 2194516 - RNA, 19 nt, Artificial Sequence
  Description of Artificial Sequence: Synthetic oligonucleotide
  Sense strand starting at position 1503 of SEQ ID NO: 1883451
ucagguaccauggguugaa

SEQ ID NO: 2194517 - RNA, 19 nt, Artificial Sequence
  Description of Artificial Sequence: Synthetic oligonucleotide
  Antisense strand to SEQ ID NO: 2194516
uucaacccaugguaccuga

SEQ ID NO: 2194518 - RNA, 19 nt, Artificial Sequence
  Description of Artificial Sequence: Synthetic oligonucleotide
  Sense strand starting at position 1504 of SEQ ID NO: 1883451
cagguaccauggguugaaa

SEQ ID NO: 2194519 - RNA, 19 nt, Artificial Sequence
  Description of Artificial Sequence: Synthetic oligonucleotide
  Antisense strand to SEQ ID NO: 2194518
uuucaacccaugguaccug

SEQ ID NO: 2194520 - RNA, 19 nt, Artificial Sequence
  Description of Artificial Sequence: Synthetic oligonucleotide
  Sense strand starting at position 1561 of SEQ ID NO: 1883451
uagagcuugcgccuguuaa

SEQ ID NO: 2194521 - RNA, 19 nt, Artificial Sequence
  Description of Artificial Sequence: Synthetic oligonucleotide
  Antisense strand to SEQ ID NO: 2194520
uuaacaggcgcaagcucua

SEQ ID NO: 2194522 - RNA, 19 nt, Artificial Sequence
  Description of Artificial Sequence: Synthetic oligonucleotide
  Sense strand starting at position 1671 of SEQ ID NO: 1883451
uucuaugugcguuuguaga

SEQ ID NO: 2194523 - RNA, 19 nt, Artificial Sequence
  Description of Artificial Sequence: Synthetic oligonucleotide
  Antisense strand to SEQ ID NO: 2194522
ucuacaaacgcacauagaa

SEQ ID NO: 2194524 - RNA, 19 nt, Artificial Sequence
  Description of Artificial Sequence: Synthetic oligonucleotide
  Sense strand starting at position 1686 of SEQ ID NO: 1883451
uagacagcaucaguguuaa

SEQ ID NO: 2194525 - RNA, 19 nt, Artificial Sequence
  Description of Artificial Sequence: Synthetic oligonucleotide
  Antisense strand to SEQ ID NO: 2194524
uuaacacugaugcugucua

SEQ ID NO: 2194526 - RNA, 19 nt, Artificial Sequence
  Description of Artificial Sequence: Synthetic oligonucleotide
  Sense strand starting at position 1715 of SEQ ID NO: 1883451
agccgaacuccuuaaagaa

SEQ ID NO: 2194527 - RNA, 19 nt, Artificial Sequence
  Description of Artificial Sequence: Synthetic oligonucleotide
  Antisense strand to SEQ ID NO: 2194526
uucuuuaaggaguucggcu

SEQ ID NO: 2194528 - RNA, 19 nt, Artificial Sequence
  Description of Artificial Sequence: Synthetic oligonucleotide
  Sense strand starting at position 1886 of SEQ ID NO: 1883451
cucucaguauaaucgaaac

SEQ ID NO: 2194529 - RNA, 19 nt, Artificial Sequence
  Description of Artificial Sequence: Synthetic oligonucleotide
  Antisense strand to SEQ ID NO: 2194528
guuucgauuauacugagag

SEQ ID NO: 2194530 - RNA, 19 nt, Artificial Sequence
  Description of Artificial Sequence: Synthetic oligonucleotide
  Sense strand starting at position 2097 of SEQ ID NO: 1883451
cgaguaaagcucgucgcuu

SEQ ID NO: 2194531 - RNA, 19 nt, Artificial Sequence
  Description of Artificial Sequence: Synthetic oligonucleotide
  Antisense strand to SEQ ID NO: 2194530
aagcgacgagcuuuacucg

SEQ ID NO: 2194532 - RNA, 19 nt, Artificial Sequence
  Description of Artificial Sequence: Synthetic oligonucleotide
  Sense strand starting at position 2673 of SEQ ID NO: 1883451
ggaaauaucccgggcccua

SEQ ID NO: 2194533 - RNA, 19 nt, Artificial Sequence
  Description of Artificial Sequence: Synthetic oligonucleotide
  Antisense strand to SEQ ID NO: 2194532
uagggcccgggauauuucc

SEQ ID NO: 2194534 - RNA, 19 nt, Artificial Sequence
  Description of Artificial Sequence: Synthetic oligonucleotide
  Sense strand starting at position 2854 of SEQ ID NO: 1883451
cugagaaacuccucugucu

SEQ ID NO: 2194535 - RNA, 19 nt, Artificial Sequence
  Description of Artificial Sequence: Synthetic oligonucleotide
  Antisense strand to SEQ ID NO: 2194534
agacagaggaguuucucag

SEQ ID NO: 2194536 - RNA, 19 nt, Artificial Sequence
  Description of Artificial Sequence: Synthetic oligonucleotide
  Sense strand starting at position 2964 of SEQ ID NO: 1883451
gcucucugaggaugaggua

SEQ ID NO: 2194537 - RNA, 19 nt, Artificial Sequence
  Description of Artificial Sequence: Synthetic oligonucleotide
  Antisense strand to SEQ ID NO: 2194536
uaccucauccucagagagc

SEQ ID NO: 2194538 - RNA, 19 nt, Artificial Sequence
  Description of Artificial Sequence: Synthetic oligonucleotide
  Sense strand starting at position 3000 of SEQ ID NO: 1883451
ugacaugagcauuggcaga

SEQ ID NO: 2194539 - RNA, 19 nt, Artificial Sequence
  Description of Artificial Sequence: Synthetic oligonucleotide
  Antisense strand to SEQ ID NO: 2194538
ucugccaaugcucauguca

SEQ ID NO: 2194540 - RNA, 19 nt, Artificial Sequence
  Description of Artificial Sequence: Synthetic oligonucleotide
  Sense strand starting at position 3002 of SEQ ID NO: 1883451
acaugagcauuggcagaaa

SEQ ID NO: 2194541 - RNA, 19 nt, Artificial Sequence
  Description of Artificial Sequence: Synthetic oligonucleotide
  Antisense strand to SEQ ID NO: 2194540
uuucugccaaugcucaugu

SEQ ID NO: 2194542 - RNA, 19 nt, Artificial Sequence
  Description of Artificial Sequence: Synthetic oligonucleotide
  Sense strand starting at position 3025 of SEQ ID NO: 1883451
ucucguaaucuggauaacu

SEQ ID NO: 2194543 - RNA, 19 nt, Artificial Sequence
  Description of Artificial Sequence: Synthetic oligonucleotide
  Antisense strand to SEQ ID NO: 2194542
aguuauccagauuacgaga

SEQ ID NO: 2194544 - RNA, 19 nt, Artificial Sequence
  Description of Artificial Sequence: Synthetic oligonucleotide
  Sense strand starting at position 3027 of SEQ ID NO: 1883451
ucguaaucuggauaacuua

SEQ ID NO: 2194545 - RNA, 19 nt, Artificial Sequence
  Description of Artificial Sequence: Synthetic oligonucleotide
  Antisense strand to SEQ ID NO: 2194544
uaaguuauccagauuacga

SEQ ID NO: 2194546 - RNA, 19 nt, Artificial Sequence
  Description of Artificial Sequence: Synthetic oligonucleotide
  Sense strand starting at position 3035 of SEQ ID NO: 1883451
uggauaacuuacguuagaa

SEQ ID NO: 2194547 - RNA, 19 nt, Artificial Sequence
  Description of Artificial Sequence: Synthetic oligonucleotide
  Antisense strand to SEQ ID NO: 2194546
uucuaacguaaguuaucca

SEQ ID NO: 2194548 - RNA, 19 nt, Artificial Sequence
  Description of Artificial Sequence: Synthetic oligonucleotide
  Sense strand starting at position 3037 of SEQ ID NO: 1883451
gauaacuuacguuagaauu

SEQ ID NO: 2194549 - RNA, 19 nt, Artificial Sequence
  Description of Artificial Sequence: Synthetic oligonucleotide
  Antisense strand to SEQ ID NO: 2194548
aauucuaacguaaguuauc

SEQ ID NO: 2194550 - RNA, 19 nt, Artificial Sequence
  Description of Artificial Sequence: Synthetic oligonucleotide
  Sense strand starting at position 3043 of SEQ ID NO: 1883451
uuacguuagaauuaguaag

SEQ ID NO: 2194551 - RNA, 19 nt, Artificial Sequence
  Description of Artificial Sequence: Synthetic oligonucleotide
  Antisense strand to SEQ ID NO: 2194550
cuuacuaauucuaacguaa

SEQ ID NO: 2194552 - RNA, 19 nt, Artificial Sequence
  Description of Artificial Sequence: Synthetic oligonucleotide
  Sense strand starting at position 3049 of SEQ ID NO: 1883451
uagaauuaguaagcaguua

SEQ ID NO: 2194553 - RNA, 19 nt, Artificial Sequence
  Description of Artificial Sequence: Synthetic oligonucleotide
  Antisense strand to SEQ ID NO: 2194552
uaacugcuuacuaauucua

SEQ ID NO: 2194554 - RNA, 19 nt, Artificial Sequence
  Description of Artificial Sequence: Synthetic oligonucleotide
  Sense strand starting at position 3077 of SEQ ID NO: 1883451
gccugaaacguccuguugu

SEQ ID NO: 2194555 - RNA, 19 nt, Artificial Sequence
  Description of Artificial Sequence: Synthetic oligonucleotide
  Antisense strand to SEQ ID NO: 2194554
acaacaggacguuucaggc

SEQ ID NO: 2194556 - RNA, 19 nt, Artificial Sequence
  Description of Artificial Sequence: Synthetic oligonucleotide
  Sense strand starting at position 3268 of SEQ ID NO: 1883451
cuccuuucuguuggauaaa

SEQ ID NO: 2194557 - RNA, 19 nt, Artificial Sequence
  Description of Artificial Sequence: Synthetic oligonucleotide
  Antisense strand to SEQ ID NO: 2194556
uuuauccaacagaaaggag

SEQ ID NO: 2194558 - RNA, 19 nt, Artificial Sequence
  Description of Artificial Sequence: Synthetic oligonucleotide
  Sense strand starting at position 3340 of SEQ ID NO: 1883451
ucacauaagugaccaagua

SEQ ID NO: 2194559 - RNA, 19 nt, Artificial Sequence
  Description of Artificial Sequence: Synthetic oligonucleotide
  Antisense strand to SEQ ID NO: 2194558
uacuuggucacuuauguga

SEQ ID NO: 2194560 - RNA, 19 nt, Artificial Sequence
  Description of Artificial Sequence: Synthetic oligonucleotide
  Sense strand starting at position 3442 of SEQ ID NO: 1883451
gggcuaaauacguggaaau

SEQ ID NO: 2194561 - RNA, 19 nt, Artificial Sequence
  Description of Artificial Sequence: Synthetic oligonucleotide
  Antisense strand to SEQ ID NO: 2194560
auuuccacguauuuagccc

SEQ ID NO: 2194562 - RNA, 19 nt, Artificial Sequence
  Description of Artificial Sequence: Synthetic oligonucleotide
  Sense strand starting at position 3443 of SEQ ID NO: 1883451
ggcuaaauacguggaaauc

SEQ ID NO: 2194563 - RNA, 19 nt, Artificial Sequence
  Description of Artificial Sequence: Synthetic oligonucleotide
  Antisense strand to SEQ ID NO: 2194562
gauuuccacguauuuagcc

SEQ ID NO: 2194564 - RNA, 19 nt, Artificial Sequence
  Description of Artificial Sequence: Synthetic oligonucleotide
  Sense strand starting at position 3444 of SEQ ID NO: 1883451
gcuaaauacguggaaauca

SEQ ID NO: 2194565 - RNA, 19 nt, Artificial Sequence
  Description of Artificial Sequence: Synthetic oligonucleotide
  Antisense strand to SEQ ID NO: 2194564
ugauuuccacguauuuagc

SEQ ID NO: 2194566 - RNA, 19 nt, Artificial Sequence
  Description of Artificial Sequence: Synthetic oligonucleotide
  Sense strand starting at position 3452 of SEQ ID NO: 1883451
cguggaaaucacugagaug

SEQ ID NO: 2194567 - RNA, 19 nt, Artificial Sequence
  Description of Artificial Sequence: Synthetic oligonucleotide
  Antisense strand to SEQ ID NO: 2194566
caucucagugauuuccacg

SEQ ID NO: 2194568 - RNA, 19 nt, Artificial Sequence
  Description of Artificial Sequence: Synthetic oligonucleotide
  Sense strand starting at position 3526 of SEQ ID NO: 1883451
gaagcucugagccgaaaga

SEQ ID NO: 2194569 - RNA, 19 nt, Artificial Sequence
  Description of Artificial Sequence: Synthetic oligonucleotide
  Antisense strand to SEQ ID NO: 2194568
ucuuucggcucagagcuuc

SEQ ID NO: 2194570 - RNA, 19 nt, Artificial Sequence
  Description of Artificial Sequence: Synthetic oligonucleotide
  Sense strand starting at position 3552 of SEQ ID NO: 1883451
gcucaaacacucugaaaug

SEQ ID NO: 2194571 - RNA, 19 nt, Artificial Sequence
  Description of Artificial Sequence: Synthetic oligonucleotide
  Antisense strand to SEQ ID NO: 2194570
cauuucagaguguuugagc

SEQ ID NO: 2194572 - RNA, 19 nt, Artificial Sequence
  Description of Artificial Sequence: Synthetic oligonucleotide
  Sense strand starting at position 3945 of SEQ ID NO: 1883451
ggacucuuucuugagguuu

SEQ ID NO: 2194573 - RNA, 19 nt, Artificial Sequence
  Description of Artificial Sequence: Synthetic oligonucleotide
  Antisense strand to SEQ ID NO: 2194572
aaaccucaagaaagagucc

SEQ ID NO: 2194574 - RNA, 19 nt, Artificial Sequence
  Description of Artificial Sequence: Synthetic oligonucleotide
  Sense strand starting at position 3971 of SEQ ID NO: 1883451
uguuccuugguaggaaauu

SEQ ID NO: 2194575 - RNA, 19 nt, Artificial Sequence
  Description of Artificial Sequence: Synthetic oligonucleotide
  Antisense strand to SEQ ID NO: 2194574
aauuuccuaccaaggaaca

SEQ ID NO: 2194576 - RNA, 19 nt, Artificial Sequence
  Description of Artificial Sequence: Synthetic oligonucleotide
  Sense strand starting at position 3980 of SEQ ID NO: 1883451
guaggaaauuauguuugaa

SEQ ID NO: 2194577 - RNA, 19 nt, Artificial Sequence
  Description of Artificial Sequence: Synthetic oligonucleotide
  Antisense strand to SEQ ID NO: 2194576
uucaaacauaauuuccuac

SEQ ID NO: 2194578 - RNA, 19 nt, Artificial Sequence
  Description of Artificial Sequence: Synthetic oligonucleotide
  Sense strand starting at position 1660 of SEQ ID NO: 1883452
uguugagaauaccacacau

SEQ ID NO: 2194579 - RNA, 19 nt, Artificial Sequence
  Description of Artificial Sequence: Synthetic oligonucleotide
  Antisense strand to SEQ ID NO: 2194578
augugugguauucucaaca

SEQ ID NO: 2194580 - RNA, 19 nt, Artificial Sequence
  Description of Artificial Sequence: Synthetic oligonucleotide
  Sense strand starting at position 1734 of SEQ ID NO: 1883452
cugaacugucagcagacau

SEQ ID NO: 2194581 - RNA, 19 nt, Artificial Sequence
  Description of Artificial Sequence: Synthetic oligonucleotide
  Antisense strand to SEQ ID NO: 2194580
augucugcugacaguucag

SEQ ID NO: 2194582 - RNA, 19 nt, Artificial Sequence
  Description of Artificial Sequence: Synthetic oligonucleotide
  Sense strand starting at position 1746 of SEQ ID NO: 1883452
cagacauaguugcuugaca

SEQ ID NO: 2194583 - RNA, 19 nt, Artificial Sequence
  Description of Artificial Sequence: Synthetic oligonucleotide
  Antisense strand to SEQ ID NO: 2194582
ugucaagcaacuaugucug

SEQ ID NO: 2194584 - RNA, 19 nt, Artificial Sequence
  Description of Artificial Sequence: Synthetic oligonucleotide
  Sense strand starting at position 1747 of SEQ ID NO: 1883452
agacauaguugcuugacaa

SEQ ID NO: 2194585 - RNA, 19 nt, Artificial Sequence
  Description of Artificial Sequence: Synthetic oligonucleotide
  Antisense strand to SEQ ID NO: 2194584
uugucaagcaacuaugucu

SEQ ID NO: 2194586 - RNA, 19 nt, Artificial Sequence
  Description of Artificial Sequence: Synthetic oligonucleotide
  Sense strand starting at position 1748 of SEQ ID NO: 1883452
gacauaguugcuugacaaa

SEQ ID NO: 2194587 - RNA, 19 nt, Artificial Sequence
  Description of Artificial Sequence: Synthetic oligonucleotide
  Antisense strand to SEQ ID NO: 2194586
uuugucaagcaacuauguc

SEQ ID NO: 2194588 - RNA, 19 nt, Artificial Sequence
  Description of Artificial Sequence: Synthetic oligonucleotide
  Sense strand starting at position 1890 of SEQ ID NO: 1883452
acaugucaguaauuaauca

SEQ ID NO: 2194589 - RNA, 19 nt, Artificial Sequence
  Description of Artificial Sequence: Synthetic oligonucleotide
  Antisense strand to SEQ ID NO: 2194588
ugauuaauuacugacaugu

SEQ ID NO: 2194590 - RNA, 19 nt, Artificial Sequence
  Description of Artificial Sequence: Synthetic oligonucleotide
  Sense strand starting at position 1898 of SEQ ID NO: 1883452
guaauuaaucaauguacag

SEQ ID NO: 2194591 - RNA, 19 nt, Artificial Sequence
  Description of Artificial Sequence: Synthetic oligonucleotide
  Antisense strand to SEQ ID NO: 2194590
cuguacauugauuaauuac

SEQ ID NO: 2194592 - RNA, 19 nt, Artificial Sequence
  Description of Artificial Sequence: Synthetic oligonucleotide
  Sense strand starting at position 1918 of SEQ ID NO: 1883452
acuggcaucucagucuuaa

SEQ ID NO: 2194593 - RNA, 19 nt, Artificial Sequence
  Description of Artificial Sequence: Synthetic oligonucleotide
  Antisense strand to SEQ ID NO: 2194592
uuaagacugagaugccagu

SEQ ID NO: 2194594 - RNA, 19 nt, Artificial Sequence
  Description of Artificial Sequence: Synthetic oligonucleotide
  Sense strand starting at position 1986 of SEQ ID NO: 1883452
uuaagucaucauugugcca

SEQ ID NO: 2194595 - RNA, 19 nt, Artificial Sequence
  Description of Artificial Sequence: Synthetic oligonucleotide
  Antisense strand to SEQ ID NO: 2194594
uggcacaaugaugacuuaa

SEQ ID NO: 2194596 - RNA, 19 nt, Artificial Sequence
  Description of Artificial Sequence: Synthetic oligonucleotide
  Sense strand starting at position 2076 of SEQ ID NO: 1883452
ccgcgugauccuaguaguu

SEQ ID NO: 2194597 - RNA, 19 nt, Artificial Sequence
  Description of Artificial Sequence: Synthetic oligonucleotide
  Antisense strand to SEQ ID NO: 2194596
aacuacuaggaucacgcgg

SEQ ID NO: 2194598 - RNA, 19 nt, Artificial Sequence
  Description of Artificial Sequence: Synthetic oligonucleotide
  Sense strand starting at position 2167 of SEQ ID NO: 1883452
uuucuugcaccuggaaauu

SEQ ID NO: 2194599 - RNA, 19 nt, Artificial Sequence
  Description of Artificial Sequence: Synthetic oligonucleotide
  Antisense strand to SEQ ID NO: 2194598
aauuuccaggugcaagaaa

SEQ ID NO: 2194600 - RNA, 19 nt, Artificial Sequence
  Description of Artificial Sequence: Synthetic oligonucleotide
  Sense strand starting at position 2228 of SEQ ID NO: 1883452
gggcaucuuauauguagga

SEQ ID NO: 2194601 - RNA, 19 nt, Artificial Sequence
  Description of Artificial Sequence: Synthetic oligonucleotide
  Antisense strand to SEQ ID NO: 2194600
uccuacauauaagaugccc

SEQ ID NO: 2194602 - RNA, 19 nt, Artificial Sequence
  Description of Artificial Sequence: Synthetic oligonucleotide
  Sense strand starting at position 2229 of SEQ ID NO: 1883452
ggcaucuuauauguaggaa

SEQ ID NO: 2194603 - RNA, 19 nt, Artificial Sequence
  Description of Artificial Sequence: Synthetic oligonucleotide
  Antisense strand to SEQ ID NO: 2194602
uuccuacauauaagaugcc

SEQ ID NO: 2194604 - RNA, 19 nt, Artificial Sequence
  Description of Artificial Sequence: Synthetic oligonucleotide
  Sense strand starting at position 2255 of SEQ ID NO: 1883452
agaagagaaucucauuccu

SEQ ID NO: 2194605 - RNA, 19 nt, Artificial Sequence
  Description of Artificial Sequence: Synthetic oligonucleotide
  Antisense strand to SEQ ID NO: 2194604
aggaaugagauucucuucu

SEQ ID NO: 2194606 - RNA, 19 nt, Artificial Sequence
  Description of Artificial Sequence: Synthetic oligonucleotide
  Sense strand starting at position 2392 of SEQ ID NO: 1883452
cucuguaacugaguauguu

SEQ ID NO: 2194607 - RNA, 19 nt, Artificial Sequence
  Description of Artificial Sequence: Synthetic oligonucleotide
  Antisense strand to SEQ ID NO: 2194606
aacauacucaguuacagag

SEQ ID NO: 2194608 - RNA, 19 nt, Artificial Sequence
  Description of Artificial Sequence: Synthetic oligonucleotide
  Sense strand starting at position 2393 of SEQ ID NO: 1883452
ucuguaacugaguauguuu

SEQ ID NO: 2194609 - RNA, 19 nt, Artificial Sequence
  Description of Artificial Sequence: Synthetic oligonucleotide
  Antisense strand to SEQ ID NO: 2194608
aaacauacucaguuacaga

SEQ ID NO: 2194610 - RNA, 19 nt, Artificial Sequence
  Description of Artificial Sequence: Synthetic oligonucleotide
  Sense strand starting at position 2400 of SEQ ID NO: 1883452
cugaguauguuugucucau

SEQ ID NO: 2194611 - RNA, 19 nt, Artificial Sequence
  Description of Artificial Sequence: Synthetic oligonucleotide
  Antisense strand to SEQ ID NO: 2194610
augagacaaacauacucag

SEQ ID NO: 2194612 - RNA, 19 nt, Artificial Sequence
  Description of Artificial Sequence: Synthetic oligonucleotide
  Sense strand starting at position 2401 of SEQ ID NO: 1883452
ugaguauguuugucucauu

SEQ ID NO: 2194613 - RNA, 19 nt, Artificial Sequence
  Description of Artificial Sequence: Synthetic oligonucleotide
  Antisense strand to SEQ ID NO: 2194612
aaugagacaaacauacuca

SEQ ID NO: 2194614 - RNA, 19 nt, Artificial Sequence
  Description of Artificial Sequence: Synthetic oligonucleotide
  Sense strand starting at position 2402 of SEQ ID NO: 1883452
gaguauguuugucucauua

SEQ ID NO: 2194615 - RNA, 19 nt, Artificial Sequence
  Description of Artificial Sequence: Synthetic oligonucleotide
  Antisense strand to SEQ ID NO: 2194614
uaaugagacaaacauacuc

SEQ ID NO: 2194616 - RNA, 19 nt, Artificial Sequence
  Description of Artificial Sequence: Synthetic oligonucleotide
  Sense strand starting at position 2406 of SEQ ID NO: 1883452
auguuugucucauuaguac

SEQ ID NO: 2194617 - RNA, 19 nt, Artificial Sequence
  Description of Artificial Sequence: Synthetic oligonucleotide
  Antisense strand to SEQ ID NO: 2194616
guacuaaugagacaaacau

SEQ ID NO: 2194618 - RNA, 19 nt, Artificial Sequence
  Description of Artificial Sequence: Synthetic oligonucleotide
  Sense strand starting at position 2413 of SEQ ID NO: 1883452
ucucauuaguaccuaguau

SEQ ID NO: 2194619 - RNA, 19 nt, Artificial Sequence
  Description of Artificial Sequence: Synthetic oligonucleotide
  Antisense strand to SEQ ID NO: 2194618
auacuagguacuaaugaga

SEQ ID NO: 2194620 - RNA, 19 nt, Artificial Sequence
  Description of Artificial Sequence: Synthetic oligonucleotide
  Sense strand starting at position 2537 of SEQ ID NO: 1883452
aagacauaauggucauagu

SEQ ID NO: 2194621 - RNA, 19 nt, Artificial Sequence
  Description of Artificial Sequence: Synthetic oligonucleotide
  Antisense strand to SEQ ID NO: 2194620
acuaugaccauuaugucuu

SEQ ID NO: 2194622 - RNA, 19 nt, Artificial Sequence
  Description of Artificial Sequence: Synthetic oligonucleotide
  Sense strand starting at position 2540 of SEQ ID NO: 1883452
acauaauggucauagugag

SEQ ID NO: 2194623 - RNA, 19 nt, Artificial Sequence
  Description of Artificial Sequence: Synthetic oligonucleotide
  Antisense strand to SEQ ID NO: 2194622
cucacuaugaccauuaugu

SEQ ID NO: 2194624 - RNA, 19 nt, Artificial Sequence
  Description of Artificial Sequence: Synthetic oligonucleotide
  Sense strand starting at position 2546 of SEQ ID NO: 1883452
uggucauagugaguacaca

SEQ ID NO: 2194625 - RNA, 19 nt, Artificial Sequence
  Description of Artificial Sequence: Synthetic oligonucleotide
  Antisense strand to SEQ ID NO: 2194624
uguguacucacuaugacca

SEQ ID NO: 2194626 - RNA, 19 nt, Artificial Sequence
  Description of Artificial Sequence: Synthetic oligonucleotide
  Sense strand starting at position 2581 of SEQ ID NO: 1883452
cucacagcucgacaaggau

SEQ ID NO: 2194627 - RNA, 19 nt, Artificial Sequence
  Description of Artificial Sequence: Synthetic oligonucleotide
  Antisense strand to SEQ ID NO: 2194626
auccuugucgagcugugag

SEQ ID NO: 2194628 - RNA, 19 nt, Artificial Sequence
  Description of Artificial Sequence: Synthetic oligonucleotide
  Sense strand starting at position 2599 of SEQ ID NO: 1883452
ugagcuaugagccagguua

SEQ ID NO: 2194629 - RNA, 19 nt, Artificial Sequence
  Description of Artificial Sequence: Synthetic oligonucleotide
  Antisense strand to SEQ ID NO: 2194628
uaaccuggcucauagcuca

SEQ ID NO: 2194630 - RNA, 19 nt, Artificial Sequence
  Description of Artificial Sequence: Synthetic oligonucleotide
  Sense strand starting at position 2601 of SEQ ID NO: 1883452
agcuaugagccagguuaga

SEQ ID NO: 2194631 - RNA, 19 nt, Artificial Sequence
  Description of Artificial Sequence: Synthetic oligonucleotide
  Antisense strand to SEQ ID NO: 2194630
ucuaaccuggcucauagcu

SEQ ID NO: 2194632 - RNA, 19 nt, Artificial Sequence
  Description of Artificial Sequence: Synthetic oligonucleotide
  Sense strand starting at position 2675 of SEQ ID NO: 1883452
gcaguuucagagcagggau

SEQ ID NO: 2194633 - RNA, 19 nt, Artificial Sequence
  Description of Artificial Sequence: Synthetic oligonucleotide
  Antisense strand to SEQ ID NO: 2194632
aucccugcucugaaacugc

SEQ ID NO: 2194634 - RNA, 19 nt, Artificial Sequence
  Description of Artificial Sequence: Synthetic oligonucleotide
  Sense strand starting at position 2713 of SEQ ID NO: 1883452
cuggacacauuccuguaaa

SEQ ID NO: 2194635 - RNA, 19 nt, Artificial Sequence
  Description of Artificial Sequence: Synthetic oligonucleotide
  Antisense strand to SEQ ID NO: 2194634
uuuacaggaauguguccag

SEQ ID NO: 2194636 - RNA, 19 nt, Artificial Sequence
  Description of Artificial Sequence: Synthetic oligonucleotide
  Sense strand starting at position 2836 of SEQ ID NO: 1883452
cgaaaugauuuaugaagac

SEQ ID NO: 2194637 - RNA, 19 nt, Artificial Sequence
  Description of Artificial Sequence: Synthetic oligonucleotide
  Antisense strand to SEQ ID NO: 2194636
gucuucauaaaucauuucg

SEQ ID NO: 2194638 - RNA, 19 nt, Artificial Sequence
  Description of Artificial Sequence: Synthetic oligonucleotide
  Sense strand starting at position 3314 of SEQ ID NO: 1883452
gcacgacaggaaugagaau

SEQ ID NO: 2194639 - RNA, 19 nt, Artificial Sequence
  Description of Artificial Sequence: Synthetic oligonucleotide
  Antisense strand to SEQ ID NO: 2194638
auucucauuccugucgugc

SEQ ID NO: 2194640 - RNA, 19 nt, Artificial Sequence
  Description of Artificial Sequence: Synthetic oligonucleotide
  Sense strand starting at position 3474 of SEQ ID NO: 1883452
acccuaguauugguaauau

SEQ ID NO: 2194641 - RNA, 19 nt, Artificial Sequence
  Description of Artificial Sequence: Synthetic oligonucleotide
  Antisense strand to SEQ ID NO: 2194640
auauuaccaauacuagggu

SEQ ID NO: 2194642 - RNA, 19 nt, Artificial Sequence
  Description of Artificial Sequence: Synthetic oligonucleotide
  Sense strand starting at position 3500 of SEQ ID NO: 1883452
cucaaauguaucgguggau

SEQ ID NO: 2194643 - RNA, 19 nt, Artificial Sequence
  Description of Artificial Sequence: Synthetic oligonucleotide
  Antisense strand to SEQ ID NO: 2194642
auccaccgauacauuugag

SEQ ID NO: 2194644 - RNA, 19 nt, Artificial Sequence
  Description of Artificial Sequence: Synthetic oligonucleotide
  Sense strand starting at position 3501 of SEQ ID NO: 1883452
ucaaauguaucgguggauu

SEQ ID NO: 2194645 - RNA, 19 nt, Artificial Sequence
  Description of Artificial Sequence: Synthetic oligonucleotide
  Antisense strand to SEQ ID NO: 2194644
aauccaccgauacauuuga

SEQ ID NO: 2194646 - RNA, 19 nt, Artificial Sequence
  Description of Artificial Sequence: Synthetic oligonucleotide
  Sense strand starting at position 3503 of SEQ ID NO: 1883452
aaauguaucgguggauucu

SEQ ID NO: 2194647 - RNA, 19 nt, Artificial Sequence
  Description of Artificial Sequence: Synthetic oligonucleotide
  Antisense strand to SEQ ID NO: 2194646
agaauccaccgauacauuu

SEQ ID NO: 2194648 - RNA, 19 nt, Artificial Sequence
  Description of Artificial Sequence: Synthetic oligonucleotide
  Sense strand starting at position 3504 of SEQ ID NO: 1883452
aauguaucgguggauucuu

SEQ ID NO: 2194649 - RNA, 19 nt, Artificial Sequence
  Description of Artificial Sequence: Synthetic oligonucleotide
  Antisense strand to SEQ ID NO: 2194648
aagaauccaccgauacauu

SEQ ID NO: 2194650 - RNA, 19 nt, Artificial Sequence
  Description of Artificial Sequence: Synthetic oligonucleotide
  Sense strand starting at position 3674 of SEQ ID NO: 1883452
ccaugacauucgucuucuu

SEQ ID NO: 2194651 - RNA, 19 nt, Artificial Sequence
  Description of Artificial Sequence: Synthetic oligonucleotide
  Antisense strand to SEQ ID NO: 2194650
aagaagacgaaugucaugg

SEQ ID NO: 2194652 - RNA, 19 nt, Artificial Sequence
  Description of Artificial Sequence: Synthetic oligonucleotide
  Sense strand starting at position 3677 of SEQ ID NO: 1883452
ugacauucgucuucuugac

SEQ ID NO: 2194653 - RNA, 19 nt, Artificial Sequence
  Description of Artificial Sequence: Synthetic oligonucleotide
  Antisense strand to SEQ ID NO: 2194652
gucaagaagacgaauguca

SEQ ID NO: 2194654 - RNA, 19 nt, Artificial Sequence
  Description of Artificial Sequence: Synthetic oligonucleotide
  Sense strand starting at position 3681 of SEQ ID NO: 1883452
auucgucuucuugacaguu

SEQ ID NO: 2194655 - RNA, 19 nt, Artificial Sequence
  Description of Artificial Sequence: Synthetic oligonucleotide
  Antisense strand to SEQ ID NO: 2194654
aacugucaagaagacgaau

SEQ ID NO: 2194656 - RNA, 19 nt, Artificial Sequence
  Description of Artificial Sequence: Synthetic oligonucleotide
  Sense strand starting at position 3756 of SEQ ID NO: 1883452
uacgaagucucacugauga

SEQ ID NO: 2194657 - RNA, 19 nt, Artificial Sequence
  Description of Artificial Sequence: Synthetic oligonucleotide
  Antisense strand to SEQ ID NO: 2194656
ucaucagugagacuucgua

SEQ ID NO: 2194658 - RNA, 19 nt, Artificial Sequence
  Description of Artificial Sequence: Synthetic oligonucleotide
  Sense strand starting at position 215 of SEQ ID NO: 1883453
uucugaguuuaggcuauaa

SEQ ID NO: 2194659 - RNA, 19 nt, Artificial Sequence
  Description of Artificial Sequence: Synthetic oligonucleotide
  Antisense strand to SEQ ID NO: 2194658
uuauagccuaaacucagaa

SEQ ID NO: 2194660 - RNA, 19 nt, Artificial Sequence
  Description of Artificial Sequence: Synthetic oligonucleotide
  Sense strand starting at position 310 of SEQ ID NO: 1883453
ugcagcugucaagaaacaa

SEQ ID NO: 2194661 - RNA, 19 nt, Artificial Sequence
  Description of Artificial Sequence: Synthetic oligonucleotide
  Antisense strand to SEQ ID NO: 2194660
uuguuucuugacagcugca

SEQ ID NO: 2194662 - RNA, 19 nt, Artificial Sequence
  Description of Artificial Sequence: Synthetic oligonucleotide
  Sense strand starting at position 587 of SEQ ID NO: 1883453
accagaagugaacgucaau

SEQ ID NO: 2194663 - RNA, 19 nt, Artificial Sequence
  Description of Artificial Sequence: Synthetic oligonucleotide
  Antisense strand to SEQ ID NO: 2194662
auugacguucacuucuggu

SEQ ID NO: 2194664 - RNA, 19 nt, Artificial Sequence
  Description of Artificial Sequence: Synthetic oligonucleotide
  Sense strand starting at position 663 of SEQ ID NO: 1883453
gugagaugaugauuaugug

SEQ ID NO: 2194665 - RNA, 19 nt, Artificial Sequence
  Description of Artificial Sequence: Synthetic oligonucleotide
  Antisense strand to SEQ ID NO: 2194664
cacauaaucaucaucucac

SEQ ID NO: 2194666 - RNA, 19 nt, Artificial Sequence
  Description of Artificial Sequence: Synthetic oligonucleotide
  Sense strand starting at position 691 of SEQ ID NO: 1883453
guuugagcucuagggaaag

SEQ ID NO: 2194667 - RNA, 19 nt, Artificial Sequence
  Description of Artificial Sequence: Synthetic oligonucleotide
  Antisense strand to SEQ ID NO: 2194666
cuuucccuagagcucaaac

SEQ ID NO: 2194668 - RNA, 19 nt, Artificial Sequence
  Description of Artificial Sequence: Synthetic oligonucleotide
  Sense strand starting at position 899 of SEQ ID NO: 1883453
gguggugaaugugucaaac

SEQ ID NO: 2194669 - RNA, 19 nt, Artificial Sequence
  Description of Artificial Sequence: Synthetic oligonucleotide
  Antisense strand to SEQ ID NO: 2194668
guuugacacauucaccacc

SEQ ID NO: 2194670 - RNA, 19 nt, Artificial Sequence
  Description of Artificial Sequence: Synthetic oligonucleotide
  Sense strand starting at position 910 of SEQ ID NO: 1883453
ugucaaacgcuccaaugau

SEQ ID NO: 2194671 - RNA, 19 nt, Artificial Sequence
  Description of Artificial Sequence: Synthetic oligonucleotide
  Antisense strand to SEQ ID NO: 2194670
aucauuggagcguuugaca

SEQ ID NO: 2194672 - RNA, 19 nt, Artificial Sequence
  Description of Artificial Sequence: Synthetic oligonucleotide
  Sense strand starting at position 917 of SEQ ID NO: 1883453
cgcuccaaugaucaaguaa

SEQ ID NO: 2194673 - RNA, 19 nt, Artificial Sequence
  Description of Artificial Sequence: Synthetic oligonucleotide
  Antisense strand to SEQ ID NO: 2194672
uuacuugaucauuggagcg

SEQ ID NO: 2194674 - RNA, 19 nt, Artificial Sequence
  Description of Artificial Sequence: Synthetic oligonucleotide
  Sense strand starting at position 1011 of SEQ ID NO: 1883453
uguaucuuauaaucaagag

SEQ ID NO: 2194675 - RNA, 19 nt, Artificial Sequence
  Description of Artificial Sequence: Synthetic oligonucleotide
  Antisense strand to SEQ ID NO: 2194674
cucuugauuauaagauaca

SEQ ID NO: 2194676 - RNA, 19 nt, Artificial Sequence
  Description of Artificial Sequence: Synthetic oligonucleotide
  Sense strand starting at position 1023 of SEQ ID NO: 1883453
ucaagaggugccugaaaug

SEQ ID NO: 2194677 - RNA, 19 nt, Artificial Sequence
  Description of Artificial Sequence: Synthetic oligonucleotide
  Antisense strand to SEQ ID NO: 2194676
cauuucaggcaccucuuga

SEQ ID NO: 2194678 - RNA, 19 nt, Artificial Sequence
  Description of Artificial Sequence: Synthetic oligonucleotide
  Sense strand starting at position 1074 of SEQ ID NO: 1883453
cugauagugugggcugaua

SEQ ID NO: 2194679 - RNA, 19 nt, Artificial Sequence
  Description of Artificial Sequence: Synthetic oligonucleotide
  Antisense strand to SEQ ID NO: 2194678
uaucagcccacacuaucag

SEQ ID NO: 2194680 - RNA, 19 nt, Artificial Sequence
  Description of Artificial Sequence: Synthetic oligonucleotide
  Sense strand starting at position 1076 of SEQ ID NO: 1883453
gauagugugggcugauaau

SEQ ID NO: 2194681 - RNA, 19 nt, Artificial Sequence
  Description of Artificial Sequence: Synthetic oligonucleotide
  Antisense strand to SEQ ID NO: 2194680
auuaucagcccacacuauc

SEQ ID NO: 2194682 - RNA, 19 nt, Artificial Sequence
  Description of Artificial Sequence: Synthetic oligonucleotide
  Sense strand starting at position 1086 of SEQ ID NO: 1883453
gcugauaaucaaugguauu

SEQ ID NO: 2194683 - RNA, 19 nt, Artificial Sequence
  Description of Artificial Sequence: Synthetic oligonucleotide
  Antisense strand to SEQ ID NO: 2194682
aauaccauugauuaucagc

SEQ ID NO: 2194684 - RNA, 19 nt, Artificial Sequence
  Description of Artificial Sequence: Synthetic oligonucleotide
  Sense strand starting at position 1089 of SEQ ID NO: 1883453
gauaaucaaugguauuuga

SEQ ID NO: 2194685 - RNA, 19 nt, Artificial Sequence
  Description of Artificial Sequence: Synthetic oligonucleotide
  Antisense strand to SEQ ID NO: 2194684
ucaaauaccauugauuauc

SEQ ID NO: 2194686 - RNA, 19 nt, Artificial Sequence
  Description of Artificial Sequence: Synthetic oligonucleotide
  Sense strand starting at position 1145 of SEQ ID NO: 1883453
caguauauguggucuauuu

SEQ ID NO: 2194687 - RNA, 19 nt, Artificial Sequence
  Description of Artificial Sequence: Synthetic oligonucleotide
  Antisense strand to SEQ ID NO: 2194686
aaauagaccacauauacug

SEQ ID NO: 2194688 - RNA, 19 nt, Artificial Sequence
  Description of Artificial Sequence: Synthetic oligonucleotide
  Sense strand starting at position 1484 of SEQ ID NO: 1883453
cagaguugacaguggauua

SEQ ID NO: 2194689 - RNA, 19 nt, Artificial Sequence
  Description of Artificial Sequence: Synthetic oligonucleotide
  Antisense strand to SEQ ID NO: 2194688
uaauccacugucaacucug

SEQ ID NO: 2194690 - RNA, 19 nt, Artificial Sequence
  Description of Artificial Sequence: Synthetic oligonucleotide
  Sense strand starting at position 1485 of SEQ ID NO: 1883453
agaguugacaguggauuau

SEQ ID NO: 2194691 - RNA, 19 nt, Artificial Sequence
  Description of Artificial Sequence: Synthetic oligonucleotide
  Antisense strand to SEQ ID NO: 2194690
auaauccacugucaacucu

SEQ ID NO: 2194692 - RNA, 19 nt, Artificial Sequence
  Description of Artificial Sequence: Synthetic oligonucleotide
  Sense strand starting at position 2285 of SEQ ID NO: 1883453
uguguugucaggcaacaac

SEQ ID NO: 2194693 - RNA, 19 nt, Artificial Sequence
  Description of Artificial Sequence: Synthetic oligonucleotide
  Antisense strand to SEQ ID NO: 2194692
guuguugccugacaacaca

SEQ ID NO: 2194694 - RNA, 19 nt, Artificial Sequence
  Description of Artificial Sequence: Synthetic oligonucleotide
  Sense strand starting at position 2295 of SEQ ID NO: 1883453
ggcaacaacugaccuuaaa

SEQ ID NO: 2194695 - RNA, 19 nt, Artificial Sequence
  Description of Artificial Sequence: Synthetic oligonucleotide
  Antisense strand to SEQ ID NO: 2194694
uuuaaggucaguuguugcc

SEQ ID NO: 2194696 - RNA, 19 nt, Artificial Sequence
  Description of Artificial Sequence: Synthetic oligonucleotide
  Sense strand starting at position 2326 of SEQ ID NO: 1883453
ccagaaguaggcuacacau

SEQ ID NO: 2194697 - RNA, 19 nt, Artificial Sequence
  Description of Artificial Sequence: Synthetic oligonucleotide
  Antisense strand to SEQ ID NO: 2194696
auguguagccuacuucugg

SEQ ID NO: 2194698 - RNA, 19 nt, Artificial Sequence
  Description of Artificial Sequence: Synthetic oligonucleotide
  Sense strand starting at position 2502 of SEQ ID NO: 1883453
gggagaacucguggagccu

SEQ ID NO: 2194699 - RNA, 19 nt, Artificial Sequence
  Description of Artificial Sequence: Synthetic oligonucleotide
  Antisense strand to SEQ ID NO: 2194698
aggcuccacgaguucuccc

SEQ ID NO: 2194700 - RNA, 19 nt, Artificial Sequence
  Description of Artificial Sequence: Synthetic oligonucleotide
  Sense strand starting at position 2703 of SEQ ID NO: 1883453
guccgaguacugugaagaa

SEQ ID NO: 2194701 - RNA, 19 nt, Artificial Sequence
  Description of Artificial Sequence: Synthetic oligonucleotide
  Antisense strand to SEQ ID NO: 2194700
uucuucacaguacucggac

SEQ ID NO: 2194702 - RNA, 19 nt, Artificial Sequence
  Description of Artificial Sequence: Synthetic oligonucleotide
  Sense strand starting at position 2738 of SEQ ID NO: 1883453
aaagcuaccggguaguuua

SEQ ID NO: 2194703 - RNA, 19 nt, Artificial Sequence
  Description of Artificial Sequence: Synthetic oligonucleotide
  Antisense strand to SEQ ID NO: 2194702
uaaacuacccgguagcuuu

SEQ ID NO: 2194704 - RNA, 19 nt, Artificial Sequence
  Description of Artificial Sequence: Synthetic oligonucleotide
  Sense strand starting at position 2749 of SEQ ID NO: 1883453
guaguuuaacaagguggaa

SEQ ID NO: 2194705 - RNA, 19 nt, Artificial Sequence
  Description of Artificial Sequence: Synthetic oligonucleotide
  Antisense strand to SEQ ID NO: 2194704
uuccaccuuguuaaacuac

SEQ ID NO: 2194706 - RNA, 19 nt, Artificial Sequence
  Description of Artificial Sequence: Synthetic oligonucleotide
  Sense strand starting at position 2798 of SEQ ID NO: 1883453
cucagaaaguugccucaaa

SEQ ID NO: 2194707 - RNA, 19 nt, Artificial Sequence
  Description of Artificial Sequence: Synthetic oligonucleotide
  Antisense strand to SEQ ID NO: 2194706
uuugaggcaacuuucugag

SEQ ID NO: 2194708 - RNA, 19 nt, Artificial Sequence
  Description of Artificial Sequence: Synthetic oligonucleotide
  Sense strand starting at position 2821 of SEQ ID NO: 1883453
cgcagaaguggaggugaau

SEQ ID NO: 2194709 - RNA, 19 nt, Artificial Sequence
  Description of Artificial Sequence: Synthetic oligonucleotide
  Antisense strand to SEQ ID NO: 2194708
auucaccuccacuucugcg

SEQ ID NO: 2194710 - RNA, 19 nt, Artificial Sequence
  Description of Artificial Sequence: Synthetic oligonucleotide
  Sense strand starting at position 2830 of SEQ ID NO: 1883453
ggaggugaaucuucuguuu

SEQ ID NO: 2194711 - RNA, 19 nt, Artificial Sequence
  Description of Artificial Sequence: Synthetic oligonucleotide
  Antisense strand to SEQ ID NO: 2194710
aaacagaagauucaccucc

SEQ ID NO: 2194712 - RNA, 19 nt, Artificial Sequence
  Description of Artificial Sequence: Synthetic oligonucleotide
  Sense strand starting at position 2938 of SEQ ID NO: 1883453
ccaccauucuguguuugaa

SEQ ID NO: 2194713 - RNA, 19 nt, Artificial Sequence
  Description of Artificial Sequence: Synthetic oligonucleotide
  Antisense strand to SEQ ID NO: 2194712
uucaaacacagaauggugg

SEQ ID NO: 2194714 - RNA, 19 nt, Artificial Sequence
  Description of Artificial Sequence: Synthetic oligonucleotide
  Sense strand starting at position 2940 of SEQ ID NO: 1883453
accauucuguguuugaauc

SEQ ID NO: 2194715 - RNA, 19 nt, Artificial Sequence
  Description of Artificial Sequence: Synthetic oligonucleotide
  Antisense strand to SEQ ID NO: 2194714
gauucaaacacagaauggu

SEQ ID NO: 2194716 - RNA, 19 nt, Artificial Sequence
  Description of Artificial Sequence: Synthetic oligonucleotide
  Sense strand starting at position 3058 of SEQ ID NO: 1883453
uugcuagugccauuacugu

SEQ ID NO: 2194717 - RNA, 19 nt, Artificial Sequence
  Description of Artificial Sequence: Synthetic oligonucleotide
  Antisense strand to SEQ ID NO: 2194716
acaguaauggcacuagcaa

SEQ ID NO: 2194718 - RNA, 19 nt, Artificial Sequence
  Description of Artificial Sequence: Synthetic oligonucleotide
  Sense strand starting at position 3103 of SEQ ID NO: 1883453
ugcccaaucuaguugagga

SEQ ID NO: 2194719 - RNA, 19 nt, Artificial Sequence
  Description of Artificial Sequence: Synthetic oligonucleotide
  Antisense strand to SEQ ID NO: 2194718
uccucaacuagauugggca

SEQ ID NO: 2194720 - RNA, 19 nt, Artificial Sequence
  Description of Artificial Sequence: Synthetic oligonucleotide
  Sense strand starting at position 3104 of SEQ ID NO: 1883453
gcccaaucuaguugaggau

SEQ ID NO: 2194721 - RNA, 19 nt, Artificial Sequence
  Description of Artificial Sequence: Synthetic oligonucleotide
  Antisense strand to SEQ ID NO: 2194720
auccucaacuagauugggc

SEQ ID NO: 2194722 - RNA, 19 nt, Artificial Sequence
  Description of Artificial Sequence: Synthetic oligonucleotide
  Sense strand starting at position 3143 of SEQ ID NO: 1883453
cugggacuccgccgagaaa

SEQ ID NO: 2194723 - RNA, 19 nt, Artificial Sequence
  Description of Artificial Sequence: Synthetic oligonucleotide
  Antisense strand to SEQ ID NO: 2194722
uuucucggcggagucccag

SEQ ID NO: 2194724 - RNA, 19 nt, Artificial Sequence
  Description of Artificial Sequence: Synthetic oligonucleotide
  Sense strand starting at position 3297 of SEQ ID NO: 1883453
ggugcuguccugccgaaau

SEQ ID NO: 2194725 - RNA, 19 nt, Artificial Sequence
  Description of Artificial Sequence: Synthetic oligonucleotide
  Antisense strand to SEQ ID NO: 2194724
auuucggcaggacagcacc

SEQ ID NO: 2194726 - RNA, 19 nt, Artificial Sequence
  Description of Artificial Sequence: Synthetic oligonucleotide
  Sense strand starting at position 3424 of SEQ ID NO: 1883453
cacguuugugugucuuacu

SEQ ID NO: 2194727 - RNA, 19 nt, Artificial Sequence
  Description of Artificial Sequence: Synthetic oligonucleotide
  Antisense strand to SEQ ID NO: 2194726
aguaagacacacaaacgug

SEQ ID NO: 2194728 - RNA, 19 nt, Artificial Sequence
  Description of Artificial Sequence: Synthetic oligonucleotide
  Sense strand starting at position 3722 of SEQ ID NO: 1883453
uuuccuaugcgccugucaa

SEQ ID NO: 2194729 - RNA, 19 nt, Artificial Sequence
  Description of Artificial Sequence: Synthetic oligonucleotide
  Antisense strand to SEQ ID NO: 2194728
uugacaggcgcauaggaaa

SEQ ID NO: 2194730 - RNA, 19 nt, Artificial Sequence
  Description of Artificial Sequence: Synthetic oligonucleotide
  Sense strand starting at position 3816 of SEQ ID NO: 1883453
ugcucuguugaagauguua

SEQ ID NO: 2194731 - RNA, 19 nt, Artificial Sequence
  Description of Artificial Sequence: Synthetic oligonucleotide
  Antisense strand to SEQ ID NO: 2194730
uaacaucuucaacagagca

SEQ ID NO: 2194732 - RNA, 19 nt, Artificial Sequence
  Description of Artificial Sequence: Synthetic oligonucleotide
  Sense strand starting at position 3867 of SEQ ID NO: 1883453
auuuguuuaccaugugguu

SEQ ID NO: 2194733 - RNA, 19 nt, Artificial Sequence
  Description of Artificial Sequence: Synthetic oligonucleotide
  Antisense strand to SEQ ID NO: 2194732
aaccacaugguaaacaaau

SEQ ID NO: 2194734 - RNA, 19 nt, Artificial Sequence
  Description of Artificial Sequence: Synthetic oligonucleotide
  Sense strand starting at position 3888 of SEQ ID NO: 1883453
accuccaugcuguaaggua

SEQ ID NO: 2194735 - RNA, 19 nt, Artificial Sequence
  Description of Artificial Sequence: Synthetic oligonucleotide
  Antisense strand to SEQ ID NO: 2194734
uaccuuacagcauggaggu

SEQ ID NO: 2194736 - RNA, 19 nt, Artificial Sequence
  Description of Artificial Sequence: Synthetic oligonucleotide
  Sense strand starting at position 3976 of SEQ ID NO: 1883453
ucaguuauuuacuauggau

SEQ ID NO: 2194737 - RNA, 19 nt, Artificial Sequence
  Description of Artificial Sequence: Synthetic oligonucleotide
  Antisense strand to SEQ ID NO: 2194736
auccauaguaaauaacuga

SEQ ID NO: 2194738 - RNA, 19 nt, Artificial Sequence
  Description of Artificial Sequence: Synthetic oligonucleotide
  Sense strand starting at position 27 of SEQ ID NO: 1883454
gcuuuaaugagaugugaac

SEQ ID NO: 2194739 - RNA, 19 nt, Artificial Sequence
  Description of Artificial Sequence: Synthetic oligonucleotide
  Antisense strand to SEQ ID NO: 2194738
guucacaucucauuaaagc

SEQ ID NO: 2194740 - RNA, 19 nt, Artificial Sequence
  Description of Artificial Sequence: Synthetic oligonucleotide
  Sense strand starting at position 167 of SEQ ID NO: 1883454
guaauaauagcagguagga

SEQ ID NO: 2194741 - RNA, 19 nt, Artificial Sequence
  Description of Artificial Sequence: Synthetic oligonucleotide
  Antisense strand to SEQ ID NO: 2194740
uccuaccugcuauuauuac

SEQ ID NO: 2194742 - RNA, 19 nt, Artificial Sequence
  Description of Artificial Sequence: Synthetic oligonucleotide
  Sense strand starting at position 237 of SEQ ID NO: 1883454
auagucaacccaggaagua

SEQ ID NO: 2194743 - RNA, 19 nt, Artificial Sequence
  Description of Artificial Sequence: Synthetic oligonucleotide
  Antisense strand to SEQ ID NO: 2194742
uacuuccuggguugacuau

SEQ ID NO: 2194744 - RNA, 19 nt, Artificial Sequence
  Description of Artificial Sequence: Synthetic oligonucleotide
  Sense strand starting at position 318 of SEQ ID NO: 1883454
acagcauuugguuguuaau

SEQ ID NO: 2194745 - RNA, 19 nt, Artificial Sequence
  Description of Artificial Sequence: Synthetic oligonucleotide
  Antisense strand to SEQ ID NO: 2194744
auuaacaaccaaaugcugu

SEQ ID NO: 2194746 - RNA, 19 nt, Artificial Sequence
  Description of Artificial Sequence: Synthetic oligonucleotide
  Sense strand starting at position 320 of SEQ ID NO: 1883454
agcauuugguuguuaauau

SEQ ID NO: 2194747 - RNA, 19 nt, Artificial Sequence
  Description of Artificial Sequence: Synthetic oligonucleotide
  Antisense strand to SEQ ID NO: 2194746
auauuaacaaccaaaugcu

SEQ ID NO: 2194748 - RNA, 19 nt, Artificial Sequence
  Description of Artificial Sequence: Synthetic oligonucleotide
  Sense strand starting at position 371 of SEQ ID NO: 1883454
gguaaacagacauggcauu

SEQ ID NO: 2194749 - RNA, 19 nt, Artificial Sequence
  Description of Artificial Sequence: Synthetic oligonucleotide
  Antisense strand to SEQ ID NO: 2194748
aaugccaugucuguuuacc

SEQ ID NO: 2194750 - RNA, 19 nt, Artificial Sequence
  Description of Artificial Sequence: Synthetic oligonucleotide
  Sense strand starting at position 390 of SEQ ID NO: 1883454
uuaaguugucuauagauug

SEQ ID NO: 2194751 - RNA, 19 nt, Artificial Sequence
  Description of Artificial Sequence: Synthetic oligonucleotide
  Antisense strand to SEQ ID NO: 2194750
caaucuauagacaacuuaa

SEQ ID NO: 2194752 - RNA, 19 nt, Artificial Sequence
  Description of Artificial Sequence: Synthetic oligonucleotide
  Sense strand starting at position 395 of SEQ ID NO: 1883454
uugucuauagauugucaac

SEQ ID NO: 2194753 - RNA, 19 nt, Artificial Sequence
  Description of Artificial Sequence: Synthetic oligonucleotide
  Antisense strand to SEQ ID NO: 2194752
guugacaaucuauagacaa

SEQ ID NO: 2194754 - RNA, 19 nt, Artificial Sequence
  Description of Artificial Sequence: Synthetic oligonucleotide
  Sense strand starting at position 397 of SEQ ID NO: 1883454
gucuauagauugucaacca

SEQ ID NO: 2194755 - RNA, 19 nt, Artificial Sequence
  Description of Artificial Sequence: Synthetic oligonucleotide
  Antisense strand to SEQ ID NO: 2194754
ugguugacaaucuauagac

SEQ ID NO: 2194756 - RNA, 19 nt, Artificial Sequence
  Description of Artificial Sequence: Synthetic oligonucleotide
  Sense strand starting at position 449 of SEQ ID NO: 1883454
augaucucaucaguagacu

SEQ ID NO: 2194757 - RNA, 19 nt, Artificial Sequence
  Description of Artificial Sequence: Synthetic oligonucleotide
  Antisense strand to SEQ ID NO: 2194756
agucuacugaugagaucau

SEQ ID NO: 2194758 - RNA, 19 nt, Artificial Sequence
  Description of Artificial Sequence: Synthetic oligonucleotide
  Sense strand starting at position 458 of SEQ ID NO: 1883454
ucaguagacuaucugaaca

SEQ ID NO: 2194759 - RNA, 19 nt, Artificial Sequence
  Description of Artificial Sequence: Synthetic oligonucleotide
  Antisense strand to SEQ ID NO: 2194758
uguucagauagucuacuga

SEQ ID NO: 2194760 - RNA, 19 nt, Artificial Sequence
  Description of Artificial Sequence: Synthetic oligonucleotide
  Sense strand starting at position 667 of SEQ ID NO: 1883454
cgcucaggacugcaagaaa

SEQ ID NO: 2194761 - RNA, 19 nt, Artificial Sequence
  Description of Artificial Sequence: Synthetic oligonucleotide
  Antisense strand to SEQ ID NO: 2194760
uuucuugcaguccugagcg

SEQ ID NO: 2194762 - RNA, 19 nt, Artificial Sequence
  Description of Artificial Sequence: Synthetic oligonucleotide
  Sense strand starting at position 762 of SEQ ID NO: 1883454
ggugucuguguucagggaa

SEQ ID NO: 2194763 - RNA, 19 nt, Artificial Sequence
  Description of Artificial Sequence: Synthetic oligonucleotide
  Antisense strand to SEQ ID NO: 2194762
uucccugaacacagacacc

SEQ ID NO: 2194764 - RNA, 19 nt, Artificial Sequence
  Description of Artificial Sequence: Synthetic oligonucleotide
  Sense strand starting at position 765 of SEQ ID NO: 1883454
gucuguguucagggaaaug

SEQ ID NO: 2194765 - RNA, 19 nt, Artificial Sequence
  Description of Artificial Sequence: Synthetic oligonucleotide
  Antisense strand to SEQ ID NO: 2194764
cauuucccugaacacagac

SEQ ID NO: 2194766 - RNA, 19 nt, Artificial Sequence
  Description of Artificial Sequence: Synthetic oligonucleotide
  Sense strand starting at position 802 of SEQ ID NO: 1883454
uugagucuuaugugaagac

SEQ ID NO: 2194767 - RNA, 19 nt, Artificial Sequence
  Description of Artificial Sequence: Synthetic oligonucleotide
  Antisense strand to SEQ ID NO: 2194766
gucuucacauaagacucaa

SEQ ID NO: 2194768 - RNA, 19 nt, Artificial Sequence
  Description of Artificial Sequence: Synthetic oligonucleotide
  Sense strand starting at position 942 of SEQ ID NO: 1883454
gcagaaaucugauccugcu

SEQ ID NO: 2194769 - RNA, 19 nt, Artificial Sequence
  Description of Artificial Sequence: Synthetic oligonucleotide
  Antisense strand to SEQ ID NO: 2194768
agcaggaucagauuucugc

SEQ ID NO: 2194770 - RNA, 19 nt, Artificial Sequence
  Description of Artificial Sequence: Synthetic oligonucleotide
  Sense strand starting at position 1144 of SEQ ID NO: 1883454
aaugaugugcuguggaaug

SEQ ID NO: 2194771 - RNA, 19 nt, Artificial Sequence
  Description of Artificial Sequence: Synthetic oligonucleotide
  Antisense strand to SEQ ID NO: 2194770
cauuccacagcacaucauu

SEQ ID NO: 2194772 - RNA, 19 nt, Artificial Sequence
  Description of Artificial Sequence: Synthetic oligonucleotide
  Sense strand starting at position 1295 of SEQ ID NO: 1883454
caggucagauaucugauga

SEQ ID NO: 2194773 - RNA, 19 nt, Artificial Sequence
  Description of Artificial Sequence: Synthetic oligonucleotide
  Antisense strand to SEQ ID NO: 2194772
ucaucagauaucugaccug

SEQ ID NO: 2194774 - RNA, 19 nt, Artificial Sequence
  Description of Artificial Sequence: Synthetic oligonucleotide
  Sense strand starting at position 1511 of SEQ ID NO: 1883454
cacgguuugcaucaagagu

SEQ ID NO: 2194775 - RNA, 19 nt, Artificial Sequence
  Description of Artificial Sequence: Synthetic oligonucleotide
  Antisense strand to SEQ ID NO: 2194774
acucuugaugcaaaccgug

SEQ ID NO: 2194776 - RNA, 19 nt, Artificial Sequence
  Description of Artificial Sequence: Synthetic oligonucleotide
  Sense strand starting at position 1825 of SEQ ID NO: 1883454
auaggcuguaccugagaaa

SEQ ID NO: 2194777 - RNA, 19 nt, Artificial Sequence
  Description of Artificial Sequence: Synthetic oligonucleotide
  Antisense strand to SEQ ID NO: 2194776
uuucucagguacagccuau

SEQ ID NO: 2194778 - RNA, 19 nt, Artificial Sequence
  Description of Artificial Sequence: Synthetic oligonucleotide
  Sense strand starting at position 2030 of SEQ ID NO: 1883454
ucaugaucuggcugacuca

SEQ ID NO: 2194779 - RNA, 19 nt, Artificial Sequence
  Description of Artificial Sequence: Synthetic oligonucleotide
  Antisense strand to SEQ ID NO: 2194778
ugagucagccagaucauga

SEQ ID NO: 2194780 - RNA, 19 nt, Artificial Sequence
  Description of Artificial Sequence: Synthetic oligonucleotide
  Sense strand starting at position 2084 of SEQ ID NO: 1883454
gaaauaacucuaggguugu

SEQ ID NO: 2194781 - RNA, 19 nt, Artificial Sequence
  Description of Artificial Sequence: Synthetic oligonucleotide
  Antisense strand to SEQ ID NO: 2194780
acaacccuagaguuauuuc

SEQ ID NO: 2194782 - RNA, 19 nt, Artificial Sequence
  Description of Artificial Sequence: Synthetic oligonucleotide
  Sense strand starting at position 2163 of SEQ ID NO: 1883454
gaaauagguuauguuacau

SEQ ID NO: 2194783 - RNA, 19 nt, Artificial Sequence
  Description of Artificial Sequence: Synthetic oligonucleotide
  Antisense strand to SEQ ID NO: 2194782
auguaacauaaccuauuuc

SEQ ID NO: 2194784 - RNA, 19 nt, Artificial Sequence
  Description of Artificial Sequence: Synthetic oligonucleotide
  Sense strand starting at position 2280 of SEQ ID NO: 1883454
cgcagauggcccuaaauca

SEQ ID NO: 2194785 - RNA, 19 nt, Artificial Sequence
  Description of Artificial Sequence: Synthetic oligonucleotide
  Antisense strand to SEQ ID NO: 2194784
ugauuuagggccaucugcg

SEQ ID NO: 2194786 - RNA, 19 nt, Artificial Sequence
  Description of Artificial Sequence: Synthetic oligonucleotide
  Sense strand starting at position 2384 of SEQ ID NO: 1883454
caggcaggaucauugaagu

SEQ ID NO: 2194787 - RNA, 19 nt, Artificial Sequence
  Description of Artificial Sequence: Synthetic oligonucleotide
  Antisense strand to SEQ ID NO: 2194786
acuucaaugauccugccug

SEQ ID NO: 2194788 - RNA, 19 nt, Artificial Sequence
  Description of Artificial Sequence: Synthetic oligonucleotide
  Sense strand starting at position 2390 of SEQ ID NO: 1883454
ggaucauugaaguggaucu

SEQ ID NO: 2194789 - RNA, 19 nt, Artificial Sequence
  Description of Artificial Sequence: Synthetic oligonucleotide
  Antisense strand to SEQ ID NO: 2194788
agauccacuucaaugaucc

SEQ ID NO: 2194790 - RNA, 19 nt, Artificial Sequence
  Description of Artificial Sequence: Synthetic oligonucleotide
  Sense strand starting at position 2470 of SEQ ID NO: 1883454
ggcugucaggucuauagga

SEQ ID NO: 2194791 - RNA, 19 nt, Artificial Sequence
  Description of Artificial Sequence: Synthetic oligonucleotide
  Antisense strand to SEQ ID NO: 2194790
uccuauagaccugacagcc

SEQ ID NO: 2194792 - RNA, 19 nt, Artificial Sequence
  Description of Artificial Sequence: Synthetic oligonucleotide
  Sense strand starting at position 2472 of SEQ ID NO: 1883454
cugucaggucuauaggaga

SEQ ID NO: 2194793 - RNA, 19 nt, Artificial Sequence
  Description of Artificial Sequence: Synthetic oligonucleotide
  Antisense strand to SEQ ID NO: 2194792
ucuccuauagaccugacag

SEQ ID NO: 2194794 - RNA, 19 nt, Artificial Sequence
  Description of Artificial Sequence: Synthetic oligonucleotide
  Sense strand starting at position 2492 of SEQ ID NO: 1883454
caaugagcuccgggaacaa

SEQ ID NO: 2194795 - RNA, 19 nt, Artificial Sequence
  Description of Artificial Sequence: Synthetic oligonucleotide
  Antisense strand to SEQ ID NO: 2194794
uuguucccggagcucauug

SEQ ID NO: 2194796 - RNA, 19 nt, Artificial Sequence
  Description of Artificial Sequence: Synthetic oligonucleotide
  Sense strand starting at position 2605 of SEQ ID NO: 1883454
ccgauauauccaugaauac

SEQ ID NO: 2194797 - RNA, 19 nt, Artificial Sequence
  Description of Artificial Sequence: Synthetic oligonucleotide
  Antisense strand to SEQ ID NO: 2194796
guauucauggauauaucgg

SEQ ID NO: 2194798 - RNA, 19 nt, Artificial Sequence
  Description of Artificial Sequence: Synthetic oligonucleotide
  Sense strand starting at position 2647 of SEQ ID NO: 1883454
aauggaaauuugcauagga

SEQ ID NO: 2194799 - RNA, 19 nt, Artificial Sequence
  Description of Artificial Sequence: Synthetic oligonucleotide
  Antisense strand to SEQ ID NO: 2194798
uccuaugcaaauuuccauu

SEQ ID NO: 2194800 - RNA, 19 nt, Artificial Sequence
  Description of Artificial Sequence: Synthetic oligonucleotide
  Sense strand starting at position 2663 of SEQ ID NO: 1883454
ggagcucaagcuuagugau

SEQ ID NO: 2194801 - RNA, 19 nt, Artificial Sequence
  Description of Artificial Sequence: Synthetic oligonucleotide
  Antisense strand to SEQ ID NO: 2194800
aucacuaagcuugagcucc

SEQ ID NO: 2194802 - RNA, 19 nt, Artificial Sequence
  Description of Artificial Sequence: Synthetic oligonucleotide
  Sense strand starting at position 2796 of SEQ ID NO: 1883454
uugaauuaccaaugcagau

SEQ ID NO: 2194803 - RNA, 19 nt, Artificial Sequence
  Description of Artificial Sequence: Synthetic oligonucleotide
  Antisense strand to SEQ ID NO: 2194802
aucugcauugguaauucaa

SEQ ID NO: 2194804 - RNA, 19 nt, Artificial Sequence
  Description of Artificial Sequence: Synthetic oligonucleotide
  Sense strand starting at position 2856 of SEQ ID NO: 1883454
cucgguuccaaagagcaau

SEQ ID NO: 2194805 - RNA, 19 nt, Artificial Sequence
  Description of Artificial Sequence: Synthetic oligonucleotide
  Antisense strand to SEQ ID NO: 2194804
auugcucuuuggaaccgag

SEQ ID NO: 2194806 - RNA, 19 nt, Artificial Sequence
  Description of Artificial Sequence: Synthetic oligonucleotide
  Sense strand starting at position 2862 of SEQ ID NO: 1883454
uccaaagagcaauguuaua

SEQ ID NO: 2194807 - RNA, 19 nt, Artificial Sequence
  Description of Artificial Sequence: Synthetic oligonucleotide
  Antisense strand to SEQ ID NO: 2194806
uauaacauugcucuuugga

SEQ ID NO: 2194808 - RNA, 19 nt, Artificial Sequence
  Description of Artificial Sequence: Synthetic oligonucleotide
  Sense strand starting at position 2874 of SEQ ID NO: 1883454
uguuauauaucauuagagg

SEQ ID NO: 2194809 - RNA, 19 nt, Artificial Sequence
  Description of Artificial Sequence: Synthetic oligonucleotide
  Antisense strand to SEQ ID NO: 2194808
ccucuaaugauauauaaca

SEQ ID NO: 2194810 - RNA, 19 nt, Artificial Sequence
  Description of Artificial Sequence: Synthetic oligonucleotide
  Sense strand starting at position 3173 of SEQ ID NO: 1883454
gccagagaucaauggugag

SEQ ID NO: 2194811 - RNA, 19 nt, Artificial Sequence
  Description of Artificial Sequence: Synthetic oligonucleotide
  Antisense strand to SEQ ID NO: 2194810
cucaccauugaucucuggc

SEQ ID NO: 2194812 - RNA, 19 nt, Artificial Sequence
  Description of Artificial Sequence: Synthetic oligonucleotide
  Sense strand starting at position 3246 of SEQ ID NO: 1883454
cugauaagcuguccuagaa

SEQ ID NO: 2194813 - RNA, 19 nt, Artificial Sequence
  Description of Artificial Sequence: Synthetic oligonucleotide
  Antisense strand to SEQ ID NO: 2194812
uucuaggacagcuuaucag

SEQ ID NO: 2194814 - RNA, 19 nt, Artificial Sequence
  Description of Artificial Sequence: Synthetic oligonucleotide
  Sense strand starting at position 3458 of SEQ ID NO: 1883454
acugcaauugccuaaaguu

SEQ ID NO: 2194815 - RNA, 19 nt, Artificial Sequence
  Description of Artificial Sequence: Synthetic oligonucleotide
  Antisense strand to SEQ ID NO: 2194814
aacuuuaggcaauugcagu

SEQ ID NO: 2194816 - RNA, 19 nt, Artificial Sequence
  Description of Artificial Sequence: Synthetic oligonucleotide
  Sense strand starting at position 3776 of SEQ ID NO: 1883454
uuugcuguuggucagauau

SEQ ID NO: 2194817 - RNA, 19 nt, Artificial Sequence
  Description of Artificial Sequence: Synthetic oligonucleotide
  Antisense strand to SEQ ID NO: 2194816
auaucugaccaacagcaaa

SEQ ID NO: 2194818 - RNA, 19 nt, Artificial Sequence
  Description of Artificial Sequence: Synthetic oligonucleotide
  Sense strand starting at position 85 of SEQ ID NO: 1883455
cccaaacagucauuguacu

SEQ ID NO: 2194819 - RNA, 19 nt, Artificial Sequence
  Description of Artificial Sequence: Synthetic oligonucleotide
  Antisense strand to SEQ ID NO: 2194818
aguacaaugacuguuuggg

SEQ ID NO: 2194820 - RNA, 19 nt, Artificial Sequence
  Description of Artificial Sequence: Synthetic oligonucleotide
  Sense strand starting at position 86 of SEQ ID NO: 1883455
ccaaacagucauuguacua

SEQ ID NO: 2194821 - RNA, 19 nt, Artificial Sequence
  Description of Artificial Sequence: Synthetic oligonucleotide
  Antisense strand to SEQ ID NO: 2194820
uaguacaaugacuguuugg

SEQ ID NO: 2194822 - RNA, 19 nt, Artificial Sequence
  Description of Artificial Sequence: Synthetic oligonucleotide
  Sense strand starting at position 134 of SEQ ID NO: 1883455
accaguaucugccuuaaga

SEQ ID NO: 2194823 - RNA, 19 nt, Artificial Sequence
  Description of Artificial Sequence: Synthetic oligonucleotide
  Antisense strand to SEQ ID NO: 2194822
ucuuaaggcagauacuggu

SEQ ID NO: 2194824 - RNA, 19 nt, Artificial Sequence
  Description of Artificial Sequence: Synthetic oligonucleotide
  Sense strand starting at position 136 of SEQ ID NO: 1883455
caguaucugccuuaagagu

SEQ ID NO: 2194825 - RNA, 19 nt, Artificial Sequence
  Description of Artificial Sequence: Synthetic oligonucleotide
  Antisense strand to SEQ ID NO: 2194824
acucuuaaggcagauacug

SEQ ID NO: 2194826 - RNA, 19 nt, Artificial Sequence
  Description of Artificial Sequence: Synthetic oligonucleotide
  Sense strand starting at position 144 of SEQ ID NO: 1883455
gccuuaagaguuugaucua

SEQ ID NO: 2194827 - RNA, 19 nt, Artificial Sequence
  Description of Artificial Sequence: Synthetic oligonucleotide
  Antisense strand to SEQ ID NO: 2194826
uagaucaaacucuuaaggc

SEQ ID NO: 2194828 - RNA, 19 nt, Artificial Sequence
  Description of Artificial Sequence: Synthetic oligonucleotide
  Sense strand starting at position 147 of SEQ ID NO: 1883455
uuaagaguuugaucuagug

SEQ ID NO: 2194829 - RNA, 19 nt, Artificial Sequence
  Description of Artificial Sequence: Synthetic oligonucleotide
  Antisense strand to SEQ ID NO: 2194828
cacuagaucaaacucuuaa

SEQ ID NO: 2194830 - RNA, 19 nt, Artificial Sequence
  Description of Artificial Sequence: Synthetic oligonucleotide
  Sense strand starting at position 153 of SEQ ID NO: 1883455
guuugaucuagugggaaag

SEQ ID NO: 2194831 - RNA, 19 nt, Artificial Sequence
  Description of Artificial Sequence: Synthetic oligonucleotide
  Antisense strand to SEQ ID NO: 2194830
cuuucccacuagaucaaac

SEQ ID NO: 2194832 - RNA, 19 nt, Artificial Sequence
  Description of Artificial Sequence: Synthetic oligonucleotide
  Sense strand starting at position 246 of SEQ ID NO: 1883455
uugguaggcagaggaauau

SEQ ID NO: 2194833 - RNA, 19 nt, Artificial Sequence
  Description of Artificial Sequence: Synthetic oligonucleotide
  Antisense strand to SEQ ID NO: 2194832
auauuccucugccuaccaa

SEQ ID NO: 2194834 - RNA, 19 nt, Artificial Sequence
  Description of Artificial Sequence: Synthetic oligonucleotide
  Sense strand starting at position 314 of SEQ ID NO: 1883455
augcacaaguguuuauaga

SEQ ID NO: 2194835 - RNA, 19 nt, Artificial Sequence
  Description of Artificial Sequence: Synthetic oligonucleotide
  Antisense strand to SEQ ID NO: 2194834
ucuauaaacacuugugcau

SEQ ID NO: 2194836 - RNA, 19 nt, Artificial Sequence
  Description of Artificial Sequence: Synthetic oligonucleotide
  Sense strand starting at position 388 of SEQ ID NO: 1883455
uaugguguguaagcauuua

SEQ ID NO: 2194837 - RNA, 19 nt, Artificial Sequence
  Description of Artificial Sequence: Synthetic oligonucleotide
  Antisense strand to SEQ ID NO: 2194836
uaaaugcuuacacaccaua

SEQ ID NO: 2194838 - RNA, 19 nt, Artificial Sequence
  Description of Artificial Sequence: Synthetic oligonucleotide
  Sense strand starting at position 412 of SEQ ID NO: 1883455
uccugaggagcguaaauga

SEQ ID NO: 2194839 - RNA, 19 nt, Artificial Sequence
  Description of Artificial Sequence: Synthetic oligonucleotide
  Antisense strand to SEQ ID NO: 2194838
ucauuuacgcuccucagga

SEQ ID NO: 2194840 - RNA, 19 nt, Artificial Sequence
  Description of Artificial Sequence: Synthetic oligonucleotide
  Sense strand starting at position 529 of SEQ ID NO: 1883455
ggaauuugguuguauaaca

SEQ ID NO: 2194841 - RNA, 19 nt, Artificial Sequence
  Description of Artificial Sequence: Synthetic oligonucleotide
  Antisense strand to SEQ ID NO: 2194840
uguuauacaaccaaauucc

SEQ ID NO: 2194842 - RNA, 19 nt, Artificial Sequence
  Description of Artificial Sequence: Synthetic oligonucleotide
  Sense strand starting at position 914 of SEQ ID NO: 1883455
ucuugauugccagaccaca

SEQ ID NO: 2194843 - RNA, 19 nt, Artificial Sequence
  Description of Artificial Sequence: Synthetic oligonucleotide
  Antisense strand to SEQ ID NO: 2194842
uguggucuggcaaucaaga

SEQ ID NO: 2194844 - RNA, 19 nt, Artificial Sequence
  Description of Artificial Sequence: Synthetic oligonucleotide
  Sense strand starting at position 946 of SEQ ID NO: 1883455
agauaucucuaccuggaug

SEQ ID NO: 2194845 - RNA, 19 nt, Artificial Sequence
  Description of Artificial Sequence: Synthetic oligonucleotide
  Antisense strand to SEQ ID NO: 2194844
cauccagguagagauaucu

SEQ ID NO: 2194846 - RNA, 19 nt, Artificial Sequence
  Description of Artificial Sequence: Synthetic oligonucleotide
  Sense strand starting at position 954 of SEQ ID NO: 1883455
cuaccuggauguccuauaa

SEQ ID NO: 2194847 - RNA, 19 nt, Artificial Sequence
  Description of Artificial Sequence: Synthetic oligonucleotide
  Antisense strand to SEQ ID NO: 2194846
uuauaggacauccagguag

SEQ ID NO: 2194848 - RNA, 19 nt, Artificial Sequence
  Description of Artificial Sequence: Synthetic oligonucleotide
  Sense strand starting at position 958 of SEQ ID NO: 1883455
cuggauguccuauaauuau

SEQ ID NO: 2194849 - RNA, 19 nt, Artificial Sequence
  Description of Artificial Sequence: Synthetic oligonucleotide
  Antisense strand to SEQ ID NO: 2194848
auaauuauaggacauccag

SEQ ID NO: 2194850 - RNA, 19 nt, Artificial Sequence
  Description of Artificial Sequence: Synthetic oligonucleotide
  Sense strand starting at position 1233 of SEQ ID NO: 1883455
ucaggauuaccuugcuaaa

SEQ ID NO: 2194851 - RNA, 19 nt, Artificial Sequence
  Description of Artificial Sequence: Synthetic oligonucleotide
  Antisense strand to SEQ ID NO: 2194850
uuuagcaagguaauccuga

SEQ ID NO: 2194852 - RNA, 19 nt, Artificial Sequence
  Description of Artificial Sequence: Synthetic oligonucleotide
  Sense strand starting at position 1360 of SEQ ID NO: 1883455
ugccgacuggaucauugua

SEQ ID NO: 2194853 - RNA, 19 nt, Artificial Sequence
  Description of Artificial Sequence: Synthetic oligonucleotide
  Antisense strand to SEQ ID NO: 2194852
uacaaugauccagucggca

SEQ ID NO: 2194854 - RNA, 19 nt, Artificial Sequence
  Description of Artificial Sequence: Synthetic oligonucleotide
  Sense strand starting at position 1368 of SEQ ID NO: 1883455
ggaucauuguacuugccaa

SEQ ID NO: 2194855 - RNA, 19 nt, Artificial Sequence
  Description of Artificial Sequence: Synthetic oligonucleotide
  Antisense strand to SEQ ID NO: 2194854
uuggcaaguacaaugaucc

SEQ ID NO: 2194856 - RNA, 19 nt, Artificial Sequence
  Description of Artificial Sequence: Synthetic oligonucleotide
  Sense strand starting at position 1460 of SEQ ID NO: 1883455
gagcuuugugcccuguguu

SEQ ID NO: 2194857 - RNA, 19 nt, Artificial Sequence
  Description of Artificial Sequence: Synthetic oligonucleotide
  Antisense strand to SEQ ID NO: 2194856
aacacagggcacaaagcuc

SEQ ID NO: 2194858 - RNA, 19 nt, Artificial Sequence
  Description of Artificial Sequence: Synthetic oligonucleotide
  Sense strand starting at position 1508 of SEQ ID NO: 1883455
gcucacuaacuaugauaug

SEQ ID NO: 2194859 - RNA, 19 nt, Artificial Sequence
  Description of Artificial Sequence: Synthetic oligonucleotide
  Antisense strand to SEQ ID NO: 2194858
cauaucauaguuagugagc

SEQ ID NO: 2194860 - RNA, 19 nt, Artificial Sequence
  Description of Artificial Sequence: Synthetic oligonucleotide
  Sense strand starting at position 1532 of SEQ ID NO: 1883455
augaaugcuugagugaauu

SEQ ID NO: 2194861 - RNA, 19 nt, Artificial Sequence
  Description of Artificial Sequence: Synthetic oligonucleotide
  Antisense strand to SEQ ID NO: 2194860
aauucacucaagcauucau

SEQ ID NO: 2194862 - RNA, 19 nt, Artificial Sequence
  Description of Artificial Sequence: Synthetic oligonucleotide
  Sense strand starting at position 1707 of SEQ ID NO: 1883455
cuguacggcuuguuaauuu

SEQ ID NO: 2194863 - RNA, 19 nt, Artificial Sequence
  Description of Artificial Sequence: Synthetic oligonucleotide
  Antisense strand to SEQ ID NO: 2194862
aaauuaacaagccguacag

SEQ ID NO: 2194864 - RNA, 19 nt, Artificial Sequence
  Description of Artificial Sequence: Synthetic oligonucleotide
  Sense strand starting at position 2323 of SEQ ID NO: 1883455
cacagaauccuaugguaga

SEQ ID NO: 2194865 - RNA, 19 nt, Artificial Sequence
  Description of Artificial Sequence: Synthetic oligonucleotide
  Antisense strand to SEQ ID NO: 2194864
ucuaccauaggauucugug

SEQ ID NO: 2194866 - RNA, 19 nt, Artificial Sequence
  Description of Artificial Sequence: Synthetic oligonucleotide
  Sense strand starting at position 2334 of SEQ ID NO: 1883455
augguagacccggguucaa

SEQ ID NO: 2194867 - RNA, 19 nt, Artificial Sequence
  Description of Artificial Sequence: Synthetic oligonucleotide
  Antisense strand to SEQ ID NO: 2194866
uugaacccgggucuaccau

SEQ ID NO: 2194868 - RNA, 19 nt, Artificial Sequence
  Description of Artificial Sequence: Synthetic oligonucleotide
  Sense strand starting at position 2671 of SEQ ID NO: 1883455
gcgcaaggugauagaguuu

SEQ ID NO: 2194869 - RNA, 19 nt, Artificial Sequence
  Description of Artificial Sequence: Synthetic oligonucleotide
  Antisense strand to SEQ ID NO: 2194868
aaacucuaucaccuugcgc

SEQ ID NO: 2194870 - RNA, 19 nt, Artificial Sequence
  Description of Artificial Sequence: Synthetic oligonucleotide
  Sense strand starting at position 2678 of SEQ ID NO: 1883455
gugauagaguuucuaagug

SEQ ID NO: 2194871 - RNA, 19 nt, Artificial Sequence
  Description of Artificial Sequence: Synthetic oligonucleotide
  Antisense strand to SEQ ID NO: 2194870
cacuuagaaacucuaucac

SEQ ID NO: 2194872 - RNA, 19 nt, Artificial Sequence
  Description of Artificial Sequence: Synthetic oligonucleotide
  Sense strand starting at position 2849 of SEQ ID NO: 1883455
gucugagacuagucugaga

SEQ ID NO: 2194873 - RNA, 19 nt, Artificial Sequence
  Description of Artificial Sequence: Synthetic oligonucleotide
  Antisense strand to SEQ ID NO: 2194872
ucucagacuagucucagac

SEQ ID NO: 2194874 - RNA, 19 nt, Artificial Sequence
  Description of Artificial Sequence: Synthetic oligonucleotide
  Sense strand starting at position 2851 of SEQ ID NO: 1883455
cugagacuagucugagaac

SEQ ID NO: 2194875 - RNA, 19 nt, Artificial Sequence
  Description of Artificial Sequence: Synthetic oligonucleotide
  Antisense strand to SEQ ID NO: 2194874
guucucagacuagucucag

SEQ ID NO: 2194876 - RNA, 19 nt, Artificial Sequence
  Description of Artificial Sequence: Synthetic oligonucleotide
  Sense strand starting at position 3025 of SEQ ID NO: 1883455
uggaguaggccuggaagaa

SEQ ID NO: 2194877 - RNA, 19 nt, Artificial Sequence
  Description of Artificial Sequence: Synthetic oligonucleotide
  Antisense strand to SEQ ID NO: 2194876
uucuuccaggccuacucca

SEQ ID NO: 2194878 - RNA, 19 nt, Artificial Sequence
  Description of Artificial Sequence: Synthetic oligonucleotide
  Sense strand starting at position 3069 of SEQ ID NO: 1883455
gauugcauauaugugacua

SEQ ID NO: 2194879 - RNA, 19 nt, Artificial Sequence
  Description of Artificial Sequence: Synthetic oligonucleotide
  Antisense strand to SEQ ID NO: 2194878
uagucacauauaugcaauc

SEQ ID NO: 2194880 - RNA, 19 nt, Artificial Sequence
  Description of Artificial Sequence: Synthetic oligonucleotide
  Sense strand starting at position 3073 of SEQ ID NO: 1883455
gcauauaugugacuauuag

SEQ ID NO: 2194881 - RNA, 19 nt, Artificial Sequence
  Description of Artificial Sequence: Synthetic oligonucleotide
  Antisense strand to SEQ ID NO: 2194880
cuaauagucacauauaugc

SEQ ID NO: 2194882 - RNA, 19 nt, Artificial Sequence
  Description of Artificial Sequence: Synthetic oligonucleotide
  Sense strand starting at position 3131 of SEQ ID NO: 1883455
ggccaaguacaaugugaug

SEQ ID NO: 2194883 - RNA, 19 nt, Artificial Sequence
  Description of Artificial Sequence: Synthetic oligonucleotide
  Antisense strand to SEQ ID NO: 2194882
caucacauuguacuuggcc

SEQ ID NO: 2194884 - RNA, 19 nt, Artificial Sequence
  Description of Artificial Sequence: Synthetic oligonucleotide
  Sense strand starting at position 3142 of SEQ ID NO: 1883455
augugaugggauuguuagu

SEQ ID NO: 2194885 - RNA, 19 nt, Artificial Sequence
  Description of Artificial Sequence: Synthetic oligonucleotide
  Antisense strand to SEQ ID NO: 2194884
acuaacaaucccaucacau

SEQ ID NO: 2194886 - RNA, 19 nt, Artificial Sequence
  Description of Artificial Sequence: Synthetic oligonucleotide
  Sense strand starting at position 3517 of SEQ ID NO: 1883455
ugaacuauagcugggaaua

SEQ ID NO: 2194887 - RNA, 19 nt, Artificial Sequence
  Description of Artificial Sequence: Synthetic oligonucleotide
  Antisense strand to SEQ ID NO: 2194886
uauucccagcuauaguuca

SEQ ID NO: 2194888 - RNA, 19 nt, Artificial Sequence
  Description of Artificial Sequence: Synthetic oligonucleotide
  Sense strand starting at position 3518 of SEQ ID NO: 1883455
gaacuauagcugggaauac

SEQ ID NO: 2194889 - RNA, 19 nt, Artificial Sequence
  Description of Artificial Sequence: Synthetic oligonucleotide
  Antisense strand to SEQ ID NO: 2194888
guauucccagcuauaguuc

SEQ ID NO: 2194890 - RNA, 19 nt, Artificial Sequence
  Description of Artificial Sequence: Synthetic oligonucleotide
  Sense strand starting at position 3583 of SEQ ID NO: 1883455
acaguuauggcucagcauu

SEQ ID NO: 2194891 - RNA, 19 nt, Artificial Sequence
  Description of Artificial Sequence: Synthetic oligonucleotide
  Antisense strand to SEQ ID NO: 2194890
aaugcugagccauaacugu

SEQ ID NO: 2194892 - RNA, 19 nt, Artificial Sequence
  Description of Artificial Sequence: Synthetic oligonucleotide
  Sense strand starting at position 3690 of SEQ ID NO: 1883455
gcauacuguguuguuguau

SEQ ID NO: 2194893 - RNA, 19 nt, Artificial Sequence
  Description of Artificial Sequence: Synthetic oligonucleotide
  Antisense strand to SEQ ID NO: 2194892
auacaacaacacaguaugc

SEQ ID NO: 2194894 - RNA, 19 nt, Artificial Sequence
  Description of Artificial Sequence: Synthetic oligonucleotide
  Sense strand starting at position 3745 of SEQ ID NO: 1883455
gcgcucauuugucucuaga

SEQ ID NO: 2194895 - RNA, 19 nt, Artificial Sequence
  Description of Artificial Sequence: Synthetic oligonucleotide
  Antisense strand to SEQ ID NO: 2194894
ucuagagacaaaugagcgc

SEQ ID NO: 2194896 - RNA, 19 nt, Artificial Sequence
  Description of Artificial Sequence: Synthetic oligonucleotide
  Sense strand starting at position 3781 of SEQ ID NO: 1883455
uuguuagaucacgacuguu

SEQ ID NO: 2194897 - RNA, 19 nt, Artificial Sequence
  Description of Artificial Sequence: Synthetic oligonucleotide
  Antisense strand to SEQ ID NO: 2194896
aacagucgugaucuaacaa

SEQ ID NO: 2194898 - RNA, 19 nt, Artificial Sequence
  Description of Artificial Sequence: Synthetic oligonucleotide
  Sense strand starting at position 56 of SEQ ID NO: 1883456
gucuuacguauuuaguguu

SEQ ID NO: 2194899 - RNA, 19 nt, Artificial Sequence
  Description of Artificial Sequence: Synthetic oligonucleotide
  Antisense strand to SEQ ID NO: 2194898
aacacuaaauacguaagac

SEQ ID NO: 2194900 - RNA, 19 nt, Artificial Sequence
  Description of Artificial Sequence: Synthetic oligonucleotide
  Sense strand starting at position 91 of SEQ ID NO: 1883456
cuagcugucauguggaaag

SEQ ID NO: 2194901 - RNA, 19 nt, Artificial Sequence
  Description of Artificial Sequence: Synthetic oligonucleotide
  Antisense strand to SEQ ID NO: 2194900
cuuuccacaugacagcuag

SEQ ID NO: 2194902 - RNA, 19 nt, Artificial Sequence
  Description of Artificial Sequence: Synthetic oligonucleotide
  Sense strand starting at position 93 of SEQ ID NO: 1883456
agcugucauguggaaagca

SEQ ID NO: 2194903 - RNA, 19 nt, Artificial Sequence
  Description of Artificial Sequence: Synthetic oligonucleotide
  Antisense strand to SEQ ID NO: 2194902
ugcuuuccacaugacagcu

SEQ ID NO: 2194904 - RNA, 19 nt, Artificial Sequence
  Description of Artificial Sequence: Synthetic oligonucleotide
  Sense strand starting at position 107 of SEQ ID NO: 1883456
aagcaugcuguccagaaga

SEQ ID NO: 2194905 - RNA, 19 nt, Artificial Sequence
  Description of Artificial Sequence: Synthetic oligonucleotide
  Antisense strand to SEQ ID NO: 2194904
ucuucuggacagcaugcuu

SEQ ID NO: 2194906 - RNA, 19 nt, Artificial Sequence
  Description of Artificial Sequence: Synthetic oligonucleotide
  Sense strand starting at position 109 of SEQ ID NO: 1883456
gcaugcuguccagaagaaa

SEQ ID NO: 2194907 - RNA, 19 nt, Artificial Sequence
  Description of Artificial Sequence: Synthetic oligonucleotide
  Antisense strand to SEQ ID NO: 2194906
uuucuucuggacagcaugc

SEQ ID NO: 2194908 - RNA, 19 nt, Artificial Sequence
  Description of Artificial Sequence: Synthetic oligonucleotide
  Sense strand starting at position 133 of SEQ ID NO: 1883456
gguccuggcuuauuccaaa

SEQ ID NO: 2194909 - RNA, 19 nt, Artificial Sequence
  Description of Artificial Sequence: Synthetic oligonucleotide
  Antisense strand to SEQ ID NO: 2194908
uuuggaauaagccaggacc

SEQ ID NO: 2194910 - RNA, 19 nt, Artificial Sequence
  Description of Artificial Sequence: Synthetic oligonucleotide
  Sense strand starting at position 235 of SEQ ID NO: 1883456
agcucugugugagucacaa

SEQ ID NO: 2194911 - RNA, 19 nt, Artificial Sequence
  Description of Artificial Sequence: Synthetic oligonucleotide
  Antisense strand to SEQ ID NO: 2194910
uugugacucacacagagcu

SEQ ID NO: 2194912 - RNA, 19 nt, Artificial Sequence
  Description of Artificial Sequence: Synthetic oligonucleotide
  Sense strand starting at position 394 of SEQ ID NO: 1883456
gccgaacgugguuaaacaa

SEQ ID NO: 2194913 - RNA, 19 nt, Artificial Sequence
  Description of Artificial Sequence: Synthetic oligonucleotide
  Antisense strand to SEQ ID NO: 2194912
uuguuuaaccacguucggc

SEQ ID NO: 2194914 - RNA, 19 nt, Artificial Sequence
  Description of Artificial Sequence: Synthetic oligonucleotide
  Sense strand starting at position 411 of SEQ ID NO: 1883456
aaauuuaggugaggacaau

SEQ ID NO: 2194915 - RNA, 19 nt, Artificial Sequence
  Description of Artificial Sequence: Synthetic oligonucleotide
  Antisense strand to SEQ ID NO: 2194914
auuguccucaccuaaauuu

SEQ ID NO: 2194916 - RNA, 19 nt, Artificial Sequence
  Description of Artificial Sequence: Synthetic oligonucleotide
  Sense strand starting at position 420 of SEQ ID NO: 1883456
ugaggacaauuauauaagu

SEQ ID NO: 2194917 - RNA, 19 nt, Artificial Sequence
  Description of Artificial Sequence: Synthetic oligonucleotide
  Antisense strand to SEQ ID NO: 2194916
acuuauauaauuguccuca

SEQ ID NO: 2194918 - RNA, 19 nt, Artificial Sequence
  Description of Artificial Sequence: Synthetic oligonucleotide
  Sense strand starting at position 717 of SEQ ID NO: 1883456
gaguuaaacuccgucucga

SEQ ID NO: 2194919 - RNA, 19 nt, Artificial Sequence
  Description of Artificial Sequence: Synthetic oligonucleotide
  Antisense strand to SEQ ID NO: 2194918
ucgagacggaguuuaacuc

SEQ ID NO: 2194920 - RNA, 19 nt, Artificial Sequence
  Description of Artificial Sequence: Synthetic oligonucleotide
  Sense strand starting at position 755 of SEQ ID NO: 1883456
aacagaugagucugaagca

SEQ ID NO: 2194921 - RNA, 19 nt, Artificial Sequence
  Description of Artificial Sequence: Synthetic oligonucleotide
  Antisense strand to SEQ ID NO: 2194920
ugcuucagacucaucuguu

SEQ ID NO: 2194922 - RNA, 19 nt, Artificial Sequence
  Description of Artificial Sequence: Synthetic oligonucleotide
  Sense strand starting at position 779 of SEQ ID NO: 1883456
cugaaagugccacacaaau

SEQ ID NO: 2194923 - RNA, 19 nt, Artificial Sequence
  Description of Artificial Sequence: Synthetic oligonucleotide
  Antisense strand to SEQ ID NO: 2194922
auuuguguggcacuuucag

SEQ ID NO: 2194924 - RNA, 19 nt, Artificial Sequence
  Description of Artificial Sequence: Synthetic oligonucleotide
  Sense strand starting at position 806 of SEQ ID NO: 1883456
uguagaaacuggucguaug

SEQ ID NO: 2194925 - RNA, 19 nt, Artificial Sequence
  Description of Artificial Sequence: Synthetic oligonucleotide
  Antisense strand to SEQ ID NO: 2194924
cauacgaccaguuucuaca

SEQ ID NO: 2194926 - RNA, 19 nt, Artificial Sequence
  Description of Artificial Sequence: Synthetic oligonucleotide
  Sense strand starting at position 807 of SEQ ID NO: 1883456
guagaaacuggucguauga

SEQ ID NO: 2194927 - RNA, 19 nt, Artificial Sequence
  Description of Artificial Sequence: Synthetic oligonucleotide
  Antisense strand to SEQ ID NO: 2194926
ucauacgaccaguuucuac

SEQ ID NO: 2194928 - RNA, 19 nt, Artificial Sequence
  Description of Artificial Sequence: Synthetic oligonucleotide
  Sense strand starting at position 971 of SEQ ID NO: 1883456
gugcgugcuguaguccuaa

SEQ ID NO: 2194929 - RNA, 19 nt, Artificial Sequence
  Description of Artificial Sequence: Synthetic oligonucleotide
  Antisense strand to SEQ ID NO: 2194928
uuaggacuacagcacgcac

SEQ ID NO: 2194930 - RNA, 19 nt, Artificial Sequence
  Description of Artificial Sequence: Synthetic oligonucleotide
  Sense strand starting at position 973 of SEQ ID NO: 1883456
gcgugcuguaguccuaacu

SEQ ID NO: 2194931 - RNA, 19 nt, Artificial Sequence
  Description of Artificial Sequence: Synthetic oligonucleotide
  Antisense strand to SEQ ID NO: 2194930
aguuaggacuacagcacgc

SEQ ID NO: 2194932 - RNA, 19 nt, Artificial Sequence
  Description of Artificial Sequence: Synthetic oligonucleotide
  Sense strand starting at position 1037 of SEQ ID NO: 1883456
uuagcaacucgccaagaaa

SEQ ID NO: 2194933 - RNA, 19 nt, Artificial Sequence
  Description of Artificial Sequence: Synthetic oligonucleotide
  Antisense strand to SEQ ID NO: 2194932
uuucuuggcgaguugcuaa

SEQ ID NO: 2194934 - RNA, 19 nt, Artificial Sequence
  Description of Artificial Sequence: Synthetic oligonucleotide
  Sense strand starting at position 1162 of SEQ ID NO: 1883456
uuaccagcccgaugucuaa

SEQ ID NO: 2194935 - RNA, 19 nt, Artificial Sequence
  Description of Artificial Sequence: Synthetic oligonucleotide
  Antisense strand to SEQ ID NO: 2194934
uuagacaucgggcugguaa

SEQ ID NO: 2194936 - RNA, 19 nt, Artificial Sequence
  Description of Artificial Sequence: Synthetic oligonucleotide
  Sense strand starting at position 1213 of SEQ ID NO: 1883456
cuagauguuggccacggau

SEQ ID NO: 2194937 - RNA, 19 nt, Artificial Sequence
  Description of Artificial Sequence: Synthetic oligonucleotide
  Antisense strand to SEQ ID NO: 2194936
auccguggccaacaucuag

SEQ ID NO: 2194938 - RNA, 19 nt, Artificial Sequence
  Description of Artificial Sequence: Synthetic oligonucleotide
  Sense strand starting at position 1215 of SEQ ID NO: 1883456
agauguuggccacggauca

SEQ ID NO: 2194939 - RNA, 19 nt, Artificial Sequence
  Description of Artificial Sequence: Synthetic oligonucleotide
  Antisense strand to SEQ ID NO: 2194938
ugauccguggccaacaucu

SEQ ID NO: 2194940 - RNA, 19 nt, Artificial Sequence
  Description of Artificial Sequence: Synthetic oligonucleotide
  Sense strand starting at position 1348 of SEQ ID NO: 1883456
cccuaaaucgauuagguuu

SEQ ID NO: 2194941 - RNA, 19 nt, Artificial Sequence
  Description of Artificial Sequence: Synthetic oligonucleotide
  Antisense strand to SEQ ID NO: 2194940
aaaccuaaucgauuuaggg

SEQ ID NO: 2194942 - RNA, 19 nt, Artificial Sequence
  Description of Artificial Sequence: Synthetic oligonucleotide
  Sense strand starting at position 1354 of SEQ ID NO: 1883456
aucgauuagguuuauuaca

SEQ ID NO: 2194943 - RNA, 19 nt, Artificial Sequence
  Description of Artificial Sequence: Synthetic oligonucleotide
  Antisense strand to SEQ ID NO: 2194942
uguaauaaaccuaaucgau

SEQ ID NO: 2194944 - RNA, 19 nt, Artificial Sequence
  Description of Artificial Sequence: Synthetic oligonucleotide
  Sense strand starting at position 2070 of SEQ ID NO: 1883456
cccuauugcaucgggacau

SEQ ID NO: 2194945 - RNA, 19 nt, Artificial Sequence
  Description of Artificial Sequence: Synthetic oligonucleotide
  Antisense strand to SEQ ID NO: 2194944
augucccgaugcaauaggg

SEQ ID NO: 2194946 - RNA, 19 nt, Artificial Sequence
  Description of Artificial Sequence: Synthetic oligonucleotide
  Sense strand starting at position 2080 of SEQ ID NO: 1883456
ucgggacaucccggaguuu

SEQ ID NO: 2194947 - RNA, 19 nt, Artificial Sequence
  Description of Artificial Sequence: Synthetic oligonucleotide
  Antisense strand to SEQ ID NO: 2194946
aaacuccgggaugucccga

SEQ ID NO: 2194948 - RNA, 19 nt, Artificial Sequence
  Description of Artificial Sequence: Synthetic oligonucleotide
  Sense strand starting at position 2135 of SEQ ID NO: 1883456
gcagauuccgagcauggaa

SEQ ID NO: 2194949 - RNA, 19 nt, Artificial Sequence
  Description of Artificial Sequence: Synthetic oligonucleotide
  Antisense strand to SEQ ID NO: 2194948
uuccaugcucggaaucugc

SEQ ID NO: 2194950 - RNA, 19 nt, Artificial Sequence
  Description of Artificial Sequence: Synthetic oligonucleotide
  Sense strand starting at position 2187 of SEQ ID NO: 1883456
gcacuuucuccauaggaga

SEQ ID NO: 2194951 - RNA, 19 nt, Artificial Sequence
  Description of Artificial Sequence: Synthetic oligonucleotide
  Antisense strand to SEQ ID NO: 2194950
ucuccuauggagaaagugc

SEQ ID NO: 2194952 - RNA, 19 nt, Artificial Sequence
  Description of Artificial Sequence: Synthetic oligonucleotide
  Sense strand starting at position 2226 of SEQ ID NO: 1883456
acccguguccucuaaguua

SEQ ID NO: 2194953 - RNA, 19 nt, Artificial Sequence
  Description of Artificial Sequence: Synthetic oligonucleotide
  Antisense strand to SEQ ID NO: 2194952
uaacuuagaggacacgggu

SEQ ID NO: 2194954 - RNA, 19 nt, Artificial Sequence
  Description of Artificial Sequence: Synthetic oligonucleotide
  Sense strand starting at position 2231 of SEQ ID NO: 1883456
uguccucuaaguuagguua

SEQ ID NO: 2194955 - RNA, 19 nt, Artificial Sequence
  Description of Artificial Sequence: Synthetic oligonucleotide
  Antisense strand to SEQ ID NO: 2194954
uaaccuaacuuagaggaca

SEQ ID NO: 2194956 - RNA, 19 nt, Artificial Sequence
  Description of Artificial Sequence: Synthetic oligonucleotide
  Sense strand starting at position 2690 of SEQ ID NO: 1883456
ggagaaacaucgucacuac

SEQ ID NO: 2194957 - RNA, 19 nt, Artificial Sequence
  Description of Artificial Sequence: Synthetic oligonucleotide
  Antisense strand to SEQ ID NO: 2194956
guagugacgauguuucucc

SEQ ID NO: 2194958 - RNA, 19 nt, Artificial Sequence
  Description of Artificial Sequence: Synthetic oligonucleotide
  Sense strand starting at position 2691 of SEQ ID NO: 1883456
gagaaacaucgucacuacu

SEQ ID NO: 2194959 - RNA, 19 nt, Artificial Sequence
  Description of Artificial Sequence: Synthetic oligonucleotide
  Antisense strand to SEQ ID NO: 2194958
aguagugacgauguuucuc

SEQ ID NO: 2194960 - RNA, 19 nt, Artificial Sequence
  Description of Artificial Sequence: Synthetic oligonucleotide
  Sense strand starting at position 2968 of SEQ ID NO: 1883456
gaaaccuucuggucagaaa

SEQ ID NO: 2194961 - RNA, 19 nt, Artificial Sequence
  Description of Artificial Sequence: Synthetic oligonucleotide
  Antisense strand to SEQ ID NO: 2194960
uuucugaccagaagguuuc

SEQ ID NO: 2194962 - RNA, 19 nt, Artificial Sequence
  Description of Artificial Sequence: Synthetic oligonucleotide
  Sense strand starting at position 3029 of SEQ ID NO: 1883456
ggugacuuaaguugugaca

SEQ ID NO: 2194963 - RNA, 19 nt, Artificial Sequence
  Description of Artificial Sequence: Synthetic oligonucleotide
  Antisense strand to SEQ ID NO: 2194962
ugucacaacuuaagucacc

SEQ ID NO: 2194964 - RNA, 19 nt, Artificial Sequence
  Description of Artificial Sequence: Synthetic oligonucleotide
  Sense strand starting at position 3117 of SEQ ID NO: 1883456
augcuauuugcagguauaa

SEQ ID NO: 2194965 - RNA, 19 nt, Artificial Sequence
  Description of Artificial Sequence: Synthetic oligonucleotide
  Antisense strand to SEQ ID NO: 2194964
uuauaccugcaaauagcau

SEQ ID NO: 2194966 - RNA, 19 nt, Artificial Sequence
  Description of Artificial Sequence: Synthetic oligonucleotide
  Sense strand starting at position 3248 of SEQ ID NO: 1883456
uugggaucguuucccuauu

SEQ ID NO: 2194967 - RNA, 19 nt, Artificial Sequence
  Description of Artificial Sequence: Synthetic oligonucleotide
  Antisense strand to SEQ ID NO: 2194966
aauagggaaacgaucccaa

SEQ ID NO: 2194968 - RNA, 19 nt, Artificial Sequence
  Description of Artificial Sequence: Synthetic oligonucleotide
  Sense strand starting at position 3249 of SEQ ID NO: 1883456
ugggaucguuucccuauuu

SEQ ID NO: 2194969 - RNA, 19 nt, Artificial Sequence
  Description of Artificial Sequence: Synthetic oligonucleotide
  Antisense strand to SEQ ID NO: 2194968
aaauagggaaacgauccca

SEQ ID NO: 2194970 - RNA, 19 nt, Artificial Sequence
  Description of Artificial Sequence: Synthetic oligonucleotide
  Sense strand starting at position 3643 of SEQ ID NO: 1883456
cggccuaucucgucaauuu

SEQ ID NO: 2194971 - RNA, 19 nt, Artificial Sequence
  Description of Artificial Sequence: Synthetic oligonucleotide
  Antisense strand to SEQ ID NO: 2194970
aaauugacgagauaggccg

SEQ ID NO: 2194972 - RNA, 19 nt, Artificial Sequence
  Description of Artificial Sequence: Synthetic oligonucleotide
  Sense strand starting at position 3666 of SEQ ID NO: 1883456
gcauaucuauguguucuaa

SEQ ID NO: 2194973 - RNA, 19 nt, Artificial Sequence
  Description of Artificial Sequence: Synthetic oligonucleotide
  Antisense strand to SEQ ID NO: 2194972
uuagaacacauagauaugc

SEQ ID NO: 2194974 - RNA, 19 nt, Artificial Sequence
  Description of Artificial Sequence: Synthetic oligonucleotide
  Sense strand starting at position 3764 of SEQ ID NO: 1883456
cucaauuaaugaguaugua

SEQ ID NO: 2194975 - RNA, 19 nt, Artificial Sequence
  Description of Artificial Sequence: Synthetic oligonucleotide
  Antisense strand to SEQ ID NO: 2194974
uacauacucauuaauugag

SEQ ID NO: 2194976 - RNA, 19 nt, Artificial Sequence
  Description of Artificial Sequence: Synthetic oligonucleotide
  Sense strand starting at position 3847 of SEQ ID NO: 1883456
cccaaagaaucaguugaug

SEQ ID NO: 2194977 - RNA, 19 nt, Artificial Sequence
  Description of Artificial Sequence: Synthetic oligonucleotide
  Antisense strand to SEQ ID NO: 2194976
caucaacugauucuuuggg

SEQ ID NO: 2194978 - RNA, 19 nt, Artificial Sequence
  Description of Artificial Sequence: Synthetic oligonucleotide
  Sense strand starting at position 56 of SEQ ID NO: 1883457
uugagcaaaucuccagagu

SEQ ID NO: 2194979 - RNA, 19 nt, Artificial Sequence
  Description of Artificial Sequence: Synthetic oligonucleotide
  Antisense strand to SEQ ID NO: 2194978
acucuggagauuugcucaa

SEQ ID NO: 2194980 - RNA, 19 nt, Artificial Sequence
  Description of Artificial Sequence: Synthetic oligonucleotide
  Sense strand starting at position 59 of SEQ ID NO: 1883457
agcaaaucuccagaguuag

SEQ ID NO: 2194981 - RNA, 19 nt, Artificial Sequence
  Description of Artificial Sequence: Synthetic oligonucleotide
  Antisense strand to SEQ ID NO: 2194980
cuaacucuggagauuugcu

SEQ ID NO: 2194982 - RNA, 19 nt, Artificial Sequence
  Description of Artificial Sequence: Synthetic oligonucleotide
  Sense strand starting at position 894 of SEQ ID NO: 1883457
gggagacccugucucaaug

SEQ ID NO: 2194983 - RNA, 19 nt, Artificial Sequence
  Description of Artificial Sequence: Synthetic oligonucleotide
  Antisense strand to SEQ ID NO: 2194982
cauugagacagggucuccc

SEQ ID NO: 2194984 - RNA, 19 nt, Artificial Sequence
  Description of Artificial Sequence: Synthetic oligonucleotide
  Sense strand starting at position 1165 of SEQ ID NO: 1883457
cuucucaaugcagguagaa

SEQ ID NO: 2194985 - RNA, 19 nt, Artificial Sequence
  Description of Artificial Sequence: Synthetic oligonucleotide
  Antisense strand to SEQ ID NO: 2194984
uucuaccugcauugagaag

SEQ ID NO: 2194986 - RNA, 19 nt, Artificial Sequence
  Description of Artificial Sequence: Synthetic oligonucleotide
  Sense strand starting at position 1178 of SEQ ID NO: 1883457
guagaagacucagcuacau

SEQ ID NO: 2194987 - RNA, 19 nt, Artificial Sequence
  Description of Artificial Sequence: Synthetic oligonucleotide
  Antisense strand to SEQ ID NO: 2194986
auguagcugagucuucuac

SEQ ID NO: 2194988 - RNA, 19 nt, Artificial Sequence
  Description of Artificial Sequence: Synthetic oligonucleotide
  Sense strand starting at position 1212 of SEQ ID NO: 1883457
caugauguccaaugcauga

SEQ ID NO: 2194989 - RNA, 19 nt, Artificial Sequence
  Description of Artificial Sequence: Synthetic oligonucleotide
  Antisense strand to SEQ ID NO: 2194988
ucaugcauuggacaucaug

SEQ ID NO: 2194990 - RNA, 19 nt, Artificial Sequence
  Description of Artificial Sequence: Synthetic oligonucleotide
  Sense strand starting at position 1258 of SEQ ID NO: 1883457
uuguauggcagcuagaacu

SEQ ID NO: 2194991 - RNA, 19 nt, Artificial Sequence
  Description of Artificial Sequence: Synthetic oligonucleotide
  Antisense strand to SEQ ID NO: 2194990
aguucuagcugccauacaa

SEQ ID NO: 2194992 - RNA, 19 nt, Artificial Sequence
  Description of Artificial Sequence: Synthetic oligonucleotide
  Sense strand starting at position 1268 of SEQ ID NO: 1883457
gcuagaacucacugcaaag

SEQ ID NO: 2194993 - RNA, 19 nt, Artificial Sequence
  Description of Artificial Sequence: Synthetic oligonucleotide
  Antisense strand to SEQ ID NO: 2194992
cuuugcagugaguucuagc

SEQ ID NO: 2194994 - RNA, 19 nt, Artificial Sequence
  Description of Artificial Sequence: Synthetic oligonucleotide
  Sense strand starting at position 1667 of SEQ ID NO: 1883457
ugguauucucaugagugaa

SEQ ID NO: 2194995 - RNA, 19 nt, Artificial Sequence
  Description of Artificial Sequence: Synthetic oligonucleotide
  Antisense strand to SEQ ID NO: 2194994
uucacucaugagaauacca

SEQ ID NO: 2194996 - RNA, 19 nt, Artificial Sequence
  Description of Artificial Sequence: Synthetic oligonucleotide
  Sense strand starting at position 1669 of SEQ ID NO: 1883457
guauucucaugagugaauc

SEQ ID NO: 2194997 - RNA, 19 nt, Artificial Sequence
  Description of Artificial Sequence: Synthetic oligonucleotide
  Antisense strand to SEQ ID NO: 2194996
gauucacucaugagaauac

SEQ ID NO: 2194998 - RNA, 19 nt, Artificial Sequence
  Description of Artificial Sequence: Synthetic oligonucleotide
  Sense strand starting at position 1682 of SEQ ID NO: 1883457
ugaaucugcugucuaugaa

SEQ ID NO: 2194999 - RNA, 19 nt, Artificial Sequence
  Description of Artificial Sequence: Synthetic oligonucleotide
  Antisense strand to SEQ ID NO: 2194998
uucauagacagcagauuca

SEQ ID NO: 2195000 - RNA, 19 nt, Artificial Sequence
  Description of Artificial Sequence: Synthetic oligonucleotide
  Sense strand starting at position 1685 of SEQ ID NO: 1883457
aucugcugucuaugaaaua

SEQ ID NO: 2195001 - RNA, 19 nt, Artificial Sequence
  Description of Artificial Sequence: Synthetic oligonucleotide
  Antisense strand to SEQ ID NO: 2195000
uauuucauagacagcagau

SEQ ID NO: 2195002 - RNA, 19 nt, Artificial Sequence
  Description of Artificial Sequence: Synthetic oligonucleotide
  Sense strand starting at position 1727 of SEQ ID NO: 1883457
gccugucucauagagguag

SEQ ID NO: 2195003 - RNA, 19 nt, Artificial Sequence
  Description of Artificial Sequence: Synthetic oligonucleotide
  Antisense strand to SEQ ID NO: 2195002
cuaccucuaugagacaggc

SEQ ID NO: 2195004 - RNA, 19 nt, Artificial Sequence
  Description of Artificial Sequence: Synthetic oligonucleotide
  Sense strand starting at position 1729 of SEQ ID NO: 1883457
cugucucauagagguagga

SEQ ID NO: 2195005 - RNA, 19 nt, Artificial Sequence
  Description of Artificial Sequence: Synthetic oligonucleotide
  Antisense strand to SEQ ID NO: 2195004
uccuaccucuaugagacag

SEQ ID NO: 2195006 - RNA, 19 nt, Artificial Sequence
  Description of Artificial Sequence: Synthetic oligonucleotide
  Sense strand starting at position 2077 of SEQ ID NO: 1883457
ggccauagacauuacugua

SEQ ID NO: 2195007 - RNA, 19 nt, Artificial Sequence
  Description of Artificial Sequence: Synthetic oligonucleotide
  Antisense strand to SEQ ID NO: 2195006
uacaguaaugucuauggcc

SEQ ID NO: 2195008 - RNA, 19 nt, Artificial Sequence
  Description of Artificial Sequence: Synthetic oligonucleotide
  Sense strand starting at position 2191 of SEQ ID NO: 1883457
uguucuauagaauagccaa

SEQ ID NO: 2195009 - RNA, 19 nt, Artificial Sequence
  Description of Artificial Sequence: Synthetic oligonucleotide
  Antisense strand to SEQ ID NO: 2195008
uuggcuauucuauagaaca

SEQ ID NO: 2195010 - RNA, 19 nt, Artificial Sequence
  Description of Artificial Sequence: Synthetic oligonucleotide
  Sense strand starting at position 2269 of SEQ ID NO: 1883457
gggccauaucaugaaugua

SEQ ID NO: 2195011 - RNA, 19 nt, Artificial Sequence
  Description of Artificial Sequence: Synthetic oligonucleotide
  Antisense strand to SEQ ID NO: 2195010
uacauucaugauauggccc

SEQ ID NO: 2195012 - RNA, 19 nt, Artificial Sequence
  Description of Artificial Sequence: Synthetic oligonucleotide
  Sense strand starting at position 2537 of SEQ ID NO: 1883457
uccuuuaguccuggagaau

SEQ ID NO: 2195013 - RNA, 19 nt, Artificial Sequence
  Description of Artificial Sequence: Synthetic oligonucleotide
  Antisense strand to SEQ ID NO: 2195012
auucuccaggacuaaagga

SEQ ID NO: 2195014 - RNA, 19 nt, Artificial Sequence
  Description of Artificial Sequence: Synthetic oligonucleotide
  Sense strand starting at position 2596 of SEQ ID NO: 1883457
ggcacacaauguccuauaa

SEQ ID NO: 2195015 - RNA, 19 nt, Artificial Sequence
  Description of Artificial Sequence: Synthetic oligonucleotide
  Antisense strand to SEQ ID NO: 2195014
uuauaggacauugugugcc

SEQ ID NO: 2195016 - RNA, 19 nt, Artificial Sequence
  Description of Artificial Sequence: Synthetic oligonucleotide
  Sense strand starting at position 2606 of SEQ ID NO: 1883457
guccuauaaccuggacacu

SEQ ID NO: 2195017 - RNA, 19 nt, Artificial Sequence
  Description of Artificial Sequence: Synthetic oligonucleotide
  Antisense strand to SEQ ID NO: 2195016
aguguccagguuauaggac

SEQ ID NO: 2195018 - RNA, 19 nt, Artificial Sequence
  Description of Artificial Sequence: Synthetic oligonucleotide
  Sense strand starting at position 2665 of SEQ ID NO: 1883457
gucccauggcauuaucagu

SEQ ID NO: 2195019 - RNA, 19 nt, Artificial Sequence
  Description of Artificial Sequence: Synthetic oligonucleotide
  Antisense strand to SEQ ID NO: 2195018
acugauaaugccaugggac

SEQ ID NO: 2195020 - RNA, 19 nt, Artificial Sequence
  Description of Artificial Sequence: Synthetic oligonucleotide
  Sense strand starting at position 2793 of SEQ ID NO: 1883457
auugcuacugucuaaaguu

SEQ ID NO: 2195021 - RNA, 19 nt, Artificial Sequence
  Description of Artificial Sequence: Synthetic oligonucleotide
  Antisense strand to SEQ ID NO: 2195020
aacuuuagacaguagcaau

SEQ ID NO: 2195022 - RNA, 19 nt, Artificial Sequence
  Description of Artificial Sequence: Synthetic oligonucleotide
  Sense strand starting at position 3105 of SEQ ID NO: 1883457
aggaauuaugucuaccuuu

SEQ ID NO: 2195023 - RNA, 19 nt, Artificial Sequence
  Description of Artificial Sequence: Synthetic oligonucleotide
  Antisense strand to SEQ ID NO: 2195022
aaagguagacauaauuccu

SEQ ID NO: 2195024 - RNA, 19 nt, Artificial Sequence
  Description of Artificial Sequence: Synthetic oligonucleotide
  Sense strand starting at position 3129 of SEQ ID NO: 1883457
gaagauuaauuguugccau

SEQ ID NO: 2195025 - RNA, 19 nt, Artificial Sequence
  Description of Artificial Sequence: Synthetic oligonucleotide
  Antisense strand to SEQ ID NO: 2195024
auggcaacaauuaaucuuc

SEQ ID NO: 2195026 - RNA, 19 nt, Artificial Sequence
  Description of Artificial Sequence: Synthetic oligonucleotide
  Sense strand starting at position 3304 of SEQ ID NO: 1883457
ugcuauuaugaugggaaga

SEQ ID NO: 2195027 - RNA, 19 nt, Artificial Sequence
  Description of Artificial Sequence: Synthetic oligonucleotide
  Antisense strand to SEQ ID NO: 2195026
ucuucccaucauaauagca

SEQ ID NO: 2195028 - RNA, 19 nt, Artificial Sequence
  Description of Artificial Sequence: Synthetic oligonucleotide
  Sense strand starting at position 3305 of SEQ ID NO: 1883457
gcuauuaugaugggaagac

SEQ ID NO: 2195029 - RNA, 19 nt, Artificial Sequence
  Description of Artificial Sequence: Synthetic oligonucleotide
  Antisense strand to SEQ ID NO: 2195028
gucuucccaucauaauagc

SEQ ID NO: 2195030 - RNA, 19 nt, Artificial Sequence
  Description of Artificial Sequence: Synthetic oligonucleotide
  Sense strand starting at position 3344 of SEQ ID NO: 1883457
aacagaagcugguccauau

SEQ ID NO: 2195031 - RNA, 19 nt, Artificial Sequence
  Description of Artificial Sequence: Synthetic oligonucleotide
  Antisense strand to SEQ ID NO: 2195030
auauggaccagcuucuguu

SEQ ID NO: 2195032 - RNA, 19 nt, Artificial Sequence
  Description of Artificial Sequence: Synthetic oligonucleotide
  Sense strand starting at position 3348 of SEQ ID NO: 1883457
gaagcugguccauauaaug

SEQ ID NO: 2195033 - RNA, 19 nt, Artificial Sequence
  Description of Artificial Sequence: Synthetic oligonucleotide
  Antisense strand to SEQ ID NO: 2195032
cauuauauggaccagcuuc

SEQ ID NO: 2195034 - RNA, 19 nt, Artificial Sequence
  Description of Artificial Sequence: Synthetic oligonucleotide
  Sense strand starting at position 3507 of SEQ ID NO: 1883457
gcuaaauucugagucaugg

SEQ ID NO: 2195035 - RNA, 19 nt, Artificial Sequence
  Description of Artificial Sequence: Synthetic oligonucleotide
  Antisense strand to SEQ ID NO: 2195034
ccaugacucagaauuuagc

SEQ ID NO: 2195036 - RNA, 19 nt, Artificial Sequence
  Description of Artificial Sequence: Synthetic oligonucleotide
  Sense strand starting at position 3513 of SEQ ID NO: 1883457
uucugagucaugggacagu

SEQ ID NO: 2195037 - RNA, 19 nt, Artificial Sequence
  Description of Artificial Sequence: Synthetic oligonucleotide
  Antisense strand to SEQ ID NO: 2195036
acugucccaugacucagaa

SEQ ID NO: 2195038 - RNA, 19 nt, Artificial Sequence
  Description of Artificial Sequence: Synthetic oligonucleotide
  Sense strand starting at position 3524 of SEQ ID NO: 1883457
gggacagugucuccaaauc

SEQ ID NO: 2195039 - RNA, 19 nt, Artificial Sequence
  Description of Artificial Sequence: Synthetic oligonucleotide
  Antisense strand to SEQ ID NO: 2195038
gauuuggagacacuguccc

SEQ ID NO: 2195040 - RNA, 19 nt, Artificial Sequence
  Description of Artificial Sequence: Synthetic oligonucleotide
  Sense strand starting at position 3604 of SEQ ID NO: 1883457
cagacauguucuccuugga

SEQ ID NO: 2195041 - RNA, 19 nt, Artificial Sequence
  Description of Artificial Sequence: Synthetic oligonucleotide
  Antisense strand to SEQ ID NO: 2195040
uccaaggagaacaugucug

SEQ ID NO: 2195042 - RNA, 19 nt, Artificial Sequence
  Description of Artificial Sequence: Synthetic oligonucleotide
  Sense strand starting at position 3611 of SEQ ID NO: 1883457
guucuccuuggacauauua

SEQ ID NO: 2195043 - RNA, 19 nt, Artificial Sequence
  Description of Artificial Sequence: Synthetic oligonucleotide
  Antisense strand to SEQ ID NO: 2195042
uaauauguccaaggagaac

SEQ ID NO: 2195044 - RNA, 19 nt, Artificial Sequence
  Description of Artificial Sequence: Synthetic oligonucleotide
  Sense strand starting at position 3678 of SEQ ID NO: 1883457
gaaccauguugagauuuga

SEQ ID NO: 2195045 - RNA, 19 nt, Artificial Sequence
  Description of Artificial Sequence: Synthetic oligonucleotide
  Antisense strand to SEQ ID NO: 2195044
ucaaaucucaacaugguuc

SEQ ID NO: 2195046 - RNA, 19 nt, Artificial Sequence
  Description of Artificial Sequence: Synthetic oligonucleotide
  Sense strand starting at position 3714 of SEQ ID NO: 1883457
gucauagaauccuugagag

SEQ ID NO: 2195047 - RNA, 19 nt, Artificial Sequence
  Description of Artificial Sequence: Synthetic oligonucleotide
  Antisense strand to SEQ ID NO: 2195046
cucucaaggauucuaugac

SEQ ID NO: 2195048 - RNA, 19 nt, Artificial Sequence
  Description of Artificial Sequence: Synthetic oligonucleotide
  Sense strand starting at position 3823 of SEQ ID NO: 1883457
acaggaaucugucucucua

SEQ ID NO: 2195049 - RNA, 19 nt, Artificial Sequence
  Description of Artificial Sequence: Synthetic oligonucleotide
  Antisense strand to SEQ ID NO: 2195048
uagagagacagauuccugu

SEQ ID NO: 2195050 - RNA, 19 nt, Artificial Sequence
  Description of Artificial Sequence: Synthetic oligonucleotide
  Sense strand starting at position 3865 of SEQ ID NO: 1883457
agucacugguaccuagaau

SEQ ID NO: 2195051 - RNA, 19 nt, Artificial Sequence
  Description of Artificial Sequence: Synthetic oligonucleotide
  Antisense strand to SEQ ID NO: 2195050
auucuagguaccagugacu

SEQ ID NO: 2195052 - RNA, 19 nt, Artificial Sequence
  Description of Artificial Sequence: Synthetic oligonucleotide
  Sense strand starting at position 3866 of SEQ ID NO: 1883457
gucacugguaccuagaaug

SEQ ID NO: 2195053 - RNA, 19 nt, Artificial Sequence
  Description of Artificial Sequence: Synthetic oligonucleotide
  Antisense strand to SEQ ID NO: 2195052
cauucuagguaccagugac

SEQ ID NO: 2195054 - RNA, 19 nt, Artificial Sequence
  Description of Artificial Sequence: Synthetic oligonucleotide
  Sense strand starting at position 3892 of SEQ ID NO: 1883457
agauauggcaaauguguua

SEQ ID NO: 2195055 - RNA, 19 nt, Artificial Sequence
  Description of Artificial Sequence: Synthetic oligonucleotide
  Antisense strand to SEQ ID NO: 2195054
uaacacauuugccauaucu

SEQ ID NO: 2195056 - RNA, 19 nt, Artificial Sequence
  Description of Artificial Sequence: Synthetic oligonucleotide
  Sense strand starting at position 3925 of SEQ ID NO: 1883457
caaggaucaugagaaauag

SEQ ID NO: 2195057 - RNA, 19 nt, Artificial Sequence
  Description of Artificial Sequence: Synthetic oligonucleotide
  Antisense strand to SEQ ID NO: 2195056
cuauuucucaugauccuug

SEQ ID NO: 2195058 - RNA, 19 nt, Artificial Sequence
  Description of Artificial Sequence: Synthetic oligonucleotide
  Sense strand starting at position 2036 of SEQ ID NO: 1883458
cuaugaguccucuaccaug

SEQ ID NO: 2195059 - RNA, 19 nt, Artificial Sequence
  Description of Artificial Sequence: Synthetic oligonucleotide
  Antisense strand to SEQ ID NO: 2195058
caugguagaggacucauag

SEQ ID NO: 2195060 - RNA, 19 nt, Artificial Sequence
  Description of Artificial Sequence: Synthetic oligonucleotide
  Sense strand starting at position 2133 of SEQ ID NO: 1883458
ggcagaggccugugucuuu

SEQ ID NO: 2195061 - RNA, 19 nt, Artificial Sequence
  Description of Artificial Sequence: Synthetic oligonucleotide
  Antisense strand to SEQ ID NO: 2195060
aaagacacaggccucugcc

SEQ ID NO: 2195062 - RNA, 19 nt, Artificial Sequence
  Description of Artificial Sequence: Synthetic oligonucleotide
  Sense strand starting at position 2146 of SEQ ID NO: 1883458
gucuuucuccacgguuaga

SEQ ID NO: 2195063 - RNA, 19 nt, Artificial Sequence
  Description of Artificial Sequence: Synthetic oligonucleotide
  Antisense strand to SEQ ID NO: 2195062
ucuaaccguggagaaagac

SEQ ID NO: 2195064 - RNA, 19 nt, Artificial Sequence
  Description of Artificial Sequence: Synthetic oligonucleotide
  Sense strand starting at position 2521 of SEQ ID NO: 1883458
cucuuuccuugcuguuauu

SEQ ID NO: 2195065 - RNA, 19 nt, Artificial Sequence
  Description of Artificial Sequence: Synthetic oligonucleotide
  Antisense strand to SEQ ID NO: 2195064
aauaacagcaaggaaagag

SEQ ID NO: 2195066 - RNA, 19 nt, Artificial Sequence
  Description of Artificial Sequence: Synthetic oligonucleotide
  Sense strand starting at position 2544 of SEQ ID NO: 1883458
ccuguuaucugcccauaag

SEQ ID NO: 2195067 - RNA, 19 nt, Artificial Sequence
  Description of Artificial Sequence: Synthetic oligonucleotide
  Antisense strand to SEQ ID NO: 2195066
cuuaugggcagauaacagg

SEQ ID NO: 2195068 - RNA, 19 nt, Artificial Sequence
  Description of Artificial Sequence: Synthetic oligonucleotide
  Sense strand starting at position 2545 of SEQ ID NO: 1883458
cuguuaucugcccauaagu

SEQ ID NO: 2195069 - RNA, 19 nt, Artificial Sequence
  Description of Artificial Sequence: Synthetic oligonucleotide
  Antisense strand to SEQ ID NO: 2195068
acuuaugggcagauaacag

SEQ ID NO: 2195070 - RNA, 19 nt, Artificial Sequence
  Description of Artificial Sequence: Synthetic oligonucleotide
  Sense strand starting at position 2547 of SEQ ID NO: 1883458
guuaucugcccauaaguag

SEQ ID NO: 2195071 - RNA, 19 nt, Artificial Sequence
  Description of Artificial Sequence: Synthetic oligonucleotide
  Antisense strand to SEQ ID NO: 2195070
cuacuuaugggcagauaac

SEQ ID NO: 2195072 - RNA, 19 nt, Artificial Sequence
  Description of Artificial Sequence: Synthetic oligonucleotide
  Sense strand starting at position 2674 of SEQ ID NO: 1883458
uccuuaggcuguuugggaa

SEQ ID NO: 2195073 - RNA, 19 nt, Artificial Sequence
  Description of Artificial Sequence: Synthetic oligonucleotide
  Antisense strand to SEQ ID NO: 2195072
uucccaaacagccuaagga

SEQ ID NO: 2195074 - RNA, 19 nt, Artificial Sequence
  Description of Artificial Sequence: Synthetic oligonucleotide
  Sense strand starting at position 2744 of SEQ ID NO: 1883458
aagacuucgugaccaaaug

SEQ ID NO: 2195075 - RNA, 19 nt, Artificial Sequence
  Description of Artificial Sequence: Synthetic oligonucleotide
  Antisense strand to SEQ ID NO: 2195074
cauuuggucacgaagucuu

SEQ ID NO: 2195076 - RNA, 19 nt, Artificial Sequence
  Description of Artificial Sequence: Synthetic oligonucleotide
  Sense strand starting at position 2745 of SEQ ID NO: 1883458
agacuucgugaccaaaugu

SEQ ID NO: 2195077 - RNA, 19 nt, Artificial Sequence
  Description of Artificial Sequence: Synthetic oligonucleotide
  Antisense strand to SEQ ID NO: 2195076
acauuuggucacgaagucu

SEQ ID NO: 2195078 - RNA, 19 nt, Artificial Sequence
  Description of Artificial Sequence: Synthetic oligonucleotide
  Sense strand starting at position 2812 of SEQ ID NO: 1883458
uggugcucucuuggagaua

SEQ ID NO: 2195079 - RNA, 19 nt, Artificial Sequence
  Description of Artificial Sequence: Synthetic oligonucleotide
  Antisense strand to SEQ ID NO: 2195078
uaucuccaagagagcacca

SEQ ID NO: 2195080 - RNA, 19 nt, Artificial Sequence
  Description of Artificial Sequence: Synthetic oligonucleotide
  Sense strand starting at position 2813 of SEQ ID NO: 1883458
ggugcucucuuggagauag

SEQ ID NO: 2195081 - RNA, 19 nt, Artificial Sequence
  Description of Artificial Sequence: Synthetic oligonucleotide
  Antisense strand to SEQ ID NO: 2195080
cuaucuccaagagagcacc

SEQ ID NO: 2195082 - RNA, 19 nt, Artificial Sequence
  Description of Artificial Sequence: Synthetic oligonucleotide
  Sense strand starting at position 2973 of SEQ ID NO: 1883458
gcuggagcaucucacagaa

SEQ ID NO: 2195083 - RNA, 19 nt, Artificial Sequence
  Description of Artificial Sequence: Synthetic oligonucleotide
  Antisense strand to SEQ ID NO: 2195082
uucugugagaugcuccagc

SEQ ID NO: 2195084 - RNA, 19 nt, Artificial Sequence
  Description of Artificial Sequence: Synthetic oligonucleotide
  Sense strand starting at position 3104 of SEQ ID NO: 1883458
gaccaacguggccaauaua

SEQ ID NO: 2195085 - RNA, 19 nt, Artificial Sequence
  Description of Artificial Sequence: Synthetic oligonucleotide
  Antisense strand to SEQ ID NO: 2195084
uauauuggccacguugguc

SEQ ID NO: 2195086 - RNA, 19 nt, Artificial Sequence
  Description of Artificial Sequence: Synthetic oligonucleotide
  Sense strand starting at position 3355 of SEQ ID NO: 1883458
aaauguguaagcugaggua

SEQ ID NO: 2195087 - RNA, 19 nt, Artificial Sequence
  Description of Artificial Sequence: Synthetic oligonucleotide
  Antisense strand to SEQ ID NO: 2195086
uaccucagcuuacacauuu

SEQ ID NO: 2195088 - RNA, 19 nt, Artificial Sequence
  Description of Artificial Sequence: Synthetic oligonucleotide
  Sense strand starting at position 3423 of SEQ ID NO: 1883458
cuaggauccuguccacuua

SEQ ID NO: 2195089 - RNA, 19 nt, Artificial Sequence
  Description of Artificial Sequence: Synthetic oligonucleotide
  Antisense strand to SEQ ID NO: 2195088
uaaguggacaggauccuag

SEQ ID NO: 2195090 - RNA, 19 nt, Artificial Sequence
  Description of Artificial Sequence: Synthetic oligonucleotide
  Sense strand starting at position 3469 of SEQ ID NO: 1883458
ccucuuagguuuguauaga

SEQ ID NO: 2195091 - RNA, 19 nt, Artificial Sequence
  Description of Artificial Sequence: Synthetic oligonucleotide
  Antisense strand to SEQ ID NO: 2195090
ucuauacaaaccuaagagg

SEQ ID NO: 2195092 - RNA, 19 nt, Artificial Sequence
  Description of Artificial Sequence: Synthetic oligonucleotide
  Sense strand starting at position 3470 of SEQ ID NO: 1883458
cucuuagguuuguauagag

SEQ ID NO: 2195093 - RNA, 19 nt, Artificial Sequence
  Description of Artificial Sequence: Synthetic oligonucleotide
  Antisense strand to SEQ ID NO: 2195092
cucuauacaaaccuaagag

SEQ ID NO: 2195094 - RNA, 19 nt, Artificial Sequence
  Description of Artificial Sequence: Synthetic oligonucleotide
  Sense strand starting at position 3486 of SEQ ID NO: 1883458
gaggcuuuauuauguaggu

SEQ ID NO: 2195095 - RNA, 19 nt, Artificial Sequence
  Description of Artificial Sequence: Synthetic oligonucleotide
  Antisense strand to SEQ ID NO: 2195094
accuacauaauaaagccuc

SEQ ID NO: 2195096 - RNA, 19 nt, Artificial Sequence
  Description of Artificial Sequence: Synthetic oligonucleotide
  Sense strand starting at position 3487 of SEQ ID NO: 1883458
aggcuuuauuauguaggua

SEQ ID NO: 2195097 - RNA, 19 nt, Artificial Sequence
  Description of Artificial Sequence: Synthetic oligonucleotide
  Antisense strand to SEQ ID NO: 2195096
uaccuacauaauaaagccu

SEQ ID NO: 2195098 - RNA, 19 nt, Artificial Sequence
  Description of Artificial Sequence: Synthetic oligonucleotide
  Sense strand starting at position 3490 of SEQ ID NO: 1883458
cuuuauuauguagguauga

SEQ ID NO: 2195099 - RNA, 19 nt, Artificial Sequence
  Description of Artificial Sequence: Synthetic oligonucleotide
  Antisense strand to SEQ ID NO: 2195098
ucauaccuacauaauaaag

SEQ ID NO: 2195100 - RNA, 19 nt, Artificial Sequence
  Description of Artificial Sequence: Synthetic oligonucleotide
  Sense strand starting at position 3575 of SEQ ID NO: 1883458
gggcauuggagcugagaau

SEQ ID NO: 2195101 - RNA, 19 nt, Artificial Sequence
  Description of Artificial Sequence: Synthetic oligonucleotide
  Antisense strand to SEQ ID NO: 2195100
auucucagcuccaaugccc

SEQ ID NO: 2195102 - RNA, 19 nt, Artificial Sequence
  Description of Artificial Sequence: Synthetic oligonucleotide
  Sense strand starting at position 3576 of SEQ ID NO: 1883458
ggcauuggagcugagaauc

SEQ ID NO: 2195103 - RNA, 19 nt, Artificial Sequence
  Description of Artificial Sequence: Synthetic oligonucleotide
  Antisense strand to SEQ ID NO: 2195102
gauucucagcuccaaugcc

SEQ ID NO: 2195104 - RNA, 19 nt, Artificial Sequence
  Description of Artificial Sequence: Synthetic oligonucleotide
  Sense strand starting at position 3639 of SEQ ID NO: 1883458
uccuaaagcugucagucaa

SEQ ID NO: 2195105 - RNA, 19 nt, Artificial Sequence
  Description of Artificial Sequence: Synthetic oligonucleotide
  Antisense strand to SEQ ID NO: 2195104
uugacugacagcuuuagga

SEQ ID NO: 2195106 - RNA, 19 nt, Artificial Sequence
  Description of Artificial Sequence: Synthetic oligonucleotide
  Sense strand starting at position 3646 of SEQ ID NO: 1883458
gcugucagucaacauaagu

SEQ ID NO: 2195107 - RNA, 19 nt, Artificial Sequence
  Description of Artificial Sequence: Synthetic oligonucleotide
  Antisense strand to SEQ ID NO: 2195106
acuuauguugacugacagc

SEQ ID NO: 2195108 - RNA, 19 nt, Artificial Sequence
  Description of Artificial Sequence: Synthetic oligonucleotide
  Sense strand starting at position 3674 of SEQ ID NO: 1883458
ggcagcacuuuggagauua

SEQ ID NO: 2195109 - RNA, 19 nt, Artificial Sequence
  Description of Artificial Sequence: Synthetic oligonucleotide
  Antisense strand to SEQ ID NO: 2195108
uaaucuccaaagugcugcc

SEQ ID NO: 2195110 - RNA, 19 nt, Artificial Sequence
  Description of Artificial Sequence: Synthetic oligonucleotide
  Sense strand starting at position 3704 of SEQ ID NO: 1883458
ggaguuguaugccagguua

SEQ ID NO: 2195111 - RNA, 19 nt, Artificial Sequence
  Description of Artificial Sequence: Synthetic oligonucleotide
  Antisense strand to SEQ ID NO: 2195110
uaaccuggcauacaacucc

SEQ ID NO: 2195112 - RNA, 19 nt, Artificial Sequence
  Description of Artificial Sequence: Synthetic oligonucleotide
  Sense strand starting at position 3706 of SEQ ID NO: 1883458
aguuguaugccagguuaug

SEQ ID NO: 2195113 - RNA, 19 nt, Artificial Sequence
  Description of Artificial Sequence: Synthetic oligonucleotide
  Antisense strand to SEQ ID NO: 2195112
cauaaccuggcauacaacu

SEQ ID NO: 2195114 - RNA, 19 nt, Artificial Sequence
  Description of Artificial Sequence: Synthetic oligonucleotide
  Sense strand starting at position 3809 of SEQ ID NO: 1883458
gagagacguucucuucuaa

SEQ ID NO: 2195115 - RNA, 19 nt, Artificial Sequence
  Description of Artificial Sequence: Synthetic oligonucleotide
  Antisense strand to SEQ ID NO: 2195114
uuagaagagaacgucucuc

SEQ ID NO: 2195116 - RNA, 19 nt, Artificial Sequence
  Description of Artificial Sequence: Synthetic oligonucleotide
  Sense strand starting at position 3813 of SEQ ID NO: 1883458
gacguucucuucuaagucu

SEQ ID NO: 2195117 - RNA, 19 nt, Artificial Sequence
  Description of Artificial Sequence: Synthetic oligonucleotide
  Antisense strand to SEQ ID NO: 2195116
agacuuagaagagaacguc

SEQ ID NO: 2195118 - RNA, 19 nt, Artificial Sequence
  Description of Artificial Sequence: Synthetic oligonucleotide
  Sense strand starting at position 3831 of SEQ ID NO: 1883458
ucucauuccugcuguuacu

SEQ ID NO: 2195119 - RNA, 19 nt, Artificial Sequence
  Description of Artificial Sequence: Synthetic oligonucleotide
  Antisense strand to SEQ ID NO: 2195118
aguaacagcaggaaugaga

SEQ ID NO: 2195120 - RNA, 19 nt, Artificial Sequence
  Description of Artificial Sequence: Synthetic oligonucleotide
  Sense strand starting at position 3866 of SEQ ID NO: 1883458
ggcugauucucggucuuaa

SEQ ID NO: 2195121 - RNA, 19 nt, Artificial Sequence
  Description of Artificial Sequence: Synthetic oligonucleotide
  Antisense strand to SEQ ID NO: 2195120
uuaagaccgagaaucagcc

SEQ ID NO: 2195122 - RNA, 19 nt, Artificial Sequence
  Description of Artificial Sequence: Synthetic oligonucleotide
  Sense strand starting at position 3870 of SEQ ID NO: 1883458
gauucucggucuuaaggaa

SEQ ID NO: 2195123 - RNA, 19 nt, Artificial Sequence
  Description of Artificial Sequence: Synthetic oligonucleotide
  Antisense strand to SEQ ID NO: 2195122
uuccuuaagaccgagaauc

SEQ ID NO: 2195124 - RNA, 19 nt, Artificial Sequence
  Description of Artificial Sequence: Synthetic oligonucleotide
  Sense strand starting at position 3903 of SEQ ID NO: 1883458
aaggguuucuuccugugua

SEQ ID NO: 2195125 - RNA, 19 nt, Artificial Sequence
  Description of Artificial Sequence: Synthetic oligonucleotide
  Antisense strand to SEQ ID NO: 2195124
uacacaggaagaaacccuu

SEQ ID NO: 2195126 - RNA, 19 nt, Artificial Sequence
  Description of Artificial Sequence: Synthetic oligonucleotide
  Sense strand starting at position 3904 of SEQ ID NO: 1883458
aggguuucuuccuguguag

SEQ ID NO: 2195127 - RNA, 19 nt, Artificial Sequence
  Description of Artificial Sequence: Synthetic oligonucleotide
  Antisense strand to SEQ ID NO: 2195126
cuacacaggaagaaacccu

SEQ ID NO: 2195128 - RNA, 19 nt, Artificial Sequence
  Description of Artificial Sequence: Synthetic oligonucleotide
  Sense strand starting at position 3906 of SEQ ID NO: 1883458
gguuucuuccuguguagug

SEQ ID NO: 2195129 - RNA, 19 nt, Artificial Sequence
  Description of Artificial Sequence: Synthetic oligonucleotide
  Antisense strand to SEQ ID NO: 2195128
cacuacacaggaagaaacc

SEQ ID NO: 2195130 - RNA, 19 nt, Artificial Sequence
  Description of Artificial Sequence: Synthetic oligonucleotide
  Sense strand starting at position 2 of SEQ ID NO: 1883459
gauucugacuccuggauuc

SEQ ID NO: 2195131 - RNA, 19 nt, Artificial Sequence
  Description of Artificial Sequence: Synthetic oligonucleotide
  Antisense strand to SEQ ID NO: 2195130
gaauccaggagucagaauc

SEQ ID NO: 2195132 - RNA, 19 nt, Artificial Sequence
  Description of Artificial Sequence: Synthetic oligonucleotide
  Sense strand starting at position 154 of SEQ ID NO: 1883459
agcuguuccugucuucgaa

SEQ ID NO: 2195133 - RNA, 19 nt, Artificial Sequence
  Description of Artificial Sequence: Synthetic oligonucleotide
  Antisense strand to SEQ ID NO: 2195132
uucgaagacaggaacagcu

SEQ ID NO: 2195134 - RNA, 19 nt, Artificial Sequence
  Description of Artificial Sequence: Synthetic oligonucleotide
  Sense strand starting at position 156 of SEQ ID NO: 1883459
cuguuccugucuucgaaca

SEQ ID NO: 2195135 - RNA, 19 nt, Artificial Sequence
  Description of Artificial Sequence: Synthetic oligonucleotide
  Antisense strand to SEQ ID NO: 2195134
uguucgaagacaggaacag

SEQ ID NO: 2195136 - RNA, 19 nt, Artificial Sequence
  Description of Artificial Sequence: Synthetic oligonucleotide
  Sense strand starting at position 158 of SEQ ID NO: 1883459
guuccugucuucgaacaca

SEQ ID NO: 2195137 - RNA, 19 nt, Artificial Sequence
  Description of Artificial Sequence: Synthetic oligonucleotide
  Antisense strand to SEQ ID NO: 2195136
uguguucgaagacaggaac

SEQ ID NO: 2195138 - RNA, 19 nt, Artificial Sequence
  Description of Artificial Sequence: Synthetic oligonucleotide
  Sense strand starting at position 283 of SEQ ID NO: 1883459
aaaugauccguguggaagc

SEQ ID NO: 2195139 - RNA, 19 nt, Artificial Sequence
  Description of Artificial Sequence: Synthetic oligonucleotide
  Antisense strand to SEQ ID NO: 2195138
gcuuccacacggaucauuu

SEQ ID NO: 2195140 - RNA, 19 nt, Artificial Sequence
  Description of Artificial Sequence: Synthetic oligonucleotide
  Sense strand starting at position 303 of SEQ ID NO: 1883459
gaggcagcuuuauugaaag

SEQ ID NO: 2195141 - RNA, 19 nt, Artificial Sequence
  Description of Artificial Sequence: Synthetic oligonucleotide
  Antisense strand to SEQ ID NO: 2195140
cuuucaauaaagcugccuc

SEQ ID NO: 2195142 - RNA, 19 nt, Artificial Sequence
  Description of Artificial Sequence: Synthetic oligonucleotide
  Sense strand starting at position 305 of SEQ ID NO: 1883459
ggcagcuuuauugaaagga

SEQ ID NO: 2195143 - RNA, 19 nt, Artificial Sequence
  Description of Artificial Sequence: Synthetic oligonucleotide
  Antisense strand to SEQ ID NO: 2195142
uccuuucaauaaagcugcc

SEQ ID NO: 2195144 - RNA, 19 nt, Artificial Sequence
  Description of Artificial Sequence: Synthetic oligonucleotide
  Sense strand starting at position 533 of SEQ ID NO: 1883459
ccagguagucgaaguaguu

SEQ ID NO: 2195145 - RNA, 19 nt, Artificial Sequence
  Description of Artificial Sequence: Synthetic oligonucleotide
  Antisense strand to SEQ ID NO: 2195144
aacuacuucgacuaccugg

SEQ ID NO: 2195146 - RNA, 19 nt, Artificial Sequence
  Description of Artificial Sequence: Synthetic oligonucleotide
  Sense strand starting at position 539 of SEQ ID NO: 1883459
agucgaaguaguugauguu

SEQ ID NO: 2195147 - RNA, 19 nt, Artificial Sequence
  Description of Artificial Sequence: Synthetic oligonucleotide
  Antisense strand to SEQ ID NO: 2195146
aacaucaacuacuucgacu

SEQ ID NO: 2195148 - RNA, 19 nt, Artificial Sequence
  Description of Artificial Sequence: Synthetic oligonucleotide
  Sense strand starting at position 545 of SEQ ID NO: 1883459
aguaguugauguugaguuu

SEQ ID NO: 2195149 - RNA, 19 nt, Artificial Sequence
  Description of Artificial Sequence: Synthetic oligonucleotide
  Antisense strand to SEQ ID NO: 2195148
aaacucaacaucaacuacu

SEQ ID NO: 2195150 - RNA, 19 nt, Artificial Sequence
  Description of Artificial Sequence: Synthetic oligonucleotide
  Sense strand starting at position 555 of SEQ ID NO: 1883459
guugaguuuccgggcgaug

SEQ ID NO: 2195151 - RNA, 19 nt, Artificial Sequence
  Description of Artificial Sequence: Synthetic oligonucleotide
  Antisense strand to SEQ ID NO: 2195150
caucgcccggaaacucaac

SEQ ID NO: 2195152 - RNA, 19 nt, Artificial Sequence
  Description of Artificial Sequence: Synthetic oligonucleotide
  Sense strand starting at position 556 of SEQ ID NO: 1883459
uugaguuuccgggcgaugu

SEQ ID NO: 2195153 - RNA, 19 nt, Artificial Sequence
  Description of Artificial Sequence: Synthetic oligonucleotide
  Antisense strand to SEQ ID NO: 2195152
acaucgcccggaaacucaa

SEQ ID NO: 2195154 - RNA, 19 nt, Artificial Sequence
  Description of Artificial Sequence: Synthetic oligonucleotide
  Sense strand starting at position 557 of SEQ ID NO: 1883459
ugaguuuccgggcgaugua

SEQ ID NO: 2195155 - RNA, 19 nt, Artificial Sequence
  Description of Artificial Sequence: Synthetic oligonucleotide
  Antisense strand to SEQ ID NO: 2195154
uacaucgcccggaaacuca

SEQ ID NO: 2195156 - RNA, 19 nt, Artificial Sequence
  Description of Artificial Sequence: Synthetic oligonucleotide
  Sense strand starting at position 558 of SEQ ID NO: 1883459
gaguuuccgggcgauguaa

SEQ ID NO: 2195157 - RNA, 19 nt, Artificial Sequence
  Description of Artificial Sequence: Synthetic oligonucleotide
  Antisense strand to SEQ ID NO: 2195156
uuacaucgcccggaaacuc

SEQ ID NO: 2195158 - RNA, 19 nt, Artificial Sequence
  Description of Artificial Sequence: Synthetic oligonucleotide
  Sense strand starting at position 570 of SEQ ID NO: 1883459
gauguaacggcccaaguau

SEQ ID NO: 2195159 - RNA, 19 nt, Artificial Sequence
  Description of Artificial Sequence: Synthetic oligonucleotide
  Antisense strand to SEQ ID NO: 2195158
auacuugggccguuacauc

SEQ ID NO: 2195160 - RNA, 19 nt, Artificial Sequence
  Description of Artificial Sequence: Synthetic oligonucleotide
  Sense strand starting at position 730 of SEQ ID NO: 1883459
caccgaagaccguguugua

SEQ ID NO: 2195161 - RNA, 19 nt, Artificial Sequence
  Description of Artificial Sequence: Synthetic oligonucleotide
  Antisense strand to SEQ ID NO: 2195160
uacaacacggucuucggug

SEQ ID NO: 2195162 - RNA, 19 nt, Artificial Sequence
  Description of Artificial Sequence: Synthetic oligonucleotide
  Sense strand starting at position 733 of SEQ ID NO: 1883459
cgaagaccguguuguauuu

SEQ ID NO: 2195163 - RNA, 19 nt, Artificial Sequence
  Description of Artificial Sequence: Synthetic oligonucleotide
  Antisense strand to SEQ ID NO: 2195162
aaauacaacacggucuucg

SEQ ID NO: 2195164 - RNA, 19 nt, Artificial Sequence
  Description of Artificial Sequence: Synthetic oligonucleotide
  Sense strand starting at position 791 of SEQ ID NO: 1883459
aacagugaucggugucauc

SEQ ID NO: 2195165 - RNA, 19 nt, Artificial Sequence
  Description of Artificial Sequence: Synthetic oligonucleotide
  Antisense strand to SEQ ID NO: 2195164
gaugacaccgaucacuguu

SEQ ID NO: 2195166 - RNA, 19 nt, Artificial Sequence
  Description of Artificial Sequence: Synthetic oligonucleotide
  Sense strand starting at position 793 of SEQ ID NO: 1883459
cagugaucggugucaucgu

SEQ ID NO: 2195167 - RNA, 19 nt, Artificial Sequence
  Description of Artificial Sequence: Synthetic oligonucleotide
  Antisense strand to SEQ ID NO: 2195166
acgaugacaccgaucacug

SEQ ID NO: 2195168 - RNA, 19 nt, Artificial Sequence
  Description of Artificial Sequence: Synthetic oligonucleotide
  Sense strand starting at position 800 of SEQ ID NO: 1883459
cggugucaucguguccuga

SEQ ID NO: 2195169 - RNA, 19 nt, Artificial Sequence
  Description of Artificial Sequence: Synthetic oligonucleotide
  Antisense strand to SEQ ID NO: 2195168
ucaggacacgaugacaccg

SEQ ID NO: 2195170 - RNA, 19 nt, Artificial Sequence
  Description of Artificial Sequence: Synthetic oligonucleotide
  Sense strand starting at position 1381 of SEQ ID NO: 1883459
guaguauucgagcacgaag

SEQ ID NO: 2195171 - RNA, 19 nt, Artificial Sequence
  Description of Artificial Sequence: Synthetic oligonucleotide
  Antisense strand to SEQ ID NO: 2195170
cuucgugcucgaauacuac

SEQ ID NO: 2195172 - RNA, 19 nt, Artificial Sequence
  Description of Artificial Sequence: Synthetic oligonucleotide
  Sense strand starting at position 1710 of SEQ ID NO: 1883459
gguagaagcuauuguucuu

SEQ ID NO: 2195173 - RNA, 19 nt, Artificial Sequence
  Description of Artificial Sequence: Synthetic oligonucleotide
  Antisense strand to SEQ ID NO: 2195172
aagaacaauagcuucuacc

SEQ ID NO: 2195174 - RNA, 19 nt, Artificial Sequence
  Description of Artificial Sequence: Synthetic oligonucleotide
  Sense strand starting at position 1758 of SEQ ID NO: 1883459
aggugaguccuaggaacca

SEQ ID NO: 2195175 - RNA, 19 nt, Artificial Sequence
  Description of Artificial Sequence: Synthetic oligonucleotide
  Antisense strand to SEQ ID NO: 2195174
ugguuccuaggacucaccu

SEQ ID NO: 2195176 - RNA, 19 nt, Artificial Sequence
  Description of Artificial Sequence: Synthetic oligonucleotide
  Sense strand starting at position 1904 of SEQ ID NO: 1883459
cuccuaccucggugagcaa

SEQ ID NO: 2195177 - RNA, 19 nt, Artificial Sequence
  Description of Artificial Sequence: Synthetic oligonucleotide
  Antisense strand to SEQ ID NO: 2195176
uugcucaccgagguaggag

SEQ ID NO: 2195178 - RNA, 19 nt, Artificial Sequence
  Description of Artificial Sequence: Synthetic oligonucleotide
  Sense strand starting at position 1917 of SEQ ID NO: 1883459
gagcaaauucuccagggcu

SEQ ID NO: 2195179 - RNA, 19 nt, Artificial Sequence
  Description of Artificial Sequence: Synthetic oligonucleotide
  Antisense strand to SEQ ID NO: 2195178
agcccuggagaauuugcuc

SEQ ID NO: 2195180 - RNA, 19 nt, Artificial Sequence
  Description of Artificial Sequence: Synthetic oligonucleotide
  Sense strand starting at position 2011 of SEQ ID NO: 1883459
gcggauggguucuagaagu

SEQ ID NO: 2195181 - RNA, 19 nt, Artificial Sequence
  Description of Artificial Sequence: Synthetic oligonucleotide
  Antisense strand to SEQ ID NO: 2195180
acuucuagaacccauccgc

SEQ ID NO: 2195182 - RNA, 19 nt, Artificial Sequence
  Description of Artificial Sequence: Synthetic oligonucleotide
  Sense strand starting at position 2101 of SEQ ID NO: 1883459
ggcauuaacuucuuggcca

SEQ ID NO: 2195183 - RNA, 19 nt, Artificial Sequence
  Description of Artificial Sequence: Synthetic oligonucleotide
  Antisense strand to SEQ ID NO: 2195182
uggccaagaaguuaaugcc

SEQ ID NO: 2195184 - RNA, 19 nt, Artificial Sequence
  Description of Artificial Sequence: Synthetic oligonucleotide
  Sense strand starting at position 2194 of SEQ ID NO: 1883459
gccugagcuggagagaaau

SEQ ID NO: 2195185 - RNA, 19 nt, Artificial Sequence
  Description of Artificial Sequence: Synthetic oligonucleotide
  Antisense strand to SEQ ID NO: 2195184
auuucucuccagcucaggc

SEQ ID NO: 2195186 - RNA, 19 nt, Artificial Sequence
  Description of Artificial Sequence: Synthetic oligonucleotide
  Sense strand starting at position 2440 of SEQ ID NO: 1883459
guggcuccaucagguauaa

SEQ ID NO: 2195187 - RNA, 19 nt, Artificial Sequence
  Description of Artificial Sequence: Synthetic oligonucleotide
  Antisense strand to SEQ ID NO: 2195186
uuauaccugauggagccac

SEQ ID NO: 2195188 - RNA, 19 nt, Artificial Sequence
  Description of Artificial Sequence: Synthetic oligonucleotide
  Sense strand starting at position 2452 of SEQ ID NO: 1883459
gguauaaccuguugcccaa

SEQ ID NO: 2195189 - RNA, 19 nt, Artificial Sequence
  Description of Artificial Sequence: Synthetic oligonucleotide
  Antisense strand to SEQ ID NO: 2195188
uugggcaacagguuauacc

SEQ ID NO: 2195190 - RNA, 19 nt, Artificial Sequence
  Description of Artificial Sequence: Synthetic oligonucleotide
  Sense strand starting at position 2528 of SEQ ID NO: 1883459
gcucaaauaucugaaauug

SEQ ID NO: 2195191 - RNA, 19 nt, Artificial Sequence
  Description of Artificial Sequence: Synthetic oligonucleotide
  Antisense strand to SEQ ID NO: 2195190
caauuucagauauuugagc

SEQ ID NO: 2195192 - RNA, 19 nt, Artificial Sequence
  Description of Artificial Sequence: Synthetic oligonucleotide
  Sense strand starting at position 2774 of SEQ ID NO: 1883459
uugagcuguugccucagaa

SEQ ID NO: 2195193 - RNA, 19 nt, Artificial Sequence
  Description of Artificial Sequence: Synthetic oligonucleotide
  Antisense strand to SEQ ID NO: 2195192
uucugaggcaacagcucaa

SEQ ID NO: 2195194 - RNA, 19 nt, Artificial Sequence
  Description of Artificial Sequence: Synthetic oligonucleotide
  Sense strand starting at position 2908 of SEQ ID NO: 1883459
gggcuuggacaguaugcau

SEQ ID NO: 2195195 - RNA, 19 nt, Artificial Sequence
  Description of Artificial Sequence: Synthetic oligonucleotide
  Antisense strand to SEQ ID NO: 2195194
augcauacuguccaagccc

SEQ ID NO: 2195196 - RNA, 19 nt, Artificial Sequence
  Description of Artificial Sequence: Synthetic oligonucleotide
  Sense strand starting at position 3173 of SEQ ID NO: 1883459
ccaguucucgcaguguaug

SEQ ID NO: 2195197 - RNA, 19 nt, Artificial Sequence
  Description of Artificial Sequence: Synthetic oligonucleotide
  Antisense strand to SEQ ID NO: 2195196
cauacacugcgagaacugg

SEQ ID NO: 2195198 - RNA, 19 nt, Artificial Sequence
  Description of Artificial Sequence: Synthetic oligonucleotide
  Sense strand starting at position 3192 of SEQ ID NO: 1883459
gcaccacuucugggucaaa

SEQ ID NO: 2195199 - RNA, 19 nt, Artificial Sequence
  Description of Artificial Sequence: Synthetic oligonucleotide
  Antisense strand to SEQ ID NO: 2195198
uuugacccagaaguggugc

SEQ ID NO: 2195200 - RNA, 19 nt, Artificial Sequence
  Description of Artificial Sequence: Synthetic oligonucleotide
  Sense strand starting at position 3239 of SEQ ID NO: 1883459
gccggucugacgugccaua

SEQ ID NO: 2195201 - RNA, 19 nt, Artificial Sequence
  Description of Artificial Sequence: Synthetic oligonucleotide
  Antisense strand to SEQ ID NO: 2195200
uauggcacgucagaccggc

SEQ ID NO: 2195202 - RNA, 19 nt, Artificial Sequence
  Description of Artificial Sequence: Synthetic oligonucleotide
  Sense strand starting at position 3440 of SEQ ID NO: 1883459
uugggagagccguggagua

SEQ ID NO: 2195203 - RNA, 19 nt, Artificial Sequence
  Description of Artificial Sequence: Synthetic oligonucleotide
  Antisense strand to SEQ ID NO: 2195202
uacuccacggcucucccaa

SEQ ID NO: 2195204 - RNA, 19 nt, Artificial Sequence
  Description of Artificial Sequence: Synthetic oligonucleotide
  Sense strand starting at position 3468 of SEQ ID NO: 1883459
ggaccucguugcucacaaa

SEQ ID NO: 2195205 - RNA, 19 nt, Artificial Sequence
  Description of Artificial Sequence: Synthetic oligonucleotide
  Antisense strand to SEQ ID NO: 2195204
uuugugagcaacgaggucc

SEQ ID NO: 2195206 - RNA, 19 nt, Artificial Sequence
  Description of Artificial Sequence: Synthetic oligonucleotide
  Sense strand starting at position 3719 of SEQ ID NO: 1883459
gaaugcuauuacgguugau

SEQ ID NO: 2195207 - RNA, 19 nt, Artificial Sequence
  Description of Artificial Sequence: Synthetic oligonucleotide
  Antisense strand to SEQ ID NO: 2195206
aucaaccguaauagcauuc

SEQ ID NO: 2195208 - RNA, 19 nt, Artificial Sequence
  Description of Artificial Sequence: Synthetic oligonucleotide
  Sense strand starting at position 3774 of SEQ ID NO: 1883459
gcagcugcccugcagagau

SEQ ID NO: 2195209 - RNA, 19 nt, Artificial Sequence
  Description of Artificial Sequence: Synthetic oligonucleotide
  Antisense strand to SEQ ID NO: 2195208
aucucugcagggcagcugc

SEQ ID NO: 2195210 - RNA, 19 nt, Artificial Sequence
  Description of Artificial Sequence: Synthetic oligonucleotide
  Sense strand starting at position 145 of SEQ ID NO: 1883460
auggguaauucagcuagga

SEQ ID NO: 2195211 - RNA, 19 nt, Artificial Sequence
  Description of Artificial Sequence: Synthetic oligonucleotide
  Antisense strand to SEQ ID NO: 2195210
uccuagcugaauuacccau

SEQ ID NO: 2195212 - RNA, 19 nt, Artificial Sequence
  Description of Artificial Sequence: Synthetic oligonucleotide
  Sense strand starting at position 333 of SEQ ID NO: 1883460
auaugacaaugagaagaaa

SEQ ID NO: 2195213 - RNA, 19 nt, Artificial Sequence
  Description of Artificial Sequence: Synthetic oligonucleotide
  Antisense strand to SEQ ID NO: 2195212
uuucuucucauugucauau

SEQ ID NO: 2195214 - RNA, 19 nt, Artificial Sequence
  Description of Artificial Sequence: Synthetic oligonucleotide
  Sense strand starting at position 588 of SEQ ID NO: 1883460
guugacaugguaggucuaa

SEQ ID NO: 2195215 - RNA, 19 nt, Artificial Sequence
  Description of Artificial Sequence: Synthetic oligonucleotide
  Antisense strand to SEQ ID NO: 2195214
uuagaccuaccaugucaac

SEQ ID NO: 2195216 - RNA, 19 nt, Artificial Sequence
  Description of Artificial Sequence: Synthetic oligonucleotide
  Sense strand starting at position 810 of SEQ ID NO: 1883460
gcaugaaauuucgcugauc

SEQ ID NO: 2195217 - RNA, 19 nt, Artificial Sequence
  Description of Artificial Sequence: Synthetic oligonucleotide
  Antisense strand to SEQ ID NO: 2195216
gaucagcgaaauuucaugc

SEQ ID NO: 2195218 - RNA, 19 nt, Artificial Sequence
  Description of Artificial Sequence: Synthetic oligonucleotide
  Sense strand starting at position 1170 of SEQ ID NO: 1883460
gcaguauagugauuaacag

SEQ ID NO: 2195219 - RNA, 19 nt, Artificial Sequence
  Description of Artificial Sequence: Synthetic oligonucleotide
  Antisense strand to SEQ ID NO: 2195218
cuguuaaucacuauacugc

SEQ ID NO: 2195220 - RNA, 19 nt, Artificial Sequence
  Description of Artificial Sequence: Synthetic oligonucleotide
  Sense strand starting at position 1179 of SEQ ID NO: 1883460
ugauuaacagcaggauucu

SEQ ID NO: 2195221 - RNA, 19 nt, Artificial Sequence
  Description of Artificial Sequence: Synthetic oligonucleotide
  Antisense strand to SEQ ID NO: 2195220
agaauccugcuguuaauca

SEQ ID NO: 2195222 - RNA, 19 nt, Artificial Sequence
  Description of Artificial Sequence: Synthetic oligonucleotide
  Sense strand starting at position 1189 of SEQ ID NO: 1883460
caggauucuggaggcagua

SEQ ID NO: 2195223 - RNA, 19 nt, Artificial Sequence
  Description of Artificial Sequence: Synthetic oligonucleotide
  Antisense strand to SEQ ID NO: 2195222
uacugccuccagaauccug

SEQ ID NO: 2195224 - RNA, 19 nt, Artificial Sequence
  Description of Artificial Sequence: Synthetic oligonucleotide
  Sense strand starting at position 1268 of SEQ ID NO: 1883460
guugcaugaccuugaacaa

SEQ ID NO: 2195225 - RNA, 19 nt, Artificial Sequence
  Description of Artificial Sequence: Synthetic oligonucleotide
  Antisense strand to SEQ ID NO: 2195224
uuguucaaggucaugcaac

SEQ ID NO: 2195226 - RNA, 19 nt, Artificial Sequence
  Description of Artificial Sequence: Synthetic oligonucleotide
  Sense strand starting at position 1356 of SEQ ID NO: 1883460
ggguuaguaugaguacaaa

SEQ ID NO: 2195227 - RNA, 19 nt, Artificial Sequence
  Description of Artificial Sequence: Synthetic oligonucleotide
  Antisense strand to SEQ ID NO: 2195226
uuuguacucauacuaaccc

SEQ ID NO: 2195228 - RNA, 19 nt, Artificial Sequence
  Description of Artificial Sequence: Synthetic oligonucleotide
  Sense strand starting at position 1376 of SEQ ID NO: 1883460
uuaguuauuauacguagag

SEQ ID NO: 2195229 - RNA, 19 nt, Artificial Sequence
  Description of Artificial Sequence: Synthetic oligonucleotide
  Antisense strand to SEQ ID NO: 2195228
cucuacguauaauaacuaa

SEQ ID NO: 2195230 - RNA, 19 nt, Artificial Sequence
  Description of Artificial Sequence: Synthetic oligonucleotide
  Sense strand starting at position 1378 of SEQ ID NO: 1883460
aguuauuauacguagaggu

SEQ ID NO: 2195231 - RNA, 19 nt, Artificial Sequence
  Description of Artificial Sequence: Synthetic oligonucleotide
  Antisense strand to SEQ ID NO: 2195230
accucuacguauaauaacu

SEQ ID NO: 2195232 - RNA, 19 nt, Artificial Sequence
  Description of Artificial Sequence: Synthetic oligonucleotide
  Sense strand starting at position 1382 of SEQ ID NO: 1883460
auuauacguagaggucuua

SEQ ID NO: 2195233 - RNA, 19 nt, Artificial Sequence
  Description of Artificial Sequence: Synthetic oligonucleotide
  Antisense strand to SEQ ID NO: 2195232
uaagaccucuacguauaau

SEQ ID NO: 2195234 - RNA, 19 nt, Artificial Sequence
  Description of Artificial Sequence: Synthetic oligonucleotide
  Sense strand starting at position 1392 of SEQ ID NO: 1883460
gaggucuuacacuggcaca

SEQ ID NO: 2195235 - RNA, 19 nt, Artificial Sequence
  Description of Artificial Sequence: Synthetic oligonucleotide
  Antisense strand to SEQ ID NO: 2195234
ugugccaguguaagaccuc

SEQ ID NO: 2195236 - RNA, 19 nt, Artificial Sequence
  Description of Artificial Sequence: Synthetic oligonucleotide
  Sense strand starting at position 1440 of SEQ ID NO: 1883460
gugcaaguauaacuaaacu

SEQ ID NO: 2195237 - RNA, 19 nt, Artificial Sequence
  Description of Artificial Sequence: Synthetic oligonucleotide
  Antisense strand to SEQ ID NO: 2195236
aguuuaguuauacuugcac

SEQ ID NO: 2195238 - RNA, 19 nt, Artificial Sequence
  Description of Artificial Sequence: Synthetic oligonucleotide
  Sense strand starting at position 1487 of SEQ ID NO: 1883460
uuuacauuucuacgucacu

SEQ ID NO: 2195239 - RNA, 19 nt, Artificial Sequence
  Description of Artificial Sequence: Synthetic oligonucleotide
  Antisense strand to SEQ ID NO: 2195238
agugacguagaaauguaaa

SEQ ID NO: 2195240 - RNA, 19 nt, Artificial Sequence
  Description of Artificial Sequence: Synthetic oligonucleotide
  Sense strand starting at position 2084 of SEQ ID NO: 1883460
uccaguaaagaauggguua

SEQ ID NO: 2195241 - RNA, 19 nt, Artificial Sequence
  Description of Artificial Sequence: Synthetic oligonucleotide
  Antisense strand to SEQ ID NO: 2195240
uaacccauucuuuacugga

SEQ ID NO: 2195242 - RNA, 19 nt, Artificial Sequence
  Description of Artificial Sequence: Synthetic oligonucleotide
  Sense strand starting at position 2096 of SEQ ID NO: 1883460
uggguuagagaccgguuaa

SEQ ID NO: 2195243 - RNA, 19 nt, Artificial Sequence
  Description of Artificial Sequence: Synthetic oligonucleotide
  Antisense strand to SEQ ID NO: 2195242
uuaaccggucucuaaccca

SEQ ID NO: 2195244 - RNA, 19 nt, Artificial Sequence
  Description of Artificial Sequence: Synthetic oligonucleotide
  Sense strand starting at position 2097 of SEQ ID NO: 1883460
ggguuagagaccgguuaac

SEQ ID NO: 2195245 - RNA, 19 nt, Artificial Sequence
  Description of Artificial Sequence: Synthetic oligonucleotide
  Antisense strand to SEQ ID NO: 2195244
guuaaccggucucuaaccc

SEQ ID NO: 2195246 - RNA, 19 nt, Artificial Sequence
  Description of Artificial Sequence: Synthetic oligonucleotide
  Sense strand starting at position 2143 of SEQ ID NO: 1883460
uguauagaguuccucuacu

SEQ ID NO: 2195247 - RNA, 19 nt, Artificial Sequence
  Description of Artificial Sequence: Synthetic oligonucleotide
  Antisense strand to SEQ ID NO: 2195246
aguagaggaacucuauaca

SEQ ID NO: 2195248 - RNA, 19 nt, Artificial Sequence
  Description of Artificial Sequence: Synthetic oligonucleotide
  Sense strand starting at position 2211 of SEQ ID NO: 1883460
uaucauaauuugucgaguu

SEQ ID NO: 2195249 - RNA, 19 nt, Artificial Sequence
  Description of Artificial Sequence: Synthetic oligonucleotide
  Antisense strand to SEQ ID NO: 2195248
aacucgacaaauuaugaua

SEQ ID NO: 2195250 - RNA, 19 nt, Artificial Sequence
  Description of Artificial Sequence: Synthetic oligonucleotide
  Sense strand starting at position 2276 of SEQ ID NO: 1883460
ggaaacaugacuuguaguu

SEQ ID NO: 2195251 - RNA, 19 nt, Artificial Sequence
  Description of Artificial Sequence: Synthetic oligonucleotide
  Antisense strand to SEQ ID NO: 2195250
aacuacaagucauguuucc

SEQ ID NO: 2195252 - RNA, 19 nt, Artificial Sequence
  Description of Artificial Sequence: Synthetic oligonucleotide
  Sense strand starting at position 2283 of SEQ ID NO: 1883460
ugacuuguaguuuaacaau

SEQ ID NO: 2195253 - RNA, 19 nt, Artificial Sequence
  Description of Artificial Sequence: Synthetic oligonucleotide
  Antisense strand to SEQ ID NO: 2195252
auuguuaaacuacaaguca

SEQ ID NO: 2195254 - RNA, 19 nt, Artificial Sequence
  Description of Artificial Sequence: Synthetic oligonucleotide
  Sense strand starting at position 2341 of SEQ ID NO: 1883460
ggauuacuauagcucaaag

SEQ ID NO: 2195255 - RNA, 19 nt, Artificial Sequence
  Description of Artificial Sequence: Synthetic oligonucleotide
  Antisense strand to SEQ ID NO: 2195254
cuuugagcuauaguaaucc

SEQ ID NO: 2195256 - RNA, 19 nt, Artificial Sequence
  Description of Artificial Sequence: Synthetic oligonucleotide
  Sense strand starting at position 2401 of SEQ ID NO: 1883460
ggaaaucauguaugcgaga

SEQ ID NO: 2195257 - RNA, 19 nt, Artificial Sequence
  Description of Artificial Sequence: Synthetic oligonucleotide
  Antisense strand to SEQ ID NO: 2195256
ucucgcauacaugauuucc

SEQ ID NO: 2195258 - RNA, 19 nt, Artificial Sequence
  Description of Artificial Sequence: Synthetic oligonucleotide
  Sense strand starting at position 2406 of SEQ ID NO: 1883460
ucauguaugcgagacaaag

SEQ ID NO: 2195259 - RNA, 19 nt, Artificial Sequence
  Description of Artificial Sequence: Synthetic oligonucleotide
  Antisense strand to SEQ ID NO: 2195258
cuuugucucgcauacauga

SEQ ID NO: 2195260 - RNA, 19 nt, Artificial Sequence
  Description of Artificial Sequence: Synthetic oligonucleotide
  Sense strand starting at position 2408 of SEQ ID NO: 1883460
auguaugcgagacaaagua

SEQ ID NO: 2195261 - RNA, 19 nt, Artificial Sequence
  Description of Artificial Sequence: Synthetic oligonucleotide
  Antisense strand to SEQ ID NO: 2195260
uacuuugucucgcauacau

SEQ ID NO: 2195262 - RNA, 19 nt, Artificial Sequence
  Description of Artificial Sequence: Synthetic oligonucleotide
  Sense strand starting at position 2455 of SEQ ID NO: 1883460
ucuguugccagcgaaauuu

SEQ ID NO: 2195263 - RNA, 19 nt, Artificial Sequence
  Description of Artificial Sequence: Synthetic oligonucleotide
  Antisense strand to SEQ ID NO: 2195262
aaauuucgcuggcaacaga

SEQ ID NO: 2195264 - RNA, 19 nt, Artificial Sequence
  Description of Artificial Sequence: Synthetic oligonucleotide
  Sense strand starting at position 2499 of SEQ ID NO: 1883460
aacgcaguccuccagaaga

SEQ ID NO: 2195265 - RNA, 19 nt, Artificial Sequence
  Description of Artificial Sequence: Synthetic oligonucleotide
  Antisense strand to SEQ ID NO: 2195264
ucuucuggaggacugcguu

SEQ ID NO: 2195266 - RNA, 19 nt, Artificial Sequence
  Description of Artificial Sequence: Synthetic oligonucleotide
  Sense strand starting at position 2501 of SEQ ID NO: 1883460
cgcaguccuccagaagaau

SEQ ID NO: 2195267 - RNA, 19 nt, Artificial Sequence
  Description of Artificial Sequence: Synthetic oligonucleotide
  Antisense strand to SEQ ID NO: 2195266
auucuucuggaggacugcg

SEQ ID NO: 2195268 - RNA, 19 nt, Artificial Sequence
  Description of Artificial Sequence: Synthetic oligonucleotide
  Sense strand starting at position 2807 of SEQ ID NO: 1883460
gcugcuuuggaccaguaua

SEQ ID NO: 2195269 - RNA, 19 nt, Artificial Sequence
  Description of Artificial Sequence: Synthetic oligonucleotide
  Antisense strand to SEQ ID NO: 2195268
uauacugguccaaagcagc

SEQ ID NO: 2195270 - RNA, 19 nt, Artificial Sequence
  Description of Artificial Sequence: Synthetic oligonucleotide
  Sense strand starting at position 2853 of SEQ ID NO: 1883460
gguugcauuccucaguaag

SEQ ID NO: 2195271 - RNA, 19 nt, Artificial Sequence
  Description of Artificial Sequence: Synthetic oligonucleotide
  Antisense strand to SEQ ID NO: 2195270
cuuacugaggaaugcaacc

SEQ ID NO: 2195272 - RNA, 19 nt, Artificial Sequence
  Description of Artificial Sequence: Synthetic oligonucleotide
  Sense strand starting at position 2855 of SEQ ID NO: 1883460
uugcauuccucaguaagac

SEQ ID NO: 2195273 - RNA, 19 nt, Artificial Sequence
  Description of Artificial Sequence: Synthetic oligonucleotide
  Antisense strand to SEQ ID NO: 2195272
gucuuacugaggaaugcaa

SEQ ID NO: 2195274 - RNA, 19 nt, Artificial Sequence
  Description of Artificial Sequence: Synthetic oligonucleotide
  Sense strand starting at position 2856 of SEQ ID NO: 1883460
ugcauuccucaguaagacu

SEQ ID NO: 2195275 - RNA, 19 nt, Artificial Sequence
  Description of Artificial Sequence: Synthetic oligonucleotide
  Antisense strand to SEQ ID NO: 2195274
agucuuacugaggaaugca

SEQ ID NO: 2195276 - RNA, 19 nt, Artificial Sequence
  Description of Artificial Sequence: Synthetic oligonucleotide
  Sense strand starting at position 2864 of SEQ ID NO: 1883460
ucaguaagacuccgaauaa

SEQ ID NO: 2195277 - RNA, 19 nt, Artificial Sequence
  Description of Artificial Sequence: Synthetic oligonucleotide
  Antisense strand to SEQ ID NO: 2195276
uuauucggagucuuacuga

SEQ ID NO: 2195278 - RNA, 19 nt, Artificial Sequence
  Description of Artificial Sequence: Synthetic oligonucleotide
  Sense strand starting at position 3298 of SEQ ID NO: 1883460
uauggaaacguuuagaguu

SEQ ID NO: 2195279 - RNA, 19 nt, Artificial Sequence
  Description of Artificial Sequence: Synthetic oligonucleotide
  Antisense strand to SEQ ID NO: 2195278
aacucuaaacguuuccaua

SEQ ID NO: 2195280 - RNA, 19 nt, Artificial Sequence
  Description of Artificial Sequence: Synthetic oligonucleotide
  Sense strand starting at position 3304 of SEQ ID NO: 1883460
aacguuuagaguuagagac

SEQ ID NO: 2195281 - RNA, 19 nt, Artificial Sequence
  Description of Artificial Sequence: Synthetic oligonucleotide
  Antisense strand to SEQ ID NO: 2195280
gucucuaacucuaaacguu

SEQ ID NO: 2195282 - RNA, 19 nt, Artificial Sequence
  Description of Artificial Sequence: Synthetic oligonucleotide
  Sense strand starting at position 3527 of SEQ ID NO: 1883460
ggaagauaccugugguaga

SEQ ID NO: 2195283 - RNA, 19 nt, Artificial Sequence
  Description of Artificial Sequence: Synthetic oligonucleotide
  Antisense strand to SEQ ID NO: 2195282
ucuaccacagguaucuucc

SEQ ID NO: 2195284 - RNA, 19 nt, Artificial Sequence
  Description of Artificial Sequence: Synthetic oligonucleotide
  Sense strand starting at position 3625 of SEQ ID NO: 1883460
gagcuagagguauggauaa

SEQ ID NO: 2195285 - RNA, 19 nt, Artificial Sequence
  Description of Artificial Sequence: Synthetic oligonucleotide
  Antisense strand to SEQ ID NO: 2195284
uuauccauaccucuagcuc

SEQ ID NO: 2195286 - RNA, 19 nt, Artificial Sequence
  Description of Artificial Sequence: Synthetic oligonucleotide
  Sense strand starting at position 3834 of SEQ ID NO: 1883460
aacuuaugggcuuggaaag

SEQ ID NO: 2195287 - RNA, 19 nt, Artificial Sequence
  Description of Artificial Sequence: Synthetic oligonucleotide
  Antisense strand to SEQ ID NO: 2195286
cuuuccaagcccauaaguu

SEQ ID NO: 2195288 - RNA, 19 nt, Artificial Sequence
  Description of Artificial Sequence: Synthetic oligonucleotide
  Sense strand starting at position 3858 of SEQ ID NO: 1883460
ggaagaauuuaggaaugug

SEQ ID NO: 2195289 - RNA, 19 nt, Artificial Sequence
  Description of Artificial Sequence: Synthetic oligonucleotide
  Antisense strand to SEQ ID NO: 2195288
cacauuccuaaauucuucc

SEQ ID NO: 2195290 - RNA, 19 nt, Artificial Sequence
  Description of Artificial Sequence: Synthetic oligonucleotide
  Sense strand starting at position 73 of SEQ ID NO: 1883461
ugucacaugaggugacaua

SEQ ID NO: 2195291 - RNA, 19 nt, Artificial Sequence
  Description of Artificial Sequence: Synthetic oligonucleotide
  Antisense strand to SEQ ID NO: 2195290
uaugucaccucaugugaca

SEQ ID NO: 2195292 - RNA, 19 nt, Artificial Sequence
  Description of Artificial Sequence: Synthetic oligonucleotide
  Sense strand starting at position 138 of SEQ ID NO: 1883461
gacagaauggcuugccuua

SEQ ID NO: 2195293 - RNA, 19 nt, Artificial Sequence
  Description of Artificial Sequence: Synthetic oligonucleotide
  Antisense strand to SEQ ID NO: 2195292
uaaggcaagccauucuguc

SEQ ID NO: 2195294 - RNA, 19 nt, Artificial Sequence
  Description of Artificial Sequence: Synthetic oligonucleotide
  Sense strand starting at position 188 of SEQ ID NO: 1883461
ggaguuuguuagcuuagca

SEQ ID NO: 2195295 - RNA, 19 nt, Artificial Sequence
  Description of Artificial Sequence: Synthetic oligonucleotide
  Antisense strand to SEQ ID NO: 2195294
ugcuaagcuaacaaacucc

SEQ ID NO: 2195296 - RNA, 19 nt, Artificial Sequence
  Description of Artificial Sequence: Synthetic oligonucleotide
  Sense strand starting at position 216 of SEQ ID NO: 1883461
ucagguuucuaggucuagu

SEQ ID NO: 2195297 - RNA, 19 nt, Artificial Sequence
  Description of Artificial Sequence: Synthetic oligonucleotide
  Antisense strand to SEQ ID NO: 2195296
acuagaccuagaaaccuga

SEQ ID NO: 2195298 - RNA, 19 nt, Artificial Sequence
  Description of Artificial Sequence: Synthetic oligonucleotide
  Sense strand starting at position 227 of SEQ ID NO: 1883461
ggucuagugugaccuugaa

SEQ ID NO: 2195299 - RNA, 19 nt, Artificial Sequence
  Description of Artificial Sequence: Synthetic oligonucleotide
  Antisense strand to SEQ ID NO: 2195298
uucaaggucacacuagacc

SEQ ID NO: 2195300 - RNA, 19 nt, Artificial Sequence
  Description of Artificial Sequence: Synthetic oligonucleotide
  Sense strand starting at position 258 of SEQ ID NO: 1883461
guaacaguuucuucuacuc

SEQ ID NO: 2195301 - RNA, 19 nt, Artificial Sequence
  Description of Artificial Sequence: Synthetic oligonucleotide
  Antisense strand to SEQ ID NO: 2195300
gaguagaagaaacuguuac

SEQ ID NO: 2195302 - RNA, 19 nt, Artificial Sequence
  Description of Artificial Sequence: Synthetic oligonucleotide
  Sense strand starting at position 278 of SEQ ID NO: 1883461
acuguuaaugacgacauca

SEQ ID NO: 2195303 - RNA, 19 nt, Artificial Sequence
  Description of Artificial Sequence: Synthetic oligonucleotide
  Antisense strand to SEQ ID NO: 2195302
ugaugucgucauuaacagu

SEQ ID NO: 2195304 - RNA, 19 nt, Artificial Sequence
  Description of Artificial Sequence: Synthetic oligonucleotide
  Sense strand starting at position 280 of SEQ ID NO: 1883461
uguuaaugacgacaucauu

SEQ ID NO: 2195305 - RNA, 19 nt, Artificial Sequence
  Description of Artificial Sequence: Synthetic oligonucleotide
  Antisense strand to SEQ ID NO: 2195304
aaugaugucgucauuaaca

SEQ ID NO: 2195306 - RNA, 19 nt, Artificial Sequence
  Description of Artificial Sequence: Synthetic oligonucleotide
  Sense strand starting at position 339 of SEQ ID NO: 1883461
acauuuagcugguguaaug

SEQ ID NO: 2195307 - RNA, 19 nt, Artificial Sequence
  Description of Artificial Sequence: Synthetic oligonucleotide
  Antisense strand to SEQ ID NO: 2195306
cauuacaccagcuaaaugu

SEQ ID NO: 2195308 - RNA, 19 nt, Artificial Sequence
  Description of Artificial Sequence: Synthetic oligonucleotide
  Sense strand starting at position 710 of SEQ ID NO: 1883461
ggaggaugauuugagguca

SEQ ID NO: 2195309 - RNA, 19 nt, Artificial Sequence
  Description of Artificial Sequence: Synthetic oligonucleotide
  Antisense strand to SEQ ID NO: 2195308
ugaccucaaaucauccucc

SEQ ID NO: 2195310 - RNA, 19 nt, Artificial Sequence
  Description of Artificial Sequence: Synthetic oligonucleotide
  Sense strand starting at position 1070 of SEQ ID NO: 1883461
uuccucaaugcugaaaugu

SEQ ID NO: 2195311 - RNA, 19 nt, Artificial Sequence
  Description of Artificial Sequence: Synthetic oligonucleotide
  Antisense strand to SEQ ID NO: 2195310
acauuucagcauugaggaa

SEQ ID NO: 2195312 - RNA, 19 nt, Artificial Sequence
  Description of Artificial Sequence: Synthetic oligonucleotide
  Sense strand starting at position 1079 of SEQ ID NO: 1883461
gcugaaauguaauuagauu

SEQ ID NO: 2195313 - RNA, 19 nt, Artificial Sequence
  Description of Artificial Sequence: Synthetic oligonucleotide
  Antisense strand to SEQ ID NO: 2195312
aaucuaauuacauuucagc

SEQ ID NO: 2195314 - RNA, 19 nt, Artificial Sequence
  Description of Artificial Sequence: Synthetic oligonucleotide
  Sense strand starting at position 1161 of SEQ ID NO: 1883461
agaguagaauuagaagaca

SEQ ID NO: 2195315 - RNA, 19 nt, Artificial Sequence
  Description of Artificial Sequence: Synthetic oligonucleotide
  Antisense strand to SEQ ID NO: 2195314
ugucuucuaauucuacucu

SEQ ID NO: 2195316 - RNA, 19 nt, Artificial Sequence
  Description of Artificial Sequence: Synthetic oligonucleotide
  Sense strand starting at position 2107 of SEQ ID NO: 1883461
gcguuauccgccagcugag

SEQ ID NO: 2195317 - RNA, 19 nt, Artificial Sequence
  Description of Artificial Sequence: Synthetic oligonucleotide
  Antisense strand to SEQ ID NO: 2195316
cucagcuggcggauaacgc

SEQ ID NO: 2195318 - RNA, 19 nt, Artificial Sequence
  Description of Artificial Sequence: Synthetic oligonucleotide
  Sense strand starting at position 2158 of SEQ ID NO: 1883461
ggcuccuccuuccuagaau

SEQ ID NO: 2195319 - RNA, 19 nt, Artificial Sequence
  Description of Artificial Sequence: Synthetic oligonucleotide
  Antisense strand to SEQ ID NO: 2195318
auucuaggaaggaggagcc

SEQ ID NO: 2195320 - RNA, 19 nt, Artificial Sequence
  Description of Artificial Sequence: Synthetic oligonucleotide
  Sense strand starting at position 2212 of SEQ ID NO: 1883461
gcuguacgagaaugacaau

SEQ ID NO: 2195321 - RNA, 19 nt, Artificial Sequence
  Description of Artificial Sequence: Synthetic oligonucleotide
  Antisense strand to SEQ ID NO: 2195320
auugucauucucguacagc

SEQ ID NO: 2195322 - RNA, 19 nt, Artificial Sequence
  Description of Artificial Sequence: Synthetic oligonucleotide
  Sense strand starting at position 2232 of SEQ ID NO: 1883461
cccagaagccaggguuaaa

SEQ ID NO: 2195323 - RNA, 19 nt, Artificial Sequence
  Description of Artificial Sequence: Synthetic oligonucleotide
  Antisense strand to SEQ ID NO: 2195322
uuuaacccuggcuucuggg

SEQ ID NO: 2195324 - RNA, 19 nt, Artificial Sequence
  Description of Artificial Sequence: Synthetic oligonucleotide
  Sense strand starting at position 2264 of SEQ ID NO: 1883461
cguggacgacaucacuaaa

SEQ ID NO: 2195325 - RNA, 19 nt, Artificial Sequence
  Description of Artificial Sequence: Synthetic oligonucleotide
  Antisense strand to SEQ ID NO: 2195324
uuuagugaugucguccacg

SEQ ID NO: 2195326 - RNA, 19 nt, Artificial Sequence
  Description of Artificial Sequence: Synthetic oligonucleotide
  Sense strand starting at position 2283 of SEQ ID NO: 1883461
aacuguuuccuuugcggaa

SEQ ID NO: 2195327 - RNA, 19 nt, Artificial Sequence
  Description of Artificial Sequence: Synthetic oligonucleotide
  Antisense strand to SEQ ID NO: 2195326
uuccgcaaaggaaacaguu

SEQ ID NO: 2195328 - RNA, 19 nt, Artificial Sequence
  Description of Artificial Sequence: Synthetic oligonucleotide
  Sense strand starting at position 2284 of SEQ ID NO: 1883461
acuguuuccuuugcggaaa

SEQ ID NO: 2195329 - RNA, 19 nt, Artificial Sequence
  Description of Artificial Sequence: Synthetic oligonucleotide
  Antisense strand to SEQ ID NO: 2195328
uuuccgcaaaggaaacagu

SEQ ID NO: 2195330 - RNA, 19 nt, Artificial Sequence
  Description of Artificial Sequence: Synthetic oligonucleotide
  Sense strand starting at position 2301 of SEQ ID NO: 1883461
aaaugauucuagccuguug

SEQ ID NO: 2195331 - RNA, 19 nt, Artificial Sequence
  Description of Artificial Sequence: Synthetic oligonucleotide
  Antisense strand to SEQ ID NO: 2195330
caacaggcuagaaucauuu

SEQ ID NO: 2195332 - RNA, 19 nt, Artificial Sequence
  Description of Artificial Sequence: Synthetic oligonucleotide
  Sense strand starting at position 2328 of SEQ ID NO: 1883461
gaaagaauauacgauuuga

SEQ ID NO: 2195333 - RNA, 19 nt, Artificial Sequence
  Description of Artificial Sequence: Synthetic oligonucleotide
  Antisense strand to SEQ ID NO: 2195332
ucaaaucguauauucuuuc

SEQ ID NO: 2195334 - RNA, 19 nt, Artificial Sequence
  Description of Artificial Sequence: Synthetic oligonucleotide
  Sense strand starting at position 2357 of SEQ ID NO: 1883461
gugauaacuuaauugaauc

SEQ ID NO: 2195335 - RNA, 19 nt, Artificial Sequence
  Description of Artificial Sequence: Synthetic oligonucleotide
  Antisense strand to SEQ ID NO: 2195334
gauucaauuaaguuaucac

SEQ ID NO: 2195336 - RNA, 19 nt, Artificial Sequence
  Description of Artificial Sequence: Synthetic oligonucleotide
  Sense strand starting at position 2365 of SEQ ID NO: 1883461
uuaauugaaucaucggguu

SEQ ID NO: 2195337 - RNA, 19 nt, Artificial Sequence
  Description of Artificial Sequence: Synthetic oligonucleotide
  Antisense strand to SEQ ID NO: 2195336
aacccgaugauucaauuaa

SEQ ID NO: 2195338 - RNA, 19 nt, Artificial Sequence
  Description of Artificial Sequence: Synthetic oligonucleotide
  Sense strand starting at position 2371 of SEQ ID NO: 1883461
gaaucaucggguuggagga

SEQ ID NO: 2195339 - RNA, 19 nt, Artificial Sequence
  Description of Artificial Sequence: Synthetic oligonucleotide
  Antisense strand to SEQ ID NO: 2195338
uccuccaacccgaugauuc

SEQ ID NO: 2195340 - RNA, 19 nt, Artificial Sequence
  Description of Artificial Sequence: Synthetic oligonucleotide
  Sense strand starting at position 2410 of SEQ ID NO: 1883461
guaauauugauagguguua

SEQ ID NO: 2195341 - RNA, 19 nt, Artificial Sequence
  Description of Artificial Sequence: Synthetic oligonucleotide
  Antisense strand to SEQ ID NO: 2195340
uaacaccuaucaauauuac

SEQ ID NO: 2195342 - RNA, 19 nt, Artificial Sequence
  Description of Artificial Sequence: Synthetic oligonucleotide
  Sense strand starting at position 2415 of SEQ ID NO: 1883461
auugauagguguuaccaga

SEQ ID NO: 2195343 - RNA, 19 nt, Artificial Sequence
  Description of Artificial Sequence: Synthetic oligonucleotide
  Antisense strand to SEQ ID NO: 2195342
ucugguaacaccuaucaau

SEQ ID NO: 2195344 - RNA, 19 nt, Artificial Sequence
  Description of Artificial Sequence: Synthetic oligonucleotide
  Sense strand starting at position 2431 of SEQ ID NO: 1883461
agauuugucuucggaaauc

SEQ ID NO: 2195345 - RNA, 19 nt, Artificial Sequence
  Description of Artificial Sequence: Synthetic oligonucleotide
  Antisense strand to SEQ ID NO: 2195344
gauuuccgaagacaaaucu

SEQ ID NO: 2195346 - RNA, 19 nt, Artificial Sequence
  Description of Artificial Sequence: Synthetic oligonucleotide
  Sense strand starting at position 2543 of SEQ ID NO: 1883461
agauuaaacugggaaucca

SEQ ID NO: 2195347 - RNA, 19 nt, Artificial Sequence
  Description of Artificial Sequence: Synthetic oligonucleotide
  Antisense strand to SEQ ID NO: 2195346
uggauucccaguuuaaucu

SEQ ID NO: 2195348 - RNA, 19 nt, Artificial Sequence
  Description of Artificial Sequence: Synthetic oligonucleotide
  Sense strand starting at position 2553 of SEQ ID NO: 1883461
gggaauccacagugcuuaa

SEQ ID NO: 2195349 - RNA, 19 nt, Artificial Sequence
  Description of Artificial Sequence: Synthetic oligonucleotide
  Antisense strand to SEQ ID NO: 2195348
uuaagcacuguggauuccc

SEQ ID NO: 2195350 - RNA, 19 nt, Artificial Sequence
  Description of Artificial Sequence: Synthetic oligonucleotide
  Sense strand starting at position 2564 of SEQ ID NO: 1883461
gugcuuaaacaguggagga

SEQ ID NO: 2195351 - RNA, 19 nt, Artificial Sequence
  Description of Artificial Sequence: Synthetic oligonucleotide
  Antisense strand to SEQ ID NO: 2195350
uccuccacuguuuaagcac

SEQ ID NO: 2195352 - RNA, 19 nt, Artificial Sequence
  Description of Artificial Sequence: Synthetic oligonucleotide
  Sense strand starting at position 2565 of SEQ ID NO: 1883461
ugcuuaaacaguggaggaa

SEQ ID NO: 2195353 - RNA, 19 nt, Artificial Sequence
  Description of Artificial Sequence: Synthetic oligonucleotide
  Antisense strand to SEQ ID NO: 2195352
uuccuccacuguuuaagca

SEQ ID NO: 2195354 - RNA, 19 nt, Artificial Sequence
  Description of Artificial Sequence: Synthetic oligonucleotide
  Sense strand starting at position 3036 of SEQ ID NO: 1883461
uagcucagucuugaaggau

SEQ ID NO: 2195355 - RNA, 19 nt, Artificial Sequence
  Description of Artificial Sequence: Synthetic oligonucleotide
  Antisense strand to SEQ ID NO: 2195354
auccuucaagacugagcua

SEQ ID NO: 2195356 - RNA, 19 nt, Artificial Sequence
  Description of Artificial Sequence: Synthetic oligonucleotide
  Sense strand starting at position 3042 of SEQ ID NO: 1883461
agucuugaaggaugagcau

SEQ ID NO: 2195357 - RNA, 19 nt, Artificial Sequence
  Description of Artificial Sequence: Synthetic oligonucleotide
  Antisense strand to SEQ ID NO: 2195356
augcucauccuucaagacu

SEQ ID NO: 2195358 - RNA, 19 nt, Artificial Sequence
  Description of Artificial Sequence: Synthetic oligonucleotide
  Sense strand starting at position 3053 of SEQ ID NO: 1883461
augagcaucuuaguaauag

SEQ ID NO: 2195359 - RNA, 19 nt, Artificial Sequence
  Description of Artificial Sequence: Synthetic oligonucleotide
  Antisense strand to SEQ ID NO: 2195358
cuauuacuaagaugcucau

SEQ ID NO: 2195360 - RNA, 19 nt, Artificial Sequence
  Description of Artificial Sequence: Synthetic oligonucleotide
  Sense strand starting at position 3081 of SEQ ID NO: 1883461
uuuguuuaccacugcagaa

SEQ ID NO: 2195361 - RNA, 19 nt, Artificial Sequence
  Description of Artificial Sequence: Synthetic oligonucleotide
  Antisense strand to SEQ ID NO: 2195360
uucugcagugguaaacaaa

SEQ ID NO: 2195362 - RNA, 19 nt, Artificial Sequence
  Description of Artificial Sequence: Synthetic oligonucleotide
  Sense strand starting at position 3120 of SEQ ID NO: 1883461
acauguuauuugcaccgga

SEQ ID NO: 2195363 - RNA, 19 nt, Artificial Sequence
  Description of Artificial Sequence: Synthetic oligonucleotide
  Antisense strand to SEQ ID NO: 2195362
uccggugcaaauaacaugu

SEQ ID NO: 2195364 - RNA, 19 nt, Artificial Sequence
  Description of Artificial Sequence: Synthetic oligonucleotide
  Sense strand starting at position 3182 of SEQ ID NO: 1883461
ggagcucacgccugcaauu

SEQ ID NO: 2195365 - RNA, 19 nt, Artificial Sequence
  Description of Artificial Sequence: Synthetic oligonucleotide
  Antisense strand to SEQ ID NO: 2195364
aauugcaggcgugagcucc

SEQ ID NO: 2195366 - RNA, 19 nt, Artificial Sequence
  Description of Artificial Sequence: Synthetic oligonucleotide
  Sense strand starting at position 3576 of SEQ ID NO: 1883461
guuagcuucuacuuacauu

SEQ ID NO: 2195367 - RNA, 19 nt, Artificial Sequence
  Description of Artificial Sequence: Synthetic oligonucleotide
  Antisense strand to SEQ ID NO: 2195366
aauguaaguagaagcuaac

SEQ ID NO: 2195368 - RNA, 19 nt, Artificial Sequence
  Description of Artificial Sequence: Synthetic oligonucleotide
  Sense strand starting at position 3959 of SEQ ID NO: 1883461
ucuugagcuccuggaauca

SEQ ID NO: 2195369 - RNA, 19 nt, Artificial Sequence
  Description of Artificial Sequence: Synthetic oligonucleotide
  Antisense strand to SEQ ID NO: 2195368
ugauuccaggagcucaaga

SEQ ID NO: 2195370 - RNA, 19 nt, Artificial Sequence
  Description of Artificial Sequence: Synthetic oligonucleotide
  Sense strand starting at position 269 of SEQ ID NO: 1883462
uauugaaaugcagacuugu

SEQ ID NO: 2195371 - RNA, 19 nt, Artificial Sequence
  Description of Artificial Sequence: Synthetic oligonucleotide
  Antisense strand to SEQ ID NO: 2195370
acaagucugcauuucaaua

SEQ ID NO: 2195372 - RNA, 19 nt, Artificial Sequence
  Description of Artificial Sequence: Synthetic oligonucleotide
  Sense strand starting at position 293 of SEQ ID NO: 1883462
ucauaauaccuguguacaa

SEQ ID NO: 2195373 - RNA, 19 nt, Artificial Sequence
  Description of Artificial Sequence: Synthetic oligonucleotide
  Antisense strand to SEQ ID NO: 2195372
uuguacacagguauuauga

SEQ ID NO: 2195374 - RNA, 19 nt, Artificial Sequence
  Description of Artificial Sequence: Synthetic oligonucleotide
  Sense strand starting at position 295 of SEQ ID NO: 1883462
auaauaccuguguacaagu

SEQ ID NO: 2195375 - RNA, 19 nt, Artificial Sequence
  Description of Artificial Sequence: Synthetic oligonucleotide
  Antisense strand to SEQ ID NO: 2195374
acuuguacacagguauuau

SEQ ID NO: 2195376 - RNA, 19 nt, Artificial Sequence
  Description of Artificial Sequence: Synthetic oligonucleotide
  Sense strand starting at position 414 of SEQ ID NO: 1883462
ucuaauaaguaggugagua

SEQ ID NO: 2195377 - RNA, 19 nt, Artificial Sequence
  Description of Artificial Sequence: Synthetic oligonucleotide
  Antisense strand to SEQ ID NO: 2195376
uacucaccuacuuauuaga

SEQ ID NO: 2195378 - RNA, 19 nt, Artificial Sequence
  Description of Artificial Sequence: Synthetic oligonucleotide
  Sense strand starting at position 415 of SEQ ID NO: 1883462
cuaauaaguaggugaguau

SEQ ID NO: 2195379 - RNA, 19 nt, Artificial Sequence
  Description of Artificial Sequence: Synthetic oligonucleotide
  Antisense strand to SEQ ID NO: 2195378
auacucaccuacuuauuag

SEQ ID NO: 2195380 - RNA, 19 nt, Artificial Sequence
  Description of Artificial Sequence: Synthetic oligonucleotide
  Sense strand starting at position 416 of SEQ ID NO: 1883462
uaauaaguaggugaguauu

SEQ ID NO: 2195381 - RNA, 19 nt, Artificial Sequence
  Description of Artificial Sequence: Synthetic oligonucleotide
  Antisense strand to SEQ ID NO: 2195380
aauacucaccuacuuauua

SEQ ID NO: 2195382 - RNA, 19 nt, Artificial Sequence
  Description of Artificial Sequence: Synthetic oligonucleotide
  Sense strand starting at position 440 of SEQ ID NO: 1883462
ugguuugcacacgaggaaa

SEQ ID NO: 2195383 - RNA, 19 nt, Artificial Sequence
  Description of Artificial Sequence: Synthetic oligonucleotide
  Antisense strand to SEQ ID NO: 2195382
uuuccucgugugcaaacca

SEQ ID NO: 2195384 - RNA, 19 nt, Artificial Sequence
  Description of Artificial Sequence: Synthetic oligonucleotide
  Sense strand starting at position 494 of SEQ ID NO: 1883462
ccacacagcuggguuaaau

SEQ ID NO: 2195385 - RNA, 19 nt, Artificial Sequence
  Description of Artificial Sequence: Synthetic oligonucleotide
  Antisense strand to SEQ ID NO: 2195384
auuuaacccagcugugugg

SEQ ID NO: 2195386 - RNA, 19 nt, Artificial Sequence
  Description of Artificial Sequence: Synthetic oligonucleotide
  Sense strand starting at position 593 of SEQ ID NO: 1883462
gguaaauggaguugaugga

SEQ ID NO: 2195387 - RNA, 19 nt, Artificial Sequence
  Description of Artificial Sequence: Synthetic oligonucleotide
  Antisense strand to SEQ ID NO: 2195386
uccaucaacuccauuuacc

SEQ ID NO: 2195388 - RNA, 19 nt, Artificial Sequence
  Description of Artificial Sequence: Synthetic oligonucleotide
  Sense strand starting at position 599 of SEQ ID NO: 1883462
uggaguugauggaggcaaa

SEQ ID NO: 2195389 - RNA, 19 nt, Artificial Sequence
  Description of Artificial Sequence: Synthetic oligonucleotide
  Antisense strand to SEQ ID NO: 2195388
uuugccuccaucaacucca

SEQ ID NO: 2195390 - RNA, 19 nt, Artificial Sequence
  Description of Artificial Sequence: Synthetic oligonucleotide
  Sense strand starting at position 624 of SEQ ID NO: 1883462
auuacuguugcucaaaggu

SEQ ID NO: 2195391 - RNA, 19 nt, Artificial Sequence
  Description of Artificial Sequence: Synthetic oligonucleotide
  Antisense strand to SEQ ID NO: 2195390
accuuugagcaacaguaau

SEQ ID NO: 2195392 - RNA, 19 nt, Artificial Sequence
  Description of Artificial Sequence: Synthetic oligonucleotide
  Sense strand starting at position 844 of SEQ ID NO: 1883462
ggaaucacugcuuagcuua

SEQ ID NO: 2195393 - RNA, 19 nt, Artificial Sequence
  Description of Artificial Sequence: Synthetic oligonucleotide
  Antisense strand to SEQ ID NO: 2195392
uaagcuaagcagugauucc

SEQ ID NO: 2195394 - RNA, 19 nt, Artificial Sequence
  Description of Artificial Sequence: Synthetic oligonucleotide
  Sense strand starting at position 940 of SEQ ID NO: 1883462
uuuggaccucucuggacau

SEQ ID NO: 2195395 - RNA, 19 nt, Artificial Sequence
  Description of Artificial Sequence: Synthetic oligonucleotide
  Antisense strand to SEQ ID NO: 2195394
auguccagagagguccaaa

SEQ ID NO: 2195396 - RNA, 19 nt, Artificial Sequence
  Description of Artificial Sequence: Synthetic oligonucleotide
  Sense strand starting at position 991 of SEQ ID NO: 1883462
ugggucugugaauggaaga

SEQ ID NO: 2195397 - RNA, 19 nt, Artificial Sequence
  Description of Artificial Sequence: Synthetic oligonucleotide
  Antisense strand to SEQ ID NO: 2195396
ucuuccauucacagaccca

SEQ ID NO: 2195398 - RNA, 19 nt, Artificial Sequence
  Description of Artificial Sequence: Synthetic oligonucleotide
  Sense strand starting at position 1038 of SEQ ID NO: 1883462
gggacaagguuucugaauc

SEQ ID NO: 2195399 - RNA, 19 nt, Artificial Sequence
  Description of Artificial Sequence: Synthetic oligonucleotide
  Antisense strand to SEQ ID NO: 2195398
gauucagaaaccuuguccc

SEQ ID NO: 2195400 - RNA, 19 nt, Artificial Sequence
  Description of Artificial Sequence: Synthetic oligonucleotide
  Sense strand starting at position 1301 of SEQ ID NO: 1883462
guuggucucauuuguugaa

SEQ ID NO: 2195401 - RNA, 19 nt, Artificial Sequence
  Description of Artificial Sequence: Synthetic oligonucleotide
  Antisense strand to SEQ ID NO: 2195400
uucaacaaaugagaccaac

SEQ ID NO: 2195402 - RNA, 19 nt, Artificial Sequence
  Description of Artificial Sequence: Synthetic oligonucleotide
  Sense strand starting at position 1396 of SEQ ID NO: 1883462
uaguaaguuccagagugac

SEQ ID NO: 2195403 - RNA, 19 nt, Artificial Sequence
  Description of Artificial Sequence: Synthetic oligonucleotide
  Antisense strand to SEQ ID NO: 2195402
gucacucuggaacuuacua

SEQ ID NO: 2195404 - RNA, 19 nt, Artificial Sequence
  Description of Artificial Sequence: Synthetic oligonucleotide
  Sense strand starting at position 1656 of SEQ ID NO: 1883462
ucauccaauucuguguaga

SEQ ID NO: 2195405 - RNA, 19 nt, Artificial Sequence
  Description of Artificial Sequence: Synthetic oligonucleotide
  Antisense strand to SEQ ID NO: 2195404
ucuacacagaauuggauga

SEQ ID NO: 2195406 - RNA, 19 nt, Artificial Sequence
  Description of Artificial Sequence: Synthetic oligonucleotide
  Sense strand starting at position 1658 of SEQ ID NO: 1883462
auccaauucuguguagaag

SEQ ID NO: 2195407 - RNA, 19 nt, Artificial Sequence
  Description of Artificial Sequence: Synthetic oligonucleotide
  Antisense strand to SEQ ID NO: 2195406
cuucuacacagaauuggau

SEQ ID NO: 2195408 - RNA, 19 nt, Artificial Sequence
  Description of Artificial Sequence: Synthetic oligonucleotide
  Sense strand starting at position 1750 of SEQ ID NO: 1883462
cagggaagcuuggugacua

SEQ ID NO: 2195409 - RNA, 19 nt, Artificial Sequence
  Description of Artificial Sequence: Synthetic oligonucleotide
  Antisense strand to SEQ ID NO: 2195408
uagucaccaagcuucccug

SEQ ID NO: 2195410 - RNA, 19 nt, Artificial Sequence
  Description of Artificial Sequence: Synthetic oligonucleotide
  Sense strand starting at position 1761 of SEQ ID NO: 1883462
ggugacuaugacuggauga

SEQ ID NO: 2195411 - RNA, 19 nt, Artificial Sequence
  Description of Artificial Sequence: Synthetic oligonucleotide
  Antisense strand to SEQ ID NO: 2195410
ucauccagucauagucacc

SEQ ID NO: 2195412 - RNA, 19 nt, Artificial Sequence
  Description of Artificial Sequence: Synthetic oligonucleotide
  Sense strand starting at position 1896 of SEQ ID NO: 1883462
gcuccaauauggucagacu

SEQ ID NO: 2195413 - RNA, 19 nt, Artificial Sequence
  Description of Artificial Sequence: Synthetic oligonucleotide
  Antisense strand to SEQ ID NO: 2195412
agucugaccauauuggagc

SEQ ID NO: 2195414 - RNA, 19 nt, Artificial Sequence
  Description of Artificial Sequence: Synthetic oligonucleotide
  Sense strand starting at position 1934 of SEQ ID NO: 1883462
agaagagauuaagaugaca

SEQ ID NO: 2195415 - RNA, 19 nt, Artificial Sequence
  Description of Artificial Sequence: Synthetic oligonucleotide
  Antisense strand to SEQ ID NO: 2195414
ugucaucuuaaucucuucu

SEQ ID NO: 2195416 - RNA, 19 nt, Artificial Sequence
  Description of Artificial Sequence: Synthetic oligonucleotide
  Sense strand starting at position 1939 of SEQ ID NO: 1883462
agauuaagaugacaaagga

SEQ ID NO: 2195417 - RNA, 19 nt, Artificial Sequence
  Description of Artificial Sequence: Synthetic oligonucleotide
  Antisense strand to SEQ ID NO: 2195416
uccuuugucaucuuaaucu

SEQ ID NO: 2195418 - RNA, 19 nt, Artificial Sequence
  Description of Artificial Sequence: Synthetic oligonucleotide
  Sense strand starting at position 2142 of SEQ ID NO: 1883462
ggaucaauacagugaccau

SEQ ID NO: 2195419 - RNA, 19 nt, Artificial Sequence
  Description of Artificial Sequence: Synthetic oligonucleotide
  Antisense strand to SEQ ID NO: 2195418
auggucacuguauugaucc

SEQ ID NO: 2195420 - RNA, 19 nt, Artificial Sequence
  Description of Artificial Sequence: Synthetic oligonucleotide
  Sense strand starting at position 2238 of SEQ ID NO: 1883462
ugugguaagaggcaucaga

SEQ ID NO: 2195421 - RNA, 19 nt, Artificial Sequence
  Description of Artificial Sequence: Synthetic oligonucleotide
  Antisense strand to SEQ ID NO: 2195420
ucugaugccucuuaccaca

SEQ ID NO: 2195422 - RNA, 19 nt, Artificial Sequence
  Description of Artificial Sequence: Synthetic oligonucleotide
  Sense strand starting at position 2428 of SEQ ID NO: 1883462
cauguuagucagcaaggaa

SEQ ID NO: 2195423 - RNA, 19 nt, Artificial Sequence
  Description of Artificial Sequence: Synthetic oligonucleotide
  Antisense strand to SEQ ID NO: 2195422
uuccuugcugacuaacaug

SEQ ID NO: 2195424 - RNA, 19 nt, Artificial Sequence
  Description of Artificial Sequence: Synthetic oligonucleotide
  Sense strand starting at position 2462 of SEQ ID NO: 1883462
guggaacuucguaguugua

SEQ ID NO: 2195425 - RNA, 19 nt, Artificial Sequence
  Description of Artificial Sequence: Synthetic oligonucleotide
  Antisense strand to SEQ ID NO: 2195424
uacaacuacgaaguuccac

SEQ ID NO: 2195426 - RNA, 19 nt, Artificial Sequence
  Description of Artificial Sequence: Synthetic oligonucleotide
  Sense strand starting at position 2527 of SEQ ID NO: 1883462
acaauaagacuauguaggu

SEQ ID NO: 2195427 - RNA, 19 nt, Artificial Sequence
  Description of Artificial Sequence: Synthetic oligonucleotide
  Antisense strand to SEQ ID NO: 2195426
accuacauagucuuauugu

SEQ ID NO: 2195428 - RNA, 19 nt, Artificial Sequence
  Description of Artificial Sequence: Synthetic oligonucleotide
  Sense strand starting at position 2627 of SEQ ID NO: 1883462
uugaguuuggaauguuuga

SEQ ID NO: 2195429 - RNA, 19 nt, Artificial Sequence
  Description of Artificial Sequence: Synthetic oligonucleotide
  Antisense strand to SEQ ID NO: 2195428
ucaaacauuccaaacucaa

SEQ ID NO: 2195430 - RNA, 19 nt, Artificial Sequence
  Description of Artificial Sequence: Synthetic oligonucleotide
  Sense strand starting at position 3028 of SEQ ID NO: 1883462
gcggcugucaugguugaug

SEQ ID NO: 2195431 - RNA, 19 nt, Artificial Sequence
  Description of Artificial Sequence: Synthetic oligonucleotide
  Antisense strand to SEQ ID NO: 2195430
caucaaccaugacagccgc

SEQ ID NO: 2195432 - RNA, 19 nt, Artificial Sequence
  Description of Artificial Sequence: Synthetic oligonucleotide
  Sense strand starting at position 3298 of SEQ ID NO: 1883462
acgggaguuucccuccaac

SEQ ID NO: 2195433 - RNA, 19 nt, Artificial Sequence
  Description of Artificial Sequence: Synthetic oligonucleotide
  Antisense strand to SEQ ID NO: 2195432
guuggagggaaacucccgu

SEQ ID NO: 2195434 - RNA, 19 nt, Artificial Sequence
  Description of Artificial Sequence: Synthetic oligonucleotide
  Sense strand starting at position 3301 of SEQ ID NO: 1883462
ggaguuucccuccaacuua

SEQ ID NO: 2195435 - RNA, 19 nt, Artificial Sequence
  Description of Artificial Sequence: Synthetic oligonucleotide
  Antisense strand to SEQ ID NO: 2195434
uaaguuggagggaaacucc

SEQ ID NO: 2195436 - RNA, 19 nt, Artificial Sequence
  Description of Artificial Sequence: Synthetic oligonucleotide
  Sense strand starting at position 3374 of SEQ ID NO: 1883462
ggcacuuuacaugaaucuu

SEQ ID NO: 2195437 - RNA, 19 nt, Artificial Sequence
  Description of Artificial Sequence: Synthetic oligonucleotide
  Antisense strand to SEQ ID NO: 2195436
aagauucauguaaagugcc

SEQ ID NO: 2195438 - RNA, 19 nt, Artificial Sequence
  Description of Artificial Sequence: Synthetic oligonucleotide
  Sense strand starting at position 3459 of SEQ ID NO: 1883462
caggcuugacagugggaau

SEQ ID NO: 2195439 - RNA, 19 nt, Artificial Sequence
  Description of Artificial Sequence: Synthetic oligonucleotide
  Antisense strand to SEQ ID NO: 2195438
auucccacugucaagccug

SEQ ID NO: 2195440 - RNA, 19 nt, Artificial Sequence
  Description of Artificial Sequence: Synthetic oligonucleotide
  Sense strand starting at position 3472 of SEQ ID NO: 1883462
gggaaugcuaaccgcagaa

SEQ ID NO: 2195441 - RNA, 19 nt, Artificial Sequence
  Description of Artificial Sequence: Synthetic oligonucleotide
  Antisense strand to SEQ ID NO: 2195440
uucugcgguuagcauuccc

SEQ ID NO: 2195442 - RNA, 19 nt, Artificial Sequence
  Description of Artificial Sequence: Synthetic oligonucleotide
  Sense strand starting at position 3898 of SEQ ID NO: 1883462
cuggcagucacuuaggaga

SEQ ID NO: 2195443 - RNA, 19 nt, Artificial Sequence
  Description of Artificial Sequence: Synthetic oligonucleotide
  Antisense strand to SEQ ID NO: 2195442
ucuccuaagugacugccag

SEQ ID NO: 2195444 - RNA, 19 nt, Artificial Sequence
  Description of Artificial Sequence: Synthetic oligonucleotide
  Sense strand starting at position 3909 of SEQ ID NO: 1883462
uuaggagacagauguguca

SEQ ID NO: 2195445 - RNA, 19 nt, Artificial Sequence
  Description of Artificial Sequence: Synthetic oligonucleotide
  Antisense strand to SEQ ID NO: 2195444
ugacacaucugucuccuaa

SEQ ID NO: 2195446 - RNA, 19 nt, Artificial Sequence
  Description of Artificial Sequence: Synthetic oligonucleotide
  Sense strand starting at position 3916 of SEQ ID NO: 1883462
acagaugugucaccagaac

SEQ ID NO: 2195447 - RNA, 19 nt, Artificial Sequence
  Description of Artificial Sequence: Synthetic oligonucleotide
  Antisense strand to SEQ ID NO: 2195446
guucuggugacacaucugu

SEQ ID NO: 2195448 - RNA, 19 nt, Artificial Sequence
  Description of Artificial Sequence: Synthetic oligonucleotide
  Sense strand starting at position 3982 of SEQ ID NO: 1883462
ugggaauucuccuuuaugu

SEQ ID NO: 2195449 - RNA, 19 nt, Artificial Sequence
  Description of Artificial Sequence: Synthetic oligonucleotide
  Antisense strand to SEQ ID NO: 2195448
acauaaaggagaauuccca

SEQ ID NO: 2195450 - RNA, 19 nt, Artificial Sequence
  Description of Artificial Sequence: Synthetic oligonucleotide
  Sense strand starting at position 88 of SEQ ID NO: 1883463
gcuguuguggcuuucuuua

SEQ ID NO: 2195451 - RNA, 19 nt, Artificial Sequence
  Description of Artificial Sequence: Synthetic oligonucleotide
  Antisense strand to SEQ ID NO: 2195450
uaaagaaagccacaacagc

SEQ ID NO: 2195452 - RNA, 19 nt, Artificial Sequence
  Description of Artificial Sequence: Synthetic oligonucleotide
  Sense strand starting at position 90 of SEQ ID NO: 1883463
uguuguggcuuucuuuaca

SEQ ID NO: 2195453 - RNA, 19 nt, Artificial Sequence
  Description of Artificial Sequence: Synthetic oligonucleotide
  Antisense strand to SEQ ID NO: 2195452
uguaaagaaagccacaaca

SEQ ID NO: 2195454 - RNA, 19 nt, Artificial Sequence
  Description of Artificial Sequence: Synthetic oligonucleotide
  Sense strand starting at position 171 of SEQ ID NO: 1883463
aguuguggcuuucuuuaca

SEQ ID NO: 2195455 - RNA, 19 nt, Artificial Sequence
  Description of Artificial Sequence: Synthetic oligonucleotide
  Antisense strand to SEQ ID NO: 2195454
uguaaagaaagccacaacu

SEQ ID NO: 2195456 - RNA, 19 nt, Artificial Sequence
  Description of Artificial Sequence: Synthetic oligonucleotide
  Sense strand starting at position 174 of SEQ ID NO: 1883463
uguggcuuucuuuacagaa

SEQ ID NO: 2195457 - RNA, 19 nt, Artificial Sequence
  Description of Artificial Sequence: Synthetic oligonucleotide
  Antisense strand to SEQ ID NO: 2195456
uucuguaaagaaagccaca

SEQ ID NO: 2195458 - RNA, 19 nt, Artificial Sequence
  Description of Artificial Sequence: Synthetic oligonucleotide
  Sense strand starting at position 300 of SEQ ID NO: 1883463
gcaaaccagugcuaagaaa

SEQ ID NO: 2195459 - RNA, 19 nt, Artificial Sequence
  Description of Artificial Sequence: Synthetic oligonucleotide
  Antisense strand to SEQ ID NO: 2195458
uuucuuagcacugguuugc

SEQ ID NO: 2195460 - RNA, 19 nt, Artificial Sequence
  Description of Artificial Sequence: Synthetic oligonucleotide
  Sense strand starting at position 517 of SEQ ID NO: 1883463
aaacaugagguguguaaca

SEQ ID NO: 2195461 - RNA, 19 nt, Artificial Sequence
  Description of Artificial Sequence: Synthetic oligonucleotide
  Antisense strand to SEQ ID NO: 2195460
uguuacacaccucauguuu

SEQ ID NO: 2195462 - RNA, 19 nt, Artificial Sequence
  Description of Artificial Sequence: Synthetic oligonucleotide
  Sense strand starting at position 519 of SEQ ID NO: 1883463
acaugagguguguaacaau

SEQ ID NO: 2195463 - RNA, 19 nt, Artificial Sequence
  Description of Artificial Sequence: Synthetic oligonucleotide
  Antisense strand to SEQ ID NO: 2195462
auuguuacacaccucaugu

SEQ ID NO: 2195464 - RNA, 19 nt, Artificial Sequence
  Description of Artificial Sequence: Synthetic oligonucleotide
  Sense strand starting at position 522 of SEQ ID NO: 1883463
ugagguguguaacaauauc

SEQ ID NO: 2195465 - RNA, 19 nt, Artificial Sequence
  Description of Artificial Sequence: Synthetic oligonucleotide
  Antisense strand to SEQ ID NO: 2195464
gauauuguuacacaccuca

SEQ ID NO: 2195466 - RNA, 19 nt, Artificial Sequence
  Description of Artificial Sequence: Synthetic oligonucleotide
  Sense strand starting at position 564 of SEQ ID NO: 1883463
cugacauucuucuagguca

SEQ ID NO: 2195467 - RNA, 19 nt, Artificial Sequence
  Description of Artificial Sequence: Synthetic oligonucleotide
  Antisense strand to SEQ ID NO: 2195466
ugaccuagaagaaugucag

SEQ ID NO: 2195468 - RNA, 19 nt, Artificial Sequence
  Description of Artificial Sequence: Synthetic oligonucleotide
  Sense strand starting at position 638 of SEQ ID NO: 1883463
ucuguacagucuugaguua

SEQ ID NO: 2195469 - RNA, 19 nt, Artificial Sequence
  Description of Artificial Sequence: Synthetic oligonucleotide
  Antisense strand to SEQ ID NO: 2195468
uaacucaagacuguacaga

SEQ ID NO: 2195470 - RNA, 19 nt, Artificial Sequence
  Description of Artificial Sequence: Synthetic oligonucleotide
  Sense strand starting at position 690 of SEQ ID NO: 1883463
gcggucucuuccucuguaa

SEQ ID NO: 2195471 - RNA, 19 nt, Artificial Sequence
  Description of Artificial Sequence: Synthetic oligonucleotide
  Antisense strand to SEQ ID NO: 2195470
uuacagaggaagagaccgc

SEQ ID NO: 2195472 - RNA, 19 nt, Artificial Sequence
  Description of Artificial Sequence: Synthetic oligonucleotide
  Sense strand starting at position 1283 of SEQ ID NO: 1883463
cgcagcuuacucgggaauu

SEQ ID NO: 2195473 - RNA, 19 nt, Artificial Sequence
  Description of Artificial Sequence: Synthetic oligonucleotide
  Antisense strand to SEQ ID NO: 2195472
aauucccgaguaagcugcg

SEQ ID NO: 2195474 - RNA, 19 nt, Artificial Sequence
  Description of Artificial Sequence: Synthetic oligonucleotide
  Sense strand starting at position 1284 of SEQ ID NO: 1883463
gcagcuuacucgggaauuc

SEQ ID NO: 2195475 - RNA, 19 nt, Artificial Sequence
  Description of Artificial Sequence: Synthetic oligonucleotide
  Antisense strand to SEQ ID NO: 2195474
gaauucccgaguaagcugc

SEQ ID NO: 2195476 - RNA, 19 nt, Artificial Sequence
  Description of Artificial Sequence: Synthetic oligonucleotide
  Sense strand starting at position 1432 of SEQ ID NO: 1883463
gugcgucuugcccggacau

SEQ ID NO: 2195477 - RNA, 19 nt, Artificial Sequence
  Description of Artificial Sequence: Synthetic oligonucleotide
  Antisense strand to SEQ ID NO: 2195476
auguccgggcaagacgcac

SEQ ID NO: 2195478 - RNA, 19 nt, Artificial Sequence
  Description of Artificial Sequence: Synthetic oligonucleotide
  Sense strand starting at position 1714 of SEQ ID NO: 1883463
agggaacgcucuuauaguc

SEQ ID NO: 2195479 - RNA, 19 nt, Artificial Sequence
  Description of Artificial Sequence: Synthetic oligonucleotide
  Antisense strand to SEQ ID NO: 2195478
gacuauaagagcguucccu

SEQ ID NO: 2195480 - RNA, 19 nt, Artificial Sequence
  Description of Artificial Sequence: Synthetic oligonucleotide
  Sense strand starting at position 1768 of SEQ ID NO: 1883463
cgggcaucgucgguguauu

SEQ ID NO: 2195481 - RNA, 19 nt, Artificial Sequence
  Description of Artificial Sequence: Synthetic oligonucleotide
  Antisense strand to SEQ ID NO: 2195480
aauacaccgacgaugcccg

SEQ ID NO: 2195482 - RNA, 19 nt, Artificial Sequence
  Description of Artificial Sequence: Synthetic oligonucleotide
  Sense strand starting at position 1769 of SEQ ID NO: 1883463
gggcaucgucgguguauuu

SEQ ID NO: 2195483 - RNA, 19 nt, Artificial Sequence
  Description of Artificial Sequence: Synthetic oligonucleotide
  Antisense strand to SEQ ID NO: 2195482
aaauacaccgacgaugccc

SEQ ID NO: 2195484 - RNA, 19 nt, Artificial Sequence
  Description of Artificial Sequence: Synthetic oligonucleotide
  Sense strand starting at position 1823 of SEQ ID NO: 1883463
ugcugauuuauguguccag

SEQ ID NO: 2195485 - RNA, 19 nt, Artificial Sequence
  Description of Artificial Sequence: Synthetic oligonucleotide
  Antisense strand to SEQ ID NO: 2195484
cuggacacauaaaucagca

SEQ ID NO: 2195486 - RNA, 19 nt, Artificial Sequence
  Description of Artificial Sequence: Synthetic oligonucleotide
  Sense strand starting at position 1826 of SEQ ID NO: 1883463
ugauuuauguguccaggcu

SEQ ID NO: 2195487 - RNA, 19 nt, Artificial Sequence
  Description of Artificial Sequence: Synthetic oligonucleotide
  Antisense strand to SEQ ID NO: 2195486
agccuggacacauaaauca

SEQ ID NO: 2195488 - RNA, 19 nt, Artificial Sequence
  Description of Artificial Sequence: Synthetic oligonucleotide
  Sense strand starting at position 1937 of SEQ ID NO: 1883463
accacagguuggugacaau

SEQ ID NO: 2195489 - RNA, 19 nt, Artificial Sequence
  Description of Artificial Sequence: Synthetic oligonucleotide
  Antisense strand to SEQ ID NO: 2195488
auugucaccaaccuguggu

SEQ ID NO: 2195490 - RNA, 19 nt, Artificial Sequence
  Description of Artificial Sequence: Synthetic oligonucleotide
  Sense strand starting at position 1940 of SEQ ID NO: 1883463
acagguuggugacaauaaa

SEQ ID NO: 2195491 - RNA, 19 nt, Artificial Sequence
  Description of Artificial Sequence: Synthetic oligonucleotide
  Antisense strand to SEQ ID NO: 2195490
uuuauugucaccaaccugu

SEQ ID NO: 2195492 - RNA, 19 nt, Artificial Sequence
  Description of Artificial Sequence: Synthetic oligonucleotide
  Sense strand starting at position 1956 of SEQ ID NO: 1883463
aaauaagagucucgucaac

SEQ ID NO: 2195493 - RNA, 19 nt, Artificial Sequence
  Description of Artificial Sequence: Synthetic oligonucleotide
  Antisense strand to SEQ ID NO: 2195492
guugacgagacucuuauuu

SEQ ID NO: 2195494 - RNA, 19 nt, Artificial Sequence
  Description of Artificial Sequence: Synthetic oligonucleotide
  Sense strand starting at position 2159 of SEQ ID NO: 1883463
gcgcgcuuggcugugaaca

SEQ ID NO: 2195495 - RNA, 19 nt, Artificial Sequence
  Description of Artificial Sequence: Synthetic oligonucleotide
  Antisense strand to SEQ ID NO: 2195494
uguucacagccaagcgcgc

SEQ ID NO: 2195496 - RNA, 19 nt, Artificial Sequence
  Description of Artificial Sequence: Synthetic oligonucleotide
  Sense strand starting at position 2172 of SEQ ID NO: 1883463
ugaacagggucuugagguu

SEQ ID NO: 2195497 - RNA, 19 nt, Artificial Sequence
  Description of Artificial Sequence: Synthetic oligonucleotide
  Antisense strand to SEQ ID NO: 2195496
aaccucaagacccuguuca

SEQ ID NO: 2195498 - RNA, 19 nt, Artificial Sequence
  Description of Artificial Sequence: Synthetic oligonucleotide
  Sense strand starting at position 2682 of SEQ ID NO: 1883463
uugucacuagucuaggaaa

SEQ ID NO: 2195499 - RNA, 19 nt, Artificial Sequence
  Description of Artificial Sequence: Synthetic oligonucleotide
  Antisense strand to SEQ ID NO: 2195498
uuuccuagacuagugacaa

SEQ ID NO: 2195500 - RNA, 19 nt, Artificial Sequence
  Description of Artificial Sequence: Synthetic oligonucleotide
  Sense strand starting at position 2684 of SEQ ID NO: 1883463
gucacuagucuaggaaaua

SEQ ID NO: 2195501 - RNA, 19 nt, Artificial Sequence
  Description of Artificial Sequence: Synthetic oligonucleotide
  Antisense strand to SEQ ID NO: 2195500
uauuuccuagacuagugac

SEQ ID NO: 2195502 - RNA, 19 nt, Artificial Sequence
  Description of Artificial Sequence: Synthetic oligonucleotide
  Sense strand starting at position 2685 of SEQ ID NO: 1883463
ucacuagucuaggaaauaa

SEQ ID NO: 2195503 - RNA, 19 nt, Artificial Sequence
  Description of Artificial Sequence: Synthetic oligonucleotide
  Antisense strand to SEQ ID NO: 2195502
uuauuuccuagacuaguga

SEQ ID NO: 2195504 - RNA, 19 nt, Artificial Sequence
  Description of Artificial Sequence: Synthetic oligonucleotide
  Sense strand starting at position 2712 of SEQ ID NO: 1883463
acaucacauuguuauguau

SEQ ID NO: 2195505 - RNA, 19 nt, Artificial Sequence
  Description of Artificial Sequence: Synthetic oligonucleotide
  Antisense strand to SEQ ID NO: 2195504
auacauaacaaugugaugu

SEQ ID NO: 2195506 - RNA, 19 nt, Artificial Sequence
  Description of Artificial Sequence: Synthetic oligonucleotide
  Sense strand starting at position 2743 of SEQ ID NO: 1883463
augguacuguguccggaau

SEQ ID NO: 2195507 - RNA, 19 nt, Artificial Sequence
  Description of Artificial Sequence: Synthetic oligonucleotide
  Antisense strand to SEQ ID NO: 2195506
auuccggacacaguaccau

SEQ ID NO: 2195508 - RNA, 19 nt, Artificial Sequence
  Description of Artificial Sequence: Synthetic oligonucleotide
  Sense strand starting at position 131 of SEQ ID NO: 1883464
gugucaaucuuccugggaa

SEQ ID NO: 2195509 - RNA, 19 nt, Artificial Sequence
  Description of Artificial Sequence: Synthetic oligonucleotide
  Antisense strand to SEQ ID NO: 2195508
uucccaggaagauugacac

SEQ ID NO: 2195510 - RNA, 19 nt, Artificial Sequence
  Description of Artificial Sequence: Synthetic oligonucleotide
  Sense strand starting at position 133 of SEQ ID NO: 1883464
gucaaucuuccugggaauc

SEQ ID NO: 2195511 - RNA, 19 nt, Artificial Sequence
  Description of Artificial Sequence: Synthetic oligonucleotide
  Antisense strand to SEQ ID NO: 2195510
gauucccaggaagauugac

SEQ ID NO: 2195512 - RNA, 19 nt, Artificial Sequence
  Description of Artificial Sequence: Synthetic oligonucleotide
  Sense strand starting at position 134 of SEQ ID NO: 1883464
ucaaucuuccugggaaucu

SEQ ID NO: 2195513 - RNA, 19 nt, Artificial Sequence
  Description of Artificial Sequence: Synthetic oligonucleotide
  Antisense strand to SEQ ID NO: 2195512
agauucccaggaagauuga

SEQ ID NO: 2195514 - RNA, 19 nt, Artificial Sequence
  Description of Artificial Sequence: Synthetic oligonucleotide
  Sense strand starting at position 395 of SEQ ID NO: 1883464
caaggucagcacuggagaa

SEQ ID NO: 2195515 - RNA, 19 nt, Artificial Sequence
  Description of Artificial Sequence: Synthetic oligonucleotide
  Antisense strand to SEQ ID NO: 2195514
uucuccagugcugaccuug

SEQ ID NO: 2195516 - RNA, 19 nt, Artificial Sequence
  Description of Artificial Sequence: Synthetic oligonucleotide
  Sense strand starting at position 407 of SEQ ID NO: 1883464
uggagaaaguuuccuggca

SEQ ID NO: 2195517 - RNA, 19 nt, Artificial Sequence
  Description of Artificial Sequence: Synthetic oligonucleotide
  Antisense strand to SEQ ID NO: 2195516
ugccaggaaacuuucucca

SEQ ID NO: 2195518 - RNA, 19 nt, Artificial Sequence
  Description of Artificial Sequence: Synthetic oligonucleotide
  Sense strand starting at position 408 of SEQ ID NO: 1883464
ggagaaaguuuccuggcaa

SEQ ID NO: 2195519 - RNA, 19 nt, Artificial Sequence
  Description of Artificial Sequence: Synthetic oligonucleotide
  Antisense strand to SEQ ID NO: 2195518
uugccaggaaacuuucucc

SEQ ID NO: 2195520 - RNA, 19 nt, Artificial Sequence
  Description of Artificial Sequence: Synthetic oligonucleotide
  Sense strand starting at position 515 of SEQ ID NO: 1883464
uuuccuguuccuggaaauc

SEQ ID NO: 2195521 - RNA, 19 nt, Artificial Sequence
  Description of Artificial Sequence: Synthetic oligonucleotide
  Antisense strand to SEQ ID NO: 2195520
gauuuccaggaacaggaaa

SEQ ID NO: 2195522 - RNA, 19 nt, Artificial Sequence
  Description of Artificial Sequence: Synthetic oligonucleotide
  Sense strand starting at position 759 of SEQ ID NO: 1883464
cugauugcuuauuuggcaa

SEQ ID NO: 2195523 - RNA, 19 nt, Artificial Sequence
  Description of Artificial Sequence: Synthetic oligonucleotide
  Antisense strand to SEQ ID NO: 2195522
uugccaaauaagcaaucag

SEQ ID NO: 2195524 - RNA, 19 nt, Artificial Sequence
  Description of Artificial Sequence: Synthetic oligonucleotide
  Sense strand starting at position 805 of SEQ ID NO: 1883464
cccagcauuggcuaugaga

SEQ ID NO: 2195525 - RNA, 19 nt, Artificial Sequence
  Description of Artificial Sequence: Synthetic oligonucleotide
  Antisense strand to SEQ ID NO: 2195524
ucucauagccaaugcuggg

SEQ ID NO: 2195526 - RNA, 19 nt, Artificial Sequence
  Description of Artificial Sequence: Synthetic oligonucleotide
  Sense strand starting at position 807 of SEQ ID NO: 1883464
cagcauuggcuaugagaug

SEQ ID NO: 2195527 - RNA, 19 nt, Artificial Sequence
  Description of Artificial Sequence: Synthetic oligonucleotide
  Antisense strand to SEQ ID NO: 2195526
caucucauagccaaugcug

SEQ ID NO: 2195528 - RNA, 19 nt, Artificial Sequence
  Description of Artificial Sequence: Synthetic oligonucleotide
  Sense strand starting at position 948 of SEQ ID NO: 1883464
aggaauaacugcuucuaaa

SEQ ID NO: 2195529 - RNA, 19 nt, Artificial Sequence
  Description of Artificial Sequence: Synthetic oligonucleotide
  Antisense strand to SEQ ID NO: 2195528
uuuagaagcaguuauuccu

SEQ ID NO: 2195530 - RNA, 19 nt, Artificial Sequence
  Description of Artificial Sequence: Synthetic oligonucleotide
  Sense strand starting at position 1014 of SEQ ID NO: 1883464
cuagcaauuucuguaaguu

SEQ ID NO: 2195531 - RNA, 19 nt, Artificial Sequence
  Description of Artificial Sequence: Synthetic oligonucleotide
  Antisense strand to SEQ ID NO: 2195530
aacuuacagaaauugcuag

SEQ ID NO: 2195532 - RNA, 19 nt, Artificial Sequence
  Description of Artificial Sequence: Synthetic oligonucleotide
  Sense strand starting at position 1057 of SEQ ID NO: 1883464
ccaggacagucauuagcaa

SEQ ID NO: 2195533 - RNA, 19 nt, Artificial Sequence
  Description of Artificial Sequence: Synthetic oligonucleotide
  Antisense strand to SEQ ID NO: 2195532
uugcuaaugacuguccugg

SEQ ID NO: 2195534 - RNA, 19 nt, Artificial Sequence
  Description of Artificial Sequence: Synthetic oligonucleotide
  Sense strand starting at position 1086 of SEQ ID NO: 1883464
ugagucagugcuuaaccau

SEQ ID NO: 2195535 - RNA, 19 nt, Artificial Sequence
  Description of Artificial Sequence: Synthetic oligonucleotide
  Antisense strand to SEQ ID NO: 2195534
augguuaagcacugacuca

SEQ ID NO: 2195536 - RNA, 19 nt, Artificial Sequence
  Description of Artificial Sequence: Synthetic oligonucleotide
  Sense strand starting at position 1213 of SEQ ID NO: 1883464
caaagugagcuuggaauau

SEQ ID NO: 2195537 - RNA, 19 nt, Artificial Sequence
  Description of Artificial Sequence: Synthetic oligonucleotide
  Antisense strand to SEQ ID NO: 2195536
auauuccaagcucacuuug

SEQ ID NO: 2195538 - RNA, 19 nt, Artificial Sequence
  Description of Artificial Sequence: Synthetic oligonucleotide
  Sense strand starting at position 1383 of SEQ ID NO: 1883464
ccugguacaucuuuacacu

SEQ ID NO: 2195539 - RNA, 19 nt, Artificial Sequence
  Description of Artificial Sequence: Synthetic oligonucleotide
  Antisense strand to SEQ ID NO: 2195538
aguguaaagauguaccagg

SEQ ID NO: 2195540 - RNA, 19 nt, Artificial Sequence
  Description of Artificial Sequence: Synthetic oligonucleotide
  Sense strand starting at position 1384 of SEQ ID NO: 1883464
cugguacaucuuuacacua

SEQ ID NO: 2195541 - RNA, 19 nt, Artificial Sequence
  Description of Artificial Sequence: Synthetic oligonucleotide
  Antisense strand to SEQ ID NO: 2195540
uaguguaaagauguaccag

SEQ ID NO: 2195542 - RNA, 19 nt, Artificial Sequence
  Description of Artificial Sequence: Synthetic oligonucleotide
  Sense strand starting at position 1426 of SEQ ID NO: 1883464
ccaaguuaugucuagguuu

SEQ ID NO: 2195543 - RNA, 19 nt, Artificial Sequence
  Description of Artificial Sequence: Synthetic oligonucleotide
  Antisense strand to SEQ ID NO: 2195542
aaaccuagacauaacuugg

SEQ ID NO: 2195544 - RNA, 19 nt, Artificial Sequence
  Description of Artificial Sequence: Synthetic oligonucleotide
  Sense strand starting at position 1480 of SEQ ID NO: 1883464
uuaccaaauuucugaagag

SEQ ID NO: 2195545 - RNA, 19 nt, Artificial Sequence
  Description of Artificial Sequence: Synthetic oligonucleotide
  Antisense strand to SEQ ID NO: 2195544
cucuucagaaauuugguaa

SEQ ID NO: 2195546 - RNA, 19 nt, Artificial Sequence
  Description of Artificial Sequence: Synthetic oligonucleotide
  Sense strand starting at position 1500 of SEQ ID NO: 1883464
aggugauccggguggagau

SEQ ID NO: 2195547 - RNA, 19 nt, Artificial Sequence
  Description of Artificial Sequence: Synthetic oligonucleotide
  Antisense strand to SEQ ID NO: 2195546
aucuccacccggaucaccu

SEQ ID NO: 2195548 - RNA, 19 nt, Artificial Sequence
  Description of Artificial Sequence: Synthetic oligonucleotide
  Sense strand starting at position 1583 of SEQ ID NO: 1883464
acugguaguccucauauaa

SEQ ID NO: 2195549 - RNA, 19 nt, Artificial Sequence
  Description of Artificial Sequence: Synthetic oligonucleotide
  Antisense strand to SEQ ID NO: 2195548
uuauaugaggacuaccagu

SEQ ID NO: 2195550 - RNA, 19 nt, Artificial Sequence
  Description of Artificial Sequence: Synthetic oligonucleotide
  Sense strand starting at position 1649 of SEQ ID NO: 1883464
gucuaaucgccugauauca

SEQ ID NO: 2195551 - RNA, 19 nt, Artificial Sequence
  Description of Artificial Sequence: Synthetic oligonucleotide
  Antisense strand to SEQ ID NO: 2195550
ugauaucaggcgauuagac

SEQ ID NO: 2195552 - RNA, 19 nt, Artificial Sequence
  Description of Artificial Sequence: Synthetic oligonucleotide
  Sense strand starting at position 1804 of SEQ ID NO: 1883464
uccugauaagcagaccuau

SEQ ID NO: 2195553 - RNA, 19 nt, Artificial Sequence
  Description of Artificial Sequence: Synthetic oligonucleotide
  Antisense strand to SEQ ID NO: 2195552
auaggucugcuuaucagga

SEQ ID NO: 2195554 - RNA, 19 nt, Artificial Sequence
  Description of Artificial Sequence: Synthetic oligonucleotide
  Sense strand starting at position 2082 of SEQ ID NO: 1883464
cuuaaucuucuaggacaag

SEQ ID NO: 2195555 - RNA, 19 nt, Artificial Sequence
  Description of Artificial Sequence: Synthetic oligonucleotide
  Antisense strand to SEQ ID NO: 2195554
cuuguccuagaagauuaag

SEQ ID NO: 2195556 - RNA, 19 nt, Artificial Sequence
  Description of Artificial Sequence: Synthetic oligonucleotide
  Sense strand starting at position 2130 of SEQ ID NO: 1883464
aaugccaucugagugauac

SEQ ID NO: 2195557 - RNA, 19 nt, Artificial Sequence
  Description of Artificial Sequence: Synthetic oligonucleotide
  Antisense strand to SEQ ID NO: 2195556
guaucacucagauggcauu

SEQ ID NO: 2195558 - RNA, 19 nt, Artificial Sequence
  Description of Artificial Sequence: Synthetic oligonucleotide
  Sense strand starting at position 2131 of SEQ ID NO: 1883464
augccaucugagugauacu

SEQ ID NO: 2195559 - RNA, 19 nt, Artificial Sequence
  Description of Artificial Sequence: Synthetic oligonucleotide
  Antisense strand to SEQ ID NO: 2195558
aguaucacucagauggcau

SEQ ID NO: 2195560 - RNA, 19 nt, Artificial Sequence
  Description of Artificial Sequence: Synthetic oligonucleotide
  Sense strand starting at position 2242 of SEQ ID NO: 1883464
gcuguauuuccaugauuac

SEQ ID NO: 2195561 - RNA, 19 nt, Artificial Sequence
  Description of Artificial Sequence: Synthetic oligonucleotide
  Antisense strand to SEQ ID NO: 2195560
guaaucauggaaauacagc

SEQ ID NO: 2195562 - RNA, 19 nt, Artificial Sequence
  Description of Artificial Sequence: Synthetic oligonucleotide
  Sense strand starting at position 2454 of SEQ ID NO: 1883464
ucugcagagcugcaauaaa

SEQ ID NO: 2195563 - RNA, 19 nt, Artificial Sequence
  Description of Artificial Sequence: Synthetic oligonucleotide
  Antisense strand to SEQ ID NO: 2195562
uuuauugcagcucugcaga

SEQ ID NO: 2195564 - RNA, 19 nt, Artificial Sequence
  Description of Artificial Sequence: Synthetic oligonucleotide
  Sense strand starting at position 2670 of SEQ ID NO: 1883464
ugggcaaugaucuguuacu

SEQ ID NO: 2195565 - RNA, 19 nt, Artificial Sequence
  Description of Artificial Sequence: Synthetic oligonucleotide
  Antisense strand to SEQ ID NO: 2195564
aguaacagaucauugccca

SEQ ID NO: 2195566 - RNA, 19 nt, Artificial Sequence
  Description of Artificial Sequence: Synthetic oligonucleotide
  Sense strand starting at position 2671 of SEQ ID NO: 1883464
gggcaaugaucuguuacug

SEQ ID NO: 2195567 - RNA, 19 nt, Artificial Sequence
  Description of Artificial Sequence: Synthetic oligonucleotide
  Antisense strand to SEQ ID NO: 2195566
caguaacagaucauugccc

SEQ ID NO: 2195568 - RNA, 19 nt, Artificial Sequence
  Description of Artificial Sequence: Synthetic oligonucleotide
  Sense strand starting at position 2903 of SEQ ID NO: 1883464
agaauauaugcuggaugau

SEQ ID NO: 2195569 - RNA, 19 nt, Artificial Sequence
  Description of Artificial Sequence: Synthetic oligonucleotide
  Antisense strand to SEQ ID NO: 2195568
aucauccagcauauauucu

SEQ ID NO: 2195570 - RNA, 19 nt, Artificial Sequence
  Description of Artificial Sequence: Synthetic oligonucleotide
  Sense strand starting at position 2949 of SEQ ID NO: 1883464
guuguacucuauuuacagu

SEQ ID NO: 2195571 - RNA, 19 nt, Artificial Sequence
  Description of Artificial Sequence: Synthetic oligonucleotide
  Antisense strand to SEQ ID NO: 2195570
acuguaaauagaguacaac

SEQ ID NO: 2195572 - RNA, 19 nt, Artificial Sequence
  Description of Artificial Sequence: Synthetic oligonucleotide
  Sense strand starting at position 3453 of SEQ ID NO: 1883464
ugaaauccauggccucuua

SEQ ID NO: 2195573 - RNA, 19 nt, Artificial Sequence
  Description of Artificial Sequence: Synthetic oligonucleotide
  Antisense strand to SEQ ID NO: 2195572
uaagaggccauggauuuca

SEQ ID NO: 2195574 - RNA, 19 nt, Artificial Sequence
  Description of Artificial Sequence: Synthetic oligonucleotide
  Sense strand starting at position 3478 of SEQ ID NO: 1883464
caggaaaggcauuggaguu

SEQ ID NO: 2195575 - RNA, 19 nt, Artificial Sequence
  Description of Artificial Sequence: Synthetic oligonucleotide
  Antisense strand to SEQ ID NO: 2195574
aacuccaaugccuuuccug

SEQ ID NO: 2195576 - RNA, 19 nt, Artificial Sequence
  Description of Artificial Sequence: Synthetic oligonucleotide
  Sense strand starting at position 3491 of SEQ ID NO: 1883464
ggaguuaugucccuagacu

SEQ ID NO: 2195577 - RNA, 19 nt, Artificial Sequence
  Description of Artificial Sequence: Synthetic oligonucleotide
  Antisense strand to SEQ ID NO: 2195576
agucuagggacauaacucc

SEQ ID NO: 2195578 - RNA, 19 nt, Artificial Sequence
  Description of Artificial Sequence: Synthetic oligonucleotide
  Sense strand starting at position 3492 of SEQ ID NO: 1883464
gaguuaugucccuagacua

SEQ ID NO: 2195579 - RNA, 19 nt, Artificial Sequence
  Description of Artificial Sequence: Synthetic oligonucleotide
  Antisense strand to SEQ ID NO: 2195578
uagucuagggacauaacuc

SEQ ID NO: 2195580 - RNA, 19 nt, Artificial Sequence
  Description of Artificial Sequence: Synthetic oligonucleotide
  Sense strand starting at position 3551 of SEQ ID NO: 1883464
cucugcauuuggucacuaa

SEQ ID NO: 2195581 - RNA, 19 nt, Artificial Sequence
  Description of Artificial Sequence: Synthetic oligonucleotide
  Antisense strand to SEQ ID NO: 2195580
uuagugaccaaaugcagag

SEQ ID NO: 2195582 - RNA, 19 nt, Artificial Sequence
  Description of Artificial Sequence: Synthetic oligonucleotide
  Sense strand starting at position 3626 of SEQ ID NO: 1883464
aaggcauuagaagguaauu

SEQ ID NO: 2195583 - RNA, 19 nt, Artificial Sequence
  Description of Artificial Sequence: Synthetic oligonucleotide
  Antisense strand to SEQ ID NO: 2195582
aauuaccuucuaaugccuu

SEQ ID NO: 2195584 - RNA, 19 nt, Artificial Sequence
  Description of Artificial Sequence: Synthetic oligonucleotide
  Sense strand starting at position 3743 of SEQ ID NO: 1883464
cacgcucuaccugaaaugu

SEQ ID NO: 2195585 - RNA, 19 nt, Artificial Sequence
  Description of Artificial Sequence: Synthetic oligonucleotide
  Antisense strand to SEQ ID NO: 2195584
acauuucagguagagcgug

SEQ ID NO: 2195586 - RNA, 19 nt, Artificial Sequence
  Description of Artificial Sequence: Synthetic oligonucleotide
  Sense strand starting at position 3961 of SEQ ID NO: 1883464
gcuccuaaucaauguggaa

SEQ ID NO: 2195587 - RNA, 19 nt, Artificial Sequence
  Description of Artificial Sequence: Synthetic oligonucleotide
  Antisense strand to SEQ ID NO: 2195586
uuccacauugauuaggagc

SEQ ID NO: 2195588 - RNA, 19 nt, Artificial Sequence
  Description of Artificial Sequence: Synthetic oligonucleotide
  Sense strand starting at position 1 of SEQ ID NO: 1883466
gucaaacgacaguguguaa

SEQ ID NO: 2195589 - RNA, 19 nt, Artificial Sequence
  Description of Artificial Sequence: Synthetic oligonucleotide
  Antisense strand to SEQ ID NO: 2195588
uuacacacugucguuugac

SEQ ID NO: 2195590 - RNA, 19 nt, Artificial Sequence
  Description of Artificial Sequence: Synthetic oligonucleotide
  Sense strand starting at position 13 of SEQ ID NO: 1883466
uguguaacagauuaguaua

SEQ ID NO: 2195591 - RNA, 19 nt, Artificial Sequence
  Description of Artificial Sequence: Synthetic oligonucleotide
  Antisense strand to SEQ ID NO: 2195590
uauacuaaucuguuacaca

SEQ ID NO: 2195592 - RNA, 19 nt, Artificial Sequence
  Description of Artificial Sequence: Synthetic oligonucleotide
  Sense strand starting at position 127 of SEQ ID NO: 1883466
cccuaagccggcuaacaau

SEQ ID NO: 2195593 - RNA, 19 nt, Artificial Sequence
  Description of Artificial Sequence: Synthetic oligonucleotide
  Antisense strand to SEQ ID NO: 2195592
auuguuagccggcuuaggg

SEQ ID NO: 2195594 - RNA, 19 nt, Artificial Sequence
  Description of Artificial Sequence: Synthetic oligonucleotide
  Sense strand starting at position 159 of SEQ ID NO: 1883466
gugacaagcuuucuaacuc

SEQ ID NO: 2195595 - RNA, 19 nt, Artificial Sequence
  Description of Artificial Sequence: Synthetic oligonucleotide
  Antisense strand to SEQ ID NO: 2195594
gaguuagaaagcuugucac

SEQ ID NO: 2195596 - RNA, 19 nt, Artificial Sequence
  Description of Artificial Sequence: Synthetic oligonucleotide
  Sense strand starting at position 186 of SEQ ID NO: 1883466
gcaugucuacuauguacaa

SEQ ID NO: 2195597 - RNA, 19 nt, Artificial Sequence
  Description of Artificial Sequence: Synthetic oligonucleotide
  Antisense strand to SEQ ID NO: 2195596
uuguacauaguagacaugc

SEQ ID NO: 2195598 - RNA, 19 nt, Artificial Sequence
  Description of Artificial Sequence: Synthetic oligonucleotide
  Sense strand starting at position 197 of SEQ ID NO: 1883466
auguacaagucaucauguu

SEQ ID NO: 2195599 - RNA, 19 nt, Artificial Sequence
  Description of Artificial Sequence: Synthetic oligonucleotide
  Antisense strand to SEQ ID NO: 2195598
aacaugaugacuuguacau

SEQ ID NO: 2195600 - RNA, 19 nt, Artificial Sequence
  Description of Artificial Sequence: Synthetic oligonucleotide
  Sense strand starting at position 198 of SEQ ID NO: 1883466
uguacaagucaucauguua

SEQ ID NO: 2195601 - RNA, 19 nt, Artificial Sequence
  Description of Artificial Sequence: Synthetic oligonucleotide
  Antisense strand to SEQ ID NO: 2195600
uaacaugaugacuuguaca

SEQ ID NO: 2195602 - RNA, 19 nt, Artificial Sequence
  Description of Artificial Sequence: Synthetic oligonucleotide
  Sense strand starting at position 297 of SEQ ID NO: 1883466
auacguuauacagguaaug

SEQ ID NO: 2195603 - RNA, 19 nt, Artificial Sequence
  Description of Artificial Sequence: Synthetic oligonucleotide
  Antisense strand to SEQ ID NO: 2195602
cauuaccuguauaacguau

SEQ ID NO: 2195604 - RNA, 19 nt, Artificial Sequence
  Description of Artificial Sequence: Synthetic oligonucleotide
  Sense strand starting at position 299 of SEQ ID NO: 1883466
acguuauacagguaaugua

SEQ ID NO: 2195605 - RNA, 19 nt, Artificial Sequence
  Description of Artificial Sequence: Synthetic oligonucleotide
  Antisense strand to SEQ ID NO: 2195604
uacauuaccuguauaacgu

SEQ ID NO: 2195606 - RNA, 19 nt, Artificial Sequence
  Description of Artificial Sequence: Synthetic oligonucleotide
  Sense strand starting at position 352 of SEQ ID NO: 1883466
gcauauuguauguaauguu

SEQ ID NO: 2195607 - RNA, 19 nt, Artificial Sequence
  Description of Artificial Sequence: Synthetic oligonucleotide
  Antisense strand to SEQ ID NO: 2195606
aacauuacauacaauaugc

SEQ ID NO: 2195608 - RNA, 19 nt, Artificial Sequence
  Description of Artificial Sequence: Synthetic oligonucleotide
  Sense strand starting at position 368 of SEQ ID NO: 1883466
guuuguaagcacuuguguu

SEQ ID NO: 2195609 - RNA, 19 nt, Artificial Sequence
  Description of Artificial Sequence: Synthetic oligonucleotide
  Antisense strand to SEQ ID NO: 2195608
aacacaagugcuuacaaac

SEQ ID NO: 2195610 - RNA, 19 nt, Artificial Sequence
  Description of Artificial Sequence: Synthetic oligonucleotide
  Sense strand starting at position 380 of SEQ ID NO: 1883466
uuguguuaagucugaaauu

SEQ ID NO: 2195611 - RNA, 19 nt, Artificial Sequence
  Description of Artificial Sequence: Synthetic oligonucleotide
  Antisense strand to SEQ ID NO: 2195610
aauuucagacuuaacacaa

SEQ ID NO: 2195612 - RNA, 19 nt, Artificial Sequence
  Description of Artificial Sequence: Synthetic oligonucleotide
  Sense strand starting at position 389 of SEQ ID NO: 1883466
gucugaaauuaaucugaag

SEQ ID NO: 2195613 - RNA, 19 nt, Artificial Sequence
  Description of Artificial Sequence: Synthetic oligonucleotide
  Antisense strand to SEQ ID NO: 2195612
cuucagauuaauuucagac

SEQ ID NO: 2195614 - RNA, 19 nt, Artificial Sequence
  Description of Artificial Sequence: Synthetic oligonucleotide
  Sense strand starting at position 809 of SEQ ID NO: 1883466
uuuggaauaugguuugauu

SEQ ID NO: 2195615 - RNA, 19 nt, Artificial Sequence
  Description of Artificial Sequence: Synthetic oligonucleotide
  Antisense strand to SEQ ID NO: 2195614
aaucaaaccauauuccaaa

SEQ ID NO: 2195616 - RNA, 19 nt, Artificial Sequence
  Description of Artificial Sequence: Synthetic oligonucleotide
  Sense strand starting at position 909 of SEQ ID NO: 1883466
agugauuccuauccucacu

SEQ ID NO: 2195617 - RNA, 19 nt, Artificial Sequence
  Description of Artificial Sequence: Synthetic oligonucleotide
  Antisense strand to SEQ ID NO: 2195616
agugaggauaggaaucacu

SEQ ID NO: 2195618 - RNA, 19 nt, Artificial Sequence
  Description of Artificial Sequence: Synthetic oligonucleotide
  Sense strand starting at position 1013 of SEQ ID NO: 1883466
ggcuuaugaucagcagaga

SEQ ID NO: 2195619 - RNA, 19 nt, Artificial Sequence
  Description of Artificial Sequence: Synthetic oligonucleotide
  Antisense strand to SEQ ID NO: 2195618
ucucugcugaucauaagcc

SEQ ID NO: 2195620 - RNA, 19 nt, Artificial Sequence
  Description of Artificial Sequence: Synthetic oligonucleotide
  Sense strand starting at position 1014 of SEQ ID NO: 1883466
gcuuaugaucagcagagau

SEQ ID NO: 2195621 - RNA, 19 nt, Artificial Sequence
  Description of Artificial Sequence: Synthetic oligonucleotide
  Antisense strand to SEQ ID NO: 2195620
aucucugcugaucauaagc

SEQ ID NO: 2195622 - RNA, 19 nt, Artificial Sequence
  Description of Artificial Sequence: Synthetic oligonucleotide
  Sense strand starting at position 1027 of SEQ ID NO: 1883466
agagaucucuaggaugaaa

SEQ ID NO: 2195623 - RNA, 19 nt, Artificial Sequence
  Description of Artificial Sequence: Synthetic oligonucleotide
  Antisense strand to SEQ ID NO: 2195622
uuucauccuagagaucucu

SEQ ID NO: 2195624 - RNA, 19 nt, Artificial Sequence
  Description of Artificial Sequence: Synthetic oligonucleotide
  Sense strand starting at position 1125 of SEQ ID NO: 1883466
cacccaacgcuaugguaaa

SEQ ID NO: 2195625 - RNA, 19 nt, Artificial Sequence
  Description of Artificial Sequence: Synthetic oligonucleotide
  Antisense strand to SEQ ID NO: 2195624
uuuaccauagcguugggug

SEQ ID NO: 2195626 - RNA, 19 nt, Artificial Sequence
  Description of Artificial Sequence: Synthetic oligonucleotide
  Sense strand starting at position 1138 of SEQ ID NO: 1883466
gguaaauuagacugaaggu

SEQ ID NO: 2195627 - RNA, 19 nt, Artificial Sequence
  Description of Artificial Sequence: Synthetic oligonucleotide
  Antisense strand to SEQ ID NO: 2195626
accuucagucuaauuuacc

SEQ ID NO: 2195628 - RNA, 19 nt, Artificial Sequence
  Description of Artificial Sequence: Synthetic oligonucleotide
  Sense strand starting at position 1233 of SEQ ID NO: 1883466
ggguuucuaguaugauaaa

SEQ ID NO: 2195629 - RNA, 19 nt, Artificial Sequence
  Description of Artificial Sequence: Synthetic oligonucleotide
  Antisense strand to SEQ ID NO: 2195628
uuuaucauacuagaaaccc

SEQ ID NO: 2195630 - RNA, 19 nt, Artificial Sequence
  Description of Artificial Sequence: Synthetic oligonucleotide
  Sense strand starting at position 1320 of SEQ ID NO: 1883466
ggcagaaagucuuaauuua

SEQ ID NO: 2195631 - RNA, 19 nt, Artificial Sequence
  Description of Artificial Sequence: Synthetic oligonucleotide
  Antisense strand to SEQ ID NO: 2195630
uaaauuaagacuuucugcc

SEQ ID NO: 2195632 - RNA, 19 nt, Artificial Sequence
  Description of Artificial Sequence: Synthetic oligonucleotide
  Sense strand starting at position 1328 of SEQ ID NO: 1883466
gucuuaauuuaugagggag

SEQ ID NO: 2195633 - RNA, 19 nt, Artificial Sequence
  Description of Artificial Sequence: Synthetic oligonucleotide
  Antisense strand to SEQ ID NO: 2195632
cucccucauaaauuaagac

SEQ ID NO: 2195634 - RNA, 19 nt, Artificial Sequence
  Description of Artificial Sequence: Synthetic oligonucleotide
  Sense strand starting at position 2390 of SEQ ID NO: 1883466
ugcaaagaaucucuugaaa

SEQ ID NO: 2195635 - RNA, 19 nt, Artificial Sequence
  Description of Artificial Sequence: Synthetic oligonucleotide
  Antisense strand to SEQ ID NO: 2195634
uuucaagagauucuuugca

SEQ ID NO: 2195636 - RNA, 19 nt, Artificial Sequence
  Description of Artificial Sequence: Synthetic oligonucleotide
  Sense strand starting at position 2538 of SEQ ID NO: 1883466
aaauuaaccgaaggucaga

SEQ ID NO: 2195637 - RNA, 19 nt, Artificial Sequence
  Description of Artificial Sequence: Synthetic oligonucleotide
  Antisense strand to SEQ ID NO: 2195636
ucugaccuucgguuaauuu

SEQ ID NO: 2195638 - RNA, 19 nt, Artificial Sequence
  Description of Artificial Sequence: Synthetic oligonucleotide
  Sense strand starting at position 2593 of SEQ ID NO: 1883466
gcgucauguccguugauca

SEQ ID NO: 2195639 - RNA, 19 nt, Artificial Sequence
  Description of Artificial Sequence: Synthetic oligonucleotide
  Antisense strand to SEQ ID NO: 2195638
ugaucaacggacaugacgc

SEQ ID NO: 2195640 - RNA, 19 nt, Artificial Sequence
  Description of Artificial Sequence: Synthetic oligonucleotide
  Sense strand starting at position 2603 of SEQ ID NO: 1883466
cguugaucaaaggacaguu

SEQ ID NO: 2195641 - RNA, 19 nt, Artificial Sequence
  Description of Artificial Sequence: Synthetic oligonucleotide
  Antisense strand to SEQ ID NO: 2195640
aacuguccuuugaucaacg

SEQ ID NO: 2195642 - RNA, 19 nt, Artificial Sequence
  Description of Artificial Sequence: Synthetic oligonucleotide
  Sense strand starting at position 2690 of SEQ ID NO: 1883466
aguuacucgucuuccauga

SEQ ID NO: 2195643 - RNA, 19 nt, Artificial Sequence
  Description of Artificial Sequence: Synthetic oligonucleotide
  Antisense strand to SEQ ID NO: 2195642
ucauggaagacgaguaacu

SEQ ID NO: 2195644 - RNA, 19 nt, Artificial Sequence
  Description of Artificial Sequence: Synthetic oligonucleotide
  Sense strand starting at position 2695 of SEQ ID NO: 1883466
cucgucuuccaugaaguca

SEQ ID NO: 2195645 - RNA, 19 nt, Artificial Sequence
  Description of Artificial Sequence: Synthetic oligonucleotide
  Antisense strand to SEQ ID NO: 2195644
ugacuucauggaagacgag

SEQ ID NO: 2195646 - RNA, 19 nt, Artificial Sequence
  Description of Artificial Sequence: Synthetic oligonucleotide
  Sense strand starting at position 2750 of SEQ ID NO: 1883466
ucaauuucguaagcuaucu

SEQ ID NO: 2195647 - RNA, 19 nt, Artificial Sequence
  Description of Artificial Sequence: Synthetic oligonucleotide
  Antisense strand to SEQ ID NO: 2195646
agauagcuuacgaaauuga

SEQ ID NO: 2195648 - RNA, 19 nt, Artificial Sequence
  Description of Artificial Sequence: Synthetic oligonucleotide
  Sense strand starting at position 2809 of SEQ ID NO: 1883466
gacguuuaggccgaagcau

SEQ ID NO: 2195649 - RNA, 19 nt, Artificial Sequence
  Description of Artificial Sequence: Synthetic oligonucleotide
  Antisense strand to SEQ ID NO: 2195648
augcuucggccuaaacguc

SEQ ID NO: 2195650 - RNA, 19 nt, Artificial Sequence
  Description of Artificial Sequence: Synthetic oligonucleotide
  Sense strand starting at position 2881 of SEQ ID NO: 1883466
acuuguaguuaccugaagu

SEQ ID NO: 2195651 - RNA, 19 nt, Artificial Sequence
  Description of Artificial Sequence: Synthetic oligonucleotide
  Antisense strand to SEQ ID NO: 2195650
acuucagguaacuacaagu

SEQ ID NO: 2195652 - RNA, 19 nt, Artificial Sequence
  Description of Artificial Sequence: Synthetic oligonucleotide
  Sense strand starting at position 2882 of SEQ ID NO: 1883466
cuuguaguuaccugaagug

SEQ ID NO: 2195653 - RNA, 19 nt, Artificial Sequence
  Description of Artificial Sequence: Synthetic oligonucleotide
  Antisense strand to SEQ ID NO: 2195652
cacuucagguaacuacaag

SEQ ID NO: 2195654 - RNA, 19 nt, Artificial Sequence
  Description of Artificial Sequence: Synthetic oligonucleotide
  Sense strand starting at position 2896 of SEQ ID NO: 1883466
aagugacuguaugcuauua

SEQ ID NO: 2195655 - RNA, 19 nt, Artificial Sequence
  Description of Artificial Sequence: Synthetic oligonucleotide
  Antisense strand to SEQ ID NO: 2195654
uaauagcauacagucacuu

SEQ ID NO: 2195656 - RNA, 19 nt, Artificial Sequence
  Description of Artificial Sequence: Synthetic oligonucleotide
  Sense strand starting at position 2924 of SEQ ID NO: 1883466
uacugucgugcuguaugua

SEQ ID NO: 2195657 - RNA, 19 nt, Artificial Sequence
  Description of Artificial Sequence: Synthetic oligonucleotide
  Antisense strand to SEQ ID NO: 2195656
uacauacagcacgacagua

SEQ ID NO: 2195658 - RNA, 19 nt, Artificial Sequence
  Description of Artificial Sequence: Synthetic oligonucleotide
  Sense strand starting at position 3012 of SEQ ID NO: 1883466
ugugaucucuucuauuuga

SEQ ID NO: 2195659 - RNA, 19 nt, Artificial Sequence
  Description of Artificial Sequence: Synthetic oligonucleotide
  Antisense strand to SEQ ID NO: 2195658
ucaaauagaagagaucaca

SEQ ID NO: 2195660 - RNA, 19 nt, Artificial Sequence
  Description of Artificial Sequence: Synthetic oligonucleotide
  Sense strand starting at position 3131 of SEQ ID NO: 1883466
acaagcuccaggugguaaa

SEQ ID NO: 2195661 - RNA, 19 nt, Artificial Sequence
  Description of Artificial Sequence: Synthetic oligonucleotide
  Antisense strand to SEQ ID NO: 2195660
uuuaccaccuggagcuugu

SEQ ID NO: 2195662 - RNA, 19 nt, Artificial Sequence
  Description of Artificial Sequence: Synthetic oligonucleotide
  Sense strand starting at position 3617 of SEQ ID NO: 1883466
guuccaggugggcaaagau

SEQ ID NO: 2195663 - RNA, 19 nt, Artificial Sequence
  Description of Artificial Sequence: Synthetic oligonucleotide
  Antisense strand to SEQ ID NO: 2195662
aucuuugcccaccuggaac

SEQ ID NO: 2195664 - RNA, 19 nt, Artificial Sequence
  Description of Artificial Sequence: Synthetic oligonucleotide
  Sense strand starting at position 3923 of SEQ ID NO: 1883466
guacuaauuuguggacaaa

SEQ ID NO: 2195665 - RNA, 19 nt, Artificial Sequence
  Description of Artificial Sequence: Synthetic oligonucleotide
  Antisense strand to SEQ ID NO: 2195664
uuuguccacaaauuaguac

SEQ ID NO: 2195666 - RNA, 19 nt, Artificial Sequence
  Description of Artificial Sequence: Synthetic oligonucleotide
  Sense strand starting at position 3958 of SEQ ID NO: 1883466
gugaguguccguuacaaau

SEQ ID NO: 2195667 - RNA, 19 nt, Artificial Sequence
  Description of Artificial Sequence: Synthetic oligonucleotide
  Antisense strand to SEQ ID NO: 2195666
auuuguaacggacacucac

SEQ ID NO: 2195668 - RNA, 19 nt, Artificial Sequence
  Description of Artificial Sequence: Synthetic oligonucleotide
  Sense strand starting at position 100 of SEQ ID NO: 1883465
acagcaaagcuuuggagua

SEQ ID NO: 2195669 - RNA, 19 nt, Artificial Sequence
  Description of Artificial Sequence: Synthetic oligonucleotide
  Antisense strand to SEQ ID NO: 2195668
uacuccaaagcuuugcugu

SEQ ID NO: 2195670 - RNA, 19 nt, Artificial Sequence
  Description of Artificial Sequence: Synthetic oligonucleotide
  Sense strand starting at position 329 of SEQ ID NO: 1883465
uguugauucuuaccaccca

SEQ ID NO: 2195671 - RNA, 19 nt, Artificial Sequence
  Description of Artificial Sequence: Synthetic oligonucleotide
  Antisense strand to SEQ ID NO: 2195670
ugggugguaagaaucaaca

SEQ ID NO: 2195672 - RNA, 19 nt, Artificial Sequence
  Description of Artificial Sequence: Synthetic oligonucleotide
  Sense strand starting at position 460 of SEQ ID NO: 1883465
gucaaacgacaguguguaa

SEQ ID NO: 2195673 - RNA, 19 nt, Artificial Sequence
  Description of Artificial Sequence: Synthetic oligonucleotide
  Antisense strand to SEQ ID NO: 2195672
uuacacacugucguuugac

SEQ ID NO: 2195674 - RNA, 19 nt, Artificial Sequence
  Description of Artificial Sequence: Synthetic oligonucleotide
  Sense strand starting at position 472 of SEQ ID NO: 1883465
uguguaacagauuaguaua

SEQ ID NO: 2195675 - RNA, 19 nt, Artificial Sequence
  Description of Artificial Sequence: Synthetic oligonucleotide
  Antisense strand to SEQ ID NO: 2195674
uauacuaaucuguuacaca

SEQ ID NO: 2195676 - RNA, 19 nt, Artificial Sequence
  Description of Artificial Sequence: Synthetic oligonucleotide
  Sense strand starting at position 586 of SEQ ID NO: 1883465
cccuaagccggcuaacaau

SEQ ID NO: 2195677 - RNA, 19 nt, Artificial Sequence
  Description of Artificial Sequence: Synthetic oligonucleotide
  Antisense strand to SEQ ID NO: 2195676
auuguuagccggcuuaggg

SEQ ID NO: 2195678 - RNA, 19 nt, Artificial Sequence
  Description of Artificial Sequence: Synthetic oligonucleotide
  Sense strand starting at position 618 of SEQ ID NO: 1883465
gugacaagcuuucuaacuc

SEQ ID NO: 2195679 - RNA, 19 nt, Artificial Sequence
  Description of Artificial Sequence: Synthetic oligonucleotide
  Antisense strand to SEQ ID NO: 2195678
gaguuagaaagcuugucac

SEQ ID NO: 2195680 - RNA, 19 nt, Artificial Sequence
  Description of Artificial Sequence: Synthetic oligonucleotide
  Sense strand starting at position 645 of SEQ ID NO: 1883465
gcaugucuacuauguacaa

SEQ ID NO: 2195681 - RNA, 19 nt, Artificial Sequence
  Description of Artificial Sequence: Synthetic oligonucleotide
  Antisense strand to SEQ ID NO: 2195680
uuguacauaguagacaugc

SEQ ID NO: 2195682 - RNA, 19 nt, Artificial Sequence
  Description of Artificial Sequence: Synthetic oligonucleotide
  Sense strand starting at position 656 of SEQ ID NO: 1883465
auguacaagucaucauguu

SEQ ID NO: 2195683 - RNA, 19 nt, Artificial Sequence
  Description of Artificial Sequence: Synthetic oligonucleotide
  Antisense strand to SEQ ID NO: 2195682
aacaugaugacuuguacau

SEQ ID NO: 2195684 - RNA, 19 nt, Artificial Sequence
  Description of Artificial Sequence: Synthetic oligonucleotide
  Sense strand starting at position 657 of SEQ ID NO: 1883465
uguacaagucaucauguua

SEQ ID NO: 2195685 - RNA, 19 nt, Artificial Sequence
  Description of Artificial Sequence: Synthetic oligonucleotide
  Antisense strand to SEQ ID NO: 2195684
uaacaugaugacuuguaca

SEQ ID NO: 2195686 - RNA, 19 nt, Artificial Sequence
  Description of Artificial Sequence: Synthetic oligonucleotide
  Sense strand starting at position 756 of SEQ ID NO: 1883465
auacguuauacagguaaug

SEQ ID NO: 2195687 - RNA, 19 nt, Artificial Sequence
  Description of Artificial Sequence: Synthetic oligonucleotide
  Antisense strand to SEQ ID NO: 2195686
cauuaccuguauaacguau

SEQ ID NO: 2195688 - RNA, 19 nt, Artificial Sequence
  Description of Artificial Sequence: Synthetic oligonucleotide
  Sense strand starting at position 758 of SEQ ID NO: 1883465
acguuauacagguaaugua

SEQ ID NO: 2195689 - RNA, 19 nt, Artificial Sequence
  Description of Artificial Sequence: Synthetic oligonucleotide
  Antisense strand to SEQ ID NO: 2195688
uacauuaccuguauaacgu

SEQ ID NO: 2195690 - RNA, 19 nt, Artificial Sequence
  Description of Artificial Sequence: Synthetic oligonucleotide
  Sense strand starting at position 810 of SEQ ID NO: 1883465
agcauauuguauguaaugu

SEQ ID NO: 2195691 - RNA, 19 nt, Artificial Sequence
  Description of Artificial Sequence: Synthetic oligonucleotide
  Antisense strand to SEQ ID NO: 2195690
acauuacauacaauaugcu

SEQ ID NO: 2195692 - RNA, 19 nt, Artificial Sequence
  Description of Artificial Sequence: Synthetic oligonucleotide
  Sense strand starting at position 811 of SEQ ID NO: 1883465
gcauauuguauguaauguu

SEQ ID NO: 2195693 - RNA, 19 nt, Artificial Sequence
  Description of Artificial Sequence: Synthetic oligonucleotide
  Antisense strand to SEQ ID NO: 2195692
aacauuacauacaauaugc

SEQ ID NO: 2195694 - RNA, 19 nt, Artificial Sequence
  Description of Artificial Sequence: Synthetic oligonucleotide
  Sense strand starting at position 827 of SEQ ID NO: 1883465
guuuguaagcacuuguguu

SEQ ID NO: 2195695 - RNA, 19 nt, Artificial Sequence
  Description of Artificial Sequence: Synthetic oligonucleotide
  Antisense strand to SEQ ID NO: 2195694
aacacaagugcuuacaaac

SEQ ID NO: 2195696 - RNA, 19 nt, Artificial Sequence
  Description of Artificial Sequence: Synthetic oligonucleotide
  Sense strand starting at position 839 of SEQ ID NO: 1883465
uuguguuaagucugaaauu

SEQ ID NO: 2195697 - RNA, 19 nt, Artificial Sequence
  Description of Artificial Sequence: Synthetic oligonucleotide
  Antisense strand to SEQ ID NO: 2195696
aauuucagacuuaacacaa

SEQ ID NO: 2195698 - RNA, 19 nt, Artificial Sequence
  Description of Artificial Sequence: Synthetic oligonucleotide
  Sense strand starting at position 848 of SEQ ID NO: 1883465
gucugaaauuaaucugaag

SEQ ID NO: 2195699 - RNA, 19 nt, Artificial Sequence
  Description of Artificial Sequence: Synthetic oligonucleotide
  Antisense strand to SEQ ID NO: 2195698
cuucagauuaauuucagac

SEQ ID NO: 2195700 - RNA, 19 nt, Artificial Sequence
  Description of Artificial Sequence: Synthetic oligonucleotide
  Sense strand starting at position 1268 of SEQ ID NO: 1883465
uuuggaauaugguuugauu

SEQ ID NO: 2195701 - RNA, 19 nt, Artificial Sequence
  Description of Artificial Sequence: Synthetic oligonucleotide
  Antisense strand to SEQ ID NO: 2195700
aaucaaaccauauuccaaa

SEQ ID NO: 2195702 - RNA, 19 nt, Artificial Sequence
  Description of Artificial Sequence: Synthetic oligonucleotide
  Sense strand starting at position 1368 of SEQ ID NO: 1883465
agugauuccuauccucacu

SEQ ID NO: 2195703 - RNA, 19 nt, Artificial Sequence
  Description of Artificial Sequence: Synthetic oligonucleotide
  Antisense strand to SEQ ID NO: 2195702
agugaggauaggaaucacu

SEQ ID NO: 2195704 - RNA, 19 nt, Artificial Sequence
  Description of Artificial Sequence: Synthetic oligonucleotide
  Sense strand starting at position 1472 of SEQ ID NO: 1883465
ggcuuaugaucagcagaga

SEQ ID NO: 2195705 - RNA, 19 nt, Artificial Sequence
  Description of Artificial Sequence: Synthetic oligonucleotide
  Antisense strand to SEQ ID NO: 2195704
ucucugcugaucauaagcc

SEQ ID NO: 2195706 - RNA, 19 nt, Artificial Sequence
  Description of Artificial Sequence: Synthetic oligonucleotide
  Sense strand starting at position 1473 of SEQ ID NO: 1883465
gcuuaugaucagcagagau

SEQ ID NO: 2195707 - RNA, 19 nt, Artificial Sequence
  Description of Artificial Sequence: Synthetic oligonucleotide
  Antisense strand to SEQ ID NO: 2195706
aucucugcugaucauaagc

SEQ ID NO: 2195708 - RNA, 19 nt, Artificial Sequence
  Description of Artificial Sequence: Synthetic oligonucleotide
  Sense strand starting at position 1486 of SEQ ID NO: 1883465
agagaucucuaggaugaaa

SEQ ID NO: 2195709 - RNA, 19 nt, Artificial Sequence
  Description of Artificial Sequence: Synthetic oligonucleotide
  Antisense strand to SEQ ID NO: 2195708
uuucauccuagagaucucu

SEQ ID NO: 2195710 - RNA, 19 nt, Artificial Sequence
  Description of Artificial Sequence: Synthetic oligonucleotide
  Sense strand starting at position 1584 of SEQ ID NO: 1883465
cacccaacgcuaugguaaa

SEQ ID NO: 2195711 - RNA, 19 nt, Artificial Sequence
  Description of Artificial Sequence: Synthetic oligonucleotide
  Antisense strand to SEQ ID NO: 2195710
uuuaccauagcguugggug

SEQ ID NO: 2195712 - RNA, 19 nt, Artificial Sequence
  Description of Artificial Sequence: Synthetic oligonucleotide
  Sense strand starting at position 1597 of SEQ ID NO: 1883465
gguaaauuagacugaaggu

SEQ ID NO: 2195713 - RNA, 19 nt, Artificial Sequence
  Description of Artificial Sequence: Synthetic oligonucleotide
  Antisense strand to SEQ ID NO: 2195712
accuucagucuaauuuacc

SEQ ID NO: 2195714 - RNA, 19 nt, Artificial Sequence
  Description of Artificial Sequence: Synthetic oligonucleotide
  Sense strand starting at position 1692 of SEQ ID NO: 1883465
ggguuucuaguaugauaaa

SEQ ID NO: 2195715 - RNA, 19 nt, Artificial Sequence
  Description of Artificial Sequence: Synthetic oligonucleotide
  Antisense strand to SEQ ID NO: 2195714
uuuaucauacuagaaaccc

SEQ ID NO: 2195716 - RNA, 19 nt, Artificial Sequence
  Description of Artificial Sequence: Synthetic oligonucleotide
  Sense strand starting at position 1779 of SEQ ID NO: 1883465
ggcagaaagucuuaauuua

SEQ ID NO: 2195717 - RNA, 19 nt, Artificial Sequence
  Description of Artificial Sequence: Synthetic oligonucleotide
  Antisense strand to SEQ ID NO: 2195716
uaaauuaagacuuucugcc

SEQ ID NO: 2195718 - RNA, 19 nt, Artificial Sequence
  Description of Artificial Sequence: Synthetic oligonucleotide
  Sense strand starting at position 1787 of SEQ ID NO: 1883465
gucuuaauuuaugagggag

SEQ ID NO: 2195719 - RNA, 19 nt, Artificial Sequence
  Description of Artificial Sequence: Synthetic oligonucleotide
  Antisense strand to SEQ ID NO: 2195718
cucccucauaaauuaagac

SEQ ID NO: 2195720 - RNA, 19 nt, Artificial Sequence
  Description of Artificial Sequence: Synthetic oligonucleotide
  Sense strand starting at position 2849 of SEQ ID NO: 1883465
ugcaaagaaucucuugaaa

SEQ ID NO: 2195721 - RNA, 19 nt, Artificial Sequence
  Description of Artificial Sequence: Synthetic oligonucleotide
  Antisense strand to SEQ ID NO: 2195720
uuucaagagauucuuugca

SEQ ID NO: 2195722 - RNA, 19 nt, Artificial Sequence
  Description of Artificial Sequence: Synthetic oligonucleotide
  Sense strand starting at position 2997 of SEQ ID NO: 1883465
aaauuaaccgaaggucaga

SEQ ID NO: 2195723 - RNA, 19 nt, Artificial Sequence
  Description of Artificial Sequence: Synthetic oligonucleotide
  Antisense strand to SEQ ID NO: 2195722
ucugaccuucgguuaauuu

SEQ ID NO: 2195724 - RNA, 19 nt, Artificial Sequence
  Description of Artificial Sequence: Synthetic oligonucleotide
  Sense strand starting at position 3052 of SEQ ID NO: 1883465
gcgucauguccguugauca

SEQ ID NO: 2195725 - RNA, 19 nt, Artificial Sequence
  Description of Artificial Sequence: Synthetic oligonucleotide
  Antisense strand to SEQ ID NO: 2195724
ugaucaacggacaugacgc

SEQ ID NO: 2195726 - RNA, 19 nt, Artificial Sequence
  Description of Artificial Sequence: Synthetic oligonucleotide
  Sense strand starting at position 3062 of SEQ ID NO: 1883465
cguugaucaaaggacaguu

SEQ ID NO: 2195727 - RNA, 19 nt, Artificial Sequence
  Description of Artificial Sequence: Synthetic oligonucleotide
  Antisense strand to SEQ ID NO: 2195726
aacuguccuuugaucaacg

SEQ ID NO: 2195728 - RNA, 19 nt, Artificial Sequence
  Description of Artificial Sequence: Synthetic oligonucleotide
  Sense strand starting at position 3149 of SEQ ID NO: 1883465
aguuacucgucuuccauga

SEQ ID NO: 2195729 - RNA, 19 nt, Artificial Sequence
  Description of Artificial Sequence: Synthetic oligonucleotide
  Antisense strand to SEQ ID NO: 2195728
ucauggaagacgaguaacu

SEQ ID NO: 2195730 - RNA, 19 nt, Artificial Sequence
  Description of Artificial Sequence: Synthetic oligonucleotide
  Sense strand starting at position 3154 of SEQ ID NO: 1883465
cucgucuuccaugaaguca

SEQ ID NO: 2195731 - RNA, 19 nt, Artificial Sequence
  Description of Artificial Sequence: Synthetic oligonucleotide
  Antisense strand to SEQ ID NO: 2195730
ugacuucauggaagacgag

SEQ ID NO: 2195732 - RNA, 19 nt, Artificial Sequence
  Description of Artificial Sequence: Synthetic oligonucleotide
  Sense strand starting at position 3209 of SEQ ID NO: 1883465
ucaauuucguaagcuaucu

SEQ ID NO: 2195733 - RNA, 19 nt, Artificial Sequence
  Description of Artificial Sequence: Synthetic oligonucleotide
  Antisense strand to SEQ ID NO: 2195732
agauagcuuacgaaauuga

SEQ ID NO: 2195734 - RNA, 19 nt, Artificial Sequence
  Description of Artificial Sequence: Synthetic oligonucleotide
  Sense strand starting at position 3268 of SEQ ID NO: 1883465
gacguuuaggccgaagcau

SEQ ID NO: 2195735 - RNA, 19 nt, Artificial Sequence
  Description of Artificial Sequence: Synthetic oligonucleotide
  Antisense strand to SEQ ID NO: 2195734
augcuucggccuaaacguc

SEQ ID NO: 2195736 - RNA, 19 nt, Artificial Sequence
  Description of Artificial Sequence: Synthetic oligonucleotide
  Sense strand starting at position 3340 of SEQ ID NO: 1883465
acuuguaguuaccugaagu

SEQ ID NO: 2195737 - RNA, 19 nt, Artificial Sequence
  Description of Artificial Sequence: Synthetic oligonucleotide
  Antisense strand to SEQ ID NO: 2195736
acuucagguaacuacaagu

SEQ ID NO: 2195738 - RNA, 19 nt, Artificial Sequence
  Description of Artificial Sequence: Synthetic oligonucleotide
  Sense strand starting at position 3341 of SEQ ID NO: 1883465
cuuguaguuaccugaagug

SEQ ID NO: 2195739 - RNA, 19 nt, Artificial Sequence
  Description of Artificial Sequence: Synthetic oligonucleotide
  Antisense strand to SEQ ID NO: 2195738
cacuucagguaacuacaag

SEQ ID NO: 2195740 - RNA, 19 nt, Artificial Sequence
  Description of Artificial Sequence: Synthetic oligonucleotide
  Sense strand starting at position 3355 of SEQ ID NO: 1883465
aagugacuguaugcuauua

SEQ ID NO: 2195741 - RNA, 19 nt, Artificial Sequence
  Description of Artificial Sequence: Synthetic oligonucleotide
  Antisense strand to SEQ ID NO: 2195740
uaauagcauacagucacuu

SEQ ID NO: 2195742 - RNA, 19 nt, Artificial Sequence
  Description of Artificial Sequence: Synthetic oligonucleotide
  Sense strand starting at position 3383 of SEQ ID NO: 1883465
uacugucgugcuguaugua

SEQ ID NO: 2195743 - RNA, 19 nt, Artificial Sequence
  Description of Artificial Sequence: Synthetic oligonucleotide
  Antisense strand to SEQ ID NO: 2195742
uacauacagcacgacagua

SEQ ID NO: 2195744 - RNA, 19 nt, Artificial Sequence
  Description of Artificial Sequence: Synthetic oligonucleotide
  Sense strand starting at position 3471 of SEQ ID NO: 1883465
ugugaucucuucuauuuga

SEQ ID NO: 2195745 - RNA, 19 nt, Artificial Sequence
  Description of Artificial Sequence: Synthetic oligonucleotide
  Antisense strand to SEQ ID NO: 2195744
ucaaauagaagagaucaca

SEQ ID NO: 2195746 - RNA, 19 nt, Artificial Sequence
  Description of Artificial Sequence: Synthetic oligonucleotide
  Sense strand starting at position 3590 of SEQ ID NO: 1883465
acaagcuccaggugguaaa

SEQ ID NO: 2195747 - RNA, 19 nt, Artificial Sequence
  Description of Artificial Sequence: Synthetic oligonucleotide
  Antisense strand to SEQ ID NO: 2195746
uuuaccaccuggagcuugu

SEQ ID NO: 2195748 - RNA, 19 nt, Artificial Sequence
  Description of Artificial Sequence: Synthetic oligonucleotide
  Sense strand starting at position 363 of SEQ ID NO: 1883467
gccucaaaugacgaaacuu

SEQ ID NO: 2195749 - RNA, 19 nt, Artificial Sequence
  Description of Artificial Sequence: Synthetic oligonucleotide
  Antisense strand to SEQ ID NO: 2195748
aaguuucgucauuugaggc

SEQ ID NO: 2195750 - RNA, 19 nt, Artificial Sequence
  Description of Artificial Sequence: Synthetic oligonucleotide
  Sense strand starting at position 411 of SEQ ID NO: 1883467
aguauaauguuuccugaaa

SEQ ID NO: 2195751 - RNA, 19 nt, Artificial Sequence
  Description of Artificial Sequence: Synthetic oligonucleotide
  Antisense strand to SEQ ID NO: 2195750
uuucaggaaacauuauacu

SEQ ID NO: 2195752 - RNA, 19 nt, Artificial Sequence
  Description of Artificial Sequence: Synthetic oligonucleotide
  Sense strand starting at position 694 of SEQ ID NO: 1883467
gagacuugcuucuuccaga

SEQ ID NO: 2195753 - RNA, 19 nt, Artificial Sequence
  Description of Artificial Sequence: Synthetic oligonucleotide
  Antisense strand to SEQ ID NO: 2195752
ucuggaagaagcaagucuc

SEQ ID NO: 2195754 - RNA, 19 nt, Artificial Sequence
  Description of Artificial Sequence: Synthetic oligonucleotide
  Sense strand starting at position 695 of SEQ ID NO: 1883467
agacuugcuucuuccagaa

SEQ ID NO: 2195755 - RNA, 19 nt, Artificial Sequence
  Description of Artificial Sequence: Synthetic oligonucleotide
  Antisense strand to SEQ ID NO: 2195754
uucuggaagaagcaagucu

SEQ ID NO: 2195756 - RNA, 19 nt, Artificial Sequence
  Description of Artificial Sequence: Synthetic oligonucleotide
  Sense strand starting at position 857 of SEQ ID NO: 1883467
gugaauuaaaugcaggcua

SEQ ID NO: 2195757 - RNA, 19 nt, Artificial Sequence
  Description of Artificial Sequence: Synthetic oligonucleotide
  Antisense strand to SEQ ID NO: 2195756
uagccugcauuuaauucac

SEQ ID NO: 2195758 - RNA, 19 nt, Artificial Sequence
  Description of Artificial Sequence: Synthetic oligonucleotide
  Sense strand starting at position 918 of SEQ ID NO: 1883467
ccaucuuugccuggaaaca

SEQ ID NO: 2195759 - RNA, 19 nt, Artificial Sequence
  Description of Artificial Sequence: Synthetic oligonucleotide
  Antisense strand to SEQ ID NO: 2195758
uguuuccaggcaaagaugg

SEQ ID NO: 2195760 - RNA, 19 nt, Artificial Sequence
  Description of Artificial Sequence: Synthetic oligonucleotide
  Sense strand starting at position 956 of SEQ ID NO: 1883467
acucccuagauucgggaaa

SEQ ID NO: 2195761 - RNA, 19 nt, Artificial Sequence
  Description of Artificial Sequence: Synthetic oligonucleotide
  Antisense strand to SEQ ID NO: 2195760
uuucccgaaucuagggagu

SEQ ID NO: 2195762 - RNA, 19 nt, Artificial Sequence
  Description of Artificial Sequence: Synthetic oligonucleotide
  Sense strand starting at position 1071 of SEQ ID NO: 1883467
ccacuaaaggucugggaau

SEQ ID NO: 2195763 - RNA, 19 nt, Artificial Sequence
  Description of Artificial Sequence: Synthetic oligonucleotide
  Antisense strand to SEQ ID NO: 2195762
auucccagaccuuuagugg

SEQ ID NO: 2195764 - RNA, 19 nt, Artificial Sequence
  Description of Artificial Sequence: Synthetic oligonucleotide
  Sense strand starting at position 1095 of SEQ ID NO: 1883467
caaagagauguauagccuu

SEQ ID NO: 2195765 - RNA, 19 nt, Artificial Sequence
  Description of Artificial Sequence: Synthetic oligonucleotide
  Antisense strand to SEQ ID NO: 2195764
aaggcuauacaucucuuug

SEQ ID NO: 2195766 - RNA, 19 nt, Artificial Sequence
  Description of Artificial Sequence: Synthetic oligonucleotide
  Sense strand starting at position 1098 of SEQ ID NO: 1883467
agagauguauagccuuauc

SEQ ID NO: 2195767 - RNA, 19 nt, Artificial Sequence
  Description of Artificial Sequence: Synthetic oligonucleotide
  Antisense strand to SEQ ID NO: 2195766
gauaaggcuauacaucucu

SEQ ID NO: 2195768 - RNA, 19 nt, Artificial Sequence
  Description of Artificial Sequence: Synthetic oligonucleotide
  Sense strand starting at position 1163 of SEQ ID NO: 1883467
aagcuaucccgagagguuu

SEQ ID NO: 2195769 - RNA, 19 nt, Artificial Sequence
  Description of Artificial Sequence: Synthetic oligonucleotide
  Antisense strand to SEQ ID NO: 2195768
aaaccucucgggauagcuu

SEQ ID NO: 2195770 - RNA, 19 nt, Artificial Sequence
  Description of Artificial Sequence: Synthetic oligonucleotide
  Sense strand starting at position 1272 of SEQ ID NO: 1883467
aggaauguccgcgagaaua

SEQ ID NO: 2195771 - RNA, 19 nt, Artificial Sequence
  Description of Artificial Sequence: Synthetic oligonucleotide
  Antisense strand to SEQ ID NO: 2195770
uauucucgcggacauuccu

SEQ ID NO: 2195772 - RNA, 19 nt, Artificial Sequence
  Description of Artificial Sequence: Synthetic oligonucleotide
  Sense strand starting at position 2230 of SEQ ID NO: 1883467
guguguaccgcgaaaugcu

SEQ ID NO: 2195773 - RNA, 19 nt, Artificial Sequence
  Description of Artificial Sequence: Synthetic oligonucleotide
  Antisense strand to SEQ ID NO: 2195772
agcauuucgcgguacacac

SEQ ID NO: 2195774 - RNA, 19 nt, Artificial Sequence
  Description of Artificial Sequence: Synthetic oligonucleotide
  Sense strand starting at position 2396 of SEQ ID NO: 1883467
gcuuucugguauuugcaga

SEQ ID NO: 2195775 - RNA, 19 nt, Artificial Sequence
  Description of Artificial Sequence: Synthetic oligonucleotide
  Antisense strand to SEQ ID NO: 2195774
ucugcaaauaccagaaagc

SEQ ID NO: 2195776 - RNA, 19 nt, Artificial Sequence
  Description of Artificial Sequence: Synthetic oligonucleotide
  Sense strand starting at position 2452 of SEQ ID NO: 1883467
agacauagguuuccuugua

SEQ ID NO: 2195777 - RNA, 19 nt, Artificial Sequence
  Description of Artificial Sequence: Synthetic oligonucleotide
  Antisense strand to SEQ ID NO: 2195776
uacaaggaaaccuaugucu

SEQ ID NO: 2195778 - RNA, 19 nt, Artificial Sequence
  Description of Artificial Sequence: Synthetic oligonucleotide
  Sense strand starting at position 2492 of SEQ ID NO: 1883467
gcagaacgacacugauauu

SEQ ID NO: 2195779 - RNA, 19 nt, Artificial Sequence
  Description of Artificial Sequence: Synthetic oligonucleotide
  Antisense strand to SEQ ID NO: 2195778
aauaucagugucguucugc

SEQ ID NO: 2195780 - RNA, 19 nt, Artificial Sequence
  Description of Artificial Sequence: Synthetic oligonucleotide
  Sense strand starting at position 2524 of SEQ ID NO: 1883467
uauuuagauuuguggagcu

SEQ ID NO: 2195781 - RNA, 19 nt, Artificial Sequence
  Description of Artificial Sequence: Synthetic oligonucleotide
  Antisense strand to SEQ ID NO: 2195780
agcuccacaaaucuaaaua

SEQ ID NO: 2195782 - RNA, 19 nt, Artificial Sequence
  Description of Artificial Sequence: Synthetic oligonucleotide
  Sense strand starting at position 2539 of SEQ ID NO: 1883467
agcugaaacuugccugaaa

SEQ ID NO: 2195783 - RNA, 19 nt, Artificial Sequence
  Description of Artificial Sequence: Synthetic oligonucleotide
  Antisense strand to SEQ ID NO: 2195782
uuucaggcaaguuucagcu

SEQ ID NO: 2195784 - RNA, 19 nt, Artificial Sequence
  Description of Artificial Sequence: Synthetic oligonucleotide
  Sense strand starting at position 2621 of SEQ ID NO: 1883467
uuaaacugcgcauauauca

SEQ ID NO: 2195785 - RNA, 19 nt, Artificial Sequence
  Description of Artificial Sequence: Synthetic oligonucleotide
  Antisense strand to SEQ ID NO: 2195784
ugauauaugcgcaguuuaa

SEQ ID NO: 2195786 - RNA, 19 nt, Artificial Sequence
  Description of Artificial Sequence: Synthetic oligonucleotide
  Sense strand starting at position 2629 of SEQ ID NO: 1883467
cgcauauaucaacaauagu

SEQ ID NO: 2195787 - RNA, 19 nt, Artificial Sequence
  Description of Artificial Sequence: Synthetic oligonucleotide
  Antisense strand to SEQ ID NO: 2195786
acuauuguugauauaugcg

SEQ ID NO: 2195788 - RNA, 19 nt, Artificial Sequence
  Description of Artificial Sequence: Synthetic oligonucleotide
  Sense strand starting at position 2655 of SEQ ID NO: 1883467
guugcagcagucuaaauuu

SEQ ID NO: 2195789 - RNA, 19 nt, Artificial Sequence
  Description of Artificial Sequence: Synthetic oligonucleotide
  Antisense strand to SEQ ID NO: 2195788
aaauuuagacugcugcaac

SEQ ID NO: 2195790 - RNA, 19 nt, Artificial Sequence
  Description of Artificial Sequence: Synthetic oligonucleotide
  Sense strand starting at position 2741 of SEQ ID NO: 1883467
auaccauuauguccagacu

SEQ ID NO: 2195791 - RNA, 19 nt, Artificial Sequence
  Description of Artificial Sequence: Synthetic oligonucleotide
  Antisense strand to SEQ ID NO: 2195790
agucuggacauaaugguau

SEQ ID NO: 2195792 - RNA, 19 nt, Artificial Sequence
  Description of Artificial Sequence: Synthetic oligonucleotide
  Sense strand starting at position 2744 of SEQ ID NO: 1883467
ccauuauguccagacuucu

SEQ ID NO: 2195793 - RNA, 19 nt, Artificial Sequence
  Description of Artificial Sequence: Synthetic oligonucleotide
  Antisense strand to SEQ ID NO: 2195792
agaagucuggacauaaugg

SEQ ID NO: 2195794 - RNA, 19 nt, Artificial Sequence
  Description of Artificial Sequence: Synthetic oligonucleotide
  Sense strand starting at position 2905 of SEQ ID NO: 1883467
uggaacugaagaugucauu

SEQ ID NO: 2195795 - RNA, 19 nt, Artificial Sequence
  Description of Artificial Sequence: Synthetic oligonucleotide
  Antisense strand to SEQ ID NO: 2195794
aaugacaucuucaguucca

SEQ ID NO: 2195796 - RNA, 19 nt, Artificial Sequence
  Description of Artificial Sequence: Synthetic oligonucleotide
  Sense strand starting at position 2911 of SEQ ID NO: 1883467
ugaagaugucauugguuua

SEQ ID NO: 2195797 - RNA, 19 nt, Artificial Sequence
  Description of Artificial Sequence: Synthetic oligonucleotide
  Antisense strand to SEQ ID NO: 2195796
uaaaccaaugacaucuuca

SEQ ID NO: 2195798 - RNA, 19 nt, Artificial Sequence
  Description of Artificial Sequence: Synthetic oligonucleotide
  Sense strand starting at position 2914 of SEQ ID NO: 1883467
agaugucauugguuuauaa

SEQ ID NO: 2195799 - RNA, 19 nt, Artificial Sequence
  Description of Artificial Sequence: Synthetic oligonucleotide
  Antisense strand to SEQ ID NO: 2195798
uuauaaaccaaugacaucu

SEQ ID NO: 2195800 - RNA, 19 nt, Artificial Sequence
  Description of Artificial Sequence: Synthetic oligonucleotide
  Sense strand starting at position 2916 of SEQ ID NO: 1883467
augucauugguuuauaaga

SEQ ID NO: 2195801 - RNA, 19 nt, Artificial Sequence
  Description of Artificial Sequence: Synthetic oligonucleotide
  Antisense strand to SEQ ID NO: 2195800
ucuuauaaaccaaugacau

SEQ ID NO: 2195802 - RNA, 19 nt, Artificial Sequence
  Description of Artificial Sequence: Synthetic oligonucleotide
  Sense strand starting at position 3130 of SEQ ID NO: 1883467
uagauuacguucucuggaa

SEQ ID NO: 2195803 - RNA, 19 nt, Artificial Sequence
  Description of Artificial Sequence: Synthetic oligonucleotide
  Antisense strand to SEQ ID NO: 2195802
uuccagagaacguaaucua

SEQ ID NO: 2195804 - RNA, 19 nt, Artificial Sequence
  Description of Artificial Sequence: Synthetic oligonucleotide
  Sense strand starting at position 3131 of SEQ ID NO: 1883467
agauuacguucucuggaac

SEQ ID NO: 2195805 - RNA, 19 nt, Artificial Sequence
  Description of Artificial Sequence: Synthetic oligonucleotide
  Antisense strand to SEQ ID NO: 2195804
guuccagagaacguaaucu

SEQ ID NO: 2195806 - RNA, 19 nt, Artificial Sequence
  Description of Artificial Sequence: Synthetic oligonucleotide
  Sense strand starting at position 3242 of SEQ ID NO: 1883467
agaaguuauggugguauac

SEQ ID NO: 2195807 - RNA, 19 nt, Artificial Sequence
  Description of Artificial Sequence: Synthetic oligonucleotide
  Antisense strand to SEQ ID NO: 2195806
guauaccaccauaacuucu

SEQ ID NO: 2195808 - RNA, 19 nt, Artificial Sequence
  Description of Artificial Sequence: Synthetic oligonucleotide
  Sense strand starting at position 3269 of SEQ ID NO: 1883467
uucucagauguccaccuua

SEQ ID NO: 2195809 - RNA, 19 nt, Artificial Sequence
  Description of Artificial Sequence: Synthetic oligonucleotide
  Antisense strand to SEQ ID NO: 2195808
uaagguggacaucugagaa

SEQ ID NO: 2195810 - RNA, 19 nt, Artificial Sequence
  Description of Artificial Sequence: Synthetic oligonucleotide
  Sense strand starting at position 3328 of SEQ ID NO: 1883467
gacuguguccuugagggau

SEQ ID NO: 2195811 - RNA, 19 nt, Artificial Sequence
  Description of Artificial Sequence: Synthetic oligonucleotide
  Antisense strand to SEQ ID NO: 2195810
aucccucaaggacacaguc

SEQ ID NO: 2195812 - RNA, 19 nt, Artificial Sequence
  Description of Artificial Sequence: Synthetic oligonucleotide
  Sense strand starting at position 3332 of SEQ ID NO: 1883467
guguccuugagggauguuu

SEQ ID NO: 2195813 - RNA, 19 nt, Artificial Sequence
  Description of Artificial Sequence: Synthetic oligonucleotide
  Antisense strand to SEQ ID NO: 2195812
aaacaucccucaaggacac

SEQ ID NO: 2195814 - RNA, 19 nt, Artificial Sequence
  Description of Artificial Sequence: Synthetic oligonucleotide
  Sense strand starting at position 3368 of SEQ ID NO: 1883467
cggaaucagccagaagcau

SEQ ID NO: 2195815 - RNA, 19 nt, Artificial Sequence
  Description of Artificial Sequence: Synthetic oligonucleotide
  Antisense strand to SEQ ID NO: 2195814
augcuucuggcugauuccg

SEQ ID NO: 2195816 - RNA, 19 nt, Artificial Sequence
  Description of Artificial Sequence: Synthetic oligonucleotide
  Sense strand starting at position 3391 of SEQ ID NO: 1883467
gguguuagccuuguugugu

SEQ ID NO: 2195817 - RNA, 19 nt, Artificial Sequence
  Description of Artificial Sequence: Synthetic oligonucleotide
  Antisense strand to SEQ ID NO: 2195816
acacaacaaggcuaacacc

SEQ ID NO: 2195818 - RNA, 19 nt, Artificial Sequence
  Description of Artificial Sequence: Synthetic oligonucleotide
  Sense strand starting at position 3404 of SEQ ID NO: 1883467
uugugucaucaacauuaca

SEQ ID NO: 2195819 - RNA, 19 nt, Artificial Sequence
  Description of Artificial Sequence: Synthetic oligonucleotide
  Antisense strand to SEQ ID NO: 2195818
uguaauguugaugacacaa

SEQ ID NO: 2195820 - RNA, 19 nt, Artificial Sequence
  Description of Artificial Sequence: Synthetic oligonucleotide
  Sense strand starting at position 3681 of SEQ ID NO: 1883467
uucugacacucaucacagu

SEQ ID NO: 2195821 - RNA, 19 nt, Artificial Sequence
  Description of Artificial Sequence: Synthetic oligonucleotide
  Antisense strand to SEQ ID NO: 2195820
acugugaugagugucagaa

SEQ ID NO: 2195822 - RNA, 19 nt, Artificial Sequence
  Description of Artificial Sequence: Synthetic oligonucleotide
  Sense strand starting at position 3737 of SEQ ID NO: 1883467
agaaguaucuucucaggag

SEQ ID NO: 2195823 - RNA, 19 nt, Artificial Sequence
  Description of Artificial Sequence: Synthetic oligonucleotide
  Antisense strand to SEQ ID NO: 2195822
cuccugagaagauacuucu

SEQ ID NO: 2195824 - RNA, 19 nt, Artificial Sequence
  Description of Artificial Sequence: Synthetic oligonucleotide
  Sense strand starting at position 3769 of SEQ ID NO: 1883467
ccagucauauccuuucuag

SEQ ID NO: 2195825 - RNA, 19 nt, Artificial Sequence
  Description of Artificial Sequence: Synthetic oligonucleotide
  Antisense strand to SEQ ID NO: 2195824
cuagaaaggauaugacugg

SEQ ID NO: 2195826 - RNA, 19 nt, Artificial Sequence
  Description of Artificial Sequence: Synthetic oligonucleotide
  Sense strand starting at position 3925 of SEQ ID NO: 1883467
auucgaguaggugggauua

SEQ ID NO: 2195827 - RNA, 19 nt, Artificial Sequence
  Description of Artificial Sequence: Synthetic oligonucleotide
  Antisense strand to SEQ ID NO: 2195826
uaaucccaccuacucgaau

SEQ ID NO: 2195828 - RNA, 19 nt, Artificial Sequence
  Description of Artificial Sequence: Synthetic oligonucleotide
  Sense strand starting at position 2122 of SEQ ID NO: 1883468
cugaauggagaauguguuu

SEQ ID NO: 2195829 - RNA, 19 nt, Artificial Sequence
  Description of Artificial Sequence: Synthetic oligonucleotide
  Antisense strand to SEQ ID NO: 2195828
aaacacauucuccauucag

SEQ ID NO: 2195830 - RNA, 19 nt, Artificial Sequence
  Description of Artificial Sequence: Synthetic oligonucleotide
  Sense strand starting at position 2194 of SEQ ID NO: 1883468
gcgaauggaacauauagua

SEQ ID NO: 2195831 - RNA, 19 nt, Artificial Sequence
  Description of Artificial Sequence: Synthetic oligonucleotide
  Antisense strand to SEQ ID NO: 2195830
uacuauauguuccauucgc

SEQ ID NO: 2195832 - RNA, 19 nt, Artificial Sequence
  Description of Artificial Sequence: Synthetic oligonucleotide
  Sense strand starting at position 2574 of SEQ ID NO: 1883468
agcacaauuuaggauauaa

SEQ ID NO: 2195833 - RNA, 19 nt, Artificial Sequence
  Description of Artificial Sequence: Synthetic oligonucleotide
  Antisense strand to SEQ ID NO: 2195832
uuauauccuaaauugugcu

SEQ ID NO: 2195834 - RNA, 19 nt, Artificial Sequence
  Description of Artificial Sequence: Synthetic oligonucleotide
  Sense strand starting at position 2618 of SEQ ID NO: 1883468
aaggcaggcuuaggaaaua

SEQ ID NO: 2195835 - RNA, 19 nt, Artificial Sequence
  Description of Artificial Sequence: Synthetic oligonucleotide
  Antisense strand to SEQ ID NO: 2195834
uauuuccuaagccugccuu

SEQ ID NO: 2195836 - RNA, 19 nt, Artificial Sequence
  Description of Artificial Sequence: Synthetic oligonucleotide
  Sense strand starting at position 2768 of SEQ ID NO: 1883468
aaaguuggguuaccuacaa

SEQ ID NO: 2195837 - RNA, 19 nt, Artificial Sequence
  Description of Artificial Sequence: Synthetic oligonucleotide
  Antisense strand to SEQ ID NO: 2195836
uuguagguaacccaacuuu

SEQ ID NO: 2195838 - RNA, 19 nt, Artificial Sequence
  Description of Artificial Sequence: Synthetic oligonucleotide
  Sense strand starting at position 3241 of SEQ ID NO: 1883468
aacccauugguguguugua

SEQ ID NO: 2195839 - RNA, 19 nt, Artificial Sequence
  Description of Artificial Sequence: Synthetic oligonucleotide
  Antisense strand to SEQ ID NO: 2195838
uacaacacaccaauggguu

SEQ ID NO: 2195840 - RNA, 19 nt, Artificial Sequence
  Description of Artificial Sequence: Synthetic oligonucleotide
  Sense strand starting at position 3246 of SEQ ID NO: 1883468
auugguguguuguauucga

SEQ ID NO: 2195841 - RNA, 19 nt, Artificial Sequence
  Description of Artificial Sequence: Synthetic oligonucleotide
  Antisense strand to SEQ ID NO: 2195840
ucgaauacaacacaccaau

SEQ ID NO: 2195842 - RNA, 19 nt, Artificial Sequence
  Description of Artificial Sequence: Synthetic oligonucleotide
  Sense strand starting at position 3253 of SEQ ID NO: 1883468
uguuguauucgagacccau

SEQ ID NO: 2195843 - RNA, 19 nt, Artificial Sequence
  Description of Artificial Sequence: Synthetic oligonucleotide
  Antisense strand to SEQ ID NO: 2195842
augggucucgaauacaaca

SEQ ID NO: 2195844 - RNA, 19 nt, Artificial Sequence
  Description of Artificial Sequence: Synthetic oligonucleotide
  Sense strand starting at position 3314 of SEQ ID NO: 1883468
agagauauuuaccaggcaa

SEQ ID NO: 2195845 - RNA, 19 nt, Artificial Sequence
  Description of Artificial Sequence: Synthetic oligonucleotide
  Antisense strand to SEQ ID NO: 2195844
uugccugguaaauaucucu

SEQ ID NO: 2195846 - RNA, 19 nt, Artificial Sequence
  Description of Artificial Sequence: Synthetic oligonucleotide
  Sense strand starting at position 3577 of SEQ ID NO: 1883468
cacuccauuguguguauua

SEQ ID NO: 2195847 - RNA, 19 nt, Artificial Sequence
  Description of Artificial Sequence: Synthetic oligonucleotide
  Antisense strand to SEQ ID NO: 2195846
uaauacacacaauggagug

SEQ ID NO: 2195848 - RNA, 19 nt, Artificial Sequence
  Description of Artificial Sequence: Synthetic oligonucleotide
  Sense strand starting at position 3579 of SEQ ID NO: 1883468
cuccauuguguguauuaga

SEQ ID NO: 2195849 - RNA, 19 nt, Artificial Sequence
  Description of Artificial Sequence: Synthetic oligonucleotide
  Antisense strand to SEQ ID NO: 2195848
ucuaauacacacaauggag

SEQ ID NO: 2195850 - RNA, 19 nt, Artificial Sequence
  Description of Artificial Sequence: Synthetic oligonucleotide
  Sense strand starting at position 3584 of SEQ ID NO: 1883468
uuguguguauuagacagau

SEQ ID NO: 2195851 - RNA, 19 nt, Artificial Sequence
  Description of Artificial Sequence: Synthetic oligonucleotide
  Antisense strand to SEQ ID NO: 2195850
aucugucuaauacacacaa

SEQ ID NO: 2195852 - RNA, 19 nt, Artificial Sequence
  Description of Artificial Sequence: Synthetic oligonucleotide
  Sense strand starting at position 3586 of SEQ ID NO: 1883468
guguguauuagacagauca

SEQ ID NO: 2195853 - RNA, 19 nt, Artificial Sequence
  Description of Artificial Sequence: Synthetic oligonucleotide
  Antisense strand to SEQ ID NO: 2195852
ugaucugucuaauacacac

SEQ ID NO: 2195854 - RNA, 19 nt, Artificial Sequence
  Description of Artificial Sequence: Synthetic oligonucleotide
  Sense strand starting at position 527 of SEQ ID NO: 1883469
cucagugcacuacagauua

SEQ ID NO: 2195855 - RNA, 19 nt, Artificial Sequence
  Description of Artificial Sequence: Synthetic oligonucleotide
  Antisense strand to SEQ ID NO: 2195854
uaaucuguagugcacugag

SEQ ID NO: 2195856 - RNA, 19 nt, Artificial Sequence
  Description of Artificial Sequence: Synthetic oligonucleotide
  Sense strand starting at position 555 of SEQ ID NO: 1883469
agcaaaucuccuuggaaau

SEQ ID NO: 2195857 - RNA, 19 nt, Artificial Sequence
  Description of Artificial Sequence: Synthetic oligonucleotide
  Antisense strand to SEQ ID NO: 2195856
auuuccaaggagauuugcu

SEQ ID NO: 2195858 - RNA, 19 nt, Artificial Sequence
  Description of Artificial Sequence: Synthetic oligonucleotide
  Sense strand starting at position 556 of SEQ ID NO: 1883469
gcaaaucuccuuggaaauu

SEQ ID NO: 2195859 - RNA, 19 nt, Artificial Sequence
  Description of Artificial Sequence: Synthetic oligonucleotide
  Antisense strand to SEQ ID NO: 2195858
aauuuccaaggagauuugc

SEQ ID NO: 2195860 - RNA, 19 nt, Artificial Sequence
  Description of Artificial Sequence: Synthetic oligonucleotide
  Sense strand starting at position 660 of SEQ ID NO: 1883469
accaccuaucagugacuau

SEQ ID NO: 2195861 - RNA, 19 nt, Artificial Sequence
  Description of Artificial Sequence: Synthetic oligonucleotide
  Antisense strand to SEQ ID NO: 2195860
auagucacugauagguggu

SEQ ID NO: 2195862 - RNA, 19 nt, Artificial Sequence
  Description of Artificial Sequence: Synthetic oligonucleotide
  Sense strand starting at position 742 of SEQ ID NO: 1883469
cugauuuauuuacaugucu

SEQ ID NO: 2195863 - RNA, 19 nt, Artificial Sequence
  Description of Artificial Sequence: Synthetic oligonucleotide
  Antisense strand to SEQ ID NO: 2195862
agacauguaaauaaaucag

SEQ ID NO: 2195864 - RNA, 19 nt, Artificial Sequence
  Description of Artificial Sequence: Synthetic oligonucleotide
  Sense strand starting at position 753 of SEQ ID NO: 1883469
acaugucuguuacuacaga

SEQ ID NO: 2195865 - RNA, 19 nt, Artificial Sequence
  Description of Artificial Sequence: Synthetic oligonucleotide
  Antisense strand to SEQ ID NO: 2195864
ucuguaguaacagacaugu

SEQ ID NO: 2195866 - RNA, 19 nt, Artificial Sequence
  Description of Artificial Sequence: Synthetic oligonucleotide
  Sense strand starting at position 818 of SEQ ID NO: 1883469
gcuaaugggaguugagauc

SEQ ID NO: 2195867 - RNA, 19 nt, Artificial Sequence
  Description of Artificial Sequence: Synthetic oligonucleotide
  Antisense strand to SEQ ID NO: 2195866
gaucucaacucccauuagc

SEQ ID NO: 2195868 - RNA, 19 nt, Artificial Sequence
  Description of Artificial Sequence: Synthetic oligonucleotide
  Sense strand starting at position 825 of SEQ ID NO: 1883469
ggaguugagaucuggucua

SEQ ID NO: 2195869 - RNA, 19 nt, Artificial Sequence
  Description of Artificial Sequence: Synthetic oligonucleotide
  Antisense strand to SEQ ID NO: 2195868
uagaccagaucucaacucc

SEQ ID NO: 2195870 - RNA, 19 nt, Artificial Sequence
  Description of Artificial Sequence: Synthetic oligonucleotide
  Sense strand starting at position 830 of SEQ ID NO: 1883469
ugagaucuggucuauguag

SEQ ID NO: 2195871 - RNA, 19 nt, Artificial Sequence
  Description of Artificial Sequence: Synthetic oligonucleotide
  Antisense strand to SEQ ID NO: 2195870
cuacauagaccagaucuca

SEQ ID NO: 2195872 - RNA, 19 nt, Artificial Sequence
  Description of Artificial Sequence: Synthetic oligonucleotide
  Sense strand starting at position 960 of SEQ ID NO: 1883469
ugucaauuagguuaacgga

SEQ ID NO: 2195873 - RNA, 19 nt, Artificial Sequence
  Description of Artificial Sequence: Synthetic oligonucleotide
  Antisense strand to SEQ ID NO: 2195872
uccguuaaccuaauugaca

SEQ ID NO: 2195874 - RNA, 19 nt, Artificial Sequence
  Description of Artificial Sequence: Synthetic oligonucleotide
  Sense strand starting at position 990 of SEQ ID NO: 1883469
accugauguuuccuaacag

SEQ ID NO: 2195875 - RNA, 19 nt, Artificial Sequence
  Description of Artificial Sequence: Synthetic oligonucleotide
  Antisense strand to SEQ ID NO: 2195874
cuguuaggaaacaucaggu

SEQ ID NO: 2195876 - RNA, 19 nt, Artificial Sequence
  Description of Artificial Sequence: Synthetic oligonucleotide
  Sense strand starting at position 1537 of SEQ ID NO: 1883469
gguugaaagucauccacua

SEQ ID NO: 2195877 - RNA, 19 nt, Artificial Sequence
  Description of Artificial Sequence: Synthetic oligonucleotide
  Antisense strand to SEQ ID NO: 2195876
uaguggaugacuuucaacc

SEQ ID NO: 2195878 - RNA, 19 nt, Artificial Sequence
  Description of Artificial Sequence: Synthetic oligonucleotide
  Sense strand starting at position 1760 of SEQ ID NO: 1883469
auuucccuuccgcgacaaa

SEQ ID NO: 2195879 - RNA, 19 nt, Artificial Sequence
  Description of Artificial Sequence: Synthetic oligonucleotide
  Antisense strand to SEQ ID NO: 2195878
uuugucgcggaagggaaau

SEQ ID NO: 2195880 - RNA, 19 nt, Artificial Sequence
  Description of Artificial Sequence: Synthetic oligonucleotide
  Sense strand starting at position 1912 of SEQ ID NO: 1883469
aagcguugccuucugggua

SEQ ID NO: 2195881 - RNA, 19 nt, Artificial Sequence
  Description of Artificial Sequence: Synthetic oligonucleotide
  Antisense strand to SEQ ID NO: 2195880
uacccagaaggcaacgcuu

SEQ ID NO: 2195882 - RNA, 19 nt, Artificial Sequence
  Description of Artificial Sequence: Synthetic oligonucleotide
  Sense strand starting at position 2059 of SEQ ID NO: 1883469
gggugaggccaauggagua

SEQ ID NO: 2195883 - RNA, 19 nt, Artificial Sequence
  Description of Artificial Sequence: Synthetic oligonucleotide
  Antisense strand to SEQ ID NO: 2195882
uacuccauuggccucaccc

SEQ ID NO: 2195884 - RNA, 19 nt, Artificial Sequence
  Description of Artificial Sequence: Synthetic oligonucleotide
  Sense strand starting at position 2117 of SEQ ID NO: 1883469
uugugaugugaugggaaga

SEQ ID NO: 2195885 - RNA, 19 nt, Artificial Sequence
  Description of Artificial Sequence: Synthetic oligonucleotide
  Antisense strand to SEQ ID NO: 2195884
ucuucccaucacaucacaa

SEQ ID NO: 2195886 - RNA, 19 nt, Artificial Sequence
  Description of Artificial Sequence: Synthetic oligonucleotide
  Sense strand starting at position 2118 of SEQ ID NO: 1883469
ugugaugugaugggaagaa

SEQ ID NO: 2195887 - RNA, 19 nt, Artificial Sequence
  Description of Artificial Sequence: Synthetic oligonucleotide
  Antisense strand to SEQ ID NO: 2195886
uucuucccaucacaucaca

SEQ ID NO: 2195888 - RNA, 19 nt, Artificial Sequence
  Description of Artificial Sequence: Synthetic oligonucleotide
  Sense strand starting at position 2176 of SEQ ID NO: 1883469
uucuguuauuugcuguuaa

SEQ ID NO: 2195889 - RNA, 19 nt, Artificial Sequence
  Description of Artificial Sequence: Synthetic oligonucleotide
  Antisense strand to SEQ ID NO: 2195888
uuaacagcaaauaacagaa

SEQ ID NO: 2195890 - RNA, 19 nt, Artificial Sequence
  Description of Artificial Sequence: Synthetic oligonucleotide
  Sense strand starting at position 2274 of SEQ ID NO: 1883469
cuuucuauugaaggacuga

SEQ ID NO: 2195891 - RNA, 19 nt, Artificial Sequence
  Description of Artificial Sequence: Synthetic oligonucleotide
  Antisense strand to SEQ ID NO: 2195890
ucaguccuucaauagaaag

SEQ ID NO: 2195892 - RNA, 19 nt, Artificial Sequence
  Description of Artificial Sequence: Synthetic oligonucleotide
  Sense strand starting at position 2427 of SEQ ID NO: 1883469
ccaggauuccucuggagua

SEQ ID NO: 2195893 - RNA, 19 nt, Artificial Sequence
  Description of Artificial Sequence: Synthetic oligonucleotide
  Antisense strand to SEQ ID NO: 2195892
uacuccagaggaauccugg

SEQ ID NO: 2195894 - RNA, 19 nt, Artificial Sequence
  Description of Artificial Sequence: Synthetic oligonucleotide
  Sense strand starting at position 2503 of SEQ ID NO: 1883469
ugcuuuggaccugaauaua

SEQ ID NO: 2195895 - RNA, 19 nt, Artificial Sequence
  Description of Artificial Sequence: Synthetic oligonucleotide
  Antisense strand to SEQ ID NO: 2195894
uauauucagguccaaagca

SEQ ID NO: 2195896 - RNA, 19 nt, Artificial Sequence
  Description of Artificial Sequence: Synthetic oligonucleotide
  Sense strand starting at position 2511 of SEQ ID NO: 1883469
accugaauauacuuuccga

SEQ ID NO: 2195897 - RNA, 19 nt, Artificial Sequence
  Description of Artificial Sequence: Synthetic oligonucleotide
  Antisense strand to SEQ ID NO: 2195896
ucggaaaguauauucaggu

SEQ ID NO: 2195898 - RNA, 19 nt, Artificial Sequence
  Description of Artificial Sequence: Synthetic oligonucleotide
  Sense strand starting at position 2514 of SEQ ID NO: 1883469
ugaauauacuuuccgaagu

SEQ ID NO: 2195899 - RNA, 19 nt, Artificial Sequence
  Description of Artificial Sequence: Synthetic oligonucleotide
  Antisense strand to SEQ ID NO: 2195898
acuucggaaaguauauuca

SEQ ID NO: 2195900 - RNA, 19 nt, Artificial Sequence
  Description of Artificial Sequence: Synthetic oligonucleotide
  Sense strand starting at position 2582 of SEQ ID NO: 1883469
uaaugacuccgcgagaaau

SEQ ID NO: 2195901 - RNA, 19 nt, Artificial Sequence
  Description of Artificial Sequence: Synthetic oligonucleotide
  Antisense strand to SEQ ID NO: 2195900
auuucucgcggagucauua

SEQ ID NO: 2195902 - RNA, 19 nt, Artificial Sequence
  Description of Artificial Sequence: Synthetic oligonucleotide
  Sense strand starting at position 2755 of SEQ ID NO: 1883469
ugugucaauuugguuccua

SEQ ID NO: 2195903 - RNA, 19 nt, Artificial Sequence
  Description of Artificial Sequence: Synthetic oligonucleotide
  Antisense strand to SEQ ID NO: 2195902
uaggaaccaaauugacaca

SEQ ID NO: 2195904 - RNA, 19 nt, Artificial Sequence
  Description of Artificial Sequence: Synthetic oligonucleotide
  Sense strand starting at position 2756 of SEQ ID NO: 1883469
gugucaauuugguuccuag

SEQ ID NO: 2195905 - RNA, 19 nt, Artificial Sequence
  Description of Artificial Sequence: Synthetic oligonucleotide
  Antisense strand to SEQ ID NO: 2195904
cuaggaaccaaauugacac

SEQ ID NO: 2195906 - RNA, 19 nt, Artificial Sequence
  Description of Artificial Sequence: Synthetic oligonucleotide
  Sense strand starting at position 2868 of SEQ ID NO: 1883469
guaauuaucucauuguaga

SEQ ID NO: 2195907 - RNA, 19 nt, Artificial Sequence
  Description of Artificial Sequence: Synthetic oligonucleotide
  Antisense strand to SEQ ID NO: 2195906
ucuacaaugagauaauuac

SEQ ID NO: 2195908 - RNA, 19 nt, Artificial Sequence
  Description of Artificial Sequence: Synthetic oligonucleotide
  Sense strand starting at position 2914 of SEQ ID NO: 1883469
ugaauaacuuguccaagag

SEQ ID NO: 2195909 - RNA, 19 nt, Artificial Sequence
  Description of Artificial Sequence: Synthetic oligonucleotide
  Antisense strand to SEQ ID NO: 2195908
cucuuggacaaguuauuca

SEQ ID NO: 2195910 - RNA, 19 nt, Artificial Sequence
  Description of Artificial Sequence: Synthetic oligonucleotide
  Sense strand starting at position 2954 of SEQ ID NO: 1883469
guucuucuuccagaaucug

SEQ ID NO: 2195911 - RNA, 19 nt, Artificial Sequence
  Description of Artificial Sequence: Synthetic oligonucleotide
  Antisense strand to SEQ ID NO: 2195910
cagauucuggaagaagaac

SEQ ID NO: 2195912 - RNA, 19 nt, Artificial Sequence
  Description of Artificial Sequence: Synthetic oligonucleotide
  Sense strand starting at position 3108 of SEQ ID NO: 1883469
guggaagguuaggucagaa

SEQ ID NO: 2195913 - RNA, 19 nt, Artificial Sequence
  Description of Artificial Sequence: Synthetic oligonucleotide
  Antisense strand to SEQ ID NO: 2195912
uucugaccuaaccuuccac

SEQ ID NO: 2195914 - RNA, 19 nt, Artificial Sequence
  Description of Artificial Sequence: Synthetic oligonucleotide
  Sense strand starting at position 3554 of SEQ ID NO: 1883469
cgaagucuuaggcauaaac

SEQ ID NO: 2195915 - RNA, 19 nt, Artificial Sequence
  Description of Artificial Sequence: Synthetic oligonucleotide
  Antisense strand to SEQ ID NO: 2195914
guuuaugccuaagacuucg

SEQ ID NO: 2195916 - RNA, 19 nt, Artificial Sequence
  Description of Artificial Sequence: Synthetic oligonucleotide
  Sense strand starting at position 3597 of SEQ ID NO: 1883469
gggagcuagcaugacugau

SEQ ID NO: 2195917 - RNA, 19 nt, Artificial Sequence
  Description of Artificial Sequence: Synthetic oligonucleotide
  Antisense strand to SEQ ID NO: 2195916
aucagucaugcuagcuccc

SEQ ID NO: 2195918 - RNA, 19 nt, Artificial Sequence
  Description of Artificial Sequence: Synthetic oligonucleotide
  Sense strand starting at position 3609 of SEQ ID NO: 1883469
gacugauaguuacugguga

SEQ ID NO: 2195919 - RNA, 19 nt, Artificial Sequence
  Description of Artificial Sequence: Synthetic oligonucleotide
  Antisense strand to SEQ ID NO: 2195918
ucaccaguaacuaucaguc

SEQ ID NO: 2195920 - RNA, 19 nt, Artificial Sequence
  Description of Artificial Sequence: Synthetic oligonucleotide
  Sense strand starting at position 3634 of SEQ ID NO: 1883469
accauuacucagugauauc

SEQ ID NO: 2195921 - RNA, 19 nt, Artificial Sequence
  Description of Artificial Sequence: Synthetic oligonucleotide
  Antisense strand to SEQ ID NO: 2195920
gauaucacugaguaauggu

SEQ ID NO: 2195922 - RNA, 19 nt, Artificial Sequence
  Description of Artificial Sequence: Synthetic oligonucleotide
  Sense strand starting at position 3674 of SEQ ID NO: 1883469
agcucagagcugggacaau

SEQ ID NO: 2195923 - RNA, 19 nt, Artificial Sequence
  Description of Artificial Sequence: Synthetic oligonucleotide
  Antisense strand to SEQ ID NO: 2195922
auugucccagcucugagcu

SEQ ID NO: 2195924 - RNA, 19 nt, Artificial Sequence
  Description of Artificial Sequence: Synthetic oligonucleotide
  Sense strand starting at position 3820 of SEQ ID NO: 1883469
uagucaguccuguauacag

SEQ ID NO: 2195925 - RNA, 19 nt, Artificial Sequence
  Description of Artificial Sequence: Synthetic oligonucleotide
  Antisense strand to SEQ ID NO: 2195924
cuguauacaggacugacua

SEQ ID NO: 2195926 - RNA, 19 nt, Artificial Sequence
  Description of Artificial Sequence: Synthetic oligonucleotide
  Sense strand starting at position 3837 of SEQ ID NO: 1883469
agcacuaaagcugaugaau

SEQ ID NO: 2195927 - RNA, 19 nt, Artificial Sequence
  Description of Artificial Sequence: Synthetic oligonucleotide
  Antisense strand to SEQ ID NO: 2195926
auucaucagcuuuagugcu

SEQ ID NO: 2195928 - RNA, 19 nt, Artificial Sequence
  Description of Artificial Sequence: Synthetic oligonucleotide
  Sense strand starting at position 3846 of SEQ ID NO: 1883469
gcugaugaaugaucuaucu

SEQ ID NO: 2195929 - RNA, 19 nt, Artificial Sequence
  Description of Artificial Sequence: Synthetic oligonucleotide
  Antisense strand to SEQ ID NO: 2195928
agauagaucauucaucagc

SEQ ID NO: 2195930 - RNA, 19 nt, Artificial Sequence
  Description of Artificial Sequence: Synthetic oligonucleotide
  Sense strand starting at position 3903 of SEQ ID NO: 1883469
ugcaguacauuuguacauu

SEQ ID NO: 2195931 - RNA, 19 nt, Artificial Sequence
  Description of Artificial Sequence: Synthetic oligonucleotide
  Antisense strand to SEQ ID NO: 2195930
aauguacaaauguacugca

SEQ ID NO: 2195932 - RNA, 19 nt, Artificial Sequence
  Description of Artificial Sequence: Synthetic oligonucleotide
  Sense strand starting at position 3938 of SEQ ID NO: 1883469
gaggguagguacucaauaa

SEQ ID NO: 2195933 - RNA, 19 nt, Artificial Sequence
  Description of Artificial Sequence: Synthetic oligonucleotide
  Antisense strand to SEQ ID NO: 2195932
uuauugaguaccuacccuc

SEQ ID NO: 2195934 - RNA, 19 nt, Artificial Sequence
  Description of Artificial Sequence: Synthetic oligonucleotide
  Sense strand starting at position 55 of SEQ ID NO: 1883470
agcuguuacacuugggauu

SEQ ID NO: 2195935 - RNA, 19 nt, Artificial Sequence
  Description of Artificial Sequence: Synthetic oligonucleotide
  Antisense strand to SEQ ID NO: 2195934
aaucccaaguguaacagcu

SEQ ID NO: 2195936 - RNA, 19 nt, Artificial Sequence
  Description of Artificial Sequence: Synthetic oligonucleotide
  Sense strand starting at position 161 of SEQ ID NO: 1883470
gaguauuauuucuuagugc

SEQ ID NO: 2195937 - RNA, 19 nt, Artificial Sequence
  Description of Artificial Sequence: Synthetic oligonucleotide
  Antisense strand to SEQ ID NO: 2195936
gcacuaagaaauaauacuc

SEQ ID NO: 2195938 - RNA, 19 nt, Artificial Sequence
  Description of Artificial Sequence: Synthetic oligonucleotide
  Sense strand starting at position 176 of SEQ ID NO: 1883470
gugcuaagucuagauugac

SEQ ID NO: 2195939 - RNA, 19 nt, Artificial Sequence
  Description of Artificial Sequence: Synthetic oligonucleotide
  Antisense strand to SEQ ID NO: 2195938
gucaaucuagacuuagcac

SEQ ID NO: 2195940 - RNA, 19 nt, Artificial Sequence
  Description of Artificial Sequence: Synthetic oligonucleotide
  Sense strand starting at position 179 of SEQ ID NO: 1883470
cuaagucuagauugacuua

SEQ ID NO: 2195941 - RNA, 19 nt, Artificial Sequence
  Description of Artificial Sequence: Synthetic oligonucleotide
  Antisense strand to SEQ ID NO: 2195940
uaagucaaucuagacuuag

SEQ ID NO: 2195942 - RNA, 19 nt, Artificial Sequence
  Description of Artificial Sequence: Synthetic oligonucleotide
  Sense strand starting at position 182 of SEQ ID NO: 1883470
agucuagauugacuuaaua

SEQ ID NO: 2195943 - RNA, 19 nt, Artificial Sequence
  Description of Artificial Sequence: Synthetic oligonucleotide
  Antisense strand to SEQ ID NO: 2195942
uauuaagucaaucuagacu

SEQ ID NO: 2195944 - RNA, 19 nt, Artificial Sequence
  Description of Artificial Sequence: Synthetic oligonucleotide
  Sense strand starting at position 217 of SEQ ID NO: 1883470
ggcuguggacuauaacuaa

SEQ ID NO: 2195945 - RNA, 19 nt, Artificial Sequence
  Description of Artificial Sequence: Synthetic oligonucleotide
  Antisense strand to SEQ ID NO: 2195944
uuaguuauaguccacagcc

SEQ ID NO: 2195946 - RNA, 19 nt, Artificial Sequence
  Description of Artificial Sequence: Synthetic oligonucleotide
  Sense strand starting at position 338 of SEQ ID NO: 1883470
agaauuucuuggcauguua

SEQ ID NO: 2195947 - RNA, 19 nt, Artificial Sequence
  Description of Artificial Sequence: Synthetic oligonucleotide
  Antisense strand to SEQ ID NO: 2195946
uaacaugccaagaaauucu

SEQ ID NO: 2195948 - RNA, 19 nt, Artificial Sequence
  Description of Artificial Sequence: Synthetic oligonucleotide
  Sense strand starting at position 345 of SEQ ID NO: 1883470
cuuggcauguuacuaauaa

SEQ ID NO: 2195949 - RNA, 19 nt, Artificial Sequence
  Description of Artificial Sequence: Synthetic oligonucleotide
  Antisense strand to SEQ ID NO: 2195948
uuauuaguaacaugccaag

SEQ ID NO: 2195950 - RNA, 19 nt, Artificial Sequence
  Description of Artificial Sequence: Synthetic oligonucleotide
  Sense strand starting at position 381 of SEQ ID NO: 1883470
augaauaugugaucuuuga

SEQ ID NO: 2195951 - RNA, 19 nt, Artificial Sequence
  Description of Artificial Sequence: Synthetic oligonucleotide
  Antisense strand to SEQ ID NO: 2195950
ucaaagaucacauauucau

SEQ ID NO: 2195952 - RNA, 19 nt, Artificial Sequence
  Description of Artificial Sequence: Synthetic oligonucleotide
  Sense strand starting at position 385 of SEQ ID NO: 1883470
auaugugaucuuugaaguu

SEQ ID NO: 2195953 - RNA, 19 nt, Artificial Sequence
  Description of Artificial Sequence: Synthetic oligonucleotide
  Antisense strand to SEQ ID NO: 2195952
aacuucaaagaucacauau

SEQ ID NO: 2195954 - RNA, 19 nt, Artificial Sequence
  Description of Artificial Sequence: Synthetic oligonucleotide
  Sense strand starting at position 508 of SEQ ID NO: 1883470
ugaggaugccgugggaaau

SEQ ID NO: 2195955 - RNA, 19 nt, Artificial Sequence
  Description of Artificial Sequence: Synthetic oligonucleotide
  Antisense strand to SEQ ID NO: 2195954
auuucccacggcauccuca

SEQ ID NO: 2195956 - RNA, 19 nt, Artificial Sequence
  Description of Artificial Sequence: Synthetic oligonucleotide
  Sense strand starting at position 525 of SEQ ID NO: 1883470
augucaucuuuccucauga

SEQ ID NO: 2195957 - RNA, 19 nt, Artificial Sequence
  Description of Artificial Sequence: Synthetic oligonucleotide
  Antisense strand to SEQ ID NO: 2195956
ucaugaggaaagaugacau

SEQ ID NO: 2195958 - RNA, 19 nt, Artificial Sequence
  Description of Artificial Sequence: Synthetic oligonucleotide
  Sense strand starting at position 526 of SEQ ID NO: 1883470
ugucaucuuuccucaugau

SEQ ID NO: 2195959 - RNA, 19 nt, Artificial Sequence
  Description of Artificial Sequence: Synthetic oligonucleotide
  Antisense strand to SEQ ID NO: 2195958
aucaugaggaaagaugaca

SEQ ID NO: 2195960 - RNA, 19 nt, Artificial Sequence
  Description of Artificial Sequence: Synthetic oligonucleotide
  Sense strand starting at position 527 of SEQ ID NO: 1883470
gucaucuuuccucaugauc

SEQ ID NO: 2195961 - RNA, 19 nt, Artificial Sequence
  Description of Artificial Sequence: Synthetic oligonucleotide
  Antisense strand to SEQ ID NO: 2195960
gaucaugaggaaagaugac

SEQ ID NO: 2195962 - RNA, 19 nt, Artificial Sequence
  Description of Artificial Sequence: Synthetic oligonucleotide
  Sense strand starting at position 764 of SEQ ID NO: 1883470
gaaaucgucuuucugucaa

SEQ ID NO: 2195963 - RNA, 19 nt, Artificial Sequence
  Description of Artificial Sequence: Synthetic oligonucleotide
  Antisense strand to SEQ ID NO: 2195962
uugacagaaagacgauuuc

SEQ ID NO: 2195964 - RNA, 19 nt, Artificial Sequence
  Description of Artificial Sequence: Synthetic oligonucleotide
  Sense strand starting at position 766 of SEQ ID NO: 1883470
aaucgucuuucugucaaag

SEQ ID NO: 2195965 - RNA, 19 nt, Artificial Sequence
  Description of Artificial Sequence: Synthetic oligonucleotide
  Antisense strand to SEQ ID NO: 2195964
cuuugacagaaagacgauu

SEQ ID NO: 2195966 - RNA, 19 nt, Artificial Sequence
  Description of Artificial Sequence: Synthetic oligonucleotide
  Sense strand starting at position 1660 of SEQ ID NO: 1883470
cugcgacuuccucacaagu

SEQ ID NO: 2195967 - RNA, 19 nt, Artificial Sequence
  Description of Artificial Sequence: Synthetic oligonucleotide
  Antisense strand to SEQ ID NO: 2195966
acuugugaggaagucgcag

SEQ ID NO: 2195968 - RNA, 19 nt, Artificial Sequence
  Description of Artificial Sequence: Synthetic oligonucleotide
  Sense strand starting at position 1841 of SEQ ID NO: 1883470
cggaucugccaccauagaa

SEQ ID NO: 2195969 - RNA, 19 nt, Artificial Sequence
  Description of Artificial Sequence: Synthetic oligonucleotide
  Antisense strand to SEQ ID NO: 2195968
uucuaugguggcagauccg

SEQ ID NO: 2195970 - RNA, 19 nt, Artificial Sequence
  Description of Artificial Sequence: Synthetic oligonucleotide
  Sense strand starting at position 2104 of SEQ ID NO: 1883470
cgcgucuucgugaaggaga

SEQ ID NO: 2195971 - RNA, 19 nt, Artificial Sequence
  Description of Artificial Sequence: Synthetic oligonucleotide
  Antisense strand to SEQ ID NO: 2195970
ucuccuucacgaagacgcg

SEQ ID NO: 2195972 - RNA, 19 nt, Artificial Sequence
  Description of Artificial Sequence: Synthetic oligonucleotide
  Sense strand starting at position 2121 of SEQ ID NO: 1883470
gaacucuugcguucugcua

SEQ ID NO: 2195973 - RNA, 19 nt, Artificial Sequence
  Description of Artificial Sequence: Synthetic oligonucleotide
  Antisense strand to SEQ ID NO: 2195972
uagcagaacgcaagaguuc

SEQ ID NO: 2195974 - RNA, 19 nt, Artificial Sequence
  Description of Artificial Sequence: Synthetic oligonucleotide
  Sense strand starting at position 2177 of SEQ ID NO: 1883470
agcucuaggaggugucuaa

SEQ ID NO: 2195975 - RNA, 19 nt, Artificial Sequence
  Description of Artificial Sequence: Synthetic oligonucleotide
  Antisense strand to SEQ ID NO: 2195974
uuagacaccuccuagagcu

SEQ ID NO: 2195976 - RNA, 19 nt, Artificial Sequence
  Description of Artificial Sequence: Synthetic oligonucleotide
  Sense strand starting at position 2337 of SEQ ID NO: 1883470
gucgcugguucgaugcaga

SEQ ID NO: 2195977 - RNA, 19 nt, Artificial Sequence
  Description of Artificial Sequence: Synthetic oligonucleotide
  Antisense strand to SEQ ID NO: 2195976
ucugcaucgaaccagcgac

SEQ ID NO: 2195978 - RNA, 19 nt, Artificial Sequence
  Description of Artificial Sequence: Synthetic oligonucleotide
  Sense strand starting at position 2344 of SEQ ID NO: 1883470
guucgaugcagaggaagaa

SEQ ID NO: 2195979 - RNA, 19 nt, Artificial Sequence
  Description of Artificial Sequence: Synthetic oligonucleotide
  Antisense strand to SEQ ID NO: 2195978
uucuuccucugcaucgaac

SEQ ID NO: 2195980 - RNA, 19 nt, Artificial Sequence
  Description of Artificial Sequence: Synthetic oligonucleotide
  Sense strand starting at position 2491 of SEQ ID NO: 1883470
gagcgaaauaagugacaga

SEQ ID NO: 2195981 - RNA, 19 nt, Artificial Sequence
  Description of Artificial Sequence: Synthetic oligonucleotide
  Antisense strand to SEQ ID NO: 2195980
ucugucacuuauuucgcuc

SEQ ID NO: 2195982 - RNA, 19 nt, Artificial Sequence
  Description of Artificial Sequence: Synthetic oligonucleotide
  Sense strand starting at position 2494 of SEQ ID NO: 1883470
cgaaauaagugacagauuu

SEQ ID NO: 2195983 - RNA, 19 nt, Artificial Sequence
  Description of Artificial Sequence: Synthetic oligonucleotide
  Antisense strand to SEQ ID NO: 2195982
aaaucugucacuuauuucg

SEQ ID NO: 2195984 - RNA, 19 nt, Artificial Sequence
  Description of Artificial Sequence: Synthetic oligonucleotide
  Sense strand starting at position 2605 of SEQ ID NO: 1883470
uggccaaacguguagacaa

SEQ ID NO: 2195985 - RNA, 19 nt, Artificial Sequence
  Description of Artificial Sequence: Synthetic oligonucleotide
  Antisense strand to SEQ ID NO: 2195984
uugucuacacguuuggcca

SEQ ID NO: 2195986 - RNA, 19 nt, Artificial Sequence
  Description of Artificial Sequence: Synthetic oligonucleotide
  Sense strand starting at position 2735 of SEQ ID NO: 1883470
gcagucugacgugggauuu

SEQ ID NO: 2195987 - RNA, 19 nt, Artificial Sequence
  Description of Artificial Sequence: Synthetic oligonucleotide
  Antisense strand to SEQ ID NO: 2195986
aaaucccacgucagacugc

SEQ ID NO: 2195988 - RNA, 19 nt, Artificial Sequence
  Description of Artificial Sequence: Synthetic oligonucleotide
  Sense strand starting at position 2862 of SEQ ID NO: 1883470
uuuauuaggcuguaaugag

SEQ ID NO: 2195989 - RNA, 19 nt, Artificial Sequence
  Description of Artificial Sequence: Synthetic oligonucleotide
  Antisense strand to SEQ ID NO: 2195988
cucauuacagccuaauaaa

SEQ ID NO: 2195990 - RNA, 19 nt, Artificial Sequence
  Description of Artificial Sequence: Synthetic oligonucleotide
  Sense strand starting at position 2866 of SEQ ID NO: 1883470
uuaggcuguaaugaguaua

SEQ ID NO: 2195991 - RNA, 19 nt, Artificial Sequence
  Description of Artificial Sequence: Synthetic oligonucleotide
  Antisense strand to SEQ ID NO: 2195990
uauacucauuacagccuaa

SEQ ID NO: 2195992 - RNA, 19 nt, Artificial Sequence
  Description of Artificial Sequence: Synthetic oligonucleotide
  Sense strand starting at position 2897 of SEQ ID NO: 1883470
uccguauaauagcuuacaa

SEQ ID NO: 2195993 - RNA, 19 nt, Artificial Sequence
  Description of Artificial Sequence: Synthetic oligonucleotide
  Antisense strand to SEQ ID NO: 2195992
uuguaagcuauuauacgga

SEQ ID NO: 2195994 - RNA, 19 nt, Artificial Sequence
  Description of Artificial Sequence: Synthetic oligonucleotide
  Sense strand starting at position 3002 of SEQ ID NO: 1883470
ugcccagauugucuuauuu

SEQ ID NO: 2195995 - RNA, 19 nt, Artificial Sequence
  Description of Artificial Sequence: Synthetic oligonucleotide
  Antisense strand to SEQ ID NO: 2195994
aaauaagacaaucugggca

SEQ ID NO: 2195996 - RNA, 19 nt, Artificial Sequence
  Description of Artificial Sequence: Synthetic oligonucleotide
  Sense strand starting at position 3020 of SEQ ID NO: 1883470
uuugguuaucgcugaagaa

SEQ ID NO: 2195997 - RNA, 19 nt, Artificial Sequence
  Description of Artificial Sequence: Synthetic oligonucleotide
  Antisense strand to SEQ ID NO: 2195996
uucuucagcgauaaccaaa

SEQ ID NO: 2195998 - RNA, 19 nt, Artificial Sequence
  Description of Artificial Sequence: Synthetic oligonucleotide
  Sense strand starting at position 3021 of SEQ ID NO: 1883470
uugguuaucgcugaagaaa

SEQ ID NO: 2195999 - RNA, 19 nt, Artificial Sequence
  Description of Artificial Sequence: Synthetic oligonucleotide
  Antisense strand to SEQ ID NO: 2195998
uuucuucagcgauaaccaa

SEQ ID NO: 2196000 - RNA, 19 nt, Artificial Sequence
  Description of Artificial Sequence: Synthetic oligonucleotide
  Sense strand starting at position 3490 of SEQ ID NO: 1883470
ugaggaugccaagguguuu

SEQ ID NO: 2196001 - RNA, 19 nt, Artificial Sequence
  Description of Artificial Sequence: Synthetic oligonucleotide
  Antisense strand to SEQ ID NO: 2196000
aaacaccuuggcauccuca

SEQ ID NO: 2196002 - RNA, 19 nt, Artificial Sequence
  Description of Artificial Sequence: Synthetic oligonucleotide
  Sense strand starting at position 3499 of SEQ ID NO: 1883470
caagguguuuagguuuauu

SEQ ID NO: 2196003 - RNA, 19 nt, Artificial Sequence
  Description of Artificial Sequence: Synthetic oligonucleotide
  Antisense strand to SEQ ID NO: 2196002
aauaaaccuaaacaccuug

SEQ ID NO: 2196004 - RNA, 19 nt, Artificial Sequence
  Description of Artificial Sequence: Synthetic oligonucleotide
  Sense strand starting at position 3698 of SEQ ID NO: 1883470
aggucaaagccaugacuua

SEQ ID NO: 2196005 - RNA, 19 nt, Artificial Sequence
  Description of Artificial Sequence: Synthetic oligonucleotide
  Antisense strand to SEQ ID NO: 2196004
uaagucauggcuuugaccu

SEQ ID NO: 2196006 - RNA, 19 nt, Artificial Sequence
  Description of Artificial Sequence: Synthetic oligonucleotide
  Sense strand starting at position 3825 of SEQ ID NO: 1883470
uucuucuguggugaucuau

SEQ ID NO: 2196007 - RNA, 19 nt, Artificial Sequence
  Description of Artificial Sequence: Synthetic oligonucleotide
  Antisense strand to SEQ ID NO: 2196006
auagaucaccacagaagaa

SEQ ID NO: 2196008 - RNA, 19 nt, Artificial Sequence
  Description of Artificial Sequence: Synthetic oligonucleotide
  Sense strand starting at position 3887 of SEQ ID NO: 1883470
guagaaaugugacuaagau

SEQ ID NO: 2196009 - RNA, 19 nt, Artificial Sequence
  Description of Artificial Sequence: Synthetic oligonucleotide
  Antisense strand to SEQ ID NO: 2196008
aucuuagucacauuucuac

SEQ ID NO: 2196010 - RNA, 19 nt, Artificial Sequence
  Description of Artificial Sequence: Synthetic oligonucleotide
  Sense strand starting at position 3893 of SEQ ID NO: 1883470
augugacuaagauguuuga

SEQ ID NO: 2196011 - RNA, 19 nt, Artificial Sequence
  Description of Artificial Sequence: Synthetic oligonucleotide
  Antisense strand to SEQ ID NO: 2196010
ucaaacaucuuagucacau

SEQ ID NO: 2196012 - RNA, 19 nt, Artificial Sequence
  Description of Artificial Sequence: Synthetic oligonucleotide
  Sense strand starting at position 3896 of SEQ ID NO: 1883470
ugacuaagauguuugaaca

SEQ ID NO: 2196013 - RNA, 19 nt, Artificial Sequence
  Description of Artificial Sequence: Synthetic oligonucleotide
  Antisense strand to SEQ ID NO: 2196012
uguucaaacaucuuaguca

SEQ ID NO: 2196014 - RNA, 19 nt, Artificial Sequence
  Description of Artificial Sequence: Synthetic oligonucleotide
  Sense strand starting at position 237 of SEQ ID NO: 1883471
uccagaguacuuggacuca

SEQ ID NO: 2196015 - RNA, 19 nt, Artificial Sequence
  Description of Artificial Sequence: Synthetic oligonucleotide
  Antisense strand to SEQ ID NO: 2196014
ugaguccaaguacucugga

SEQ ID NO: 2196016 - RNA, 19 nt, Artificial Sequence
  Description of Artificial Sequence: Synthetic oligonucleotide
  Sense strand starting at position 248 of SEQ ID NO: 1883471
uggacucaugcuuaaaccu

SEQ ID NO: 2196017 - RNA, 19 nt, Artificial Sequence
  Description of Artificial Sequence: Synthetic oligonucleotide
  Antisense strand to SEQ ID NO: 2196016
agguuuaagcaugagucca

SEQ ID NO: 2196018 - RNA, 19 nt, Artificial Sequence
  Description of Artificial Sequence: Synthetic oligonucleotide
  Sense strand starting at position 397 of SEQ ID NO: 1883471
cgaaauaaacagcgacuua

SEQ ID NO: 2196019 - RNA, 19 nt, Artificial Sequence
  Description of Artificial Sequence: Synthetic oligonucleotide
  Antisense strand to SEQ ID NO: 2196018
uaagucgcuguuuauuucg

SEQ ID NO: 2196020 - RNA, 19 nt, Artificial Sequence
  Description of Artificial Sequence: Synthetic oligonucleotide
  Sense strand starting at position 456 of SEQ ID NO: 1883471
cuaaguaggaaugguuaga

SEQ ID NO: 2196021 - RNA, 19 nt, Artificial Sequence
  Description of Artificial Sequence: Synthetic oligonucleotide
  Antisense strand to SEQ ID NO: 2196020
ucuaaccauuccuacuuag

SEQ ID NO: 2196022 - RNA, 19 nt, Artificial Sequence
  Description of Artificial Sequence: Synthetic oligonucleotide
  Sense strand starting at position 530 of SEQ ID NO: 1883471
cugggcaaguccuuuacuu

SEQ ID NO: 2196023 - RNA, 19 nt, Artificial Sequence
  Description of Artificial Sequence: Synthetic oligonucleotide
  Antisense strand to SEQ ID NO: 2196022
aaguaaaggacuugcccag

SEQ ID NO: 2196024 - RNA, 19 nt, Artificial Sequence
  Description of Artificial Sequence: Synthetic oligonucleotide
  Sense strand starting at position 585 of SEQ ID NO: 1883471
gcugauaacuuucugguaa

SEQ ID NO: 2196025 - RNA, 19 nt, Artificial Sequence
  Description of Artificial Sequence: Synthetic oligonucleotide
  Antisense strand to SEQ ID NO: 2196024
uuaccagaaaguuaucagc

SEQ ID NO: 2196026 - RNA, 19 nt, Artificial Sequence
  Description of Artificial Sequence: Synthetic oligonucleotide
  Sense strand starting at position 597 of SEQ ID NO: 1883471
cugguaaggugguucugaa

SEQ ID NO: 2196027 - RNA, 19 nt, Artificial Sequence
  Description of Artificial Sequence: Synthetic oligonucleotide
  Antisense strand to SEQ ID NO: 2196026
uucagaaccaccuuaccag

SEQ ID NO: 2196028 - RNA, 19 nt, Artificial Sequence
  Description of Artificial Sequence: Synthetic oligonucleotide
  Sense strand starting at position 699 of SEQ ID NO: 1883471
gaggcauugagaggaauuc

SEQ ID NO: 2196029 - RNA, 19 nt, Artificial Sequence
  Description of Artificial Sequence: Synthetic oligonucleotide
  Antisense strand to SEQ ID NO: 2196028
gaauuccucucaaugccuc

SEQ ID NO: 2196030 - RNA, 19 nt, Artificial Sequence
  Description of Artificial Sequence: Synthetic oligonucleotide
  Sense strand starting at position 773 of SEQ ID NO: 1883471
agaccuagagucugauucu

SEQ ID NO: 2196031 - RNA, 19 nt, Artificial Sequence
  Description of Artificial Sequence: Synthetic oligonucleotide
  Antisense strand to SEQ ID NO: 2196030
agaaucagacucuaggucu

SEQ ID NO: 2196032 - RNA, 19 nt, Artificial Sequence
  Description of Artificial Sequence: Synthetic oligonucleotide
  Sense strand starting at position 786 of SEQ ID NO: 1883471
gauucuggcaagugguuua

SEQ ID NO: 2196033 - RNA, 19 nt, Artificial Sequence
  Description of Artificial Sequence: Synthetic oligonucleotide
  Antisense strand to SEQ ID NO: 2196032
uaaaccacuugccagaauc

SEQ ID NO: 2196034 - RNA, 19 nt, Artificial Sequence
  Description of Artificial Sequence: Synthetic oligonucleotide
  Sense strand starting at position 855 of SEQ ID NO: 1883471
ggaagccaucagugucauu

SEQ ID NO: 2196035 - RNA, 19 nt, Artificial Sequence
  Description of Artificial Sequence: Synthetic oligonucleotide
  Antisense strand to SEQ ID NO: 2196034
aaugacacugauggcuucc

SEQ ID NO: 2196036 - RNA, 19 nt, Artificial Sequence
  Description of Artificial Sequence: Synthetic oligonucleotide
  Sense strand starting at position 1049 of SEQ ID NO: 1883471
gcucuacacggucacauau

SEQ ID NO: 2196037 - RNA, 19 nt, Artificial Sequence
  Description of Artificial Sequence: Synthetic oligonucleotide
  Antisense strand to SEQ ID NO: 2196036
auaugugaccguguagagc

SEQ ID NO: 2196038 - RNA, 19 nt, Artificial Sequence
  Description of Artificial Sequence: Synthetic oligonucleotide
  Sense strand starting at position 1283 of SEQ ID NO: 1883471
agcacuguuugcucaauaa

SEQ ID NO: 2196039 - RNA, 19 nt, Artificial Sequence
  Description of Artificial Sequence: Synthetic oligonucleotide
  Antisense strand to SEQ ID NO: 2196038
uuauugagcaaacagugcu

SEQ ID NO: 2196040 - RNA, 19 nt, Artificial Sequence
  Description of Artificial Sequence: Synthetic oligonucleotide
  Sense strand starting at position 1287 of SEQ ID NO: 1883471
cuguuugcucaauaaggag

SEQ ID NO: 2196041 - RNA, 19 nt, Artificial Sequence
  Description of Artificial Sequence: Synthetic oligonucleotide
  Antisense strand to SEQ ID NO: 2196040
cuccuuauugagcaaacag

SEQ ID NO: 2196042 - RNA, 19 nt, Artificial Sequence
  Description of Artificial Sequence: Synthetic oligonucleotide
  Sense strand starting at position 2212 of SEQ ID NO: 1883471
cacacuagggugugaaauu

SEQ ID NO: 2196043 - RNA, 19 nt, Artificial Sequence
  Description of Artificial Sequence: Synthetic oligonucleotide
  Antisense strand to SEQ ID NO: 2196042
aauuucacacccuagugug

SEQ ID NO: 2196044 - RNA, 19 nt, Artificial Sequence
  Description of Artificial Sequence: Synthetic oligonucleotide
  Sense strand starting at position 2302 of SEQ ID NO: 1883471
caggauguccgaggagaua

SEQ ID NO: 2196045 - RNA, 19 nt, Artificial Sequence
  Description of Artificial Sequence: Synthetic oligonucleotide
  Antisense strand to SEQ ID NO: 2196044
uaucuccucggacauccug

SEQ ID NO: 2196046 - RNA, 19 nt, Artificial Sequence
  Description of Artificial Sequence: Synthetic oligonucleotide
  Sense strand starting at position 2356 of SEQ ID NO: 1883471
gagggcucccagugggaaa

SEQ ID NO: 2196047 - RNA, 19 nt, Artificial Sequence
  Description of Artificial Sequence: Synthetic oligonucleotide
  Antisense strand to SEQ ID NO: 2196046
uuucccacugggagcccuc

SEQ ID NO: 2196048 - RNA, 19 nt, Artificial Sequence
  Description of Artificial Sequence: Synthetic oligonucleotide
  Sense strand starting at position 2948 of SEQ ID NO: 1883471
cucugcucauuggucagaa

SEQ ID NO: 2196049 - RNA, 19 nt, Artificial Sequence
  Description of Artificial Sequence: Synthetic oligonucleotide
  Antisense strand to SEQ ID NO: 2196048
uucugaccaaugagcagag

SEQ ID NO: 2196050 - RNA, 19 nt, Artificial Sequence
  Description of Artificial Sequence: Synthetic oligonucleotide
  Sense strand starting at position 3066 of SEQ ID NO: 1883471
gagucucuuccuugggcaa

SEQ ID NO: 2196051 - RNA, 19 nt, Artificial Sequence
  Description of Artificial Sequence: Synthetic oligonucleotide
  Antisense strand to SEQ ID NO: 2196050
uugcccaaggaagagacuc

SEQ ID NO: 2196052 - RNA, 19 nt, Artificial Sequence
  Description of Artificial Sequence: Synthetic oligonucleotide
  Sense strand starting at position 3069 of SEQ ID NO: 1883471
ucucuuccuugggcaagaa

SEQ ID NO: 2196053 - RNA, 19 nt, Artificial Sequence
  Description of Artificial Sequence: Synthetic oligonucleotide
  Antisense strand to SEQ ID NO: 2196052
uucuugcccaaggaagaga

SEQ ID NO: 2196054 - RNA, 19 nt, Artificial Sequence
  Description of Artificial Sequence: Synthetic oligonucleotide
  Sense strand starting at position 3070 of SEQ ID NO: 1883471
cucuuccuugggcaagaaa

SEQ ID NO: 2196055 - RNA, 19 nt, Artificial Sequence
  Description of Artificial Sequence: Synthetic oligonucleotide
  Antisense strand to SEQ ID NO: 2196054
uuucuugcccaaggaagag

SEQ ID NO: 2196056 - RNA, 19 nt, Artificial Sequence
  Description of Artificial Sequence: Synthetic oligonucleotide
  Sense strand starting at position 3221 of SEQ ID NO: 1883471
uugaacuagcgucauguau

SEQ ID NO: 2196057 - RNA, 19 nt, Artificial Sequence
  Description of Artificial Sequence: Synthetic oligonucleotide
  Antisense strand to SEQ ID NO: 2196056
auacaugacgcuaguucaa

SEQ ID NO: 2196058 - RNA, 19 nt, Artificial Sequence
  Description of Artificial Sequence: Synthetic oligonucleotide
  Sense strand starting at position 3225 of SEQ ID NO: 1883471
acuagcgucauguauagau

SEQ ID NO: 2196059 - RNA, 19 nt, Artificial Sequence
  Description of Artificial Sequence: Synthetic oligonucleotide
  Antisense strand to SEQ ID NO: 2196058
aucuauacaugacgcuagu

SEQ ID NO: 2196060 - RNA, 19 nt, Artificial Sequence
  Description of Artificial Sequence: Synthetic oligonucleotide
  Sense strand starting at position 3227 of SEQ ID NO: 1883471
uagcgucauguauagauca

SEQ ID NO: 2196061 - RNA, 19 nt, Artificial Sequence
  Description of Artificial Sequence: Synthetic oligonucleotide
  Antisense strand to SEQ ID NO: 2196060
ugaucuauacaugacgcua

SEQ ID NO: 2196062 - RNA, 19 nt, Artificial Sequence
  Description of Artificial Sequence: Synthetic oligonucleotide
  Sense strand starting at position 3229 of SEQ ID NO: 1883471
gcgucauguauagaucauc

SEQ ID NO: 2196063 - RNA, 19 nt, Artificial Sequence
  Description of Artificial Sequence: Synthetic oligonucleotide
  Antisense strand to SEQ ID NO: 2196062
gaugaucuauacaugacgc

SEQ ID NO: 2196064 - RNA, 19 nt, Artificial Sequence
  Description of Artificial Sequence: Synthetic oligonucleotide
  Sense strand starting at position 3550 of SEQ ID NO: 1883471
gcuuguguucauggaagag

SEQ ID NO: 2196065 - RNA, 19 nt, Artificial Sequence
  Description of Artificial Sequence: Synthetic oligonucleotide
  Antisense strand to SEQ ID NO: 2196064
cucuuccaugaacacaagc

SEQ ID NO: 2196066 - RNA, 19 nt, Artificial Sequence
  Description of Artificial Sequence: Synthetic oligonucleotide
  Sense strand starting at position 3554 of SEQ ID NO: 1883471
guguucauggaagagguuu

SEQ ID NO: 2196067 - RNA, 19 nt, Artificial Sequence
  Description of Artificial Sequence: Synthetic oligonucleotide
  Antisense strand to SEQ ID NO: 2196066
aaaccucuuccaugaacac

SEQ ID NO: 2196068 - RNA, 19 nt, Artificial Sequence
  Description of Artificial Sequence: Synthetic oligonucleotide
  Sense strand starting at position 3565 of SEQ ID NO: 1883471
agagguuuaugaucccuau

SEQ ID NO: 2196069 - RNA, 19 nt, Artificial Sequence
  Description of Artificial Sequence: Synthetic oligonucleotide
  Antisense strand to SEQ ID NO: 2196068
auagggaucauaaaccucu

SEQ ID NO: 2196070 - RNA, 19 nt, Artificial Sequence
  Description of Artificial Sequence: Synthetic oligonucleotide
  Sense strand starting at position 3568 of SEQ ID NO: 1883471
gguuuaugaucccuauaga

SEQ ID NO: 2196071 - RNA, 19 nt, Artificial Sequence
  Description of Artificial Sequence: Synthetic oligonucleotide
  Antisense strand to SEQ ID NO: 2196070
ucuauagggaucauaaacc

SEQ ID NO: 2196072 - RNA, 19 nt, Artificial Sequence
  Description of Artificial Sequence: Synthetic oligonucleotide
  Sense strand starting at position 3569 of SEQ ID NO: 1883471
guuuaugaucccuauagac

SEQ ID NO: 2196073 - RNA, 19 nt, Artificial Sequence
  Description of Artificial Sequence: Synthetic oligonucleotide
  Antisense strand to SEQ ID NO: 2196072
gucuauagggaucauaaac

SEQ ID NO: 2196074 - RNA, 19 nt, Artificial Sequence
  Description of Artificial Sequence: Synthetic oligonucleotide
  Sense strand starting at position 3598 of SEQ ID NO: 1883471
aagagauggugcucaugau

SEQ ID NO: 2196075 - RNA, 19 nt, Artificial Sequence
  Description of Artificial Sequence: Synthetic oligonucleotide
  Antisense strand to SEQ ID NO: 2196074
aucaugagcaccaucucuu

SEQ ID NO: 2196076 - RNA, 19 nt, Artificial Sequence
  Description of Artificial Sequence: Synthetic oligonucleotide
  Sense strand starting at position 3599 of SEQ ID NO: 1883471
agagauggugcucaugauu

SEQ ID NO: 2196077 - RNA, 19 nt, Artificial Sequence
  Description of Artificial Sequence: Synthetic oligonucleotide
  Antisense strand to SEQ ID NO: 2196076
aaucaugagcaccaucucu

SEQ ID NO: 2196078 - RNA, 19 nt, Artificial Sequence
  Description of Artificial Sequence: Synthetic oligonucleotide
  Sense strand starting at position 3639 of SEQ ID NO: 1883471
augugccucugauccaauu

SEQ ID NO: 2196079 - RNA, 19 nt, Artificial Sequence
  Description of Artificial Sequence: Synthetic oligonucleotide
  Antisense strand to SEQ ID NO: 2196078
aauuggaucagaggcacau

SEQ ID NO: 2196080 - RNA, 19 nt, Artificial Sequence
  Description of Artificial Sequence: Synthetic oligonucleotide
  Sense strand starting at position 3683 of SEQ ID NO: 1883471
cugcuagggucuucuagaa

SEQ ID NO: 2196081 - RNA, 19 nt, Artificial Sequence
  Description of Artificial Sequence: Synthetic oligonucleotide
  Antisense strand to SEQ ID NO: 2196080
uucuagaagacccuagcag

SEQ ID NO: 2196082 - RNA, 19 nt, Artificial Sequence
  Description of Artificial Sequence: Synthetic oligonucleotide
  Sense strand starting at position 3703 of SEQ ID NO: 1883471
agauucccuuccucaggaa

SEQ ID NO: 2196083 - RNA, 19 nt, Artificial Sequence
  Description of Artificial Sequence: Synthetic oligonucleotide
  Antisense strand to SEQ ID NO: 2196082
uuccugaggaagggaaucu

SEQ ID NO: 2196084 - RNA, 19 nt, Artificial Sequence
  Description of Artificial Sequence: Synthetic oligonucleotide
  Sense strand starting at position 3759 of SEQ ID NO: 1883471
ugcaaaugugaugguugga

SEQ ID NO: 2196085 - RNA, 19 nt, Artificial Sequence
  Description of Artificial Sequence: Synthetic oligonucleotide
  Antisense strand to SEQ ID NO: 2196084
uccaaccaucacauuugca

SEQ ID NO: 2196086 - RNA, 19 nt, Artificial Sequence
  Description of Artificial Sequence: Synthetic oligonucleotide
  Sense strand starting at position 3796 of SEQ ID NO: 1883471
gguauaugaggcugagaau

SEQ ID NO: 2196087 - RNA, 19 nt, Artificial Sequence
  Description of Artificial Sequence: Synthetic oligonucleotide
  Antisense strand to SEQ ID NO: 2196086
auucucagccucauauacc

SEQ ID NO: 2196088 - RNA, 19 nt, Artificial Sequence
  Description of Artificial Sequence: Synthetic oligonucleotide
  Sense strand starting at position 3799 of SEQ ID NO: 1883471
auaugaggcugagaauaaa

SEQ ID NO: 2196089 - RNA, 19 nt, Artificial Sequence
  Description of Artificial Sequence: Synthetic oligonucleotide
  Antisense strand to SEQ ID NO: 2196088
uuuauucucagccucauau

SEQ ID NO: 2196090 - RNA, 19 nt, Artificial Sequence
  Description of Artificial Sequence: Synthetic oligonucleotide
  Sense strand starting at position 3946 of SEQ ID NO: 1883471
aacuguaguuagucugaau

SEQ ID NO: 2196091 - RNA, 19 nt, Artificial Sequence
  Description of Artificial Sequence: Synthetic oligonucleotide
  Antisense strand to SEQ ID NO: 2196090
auucagacuaacuacaguu

SEQ ID NO: 2196092 - RNA, 19 nt, Artificial Sequence
  Description of Artificial Sequence: Synthetic oligonucleotide
  Sense strand starting at position 3978 of SEQ ID NO: 1883471
agucaaguuguauacuaau

SEQ ID NO: 2196093 - RNA, 19 nt, Artificial Sequence
  Description of Artificial Sequence: Synthetic oligonucleotide
  Antisense strand to SEQ ID NO: 2196092
auuaguauacaacuugacu

SEQ ID NO: 2196094 - RNA, 19 nt, Artificial Sequence
  Description of Artificial Sequence: Synthetic oligonucleotide
  Sense strand starting at position 111 of SEQ ID NO: 1883472
auguaacugguauguacaa

SEQ ID NO: 2196095 - RNA, 19 nt, Artificial Sequence
  Description of Artificial Sequence: Synthetic oligonucleotide
  Antisense strand to SEQ ID NO: 2196094
uuguacauaccaguuacau

SEQ ID NO: 2196096 - RNA, 19 nt, Artificial Sequence
  Description of Artificial Sequence: Synthetic oligonucleotide
  Sense strand starting at position 112 of SEQ ID NO: 1883472
uguaacugguauguacaaa

SEQ ID NO: 2196097 - RNA, 19 nt, Artificial Sequence
  Description of Artificial Sequence: Synthetic oligonucleotide
  Antisense strand to SEQ ID NO: 2196096
uuuguacauaccaguuaca

SEQ ID NO: 2196098 - RNA, 19 nt, Artificial Sequence
  Description of Artificial Sequence: Synthetic oligonucleotide
  Sense strand starting at position 271 of SEQ ID NO: 1883472
uuucuaacacuguguuacu

SEQ ID NO: 2196099 - RNA, 19 nt, Artificial Sequence
  Description of Artificial Sequence: Synthetic oligonucleotide
  Antisense strand to SEQ ID NO: 2196098
aguaacacaguguuagaaa

SEQ ID NO: 2196100 - RNA, 19 nt, Artificial Sequence
  Description of Artificial Sequence: Synthetic oligonucleotide
  Sense strand starting at position 373 of SEQ ID NO: 1883472
gcacuaucccaagaaagca

SEQ ID NO: 2196101 - RNA, 19 nt, Artificial Sequence
  Description of Artificial Sequence: Synthetic oligonucleotide
  Antisense strand to SEQ ID NO: 2196100
ugcuuucuugggauagugc

SEQ ID NO: 2196102 - RNA, 19 nt, Artificial Sequence
  Description of Artificial Sequence: Synthetic oligonucleotide
  Sense strand starting at position 722 of SEQ ID NO: 1883472
cauuaaugugauggaauac

SEQ ID NO: 2196103 - RNA, 19 nt, Artificial Sequence
  Description of Artificial Sequence: Synthetic oligonucleotide
  Antisense strand to SEQ ID NO: 2196102
guauuccaucacauuaaug

SEQ ID NO: 2196104 - RNA, 19 nt, Artificial Sequence
  Description of Artificial Sequence: Synthetic oligonucleotide
  Sense strand starting at position 760 of SEQ ID NO: 1883472
caguguaauccagacaugu

SEQ ID NO: 2196105 - RNA, 19 nt, Artificial Sequence
  Description of Artificial Sequence: Synthetic oligonucleotide
  Antisense strand to SEQ ID NO: 2196104
acaugucuggauuacacug

SEQ ID NO: 2196106 - RNA, 19 nt, Artificial Sequence
  Description of Artificial Sequence: Synthetic oligonucleotide
  Sense strand starting at position 762 of SEQ ID NO: 1883472
guguaauccagacauguca

SEQ ID NO: 2196107 - RNA, 19 nt, Artificial Sequence
  Description of Artificial Sequence: Synthetic oligonucleotide
  Antisense strand to SEQ ID NO: 2196106
ugacaugucuggauuacac

SEQ ID NO: 2196108 - RNA, 19 nt, Artificial Sequence
  Description of Artificial Sequence: Synthetic oligonucleotide
  Sense strand starting at position 990 of SEQ ID NO: 1883472
auagaacuuggcuaccuua

SEQ ID NO: 2196109 - RNA, 19 nt, Artificial Sequence
  Description of Artificial Sequence: Synthetic oligonucleotide
  Antisense strand to SEQ ID NO: 2196108
uaagguagccaaguucuau

SEQ ID NO: 2196110 - RNA, 19 nt, Artificial Sequence
  Description of Artificial Sequence: Synthetic oligonucleotide
  Sense strand starting at position 1001 of SEQ ID NO: 1883472
cuaccuuagccaugaugaa

SEQ ID NO: 2196111 - RNA, 19 nt, Artificial Sequence
  Description of Artificial Sequence: Synthetic oligonucleotide
  Antisense strand to SEQ ID NO: 2196110
uucaucauggcuaagguag

SEQ ID NO: 2196112 - RNA, 19 nt, Artificial Sequence
  Description of Artificial Sequence: Synthetic oligonucleotide
  Sense strand starting at position 1005 of SEQ ID NO: 1883472
cuuagccaugaugaauauu

SEQ ID NO: 2196113 - RNA, 19 nt, Artificial Sequence
  Description of Artificial Sequence: Synthetic oligonucleotide
  Antisense strand to SEQ ID NO: 2196112
aauauucaucauggcuaag

SEQ ID NO: 2196114 - RNA, 19 nt, Artificial Sequence
  Description of Artificial Sequence: Synthetic oligonucleotide
  Sense strand starting at position 1101 of SEQ ID NO: 1883472
aggcaacauugagcaauaa

SEQ ID NO: 2196115 - RNA, 19 nt, Artificial Sequence
  Description of Artificial Sequence: Synthetic oligonucleotide
  Antisense strand to SEQ ID NO: 2196114
uuauugcucaauguugccu

SEQ ID NO: 2196116 - RNA, 19 nt, Artificial Sequence
  Description of Artificial Sequence: Synthetic oligonucleotide
  Sense strand starting at position 1178 of SEQ ID NO: 1883472
agacgaaagaugcgguaaa

SEQ ID NO: 2196117 - RNA, 19 nt, Artificial Sequence
  Description of Artificial Sequence: Synthetic oligonucleotide
  Antisense strand to SEQ ID NO: 2196116
uuuaccgcaucuuucgucu

SEQ ID NO: 2196118 - RNA, 19 nt, Artificial Sequence
  Description of Artificial Sequence: Synthetic oligonucleotide
  Sense strand starting at position 2490 of SEQ ID NO: 1883472
aguugugguacucaaacuu

SEQ ID NO: 2196119 - RNA, 19 nt, Artificial Sequence
  Description of Artificial Sequence: Synthetic oligonucleotide
  Antisense strand to SEQ ID NO: 2196118
aaguuugaguaccacaacu

SEQ ID NO: 2196120 - RNA, 19 nt, Artificial Sequence
  Description of Artificial Sequence: Synthetic oligonucleotide
  Sense strand starting at position 2568 of SEQ ID NO: 1883472
ccguaaucucuggagucag

SEQ ID NO: 2196121 - RNA, 19 nt, Artificial Sequence
  Description of Artificial Sequence: Synthetic oligonucleotide
  Antisense strand to SEQ ID NO: 2196120
cugacuccagagauuacgg

SEQ ID NO: 2196122 - RNA, 19 nt, Artificial Sequence
  Description of Artificial Sequence: Synthetic oligonucleotide
  Sense strand starting at position 2643 of SEQ ID NO: 1883472
ugaauaaaguugccuagga

SEQ ID NO: 2196123 - RNA, 19 nt, Artificial Sequence
  Description of Artificial Sequence: Synthetic oligonucleotide
  Antisense strand to SEQ ID NO: 2196122
uccuaggcaacuuuauuca

SEQ ID NO: 2196124 - RNA, 19 nt, Artificial Sequence
  Description of Artificial Sequence: Synthetic oligonucleotide
  Sense strand starting at position 2644 of SEQ ID NO: 1883472
gaauaaaguugccuaggau

SEQ ID NO: 2196125 - RNA, 19 nt, Artificial Sequence
  Description of Artificial Sequence: Synthetic oligonucleotide
  Antisense strand to SEQ ID NO: 2196124
auccuaggcaacuuuauuc

SEQ ID NO: 2196126 - RNA, 19 nt, Artificial Sequence
  Description of Artificial Sequence: Synthetic oligonucleotide
  Sense strand starting at position 2647 of SEQ ID NO: 1883472
uaaaguugccuaggauacu

SEQ ID NO: 2196127 - RNA, 19 nt, Artificial Sequence
  Description of Artificial Sequence: Synthetic oligonucleotide
  Antisense strand to SEQ ID NO: 2196126
aguauccuaggcaacuuua

SEQ ID NO: 2196128 - RNA, 19 nt, Artificial Sequence
  Description of Artificial Sequence: Synthetic oligonucleotide
  Sense strand starting at position 2653 of SEQ ID NO: 1883472
ugccuaggauacuuaagua

SEQ ID NO: 2196129 - RNA, 19 nt, Artificial Sequence
  Description of Artificial Sequence: Synthetic oligonucleotide
  Antisense strand to SEQ ID NO: 2196128
uacuuaaguauccuaggca

SEQ ID NO: 2196130 - RNA, 19 nt, Artificial Sequence
  Description of Artificial Sequence: Synthetic oligonucleotide
  Sense strand starting at position 2657 of SEQ ID NO: 1883472
uaggauacuuaaguauagu

SEQ ID NO: 2196131 - RNA, 19 nt, Artificial Sequence
  Description of Artificial Sequence: Synthetic oligonucleotide
  Antisense strand to SEQ ID NO: 2196130
acuauacuuaaguauccua

SEQ ID NO: 2196132 - RNA, 19 nt, Artificial Sequence
  Description of Artificial Sequence: Synthetic oligonucleotide
  Sense strand starting at position 2663 of SEQ ID NO: 1883472
acuuaaguauaguugcaga

SEQ ID NO: 2196133 - RNA, 19 nt, Artificial Sequence
  Description of Artificial Sequence: Synthetic oligonucleotide
  Antisense strand to SEQ ID NO: 2196132
ucugcaacuauacuuaagu

SEQ ID NO: 2196134 - RNA, 19 nt, Artificial Sequence
  Description of Artificial Sequence: Synthetic oligonucleotide
  Sense strand starting at position 2806 of SEQ ID NO: 1883472
ggcaaagauuccuugucuc

SEQ ID NO: 2196135 - RNA, 19 nt, Artificial Sequence
  Description of Artificial Sequence: Synthetic oligonucleotide
  Antisense strand to SEQ ID NO: 2196134
gagacaaggaaucuuugcc

SEQ ID NO: 2196136 - RNA, 19 nt, Artificial Sequence
  Description of Artificial Sequence: Synthetic oligonucleotide
  Sense strand starting at position 2898 of SEQ ID NO: 1883472
agugaucauuuagaaagua

SEQ ID NO: 2196137 - RNA, 19 nt, Artificial Sequence
  Description of Artificial Sequence: Synthetic oligonucleotide
  Antisense strand to SEQ ID NO: 2196136
uacuuucuaaaugaucacu

SEQ ID NO: 2196138 - RNA, 19 nt, Artificial Sequence
  Description of Artificial Sequence: Synthetic oligonucleotide
  Sense strand starting at position 2954 of SEQ ID NO: 1883472
gugcaacaguaucuuagaa

SEQ ID NO: 2196139 - RNA, 19 nt, Artificial Sequence
  Description of Artificial Sequence: Synthetic oligonucleotide
  Antisense strand to SEQ ID NO: 2196138
uucuaagauacuguugcac

SEQ ID NO: 2196140 - RNA, 19 nt, Artificial Sequence
  Description of Artificial Sequence: Synthetic oligonucleotide
  Sense strand starting at position 3033 of SEQ ID NO: 1883472
uuaaguucugguuagacag

SEQ ID NO: 2196141 - RNA, 19 nt, Artificial Sequence
  Description of Artificial Sequence: Synthetic oligonucleotide
  Antisense strand to SEQ ID NO: 2196140
cugucuaaccagaacuuaa

SEQ ID NO: 2196142 - RNA, 19 nt, Artificial Sequence
  Description of Artificial Sequence: Synthetic oligonucleotide
  Sense strand starting at position 3205 of SEQ ID NO: 1883472
ugcuaugagccaggaacuu

SEQ ID NO: 2196143 - RNA, 19 nt, Artificial Sequence
  Description of Artificial Sequence: Synthetic oligonucleotide
  Antisense strand to SEQ ID NO: 2196142
aaguuccuggcucauagca

SEQ ID NO: 2196144 - RNA, 19 nt, Artificial Sequence
  Description of Artificial Sequence: Synthetic oligonucleotide
  Sense strand starting at position 3266 of SEQ ID NO: 1883472
gucuuugauccuuaguauc

SEQ ID NO: 2196145 - RNA, 19 nt, Artificial Sequence
  Description of Artificial Sequence: Synthetic oligonucleotide
  Antisense strand to SEQ ID NO: 2196144
gauacuaaggaucaaagac

SEQ ID NO: 2196146 - RNA, 19 nt, Artificial Sequence
  Description of Artificial Sequence: Synthetic oligonucleotide
  Sense strand starting at position 3268 of SEQ ID NO: 1883472
cuuugauccuuaguaucau

SEQ ID NO: 2196147 - RNA, 19 nt, Artificial Sequence
  Description of Artificial Sequence: Synthetic oligonucleotide
  Antisense strand to SEQ ID NO: 2196146
augauacuaaggaucaaag

SEQ ID NO: 2196148 - RNA, 19 nt, Artificial Sequence
  Description of Artificial Sequence: Synthetic oligonucleotide
  Sense strand starting at position 3277 of SEQ ID NO: 1883472
uuaguaucauggcuuugga

SEQ ID NO: 2196149 - RNA, 19 nt, Artificial Sequence
  Description of Artificial Sequence: Synthetic oligonucleotide
  Antisense strand to SEQ ID NO: 2196148
uccaaagccaugauacuaa

SEQ ID NO: 2196150 - RNA, 19 nt, Artificial Sequence
  Description of Artificial Sequence: Synthetic oligonucleotide
  Sense strand starting at position 3309 of SEQ ID NO: 1883472
gaauuuaaauucuagugga

SEQ ID NO: 2196151 - RNA, 19 nt, Artificial Sequence
  Description of Artificial Sequence: Synthetic oligonucleotide
  Antisense strand to SEQ ID NO: 2196150
uccacuagaauuuaaauuc

SEQ ID NO: 2196152 - RNA, 19 nt, Artificial Sequence
  Description of Artificial Sequence: Synthetic oligonucleotide
  Sense strand starting at position 3326 of SEQ ID NO: 1883472
gagcaagaauuaguguuau

SEQ ID NO: 2196153 - RNA, 19 nt, Artificial Sequence
  Description of Artificial Sequence: Synthetic oligonucleotide
  Antisense strand to SEQ ID NO: 2196152
auaacacuaauucuugcuc

SEQ ID NO: 2196154 - RNA, 19 nt, Artificial Sequence
  Description of Artificial Sequence: Synthetic oligonucleotide
  Sense strand starting at position 3340 of SEQ ID NO: 1883472
guuauaaucuugguaaagg

SEQ ID NO: 2196155 - RNA, 19 nt, Artificial Sequence
  Description of Artificial Sequence: Synthetic oligonucleotide
  Antisense strand to SEQ ID NO: 2196154
ccuuuaccaagauuauaac

SEQ ID NO: 2196156 - RNA, 19 nt, Artificial Sequence
  Description of Artificial Sequence: Synthetic oligonucleotide
  Sense strand starting at position 3411 of SEQ ID NO: 1883472
uguacaguuccugacacaa

SEQ ID NO: 2196157 - RNA, 19 nt, Artificial Sequence
  Description of Artificial Sequence: Synthetic oligonucleotide
  Antisense strand to SEQ ID NO: 2196156
uugugucaggaacuguaca

SEQ ID NO: 2196158 - RNA, 19 nt, Artificial Sequence
  Description of Artificial Sequence: Synthetic oligonucleotide
  Sense strand starting at position 3442 of SEQ ID NO: 1883472
agcaaauuguggcuauaua

SEQ ID NO: 2196159 - RNA, 19 nt, Artificial Sequence
  Description of Artificial Sequence: Synthetic oligonucleotide
  Antisense strand to SEQ ID NO: 2196158
uauauagccacaauuugcu

SEQ ID NO: 2196160 - RNA, 19 nt, Artificial Sequence
  Description of Artificial Sequence: Synthetic oligonucleotide
  Sense strand starting at position 3443 of SEQ ID NO: 1883472
gcaaauuguggcuauauac

SEQ ID NO: 2196161 - RNA, 19 nt, Artificial Sequence
  Description of Artificial Sequence: Synthetic oligonucleotide
  Antisense strand to SEQ ID NO: 2196160
guauauagccacaauuugc

SEQ ID NO: 2196162 - RNA, 19 nt, Artificial Sequence
  Description of Artificial Sequence: Synthetic oligonucleotide
  Sense strand starting at position 3451 of SEQ ID NO: 1883472
uggcuauauacagguaaug

SEQ ID NO: 2196163 - RNA, 19 nt, Artificial Sequence
  Description of Artificial Sequence: Synthetic oligonucleotide
  Antisense strand to SEQ ID NO: 2196162
cauuaccuguauauagcca

SEQ ID NO: 2196164 - RNA, 19 nt, Artificial Sequence
  Description of Artificial Sequence: Synthetic oligonucleotide
  Sense strand starting at position 3495 of SEQ ID NO: 1883472
cggaaauaguaaucgcuua

SEQ ID NO: 2196165 - RNA, 19 nt, Artificial Sequence
  Description of Artificial Sequence: Synthetic oligonucleotide
  Antisense strand to SEQ ID NO: 2196164
uaagcgauuacuauuuccg

SEQ ID NO: 2196166 - RNA, 19 nt, Artificial Sequence
  Description of Artificial Sequence: Synthetic oligonucleotide
  Sense strand starting at position 3496 of SEQ ID NO: 1883472
ggaaauaguaaucgcuuac

SEQ ID NO: 2196167 - RNA, 19 nt, Artificial Sequence
  Description of Artificial Sequence: Synthetic oligonucleotide
  Antisense strand to SEQ ID NO: 2196166
guaagcgauuacuauuucc

SEQ ID NO: 2196168 - RNA, 19 nt, Artificial Sequence
  Description of Artificial Sequence: Synthetic oligonucleotide
  Sense strand starting at position 3621 of SEQ ID NO: 1883472
acagcuagucacuaugaga

SEQ ID NO: 2196169 - RNA, 19 nt, Artificial Sequence
  Description of Artificial Sequence: Synthetic oligonucleotide
  Antisense strand to SEQ ID NO: 2196168
ucucauagugacuagcugu

SEQ ID NO: 2196170 - RNA, 19 nt, Artificial Sequence
  Description of Artificial Sequence: Synthetic oligonucleotide
  Sense strand starting at position 3650 of SEQ ID NO: 1883472
gaacucaagcagugugacu

SEQ ID NO: 2196171 - RNA, 19 nt, Artificial Sequence
  Description of Artificial Sequence: Synthetic oligonucleotide
  Antisense strand to SEQ ID NO: 2196170
agucacacugcuugaguuc

SEQ ID NO: 2196172 - RNA, 19 nt, Artificial Sequence
  Description of Artificial Sequence: Synthetic oligonucleotide
  Sense strand starting at position 3950 of SEQ ID NO: 1883472
ggguuaaauuguguuuaaa

SEQ ID NO: 2196173 - RNA, 19 nt, Artificial Sequence
  Description of Artificial Sequence: Synthetic oligonucleotide
  Antisense strand to SEQ ID NO: 2196172
uuuaaacacaauuuaaccc

SEQ ID NO: 2196174 - RNA, 19 nt, Artificial Sequence
  Description of Artificial Sequence: Synthetic oligonucleotide
  Sense strand starting at position 296 of SEQ ID NO: 1883473
uagguuuauaucugagggu

SEQ ID NO: 2196175 - RNA, 19 nt, Artificial Sequence
  Description of Artificial Sequence: Synthetic oligonucleotide
  Antisense strand to SEQ ID NO: 2196174
acccucagauauaaaccua

SEQ ID NO: 2196176 - RNA, 19 nt, Artificial Sequence
  Description of Artificial Sequence: Synthetic oligonucleotide
  Sense strand starting at position 300 of SEQ ID NO: 1883473
uuuauaucugaggguaggu

SEQ ID NO: 2196177 - RNA, 19 nt, Artificial Sequence
  Description of Artificial Sequence: Synthetic oligonucleotide
  Antisense strand to SEQ ID NO: 2196176
accuacccucagauauaaa

SEQ ID NO: 2196178 - RNA, 19 nt, Artificial Sequence
  Description of Artificial Sequence: Synthetic oligonucleotide
  Sense strand starting at position 305 of SEQ ID NO: 1883473
aucugaggguagguauuau

SEQ ID NO: 2196179 - RNA, 19 nt, Artificial Sequence
  Description of Artificial Sequence: Synthetic oligonucleotide
  Antisense strand to SEQ ID NO: 2196178
auaauaccuacccucagau

SEQ ID NO: 2196180 - RNA, 19 nt, Artificial Sequence
  Description of Artificial Sequence: Synthetic oligonucleotide
  Sense strand starting at position 314 of SEQ ID NO: 1883473
uagguauuauugcuaggaa

SEQ ID NO: 2196181 - RNA, 19 nt, Artificial Sequence
  Description of Artificial Sequence: Synthetic oligonucleotide
  Antisense strand to SEQ ID NO: 2196180
uuccuagcaauaauaccua

SEQ ID NO: 2196182 - RNA, 19 nt, Artificial Sequence
  Description of Artificial Sequence: Synthetic oligonucleotide
  Sense strand starting at position 317 of SEQ ID NO: 1883473
guauuauugcuaggaagaa

SEQ ID NO: 2196183 - RNA, 19 nt, Artificial Sequence
  Description of Artificial Sequence: Synthetic oligonucleotide
  Antisense strand to SEQ ID NO: 2196182
uucuuccuagcaauaauac

SEQ ID NO: 2196184 - RNA, 19 nt, Artificial Sequence
  Description of Artificial Sequence: Synthetic oligonucleotide
  Sense strand starting at position 346 of SEQ ID NO: 1883473
gaaagaaguuuguugagca

SEQ ID NO: 2196185 - RNA, 19 nt, Artificial Sequence
  Description of Artificial Sequence: Synthetic oligonucleotide
  Antisense strand to SEQ ID NO: 2196184
ugcucaacaaacuucuuuc

SEQ ID NO: 2196186 - RNA, 19 nt, Artificial Sequence
  Description of Artificial Sequence: Synthetic oligonucleotide
  Sense strand starting at position 391 of SEQ ID NO: 1883473
auauuaugucauuaggcag

SEQ ID NO: 2196187 - RNA, 19 nt, Artificial Sequence
  Description of Artificial Sequence: Synthetic oligonucleotide
  Antisense strand to SEQ ID NO: 2196186
cugccuaaugacauaauau

SEQ ID NO: 2196188 - RNA, 19 nt, Artificial Sequence
  Description of Artificial Sequence: Synthetic oligonucleotide
  Sense strand starting at position 398 of SEQ ID NO: 1883473
gucauuaggcaguauuaua

SEQ ID NO: 2196189 - RNA, 19 nt, Artificial Sequence
  Description of Artificial Sequence: Synthetic oligonucleotide
  Antisense strand to SEQ ID NO: 2196188
uauaauacugccuaaugac

SEQ ID NO: 2196190 - RNA, 19 nt, Artificial Sequence
  Description of Artificial Sequence: Synthetic oligonucleotide
  Sense strand starting at position 420 of SEQ ID NO: 1883473
uaguuauuagagugggaac

SEQ ID NO: 2196191 - RNA, 19 nt, Artificial Sequence
  Description of Artificial Sequence: Synthetic oligonucleotide
  Antisense strand to SEQ ID NO: 2196190
guucccacucuaauaacua

SEQ ID NO: 2196192 - RNA, 19 nt, Artificial Sequence
  Description of Artificial Sequence: Synthetic oligonucleotide
  Sense strand starting at position 421 of SEQ ID NO: 1883473
aguuauuagagugggaacu

SEQ ID NO: 2196193 - RNA, 19 nt, Artificial Sequence
  Description of Artificial Sequence: Synthetic oligonucleotide
  Antisense strand to SEQ ID NO: 2196192
aguucccacucuaauaacu

SEQ ID NO: 2196194 - RNA, 19 nt, Artificial Sequence
  Description of Artificial Sequence: Synthetic oligonucleotide
  Sense strand starting at position 422 of SEQ ID NO: 1883473
guuauuagagugggaacuu

SEQ ID NO: 2196195 - RNA, 19 nt, Artificial Sequence
  Description of Artificial Sequence: Synthetic oligonucleotide
  Antisense strand to SEQ ID NO: 2196194
aaguucccacucuaauaac

SEQ ID NO: 2196196 - RNA, 19 nt, Artificial Sequence
  Description of Artificial Sequence: Synthetic oligonucleotide
  Sense strand starting at position 495 of SEQ ID NO: 1883473
guuuguggcguguuuccua

SEQ ID NO: 2196197 - RNA, 19 nt, Artificial Sequence
  Description of Artificial Sequence: Synthetic oligonucleotide
  Antisense strand to SEQ ID NO: 2196196
uaggaaacacgccacaaac

SEQ ID NO: 2196198 - RNA, 19 nt, Artificial Sequence
  Description of Artificial Sequence: Synthetic oligonucleotide
  Sense strand starting at position 537 of SEQ ID NO: 1883473
auggcacuucugcaaggau

SEQ ID NO: 2196199 - RNA, 19 nt, Artificial Sequence
  Description of Artificial Sequence: Synthetic oligonucleotide
  Antisense strand to SEQ ID NO: 2196198
auccuugcagaagugccau

SEQ ID NO: 2196200 - RNA, 19 nt, Artificial Sequence
  Description of Artificial Sequence: Synthetic oligonucleotide
  Sense strand starting at position 581 of SEQ ID NO: 1883473
auguguucucaauaaaugu

SEQ ID NO: 2196201 - RNA, 19 nt, Artificial Sequence
  Description of Artificial Sequence: Synthetic oligonucleotide
  Antisense strand to SEQ ID NO: 2196200
acauuuauugagaacacau

SEQ ID NO: 2196202 - RNA, 19 nt, Artificial Sequence
  Description of Artificial Sequence: Synthetic oligonucleotide
  Sense strand starting at position 595 of SEQ ID NO: 1883473
aauguaagcgauuacuauu

SEQ ID NO: 2196203 - RNA, 19 nt, Artificial Sequence
  Description of Artificial Sequence: Synthetic oligonucleotide
  Antisense strand to SEQ ID NO: 2196202
aauaguaaucgcuuacauu

SEQ ID NO: 2196204 - RNA, 19 nt, Artificial Sequence
  Description of Artificial Sequence: Synthetic oligonucleotide
  Sense strand starting at position 803 of SEQ ID NO: 1883473
cgaauugauuggguuccaa

SEQ ID NO: 2196205 - RNA, 19 nt, Artificial Sequence
  Description of Artificial Sequence: Synthetic oligonucleotide
  Antisense strand to SEQ ID NO: 2196204
uuggaacccaaucaauucg

SEQ ID NO: 2196206 - RNA, 19 nt, Artificial Sequence
  Description of Artificial Sequence: Synthetic oligonucleotide
  Sense strand starting at position 813 of SEQ ID NO: 1883473
ggguuccaaagccaugaua

SEQ ID NO: 2196207 - RNA, 19 nt, Artificial Sequence
  Description of Artificial Sequence: Synthetic oligonucleotide
  Antisense strand to SEQ ID NO: 2196206
uaucauggcuuuggaaccc

SEQ ID NO: 2196208 - RNA, 19 nt, Artificial Sequence
  Description of Artificial Sequence: Synthetic oligonucleotide
  Sense strand starting at position 939 of SEQ ID NO: 1883473
ucuguuugggagugaagga

SEQ ID NO: 2196209 - RNA, 19 nt, Artificial Sequence
  Description of Artificial Sequence: Synthetic oligonucleotide
  Antisense strand to SEQ ID NO: 2196208
uccuucacucccaaacaga

SEQ ID NO: 2196210 - RNA, 19 nt, Artificial Sequence
  Description of Artificial Sequence: Synthetic oligonucleotide
  Sense strand starting at position 1084 of SEQ ID NO: 1883473
gccucuuggugauuuacau

SEQ ID NO: 2196211 - RNA, 19 nt, Artificial Sequence
  Description of Artificial Sequence: Synthetic oligonucleotide
  Antisense strand to SEQ ID NO: 2196210
auguaaaucaccaagaggc

SEQ ID NO: 2196212 - RNA, 19 nt, Artificial Sequence
  Description of Artificial Sequence: Synthetic oligonucleotide
  Sense strand starting at position 1088 of SEQ ID NO: 1883473
cuuggugauuuacaugaaa

SEQ ID NO: 2196213 - RNA, 19 nt, Artificial Sequence
  Description of Artificial Sequence: Synthetic oligonucleotide
  Antisense strand to SEQ ID NO: 2196212
uuucauguaaaucaccaag

SEQ ID NO: 2196214 - RNA, 19 nt, Artificial Sequence
  Description of Artificial Sequence: Synthetic oligonucleotide
  Sense strand starting at position 1496 of SEQ ID NO: 1883473
agcacaaauccaugaauug

SEQ ID NO: 2196215 - RNA, 19 nt, Artificial Sequence
  Description of Artificial Sequence: Synthetic oligonucleotide
  Antisense strand to SEQ ID NO: 2196214
caauucauggauuugugcu

SEQ ID NO: 2196216 - RNA, 19 nt, Artificial Sequence
  Description of Artificial Sequence: Synthetic oligonucleotide
  Sense strand starting at position 1534 of SEQ ID NO: 1883473
agagauuacggcugaacug

SEQ ID NO: 2196217 - RNA, 19 nt, Artificial Sequence
  Description of Artificial Sequence: Synthetic oligonucleotide
  Antisense strand to SEQ ID NO: 2196216
caguucagccguaaucucu

SEQ ID NO: 2196218 - RNA, 19 nt, Artificial Sequence
  Description of Artificial Sequence: Synthetic oligonucleotide
  Sense strand starting at position 1606 of SEQ ID NO: 1883473
guuugaguaccacaacucu

SEQ ID NO: 2196219 - RNA, 19 nt, Artificial Sequence
  Description of Artificial Sequence: Synthetic oligonucleotide
  Antisense strand to SEQ ID NO: 2196218
agaguugugguacucaaac

SEQ ID NO: 2196220 - RNA, 19 nt, Artificial Sequence
  Description of Artificial Sequence: Synthetic oligonucleotide
  Sense strand starting at position 1976 of SEQ ID NO: 1883473
gaaaguuggcgcucgcuga

SEQ ID NO: 2196221 - RNA, 19 nt, Artificial Sequence
  Description of Artificial Sequence: Synthetic oligonucleotide
  Antisense strand to SEQ ID NO: 2196220
ucagcgagcgccaacuuuc

SEQ ID NO: 2196222 - RNA, 19 nt, Artificial Sequence
  Description of Artificial Sequence: Synthetic oligonucleotide
  Sense strand starting at position 2866 of SEQ ID NO: 1883473
ugauaaugccuuugauuaa

SEQ ID NO: 2196223 - RNA, 19 nt, Artificial Sequence
  Description of Artificial Sequence: Synthetic oligonucleotide
  Antisense strand to SEQ ID NO: 2196222
uuaaucaaaggcauuauca

SEQ ID NO: 2196224 - RNA, 19 nt, Artificial Sequence
  Description of Artificial Sequence: Synthetic oligonucleotide
  Sense strand starting at position 2921 of SEQ ID NO: 1883473
cgcaucuuucgucuugcaa

SEQ ID NO: 2196225 - RNA, 19 nt, Artificial Sequence
  Description of Artificial Sequence: Synthetic oligonucleotide
  Antisense strand to SEQ ID NO: 2196224
uugcaagacgaaagaugcg

SEQ ID NO: 2196226 - RNA, 19 nt, Artificial Sequence
  Description of Artificial Sequence: Synthetic oligonucleotide
  Sense strand starting at position 2922 of SEQ ID NO: 1883473
gcaucuuucgucuugcaac

SEQ ID NO: 2196227 - RNA, 19 nt, Artificial Sequence
  Description of Artificial Sequence: Synthetic oligonucleotide
  Antisense strand to SEQ ID NO: 2196226
guugcaagacgaaagaugc

SEQ ID NO: 2196228 - RNA, 19 nt, Artificial Sequence
  Description of Artificial Sequence: Synthetic oligonucleotide
  Sense strand starting at position 3166 of SEQ ID NO: 1883473
accaaaguaguacgagaaa

SEQ ID NO: 2196229 - RNA, 19 nt, Artificial Sequence
  Description of Artificial Sequence: Synthetic oligonucleotide
  Antisense strand to SEQ ID NO: 2196228
uuucucguacuacuuuggu

SEQ ID NO: 2196230 - RNA, 19 nt, Artificial Sequence
  Description of Artificial Sequence: Synthetic oligonucleotide
  Sense strand starting at position 3180 of SEQ ID NO: 1883473
agaaacaguuuccuuguca

SEQ ID NO: 2196231 - RNA, 19 nt, Artificial Sequence
  Description of Artificial Sequence: Synthetic oligonucleotide
  Antisense strand to SEQ ID NO: 2196230
ugacaaggaaacuguuucu

SEQ ID NO: 2196232 - RNA, 19 nt, Artificial Sequence
  Description of Artificial Sequence: Synthetic oligonucleotide
  Sense strand starting at position 3215 of SEQ ID NO: 1883473
ugugaaccuggugguauuu

SEQ ID NO: 2196233 - RNA, 19 nt, Artificial Sequence
  Description of Artificial Sequence: Synthetic oligonucleotide
  Antisense strand to SEQ ID NO: 2196232
aaauaccaccagguucaca

SEQ ID NO: 2196234 - RNA, 19 nt, Artificial Sequence
  Description of Artificial Sequence: Synthetic oligonucleotide
  Sense strand starting at position 3224 of SEQ ID NO: 1883473
ggugguauuucuuugguuu

SEQ ID NO: 2196235 - RNA, 19 nt, Artificial Sequence
  Description of Artificial Sequence: Synthetic oligonucleotide
  Antisense strand to SEQ ID NO: 2196234
aaaccaaagaaauaccacc

SEQ ID NO: 2196236 - RNA, 19 nt, Artificial Sequence
  Description of Artificial Sequence: Synthetic oligonucleotide
  Sense strand starting at position 3290 of SEQ ID NO: 1883473
uguguauauagacaaguau

SEQ ID NO: 2196237 - RNA, 19 nt, Artificial Sequence
  Description of Artificial Sequence: Synthetic oligonucleotide
  Antisense strand to SEQ ID NO: 2196236
auacuugucuauauacaca

SEQ ID NO: 2196238 - RNA, 19 nt, Artificial Sequence
  Description of Artificial Sequence: Synthetic oligonucleotide
  Sense strand starting at position 3424 of SEQ ID NO: 1883473
gucaguuguaaugaggcaa

SEQ ID NO: 2196239 - RNA, 19 nt, Artificial Sequence
  Description of Artificial Sequence: Synthetic oligonucleotide
  Antisense strand to SEQ ID NO: 2196238
uugccucauuacaacugac

SEQ ID NO: 2196240 - RNA, 19 nt, Artificial Sequence
  Description of Artificial Sequence: Synthetic oligonucleotide
  Sense strand starting at position 3428 of SEQ ID NO: 1883473
guuguaaugaggcaacaac

SEQ ID NO: 2196241 - RNA, 19 nt, Artificial Sequence
  Description of Artificial Sequence: Synthetic oligonucleotide
  Antisense strand to SEQ ID NO: 2196240
guuguugccucauuacaac

SEQ ID NO: 2196242 - RNA, 19 nt, Artificial Sequence
  Description of Artificial Sequence: Synthetic oligonucleotide
  Sense strand starting at position 3452 of SEQ ID NO: 1883473
agagguuagaacugaguag

SEQ ID NO: 2196243 - RNA, 19 nt, Artificial Sequence
  Description of Artificial Sequence: Synthetic oligonucleotide
  Antisense strand to SEQ ID NO: 2196242
cuacucaguucuaaccucu

SEQ ID NO: 2196244 - RNA, 19 nt, Artificial Sequence
  Description of Artificial Sequence: Synthetic oligonucleotide
  Sense strand starting at position 3456 of SEQ ID NO: 1883473
guuagaacugaguaggcau

SEQ ID NO: 2196245 - RNA, 19 nt, Artificial Sequence
  Description of Artificial Sequence: Synthetic oligonucleotide
  Antisense strand to SEQ ID NO: 2196244
augccuacucaguucuaac

SEQ ID NO: 2196246 - RNA, 19 nt, Artificial Sequence
  Description of Artificial Sequence: Synthetic oligonucleotide
  Sense strand starting at position 3716 of SEQ ID NO: 1883473
auaacugcuuucuugggau

SEQ ID NO: 2196247 - RNA, 19 nt, Artificial Sequence
  Description of Artificial Sequence: Synthetic oligonucleotide
  Antisense strand to SEQ ID NO: 2196246
aucccaagaaagcaguuau

SEQ ID NO: 2196248 - RNA, 19 nt, Artificial Sequence
  Description of Artificial Sequence: Synthetic oligonucleotide
  Sense strand starting at position 3919 of SEQ ID NO: 1883473
uugcaaauuuggugaauuu

SEQ ID NO: 2196249 - RNA, 19 nt, Artificial Sequence
  Description of Artificial Sequence: Synthetic oligonucleotide
  Antisense strand to SEQ ID NO: 2196248
aaauucaccaaauuugcaa

SEQ ID NO: 2196250 - RNA, 19 nt, Artificial Sequence
  Description of Artificial Sequence: Synthetic oligonucleotide
  Sense strand starting at position 3945 of SEQ ID NO: 1883473
uuuggauauguagauuagu

SEQ ID NO: 2196251 - RNA, 19 nt, Artificial Sequence
  Description of Artificial Sequence: Synthetic oligonucleotide
  Antisense strand to SEQ ID NO: 2196250
acuaaucuacauauccaaa

SEQ ID NO: 2196252 - RNA, 19 nt, Artificial Sequence
  Description of Artificial Sequence: Synthetic oligonucleotide
  Sense strand starting at position 3956 of SEQ ID NO: 1883473
agauuaguuuccucugaau

SEQ ID NO: 2196253 - RNA, 19 nt, Artificial Sequence
  Description of Artificial Sequence: Synthetic oligonucleotide
  Antisense strand to SEQ ID NO: 2196252
auucagaggaaacuaaucu

SEQ ID NO: 2196254 - RNA, 19 nt, Artificial Sequence
  Description of Artificial Sequence: Synthetic oligonucleotide
  Sense strand starting at position 251 of SEQ ID NO: 1883474
gguggagaugcuuaauauu

SEQ ID NO: 2196255 - RNA, 19 nt, Artificial Sequence
  Description of Artificial Sequence: Synthetic oligonucleotide
  Antisense strand to SEQ ID NO: 2196254
aauauuaagcaucuccacc

SEQ ID NO: 2196256 - RNA, 19 nt, Artificial Sequence
  Description of Artificial Sequence: Synthetic oligonucleotide
  Sense strand starting at position 394 of SEQ ID NO: 1883474
aggauauacacuugacgua

SEQ ID NO: 2196257 - RNA, 19 nt, Artificial Sequence
  Description of Artificial Sequence: Synthetic oligonucleotide
  Antisense strand to SEQ ID NO: 2196256
uacgucaaguguauauccu

SEQ ID NO: 2196258 - RNA, 19 nt, Artificial Sequence
  Description of Artificial Sequence: Synthetic oligonucleotide
  Sense strand starting at position 513 of SEQ ID NO: 1883474
cuaugucaugaauggcaua

SEQ ID NO: 2196259 - RNA, 19 nt, Artificial Sequence
  Description of Artificial Sequence: Synthetic oligonucleotide
  Antisense strand to SEQ ID NO: 2196258
uaugccauucaugacauag

SEQ ID NO: 2196260 - RNA, 19 nt, Artificial Sequence
  Description of Artificial Sequence: Synthetic oligonucleotide
  Sense strand starting at position 527 of SEQ ID NO: 1883474
gcauauaauguguauugga

SEQ ID NO: 2196261 - RNA, 19 nt, Artificial Sequence
  Description of Artificial Sequence: Synthetic oligonucleotide
  Antisense strand to SEQ ID NO: 2196260
uccaauacacauuauaugc

SEQ ID NO: 2196262 - RNA, 19 nt, Artificial Sequence
  Description of Artificial Sequence: Synthetic oligonucleotide
  Sense strand starting at position 692 of SEQ ID NO: 1883474
ccuagaagggauuguguca

SEQ ID NO: 2196263 - RNA, 19 nt, Artificial Sequence
  Description of Artificial Sequence: Synthetic oligonucleotide
  Antisense strand to SEQ ID NO: 2196262
ugacacaaucccuucuagg

SEQ ID NO: 2196264 - RNA, 19 nt, Artificial Sequence
  Description of Artificial Sequence: Synthetic oligonucleotide
  Sense strand starting at position 721 of SEQ ID NO: 1883474
cacgcauucccacaguaga

SEQ ID NO: 2196265 - RNA, 19 nt, Artificial Sequence
  Description of Artificial Sequence: Synthetic oligonucleotide
  Antisense strand to SEQ ID NO: 2196264
ucuacugugggaaugcgug

SEQ ID NO: 2196266 - RNA, 19 nt, Artificial Sequence
  Description of Artificial Sequence: Synthetic oligonucleotide
  Sense strand starting at position 724 of SEQ ID NO: 1883474
gcauucccacaguagaaau

SEQ ID NO: 2196267 - RNA, 19 nt, Artificial Sequence
  Description of Artificial Sequence: Synthetic oligonucleotide
  Antisense strand to SEQ ID NO: 2196266
auuucuacugugggaaugc

SEQ ID NO: 2196268 - RNA, 19 nt, Artificial Sequence
  Description of Artificial Sequence: Synthetic oligonucleotide
  Sense strand starting at position 776 of SEQ ID NO: 1883474
gcuaaaucucaagagucuu

SEQ ID NO: 2196269 - RNA, 19 nt, Artificial Sequence
  Description of Artificial Sequence: Synthetic oligonucleotide
  Antisense strand to SEQ ID NO: 2196268
aagacucuugagauuuagc

SEQ ID NO: 2196270 - RNA, 19 nt, Artificial Sequence
  Description of Artificial Sequence: Synthetic oligonucleotide
  Sense strand starting at position 782 of SEQ ID NO: 1883474
ucucaagagucuuugacac

SEQ ID NO: 2196271 - RNA, 19 nt, Artificial Sequence
  Description of Artificial Sequence: Synthetic oligonucleotide
  Antisense strand to SEQ ID NO: 2196270
gugucaaagacucuugaga

SEQ ID NO: 2196272 - RNA, 19 nt, Artificial Sequence
  Description of Artificial Sequence: Synthetic oligonucleotide
  Sense strand starting at position 817 of SEQ ID NO: 1883474
gauaccaaugacugaaguu

SEQ ID NO: 2196273 - RNA, 19 nt, Artificial Sequence
  Description of Artificial Sequence: Synthetic oligonucleotide
  Antisense strand to SEQ ID NO: 2196272
aacuucagucauugguauc

SEQ ID NO: 2196274 - RNA, 19 nt, Artificial Sequence
  Description of Artificial Sequence: Synthetic oligonucleotide
  Sense strand starting at position 872 of SEQ ID NO: 1883474
gugugugaaaccuaguaac

SEQ ID NO: 2196275 - RNA, 19 nt, Artificial Sequence
  Description of Artificial Sequence: Synthetic oligonucleotide
  Antisense strand to SEQ ID NO: 2196274
guuacuagguuucacacac

SEQ ID NO: 2196276 - RNA, 19 nt, Artificial Sequence
  Description of Artificial Sequence: Synthetic oligonucleotide
  Sense strand starting at position 967 of SEQ ID NO: 1883474
gccacaucaccuuggacua

SEQ ID NO: 2196277 - RNA, 19 nt, Artificial Sequence
  Description of Artificial Sequence: Synthetic oligonucleotide
  Antisense strand to SEQ ID NO: 2196276
uaguccaaggugauguggc

SEQ ID NO: 2196278 - RNA, 19 nt, Artificial Sequence
  Description of Artificial Sequence: Synthetic oligonucleotide
  Sense strand starting at position 974 of SEQ ID NO: 1883474
caccuuggacuagguauau

SEQ ID NO: 2196279 - RNA, 19 nt, Artificial Sequence
  Description of Artificial Sequence: Synthetic oligonucleotide
  Antisense strand to SEQ ID NO: 2196278
auauaccuaguccaaggug

SEQ ID NO: 2196280 - RNA, 19 nt, Artificial Sequence
  Description of Artificial Sequence: Synthetic oligonucleotide
  Sense strand starting at position 1231 of SEQ ID NO: 1883474
ucaggaugccuuugagaau

SEQ ID NO: 2196281 - RNA, 19 nt, Artificial Sequence
  Description of Artificial Sequence: Synthetic oligonucleotide
  Antisense strand to SEQ ID NO: 2196280
auucucaaaggcauccuga

SEQ ID NO: 2196282 - RNA, 19 nt, Artificial Sequence
  Description of Artificial Sequence: Synthetic oligonucleotide
  Sense strand starting at position 1334 of SEQ ID NO: 1883474
cugacagcuacguaacaga

SEQ ID NO: 2196283 - RNA, 19 nt, Artificial Sequence
  Description of Artificial Sequence: Synthetic oligonucleotide
  Antisense strand to SEQ ID NO: 2196282
ucuguuacguagcugucag

SEQ ID NO: 2196284 - RNA, 19 nt, Artificial Sequence
  Description of Artificial Sequence: Synthetic oligonucleotide
  Sense strand starting at position 2109 of SEQ ID NO: 1883474
cgauuuguccuaggugcau

SEQ ID NO: 2196285 - RNA, 19 nt, Artificial Sequence
  Description of Artificial Sequence: Synthetic oligonucleotide
  Antisense strand to SEQ ID NO: 2196284
augcaccuaggacaaaucg

SEQ ID NO: 2196286 - RNA, 19 nt, Artificial Sequence
  Description of Artificial Sequence: Synthetic oligonucleotide
  Sense strand starting at position 2121 of SEQ ID NO: 1883474
ggugcauucgccgugacca

SEQ ID NO: 2196287 - RNA, 19 nt, Artificial Sequence
  Description of Artificial Sequence: Synthetic oligonucleotide
  Antisense strand to SEQ ID NO: 2196286
uggucacggcgaaugcacc

SEQ ID NO: 2196288 - RNA, 19 nt, Artificial Sequence
  Description of Artificial Sequence: Synthetic oligonucleotide
  Sense strand starting at position 2162 of SEQ ID NO: 1883474
uguucuucucggagcggaa

SEQ ID NO: 2196289 - RNA, 19 nt, Artificial Sequence
  Description of Artificial Sequence: Synthetic oligonucleotide
  Antisense strand to SEQ ID NO: 2196288
uuccgcuccgagaagaaca

SEQ ID NO: 2196290 - RNA, 19 nt, Artificial Sequence
  Description of Artificial Sequence: Synthetic oligonucleotide
  Sense strand starting at position 2187 of SEQ ID NO: 1883474
ucgccuaguccuuaaagaa

SEQ ID NO: 2196291 - RNA, 19 nt, Artificial Sequence
  Description of Artificial Sequence: Synthetic oligonucleotide
  Antisense strand to SEQ ID NO: 2196290
uucuuuaaggacuaggcga

SEQ ID NO: 2196292 - RNA, 19 nt, Artificial Sequence
  Description of Artificial Sequence: Synthetic oligonucleotide
  Sense strand starting at position 2729 of SEQ ID NO: 1883474
guguuacuugauuauguag

SEQ ID NO: 2196293 - RNA, 19 nt, Artificial Sequence
  Description of Artificial Sequence: Synthetic oligonucleotide
  Antisense strand to SEQ ID NO: 2196292
cuacauaaucaaguaacac

SEQ ID NO: 2196294 - RNA, 19 nt, Artificial Sequence
  Description of Artificial Sequence: Synthetic oligonucleotide
  Sense strand starting at position 2738 of SEQ ID NO: 1883474
gauuauguaguguaacaua

SEQ ID NO: 2196295 - RNA, 19 nt, Artificial Sequence
  Description of Artificial Sequence: Synthetic oligonucleotide
  Antisense strand to SEQ ID NO: 2196294
uauguuacacuacauaauc

SEQ ID NO: 2196296 - RNA, 19 nt, Artificial Sequence
  Description of Artificial Sequence: Synthetic oligonucleotide
  Sense strand starting at position 2956 of SEQ ID NO: 1883474
gggauuccacugggaugua

SEQ ID NO: 2196297 - RNA, 19 nt, Artificial Sequence
  Description of Artificial Sequence: Synthetic oligonucleotide
  Antisense strand to SEQ ID NO: 2196296
uacaucccaguggaauccc

SEQ ID NO: 2196298 - RNA, 19 nt, Artificial Sequence
  Description of Artificial Sequence: Synthetic oligonucleotide
  Sense strand starting at position 3038 of SEQ ID NO: 1883474
gguacauaugaaugccauu

SEQ ID NO: 2196299 - RNA, 19 nt, Artificial Sequence
  Description of Artificial Sequence: Synthetic oligonucleotide
  Antisense strand to SEQ ID NO: 2196298
aauggcauucauauguacc

SEQ ID NO: 2196300 - RNA, 19 nt, Artificial Sequence
  Description of Artificial Sequence: Synthetic oligonucleotide
  Sense strand starting at position 3145 of SEQ ID NO: 1883474
ccuauauaccuuuggagau

SEQ ID NO: 2196301 - RNA, 19 nt, Artificial Sequence
  Description of Artificial Sequence: Synthetic oligonucleotide
  Antisense strand to SEQ ID NO: 2196300
aucuccaaagguauauagg

SEQ ID NO: 2196302 - RNA, 19 nt, Artificial Sequence
  Description of Artificial Sequence: Synthetic oligonucleotide
  Sense strand starting at position 3228 of SEQ ID NO: 1883474
gcauuugcucuugagccaa

SEQ ID NO: 2196303 - RNA, 19 nt, Artificial Sequence
  Description of Artificial Sequence: Synthetic oligonucleotide
  Antisense strand to SEQ ID NO: 2196302
uuggcucaagagcaaaugc

SEQ ID NO: 2196304 - RNA, 19 nt, Artificial Sequence
  Description of Artificial Sequence: Synthetic oligonucleotide
  Sense strand starting at position 3266 of SEQ ID NO: 1883474
ucagaauugcuugagucuc

SEQ ID NO: 2196305 - RNA, 19 nt, Artificial Sequence
  Description of Artificial Sequence: Synthetic oligonucleotide
  Antisense strand to SEQ ID NO: 2196304
gagacucaagcaauucuga

SEQ ID NO: 2196306 - RNA, 19 nt, Artificial Sequence
  Description of Artificial Sequence: Synthetic oligonucleotide
  Sense strand starting at position 3367 of SEQ ID NO: 1883474
acauuaaaugauuggcuca

SEQ ID NO: 2196307 - RNA, 19 nt, Artificial Sequence
  Description of Artificial Sequence: Synthetic oligonucleotide
  Antisense strand to SEQ ID NO: 2196306
ugagccaaucauuuaaugu

SEQ ID NO: 2196308 - RNA, 19 nt, Artificial Sequence
  Description of Artificial Sequence: Synthetic oligonucleotide
  Sense strand starting at position 3369 of SEQ ID NO: 1883474
auuaaaugauuggcucaca

SEQ ID NO: 2196309 - RNA, 19 nt, Artificial Sequence
  Description of Artificial Sequence: Synthetic oligonucleotide
  Antisense strand to SEQ ID NO: 2196308
ugugagccaaucauuuaau

SEQ ID NO: 2196310 - RNA, 19 nt, Artificial Sequence
  Description of Artificial Sequence: Synthetic oligonucleotide
  Sense strand starting at position 3370 of SEQ ID NO: 1883474
uuaaaugauuggcucacau

SEQ ID NO: 2196311 - RNA, 19 nt, Artificial Sequence
  Description of Artificial Sequence: Synthetic oligonucleotide
  Antisense strand to SEQ ID NO: 2196310
augugagccaaucauuuaa

SEQ ID NO: 2196312 - RNA, 19 nt, Artificial Sequence
  Description of Artificial Sequence: Synthetic oligonucleotide
  Sense strand starting at position 3381 of SEQ ID NO: 1883474
gcucacauuaguggaugaa

SEQ ID NO: 2196313 - RNA, 19 nt, Artificial Sequence
  Description of Artificial Sequence: Synthetic oligonucleotide
  Antisense strand to SEQ ID NO: 2196312
uucauccacuaaugugagc

SEQ ID NO: 2196314 - RNA, 19 nt, Artificial Sequence
  Description of Artificial Sequence: Synthetic oligonucleotide
  Sense strand starting at position 3473 of SEQ ID NO: 1883474
uauguuuaaguugaucaga

SEQ ID NO: 2196315 - RNA, 19 nt, Artificial Sequence
  Description of Artificial Sequence: Synthetic oligonucleotide
  Antisense strand to SEQ ID NO: 2196314
ucugaucaacuuaaacaua

SEQ ID NO: 2196316 - RNA, 19 nt, Artificial Sequence
  Description of Artificial Sequence: Synthetic oligonucleotide
  Sense strand starting at position 3475 of SEQ ID NO: 1883474
uguuuaaguugaucagauc

SEQ ID NO: 2196317 - RNA, 19 nt, Artificial Sequence
  Description of Artificial Sequence: Synthetic oligonucleotide
  Antisense strand to SEQ ID NO: 2196316
gaucugaucaacuuaaaca

SEQ ID NO: 2196318 - RNA, 19 nt, Artificial Sequence
  Description of Artificial Sequence: Synthetic oligonucleotide
  Sense strand starting at position 3476 of SEQ ID NO: 1883474
guuuaaguugaucagauca

SEQ ID NO: 2196319 - RNA, 19 nt, Artificial Sequence
  Description of Artificial Sequence: Synthetic oligonucleotide
  Antisense strand to SEQ ID NO: 2196318
ugaucugaucaacuuaaac

SEQ ID NO: 2196320 - RNA, 19 nt, Artificial Sequence
  Description of Artificial Sequence: Synthetic oligonucleotide
  Sense strand starting at position 3499 of SEQ ID NO: 1883474
auaacagguuuccuggaau

SEQ ID NO: 2196321 - RNA, 19 nt, Artificial Sequence
  Description of Artificial Sequence: Synthetic oligonucleotide
  Antisense strand to SEQ ID NO: 2196320
auuccaggaaaccuguuau

SEQ ID NO: 2196322 - RNA, 19 nt, Artificial Sequence
  Description of Artificial Sequence: Synthetic oligonucleotide
  Sense strand starting at position 3531 of SEQ ID NO: 1883474
uggaauguucuagauaggu

SEQ ID NO: 2196323 - RNA, 19 nt, Artificial Sequence
  Description of Artificial Sequence: Synthetic oligonucleotide
  Antisense strand to SEQ ID NO: 2196322
accuaucuagaacauucca

SEQ ID NO: 2196324 - RNA, 19 nt, Artificial Sequence
  Description of Artificial Sequence: Synthetic oligonucleotide
  Sense strand starting at position 3601 of SEQ ID NO: 1883474
ucaguuauuggacaccuca

SEQ ID NO: 2196325 - RNA, 19 nt, Artificial Sequence
  Description of Artificial Sequence: Synthetic oligonucleotide
  Antisense strand to SEQ ID NO: 2196324
ugagguguccaauaacuga

SEQ ID NO: 2196326 - RNA, 19 nt, Artificial Sequence
  Description of Artificial Sequence: Synthetic oligonucleotide
  Sense strand starting at position 3624 of SEQ ID NO: 1883474
acaucagaugauuagcgua

SEQ ID NO: 2196327 - RNA, 19 nt, Artificial Sequence
  Description of Artificial Sequence: Synthetic oligonucleotide
  Antisense strand to SEQ ID NO: 2196326
uacgcuaaucaucugaugu

SEQ ID NO: 2196328 - RNA, 19 nt, Artificial Sequence
  Description of Artificial Sequence: Synthetic oligonucleotide
  Sense strand starting at position 3822 of SEQ ID NO: 1883474
auucucagcccugagaaca

SEQ ID NO: 2196329 - RNA, 19 nt, Artificial Sequence
  Description of Artificial Sequence: Synthetic oligonucleotide
  Antisense strand to SEQ ID NO: 2196328
uguucucagggcugagaau

SEQ ID NO: 2196330 - RNA, 19 nt, Artificial Sequence
  Description of Artificial Sequence: Synthetic oligonucleotide
  Sense strand starting at position 3864 of SEQ ID NO: 1883474
uuuccaacugucugauaga

SEQ ID NO: 2196331 - RNA, 19 nt, Artificial Sequence
  Description of Artificial Sequence: Synthetic oligonucleotide
  Antisense strand to SEQ ID NO: 2196330
ucuaucagacaguuggaaa

SEQ ID NO: 2196332 - RNA, 19 nt, Artificial Sequence
  Description of Artificial Sequence: Synthetic oligonucleotide
  Sense strand starting at position 3928 of SEQ ID NO: 1883474
gggauaauuuccuaccaua

SEQ ID NO: 2196333 - RNA, 19 nt, Artificial Sequence
  Description of Artificial Sequence: Synthetic oligonucleotide
  Antisense strand to SEQ ID NO: 2196332
uaugguaggaaauuauccc

SEQ ID NO: 2196334 - RNA, 19 nt, Artificial Sequence
  Description of Artificial Sequence: Synthetic oligonucleotide
  Sense strand starting at position 29 of SEQ ID NO: 1883475
uuucuuucugaguguuaac

SEQ ID NO: 2196335 - RNA, 19 nt, Artificial Sequence
  Description of Artificial Sequence: Synthetic oligonucleotide
  Antisense strand to SEQ ID NO: 2196334
guuaacacucagaaagaaa

SEQ ID NO: 2196336 - RNA, 19 nt, Artificial Sequence
  Description of Artificial Sequence: Synthetic oligonucleotide
  Sense strand starting at position 46 of SEQ ID NO: 1883475
acagcaucgucuuuacagu

SEQ ID NO: 2196337 - RNA, 19 nt, Artificial Sequence
  Description of Artificial Sequence: Synthetic oligonucleotide
  Antisense strand to SEQ ID NO: 2196336
acuguaaagacgaugcugu

SEQ ID NO: 2196338 - RNA, 19 nt, Artificial Sequence
  Description of Artificial Sequence: Synthetic oligonucleotide
  Sense strand starting at position 47 of SEQ ID NO: 1883475
cagcaucgucuuuacaguu

SEQ ID NO: 2196339 - RNA, 19 nt, Artificial Sequence
  Description of Artificial Sequence: Synthetic oligonucleotide
  Antisense strand to SEQ ID NO: 2196338
aacuguaaagacgaugcug

SEQ ID NO: 2196340 - RNA, 19 nt, Artificial Sequence
  Description of Artificial Sequence: Synthetic oligonucleotide
  Sense strand starting at position 620 of SEQ ID NO: 1883475
cgggucuccugacccaaua

SEQ ID NO: 2196341 - RNA, 19 nt, Artificial Sequence
  Description of Artificial Sequence: Synthetic oligonucleotide
  Antisense strand to SEQ ID NO: 2196340
uauugggucaggagacccg

SEQ ID NO: 2196342 - RNA, 19 nt, Artificial Sequence
  Description of Artificial Sequence: Synthetic oligonucleotide
  Sense strand starting at position 875 of SEQ ID NO: 1883475
acugguaggcucggaagau

SEQ ID NO: 2196343 - RNA, 19 nt, Artificial Sequence
  Description of Artificial Sequence: Synthetic oligonucleotide
  Antisense strand to SEQ ID NO: 2196342
aucuuccgagccuaccagu

SEQ ID NO: 2196344 - RNA, 19 nt, Artificial Sequence
  Description of Artificial Sequence: Synthetic oligonucleotide
  Sense strand starting at position 1033 of SEQ ID NO: 1883475
ugagccaagcccuauucua

SEQ ID NO: 2196345 - RNA, 19 nt, Artificial Sequence
  Description of Artificial Sequence: Synthetic oligonucleotide
  Antisense strand to SEQ ID NO: 2196344
uagaauagggcuuggcuca

SEQ ID NO: 2196346 - RNA, 19 nt, Artificial Sequence
  Description of Artificial Sequence: Synthetic oligonucleotide
  Sense strand starting at position 1154 of SEQ ID NO: 1883475
guguaaaguugaccucucu

SEQ ID NO: 2196347 - RNA, 19 nt, Artificial Sequence
  Description of Artificial Sequence: Synthetic oligonucleotide
  Antisense strand to SEQ ID NO: 2196346
agagaggucaacuuuacac

SEQ ID NO: 2196348 - RNA, 19 nt, Artificial Sequence
  Description of Artificial Sequence: Synthetic oligonucleotide
  Sense strand starting at position 1160 of SEQ ID NO: 1883475
aguugaccucucugaacuu

SEQ ID NO: 2196349 - RNA, 19 nt, Artificial Sequence
  Description of Artificial Sequence: Synthetic oligonucleotide
  Antisense strand to SEQ ID NO: 2196348
aaguucagagaggucaacu

SEQ ID NO: 2196350 - RNA, 19 nt, Artificial Sequence
  Description of Artificial Sequence: Synthetic oligonucleotide
  Sense strand starting at position 1208 of SEQ ID NO: 1883475
uagaguucucaagagagcu

SEQ ID NO: 2196351 - RNA, 19 nt, Artificial Sequence
  Description of Artificial Sequence: Synthetic oligonucleotide
  Antisense strand to SEQ ID NO: 2196350
agcucucuugagaacucua

SEQ ID NO: 2196352 - RNA, 19 nt, Artificial Sequence
  Description of Artificial Sequence: Synthetic oligonucleotide
  Sense strand starting at position 1243 of SEQ ID NO: 1883475
uaagucagugcccaaaugu

SEQ ID NO: 2196353 - RNA, 19 nt, Artificial Sequence
  Description of Artificial Sequence: Synthetic oligonucleotide
  Antisense strand to SEQ ID NO: 2196352
acauuugggcacugacuua

SEQ ID NO: 2196354 - RNA, 19 nt, Artificial Sequence
  Description of Artificial Sequence: Synthetic oligonucleotide
  Sense strand starting at position 1270 of SEQ ID NO: 1883475
gugguaauuacaggugaag

SEQ ID NO: 2196355 - RNA, 19 nt, Artificial Sequence
  Description of Artificial Sequence: Synthetic oligonucleotide
  Antisense strand to SEQ ID NO: 2196354
cuucaccuguaauuaccac

SEQ ID NO: 2196356 - RNA, 19 nt, Artificial Sequence
  Description of Artificial Sequence: Synthetic oligonucleotide
  Sense strand starting at position 1272 of SEQ ID NO: 1883475
gguaauuacaggugaagga

SEQ ID NO: 2196357 - RNA, 19 nt, Artificial Sequence
  Description of Artificial Sequence: Synthetic oligonucleotide
  Antisense strand to SEQ ID NO: 2196356
uccuucaccuguaauuacc

SEQ ID NO: 2196358 - RNA, 19 nt, Artificial Sequence
  Description of Artificial Sequence: Synthetic oligonucleotide
  Sense strand starting at position 1319 of SEQ ID NO: 1883475
ccgggugucaaguggaaga

SEQ ID NO: 2196359 - RNA, 19 nt, Artificial Sequence
  Description of Artificial Sequence: Synthetic oligonucleotide
  Antisense strand to SEQ ID NO: 2196358
ucuuccacuugacacccgg

SEQ ID NO: 2196360 - RNA, 19 nt, Artificial Sequence
  Description of Artificial Sequence: Synthetic oligonucleotide
  Sense strand starting at position 1385 of SEQ ID NO: 1883475
guacucauuucgccaagga

SEQ ID NO: 2196361 - RNA, 19 nt, Artificial Sequence
  Description of Artificial Sequence: Synthetic oligonucleotide
  Antisense strand to SEQ ID NO: 2196360
uccuuggcgaaaugaguac

SEQ ID NO: 2196362 - RNA, 19 nt, Artificial Sequence
  Description of Artificial Sequence: Synthetic oligonucleotide
  Sense strand starting at position 1519 of SEQ ID NO: 1883475
cacccauugccguggaaac

SEQ ID NO: 2196363 - RNA, 19 nt, Artificial Sequence
  Description of Artificial Sequence: Synthetic oligonucleotide
  Antisense strand to SEQ ID NO: 2196362
guuuccacggcaaugggug

SEQ ID NO: 2196364 - RNA, 19 nt, Artificial Sequence
  Description of Artificial Sequence: Synthetic oligonucleotide
  Sense strand starting at position 1954 of SEQ ID NO: 1883475
gcgaaucugcggcauccaa

SEQ ID NO: 2196365 - RNA, 19 nt, Artificial Sequence
  Description of Artificial Sequence: Synthetic oligonucleotide
  Antisense strand to SEQ ID NO: 2196364
uuggaugccgcagauucgc

SEQ ID NO: 2196366 - RNA, 19 nt, Artificial Sequence
  Description of Artificial Sequence: Synthetic oligonucleotide
  Sense strand starting at position 2373 of SEQ ID NO: 1883475
aguuuacugauguguccau

SEQ ID NO: 2196367 - RNA, 19 nt, Artificial Sequence
  Description of Artificial Sequence: Synthetic oligonucleotide
  Antisense strand to SEQ ID NO: 2196366
auggacacaucaguaaacu

SEQ ID NO: 2196368 - RNA, 19 nt, Artificial Sequence
  Description of Artificial Sequence: Synthetic oligonucleotide
  Sense strand starting at position 2648 of SEQ ID NO: 1883475
guggaaauuuaaugacuuu

SEQ ID NO: 2196369 - RNA, 19 nt, Artificial Sequence
  Description of Artificial Sequence: Synthetic oligonucleotide
  Antisense strand to SEQ ID NO: 2196368
aaagucauuaaauuuccac

SEQ ID NO: 2196370 - RNA, 19 nt, Artificial Sequence
  Description of Artificial Sequence: Synthetic oligonucleotide
  Sense strand starting at position 2687 of SEQ ID NO: 1883475
gguguuuagcuccaacacu

SEQ ID NO: 2196371 - RNA, 19 nt, Artificial Sequence
  Description of Artificial Sequence: Synthetic oligonucleotide
  Antisense strand to SEQ ID NO: 2196370
aguguuggagcuaaacacc

SEQ ID NO: 2196372 - RNA, 19 nt, Artificial Sequence
  Description of Artificial Sequence: Synthetic oligonucleotide
  Sense strand starting at position 2707 of SEQ ID NO: 1883475
uaguccucggcucaaauga

SEQ ID NO: 2196373 - RNA, 19 nt, Artificial Sequence
  Description of Artificial Sequence: Synthetic oligonucleotide
  Antisense strand to SEQ ID NO: 2196372
ucauuugagccgaggacua

SEQ ID NO: 2196374 - RNA, 19 nt, Artificial Sequence
  Description of Artificial Sequence: Synthetic oligonucleotide
  Sense strand starting at position 2873 of SEQ ID NO: 1883475
caaacugagccugacaguu

SEQ ID NO: 2196375 - RNA, 19 nt, Artificial Sequence
  Description of Artificial Sequence: Synthetic oligonucleotide
  Antisense strand to SEQ ID NO: 2196374
aacugucaggcucaguuug

SEQ ID NO: 2196376 - RNA, 19 nt, Artificial Sequence
  Description of Artificial Sequence: Synthetic oligonucleotide
  Sense strand starting at position 2902 of SEQ ID NO: 1883475
ugaguaaugaguugaugug

SEQ ID NO: 2196377 - RNA, 19 nt, Artificial Sequence
  Description of Artificial Sequence: Synthetic oligonucleotide
  Antisense strand to SEQ ID NO: 2196376
cacaucaacucauuacuca

SEQ ID NO: 2196378 - RNA, 19 nt, Artificial Sequence
  Description of Artificial Sequence: Synthetic oligonucleotide
  Sense strand starting at position 2914 of SEQ ID NO: 1883475
ugaugugguccauguucua

SEQ ID NO: 2196379 - RNA, 19 nt, Artificial Sequence
  Description of Artificial Sequence: Synthetic oligonucleotide
  Antisense strand to SEQ ID NO: 2196378
uagaacauggaccacauca

SEQ ID NO: 2196380 - RNA, 19 nt, Artificial Sequence
  Description of Artificial Sequence: Synthetic oligonucleotide
  Sense strand starting at position 3190 of SEQ ID NO: 1883475
uuugguugcugcucaacau

SEQ ID NO: 2196381 - RNA, 19 nt, Artificial Sequence
  Description of Artificial Sequence: Synthetic oligonucleotide
  Antisense strand to SEQ ID NO: 2196380
auguugagcagcaaccaaa

SEQ ID NO: 2196382 - RNA, 19 nt, Artificial Sequence
  Description of Artificial Sequence: Synthetic oligonucleotide
  Sense strand starting at position 3194 of SEQ ID NO: 1883475
guugcugcucaacaugaaa

SEQ ID NO: 2196383 - RNA, 19 nt, Artificial Sequence
  Description of Artificial Sequence: Synthetic oligonucleotide
  Antisense strand to SEQ ID NO: 2196382
uuucauguugagcagcaac

SEQ ID NO: 2196384 - RNA, 19 nt, Artificial Sequence
  Description of Artificial Sequence: Synthetic oligonucleotide
  Sense strand starting at position 3283 of SEQ ID NO: 1883475
ccacuucucuguuugcaca

SEQ ID NO: 2196385 - RNA, 19 nt, Artificial Sequence
  Description of Artificial Sequence: Synthetic oligonucleotide
  Antisense strand to SEQ ID NO: 2196384
ugugcaaacagagaagugg

SEQ ID NO: 2196386 - RNA, 19 nt, Artificial Sequence
  Description of Artificial Sequence: Synthetic oligonucleotide
  Sense strand starting at position 3372 of SEQ ID NO: 1883475
ccuguugcauagucauauu

SEQ ID NO: 2196387 - RNA, 19 nt, Artificial Sequence
  Description of Artificial Sequence: Synthetic oligonucleotide
  Antisense strand to SEQ ID NO: 2196386
aauaugacuaugcaacagg

SEQ ID NO: 2196388 - RNA, 19 nt, Artificial Sequence
  Description of Artificial Sequence: Synthetic oligonucleotide
  Sense strand starting at position 3459 of SEQ ID NO: 1883475
caggaugacucaucugauu

SEQ ID NO: 2196389 - RNA, 19 nt, Artificial Sequence
  Description of Artificial Sequence: Synthetic oligonucleotide
  Antisense strand to SEQ ID NO: 2196388
aaucagaugagucauccug

SEQ ID NO: 2196390 - RNA, 19 nt, Artificial Sequence
  Description of Artificial Sequence: Synthetic oligonucleotide
  Sense strand starting at position 3471 of SEQ ID NO: 1883475
ucugauuucucaggagacu

SEQ ID NO: 2196391 - RNA, 19 nt, Artificial Sequence
  Description of Artificial Sequence: Synthetic oligonucleotide
  Antisense strand to SEQ ID NO: 2196390
agucuccugagaaaucaga

SEQ ID NO: 2196392 - RNA, 19 nt, Artificial Sequence
  Description of Artificial Sequence: Synthetic oligonucleotide
  Sense strand starting at position 3505 of SEQ ID NO: 1883475
aacccuguucuugggaaau

SEQ ID NO: 2196393 - RNA, 19 nt, Artificial Sequence
  Description of Artificial Sequence: Synthetic oligonucleotide
  Antisense strand to SEQ ID NO: 2196392
auuucccaagaacaggguu

SEQ ID NO: 2196394 - RNA, 19 nt, Artificial Sequence
  Description of Artificial Sequence: Synthetic oligonucleotide
  Sense strand starting at position 3547 of SEQ ID NO: 1883475
aguuguccagucuguuaaa

SEQ ID NO: 2196395 - RNA, 19 nt, Artificial Sequence
  Description of Artificial Sequence: Synthetic oligonucleotide
  Antisense strand to SEQ ID NO: 2196394
uuuaacagacuggacaacu

SEQ ID NO: 2196396 - RNA, 19 nt, Artificial Sequence
  Description of Artificial Sequence: Synthetic oligonucleotide
  Sense strand starting at position 3548 of SEQ ID NO: 1883475
guuguccagucuguuaaau

SEQ ID NO: 2196397 - RNA, 19 nt, Artificial Sequence
  Description of Artificial Sequence: Synthetic oligonucleotide
  Antisense strand to SEQ ID NO: 2196396
auuuaacagacuggacaac

SEQ ID NO: 2196398 - RNA, 19 nt, Artificial Sequence
  Description of Artificial Sequence: Synthetic oligonucleotide
  Sense strand starting at position 3606 of SEQ ID NO: 1883475
ccucgcaaucuggaagguu

SEQ ID NO: 2196399 - RNA, 19 nt, Artificial Sequence
  Description of Artificial Sequence: Synthetic oligonucleotide
  Antisense strand to SEQ ID NO: 2196398
aaccuuccagauugcgagg

SEQ ID NO: 2196400 - RNA, 19 nt, Artificial Sequence
  Description of Artificial Sequence: Synthetic oligonucleotide
  Sense strand starting at position 3618 of SEQ ID NO: 1883475
gaagguuaaguugggcaau

SEQ ID NO: 2196401 - RNA, 19 nt, Artificial Sequence
  Description of Artificial Sequence: Synthetic oligonucleotide
  Antisense strand to SEQ ID NO: 2196400
auugcccaacuuaaccuuc

SEQ ID NO: 2196402 - RNA, 19 nt, Artificial Sequence
  Description of Artificial Sequence: Synthetic oligonucleotide
  Sense strand starting at position 3620 of SEQ ID NO: 1883475
agguuaaguugggcaauau

SEQ ID NO: 2196403 - RNA, 19 nt, Artificial Sequence
  Description of Artificial Sequence: Synthetic oligonucleotide
  Antisense strand to SEQ ID NO: 2196402
auauugcccaacuuaaccu

SEQ ID NO: 2196404 - RNA, 19 nt, Artificial Sequence
  Description of Artificial Sequence: Synthetic oligonucleotide
  Sense strand starting at position 3624 of SEQ ID NO: 1883475
uaaguugggcaauaugauu

SEQ ID NO: 2196405 - RNA, 19 nt, Artificial Sequence
  Description of Artificial Sequence: Synthetic oligonucleotide
  Antisense strand to SEQ ID NO: 2196404
aaucauauugcccaacuua

SEQ ID NO: 2196406 - RNA, 19 nt, Artificial Sequence
  Description of Artificial Sequence: Synthetic oligonucleotide
  Sense strand starting at position 3629 of SEQ ID NO: 1883475
ugggcaauaugauuauugu

SEQ ID NO: 2196407 - RNA, 19 nt, Artificial Sequence
  Description of Artificial Sequence: Synthetic oligonucleotide
  Antisense strand to SEQ ID NO: 2196406
acaauaaucauauugccca

SEQ ID NO: 2196408 - RNA, 19 nt, Artificial Sequence
  Description of Artificial Sequence: Synthetic oligonucleotide
  Sense strand starting at position 3672 of SEQ ID NO: 1883475
uguucagaguggucaaaug

SEQ ID NO: 2196409 - RNA, 19 nt, Artificial Sequence
  Description of Artificial Sequence: Synthetic oligonucleotide
  Antisense strand to SEQ ID NO: 2196408
cauuugaccacucugaaca

SEQ ID NO: 2196410 - RNA, 19 nt, Artificial Sequence
  Description of Artificial Sequence: Synthetic oligonucleotide
  Sense strand starting at position 3684 of SEQ ID NO: 1883475
ucaaauggcuuucugagau

SEQ ID NO: 2196411 - RNA, 19 nt, Artificial Sequence
  Description of Artificial Sequence: Synthetic oligonucleotide
  Antisense strand to SEQ ID NO: 2196410
aucucagaaagccauuuga

SEQ ID NO: 2196412 - RNA, 19 nt, Artificial Sequence
  Description of Artificial Sequence: Synthetic oligonucleotide
  Sense strand starting at position 3868 of SEQ ID NO: 1883475
cguccuccaccacaagaua

SEQ ID NO: 2196413 - RNA, 19 nt, Artificial Sequence
  Description of Artificial Sequence: Synthetic oligonucleotide
  Antisense strand to SEQ ID NO: 2196412
uaucuugugguggaggacg

SEQ ID NO: 2196414 - RNA, 19 nt, Artificial Sequence
  Description of Artificial Sequence: Synthetic oligonucleotide
  Sense strand starting at position 4 of SEQ ID NO: 1883476
gguugaauuagauaaugcu

SEQ ID NO: 2196415 - RNA, 19 nt, Artificial Sequence
  Description of Artificial Sequence: Synthetic oligonucleotide
  Antisense strand to SEQ ID NO: 2196414
agcauuaucuaauucaacc

SEQ ID NO: 2196416 - RNA, 19 nt, Artificial Sequence
  Description of Artificial Sequence: Synthetic oligonucleotide
  Sense strand starting at position 58 of SEQ ID NO: 1883476
gagcauaguagauguugau

SEQ ID NO: 2196417 - RNA, 19 nt, Artificial Sequence
  Description of Artificial Sequence: Synthetic oligonucleotide
  Antisense strand to SEQ ID NO: 2196416
aucaacaucuacuaugcuc

SEQ ID NO: 2196418 - RNA, 19 nt, Artificial Sequence
  Description of Artificial Sequence: Synthetic oligonucleotide
  Sense strand starting at position 121 of SEQ ID NO: 1883476
gagagaaugucuuugaagc

SEQ ID NO: 2196419 - RNA, 19 nt, Artificial Sequence
  Description of Artificial Sequence: Synthetic oligonucleotide
  Antisense strand to SEQ ID NO: 2196418
gcuucaaagacauucucuc

SEQ ID NO: 2196420 - RNA, 19 nt, Artificial Sequence
  Description of Artificial Sequence: Synthetic oligonucleotide
  Sense strand starting at position 122 of SEQ ID NO: 1883476
agagaaugucuuugaagca

SEQ ID NO: 2196421 - RNA, 19 nt, Artificial Sequence
  Description of Artificial Sequence: Synthetic oligonucleotide
  Antisense strand to SEQ ID NO: 2196420
ugcuucaaagacauucucu

SEQ ID NO: 2196422 - RNA, 19 nt, Artificial Sequence
  Description of Artificial Sequence: Synthetic oligonucleotide
  Sense strand starting at position 207 of SEQ ID NO: 1883476
uaggucuuugguggaggau

SEQ ID NO: 2196423 - RNA, 19 nt, Artificial Sequence
  Description of Artificial Sequence: Synthetic oligonucleotide
  Antisense strand to SEQ ID NO: 2196422
auccuccaccaaagaccua

SEQ ID NO: 2196424 - RNA, 19 nt, Artificial Sequence
  Description of Artificial Sequence: Synthetic oligonucleotide
  Sense strand starting at position 278 of SEQ ID NO: 1883476
gaggcugacaccugagagu

SEQ ID NO: 2196425 - RNA, 19 nt, Artificial Sequence
  Description of Artificial Sequence: Synthetic oligonucleotide
  Antisense strand to SEQ ID NO: 2196424
acucucaggugucagccuc

SEQ ID NO: 2196426 - RNA, 19 nt, Artificial Sequence
  Description of Artificial Sequence: Synthetic oligonucleotide
  Sense strand starting at position 441 of SEQ ID NO: 1883476
aucauaacaguuugucacu

SEQ ID NO: 2196427 - RNA, 19 nt, Artificial Sequence
  Description of Artificial Sequence: Synthetic oligonucleotide
  Antisense strand to SEQ ID NO: 2196426
agugacaaacuguuaugau

SEQ ID NO: 2196428 - RNA, 19 nt, Artificial Sequence
  Description of Artificial Sequence: Synthetic oligonucleotide
  Sense strand starting at position 442 of SEQ ID NO: 1883476
ucauaacaguuugucacua

SEQ ID NO: 2196429 - RNA, 19 nt, Artificial Sequence
  Description of Artificial Sequence: Synthetic oligonucleotide
  Antisense strand to SEQ ID NO: 2196428
uagugacaaacuguuauga

SEQ ID NO: 2196430 - RNA, 19 nt, Artificial Sequence
  Description of Artificial Sequence: Synthetic oligonucleotide
  Sense strand starting at position 447 of SEQ ID NO: 1883476
acaguuugucacuaagggu

SEQ ID NO: 2196431 - RNA, 19 nt, Artificial Sequence
  Description of Artificial Sequence: Synthetic oligonucleotide
  Antisense strand to SEQ ID NO: 2196430
acccuuagugacaaacugu

SEQ ID NO: 2196432 - RNA, 19 nt, Artificial Sequence
  Description of Artificial Sequence: Synthetic oligonucleotide
  Sense strand starting at position 578 of SEQ ID NO: 1883476
ucacuugucuucccugaga

SEQ ID NO: 2196433 - RNA, 19 nt, Artificial Sequence
  Description of Artificial Sequence: Synthetic oligonucleotide
  Antisense strand to SEQ ID NO: 2196432
ucucagggaagacaaguga

SEQ ID NO: 2196434 - RNA, 19 nt, Artificial Sequence
  Description of Artificial Sequence: Synthetic oligonucleotide
  Sense strand starting at position 591 of SEQ ID NO: 1883476
cugagaccuguaugaaaua

SEQ ID NO: 2196435 - RNA, 19 nt, Artificial Sequence
  Description of Artificial Sequence: Synthetic oligonucleotide
  Antisense strand to SEQ ID NO: 2196434
uauuucauacaggucucag

SEQ ID NO: 2196436 - RNA, 19 nt, Artificial Sequence
  Description of Artificial Sequence: Synthetic oligonucleotide
  Sense strand starting at position 805 of SEQ ID NO: 1883476
guccuugucauguaauuga

SEQ ID NO: 2196437 - RNA, 19 nt, Artificial Sequence
  Description of Artificial Sequence: Synthetic oligonucleotide
  Antisense strand to SEQ ID NO: 2196436
ucaauuacaugacaaggac

SEQ ID NO: 2196438 - RNA, 19 nt, Artificial Sequence
  Description of Artificial Sequence: Synthetic oligonucleotide
  Sense strand starting at position 1085 of SEQ ID NO: 1883476
gggagaagccuuugaauau

SEQ ID NO: 2196439 - RNA, 19 nt, Artificial Sequence
  Description of Artificial Sequence: Synthetic oligonucleotide
  Antisense strand to SEQ ID NO: 2196438
auauucaaaggcuucuccc

SEQ ID NO: 2196440 - RNA, 19 nt, Artificial Sequence
  Description of Artificial Sequence: Synthetic oligonucleotide
  Sense strand starting at position 1149 of SEQ ID NO: 1883476
cccuauuuaccacguguuu

SEQ ID NO: 2196441 - RNA, 19 nt, Artificial Sequence
  Description of Artificial Sequence: Synthetic oligonucleotide
  Antisense strand to SEQ ID NO: 2196440
aaacacgugguaaauaggg

SEQ ID NO: 2196442 - RNA, 19 nt, Artificial Sequence
  Description of Artificial Sequence: Synthetic oligonucleotide
  Sense strand starting at position 1187 of SEQ ID NO: 1883476
ugaccuauuugccucaguu

SEQ ID NO: 2196443 - RNA, 19 nt, Artificial Sequence
  Description of Artificial Sequence: Synthetic oligonucleotide
  Antisense strand to SEQ ID NO: 2196442
aacugaggcaaauagguca

SEQ ID NO: 2196444 - RNA, 19 nt, Artificial Sequence
  Description of Artificial Sequence: Synthetic oligonucleotide
  Sense strand starting at position 1240 of SEQ ID NO: 1883476
agauguaaaugucuuagaa

SEQ ID NO: 2196445 - RNA, 19 nt, Artificial Sequence
  Description of Artificial Sequence: Synthetic oligonucleotide
  Antisense strand to SEQ ID NO: 2196444
uucuaagacauuuacaucu

SEQ ID NO: 2196446 - RNA, 19 nt, Artificial Sequence
  Description of Artificial Sequence: Synthetic oligonucleotide
  Sense strand starting at position 2062 of SEQ ID NO: 1883476
agggauugugcugauucuu

SEQ ID NO: 2196447 - RNA, 19 nt, Artificial Sequence
  Description of Artificial Sequence: Synthetic oligonucleotide
  Antisense strand to SEQ ID NO: 2196446
aagaaucagcacaaucccu

SEQ ID NO: 2196448 - RNA, 19 nt, Artificial Sequence
  Description of Artificial Sequence: Synthetic oligonucleotide
  Sense strand starting at position 2077 of SEQ ID NO: 1883476
ucuuucugugcuguuaagu

SEQ ID NO: 2196449 - RNA, 19 nt, Artificial Sequence
  Description of Artificial Sequence: Synthetic oligonucleotide
  Antisense strand to SEQ ID NO: 2196448
acuuaacagcacagaaaga

SEQ ID NO: 2196450 - RNA, 19 nt, Artificial Sequence
  Description of Artificial Sequence: Synthetic oligonucleotide
  Sense strand starting at position 2094 of SEQ ID NO: 1883476
guggcaguugugcuuuaug

SEQ ID NO: 2196451 - RNA, 19 nt, Artificial Sequence
  Description of Artificial Sequence: Synthetic oligonucleotide
  Antisense strand to SEQ ID NO: 2196450
cauaaagcacaacugccac

SEQ ID NO: 2196452 - RNA, 19 nt, Artificial Sequence
  Description of Artificial Sequence: Synthetic oligonucleotide
  Sense strand starting at position 2101 of SEQ ID NO: 1883476
uugugcuuuaugcuacgau

SEQ ID NO: 2196453 - RNA, 19 nt, Artificial Sequence
  Description of Artificial Sequence: Synthetic oligonucleotide
  Antisense strand to SEQ ID NO: 2196452
aucguagcauaaagcacaa

SEQ ID NO: 2196454 - RNA, 19 nt, Artificial Sequence
  Description of Artificial Sequence: Synthetic oligonucleotide
  Sense strand starting at position 2494 of SEQ ID NO: 1883476
cagugacgucaauacaaca

SEQ ID NO: 2196455 - RNA, 19 nt, Artificial Sequence
  Description of Artificial Sequence: Synthetic oligonucleotide
  Antisense strand to SEQ ID NO: 2196454
uguuguauugacgucacug

SEQ ID NO: 2196456 - RNA, 19 nt, Artificial Sequence
  Description of Artificial Sequence: Synthetic oligonucleotide
  Sense strand starting at position 2499 of SEQ ID NO: 1883476
acgucaauacaacaaugua

SEQ ID NO: 2196457 - RNA, 19 nt, Artificial Sequence
  Description of Artificial Sequence: Synthetic oligonucleotide
  Antisense strand to SEQ ID NO: 2196456
uacauuguuguauugacgu

SEQ ID NO: 2196458 - RNA, 19 nt, Artificial Sequence
  Description of Artificial Sequence: Synthetic oligonucleotide
  Sense strand starting at position 2588 of SEQ ID NO: 1883476
ggguucugagguuaugagu

SEQ ID NO: 2196459 - RNA, 19 nt, Artificial Sequence
  Description of Artificial Sequence: Synthetic oligonucleotide
  Antisense strand to SEQ ID NO: 2196458
acucauaaccucagaaccc

SEQ ID NO: 2196460 - RNA, 19 nt, Artificial Sequence
  Description of Artificial Sequence: Synthetic oligonucleotide
  Sense strand starting at position 2671 of SEQ ID NO: 1883476
ggaagcuauuuguauuuac

SEQ ID NO: 2196461 - RNA, 19 nt, Artificial Sequence
  Description of Artificial Sequence: Synthetic oligonucleotide
  Antisense strand to SEQ ID NO: 2196460
guaaauacaaauagcuucc

SEQ ID NO: 2196462 - RNA, 19 nt, Artificial Sequence
  Description of Artificial Sequence: Synthetic oligonucleotide
  Sense strand starting at position 2685 of SEQ ID NO: 1883476
uuuacuccagguuauugaa

SEQ ID NO: 2196463 - RNA, 19 nt, Artificial Sequence
  Description of Artificial Sequence: Synthetic oligonucleotide
  Antisense strand to SEQ ID NO: 2196462
uucaauaaccuggaguaaa

SEQ ID NO: 2196464 - RNA, 19 nt, Artificial Sequence
  Description of Artificial Sequence: Synthetic oligonucleotide
  Sense strand starting at position 2695 of SEQ ID NO: 1883476
guuauugaauuacugaaca

SEQ ID NO: 2196465 - RNA, 19 nt, Artificial Sequence
  Description of Artificial Sequence: Synthetic oligonucleotide
  Antisense strand to SEQ ID NO: 2196464
uguucaguaauucaauaac

SEQ ID NO: 2196466 - RNA, 19 nt, Artificial Sequence
  Description of Artificial Sequence: Synthetic oligonucleotide
  Sense strand starting at position 3043 of SEQ ID NO: 1883476
cucauuaaagugugaaauc

SEQ ID NO: 2196467 - RNA, 19 nt, Artificial Sequence
  Description of Artificial Sequence: Synthetic oligonucleotide
  Antisense strand to SEQ ID NO: 2196466
gauuucacacuuuaaugag

SEQ ID NO: 2196468 - RNA, 19 nt, Artificial Sequence
  Description of Artificial Sequence: Synthetic oligonucleotide
  Sense strand starting at position 3080 of SEQ ID NO: 1883476
aguauauccacggaguugu

SEQ ID NO: 2196469 - RNA, 19 nt, Artificial Sequence
  Description of Artificial Sequence: Synthetic oligonucleotide
  Antisense strand to SEQ ID NO: 2196468
acaacuccguggauauacu

SEQ ID NO: 2196470 - RNA, 19 nt, Artificial Sequence
  Description of Artificial Sequence: Synthetic oligonucleotide
  Sense strand starting at position 3217 of SEQ ID NO: 1883476
cucucuauaucuguggauu

SEQ ID NO: 2196471 - RNA, 19 nt, Artificial Sequence
  Description of Artificial Sequence: Synthetic oligonucleotide
  Antisense strand to SEQ ID NO: 2196470
aauccacagauauagagag

SEQ ID NO: 2196472 - RNA, 19 nt, Artificial Sequence
  Description of Artificial Sequence: Synthetic oligonucleotide
  Sense strand starting at position 3231 of SEQ ID NO: 1883476
ggauuugccuguucuuucu

SEQ ID NO: 2196473 - RNA, 19 nt, Artificial Sequence
  Description of Artificial Sequence: Synthetic oligonucleotide
  Antisense strand to SEQ ID NO: 2196472
agaaagaacaggcaaaucc

SEQ ID NO: 2196474 - RNA, 19 nt, Artificial Sequence
  Description of Artificial Sequence: Synthetic oligonucleotide
  Sense strand starting at position 3507 of SEQ ID NO: 1883476
cuaagaaagcauggagguu

SEQ ID NO: 2196475 - RNA, 19 nt, Artificial Sequence
  Description of Artificial Sequence: Synthetic oligonucleotide
  Antisense strand to SEQ ID NO: 2196474
aaccuccaugcuuucuuag

SEQ ID NO: 2196476 - RNA, 19 nt, Artificial Sequence
  Description of Artificial Sequence: Synthetic oligonucleotide
  Sense strand starting at position 3521 of SEQ ID NO: 1883476
agguuaauucuaggagguu

SEQ ID NO: 2196477 - RNA, 19 nt, Artificial Sequence
  Description of Artificial Sequence: Synthetic oligonucleotide
  Antisense strand to SEQ ID NO: 2196476
aaccuccuagaauuaaccu

SEQ ID NO: 2196478 - RNA, 19 nt, Artificial Sequence
  Description of Artificial Sequence: Synthetic oligonucleotide
  Sense strand starting at position 3530 of SEQ ID NO: 1883476
cuaggagguuaaguauuaa

SEQ ID NO: 2196479 - RNA, 19 nt, Artificial Sequence
  Description of Artificial Sequence: Synthetic oligonucleotide
  Antisense strand to SEQ ID NO: 2196478
uuaauacuuaaccuccuag

SEQ ID NO: 2196480 - RNA, 19 nt, Artificial Sequence
  Description of Artificial Sequence: Synthetic oligonucleotide
  Sense strand starting at position 3635 of SEQ ID NO: 1883476
ccaguauuuagcuguguca

SEQ ID NO: 2196481 - RNA, 19 nt, Artificial Sequence
  Description of Artificial Sequence: Synthetic oligonucleotide
  Antisense strand to SEQ ID NO: 2196480
ugacacagcuaaauacugg

SEQ ID NO: 2196482 - RNA, 19 nt, Artificial Sequence
  Description of Artificial Sequence: Synthetic oligonucleotide
  Sense strand starting at position 3637 of SEQ ID NO: 1883476
aguauuuagcugugucauu

SEQ ID NO: 2196483 - RNA, 19 nt, Artificial Sequence
  Description of Artificial Sequence: Synthetic oligonucleotide
  Antisense strand to SEQ ID NO: 2196482
aaugacacagcuaaauacu

SEQ ID NO: 2196484 - RNA, 19 nt, Artificial Sequence
  Description of Artificial Sequence: Synthetic oligonucleotide
  Sense strand starting at position 3638 of SEQ ID NO: 1883476
guauuuagcugugucauug

SEQ ID NO: 2196485 - RNA, 19 nt, Artificial Sequence
  Description of Artificial Sequence: Synthetic oligonucleotide
  Antisense strand to SEQ ID NO: 2196484
caaugacacagcuaaauac

SEQ ID NO: 2196486 - RNA, 19 nt, Artificial Sequence
  Description of Artificial Sequence: Synthetic oligonucleotide
  Sense strand starting at position 3872 of SEQ ID NO: 1883476
gugaaagugccuuauggau

SEQ ID NO: 2196487 - RNA, 19 nt, Artificial Sequence
  Description of Artificial Sequence: Synthetic oligonucleotide
  Antisense strand to SEQ ID NO: 2196486
auccauaaggcacuuucac

SEQ ID NO: 2196488 - RNA, 19 nt, Artificial Sequence
  Description of Artificial Sequence: Synthetic oligonucleotide
  Sense strand starting at position 3902 of SEQ ID NO: 1883476
ugaucuuaggacugugauc

SEQ ID NO: 2196489 - RNA, 19 nt, Artificial Sequence
  Description of Artificial Sequence: Synthetic oligonucleotide
  Antisense strand to SEQ ID NO: 2196488
gaucacaguccuaagauca

SEQ ID NO: 2196490 - RNA, 19 nt, Artificial Sequence
  Description of Artificial Sequence: Synthetic oligonucleotide
  Sense strand starting at position 3904 of SEQ ID NO: 1883476
aucuuaggacugugaucau

SEQ ID NO: 2196491 - RNA, 19 nt, Artificial Sequence
  Description of Artificial Sequence: Synthetic oligonucleotide
  Antisense strand to SEQ ID NO: 2196490
augaucacaguccuaagau

SEQ ID NO: 2196492 - RNA, 19 nt, Artificial Sequence
  Description of Artificial Sequence: Synthetic oligonucleotide
  Sense strand starting at position 3952 of SEQ ID NO: 1883476
ugcuguucugaucaggaaa

SEQ ID NO: 2196493 - RNA, 19 nt, Artificial Sequence
  Description of Artificial Sequence: Synthetic oligonucleotide
  Antisense strand to SEQ ID NO: 2196492
uuuccugaucagaacagca

SEQ ID NO: 2196494 - RNA, 19 nt, Artificial Sequence
  Description of Artificial Sequence: Synthetic oligonucleotide
  Sense strand starting at position 370 of SEQ ID NO: 1883477
ugaguaguuucuguuaaau

SEQ ID NO: 2196495 - RNA, 19 nt, Artificial Sequence
  Description of Artificial Sequence: Synthetic oligonucleotide
  Antisense strand to SEQ ID NO: 2196494
auuuaacagaaacuacuca

SEQ ID NO: 2196496 - RNA, 19 nt, Artificial Sequence
  Description of Artificial Sequence: Synthetic oligonucleotide
  Sense strand starting at position 381 of SEQ ID NO: 1883477
uguuaaauuuaggucgagu

SEQ ID NO: 2196497 - RNA, 19 nt, Artificial Sequence
  Description of Artificial Sequence: Synthetic oligonucleotide
  Antisense strand to SEQ ID NO: 2196496
acucgaccuaaauuuaaca

SEQ ID NO: 2196498 - RNA, 19 nt, Artificial Sequence
  Description of Artificial Sequence: Synthetic oligonucleotide
  Sense strand starting at position 394 of SEQ ID NO: 1883477
ucgaguaucgauuaucuuu

SEQ ID NO: 2196499 - RNA, 19 nt, Artificial Sequence
  Description of Artificial Sequence: Synthetic oligonucleotide
  Antisense strand to SEQ ID NO: 2196498
aaagauaaucgauacucga

SEQ ID NO: 2196500 - RNA, 19 nt, Artificial Sequence
  Description of Artificial Sequence: Synthetic oligonucleotide
  Sense strand starting at position 681 of SEQ ID NO: 1883477
ggauuaaguggcggaggau

SEQ ID NO: 2196501 - RNA, 19 nt, Artificial Sequence
  Description of Artificial Sequence: Synthetic oligonucleotide
  Antisense strand to SEQ ID NO: 2196500
auccuccgccacuuaaucc

SEQ ID NO: 2196502 - RNA, 19 nt, Artificial Sequence
  Description of Artificial Sequence: Synthetic oligonucleotide
  Sense strand starting at position 880 of SEQ ID NO: 1883477
ccgcacucauccucugaaa

SEQ ID NO: 2196503 - RNA, 19 nt, Artificial Sequence
  Description of Artificial Sequence: Synthetic oligonucleotide
  Antisense strand to SEQ ID NO: 2196502
uuucagaggaugagugcgg

SEQ ID NO: 2196504 - RNA, 19 nt, Artificial Sequence
  Description of Artificial Sequence: Synthetic oligonucleotide
  Sense strand starting at position 882 of SEQ ID NO: 1883477
gcacucauccucugaaagu

SEQ ID NO: 2196505 - RNA, 19 nt, Artificial Sequence
  Description of Artificial Sequence: Synthetic oligonucleotide
  Antisense strand to SEQ ID NO: 2196504
acuuucagaggaugagugc

SEQ ID NO: 2196506 - RNA, 19 nt, Artificial Sequence
  Description of Artificial Sequence: Synthetic oligonucleotide
  Sense strand starting at position 1482 of SEQ ID NO: 1883477
aggguuccaugccuacaaa

SEQ ID NO: 2196507 - RNA, 19 nt, Artificial Sequence
  Description of Artificial Sequence: Synthetic oligonucleotide
  Antisense strand to SEQ ID NO: 2196506
uuuguaggcauggaacccu

SEQ ID NO: 2196508 - RNA, 19 nt, Artificial Sequence
  Description of Artificial Sequence: Synthetic oligonucleotide
  Sense strand starting at position 1483 of SEQ ID NO: 1883477
ggguuccaugccuacaaau

SEQ ID NO: 2196509 - RNA, 19 nt, Artificial Sequence
  Description of Artificial Sequence: Synthetic oligonucleotide
  Antisense strand to SEQ ID NO: 2196508
auuuguaggcauggaaccc

SEQ ID NO: 2196510 - RNA, 19 nt, Artificial Sequence
  Description of Artificial Sequence: Synthetic oligonucleotide
  Sense strand starting at position 1485 of SEQ ID NO: 1883477
guuccaugccuacaaauga

SEQ ID NO: 2196511 - RNA, 19 nt, Artificial Sequence
  Description of Artificial Sequence: Synthetic oligonucleotide
  Antisense strand to SEQ ID NO: 2196510
ucauuuguaggcauggaac

SEQ ID NO: 2196512 - RNA, 19 nt, Artificial Sequence
  Description of Artificial Sequence: Synthetic oligonucleotide
  Sense strand starting at position 1695 of SEQ ID NO: 1883477
cgauguccaaguuacagaa

SEQ ID NO: 2196513 - RNA, 19 nt, Artificial Sequence
  Description of Artificial Sequence: Synthetic oligonucleotide
  Antisense strand to SEQ ID NO: 2196512
uucuguaacuuggacaucg

SEQ ID NO: 2196514 - RNA, 19 nt, Artificial Sequence
  Description of Artificial Sequence: Synthetic oligonucleotide
  Sense strand starting at position 1699 of SEQ ID NO: 1883477
guccaaguuacagaagguu

SEQ ID NO: 2196515 - RNA, 19 nt, Artificial Sequence
  Description of Artificial Sequence: Synthetic oligonucleotide
  Antisense strand to SEQ ID NO: 2196514
aaccuucuguaacuuggac

SEQ ID NO: 2196516 - RNA, 19 nt, Artificial Sequence
  Description of Artificial Sequence: Synthetic oligonucleotide
  Sense strand starting at position 1708 of SEQ ID NO: 1883477
acagaagguucccuauucu

SEQ ID NO: 2196517 - RNA, 19 nt, Artificial Sequence
  Description of Artificial Sequence: Synthetic oligonucleotide
  Antisense strand to SEQ ID NO: 2196516
agaauagggaaccuucugu

SEQ ID NO: 2196518 - RNA, 19 nt, Artificial Sequence
  Description of Artificial Sequence: Synthetic oligonucleotide
  Sense strand starting at position 2183 of SEQ ID NO: 1883477
guggauugacacugacuca

SEQ ID NO: 2196519 - RNA, 19 nt, Artificial Sequence
  Description of Artificial Sequence: Synthetic oligonucleotide
  Antisense strand to SEQ ID NO: 2196518
ugagucagugucaauccac

SEQ ID NO: 2196520 - RNA, 19 nt, Artificial Sequence
  Description of Artificial Sequence: Synthetic oligonucleotide
  Sense strand starting at position 2295 of SEQ ID NO: 1883477
ucuguuccauguuuaauca

SEQ ID NO: 2196521 - RNA, 19 nt, Artificial Sequence
  Description of Artificial Sequence: Synthetic oligonucleotide
  Antisense strand to SEQ ID NO: 2196520
ugauuaaacauggaacaga

SEQ ID NO: 2196522 - RNA, 19 nt, Artificial Sequence
  Description of Artificial Sequence: Synthetic oligonucleotide
  Sense strand starting at position 2296 of SEQ ID NO: 1883477
cuguuccauguuuaaucaa

SEQ ID NO: 2196523 - RNA, 19 nt, Artificial Sequence
  Description of Artificial Sequence: Synthetic oligonucleotide
  Antisense strand to SEQ ID NO: 2196522
uugauuaaacauggaacag

SEQ ID NO: 2196524 - RNA, 19 nt, Artificial Sequence
  Description of Artificial Sequence: Synthetic oligonucleotide
  Sense strand starting at position 2303 of SEQ ID NO: 1883477
auguuuaaucaaggaucau

SEQ ID NO: 2196525 - RNA, 19 nt, Artificial Sequence
  Description of Artificial Sequence: Synthetic oligonucleotide
  Antisense strand to SEQ ID NO: 2196524
augauccuugauuaaacau

SEQ ID NO: 2196526 - RNA, 19 nt, Artificial Sequence
  Description of Artificial Sequence: Synthetic oligonucleotide
  Sense strand starting at position 2315 of SEQ ID NO: 1883477
ggaucauguagauggcaaa

SEQ ID NO: 2196527 - RNA, 19 nt, Artificial Sequence
  Description of Artificial Sequence: Synthetic oligonucleotide
  Antisense strand to SEQ ID NO: 2196526
uuugccaucuacaugaucc

SEQ ID NO: 2196528 - RNA, 19 nt, Artificial Sequence
  Description of Artificial Sequence: Synthetic oligonucleotide
  Sense strand starting at position 2464 of SEQ ID NO: 1883477
guggcuugaucccuauaaa

SEQ ID NO: 2196529 - RNA, 19 nt, Artificial Sequence
  Description of Artificial Sequence: Synthetic oligonucleotide
  Antisense strand to SEQ ID NO: 2196528
uuuauagggaucaagccac

SEQ ID NO: 2196530 - RNA, 19 nt, Artificial Sequence
  Description of Artificial Sequence: Synthetic oligonucleotide
  Sense strand starting at position 2465 of SEQ ID NO: 1883477
uggcuugaucccuauaaac

SEQ ID NO: 2196531 - RNA, 19 nt, Artificial Sequence
  Description of Artificial Sequence: Synthetic oligonucleotide
  Antisense strand to SEQ ID NO: 2196530
guuuauagggaucaagcca

SEQ ID NO: 2196532 - RNA, 19 nt, Artificial Sequence
  Description of Artificial Sequence: Synthetic oligonucleotide
  Sense strand starting at position 2467 of SEQ ID NO: 1883477
gcuugaucccuauaaacgu

SEQ ID NO: 2196533 - RNA, 19 nt, Artificial Sequence
  Description of Artificial Sequence: Synthetic oligonucleotide
  Antisense strand to SEQ ID NO: 2196532
acguuuauagggaucaagc

SEQ ID NO: 2196534 - RNA, 19 nt, Artificial Sequence
  Description of Artificial Sequence: Synthetic oligonucleotide
  Sense strand starting at position 2489 of SEQ ID NO: 1883477
gugguuaaagcucauaugu

SEQ ID NO: 2196535 - RNA, 19 nt, Artificial Sequence
  Description of Artificial Sequence: Synthetic oligonucleotide
  Antisense strand to SEQ ID NO: 2196534
acauaugagcuuuaaccac

SEQ ID NO: 2196536 - RNA, 19 nt, Artificial Sequence
  Description of Artificial Sequence: Synthetic oligonucleotide
  Sense strand starting at position 2587 of SEQ ID NO: 1883477
uuagauuaaggcugagacu

SEQ ID NO: 2196537 - RNA, 19 nt, Artificial Sequence
  Description of Artificial Sequence: Synthetic oligonucleotide
  Antisense strand to SEQ ID NO: 2196536
agucucagccuuaaucuaa

SEQ ID NO: 2196538 - RNA, 19 nt, Artificial Sequence
  Description of Artificial Sequence: Synthetic oligonucleotide
  Sense strand starting at position 2636 of SEQ ID NO: 1883477
ggcaucgaucgcuuccauu

SEQ ID NO: 2196539 - RNA, 19 nt, Artificial Sequence
  Description of Artificial Sequence: Synthetic oligonucleotide
  Antisense strand to SEQ ID NO: 2196538
aauggaagcgaucgaugcc

SEQ ID NO: 2196540 - RNA, 19 nt, Artificial Sequence
  Description of Artificial Sequence: Synthetic oligonucleotide
  Sense strand starting at position 2751 of SEQ ID NO: 1883477
cucagacuuucuuucuguu

SEQ ID NO: 2196541 - RNA, 19 nt, Artificial Sequence
  Description of Artificial Sequence: Synthetic oligonucleotide
  Antisense strand to SEQ ID NO: 2196540
aacagaaagaaagucugag

SEQ ID NO: 2196542 - RNA, 19 nt, Artificial Sequence
  Description of Artificial Sequence: Synthetic oligonucleotide
  Sense strand starting at position 2819 of SEQ ID NO: 1883477
guguauagaaauugcugaa

SEQ ID NO: 2196543 - RNA, 19 nt, Artificial Sequence
  Description of Artificial Sequence: Synthetic oligonucleotide
  Antisense strand to SEQ ID NO: 2196542
uucagcaauuucuauacac

SEQ ID NO: 2196544 - RNA, 19 nt, Artificial Sequence
  Description of Artificial Sequence: Synthetic oligonucleotide
  Sense strand starting at position 2882 of SEQ ID NO: 1883477
ucacuaccucugugacuga

SEQ ID NO: 2196545 - RNA, 19 nt, Artificial Sequence
  Description of Artificial Sequence: Synthetic oligonucleotide
  Antisense strand to SEQ ID NO: 2196544
ucagucacagagguaguga

SEQ ID NO: 2196546 - RNA, 19 nt, Artificial Sequence
  Description of Artificial Sequence: Synthetic oligonucleotide
  Sense strand starting at position 2995 of SEQ ID NO: 1883477
aagggaauauuugauaguu

SEQ ID NO: 2196547 - RNA, 19 nt, Artificial Sequence
  Description of Artificial Sequence: Synthetic oligonucleotide
  Antisense strand to SEQ ID NO: 2196546
aacuaucaaauauucccuu

SEQ ID NO: 2196548 - RNA, 19 nt, Artificial Sequence
  Description of Artificial Sequence: Synthetic oligonucleotide
  Sense strand starting at position 3025 of SEQ ID NO: 1883477
ugguuucagucagcaggaa

SEQ ID NO: 2196549 - RNA, 19 nt, Artificial Sequence
  Description of Artificial Sequence: Synthetic oligonucleotide
  Antisense strand to SEQ ID NO: 2196548
uuccugcugacugaaacca

SEQ ID NO: 2196550 - RNA, 19 nt, Artificial Sequence
  Description of Artificial Sequence: Synthetic oligonucleotide
  Sense strand starting at position 3250 of SEQ ID NO: 1883477
uguuuauggcaaugaagau

SEQ ID NO: 2196551 - RNA, 19 nt, Artificial Sequence
  Description of Artificial Sequence: Synthetic oligonucleotide
  Antisense strand to SEQ ID NO: 2196550
aucuucauugccauaaaca

SEQ ID NO: 2196552 - RNA, 19 nt, Artificial Sequence
  Description of Artificial Sequence: Synthetic oligonucleotide
  Sense strand starting at position 3309 of SEQ ID NO: 1883477
agugaaauguacccaagga

SEQ ID NO: 2196553 - RNA, 19 nt, Artificial Sequence
  Description of Artificial Sequence: Synthetic oligonucleotide
  Antisense strand to SEQ ID NO: 2196552
uccuuggguacauuucacu

SEQ ID NO: 2196554 - RNA, 19 nt, Artificial Sequence
  Description of Artificial Sequence: Synthetic oligonucleotide
  Sense strand starting at position 3341 of SEQ ID NO: 1883477
agguaaaccagcuguguaa

SEQ ID NO: 2196555 - RNA, 19 nt, Artificial Sequence
  Description of Artificial Sequence: Synthetic oligonucleotide
  Antisense strand to SEQ ID NO: 2196554
uuacacagcugguuuaccu

SEQ ID NO: 2196556 - RNA, 19 nt, Artificial Sequence
  Description of Artificial Sequence: Synthetic oligonucleotide
  Sense strand starting at position 3409 of SEQ ID NO: 1883477
gguucuaugaagugaaagu

SEQ ID NO: 2196557 - RNA, 19 nt, Artificial Sequence
  Description of Artificial Sequence: Synthetic oligonucleotide
  Antisense strand to SEQ ID NO: 2196556
acuuucacuucauagaacc

SEQ ID NO: 2196558 - RNA, 19 nt, Artificial Sequence
  Description of Artificial Sequence: Synthetic oligonucleotide
  Sense strand starting at position 3410 of SEQ ID NO: 1883477
guucuaugaagugaaaguu

SEQ ID NO: 2196559 - RNA, 19 nt, Artificial Sequence
  Description of Artificial Sequence: Synthetic oligonucleotide
  Antisense strand to SEQ ID NO: 2196558
aacuuucacuucauagaac

SEQ ID NO: 2196560 - RNA, 19 nt, Artificial Sequence
  Description of Artificial Sequence: Synthetic oligonucleotide
  Sense strand starting at position 3418 of SEQ ID NO: 1883477
aagugaaaguugccacuua

SEQ ID NO: 2196561 - RNA, 19 nt, Artificial Sequence
  Description of Artificial Sequence: Synthetic oligonucleotide
  Antisense strand to SEQ ID NO: 2196560
uaaguggcaacuuucacuu

SEQ ID NO: 2196562 - RNA, 19 nt, Artificial Sequence
  Description of Artificial Sequence: Synthetic oligonucleotide
  Sense strand starting at position 3491 of SEQ ID NO: 1883477
agcagaugagcccaaaucu

SEQ ID NO: 2196563 - RNA, 19 nt, Artificial Sequence
  Description of Artificial Sequence: Synthetic oligonucleotide
  Antisense strand to SEQ ID NO: 2196562
agauuugggcucaucugcu

SEQ ID NO: 2196564 - RNA, 19 nt, Artificial Sequence
  Description of Artificial Sequence: Synthetic oligonucleotide
  Sense strand starting at position 3697 of SEQ ID NO: 1883477
ggaugagaauugagguggu

SEQ ID NO: 2196565 - RNA, 19 nt, Artificial Sequence
  Description of Artificial Sequence: Synthetic oligonucleotide
  Antisense strand to SEQ ID NO: 2196564
accaccucaauucucaucc

SEQ ID NO: 2196566 - RNA, 19 nt, Artificial Sequence
  Description of Artificial Sequence: Synthetic oligonucleotide
  Sense strand starting at position 3718 of SEQ ID NO: 1883477
uguugauugcaaggguuua

SEQ ID NO: 2196567 - RNA, 19 nt, Artificial Sequence
  Description of Artificial Sequence: Synthetic oligonucleotide
  Antisense strand to SEQ ID NO: 2196566
uaaacccuugcaaucaaca

SEQ ID NO: 2196568 - RNA, 19 nt, Artificial Sequence
  Description of Artificial Sequence: Synthetic oligonucleotide
  Sense strand starting at position 3719 of SEQ ID NO: 1883477
guugauugcaaggguuuaa

SEQ ID NO: 2196569 - RNA, 19 nt, Artificial Sequence
  Description of Artificial Sequence: Synthetic oligonucleotide
  Antisense strand to SEQ ID NO: 2196568
uuaaacccuugcaaucaac

SEQ ID NO: 2196570 - RNA, 19 nt, Artificial Sequence
  Description of Artificial Sequence: Synthetic oligonucleotide
  Sense strand starting at position 3943 of SEQ ID NO: 1883477
ggucgacaaugugucauuu

SEQ ID NO: 2196571 - RNA, 19 nt, Artificial Sequence
  Description of Artificial Sequence: Synthetic oligonucleotide
  Antisense strand to SEQ ID NO: 2196570
aaaugacacauugucgacc

SEQ ID NO: 2196572 - RNA, 19 nt, Artificial Sequence
  Description of Artificial Sequence: Synthetic oligonucleotide
  Sense strand starting at position 3977 of SEQ ID NO: 1883477
gcccucugccuauaugaua

SEQ ID NO: 2196573 - RNA, 19 nt, Artificial Sequence
  Description of Artificial Sequence: Synthetic oligonucleotide
  Antisense strand to SEQ ID NO: 2196572
uaucauauaggcagagggc

SEQ ID NO: 2196574 - RNA, 19 nt, Artificial Sequence
  Description of Artificial Sequence: Synthetic oligonucleotide
  Sense strand starting at position 92 of SEQ ID NO: 1883478
gguuguauggagcagaagu

SEQ ID NO: 2196575 - RNA, 19 nt, Artificial Sequence
  Description of Artificial Sequence: Synthetic oligonucleotide
  Antisense strand to SEQ ID NO: 2196574
acuucugcuccauacaacc

SEQ ID NO: 2196576 - RNA, 19 nt, Artificial Sequence
  Description of Artificial Sequence: Synthetic oligonucleotide
  Sense strand starting at position 94 of SEQ ID NO: 1883478
uuguauggagcagaaguaa

SEQ ID NO: 2196577 - RNA, 19 nt, Artificial Sequence
  Description of Artificial Sequence: Synthetic oligonucleotide
  Antisense strand to SEQ ID NO: 2196576
uuacuucugcuccauacaa

SEQ ID NO: 2196578 - RNA, 19 nt, Artificial Sequence
  Description of Artificial Sequence: Synthetic oligonucleotide
  Sense strand starting at position 205 of SEQ ID NO: 1883478
cucaaagauggaggcauua

SEQ ID NO: 2196579 - RNA, 19 nt, Artificial Sequence
  Description of Artificial Sequence: Synthetic oligonucleotide
  Antisense strand to SEQ ID NO: 2196578
uaaugccuccaucuuugag

SEQ ID NO: 2196580 - RNA, 19 nt, Artificial Sequence
  Description of Artificial Sequence: Synthetic oligonucleotide
  Sense strand starting at position 215 of SEQ ID NO: 1883478
gaggcauuaugccugaaau

SEQ ID NO: 2196581 - RNA, 19 nt, Artificial Sequence
  Description of Artificial Sequence: Synthetic oligonucleotide
  Antisense strand to SEQ ID NO: 2196580
auuucaggcauaaugccuc

SEQ ID NO: 2196582 - RNA, 19 nt, Artificial Sequence
  Description of Artificial Sequence: Synthetic oligonucleotide
  Sense strand starting at position 217 of SEQ ID NO: 1883478
ggcauuaugccugaaauua

SEQ ID NO: 2196583 - RNA, 19 nt, Artificial Sequence
  Description of Artificial Sequence: Synthetic oligonucleotide
  Antisense strand to SEQ ID NO: 2196582
uaauuucaggcauaaugcc

SEQ ID NO: 2196584 - RNA, 19 nt, Artificial Sequence
  Description of Artificial Sequence: Synthetic oligonucleotide
  Sense strand starting at position 475 of SEQ ID NO: 1883478
ugcuuaaaucuagagucau

SEQ ID NO: 2196585 - RNA, 19 nt, Artificial Sequence
  Description of Artificial Sequence: Synthetic oligonucleotide
  Antisense strand to SEQ ID NO: 2196584
augacucuagauuuaagca

SEQ ID NO: 2196586 - RNA, 19 nt, Artificial Sequence
  Description of Artificial Sequence: Synthetic oligonucleotide
  Sense strand starting at position 589 of SEQ ID NO: 1883478
cuaugagagaagugugaag

SEQ ID NO: 2196587 - RNA, 19 nt, Artificial Sequence
  Description of Artificial Sequence: Synthetic oligonucleotide
  Antisense strand to SEQ ID NO: 2196586
cuucacacuucucucauag

SEQ ID NO: 2196588 - RNA, 19 nt, Artificial Sequence
  Description of Artificial Sequence: Synthetic oligonucleotide
  Sense strand starting at position 805 of SEQ ID NO: 1883478
acuguacaugugggauuau

SEQ ID NO: 2196589 - RNA, 19 nt, Artificial Sequence
  Description of Artificial Sequence: Synthetic oligonucleotide
  Antisense strand to SEQ ID NO: 2196588
auaaucccacauguacagu

SEQ ID NO: 2196590 - RNA, 19 nt, Artificial Sequence
  Description of Artificial Sequence: Synthetic oligonucleotide
  Sense strand starting at position 1005 of SEQ ID NO: 1883478
acucaaauuucggagauca

SEQ ID NO: 2196591 - RNA, 19 nt, Artificial Sequence
  Description of Artificial Sequence: Synthetic oligonucleotide
  Antisense strand to SEQ ID NO: 2196590
ugaucuccgaaauuugagu

SEQ ID NO: 2196592 - RNA, 19 nt, Artificial Sequence
  Description of Artificial Sequence: Synthetic oligonucleotide
  Sense strand starting at position 1024 of SEQ ID NO: 1883478
ggaggaguaauguguaaga

SEQ ID NO: 2196593 - RNA, 19 nt, Artificial Sequence
  Description of Artificial Sequence: Synthetic oligonucleotide
  Antisense strand to SEQ ID NO: 2196592
ucuuacacauuacuccucc

SEQ ID NO: 2196594 - RNA, 19 nt, Artificial Sequence
  Description of Artificial Sequence: Synthetic oligonucleotide
  Sense strand starting at position 1089 of SEQ ID NO: 1883478
cguauuuccugucuauacu

SEQ ID NO: 2196595 - RNA, 19 nt, Artificial Sequence
  Description of Artificial Sequence: Synthetic oligonucleotide
  Antisense strand to SEQ ID NO: 2196594
aguauagacaggaaauacg

SEQ ID NO: 2196596 - RNA, 19 nt, Artificial Sequence
  Description of Artificial Sequence: Synthetic oligonucleotide
  Sense strand starting at position 1133 of SEQ ID NO: 1883478
uaguuaccaugagugaaac

SEQ ID NO: 2196597 - RNA, 19 nt, Artificial Sequence
  Description of Artificial Sequence: Synthetic oligonucleotide
  Antisense strand to SEQ ID NO: 2196596
guuucacucaugguaacua

SEQ ID NO: 2196598 - RNA, 19 nt, Artificial Sequence
  Description of Artificial Sequence: Synthetic oligonucleotide
  Sense strand starting at position 1134 of SEQ ID NO: 1883478
aguuaccaugagugaaacu

SEQ ID NO: 2196599 - RNA, 19 nt, Artificial Sequence
  Description of Artificial Sequence: Synthetic oligonucleotide
  Antisense strand to SEQ ID NO: 2196598
aguuucacucaugguaacu

SEQ ID NO: 2196600 - RNA, 19 nt, Artificial Sequence
  Description of Artificial Sequence: Synthetic oligonucleotide
  Sense strand starting at position 1260 of SEQ ID NO: 1883478
ugauccauuccucauaguu

SEQ ID NO: 2196601 - RNA, 19 nt, Artificial Sequence
  Description of Artificial Sequence: Synthetic oligonucleotide
  Antisense strand to SEQ ID NO: 2196600
aacuaugaggaauggauca

SEQ ID NO: 2196602 - RNA, 19 nt, Artificial Sequence
  Description of Artificial Sequence: Synthetic oligonucleotide
  Sense strand starting at position 1299 of SEQ ID NO: 1883478
uuacauagacccuguuaca

SEQ ID NO: 2196603 - RNA, 19 nt, Artificial Sequence
  Description of Artificial Sequence: Synthetic oligonucleotide
  Antisense strand to SEQ ID NO: 2196602
uguaacagggucuauguaa

SEQ ID NO: 2196604 - RNA, 19 nt, Artificial Sequence
  Description of Artificial Sequence: Synthetic oligonucleotide
  Sense strand starting at position 1807 of SEQ ID NO: 1883478
aguauuuacuugccucacu

SEQ ID NO: 2196605 - RNA, 19 nt, Artificial Sequence
  Description of Artificial Sequence: Synthetic oligonucleotide
  Antisense strand to SEQ ID NO: 2196604
agugaggcaaguaaauacu

SEQ ID NO: 2196606 - RNA, 19 nt, Artificial Sequence
  Description of Artificial Sequence: Synthetic oligonucleotide
  Sense strand starting at position 1808 of SEQ ID NO: 1883478
guauuuacuugccucacuu

SEQ ID NO: 2196607 - RNA, 19 nt, Artificial Sequence
  Description of Artificial Sequence: Synthetic oligonucleotide
  Antisense strand to SEQ ID NO: 2196606
aagugaggcaaguaaauac

SEQ ID NO: 2196608 - RNA, 19 nt, Artificial Sequence
  Description of Artificial Sequence: Synthetic oligonucleotide
  Sense strand starting at position 1862 of SEQ ID NO: 1883478
uggagaaaguacuuacucu

SEQ ID NO: 2196609 - RNA, 19 nt, Artificial Sequence
  Description of Artificial Sequence: Synthetic oligonucleotide
  Antisense strand to SEQ ID NO: 2196608
agaguaaguacuuucucca

SEQ ID NO: 2196610 - RNA, 19 nt, Artificial Sequence
  Description of Artificial Sequence: Synthetic oligonucleotide
  Sense strand starting at position 1899 of SEQ ID NO: 1883478
guugauaagauguguacag

SEQ ID NO: 2196611 - RNA, 19 nt, Artificial Sequence
  Description of Artificial Sequence: Synthetic oligonucleotide
  Antisense strand to SEQ ID NO: 2196610
cuguacacaucuuaucaac

SEQ ID NO: 2196612 - RNA, 19 nt, Artificial Sequence
  Description of Artificial Sequence: Synthetic oligonucleotide
  Sense strand starting at position 1996 of SEQ ID NO: 1883478
ucaagaauaggucgaagca

SEQ ID NO: 2196613 - RNA, 19 nt, Artificial Sequence
  Description of Artificial Sequence: Synthetic oligonucleotide
  Antisense strand to SEQ ID NO: 2196612
ugcuucgaccuauucuuga

SEQ ID NO: 2196614 - RNA, 19 nt, Artificial Sequence
  Description of Artificial Sequence: Synthetic oligonucleotide
  Sense strand starting at position 2312 of SEQ ID NO: 1883478
ugaacaauccugggcacau

SEQ ID NO: 2196615 - RNA, 19 nt, Artificial Sequence
  Description of Artificial Sequence: Synthetic oligonucleotide
  Antisense strand to SEQ ID NO: 2196614
augugcccaggauuguuca

SEQ ID NO: 2196616 - RNA, 19 nt, Artificial Sequence
  Description of Artificial Sequence: Synthetic oligonucleotide
  Sense strand starting at position 2464 of SEQ ID NO: 1883478
auuucuuagaggcgauguu

SEQ ID NO: 2196617 - RNA, 19 nt, Artificial Sequence
  Description of Artificial Sequence: Synthetic oligonucleotide
  Antisense strand to SEQ ID NO: 2196616
aacaucgccucuaagaaau

SEQ ID NO: 2196618 - RNA, 19 nt, Artificial Sequence
  Description of Artificial Sequence: Synthetic oligonucleotide
  Sense strand starting at position 2491 of SEQ ID NO: 1883478
uuaccaucaccucaugagu

SEQ ID NO: 2196619 - RNA, 19 nt, Artificial Sequence
  Description of Artificial Sequence: Synthetic oligonucleotide
  Antisense strand to SEQ ID NO: 2196618
acucaugaggugaugguaa

SEQ ID NO: 2196620 - RNA, 19 nt, Artificial Sequence
  Description of Artificial Sequence: Synthetic oligonucleotide
  Sense strand starting at position 2720 of SEQ ID NO: 1883478
ugggaucaguuggcugaua

SEQ ID NO: 2196621 - RNA, 19 nt, Artificial Sequence
  Description of Artificial Sequence: Synthetic oligonucleotide
  Antisense strand to SEQ ID NO: 2196620
uaucagccaacugauccca

SEQ ID NO: 2196622 - RNA, 19 nt, Artificial Sequence
  Description of Artificial Sequence: Synthetic oligonucleotide
  Sense strand starting at position 2856 of SEQ ID NO: 1883478
ucaucuuggcugcaaagaa

SEQ ID NO: 2196623 - RNA, 19 nt, Artificial Sequence
  Description of Artificial Sequence: Synthetic oligonucleotide
  Antisense strand to SEQ ID NO: 2196622
uucuuugcagccaagauga

SEQ ID NO: 2196624 - RNA, 19 nt, Artificial Sequence
  Description of Artificial Sequence: Synthetic oligonucleotide
  Sense strand starting at position 3033 of SEQ ID NO: 1883478
cauuaaugccuguaggaga

SEQ ID NO: 2196625 - RNA, 19 nt, Artificial Sequence
  Description of Artificial Sequence: Synthetic oligonucleotide
  Antisense strand to SEQ ID NO: 2196624
ucuccuacaggcauuaaug

SEQ ID NO: 2196626 - RNA, 19 nt, Artificial Sequence
  Description of Artificial Sequence: Synthetic oligonucleotide
  Sense strand starting at position 3046 of SEQ ID NO: 1883478
aggagaacaucugcuacau

SEQ ID NO: 2196627 - RNA, 19 nt, Artificial Sequence
  Description of Artificial Sequence: Synthetic oligonucleotide
  Antisense strand to SEQ ID NO: 2196626
auguagcagauguucuccu

SEQ ID NO: 2196628 - RNA, 19 nt, Artificial Sequence
  Description of Artificial Sequence: Synthetic oligonucleotide
  Sense strand starting at position 3095 of SEQ ID NO: 1883478
ugacuuauucuguggauau

SEQ ID NO: 2196629 - RNA, 19 nt, Artificial Sequence
  Description of Artificial Sequence: Synthetic oligonucleotide
  Antisense strand to SEQ ID NO: 2196628
auauccacagaauaaguca

SEQ ID NO: 2196630 - RNA, 19 nt, Artificial Sequence
  Description of Artificial Sequence: Synthetic oligonucleotide
  Sense strand starting at position 3097 of SEQ ID NO: 1883478
acuuauucuguggauauca

SEQ ID NO: 2196631 - RNA, 19 nt, Artificial Sequence
  Description of Artificial Sequence: Synthetic oligonucleotide
  Antisense strand to SEQ ID NO: 2196630
ugauauccacagaauaagu

SEQ ID NO: 2196632 - RNA, 19 nt, Artificial Sequence
  Description of Artificial Sequence: Synthetic oligonucleotide
  Sense strand starting at position 3134 of SEQ ID NO: 1883478
cuagauuaugcacagugga

SEQ ID NO: 2196633 - RNA, 19 nt, Artificial Sequence
  Description of Artificial Sequence: Synthetic oligonucleotide
  Antisense strand to SEQ ID NO: 2196632
uccacugugcauaaucuag

SEQ ID NO: 2196634 - RNA, 19 nt, Artificial Sequence
  Description of Artificial Sequence: Synthetic oligonucleotide
  Sense strand starting at position 3137 of SEQ ID NO: 1883478
gauuaugcacaguggauau

SEQ ID NO: 2196635 - RNA, 19 nt, Artificial Sequence
  Description of Artificial Sequence: Synthetic oligonucleotide
  Antisense strand to SEQ ID NO: 2196634
auauccacugugcauaauc

SEQ ID NO: 2196636 - RNA, 19 nt, Artificial Sequence
  Description of Artificial Sequence: Synthetic oligonucleotide
  Sense strand starting at position 3148 of SEQ ID NO: 1883478
guggauauaugagcacaaa

SEQ ID NO: 2196637 - RNA, 19 nt, Artificial Sequence
  Description of Artificial Sequence: Synthetic oligonucleotide
  Antisense strand to SEQ ID NO: 2196636
uuugugcucauauauccac

SEQ ID NO: 2196638 - RNA, 19 nt, Artificial Sequence
  Description of Artificial Sequence: Synthetic oligonucleotide
  Sense strand starting at position 3259 of SEQ ID NO: 1883478
acauguaucccagauguag

SEQ ID NO: 2196639 - RNA, 19 nt, Artificial Sequence
  Description of Artificial Sequence: Synthetic oligonucleotide
  Antisense strand to SEQ ID NO: 2196638
cuacaucugggauacaugu

SEQ ID NO: 2196640 - RNA, 19 nt, Artificial Sequence
  Description of Artificial Sequence: Synthetic oligonucleotide
  Sense strand starting at position 3261 of SEQ ID NO: 1883478
auguaucccagauguagag

SEQ ID NO: 2196641 - RNA, 19 nt, Artificial Sequence
  Description of Artificial Sequence: Synthetic oligonucleotide
  Antisense strand to SEQ ID NO: 2196640
cucuacaucugggauacau

SEQ ID NO: 2196642 - RNA, 19 nt, Artificial Sequence
  Description of Artificial Sequence: Synthetic oligonucleotide
  Sense strand starting at position 3325 of SEQ ID NO: 1883478
cucuauccaguggaaguua

SEQ ID NO: 2196643 - RNA, 19 nt, Artificial Sequence
  Description of Artificial Sequence: Synthetic oligonucleotide
  Antisense strand to SEQ ID NO: 2196642
uaacuuccacuggauagag

SEQ ID NO: 2196644 - RNA, 19 nt, Artificial Sequence
  Description of Artificial Sequence: Synthetic oligonucleotide
  Sense strand starting at position 3333 of SEQ ID NO: 1883478
aguggaaguuacucuacca

SEQ ID NO: 2196645 - RNA, 19 nt, Artificial Sequence
  Description of Artificial Sequence: Synthetic oligonucleotide
  Antisense strand to SEQ ID NO: 2196644
ugguagaguaacuuccacu

SEQ ID NO: 2196646 - RNA, 19 nt, Artificial Sequence
  Description of Artificial Sequence: Synthetic oligonucleotide
  Sense strand starting at position 3371 of SEQ ID NO: 1883478
augacauauuggcugagua

SEQ ID NO: 2196647 - RNA, 19 nt, Artificial Sequence
  Description of Artificial Sequence: Synthetic oligonucleotide
  Antisense strand to SEQ ID NO: 2196646
uacucagccaauaugucau

SEQ ID NO: 2196648 - RNA, 19 nt, Artificial Sequence
  Description of Artificial Sequence: Synthetic oligonucleotide
  Sense strand starting at position 3373 of SEQ ID NO: 1883478
gacauauuggcugaguaug

SEQ ID NO: 2196649 - RNA, 19 nt, Artificial Sequence
  Description of Artificial Sequence: Synthetic oligonucleotide
  Antisense strand to SEQ ID NO: 2196648
cauacucagccaauauguc

SEQ ID NO: 2196650 - RNA, 19 nt, Artificial Sequence
  Description of Artificial Sequence: Synthetic oligonucleotide
  Sense strand starting at position 3426 of SEQ ID NO: 1883478
ugagaaguaucagcuauag

SEQ ID NO: 2196651 - RNA, 19 nt, Artificial Sequence
  Description of Artificial Sequence: Synthetic oligonucleotide
  Antisense strand to SEQ ID NO: 2196650
cuauagcugauacuucuca

SEQ ID NO: 2196652 - RNA, 19 nt, Artificial Sequence
  Description of Artificial Sequence: Synthetic oligonucleotide
  Sense strand starting at position 3820 of SEQ ID NO: 1883478
gaucauucucuggaggcuu

SEQ ID NO: 2196653 - RNA, 19 nt, Artificial Sequence
  Description of Artificial Sequence: Synthetic oligonucleotide
  Antisense strand to SEQ ID NO: 2196652
aagccuccagagaaugauc

SEQ ID NO: 2196654 - RNA, 19 nt, Artificial Sequence
  Description of Artificial Sequence: Synthetic oligonucleotide
  Sense strand starting at position 65 of SEQ ID NO: 1883480
gguaaagacuucuccugaa

SEQ ID NO: 2196655 - RNA, 19 nt, Artificial Sequence
  Description of Artificial Sequence: Synthetic oligonucleotide
  Antisense strand to SEQ ID NO: 2196654
uucaggagaagucuuuacc

SEQ ID NO: 2196656 - RNA, 19 nt, Artificial Sequence
  Description of Artificial Sequence: Synthetic oligonucleotide
  Sense strand starting at position 127 of SEQ ID NO: 1883480
gcaagagaaucucuccuua

SEQ ID NO: 2196657 - RNA, 19 nt, Artificial Sequence
  Description of Artificial Sequence: Synthetic oligonucleotide
  Antisense strand to SEQ ID NO: 2196656
uaaggagagauucucuugc

SEQ ID NO: 2196658 - RNA, 19 nt, Artificial Sequence
  Description of Artificial Sequence: Synthetic oligonucleotide
  Sense strand starting at position 141 of SEQ ID NO: 1883480
ccuuacucucagggagacu

SEQ ID NO: 2196659 - RNA, 19 nt, Artificial Sequence
  Description of Artificial Sequence: Synthetic oligonucleotide
  Antisense strand to SEQ ID NO: 2196658
agucucccugagaguaagg

SEQ ID NO: 2196660 - RNA, 19 nt, Artificial Sequence
  Description of Artificial Sequence: Synthetic oligonucleotide
  Sense strand starting at position 329 of SEQ ID NO: 1883480
cugagauguucccuccaga

SEQ ID NO: 2196661 - RNA, 19 nt, Artificial Sequence
  Description of Artificial Sequence: Synthetic oligonucleotide
  Antisense strand to SEQ ID NO: 2196660
ucuggagggaacaucucag

SEQ ID NO: 2196662 - RNA, 19 nt, Artificial Sequence
  Description of Artificial Sequence: Synthetic oligonucleotide
  Sense strand starting at position 1260 of SEQ ID NO: 1883480
uccuaaugucacugcugga

SEQ ID NO: 2196663 - RNA, 19 nt, Artificial Sequence
  Description of Artificial Sequence: Synthetic oligonucleotide
  Antisense strand to SEQ ID NO: 2196662
uccagcagugacauuagga

SEQ ID NO: 2196664 - RNA, 19 nt, Artificial Sequence
  Description of Artificial Sequence: Synthetic oligonucleotide
  Sense strand starting at position 1273 of SEQ ID NO: 1883480
gcuggaucgugagagguaa

SEQ ID NO: 2196665 - RNA, 19 nt, Artificial Sequence
  Description of Artificial Sequence: Synthetic oligonucleotide
  Antisense strand to SEQ ID NO: 2196664
uuaccucucacgauccagc

SEQ ID NO: 2196666 - RNA, 19 nt, Artificial Sequence
  Description of Artificial Sequence: Synthetic oligonucleotide
  Sense strand starting at position 1277 of SEQ ID NO: 1883480
gaucgugagagguaagcau

SEQ ID NO: 2196667 - RNA, 19 nt, Artificial Sequence
  Description of Artificial Sequence: Synthetic oligonucleotide
  Antisense strand to SEQ ID NO: 2196666
augcuuaccucucacgauc

SEQ ID NO: 2196668 - RNA, 19 nt, Artificial Sequence
  Description of Artificial Sequence: Synthetic oligonucleotide
  Sense strand starting at position 1903 of SEQ ID NO: 1883480
uccgcugagccacaguaau

SEQ ID NO: 2196669 - RNA, 19 nt, Artificial Sequence
  Description of Artificial Sequence: Synthetic oligonucleotide
  Antisense strand to SEQ ID NO: 2196668
auuacuguggcucagcgga

SEQ ID NO: 2196670 - RNA, 19 nt, Artificial Sequence
  Description of Artificial Sequence: Synthetic oligonucleotide
  Sense strand starting at position 1941 of SEQ ID NO: 1883480
uccgcugagccacauuaau

SEQ ID NO: 2196671 - RNA, 19 nt, Artificial Sequence
  Description of Artificial Sequence: Synthetic oligonucleotide
  Antisense strand to SEQ ID NO: 2196670
auuaauguggcucagcgga

SEQ ID NO: 2196672 - RNA, 19 nt, Artificial Sequence
  Description of Artificial Sequence: Synthetic oligonucleotide
  Sense strand starting at position 2294 of SEQ ID NO: 1883480
cguggaaucugaucguuga

SEQ ID NO: 2196673 - RNA, 19 nt, Artificial Sequence
  Description of Artificial Sequence: Synthetic oligonucleotide
  Antisense strand to SEQ ID NO: 2196672
ucaacgaucagauuccacg

SEQ ID NO: 2196674 - RNA, 19 nt, Artificial Sequence
  Description of Artificial Sequence: Synthetic oligonucleotide
  Sense strand starting at position 2295 of SEQ ID NO: 1883480
guggaaucugaucguugaa

SEQ ID NO: 2196675 - RNA, 19 nt, Artificial Sequence
  Description of Artificial Sequence: Synthetic oligonucleotide
  Antisense strand to SEQ ID NO: 2196674
uucaacgaucagauuccac

SEQ ID NO: 2196676 - RNA, 19 nt, Artificial Sequence
  Description of Artificial Sequence: Synthetic oligonucleotide
  Sense strand starting at position 2297 of SEQ ID NO: 1883480
ggaaucugaucguugaaau

SEQ ID NO: 2196677 - RNA, 19 nt, Artificial Sequence
  Description of Artificial Sequence: Synthetic oligonucleotide
  Antisense strand to SEQ ID NO: 2196676
auuucaacgaucagauucc

SEQ ID NO: 2196678 - RNA, 19 nt, Artificial Sequence
  Description of Artificial Sequence: Synthetic oligonucleotide
  Sense strand starting at position 2298 of SEQ ID NO: 1883480
gaaucugaucguugaaauc

SEQ ID NO: 2196679 - RNA, 19 nt, Artificial Sequence
  Description of Artificial Sequence: Synthetic oligonucleotide
  Antisense strand to SEQ ID NO: 2196678
gauuucaacgaucagauuc

SEQ ID NO: 2196680 - RNA, 19 nt, Artificial Sequence
  Description of Artificial Sequence: Synthetic oligonucleotide
  Sense strand starting at position 2304 of SEQ ID NO: 1883480
gaucguugaaaucaguguu

SEQ ID NO: 2196681 - RNA, 19 nt, Artificial Sequence
  Description of Artificial Sequence: Synthetic oligonucleotide
  Antisense strand to SEQ ID NO: 2196680
aacacugauuucaacgauc

SEQ ID NO: 2196682 - RNA, 19 nt, Artificial Sequence
  Description of Artificial Sequence: Synthetic oligonucleotide
  Sense strand starting at position 2307 of SEQ ID NO: 1883480
cguugaaaucaguguucua

SEQ ID NO: 2196683 - RNA, 19 nt, Artificial Sequence
  Description of Artificial Sequence: Synthetic oligonucleotide
  Antisense strand to SEQ ID NO: 2196682
uagaacacugauuucaacg

SEQ ID NO: 2196684 - RNA, 19 nt, Artificial Sequence
  Description of Artificial Sequence: Synthetic oligonucleotide
  Sense strand starting at position 2310 of SEQ ID NO: 1883480
ugaaaucaguguucuacaa

SEQ ID NO: 2196685 - RNA, 19 nt, Artificial Sequence
  Description of Artificial Sequence: Synthetic oligonucleotide
  Antisense strand to SEQ ID NO: 2196684
uuguagaacacugauuuca

SEQ ID NO: 2196686 - RNA, 19 nt, Artificial Sequence
  Description of Artificial Sequence: Synthetic oligonucleotide
  Sense strand starting at position 2314 of SEQ ID NO: 1883480
aucaguguucuacaauauu

SEQ ID NO: 2196687 - RNA, 19 nt, Artificial Sequence
  Description of Artificial Sequence: Synthetic oligonucleotide
  Antisense strand to SEQ ID NO: 2196686
aauauuguagaacacugau

SEQ ID NO: 2196688 - RNA, 19 nt, Artificial Sequence
  Description of Artificial Sequence: Synthetic oligonucleotide
  Sense strand starting at position 2317 of SEQ ID NO: 1883480
aguguucuacaauauucuu

SEQ ID NO: 2196689 - RNA, 19 nt, Artificial Sequence
  Description of Artificial Sequence: Synthetic oligonucleotide
  Antisense strand to SEQ ID NO: 2196688
aagaauauuguagaacacu

SEQ ID NO: 2196690 - RNA, 19 nt, Artificial Sequence
  Description of Artificial Sequence: Synthetic oligonucleotide
  Sense strand starting at position 2461 of SEQ ID NO: 1883480
uuuacucuucuggaguuaa

SEQ ID NO: 2196691 - RNA, 19 nt, Artificial Sequence
  Description of Artificial Sequence: Synthetic oligonucleotide
  Antisense strand to SEQ ID NO: 2196690
uuaacuccagaagaguaaa

SEQ ID NO: 2196692 - RNA, 19 nt, Artificial Sequence
  Description of Artificial Sequence: Synthetic oligonucleotide
  Sense strand starting at position 2718 of SEQ ID NO: 1883480
accucuuuagaccgaggaa

SEQ ID NO: 2196693 - RNA, 19 nt, Artificial Sequence
  Description of Artificial Sequence: Synthetic oligonucleotide
  Antisense strand to SEQ ID NO: 2196692
uuccucggucuaaagaggu

SEQ ID NO: 2196694 - RNA, 19 nt, Artificial Sequence
  Description of Artificial Sequence: Synthetic oligonucleotide
  Sense strand starting at position 3182 of SEQ ID NO: 1883480
uccugucuuccaggaacuu

SEQ ID NO: 2196695 - RNA, 19 nt, Artificial Sequence
  Description of Artificial Sequence: Synthetic oligonucleotide
  Antisense strand to SEQ ID NO: 2196694
aaguuccuggaagacagga

SEQ ID NO: 2196696 - RNA, 19 nt, Artificial Sequence
  Description of Artificial Sequence: Synthetic oligonucleotide
  Sense strand starting at position 3227 of SEQ ID NO: 1883480
ggagcauaaagauguguca

SEQ ID NO: 2196697 - RNA, 19 nt, Artificial Sequence
  Description of Artificial Sequence: Synthetic oligonucleotide
  Antisense strand to SEQ ID NO: 2196696
ugacacaucuuuaugcucc

SEQ ID NO: 2196698 - RNA, 19 nt, Artificial Sequence
  Description of Artificial Sequence: Synthetic oligonucleotide
  Sense strand starting at position 3229 of SEQ ID NO: 1883480
agcauaaagaugugucaag

SEQ ID NO: 2196699 - RNA, 19 nt, Artificial Sequence
  Description of Artificial Sequence: Synthetic oligonucleotide
  Antisense strand to SEQ ID NO: 2196698
cuugacacaucuuuaugcu

SEQ ID NO: 2196700 - RNA, 19 nt, Artificial Sequence
  Description of Artificial Sequence: Synthetic oligonucleotide
  Sense strand starting at position 3230 of SEQ ID NO: 1883480
gcauaaagaugugucaagu

SEQ ID NO: 2196701 - RNA, 19 nt, Artificial Sequence
  Description of Artificial Sequence: Synthetic oligonucleotide
  Antisense strand to SEQ ID NO: 2196700
acuugacacaucuuuaugc

SEQ ID NO: 2196702 - RNA, 19 nt, Artificial Sequence
  Description of Artificial Sequence: Synthetic oligonucleotide
  Sense strand starting at position 3236 of SEQ ID NO: 1883480
agaugugucaagugaaaga

SEQ ID NO: 2196703 - RNA, 19 nt, Artificial Sequence
  Description of Artificial Sequence: Synthetic oligonucleotide
  Antisense strand to SEQ ID NO: 2196702
ucuuucacuugacacaucu

SEQ ID NO: 2196704 - RNA, 19 nt, Artificial Sequence
  Description of Artificial Sequence: Synthetic oligonucleotide
  Sense strand starting at position 3280 of SEQ ID NO: 1883480
ggagcuguugacuguaacu

SEQ ID NO: 2196705 - RNA, 19 nt, Artificial Sequence
  Description of Artificial Sequence: Synthetic oligonucleotide
  Antisense strand to SEQ ID NO: 2196704
aguuacagucaacagcucc

SEQ ID NO: 2196706 - RNA, 19 nt, Artificial Sequence
  Description of Artificial Sequence: Synthetic oligonucleotide
  Sense strand starting at position 3349 of SEQ ID NO: 1883480
cuacuuuagcacuaguuua

SEQ ID NO: 2196707 - RNA, 19 nt, Artificial Sequence
  Description of Artificial Sequence: Synthetic oligonucleotide
  Antisense strand to SEQ ID NO: 2196706
uaaacuagugcuaaaguag

SEQ ID NO: 2196708 - RNA, 19 nt, Artificial Sequence
  Description of Artificial Sequence: Synthetic oligonucleotide
  Sense strand starting at position 3461 of SEQ ID NO: 1883480
gggcaauucuguccaagaa

SEQ ID NO: 2196709 - RNA, 19 nt, Artificial Sequence
  Description of Artificial Sequence: Synthetic oligonucleotide
  Antisense strand to SEQ ID NO: 2196708
uucuuggacagaauugccc

SEQ ID NO: 2196710 - RNA, 19 nt, Artificial Sequence
  Description of Artificial Sequence: Synthetic oligonucleotide
  Sense strand starting at position 3462 of SEQ ID NO: 1883480
ggcaauucuguccaagaaa

SEQ ID NO: 2196711 - RNA, 19 nt, Artificial Sequence
  Description of Artificial Sequence: Synthetic oligonucleotide
  Antisense strand to SEQ ID NO: 2196710
uuucuuggacagaauugcc

SEQ ID NO: 2196712 - RNA, 19 nt, Artificial Sequence
  Description of Artificial Sequence: Synthetic oligonucleotide
  Sense strand starting at position 3492 of SEQ ID NO: 1883480
agaacaauguccuuagcug

SEQ ID NO: 2196713 - RNA, 19 nt, Artificial Sequence
  Description of Artificial Sequence: Synthetic oligonucleotide
  Antisense strand to SEQ ID NO: 2196712
cagcuaaggacauuguucu

SEQ ID NO: 2196714 - RNA, 19 nt, Artificial Sequence
  Description of Artificial Sequence: Synthetic oligonucleotide
  Sense strand starting at position 3493 of SEQ ID NO: 1883480
gaacaauguccuuagcuga

SEQ ID NO: 2196715 - RNA, 19 nt, Artificial Sequence
  Description of Artificial Sequence: Synthetic oligonucleotide
  Antisense strand to SEQ ID NO: 2196714
ucagcuaaggacauuguuc

SEQ ID NO: 2196716 - RNA, 19 nt, Artificial Sequence
  Description of Artificial Sequence: Synthetic oligonucleotide
  Sense strand starting at position 3527 of SEQ ID NO: 1883480
uugguauccuucuacaaag

SEQ ID NO: 2196717 - RNA, 19 nt, Artificial Sequence
  Description of Artificial Sequence: Synthetic oligonucleotide
  Antisense strand to SEQ ID NO: 2196716
cuuuguagaaggauaccaa

SEQ ID NO: 2196718 - RNA, 19 nt, Artificial Sequence
  Description of Artificial Sequence: Synthetic oligonucleotide
  Sense strand starting at position 3545 of SEQ ID NO: 1883480
gcaagacuguuaucaucac

SEQ ID NO: 2196719 - RNA, 19 nt, Artificial Sequence
  Description of Artificial Sequence: Synthetic oligonucleotide
  Antisense strand to SEQ ID NO: 2196718
gugaugauaacagucuugc

SEQ ID NO: 2196720 - RNA, 19 nt, Artificial Sequence
  Description of Artificial Sequence: Synthetic oligonucleotide
  Sense strand starting at position 3605 of SEQ ID NO: 1883480
auauauguuuagcauagca

SEQ ID NO: 2196721 - RNA, 19 nt, Artificial Sequence
  Description of Artificial Sequence: Synthetic oligonucleotide
  Antisense strand to SEQ ID NO: 2196720
ugcuaugcuaaacauauau

SEQ ID NO: 2196722 - RNA, 19 nt, Artificial Sequence
  Description of Artificial Sequence: Synthetic oligonucleotide
  Sense strand starting at position 3607 of SEQ ID NO: 1883480
auauguuuagcauagcaga

SEQ ID NO: 2196723 - RNA, 19 nt, Artificial Sequence
  Description of Artificial Sequence: Synthetic oligonucleotide
  Antisense strand to SEQ ID NO: 2196722
ucugcuaugcuaaacauau

SEQ ID NO: 2196724 - RNA, 19 nt, Artificial Sequence
  Description of Artificial Sequence: Synthetic oligonucleotide
  Sense strand starting at position 3627 of SEQ ID NO: 1883480
ugugccagcccacauaaau

SEQ ID NO: 2196725 - RNA, 19 nt, Artificial Sequence
  Description of Artificial Sequence: Synthetic oligonucleotide
  Antisense strand to SEQ ID NO: 2196724
auuuaugugggcuggcaca

SEQ ID NO: 2196726 - RNA, 19 nt, Artificial Sequence
  Description of Artificial Sequence: Synthetic oligonucleotide
  Sense strand starting at position 3638 of SEQ ID NO: 1883480
acauaaaucugcuuagaga

SEQ ID NO: 2196727 - RNA, 19 nt, Artificial Sequence
  Description of Artificial Sequence: Synthetic oligonucleotide
  Antisense strand to SEQ ID NO: 2196726
ucucuaagcagauuuaugu

SEQ ID NO: 2196728 - RNA, 19 nt, Artificial Sequence
  Description of Artificial Sequence: Synthetic oligonucleotide
  Sense strand starting at position 3848 of SEQ ID NO: 1883480
ucaguacucuuagagauag

SEQ ID NO: 2196729 - RNA, 19 nt, Artificial Sequence
  Description of Artificial Sequence: Synthetic oligonucleotide
  Antisense strand to SEQ ID NO: 2196728
cuaucucuaagaguacuga

SEQ ID NO: 2196730 - RNA, 19 nt, Artificial Sequence
  Description of Artificial Sequence: Synthetic oligonucleotide
  Sense strand starting at position 3865 of SEQ ID NO: 1883480
agaaguuguucagcagguu

SEQ ID NO: 2196731 - RNA, 19 nt, Artificial Sequence
  Description of Artificial Sequence: Synthetic oligonucleotide
  Antisense strand to SEQ ID NO: 2196730
aaccugcugaacaacuucu

SEQ ID NO: 2196732 - RNA, 19 nt, Artificial Sequence
  Description of Artificial Sequence: Synthetic oligonucleotide
  Sense strand starting at position 3944 of SEQ ID NO: 1883480
aaauauugguaggaaauga

SEQ ID NO: 2196733 - RNA, 19 nt, Artificial Sequence
  Description of Artificial Sequence: Synthetic oligonucleotide
  Antisense strand to SEQ ID NO: 2196732
ucauuuccuaccaauauuu

SEQ ID NO: 2196734 - RNA, 19 nt, Artificial Sequence
  Description of Artificial Sequence: Synthetic oligonucleotide
  Sense strand starting at position 12 of SEQ ID NO: 1883479
gagucagaauugcuacuuu

SEQ ID NO: 2196735 - RNA, 19 nt, Artificial Sequence
  Description of Artificial Sequence: Synthetic oligonucleotide
  Antisense strand to SEQ ID NO: 2196734
aaaguagcaauucugacuc

SEQ ID NO: 2196736 - RNA, 19 nt, Artificial Sequence
  Description of Artificial Sequence: Synthetic oligonucleotide
  Sense strand starting at position 238 of SEQ ID NO: 1883479
gcucuuauauauguauaca

SEQ ID NO: 2196737 - RNA, 19 nt, Artificial Sequence
  Description of Artificial Sequence: Synthetic oligonucleotide
  Antisense strand to SEQ ID NO: 2196736
uguauacauauauaagagc

SEQ ID NO: 2196738 - RNA, 19 nt, Artificial Sequence
  Description of Artificial Sequence: Synthetic oligonucleotide
  Sense strand starting at position 327 of SEQ ID NO: 1883479
ccgugaaccgcuguauauu

SEQ ID NO: 2196739 - RNA, 19 nt, Artificial Sequence
  Description of Artificial Sequence: Synthetic oligonucleotide
  Antisense strand to SEQ ID NO: 2196738
aauauacagcgguucacgg

SEQ ID NO: 2196740 - RNA, 19 nt, Artificial Sequence
  Description of Artificial Sequence: Synthetic oligonucleotide
  Sense strand starting at position 328 of SEQ ID NO: 1883479
cgugaaccgcuguauauuu

SEQ ID NO: 2196741 - RNA, 19 nt, Artificial Sequence
  Description of Artificial Sequence: Synthetic oligonucleotide
  Antisense strand to SEQ ID NO: 2196740
aaauauacagcgguucacg

SEQ ID NO: 2196742 - RNA, 19 nt, Artificial Sequence
  Description of Artificial Sequence: Synthetic oligonucleotide
  Sense strand starting at position 394 of SEQ ID NO: 1883479
agaacugcuuaaguuacau

SEQ ID NO: 2196743 - RNA, 19 nt, Artificial Sequence
  Description of Artificial Sequence: Synthetic oligonucleotide
  Antisense strand to SEQ ID NO: 2196742
auguaacuuaagcaguucu

SEQ ID NO: 2196744 - RNA, 19 nt, Artificial Sequence
  Description of Artificial Sequence: Synthetic oligonucleotide
  Sense strand starting at position 471 of SEQ ID NO: 1883479
auauuagcucuucgcauuu

SEQ ID NO: 2196745 - RNA, 19 nt, Artificial Sequence
  Description of Artificial Sequence: Synthetic oligonucleotide
  Antisense strand to SEQ ID NO: 2196744
aaaugcgaagagcuaauau

SEQ ID NO: 2196746 - RNA, 19 nt, Artificial Sequence
  Description of Artificial Sequence: Synthetic oligonucleotide
  Sense strand starting at position 543 of SEQ ID NO: 1883479
ugcucuguccgauaucuuc

SEQ ID NO: 2196747 - RNA, 19 nt, Artificial Sequence
  Description of Artificial Sequence: Synthetic oligonucleotide
  Antisense strand to SEQ ID NO: 2196746
gaagauaucggacagagca

SEQ ID NO: 2196748 - RNA, 19 nt, Artificial Sequence
  Description of Artificial Sequence: Synthetic oligonucleotide
  Sense strand starting at position 550 of SEQ ID NO: 1883479
uccgauaucuucccuguau

SEQ ID NO: 2196749 - RNA, 19 nt, Artificial Sequence
  Description of Artificial Sequence: Synthetic oligonucleotide
  Antisense strand to SEQ ID NO: 2196748
auacagggaagauaucgga

SEQ ID NO: 2196750 - RNA, 19 nt, Artificial Sequence
  Description of Artificial Sequence: Synthetic oligonucleotide
  Sense strand starting at position 551 of SEQ ID NO: 1883479
ccgauaucuucccuguauu

SEQ ID NO: 2196751 - RNA, 19 nt, Artificial Sequence
  Description of Artificial Sequence: Synthetic oligonucleotide
  Antisense strand to SEQ ID NO: 2196750
aauacagggaagauaucgg

SEQ ID NO: 2196752 - RNA, 19 nt, Artificial Sequence
  Description of Artificial Sequence: Synthetic oligonucleotide
  Sense strand starting at position 552 of SEQ ID NO: 1883479
cgauaucuucccuguauuc

SEQ ID NO: 2196753 - RNA, 19 nt, Artificial Sequence
  Description of Artificial Sequence: Synthetic oligonucleotide
  Antisense strand to SEQ ID NO: 2196752
gaauacagggaagauaucg

SEQ ID NO: 2196754 - RNA, 19 nt, Artificial Sequence
  Description of Artificial Sequence: Synthetic oligonucleotide
  Sense strand starting at position 581 of SEQ ID NO: 1883479
aucccuagucucuguucua

SEQ ID NO: 2196755 - RNA, 19 nt, Artificial Sequence
  Description of Artificial Sequence: Synthetic oligonucleotide
  Antisense strand to SEQ ID NO: 2196754
uagaacagagacuagggau

SEQ ID NO: 2196756 - RNA, 19 nt, Artificial Sequence
  Description of Artificial Sequence: Synthetic oligonucleotide
  Sense strand starting at position 582 of SEQ ID NO: 1883479
ucccuagucucuguucuaa

SEQ ID NO: 2196757 - RNA, 19 nt, Artificial Sequence
  Description of Artificial Sequence: Synthetic oligonucleotide
  Antisense strand to SEQ ID NO: 2196756
uuagaacagagacuaggga

SEQ ID NO: 2196758 - RNA, 19 nt, Artificial Sequence
  Description of Artificial Sequence: Synthetic oligonucleotide
  Sense strand starting at position 702 of SEQ ID NO: 1883479
augcucuuuccuuacaguu

SEQ ID NO: 2196759 - RNA, 19 nt, Artificial Sequence
  Description of Artificial Sequence: Synthetic oligonucleotide
  Antisense strand to SEQ ID NO: 2196758
aacuguaaggaaagagcau

SEQ ID NO: 2196760 - RNA, 19 nt, Artificial Sequence
  Description of Artificial Sequence: Synthetic oligonucleotide
  Sense strand starting at position 780 of SEQ ID NO: 1883479
ccuccaacuuugguguaaa

SEQ ID NO: 2196761 - RNA, 19 nt, Artificial Sequence
  Description of Artificial Sequence: Synthetic oligonucleotide
  Antisense strand to SEQ ID NO: 2196760
uuuacaccaaaguuggagg

SEQ ID NO: 2196762 - RNA, 19 nt, Artificial Sequence
  Description of Artificial Sequence: Synthetic oligonucleotide
  Sense strand starting at position 783 of SEQ ID NO: 1883479
ccaacuuugguguaaauau

SEQ ID NO: 2196763 - RNA, 19 nt, Artificial Sequence
  Description of Artificial Sequence: Synthetic oligonucleotide
  Antisense strand to SEQ ID NO: 2196762
auauuuacaccaaaguugg

SEQ ID NO: 2196764 - RNA, 19 nt, Artificial Sequence
  Description of Artificial Sequence: Synthetic oligonucleotide
  Sense strand starting at position 844 of SEQ ID NO: 1883479
agaccuuguuccucucaca

SEQ ID NO: 2196765 - RNA, 19 nt, Artificial Sequence
  Description of Artificial Sequence: Synthetic oligonucleotide
  Antisense strand to SEQ ID NO: 2196764
ugugagaggaacaaggucu

SEQ ID NO: 2196766 - RNA, 19 nt, Artificial Sequence
  Description of Artificial Sequence: Synthetic oligonucleotide
  Sense strand starting at position 892 of SEQ ID NO: 1883479
gagguauuaguagauuguu

SEQ ID NO: 2196767 - RNA, 19 nt, Artificial Sequence
  Description of Artificial Sequence: Synthetic oligonucleotide
  Antisense strand to SEQ ID NO: 2196766
aacaaucuacuaauaccuc

SEQ ID NO: 2196768 - RNA, 19 nt, Artificial Sequence
  Description of Artificial Sequence: Synthetic oligonucleotide
  Sense strand starting at position 919 of SEQ ID NO: 1883479
gcccuaaggcuuggaggau

SEQ ID NO: 2196769 - RNA, 19 nt, Artificial Sequence
  Description of Artificial Sequence: Synthetic oligonucleotide
  Antisense strand to SEQ ID NO: 2196768
auccuccaagccuuagggc

SEQ ID NO: 2196770 - RNA, 19 nt, Artificial Sequence
  Description of Artificial Sequence: Synthetic oligonucleotide
  Sense strand starting at position 931 of SEQ ID NO: 1883479
ggaggauucccauggguca

SEQ ID NO: 2196771 - RNA, 19 nt, Artificial Sequence
  Description of Artificial Sequence: Synthetic oligonucleotide
  Antisense strand to SEQ ID NO: 2196770
ugacccaugggaauccucc

SEQ ID NO: 2196772 - RNA, 19 nt, Artificial Sequence
  Description of Artificial Sequence: Synthetic oligonucleotide
  Sense strand starting at position 1020 of SEQ ID NO: 1883479
aucguaauaugguucuuaa

SEQ ID NO: 2196773 - RNA, 19 nt, Artificial Sequence
  Description of Artificial Sequence: Synthetic oligonucleotide
  Antisense strand to SEQ ID NO: 2196772
uuaagaaccauauuacgau

SEQ ID NO: 2196774 - RNA, 19 nt, Artificial Sequence
  Description of Artificial Sequence: Synthetic oligonucleotide
  Sense strand starting at position 1023 of SEQ ID NO: 1883479
guaauaugguucuuaagga

SEQ ID NO: 2196775 - RNA, 19 nt, Artificial Sequence
  Description of Artificial Sequence: Synthetic oligonucleotide
  Antisense strand to SEQ ID NO: 2196774
uccuuaagaaccauauuac

SEQ ID NO: 2196776 - RNA, 19 nt, Artificial Sequence
  Description of Artificial Sequence: Synthetic oligonucleotide
  Sense strand starting at position 1119 of SEQ ID NO: 1883479
gguaaagacuucuccugaa

SEQ ID NO: 2196777 - RNA, 19 nt, Artificial Sequence
  Description of Artificial Sequence: Synthetic oligonucleotide
  Antisense strand to SEQ ID NO: 2196776
uucaggagaagucuuuacc

SEQ ID NO: 2196778 - RNA, 19 nt, Artificial Sequence
  Description of Artificial Sequence: Synthetic oligonucleotide
  Sense strand starting at position 1181 of SEQ ID NO: 1883479
gcaagagaaucucuccuua

SEQ ID NO: 2196779 - RNA, 19 nt, Artificial Sequence
  Description of Artificial Sequence: Synthetic oligonucleotide
  Antisense strand to SEQ ID NO: 2196778
uaaggagagauucucuugc

SEQ ID NO: 2196780 - RNA, 19 nt, Artificial Sequence
  Description of Artificial Sequence: Synthetic oligonucleotide
  Sense strand starting at position 1195 of SEQ ID NO: 1883479
ccuuacucucagggagacu

SEQ ID NO: 2196781 - RNA, 19 nt, Artificial Sequence
  Description of Artificial Sequence: Synthetic oligonucleotide
  Antisense strand to SEQ ID NO: 2196780
agucucccugagaguaagg

SEQ ID NO: 2196782 - RNA, 19 nt, Artificial Sequence
  Description of Artificial Sequence: Synthetic oligonucleotide
  Sense strand starting at position 1383 of SEQ ID NO: 1883479
cugagauguucccuccaga

SEQ ID NO: 2196783 - RNA, 19 nt, Artificial Sequence
  Description of Artificial Sequence: Synthetic oligonucleotide
  Antisense strand to SEQ ID NO: 2196782
ucuggagggaacaucucag

SEQ ID NO: 2196784 - RNA, 19 nt, Artificial Sequence
  Description of Artificial Sequence: Synthetic oligonucleotide
  Sense strand starting at position 2314 of SEQ ID NO: 1883479
uccuaaugucacugcugga

SEQ ID NO: 2196785 - RNA, 19 nt, Artificial Sequence
  Description of Artificial Sequence: Synthetic oligonucleotide
  Antisense strand to SEQ ID NO: 2196784
uccagcagugacauuagga

SEQ ID NO: 2196786 - RNA, 19 nt, Artificial Sequence
  Description of Artificial Sequence: Synthetic oligonucleotide
  Sense strand starting at position 2331 of SEQ ID NO: 1883479
gaucgugagagguaagcau

SEQ ID NO: 2196787 - RNA, 19 nt, Artificial Sequence
  Description of Artificial Sequence: Synthetic oligonucleotide
  Antisense strand to SEQ ID NO: 2196786
augcuuaccucucacgauc

SEQ ID NO: 2196788 - RNA, 19 nt, Artificial Sequence
  Description of Artificial Sequence: Synthetic oligonucleotide
  Sense strand starting at position 2957 of SEQ ID NO: 1883479
uccgcugagccacaguaau

SEQ ID NO: 2196789 - RNA, 19 nt, Artificial Sequence
  Description of Artificial Sequence: Synthetic oligonucleotide
  Antisense strand to SEQ ID NO: 2196788
auuacuguggcucagcgga

SEQ ID NO: 2196790 - RNA, 19 nt, Artificial Sequence
  Description of Artificial Sequence: Synthetic oligonucleotide
  Sense strand starting at position 2995 of SEQ ID NO: 1883479
uccgcugagccacauuaau

SEQ ID NO: 2196791 - RNA, 19 nt, Artificial Sequence
  Description of Artificial Sequence: Synthetic oligonucleotide
  Antisense strand to SEQ ID NO: 2196790
auuaauguggcucagcgga

SEQ ID NO: 2196792 - RNA, 19 nt, Artificial Sequence
  Description of Artificial Sequence: Synthetic oligonucleotide
  Sense strand starting at position 3348 of SEQ ID NO: 1883479
cguggaaucugaucguuga

SEQ ID NO: 2196793 - RNA, 19 nt, Artificial Sequence
  Description of Artificial Sequence: Synthetic oligonucleotide
  Antisense strand to SEQ ID NO: 2196792
ucaacgaucagauuccacg

SEQ ID NO: 2196794 - RNA, 19 nt, Artificial Sequence
  Description of Artificial Sequence: Synthetic oligonucleotide
  Sense strand starting at position 3349 of SEQ ID NO: 1883479
guggaaucugaucguugaa

SEQ ID NO: 2196795 - RNA, 19 nt, Artificial Sequence
  Description of Artificial Sequence: Synthetic oligonucleotide
  Antisense strand to SEQ ID NO: 2196794
uucaacgaucagauuccac

SEQ ID NO: 2196796 - RNA, 19 nt, Artificial Sequence
  Description of Artificial Sequence: Synthetic oligonucleotide
  Sense strand starting at position 3351 of SEQ ID NO: 1883479
ggaaucugaucguugaaau

SEQ ID NO: 2196797 - RNA, 19 nt, Artificial Sequence
  Description of Artificial Sequence: Synthetic oligonucleotide
  Antisense strand to SEQ ID NO: 2196796
auuucaacgaucagauucc

SEQ ID NO: 2196798 - RNA, 19 nt, Artificial Sequence
  Description of Artificial Sequence: Synthetic oligonucleotide
  Sense strand starting at position 3352 of SEQ ID NO: 1883479
gaaucugaucguugaaauc

SEQ ID NO: 2196799 - RNA, 19 nt, Artificial Sequence
  Description of Artificial Sequence: Synthetic oligonucleotide
  Antisense strand to SEQ ID NO: 2196798
gauuucaacgaucagauuc

SEQ ID NO: 2196800 - RNA, 19 nt, Artificial Sequence
  Description of Artificial Sequence: Synthetic oligonucleotide
  Sense strand starting at position 3358 of SEQ ID NO: 1883479
gaucguugaaaucaguguu

SEQ ID NO: 2196801 - RNA, 19 nt, Artificial Sequence
  Description of Artificial Sequence: Synthetic oligonucleotide
  Antisense strand to SEQ ID NO: 2196800
aacacugauuucaacgauc

SEQ ID NO: 2196802 - RNA, 19 nt, Artificial Sequence
  Description of Artificial Sequence: Synthetic oligonucleotide
  Sense strand starting at position 3361 of SEQ ID NO: 1883479
cguugaaaucaguguucua

SEQ ID NO: 2196803 - RNA, 19 nt, Artificial Sequence
  Description of Artificial Sequence: Synthetic oligonucleotide
  Antisense strand to SEQ ID NO: 2196802
uagaacacugauuucaacg

SEQ ID NO: 2196804 - RNA, 19 nt, Artificial Sequence
  Description of Artificial Sequence: Synthetic oligonucleotide
  Sense strand starting at position 3364 of SEQ ID NO: 1883479
ugaaaucaguguucuacaa

SEQ ID NO: 2196805 - RNA, 19 nt, Artificial Sequence
  Description of Artificial Sequence: Synthetic oligonucleotide
  Antisense strand to SEQ ID NO: 2196804
uuguagaacacugauuuca

SEQ ID NO: 2196806 - RNA, 19 nt, Artificial Sequence
  Description of Artificial Sequence: Synthetic oligonucleotide
  Sense strand starting at position 3368 of SEQ ID NO: 1883479
aucaguguucuacaauauu

SEQ ID NO: 2196807 - RNA, 19 nt, Artificial Sequence
  Description of Artificial Sequence: Synthetic oligonucleotide
  Antisense strand to SEQ ID NO: 2196806
aauauuguagaacacugau

SEQ ID NO: 2196808 - RNA, 19 nt, Artificial Sequence
  Description of Artificial Sequence: Synthetic oligonucleotide
  Sense strand starting at position 3371 of SEQ ID NO: 1883479
aguguucuacaauauucuu

SEQ ID NO: 2196809 - RNA, 19 nt, Artificial Sequence
  Description of Artificial Sequence: Synthetic oligonucleotide
  Antisense strand to SEQ ID NO: 2196808
aagaauauuguagaacacu

SEQ ID NO: 2196810 - RNA, 19 nt, Artificial Sequence
  Description of Artificial Sequence: Synthetic oligonucleotide
  Sense strand starting at position 3515 of SEQ ID NO: 1883479
uuuacucuucuggaguuaa

SEQ ID NO: 2196811 - RNA, 19 nt, Artificial Sequence
  Description of Artificial Sequence: Synthetic oligonucleotide
  Antisense strand to SEQ ID NO: 2196810
uuaacuccagaagaguaaa

SEQ ID NO: 2196812 - RNA, 19 nt, Artificial Sequence
  Description of Artificial Sequence: Synthetic oligonucleotide
  Sense strand starting at position 3772 of SEQ ID NO: 1883479
accucuuuagaccgaggaa

SEQ ID NO: 2196813 - RNA, 19 nt, Artificial Sequence
  Description of Artificial Sequence: Synthetic oligonucleotide
  Antisense strand to SEQ ID NO: 2196812
uuccucggucuaaagaggu

SEQ ID NO: 2196814 - RNA, 19 nt, Artificial Sequence
  Description of Artificial Sequence: Synthetic oligonucleotide
  Sense strand starting at position 21 of SEQ ID NO: 1883481
ccuuguaagccuuagggca

SEQ ID NO: 2196815 - RNA, 19 nt, Artificial Sequence
  Description of Artificial Sequence: Synthetic oligonucleotide
  Antisense strand to SEQ ID NO: 2196814
ugcccuaaggcuuacaagg

SEQ ID NO: 2196816 - RNA, 19 nt, Artificial Sequence
  Description of Artificial Sequence: Synthetic oligonucleotide
  Sense strand starting at position 70 of SEQ ID NO: 1883481
ccuggaaugucugggaaga

SEQ ID NO: 2196817 - RNA, 19 nt, Artificial Sequence
  Description of Artificial Sequence: Synthetic oligonucleotide
  Antisense strand to SEQ ID NO: 2196816
ucuucccagacauuccagg

SEQ ID NO: 2196818 - RNA, 19 nt, Artificial Sequence
  Description of Artificial Sequence: Synthetic oligonucleotide
  Sense strand starting at position 72 of SEQ ID NO: 1883481
uggaaugucugggaagagu

SEQ ID NO: 2196819 - RNA, 19 nt, Artificial Sequence
  Description of Artificial Sequence: Synthetic oligonucleotide
  Antisense strand to SEQ ID NO: 2196818
acucuucccagacauucca

SEQ ID NO: 2196820 - RNA, 19 nt, Artificial Sequence
  Description of Artificial Sequence: Synthetic oligonucleotide
  Sense strand starting at position 83 of SEQ ID NO: 1883481
ggaagagucauaugaccuc

SEQ ID NO: 2196821 - RNA, 19 nt, Artificial Sequence
  Description of Artificial Sequence: Synthetic oligonucleotide
  Antisense strand to SEQ ID NO: 2196820
gaggucauaugacucuucc

SEQ ID NO: 2196822 - RNA, 19 nt, Artificial Sequence
  Description of Artificial Sequence: Synthetic oligonucleotide
  Sense strand starting at position 86 of SEQ ID NO: 1883481
agagucauaugaccucaga

SEQ ID NO: 2196823 - RNA, 19 nt, Artificial Sequence
  Description of Artificial Sequence: Synthetic oligonucleotide
  Antisense strand to SEQ ID NO: 2196822
ucugaggucauaugacucu

SEQ ID NO: 2196824 - RNA, 19 nt, Artificial Sequence
  Description of Artificial Sequence: Synthetic oligonucleotide
  Sense strand starting at position 89 of SEQ ID NO: 1883481
gucauaugaccucagaugu

SEQ ID NO: 2196825 - RNA, 19 nt, Artificial Sequence
  Description of Artificial Sequence: Synthetic oligonucleotide
  Antisense strand to SEQ ID NO: 2196824
acaucugaggucauaugac

SEQ ID NO: 2196826 - RNA, 19 nt, Artificial Sequence
  Description of Artificial Sequence: Synthetic oligonucleotide
  Sense strand starting at position 131 of SEQ ID NO: 1883481
gggugcuuugaauagacua

SEQ ID NO: 2196827 - RNA, 19 nt, Artificial Sequence
  Description of Artificial Sequence: Synthetic oligonucleotide
  Antisense strand to SEQ ID NO: 2196826
uagucuauucaaagcaccc

SEQ ID NO: 2196828 - RNA, 19 nt, Artificial Sequence
  Description of Artificial Sequence: Synthetic oligonucleotide
  Sense strand starting at position 176 of SEQ ID NO: 1883481
ggaaaccagucagaagguu

SEQ ID NO: 2196829 - RNA, 19 nt, Artificial Sequence
  Description of Artificial Sequence: Synthetic oligonucleotide
  Antisense strand to SEQ ID NO: 2196828
aaccuucugacugguuucc

SEQ ID NO: 2196830 - RNA, 19 nt, Artificial Sequence
  Description of Artificial Sequence: Synthetic oligonucleotide
  Sense strand starting at position 214 of SEQ ID NO: 1883481
agaugaauguccuggacca

SEQ ID NO: 2196831 - RNA, 19 nt, Artificial Sequence
  Description of Artificial Sequence: Synthetic oligonucleotide
  Antisense strand to SEQ ID NO: 2196830
ugguccaggacauucaucu

SEQ ID NO: 2196832 - RNA, 19 nt, Artificial Sequence
  Description of Artificial Sequence: Synthetic oligonucleotide
  Sense strand starting at position 215 of SEQ ID NO: 1883481
gaugaauguccuggaccag

SEQ ID NO: 2196833 - RNA, 19 nt, Artificial Sequence
  Description of Artificial Sequence: Synthetic oligonucleotide
  Antisense strand to SEQ ID NO: 2196832
cugguccaggacauucauc

SEQ ID NO: 2196834 - RNA, 19 nt, Artificial Sequence
  Description of Artificial Sequence: Synthetic oligonucleotide
  Sense strand starting at position 417 of SEQ ID NO: 1883481
aguugucuuguauacagua

SEQ ID NO: 2196835 - RNA, 19 nt, Artificial Sequence
  Description of Artificial Sequence: Synthetic oligonucleotide
  Antisense strand to SEQ ID NO: 2196834
uacuguauacaagacaacu

SEQ ID NO: 2196836 - RNA, 19 nt, Artificial Sequence
  Description of Artificial Sequence: Synthetic oligonucleotide
  Sense strand starting at position 422 of SEQ ID NO: 1883481
ucuuguauacaguaauguu

SEQ ID NO: 2196837 - RNA, 19 nt, Artificial Sequence
  Description of Artificial Sequence: Synthetic oligonucleotide
  Antisense strand to SEQ ID NO: 2196836
aacauuacuguauacaaga

SEQ ID NO: 2196838 - RNA, 19 nt, Artificial Sequence
  Description of Artificial Sequence: Synthetic oligonucleotide
  Sense strand starting at position 432 of SEQ ID NO: 1883481
aguaauguuuaagauaccu

SEQ ID NO: 2196839 - RNA, 19 nt, Artificial Sequence
  Description of Artificial Sequence: Synthetic oligonucleotide
  Antisense strand to SEQ ID NO: 2196838
agguaucuuaaacauuacu

SEQ ID NO: 2196840 - RNA, 19 nt, Artificial Sequence
  Description of Artificial Sequence: Synthetic oligonucleotide
  Sense strand starting at position 437 of SEQ ID NO: 1883481
uguuuaagauaccuauuag

SEQ ID NO: 2196841 - RNA, 19 nt, Artificial Sequence
  Description of Artificial Sequence: Synthetic oligonucleotide
  Antisense strand to SEQ ID NO: 2196840
cuaauagguaucuuaaaca

SEQ ID NO: 2196842 - RNA, 19 nt, Artificial Sequence
  Description of Artificial Sequence: Synthetic oligonucleotide
  Sense strand starting at position 547 of SEQ ID NO: 1883481
guacacagaugacaucuaa

SEQ ID NO: 2196843 - RNA, 19 nt, Artificial Sequence
  Description of Artificial Sequence: Synthetic oligonucleotide
  Antisense strand to SEQ ID NO: 2196842
uuagaugucaucuguguac

SEQ ID NO: 2196844 - RNA, 19 nt, Artificial Sequence
  Description of Artificial Sequence: Synthetic oligonucleotide
  Sense strand starting at position 587 of SEQ ID NO: 1883481
uuagcagugauauguguca

SEQ ID NO: 2196845 - RNA, 19 nt, Artificial Sequence
  Description of Artificial Sequence: Synthetic oligonucleotide
  Antisense strand to SEQ ID NO: 2196844
ugacacauaucacugcuaa

SEQ ID NO: 2196846 - RNA, 19 nt, Artificial Sequence
  Description of Artificial Sequence: Synthetic oligonucleotide
  Sense strand starting at position 589 of SEQ ID NO: 1883481
agcagugauaugugucacu

SEQ ID NO: 2196847 - RNA, 19 nt, Artificial Sequence
  Description of Artificial Sequence: Synthetic oligonucleotide
  Antisense strand to SEQ ID NO: 2196846
agugacacauaucacugcu

SEQ ID NO: 2196848 - RNA, 19 nt, Artificial Sequence
  Description of Artificial Sequence: Synthetic oligonucleotide
  Sense strand starting at position 622 of SEQ ID NO: 1883481
cccaauuggccucagcaua

SEQ ID NO: 2196849 - RNA, 19 nt, Artificial Sequence
  Description of Artificial Sequence: Synthetic oligonucleotide
  Antisense strand to SEQ ID NO: 2196848
uaugcugaggccaauuggg

SEQ ID NO: 2196850 - RNA, 19 nt, Artificial Sequence
  Description of Artificial Sequence: Synthetic oligonucleotide
  Sense strand starting at position 678 of SEQ ID NO: 1883481
acaaauuccuuaguuuagu

SEQ ID NO: 2196851 - RNA, 19 nt, Artificial Sequence
  Description of Artificial Sequence: Synthetic oligonucleotide
  Antisense strand to SEQ ID NO: 2196850
acuaaacuaaggaauuugu

SEQ ID NO: 2196852 - RNA, 19 nt, Artificial Sequence
  Description of Artificial Sequence: Synthetic oligonucleotide
  Sense strand starting at position 746 of SEQ ID NO: 1883481
caguucucgucaccaagau

SEQ ID NO: 2196853 - RNA, 19 nt, Artificial Sequence
  Description of Artificial Sequence: Synthetic oligonucleotide
  Antisense strand to SEQ ID NO: 2196852
aucuuggugacgagaacug

SEQ ID NO: 2196854 - RNA, 19 nt, Artificial Sequence
  Description of Artificial Sequence: Synthetic oligonucleotide
  Sense strand starting at position 750 of SEQ ID NO: 1883481
ucucgucaccaagauguua

SEQ ID NO: 2196855 - RNA, 19 nt, Artificial Sequence
  Description of Artificial Sequence: Synthetic oligonucleotide
  Antisense strand to SEQ ID NO: 2196854
uaacaucuuggugacgaga

SEQ ID NO: 2196856 - RNA, 19 nt, Artificial Sequence
  Description of Artificial Sequence: Synthetic oligonucleotide
  Sense strand starting at position 772 of SEQ ID NO: 1883481
gaaguuugccaagaggcau

SEQ ID NO: 2196857 - RNA, 19 nt, Artificial Sequence
  Description of Artificial Sequence: Synthetic oligonucleotide
  Antisense strand to SEQ ID NO: 2196856
augccucuuggcaaacuuc

SEQ ID NO: 2196858 - RNA, 19 nt, Artificial Sequence
  Description of Artificial Sequence: Synthetic oligonucleotide
  Sense strand starting at position 853 of SEQ ID NO: 1883481
guucuagagcccuggcauu

SEQ ID NO: 2196859 - RNA, 19 nt, Artificial Sequence
  Description of Artificial Sequence: Synthetic oligonucleotide
  Antisense strand to SEQ ID NO: 2196858
aaugccagggcucuagaac

SEQ ID NO: 2196860 - RNA, 19 nt, Artificial Sequence
  Description of Artificial Sequence: Synthetic oligonucleotide
  Sense strand starting at position 908 of SEQ ID NO: 1883481
cauuuaagccuucguugga

SEQ ID NO: 2196861 - RNA, 19 nt, Artificial Sequence
  Description of Artificial Sequence: Synthetic oligonucleotide
  Antisense strand to SEQ ID NO: 2196860
uccaacgaaggcuuaaaug

SEQ ID NO: 2196862 - RNA, 19 nt, Artificial Sequence
  Description of Artificial Sequence: Synthetic oligonucleotide
  Sense strand starting at position 912 of SEQ ID NO: 1883481
uaagccuucguuggacaga

SEQ ID NO: 2196863 - RNA, 19 nt, Artificial Sequence
  Description of Artificial Sequence: Synthetic oligonucleotide
  Antisense strand to SEQ ID NO: 2196862
ucuguccaacgaaggcuua

SEQ ID NO: 2196864 - RNA, 19 nt, Artificial Sequence
  Description of Artificial Sequence: Synthetic oligonucleotide
  Sense strand starting at position 950 of SEQ ID NO: 1883481
acauaagcucauugauguc

SEQ ID NO: 2196865 - RNA, 19 nt, Artificial Sequence
  Description of Artificial Sequence: Synthetic oligonucleotide
  Antisense strand to SEQ ID NO: 2196864
gacaucaaugagcuuaugu

SEQ ID NO: 2196866 - RNA, 19 nt, Artificial Sequence
  Description of Artificial Sequence: Synthetic oligonucleotide
  Sense strand starting at position 1002 of SEQ ID NO: 1883481
gagggaaucuuccaguccu

SEQ ID NO: 2196867 - RNA, 19 nt, Artificial Sequence
  Description of Artificial Sequence: Synthetic oligonucleotide
  Antisense strand to SEQ ID NO: 2196866
aggacuggaagauucccuc

SEQ ID NO: 2196868 - RNA, 19 nt, Artificial Sequence
  Description of Artificial Sequence: Synthetic oligonucleotide
  Sense strand starting at position 1053 of SEQ ID NO: 1883481
gcuuaugcccuuugugaau

SEQ ID NO: 2196869 - RNA, 19 nt, Artificial Sequence
  Description of Artificial Sequence: Synthetic oligonucleotide
  Antisense strand to SEQ ID NO: 2196868
auucacaaagggcauaagc

SEQ ID NO: 2196870 - RNA, 19 nt, Artificial Sequence
  Description of Artificial Sequence: Synthetic oligonucleotide
  Sense strand starting at position 1169 of SEQ ID NO: 1883481
aggacugaguucuaaccuu

SEQ ID NO: 2196871 - RNA, 19 nt, Artificial Sequence
  Description of Artificial Sequence: Synthetic oligonucleotide
  Antisense strand to SEQ ID NO: 2196870
aagguuagaacucaguccu

SEQ ID NO: 2196872 - RNA, 19 nt, Artificial Sequence
  Description of Artificial Sequence: Synthetic oligonucleotide
  Sense strand starting at position 1176 of SEQ ID NO: 1883481
aguucuaaccuuggaucca

SEQ ID NO: 2196873 - RNA, 19 nt, Artificial Sequence
  Description of Artificial Sequence: Synthetic oligonucleotide
  Antisense strand to SEQ ID NO: 2196872
uggauccaagguuagaacu

SEQ ID NO: 2196874 - RNA, 19 nt, Artificial Sequence
  Description of Artificial Sequence: Synthetic oligonucleotide
  Sense strand starting at position 1209 of SEQ ID NO: 1883481
agaggucucagguaaguga

SEQ ID NO: 2196875 - RNA, 19 nt, Artificial Sequence
  Description of Artificial Sequence: Synthetic oligonucleotide
  Antisense strand to SEQ ID NO: 2196874
ucacuuaccugagaccucu

SEQ ID NO: 2196876 - RNA, 19 nt, Artificial Sequence
  Description of Artificial Sequence: Synthetic oligonucleotide
  Sense strand starting at position 1216 of SEQ ID NO: 1883481
ucagguaagugacuugagu

SEQ ID NO: 2196877 - RNA, 19 nt, Artificial Sequence
  Description of Artificial Sequence: Synthetic oligonucleotide
  Antisense strand to SEQ ID NO: 2196876
acucaagucacuuaccuga

SEQ ID NO: 2196878 - RNA, 19 nt, Artificial Sequence
  Description of Artificial Sequence: Synthetic oligonucleotide
  Sense strand starting at position 1218 of SEQ ID NO: 1883481
agguaagugacuugaguuu

SEQ ID NO: 2196879 - RNA, 19 nt, Artificial Sequence
  Description of Artificial Sequence: Synthetic oligonucleotide
  Antisense strand to SEQ ID NO: 2196878
aaacucaagucacuuaccu

SEQ ID NO: 2196880 - RNA, 19 nt, Artificial Sequence
  Description of Artificial Sequence: Synthetic oligonucleotide
  Sense strand starting at position 1277 of SEQ ID NO: 1883481
ugacuauauugcguuaaau

SEQ ID NO: 2196881 - RNA, 19 nt, Artificial Sequence
  Description of Artificial Sequence: Synthetic oligonucleotide
  Antisense strand to SEQ ID NO: 2196880
auuuaacgcaauauaguca

SEQ ID NO: 2196882 - RNA, 19 nt, Artificial Sequence
  Description of Artificial Sequence: Synthetic oligonucleotide
  Sense strand starting at position 1279 of SEQ ID NO: 1883481
acuauauugcguuaaauga

SEQ ID NO: 2196883 - RNA, 19 nt, Artificial Sequence
  Description of Artificial Sequence: Synthetic oligonucleotide
  Antisense strand to SEQ ID NO: 2196882
ucauuuaacgcaauauagu

SEQ ID NO: 2196884 - RNA, 19 nt, Artificial Sequence
  Description of Artificial Sequence: Synthetic oligonucleotide
  Sense strand starting at position 1358 of SEQ ID NO: 1883481
uguccuaaucaguaaguca

SEQ ID NO: 2196885 - RNA, 19 nt, Artificial Sequence
  Description of Artificial Sequence: Synthetic oligonucleotide
  Antisense strand to SEQ ID NO: 2196884
ugacuuacugauuaggaca

SEQ ID NO: 2196886 - RNA, 19 nt, Artificial Sequence
  Description of Artificial Sequence: Synthetic oligonucleotide
  Sense strand starting at position 1392 of SEQ ID NO: 1883481
cuacuaaaugaaugagugu

SEQ ID NO: 2196887 - RNA, 19 nt, Artificial Sequence
  Description of Artificial Sequence: Synthetic oligonucleotide
  Antisense strand to SEQ ID NO: 2196886
acacucauucauuuaguag

SEQ ID NO: 2196888 - RNA, 19 nt, Artificial Sequence
  Description of Artificial Sequence: Synthetic oligonucleotide
  Sense strand starting at position 1405 of SEQ ID NO: 1883481
gaguguugagcuuguucca

SEQ ID NO: 2196889 - RNA, 19 nt, Artificial Sequence
  Description of Artificial Sequence: Synthetic oligonucleotide
  Antisense strand to SEQ ID NO: 2196888
uggaacaagcucaacacuc

SEQ ID NO: 2196890 - RNA, 19 nt, Artificial Sequence
  Description of Artificial Sequence: Synthetic oligonucleotide
  Sense strand starting at position 1606 of SEQ ID NO: 1883481
cucccuuccucugcgagau

SEQ ID NO: 2196891 - RNA, 19 nt, Artificial Sequence
  Description of Artificial Sequence: Synthetic oligonucleotide
  Antisense strand to SEQ ID NO: 2196890
aucucgcagaggaagggag

SEQ ID NO: 2196892 - RNA, 19 nt, Artificial Sequence
  Description of Artificial Sequence: Synthetic oligonucleotide
  Sense strand starting at position 1610 of SEQ ID NO: 1883481
cuuccucugcgagaucuuu

SEQ ID NO: 2196893 - RNA, 19 nt, Artificial Sequence
  Description of Artificial Sequence: Synthetic oligonucleotide
  Antisense strand to SEQ ID NO: 2196892
aaagaucucgcagaggaag

SEQ ID NO: 2196894 - RNA, 19 nt, Artificial Sequence
  Description of Artificial Sequence: Synthetic oligonucleotide
  Sense strand starting at position 2100 of SEQ ID NO: 1883482
cucagugacccguagagga

SEQ ID NO: 2196895 - RNA, 19 nt, Artificial Sequence
  Description of Artificial Sequence: Synthetic oligonucleotide
  Antisense strand to SEQ ID NO: 2196894
uccucuacgggucacugag

SEQ ID NO: 2196896 - RNA, 19 nt, Artificial Sequence
  Description of Artificial Sequence: Synthetic oligonucleotide
  Sense strand starting at position 2378 of SEQ ID NO: 1883482
uuagcaggaauguauugau

SEQ ID NO: 2196897 - RNA, 19 nt, Artificial Sequence
  Description of Artificial Sequence: Synthetic oligonucleotide
  Antisense strand to SEQ ID NO: 2196896
aucaauacauuccugcuaa

SEQ ID NO: 2196898 - RNA, 19 nt, Artificial Sequence
  Description of Artificial Sequence: Synthetic oligonucleotide
  Sense strand starting at position 2415 of SEQ ID NO: 1883482
agagcuguggugugaagga

SEQ ID NO: 2196899 - RNA, 19 nt, Artificial Sequence
  Description of Artificial Sequence: Synthetic oligonucleotide
  Antisense strand to SEQ ID NO: 2196898
uccuucacaccacagcucu

SEQ ID NO: 2196900 - RNA, 19 nt, Artificial Sequence
  Description of Artificial Sequence: Synthetic oligonucleotide
  Sense strand starting at position 2479 of SEQ ID NO: 1883482
cacagaugcgcuggaacaa

SEQ ID NO: 2196901 - RNA, 19 nt, Artificial Sequence
  Description of Artificial Sequence: Synthetic oligonucleotide
  Antisense strand to SEQ ID NO: 2196900
uuguuccagcgcaucugug

SEQ ID NO: 2196902 - RNA, 19 nt, Artificial Sequence
  Description of Artificial Sequence: Synthetic oligonucleotide
  Sense strand starting at position 2528 of SEQ ID NO: 1883482
gguaaaugcugacuuacug

SEQ ID NO: 2196903 - RNA, 19 nt, Artificial Sequence
  Description of Artificial Sequence: Synthetic oligonucleotide
  Antisense strand to SEQ ID NO: 2196902
caguaagucagcauuuacc

SEQ ID NO: 2196904 - RNA, 19 nt, Artificial Sequence
  Description of Artificial Sequence: Synthetic oligonucleotide
  Sense strand starting at position 2539 of SEQ ID NO: 1883482
acuuacugauuaggacaau

SEQ ID NO: 2196905 - RNA, 19 nt, Artificial Sequence
  Description of Artificial Sequence: Synthetic oligonucleotide
  Antisense strand to SEQ ID NO: 2196904
auuguccuaaucaguaagu

SEQ ID NO: 2196906 - RNA, 19 nt, Artificial Sequence
  Description of Artificial Sequence: Synthetic oligonucleotide
  Sense strand starting at position 2540 of SEQ ID NO: 1883482
cuuacugauuaggacaauu

SEQ ID NO: 2196907 - RNA, 19 nt, Artificial Sequence
  Description of Artificial Sequence: Synthetic oligonucleotide
  Antisense strand to SEQ ID NO: 2196906
aauuguccuaaucaguaag

SEQ ID NO: 2196908 - RNA, 19 nt, Artificial Sequence
  Description of Artificial Sequence: Synthetic oligonucleotide
  Sense strand starting at position 2555 of SEQ ID NO: 1883482
aauugagacuuaguauugu

SEQ ID NO: 2196909 - RNA, 19 nt, Artificial Sequence
  Description of Artificial Sequence: Synthetic oligonucleotide
  Antisense strand to SEQ ID NO: 2196908
acaauacuaagucucaauu

SEQ ID NO: 2196910 - RNA, 19 nt, Artificial Sequence
  Description of Artificial Sequence: Synthetic oligonucleotide
  Sense strand starting at position 2568 of SEQ ID NO: 1883482
uauuguuugcgguuugcua

SEQ ID NO: 2196911 - RNA, 19 nt, Artificial Sequence
  Description of Artificial Sequence: Synthetic oligonucleotide
  Antisense strand to SEQ ID NO: 2196910
uagcaaaccgcaaacaaua

SEQ ID NO: 2196912 - RNA, 19 nt, Artificial Sequence
  Description of Artificial Sequence: Synthetic oligonucleotide
  Sense strand starting at position 2569 of SEQ ID NO: 1883482
auuguuugcgguuugcuaa

SEQ ID NO: 2196913 - RNA, 19 nt, Artificial Sequence
  Description of Artificial Sequence: Synthetic oligonucleotide
  Antisense strand to SEQ ID NO: 2196912
uuagcaaaccgcaaacaau

SEQ ID NO: 2196914 - RNA, 19 nt, Artificial Sequence
  Description of Artificial Sequence: Synthetic oligonucleotide
  Sense strand starting at position 2625 of SEQ ID NO: 1883482
gcaauauagucacuuaagg

SEQ ID NO: 2196915 - RNA, 19 nt, Artificial Sequence
  Description of Artificial Sequence: Synthetic oligonucleotide
  Antisense strand to SEQ ID NO: 2196914
ccuuaagugacuauauugc

SEQ ID NO: 2196916 - RNA, 19 nt, Artificial Sequence
  Description of Artificial Sequence: Synthetic oligonucleotide
  Sense strand starting at position 2681 of SEQ ID NO: 1883482
ucaagucacuuaccugaga

SEQ ID NO: 2196917 - RNA, 19 nt, Artificial Sequence
  Description of Artificial Sequence: Synthetic oligonucleotide
  Antisense strand to SEQ ID NO: 2196916
ucucagguaagugacuuga

SEQ ID NO: 2196918 - RNA, 19 nt, Artificial Sequence
  Description of Artificial Sequence: Synthetic oligonucleotide
  Sense strand starting at position 2692 of SEQ ID NO: 1883482
accugagaccucugcauga

SEQ ID NO: 2196919 - RNA, 19 nt, Artificial Sequence
  Description of Artificial Sequence: Synthetic oligonucleotide
  Antisense strand to SEQ ID NO: 2196918
ucaugcagaggucucaggu

SEQ ID NO: 2196920 - RNA, 19 nt, Artificial Sequence
  Description of Artificial Sequence: Synthetic oligonucleotide
  Sense strand starting at position 2694 of SEQ ID NO: 1883482
cugagaccucugcaugagu

SEQ ID NO: 2196921 - RNA, 19 nt, Artificial Sequence
  Description of Artificial Sequence: Synthetic oligonucleotide
  Antisense strand to SEQ ID NO: 2196920
acucaugcagaggucucag

SEQ ID NO: 2196922 - RNA, 19 nt, Artificial Sequence
  Description of Artificial Sequence: Synthetic oligonucleotide
  Sense strand starting at position 2696 of SEQ ID NO: 1883482
gagaccucugcaugaguaa

SEQ ID NO: 2196923 - RNA, 19 nt, Artificial Sequence
  Description of Artificial Sequence: Synthetic oligonucleotide
  Antisense strand to SEQ ID NO: 2196922
uuacucaugcagaggucuc

SEQ ID NO: 2196924 - RNA, 19 nt, Artificial Sequence
  Description of Artificial Sequence: Synthetic oligonucleotide
  Sense strand starting at position 2705 of SEQ ID NO: 1883482
gcaugaguaagugguggau

SEQ ID NO: 2196925 - RNA, 19 nt, Artificial Sequence
  Description of Artificial Sequence: Synthetic oligonucleotide
  Antisense strand to SEQ ID NO: 2196924
auccaccacuuacucaugc

SEQ ID NO: 2196926 - RNA, 19 nt, Artificial Sequence
  Description of Artificial Sequence: Synthetic oligonucleotide
  Sense strand starting at position 2709 of SEQ ID NO: 1883482
gaguaagugguggauccaa

SEQ ID NO: 2196927 - RNA, 19 nt, Artificial Sequence
  Description of Artificial Sequence: Synthetic oligonucleotide
  Antisense strand to SEQ ID NO: 2196926
uuggauccaccacuuacuc

SEQ ID NO: 2196928 - RNA, 19 nt, Artificial Sequence
  Description of Artificial Sequence: Synthetic oligonucleotide
  Sense strand starting at position 2766 of SEQ ID NO: 1883482
gccuaauagcagcauuaca

SEQ ID NO: 2196929 - RNA, 19 nt, Artificial Sequence
  Description of Artificial Sequence: Synthetic oligonucleotide
  Antisense strand to SEQ ID NO: 2196928
uguaaugcugcuauuaggc

SEQ ID NO: 2196930 - RNA, 19 nt, Artificial Sequence
  Description of Artificial Sequence: Synthetic oligonucleotide
  Sense strand starting at position 2790 of SEQ ID NO: 1883482
gccacaugcguuuaggagu

SEQ ID NO: 2196931 - RNA, 19 nt, Artificial Sequence
  Description of Artificial Sequence: Synthetic oligonucleotide
  Antisense strand to SEQ ID NO: 2196930
acuccuaaacgcauguggc

SEQ ID NO: 2196932 - RNA, 19 nt, Artificial Sequence
  Description of Artificial Sequence: Synthetic oligonucleotide
  Sense strand starting at position 2797 of SEQ ID NO: 1883482
gcguuuaggagugaaggca

SEQ ID NO: 2196933 - RNA, 19 nt, Artificial Sequence
  Description of Artificial Sequence: Synthetic oligonucleotide
  Antisense strand to SEQ ID NO: 2196932
ugccuucacuccuaaacgc

SEQ ID NO: 2196934 - RNA, 19 nt, Artificial Sequence
  Description of Artificial Sequence: Synthetic oligonucleotide
  Sense strand starting at position 2826 of SEQ ID NO: 1883482
agagguaccgcuugugauu

SEQ ID NO: 2196935 - RNA, 19 nt, Artificial Sequence
  Description of Artificial Sequence: Synthetic oligonucleotide
  Antisense strand to SEQ ID NO: 2196934
aaucacaagcgguaccucu

SEQ ID NO: 2196936 - RNA, 19 nt, Artificial Sequence
  Description of Artificial Sequence: Synthetic oligonucleotide
  Sense strand starting at position 2886 of SEQ ID NO: 1883482
cugucugaggacuggaaga

SEQ ID NO: 2196937 - RNA, 19 nt, Artificial Sequence
  Description of Artificial Sequence: Synthetic oligonucleotide
  Antisense strand to SEQ ID NO: 2196936
ucuuccaguccucagacag

SEQ ID NO: 2196938 - RNA, 19 nt, Artificial Sequence
  Description of Artificial Sequence: Synthetic oligonucleotide
  Sense strand starting at position 2941 of SEQ ID NO: 1883482
ugaagacaucaaugagcuu

SEQ ID NO: 2196939 - RNA, 19 nt, Artificial Sequence
  Description of Artificial Sequence: Synthetic oligonucleotide
  Antisense strand to SEQ ID NO: 2196938
aagcucauugaugucuuca

SEQ ID NO: 2196940 - RNA, 19 nt, Artificial Sequence
  Description of Artificial Sequence: Synthetic oligonucleotide
  Sense strand starting at position 2974 of SEQ ID NO: 1883482
gucagaaagucuguccaac

SEQ ID NO: 2196941 - RNA, 19 nt, Artificial Sequence
  Description of Artificial Sequence: Synthetic oligonucleotide
  Antisense strand to SEQ ID NO: 2196940
guuggacagacuuucugac

SEQ ID NO: 2196942 - RNA, 19 nt, Artificial Sequence
  Description of Artificial Sequence: Synthetic oligonucleotide
  Sense strand starting at position 2976 of SEQ ID NO: 1883482
cagaaagucuguccaacga

SEQ ID NO: 2196943 - RNA, 19 nt, Artificial Sequence
  Description of Artificial Sequence: Synthetic oligonucleotide
  Antisense strand to SEQ ID NO: 2196942
ucguuggacagacuuucug

SEQ ID NO: 2196944 - RNA, 19 nt, Artificial Sequence
  Description of Artificial Sequence: Synthetic oligonucleotide
  Sense strand starting at position 2998 of SEQ ID NO: 1883482
cuuaaaugaugaugagaca

SEQ ID NO: 2196945 - RNA, 19 nt, Artificial Sequence
  Description of Artificial Sequence: Synthetic oligonucleotide
  Antisense strand to SEQ ID NO: 2196944
ugucucaucaucauuuaag

SEQ ID NO: 2196946 - RNA, 19 nt, Artificial Sequence
  Description of Artificial Sequence: Synthetic oligonucleotide
  Sense strand starting at position 3017 of SEQ ID NO: 1883482
ggguuuguuccagaguuug

SEQ ID NO: 2196947 - RNA, 19 nt, Artificial Sequence
  Description of Artificial Sequence: Synthetic oligonucleotide
  Antisense strand to SEQ ID NO: 2196946
caaacucuggaacaaaccc

SEQ ID NO: 2196948 - RNA, 19 nt, Artificial Sequence
  Description of Artificial Sequence: Synthetic oligonucleotide
  Sense strand starting at position 3023 of SEQ ID NO: 1883482
guuccagaguuuguuguga

SEQ ID NO: 2196949 - RNA, 19 nt, Artificial Sequence
  Description of Artificial Sequence: Synthetic oligonucleotide
  Antisense strand to SEQ ID NO: 2196948
ucacaacaaacucuggaac

SEQ ID NO: 2196950 - RNA, 19 nt, Artificial Sequence
  Description of Artificial Sequence: Synthetic oligonucleotide
  Sense strand starting at position 3038 of SEQ ID NO: 1883482
gugaaaugccagggcucua

SEQ ID NO: 2196951 - RNA, 19 nt, Artificial Sequence
  Description of Artificial Sequence: Synthetic oligonucleotide
  Antisense strand to SEQ ID NO: 2196950
uagagcccuggcauuucac

SEQ ID NO: 2196952 - RNA, 19 nt, Artificial Sequence
  Description of Artificial Sequence: Synthetic oligonucleotide
  Sense strand starting at position 3148 of SEQ ID NO: 1883482
caucuuggugacgagaacu

SEQ ID NO: 2196953 - RNA, 19 nt, Artificial Sequence
  Description of Artificial Sequence: Synthetic oligonucleotide
  Antisense strand to SEQ ID NO: 2196952
aguucucgucaccaagaug

SEQ ID NO: 2196954 - RNA, 19 nt, Artificial Sequence
  Description of Artificial Sequence: Synthetic oligonucleotide
  Sense strand starting at position 3199 of SEQ ID NO: 1883482
gggcgcauuuccuccugaa

SEQ ID NO: 2196955 - RNA, 19 nt, Artificial Sequence
  Description of Artificial Sequence: Synthetic oligonucleotide
  Antisense strand to SEQ ID NO: 2196954
uucaggaggaaaugcgccc

SEQ ID NO: 2196956 - RNA, 19 nt, Artificial Sequence
  Description of Artificial Sequence: Synthetic oligonucleotide
  Sense strand starting at position 3256 of SEQ ID NO: 1883482
ggaggugacuuguugugua

SEQ ID NO: 2196957 - RNA, 19 nt, Artificial Sequence
  Description of Artificial Sequence: Synthetic oligonucleotide
  Antisense strand to SEQ ID NO: 2196956
uacacaacaagucaccucc

SEQ ID NO: 2196958 - RNA, 19 nt, Artificial Sequence
  Description of Artificial Sequence: Synthetic oligonucleotide
  Sense strand starting at position 3348 of SEQ ID NO: 1883482
uuagaugucaucuguguac

SEQ ID NO: 2196959 - RNA, 19 nt, Artificial Sequence
  Description of Artificial Sequence: Synthetic oligonucleotide
  Antisense strand to SEQ ID NO: 2196958
guacacagaugacaucuaa

SEQ ID NO: 2196960 - RNA, 19 nt, Artificial Sequence
  Description of Artificial Sequence: Synthetic oligonucleotide
  Sense strand starting at position 3350 of SEQ ID NO: 1883482
agaugucaucuguguacug

SEQ ID NO: 2196961 - RNA, 19 nt, Artificial Sequence
  Description of Artificial Sequence: Synthetic oligonucleotide
  Antisense strand to SEQ ID NO: 2196960
caguacacagaugacaucu

SEQ ID NO: 2196962 - RNA, 19 nt, Artificial Sequence
  Description of Artificial Sequence: Synthetic oligonucleotide
  Sense strand starting at position 3351 of SEQ ID NO: 1883482
gaugucaucuguguacuga

SEQ ID NO: 2196963 - RNA, 19 nt, Artificial Sequence
  Description of Artificial Sequence: Synthetic oligonucleotide
  Antisense strand to SEQ ID NO: 2196962
ucaguacacagaugacauc

SEQ ID NO: 2196964 - RNA, 19 nt, Artificial Sequence
  Description of Artificial Sequence: Synthetic oligonucleotide
  Sense strand starting at position 3580 of SEQ ID NO: 1883482
ugucucguccuacaugaaa

SEQ ID NO: 2196965 - RNA, 19 nt, Artificial Sequence
  Description of Artificial Sequence: Synthetic oligonucleotide
  Antisense strand to SEQ ID NO: 2196964
uuucauguaggacgagaca

SEQ ID NO: 2196966 - RNA, 19 nt, Artificial Sequence
  Description of Artificial Sequence: Synthetic oligonucleotide
  Sense strand starting at position 3614 of SEQ ID NO: 1883482
uauugaugguaccuuugaa

SEQ ID NO: 2196967 - RNA, 19 nt, Artificial Sequence
  Description of Artificial Sequence: Synthetic oligonucleotide
  Antisense strand to SEQ ID NO: 2196966
uucaaagguaccaucaaua

SEQ ID NO: 2196968 - RNA, 19 nt, Artificial Sequence
  Description of Artificial Sequence: Synthetic oligonucleotide
  Sense strand starting at position 3638 of SEQ ID NO: 1883482
uccauaaucuggcugcuuu

SEQ ID NO: 2196969 - RNA, 19 nt, Artificial Sequence
  Description of Artificial Sequence: Synthetic oligonucleotide
  Antisense strand to SEQ ID NO: 2196968
aaagcagccagauuaugga

SEQ ID NO: 2196970 - RNA, 19 nt, Artificial Sequence
  Description of Artificial Sequence: Synthetic oligonucleotide
  Sense strand starting at position 3676 of SEQ ID NO: 1883482
cagucugguccaggacauu

SEQ ID NO: 2196971 - RNA, 19 nt, Artificial Sequence
  Description of Artificial Sequence: Synthetic oligonucleotide
  Antisense strand to SEQ ID NO: 2196970
aauguccuggaccagacug

SEQ ID NO: 2196972 - RNA, 19 nt, Artificial Sequence
  Description of Artificial Sequence: Synthetic oligonucleotide
  Sense strand starting at position 3703 of SEQ ID NO: 1883482
gcuggauuguugcuagaac

SEQ ID NO: 2196973 - RNA, 19 nt, Artificial Sequence
  Description of Artificial Sequence: Synthetic oligonucleotide
  Antisense strand to SEQ ID NO: 2196972
guucuagcaacaauccagc

SEQ ID NO: 2196974 - RNA, 19 nt, Artificial Sequence
  Description of Artificial Sequence: Synthetic oligonucleotide
  Sense strand starting at position 47 of SEQ ID NO: 1883483
uagcaaugaccacagugau

SEQ ID NO: 2196975 - RNA, 19 nt, Artificial Sequence
  Description of Artificial Sequence: Synthetic oligonucleotide
  Antisense strand to SEQ ID NO: 2196974
aucacuguggucauugcua

SEQ ID NO: 2196976 - RNA, 19 nt, Artificial Sequence
  Description of Artificial Sequence: Synthetic oligonucleotide
  Sense strand starting at position 439 of SEQ ID NO: 1883483
cagggagaaccgugagaua

SEQ ID NO: 2196977 - RNA, 19 nt, Artificial Sequence
  Description of Artificial Sequence: Synthetic oligonucleotide
  Antisense strand to SEQ ID NO: 2196976
uaucucacgguucucccug

SEQ ID NO: 2196978 - RNA, 19 nt, Artificial Sequence
  Description of Artificial Sequence: Synthetic oligonucleotide
  Sense strand starting at position 469 of SEQ ID NO: 1883483
gggcuaaagccagauuccu

SEQ ID NO: 2196979 - RNA, 19 nt, Artificial Sequence
  Description of Artificial Sequence: Synthetic oligonucleotide
  Antisense strand to SEQ ID NO: 2196978
aggaaucuggcuuuagccc

SEQ ID NO: 2196980 - RNA, 19 nt, Artificial Sequence
  Description of Artificial Sequence: Synthetic oligonucleotide
  Sense strand starting at position 513 of SEQ ID NO: 1883483
uguguaaugcaacaaaguu

SEQ ID NO: 2196981 - RNA, 19 nt, Artificial Sequence
  Description of Artificial Sequence: Synthetic oligonucleotide
  Antisense strand to SEQ ID NO: 2196980
aacuuuguugcauuacaca

SEQ ID NO: 2196982 - RNA, 19 nt, Artificial Sequence
  Description of Artificial Sequence: Synthetic oligonucleotide
  Sense strand starting at position 526 of SEQ ID NO: 1883483
aaaguuuaauacgggagaa

SEQ ID NO: 2196983 - RNA, 19 nt, Artificial Sequence
  Description of Artificial Sequence: Synthetic oligonucleotide
  Antisense strand to SEQ ID NO: 2196982
uucucccguauuaaacuuu

SEQ ID NO: 2196984 - RNA, 19 nt, Artificial Sequence
  Description of Artificial Sequence: Synthetic oligonucleotide
  Sense strand starting at position 544 of SEQ ID NO: 1883483
acagaaggauauugucaua

SEQ ID NO: 2196985 - RNA, 19 nt, Artificial Sequence
  Description of Artificial Sequence: Synthetic oligonucleotide
  Antisense strand to SEQ ID NO: 2196984
uaugacaauauccuucugu

SEQ ID NO: 2196986 - RNA, 19 nt, Artificial Sequence
  Description of Artificial Sequence: Synthetic oligonucleotide
  Sense strand starting at position 547 of SEQ ID NO: 1883483
gaaggauauugucauagcu

SEQ ID NO: 2196987 - RNA, 19 nt, Artificial Sequence
  Description of Artificial Sequence: Synthetic oligonucleotide
  Antisense strand to SEQ ID NO: 2196986
agcuaugacaauauccuuc

SEQ ID NO: 2196988 - RNA, 19 nt, Artificial Sequence
  Description of Artificial Sequence: Synthetic oligonucleotide
  Sense strand starting at position 549 of SEQ ID NO: 1883483
aggauauugucauagcuac

SEQ ID NO: 2196989 - RNA, 19 nt, Artificial Sequence
  Description of Artificial Sequence: Synthetic oligonucleotide
  Antisense strand to SEQ ID NO: 2196988
guagcuaugacaauauccu

SEQ ID NO: 2196990 - RNA, 19 nt, Artificial Sequence
  Description of Artificial Sequence: Synthetic oligonucleotide
  Sense strand starting at position 744 of SEQ ID NO: 1883483
gccaacaugcccugcaauu

SEQ ID NO: 2196991 - RNA, 19 nt, Artificial Sequence
  Description of Artificial Sequence: Synthetic oligonucleotide
  Antisense strand to SEQ ID NO: 2196990
aauugcagggcauguuggc

SEQ ID NO: 2196992 - RNA, 19 nt, Artificial Sequence
  Description of Artificial Sequence: Synthetic oligonucleotide
  Sense strand starting at position 1226 of SEQ ID NO: 1883483
aaagauccucugugaugaa

SEQ ID NO: 2196993 - RNA, 19 nt, Artificial Sequence
  Description of Artificial Sequence: Synthetic oligonucleotide
  Antisense strand to SEQ ID NO: 2196992
uucaucacagaggaucuuu

SEQ ID NO: 2196994 - RNA, 19 nt, Artificial Sequence
  Description of Artificial Sequence: Synthetic oligonucleotide
  Sense strand starting at position 1229 of SEQ ID NO: 1883483
gauccucugugaugaacaa

SEQ ID NO: 2196995 - RNA, 19 nt, Artificial Sequence
  Description of Artificial Sequence: Synthetic oligonucleotide
  Antisense strand to SEQ ID NO: 2196994
uuguucaucacagaggauc

SEQ ID NO: 2196996 - RNA, 19 nt, Artificial Sequence
  Description of Artificial Sequence: Synthetic oligonucleotide
  Sense strand starting at position 1352 of SEQ ID NO: 1883483
ggaggcaaaugguucaguu

SEQ ID NO: 2196997 - RNA, 19 nt, Artificial Sequence
  Description of Artificial Sequence: Synthetic oligonucleotide
  Antisense strand to SEQ ID NO: 2196996
aacugaaccauuugccucc

SEQ ID NO: 2196998 - RNA, 19 nt, Artificial Sequence
  Description of Artificial Sequence: Synthetic oligonucleotide
  Sense strand starting at position 1361 of SEQ ID NO: 1883483
ugguucaguuauggagcua

SEQ ID NO: 2196999 - RNA, 19 nt, Artificial Sequence
  Description of Artificial Sequence: Synthetic oligonucleotide
  Antisense strand to SEQ ID NO: 2196998
uagcuccauaacugaacca

SEQ ID NO: 2197000 - RNA, 19 nt, Artificial Sequence
  Description of Artificial Sequence: Synthetic oligonucleotide
  Sense strand starting at position 1425 of SEQ ID NO: 1883483
aagcgaaucucggguuucu

SEQ ID NO: 2197001 - RNA, 19 nt, Artificial Sequence
  Description of Artificial Sequence: Synthetic oligonucleotide
  Antisense strand to SEQ ID NO: 2197000
agaaacccgagauucgcuu

SEQ ID NO: 2197002 - RNA, 19 nt, Artificial Sequence
  Description of Artificial Sequence: Synthetic oligonucleotide
  Sense strand starting at position 1524 of SEQ ID NO: 1883483
gggagcuuuggguguuaug

SEQ ID NO: 2197003 - RNA, 19 nt, Artificial Sequence
  Description of Artificial Sequence: Synthetic oligonucleotide
  Antisense strand to SEQ ID NO: 2197002
cauaacacccaaagcuccc

SEQ ID NO: 2197004 - RNA, 19 nt, Artificial Sequence
  Description of Artificial Sequence: Synthetic oligonucleotide
  Sense strand starting at position 1534 of SEQ ID NO: 1883483
gguguuaugaaucaagucu

SEQ ID NO: 2197005 - RNA, 19 nt, Artificial Sequence
  Description of Artificial Sequence: Synthetic oligonucleotide
  Antisense strand to SEQ ID NO: 2197004
agacuugauucauaacacc

SEQ ID NO: 2197006 - RNA, 19 nt, Artificial Sequence
  Description of Artificial Sequence: Synthetic oligonucleotide
  Sense strand starting at position 1560 of SEQ ID NO: 1883483
cgggucucaucggagcgau

SEQ ID NO: 2197007 - RNA, 19 nt, Artificial Sequence
  Description of Artificial Sequence: Synthetic oligonucleotide
  Antisense strand to SEQ ID NO: 2197006
aucgcuccgaugagacccg

SEQ ID NO: 2197008 - RNA, 19 nt, Artificial Sequence
  Description of Artificial Sequence: Synthetic oligonucleotide
  Sense strand starting at position 1593 of SEQ ID NO: 1883483
agguguggaaagugucuau

SEQ ID NO: 2197009 - RNA, 19 nt, Artificial Sequence
  Description of Artificial Sequence: Synthetic oligonucleotide
  Antisense strand to SEQ ID NO: 2197008
auagacacuuuccacaccu

SEQ ID NO: 2197010 - RNA, 19 nt, Artificial Sequence
  Description of Artificial Sequence: Synthetic oligonucleotide
  Sense strand starting at position 1596 of SEQ ID NO: 1883483
uguggaaagugucuaugag

SEQ ID NO: 2197011 - RNA, 19 nt, Artificial Sequence
  Description of Artificial Sequence: Synthetic oligonucleotide
  Antisense strand to SEQ ID NO: 2197010
cucauagacacuuuccaca

SEQ ID NO: 2197012 - RNA, 19 nt, Artificial Sequence
  Description of Artificial Sequence: Synthetic oligonucleotide
  Sense strand starting at position 1600 of SEQ ID NO: 1883483
gaaagugucuaugagggau

SEQ ID NO: 2197013 - RNA, 19 nt, Artificial Sequence
  Description of Artificial Sequence: Synthetic oligonucleotide
  Antisense strand to SEQ ID NO: 2197012
aucccucauagacacuuuc

SEQ ID NO: 2197014 - RNA, 19 nt, Artificial Sequence
  Description of Artificial Sequence: Synthetic oligonucleotide
  Sense strand starting at position 1604 of SEQ ID NO: 1883483
gugucuaugagggauaacu

SEQ ID NO: 2197015 - RNA, 19 nt, Artificial Sequence
  Description of Artificial Sequence: Synthetic oligonucleotide
  Antisense strand to SEQ ID NO: 2197014
aguuaucccucauagacac

SEQ ID NO: 2197016 - RNA, 19 nt, Artificial Sequence
  Description of Artificial Sequence: Synthetic oligonucleotide
  Sense strand starting at position 1678 of SEQ ID NO: 1883483
gcaaccggguccugacaaa

SEQ ID NO: 2197017 - RNA, 19 nt, Artificial Sequence
  Description of Artificial Sequence: Synthetic oligonucleotide
  Antisense strand to SEQ ID NO: 2197016
uuugucaggacccgguugc

SEQ ID NO: 2197018 - RNA, 19 nt, Artificial Sequence
  Description of Artificial Sequence: Synthetic oligonucleotide
  Sense strand starting at position 1841 of SEQ ID NO: 1883483
gcagaauuagaagguuuga

SEQ ID NO: 2197019 - RNA, 19 nt, Artificial Sequence
  Description of Artificial Sequence: Synthetic oligonucleotide
  Antisense strand to SEQ ID NO: 2197018
ucaaaccuucuaauucugc

SEQ ID NO: 2197020 - RNA, 19 nt, Artificial Sequence
  Description of Artificial Sequence: Synthetic oligonucleotide
  Sense strand starting at position 1985 of SEQ ID NO: 1883483
agcggaaguuguuauccga

SEQ ID NO: 2197021 - RNA, 19 nt, Artificial Sequence
  Description of Artificial Sequence: Synthetic oligonucleotide
  Antisense strand to SEQ ID NO: 2197020
ucggauaacaacuuccgcu

SEQ ID NO: 2197022 - RNA, 19 nt, Artificial Sequence
  Description of Artificial Sequence: Synthetic oligonucleotide
  Sense strand starting at position 1988 of SEQ ID NO: 1883483
ggaaguuguuauccgaaag

SEQ ID NO: 2197023 - RNA, 19 nt, Artificial Sequence
  Description of Artificial Sequence: Synthetic oligonucleotide
  Antisense strand to SEQ ID NO: 2197022
cuuucggauaacaacuucc

SEQ ID NO: 2197024 - RNA, 19 nt, Artificial Sequence
  Description of Artificial Sequence: Synthetic oligonucleotide
  Sense strand starting at position 2310 of SEQ ID NO: 1883483
ggccuaaagguuuauccua

SEQ ID NO: 2197025 - RNA, 19 nt, Artificial Sequence
  Description of Artificial Sequence: Synthetic oligonucleotide
  Antisense strand to SEQ ID NO: 2197024
uaggauaaaccuuuaggcc

SEQ ID NO: 2197026 - RNA, 19 nt, Artificial Sequence
  Description of Artificial Sequence: Synthetic oligonucleotide
  Sense strand starting at position 2317 of SEQ ID NO: 1883483
agguuuauccuacaaagug

SEQ ID NO: 2197027 - RNA, 19 nt, Artificial Sequence
  Description of Artificial Sequence: Synthetic oligonucleotide
  Antisense strand to SEQ ID NO: 2197026
cacuuuguaggauaaaccu

SEQ ID NO: 2197028 - RNA, 19 nt, Artificial Sequence
  Description of Artificial Sequence: Synthetic oligonucleotide
  Sense strand starting at position 2355 of SEQ ID NO: 1883483
gugugaacagacugucacu

SEQ ID NO: 2197029 - RNA, 19 nt, Artificial Sequence
  Description of Artificial Sequence: Synthetic oligonucleotide
  Antisense strand to SEQ ID NO: 2197028
agugacagucuguucacac

SEQ ID NO: 2197030 - RNA, 19 nt, Artificial Sequence
  Description of Artificial Sequence: Synthetic oligonucleotide
  Sense strand starting at position 2652 of SEQ ID NO: 1883483
ugaagcaagucacaugauu

SEQ ID NO: 2197031 - RNA, 19 nt, Artificial Sequence
  Description of Artificial Sequence: Synthetic oligonucleotide
  Antisense strand to SEQ ID NO: 2197030
aaucaugugacuugcuuca

SEQ ID NO: 2197032 - RNA, 19 nt, Artificial Sequence
  Description of Artificial Sequence: Synthetic oligonucleotide
  Sense strand starting at position 2722 of SEQ ID NO: 1883483
agcauaaguuagcauuaau

SEQ ID NO: 2197033 - RNA, 19 nt, Artificial Sequence
  Description of Artificial Sequence: Synthetic oligonucleotide
  Antisense strand to SEQ ID NO: 2197032
auuaaugcuaacuuaugcu

SEQ ID NO: 2197034 - RNA, 19 nt, Artificial Sequence
  Description of Artificial Sequence: Synthetic oligonucleotide
  Sense strand starting at position 2889 of SEQ ID NO: 1883483
cggccaggccuggguaaua

SEQ ID NO: 2197035 - RNA, 19 nt, Artificial Sequence
  Description of Artificial Sequence: Synthetic oligonucleotide
  Antisense strand to SEQ ID NO: 2197034
uauuacccaggccuggccg

SEQ ID NO: 2197036 - RNA, 19 nt, Artificial Sequence
  Description of Artificial Sequence: Synthetic oligonucleotide
  Sense strand starting at position 3393 of SEQ ID NO: 1883483
gauuccaggucuuagguaa

SEQ ID NO: 2197037 - RNA, 19 nt, Artificial Sequence
  Description of Artificial Sequence: Synthetic oligonucleotide
  Antisense strand to SEQ ID NO: 2197036
uuaccuaagaccuggaauc

SEQ ID NO: 2197038 - RNA, 19 nt, Artificial Sequence
  Description of Artificial Sequence: Synthetic oligonucleotide
  Sense strand starting at position 3400 of SEQ ID NO: 1883483
ggucuuagguaaucacuua

SEQ ID NO: 2197039 - RNA, 19 nt, Artificial Sequence
  Description of Artificial Sequence: Synthetic oligonucleotide
  Antisense strand to SEQ ID NO: 2197038
uaagugauuaccuaagacc

SEQ ID NO: 2197040 - RNA, 19 nt, Artificial Sequence
  Description of Artificial Sequence: Synthetic oligonucleotide
  Sense strand starting at position 3700 of SEQ ID NO: 1883483
gcaggagaacggugugaaa

SEQ ID NO: 2197041 - RNA, 19 nt, Artificial Sequence
  Description of Artificial Sequence: Synthetic oligonucleotide
  Antisense strand to SEQ ID NO: 2197040
uuucacaccguucuccugc

SEQ ID NO: 2197042 - RNA, 19 nt, Artificial Sequence
  Description of Artificial Sequence: Synthetic oligonucleotide
  Sense strand starting at position 3837 of SEQ ID NO: 1883483
uuaucugucaugugacguu

SEQ ID NO: 2197043 - RNA, 19 nt, Artificial Sequence
  Description of Artificial Sequence: Synthetic oligonucleotide
  Antisense strand to SEQ ID NO: 2197042
aacgucacaugacagauaa

SEQ ID NO: 2197044 - RNA, 19 nt, Artificial Sequence
  Description of Artificial Sequence: Synthetic oligonucleotide
  Sense strand starting at position 3850 of SEQ ID NO: 1883483
gacguuaugcuagagucag

SEQ ID NO: 2197045 - RNA, 19 nt, Artificial Sequence
  Description of Artificial Sequence: Synthetic oligonucleotide
  Antisense strand to SEQ ID NO: 2197044
cugacucuagcauaacguc

SEQ ID NO: 2197046 - RNA, 19 nt, Artificial Sequence
  Description of Artificial Sequence: Synthetic oligonucleotide
  Sense strand starting at position 3882 of SEQ ID NO: 1883483
ccaauuauauaggguuaaa

SEQ ID NO: 2197047 - RNA, 19 nt, Artificial Sequence
  Description of Artificial Sequence: Synthetic oligonucleotide
  Antisense strand to SEQ ID NO: 2197046
uuuaacccuauauaauugg

SEQ ID NO: 2197048 - RNA, 19 nt, Artificial Sequence
  Description of Artificial Sequence: Synthetic oligonucleotide
  Sense strand starting at position 2549 of SEQ ID NO: 1883484
aaguguggucaggauaaau

SEQ ID NO: 2197049 - RNA, 19 nt, Artificial Sequence
  Description of Artificial Sequence: Synthetic oligonucleotide
  Antisense strand to SEQ ID NO: 2197048
auuuauccugaccacacuu

SEQ ID NO: 2197050 - RNA, 19 nt, Artificial Sequence
  Description of Artificial Sequence: Synthetic oligonucleotide
  Sense strand starting at position 2501 of SEQ ID NO: 1883484
gcuuauugucaagugcagu

SEQ ID NO: 2197051 - RNA, 19 nt, Artificial Sequence
  Description of Artificial Sequence: Synthetic oligonucleotide
  Antisense strand to SEQ ID NO: 2197050
acugcacuugacaauaagc

SEQ ID NO: 2197052 - RNA, 19 nt, Artificial Sequence
  Description of Artificial Sequence: Synthetic oligonucleotide
  Sense strand starting at position 2842 of SEQ ID NO: 1883484
guggguuauguguuucugu

SEQ ID NO: 2197053 - RNA, 19 nt, Artificial Sequence
  Description of Artificial Sequence: Synthetic oligonucleotide
  Antisense strand to SEQ ID NO: 2197052
acagaaacacauaacccac

SEQ ID NO: 2197054 - RNA, 19 nt, Artificial Sequence
  Description of Artificial Sequence: Synthetic oligonucleotide
  Sense strand starting at position 3617 of SEQ ID NO: 1883484
gggcuucuucaaggaagag

SEQ ID NO: 2197055 - RNA, 19 nt, Artificial Sequence
  Description of Artificial Sequence: Synthetic oligonucleotide
  Antisense strand to SEQ ID NO: 2197054
cucuuccuugaagaagccc

SEQ ID NO: 2197056 - RNA, 19 nt, Artificial Sequence
  Description of Artificial Sequence: Synthetic oligonucleotide
  Sense strand starting at position 957 of SEQ ID NO: 1883484
caagcugugagggaaguua

SEQ ID NO: 2197057 - RNA, 19 nt, Artificial Sequence
  Description of Artificial Sequence: Synthetic oligonucleotide
  Antisense strand to SEQ ID NO: 2197056
uaacuucccucacagcuug

SEQ ID NO: 2197058 - RNA, 19 nt, Artificial Sequence
  Description of Artificial Sequence: Synthetic oligonucleotide
  Sense strand starting at position 2756 of SEQ ID NO: 1883484
gcauucugucugucuguuu

SEQ ID NO: 2197059 - RNA, 19 nt, Artificial Sequence
  Description of Artificial Sequence: Synthetic oligonucleotide
  Antisense strand to SEQ ID NO: 2197058
aaacagacagacagaaugc

SEQ ID NO: 2197060 - RNA, 19 nt, Artificial Sequence
  Description of Artificial Sequence: Synthetic oligonucleotide
  Sense strand starting at position 1208 of SEQ ID NO: 1883484
gggaauuguauagaugugu

SEQ ID NO: 2197061 - RNA, 19 nt, Artificial Sequence
  Description of Artificial Sequence: Synthetic oligonucleotide
  Antisense strand to SEQ ID NO: 2197060
acacaucuauacaauuccc

SEQ ID NO: 2197062 - RNA, 19 nt, Artificial Sequence
  Description of Artificial Sequence: Synthetic oligonucleotide
  Sense strand starting at position 987 of SEQ ID NO: 1883484
cuuucuagauaagcugaaa

SEQ ID NO: 2197063 - RNA, 19 nt, Artificial Sequence
  Description of Artificial Sequence: Synthetic oligonucleotide
  Antisense strand to SEQ ID NO: 2197062
uuucagcuuaucuagaaag

SEQ ID NO: 2197064 - RNA, 19 nt, Artificial Sequence
  Description of Artificial Sequence: Synthetic oligonucleotide
  Sense strand starting at position 593 of SEQ ID NO: 1883484
ggaugugugcuauagggaa

SEQ ID NO: 2197065 - RNA, 19 nt, Artificial Sequence
  Description of Artificial Sequence: Synthetic oligonucleotide
  Antisense strand to SEQ ID NO: 2197064
uucccuauagcacacaucc

SEQ ID NO: 2197066 - RNA, 19 nt, Artificial Sequence
  Description of Artificial Sequence: Synthetic oligonucleotide
  Sense strand starting at position 749 of SEQ ID NO: 1883484
gaagcugggcucuaagacu

SEQ ID NO: 2197067 - RNA, 19 nt, Artificial Sequence
  Description of Artificial Sequence: Synthetic oligonucleotide
  Antisense strand to SEQ ID NO: 2197066
agucuuagagcccagcuuc

SEQ ID NO: 2197068 - RNA, 19 nt, Artificial Sequence
  Description of Artificial Sequence: Synthetic oligonucleotide
  Sense strand starting at position 10 of SEQ ID NO: 1883484
auaggagguauugggucau

SEQ ID NO: 2197069 - RNA, 19 nt, Artificial Sequence
  Description of Artificial Sequence: Synthetic oligonucleotide
  Antisense strand to SEQ ID NO: 2197068
augacccaauaccuccuau

SEQ ID NO: 2197070 - RNA, 19 nt, Artificial Sequence
  Description of Artificial Sequence: Synthetic oligonucleotide
  Sense strand starting at position 3803 of SEQ ID NO: 1883484
uggccugccguguuuauua

SEQ ID NO: 2197071 - RNA, 19 nt, Artificial Sequence
  Description of Artificial Sequence: Synthetic oligonucleotide
  Antisense strand to SEQ ID NO: 2197070
uaauaaacacggcaggcca

SEQ ID NO: 2197072 - RNA, 19 nt, Artificial Sequence
  Description of Artificial Sequence: Synthetic oligonucleotide
  Sense strand starting at position 1193 of SEQ ID NO: 1883484
uucagugaugcggauggga

SEQ ID NO: 2197073 - RNA, 19 nt, Artificial Sequence
  Description of Artificial Sequence: Synthetic oligonucleotide
  Antisense strand to SEQ ID NO: 2197072
ucccauccgcaucacugaa

SEQ ID NO: 2197074 - RNA, 19 nt, Artificial Sequence
  Description of Artificial Sequence: Synthetic oligonucleotide
  Sense strand starting at position 1052 of SEQ ID NO: 1883484
guagaaugaguuugacauu

SEQ ID NO: 2197075 - RNA, 19 nt, Artificial Sequence
  Description of Artificial Sequence: Synthetic oligonucleotide
  Antisense strand to SEQ ID NO: 2197074
aaugucaaacucauucuac

SEQ ID NO: 2197076 - RNA, 19 nt, Artificial Sequence
  Description of Artificial Sequence: Synthetic oligonucleotide
  Sense strand starting at position 745 of SEQ ID NO: 1883484
ggaggaagcugggcucuaa

SEQ ID NO: 2197077 - RNA, 19 nt, Artificial Sequence
  Description of Artificial Sequence: Synthetic oligonucleotide
  Antisense strand to SEQ ID NO: 2197076
uuagagcccagcuuccucc

SEQ ID NO: 2197078 - RNA, 19 nt, Artificial Sequence
  Description of Artificial Sequence: Synthetic oligonucleotide
  Sense strand starting at position 597 of SEQ ID NO: 1883484
gugugcuauagggaaacuu

SEQ ID NO: 2197079 - RNA, 19 nt, Artificial Sequence
  Description of Artificial Sequence: Synthetic oligonucleotide
  Antisense strand to SEQ ID NO: 2197078
aaguuucccuauagcacac

SEQ ID NO: 2197080 - RNA, 19 nt, Artificial Sequence
  Description of Artificial Sequence: Synthetic oligonucleotide
  Sense strand starting at position 2895 of SEQ ID NO: 1883484
cuugaauaaugaguguauu

SEQ ID NO: 2197081 - RNA, 19 nt, Artificial Sequence
  Description of Artificial Sequence: Synthetic oligonucleotide
  Antisense strand to SEQ ID NO: 2197080
aauacacucauuauucaag

SEQ ID NO: 2197082 - RNA, 19 nt, Artificial Sequence
  Description of Artificial Sequence: Synthetic oligonucleotide
  Sense strand starting at position 1274 of SEQ ID NO: 1883484
ugcuguguguaauuuccaa

SEQ ID NO: 2197083 - RNA, 19 nt, Artificial Sequence
  Description of Artificial Sequence: Synthetic oligonucleotide
  Antisense strand to SEQ ID NO: 2197082
uuggaaauuacacacagca

SEQ ID NO: 2197084 - RNA, 19 nt, Artificial Sequence
  Description of Artificial Sequence: Synthetic oligonucleotide
  Sense strand starting at position 2461 of SEQ ID NO: 1883484
gauagaguucagugaggug

SEQ ID NO: 2197085 - RNA, 19 nt, Artificial Sequence
  Description of Artificial Sequence: Synthetic oligonucleotide
  Antisense strand to SEQ ID NO: 2197084
caccucacugaacucuauc

SEQ ID NO: 2197086 - RNA, 19 nt, Artificial Sequence
  Description of Artificial Sequence: Synthetic oligonucleotide
  Sense strand starting at position 1053 of SEQ ID NO: 1883484
uagaaugaguuugacauuu

SEQ ID NO: 2197087 - RNA, 19 nt, Artificial Sequence
  Description of Artificial Sequence: Synthetic oligonucleotide
  Antisense strand to SEQ ID NO: 2197086
aaaugucaaacucauucua

SEQ ID NO: 2197088 - RNA, 19 nt, Artificial Sequence
  Description of Artificial Sequence: Synthetic oligonucleotide
  Sense strand starting at position 2451 of SEQ ID NO: 1883484
ggcugucugggauagaguu

SEQ ID NO: 2197089 - RNA, 19 nt, Artificial Sequence
  Description of Artificial Sequence: Synthetic oligonucleotide
  Antisense strand to SEQ ID NO: 2197088
aacucuaucccagacagcc

SEQ ID NO: 2197090 - RNA, 19 nt, Artificial Sequence
  Description of Artificial Sequence: Synthetic oligonucleotide
  Sense strand starting at position 1428 of SEQ ID NO: 1883484
gagaccucgccucaaguga

SEQ ID NO: 2197091 - RNA, 19 nt, Artificial Sequence
  Description of Artificial Sequence: Synthetic oligonucleotide
  Antisense strand to SEQ ID NO: 2197090
ucacuugaggcgaggucuc

SEQ ID NO: 2197092 - RNA, 19 nt, Artificial Sequence
  Description of Artificial Sequence: Synthetic oligonucleotide
  Sense strand starting at position 2818 of SEQ ID NO: 1883484
guuagcacucauuacacuu

SEQ ID NO: 2197093 - RNA, 19 nt, Artificial Sequence
  Description of Artificial Sequence: Synthetic oligonucleotide
  Antisense strand to SEQ ID NO: 2197092
aaguguaaugagugcuaac

SEQ ID NO: 2197094 - RNA, 19 nt, Artificial Sequence
  Description of Artificial Sequence: Synthetic oligonucleotide
  Sense strand starting at position 1046 of SEQ ID NO: 1883484
caagguguagaaugaguuu

SEQ ID NO: 2197095 - RNA, 19 nt, Artificial Sequence
  Description of Artificial Sequence: Synthetic oligonucleotide
  Antisense strand to SEQ ID NO: 2197094
aaacucauucuacaccuug

SEQ ID NO: 2197096 - RNA, 19 nt, Artificial Sequence
  Description of Artificial Sequence: Synthetic oligonucleotide
  Sense strand starting at position 2545 of SEQ ID NO: 1883484
gauuaaguguggucaggau

SEQ ID NO: 2197097 - RNA, 19 nt, Artificial Sequence
  Description of Artificial Sequence: Synthetic oligonucleotide
  Antisense strand to SEQ ID NO: 2197096
auccugaccacacuuaauc

SEQ ID NO: 2197098 - RNA, 19 nt, Artificial Sequence
  Description of Artificial Sequence: Synthetic oligonucleotide
  Sense strand starting at position 3956 of SEQ ID NO: 1883484
uuaugacaaguacgucaaa

SEQ ID NO: 2197099 - RNA, 19 nt, Artificial Sequence
  Description of Artificial Sequence: Synthetic oligonucleotide
  Antisense strand to SEQ ID NO: 2197098
uuugacguacuugucauaa

SEQ ID NO: 2197100 - RNA, 19 nt, Artificial Sequence
  Description of Artificial Sequence: Synthetic oligonucleotide
  Sense strand starting at position 2014 of SEQ ID NO: 1883484
gugccuugugguagucaug

SEQ ID NO: 2197101 - RNA, 19 nt, Artificial Sequence
  Description of Artificial Sequence: Synthetic oligonucleotide
  Antisense strand to SEQ ID NO: 2197100
caugacuaccacaaggcac

SEQ ID NO: 2197102 - RNA, 19 nt, Artificial Sequence
  Description of Artificial Sequence: Synthetic oligonucleotide
  Sense strand starting at position 1195 of SEQ ID NO: 1883484
cagugaugcggaugggaau

SEQ ID NO: 2197103 - RNA, 19 nt, Artificial Sequence
  Description of Artificial Sequence: Synthetic oligonucleotide
  Antisense strand to SEQ ID NO: 2197102
auucccauccgcaucacug

SEQ ID NO: 2197104 - RNA, 19 nt, Artificial Sequence
  Description of Artificial Sequence: Synthetic oligonucleotide
  Sense strand starting at position 1202 of SEQ ID NO: 1883484
gcggaugggaauuguauag

SEQ ID NO: 2197105 - RNA, 19 nt, Artificial Sequence
  Description of Artificial Sequence: Synthetic oligonucleotide
  Antisense strand to SEQ ID NO: 2197104
cuauacaauucccauccgc

SEQ ID NO: 2197106 - RNA, 19 nt, Artificial Sequence
  Description of Artificial Sequence: Synthetic oligonucleotide
  Sense strand starting at position 1196 of SEQ ID NO: 1883484
agugaugcggaugggaauu

SEQ ID NO: 2197107 - RNA, 19 nt, Artificial Sequence
  Description of Artificial Sequence: Synthetic oligonucleotide
  Antisense strand to SEQ ID NO: 2197106
aauucccauccgcaucacu

SEQ ID NO: 2197108 - RNA, 19 nt, Artificial Sequence
  Description of Artificial Sequence: Synthetic oligonucleotide
  Sense strand starting at position 3954 of SEQ ID NO: 1883484
guuuaugacaaguacguca

SEQ ID NO: 2197109 - RNA, 19 nt, Artificial Sequence
  Description of Artificial Sequence: Synthetic oligonucleotide
  Antisense strand to SEQ ID NO: 2197108
ugacguacuugucauaaac

SEQ ID NO: 2197110 - RNA, 19 nt, Artificial Sequence
  Description of Artificial Sequence: Synthetic oligonucleotide
  Sense strand starting at position 927 of SEQ ID NO: 1883484
aagcgauuucuguguagca

SEQ ID NO: 2197111 - RNA, 19 nt, Artificial Sequence
  Description of Artificial Sequence: Synthetic oligonucleotide
  Antisense strand to SEQ ID NO: 2197110
ugcuacacagaaaucgcuu

SEQ ID NO: 2197112 - RNA, 19 nt, Artificial Sequence
  Description of Artificial Sequence: Synthetic oligonucleotide
  Sense strand starting at position 928 of SEQ ID NO: 1883484
agcgauuucuguguagcag

SEQ ID NO: 2197113 - RNA, 19 nt, Artificial Sequence
  Description of Artificial Sequence: Synthetic oligonucleotide
  Antisense strand to SEQ ID NO: 2197112
cugcuacacagaaaucgcu

SEQ ID NO: 2197114 - RNA, 19 nt, Artificial Sequence
  Description of Artificial Sequence: Synthetic oligonucleotide
  Sense strand starting at position 3802 of SEQ ID NO: 1883484
guggccugccguguuuauu

SEQ ID NO: 2197115 - RNA, 19 nt, Artificial Sequence
  Description of Artificial Sequence: Synthetic oligonucleotide
  Antisense strand to SEQ ID NO: 2197114
aauaaacacggcaggccac

SEQ ID NO: 2197116 - RNA, 19 nt, Artificial Sequence
  Description of Artificial Sequence: Synthetic oligonucleotide
  Sense strand starting at position 448 of SEQ ID NO: 1883484
cacaguaucucagugcaga

SEQ ID NO: 2197117 - RNA, 19 nt, Artificial Sequence
  Description of Artificial Sequence: Synthetic oligonucleotide
  Antisense strand to SEQ ID NO: 2197116
ucugcacugagauacugug

SEQ ID NO: 2197118 - RNA, 19 nt, Artificial Sequence
  Description of Artificial Sequence: Synthetic oligonucleotide
  Sense strand starting at position 2494 of SEQ ID NO: 1883484
ucuugaggcuuauugucaa

SEQ ID NO: 2197119 - RNA, 19 nt, Artificial Sequence
  Description of Artificial Sequence: Synthetic oligonucleotide
  Antisense strand to SEQ ID NO: 2197118
uugacaauaagccucaaga

SEQ ID NO: 2197120 - RNA, 19 nt, Artificial Sequence
  Description of Artificial Sequence: Synthetic oligonucleotide
  Sense strand starting at position 2338 of SEQ ID NO: 1883484
aggugacguguucauaagu

SEQ ID NO: 2197121 - RNA, 19 nt, Artificial Sequence
  Description of Artificial Sequence: Synthetic oligonucleotide
  Antisense strand to SEQ ID NO: 2197120
acuuaugaacacgucaccu

SEQ ID NO: 2197122 - RNA, 19 nt, Artificial Sequence
  Description of Artificial Sequence: Synthetic oligonucleotide
  Sense strand starting at position 449 of SEQ ID NO: 1883484
acaguaucucagugcagac

SEQ ID NO: 2197123 - RNA, 19 nt, Artificial Sequence
  Description of Artificial Sequence: Synthetic oligonucleotide
  Antisense strand to SEQ ID NO: 2197122
gucugcacugagauacugu

SEQ ID NO: 2197124 - RNA, 19 nt, Artificial Sequence
  Description of Artificial Sequence: Synthetic oligonucleotide
  Sense strand starting at position 2448 of SEQ ID NO: 1883484
gcaggcugucugggauaga

SEQ ID NO: 2197125 - RNA, 19 nt, Artificial Sequence
  Description of Artificial Sequence: Synthetic oligonucleotide
  Antisense strand to SEQ ID NO: 2197124
ucuaucccagacagccugc

SEQ ID NO: 2197126 - RNA, 19 nt, Artificial Sequence
  Description of Artificial Sequence: Synthetic oligonucleotide
  Sense strand starting at position 73 of SEQ ID NO: 1883484
acgaguaaguucucacucu

SEQ ID NO: 2197127 - RNA, 19 nt, Artificial Sequence
  Description of Artificial Sequence: Synthetic oligonucleotide
  Antisense strand to SEQ ID NO: 2197126
agagugagaacuuacucgu

SEQ ID NO: 2197128 - RNA, 19 nt, Artificial Sequence
  Description of Artificial Sequence: Synthetic oligonucleotide
  Sense strand starting at position 3396 of SEQ ID NO: 1883485
augguuuaagcagagagua

SEQ ID NO: 2197129 - RNA, 19 nt, Artificial Sequence
  Description of Artificial Sequence: Synthetic oligonucleotide
  Antisense strand to SEQ ID NO: 2197128
uacucucugcuuaaaccau

SEQ ID NO: 2197130 - RNA, 19 nt, Artificial Sequence
  Description of Artificial Sequence: Synthetic oligonucleotide
  Sense strand starting at position 1187 of SEQ ID NO: 1883485
cugagauugggccaccgaa

SEQ ID NO: 2197131 - RNA, 19 nt, Artificial Sequence
  Description of Artificial Sequence: Synthetic oligonucleotide
  Antisense strand to SEQ ID NO: 2197130
uucgguggcccaaucucag

SEQ ID NO: 2197132 - RNA, 19 nt, Artificial Sequence
  Description of Artificial Sequence: Synthetic oligonucleotide
  Sense strand starting at position 1247 of SEQ ID NO: 1883485
uguucugagcuggagagau

SEQ ID NO: 2197133 - RNA, 19 nt, Artificial Sequence
  Description of Artificial Sequence: Synthetic oligonucleotide
  Antisense strand to SEQ ID NO: 2197132
aucucuccagcucagaaca

SEQ ID NO: 2197134 - RNA, 19 nt, Artificial Sequence
  Description of Artificial Sequence: Synthetic oligonucleotide
  Sense strand starting at position 2477 of SEQ ID NO: 1883485
ugaaauaggacuuggcauu

SEQ ID NO: 2197135 - RNA, 19 nt, Artificial Sequence
  Description of Artificial Sequence: Synthetic oligonucleotide
  Antisense strand to SEQ ID NO: 2197134
aaugccaaguccuauuuca

SEQ ID NO: 2197136 - RNA, 19 nt, Artificial Sequence
  Description of Artificial Sequence: Synthetic oligonucleotide
  Sense strand starting at position 1257 of SEQ ID NO: 1883485
uggagagaucacuggccua

SEQ ID NO: 2197137 - RNA, 19 nt, Artificial Sequence
  Description of Artificial Sequence: Synthetic oligonucleotide
  Antisense strand to SEQ ID NO: 2197136
uaggccagugaucucucca

SEQ ID NO: 2197138 - RNA, 19 nt, Artificial Sequence
  Description of Artificial Sequence: Synthetic oligonucleotide
  Sense strand starting at position 945 of SEQ ID NO: 1883485
aggcaaucuuuccugaaag

SEQ ID NO: 2197139 - RNA, 19 nt, Artificial Sequence
  Description of Artificial Sequence: Synthetic oligonucleotide
  Antisense strand to SEQ ID NO: 2197138
cuuucaggaaagauugccu

SEQ ID NO: 2197140 - RNA, 19 nt, Artificial Sequence
  Description of Artificial Sequence: Synthetic oligonucleotide
  Sense strand starting at position 2371 of SEQ ID NO: 1883485
cgucaaaucaauuggaaug

SEQ ID NO: 2197141 - RNA, 19 nt, Artificial Sequence
  Description of Artificial Sequence: Synthetic oligonucleotide
  Antisense strand to SEQ ID NO: 2197140
cauuccaauugauuugacg

SEQ ID NO: 2197142 - RNA, 19 nt, Artificial Sequence
  Description of Artificial Sequence: Synthetic oligonucleotide
  Sense strand starting at position 2244 of SEQ ID NO: 1883485
aaugaaaugcgaggaucuu

SEQ ID NO: 2197143 - RNA, 19 nt, Artificial Sequence
  Description of Artificial Sequence: Synthetic oligonucleotide
  Antisense strand to SEQ ID NO: 2197142
aagauccucgcauuucauu

SEQ ID NO: 2197144 - RNA, 19 nt, Artificial Sequence
  Description of Artificial Sequence: Synthetic oligonucleotide
  Sense strand starting at position 1029 of SEQ ID NO: 1883485
gaucucuacgcccaucaga

SEQ ID NO: 2197145 - RNA, 19 nt, Artificial Sequence
  Description of Artificial Sequence: Synthetic oligonucleotide
  Antisense strand to SEQ ID NO: 2197144
ucugaugggcguagagauc

SEQ ID NO: 2197146 - RNA, 19 nt, Artificial Sequence
  Description of Artificial Sequence: Synthetic oligonucleotide
  Sense strand starting at position 3438 of SEQ ID NO: 1883485
guggaugggagcugacuua

SEQ ID NO: 2197147 - RNA, 19 nt, Artificial Sequence
  Description of Artificial Sequence: Synthetic oligonucleotide
  Antisense strand to SEQ ID NO: 2197146
uaagucagcucccauccac

SEQ ID NO: 2197148 - RNA, 19 nt, Artificial Sequence
  Description of Artificial Sequence: Synthetic oligonucleotide
  Sense strand starting at position 748 of SEQ ID NO: 1883485
ccaggucuugcagaacuuu

SEQ ID NO: 2197149 - RNA, 19 nt, Artificial Sequence
  Description of Artificial Sequence: Synthetic oligonucleotide
  Antisense strand to SEQ ID NO: 2197148
aaaguucugcaagaccugg

SEQ ID NO: 2197150 - RNA, 19 nt, Artificial Sequence
  Description of Artificial Sequence: Synthetic oligonucleotide
  Sense strand starting at position 560 of SEQ ID NO: 1883485
gaaggaaacugggagacau

SEQ ID NO: 2197151 - RNA, 19 nt, Artificial Sequence
  Description of Artificial Sequence: Synthetic oligonucleotide
  Antisense strand to SEQ ID NO: 2197150
augucucccaguuuccuuc

SEQ ID NO: 2197152 - RNA, 19 nt, Artificial Sequence
  Description of Artificial Sequence: Synthetic oligonucleotide
  Sense strand starting at position 155 of SEQ ID NO: 1883485
uccaguugugcucaagaug

SEQ ID NO: 2197153 - RNA, 19 nt, Artificial Sequence
  Description of Artificial Sequence: Synthetic oligonucleotide
  Antisense strand to SEQ ID NO: 2197152
caucuugagcacaacugga

SEQ ID NO: 2197154 - RNA, 19 nt, Artificial Sequence
  Description of Artificial Sequence: Synthetic oligonucleotide
  Sense strand starting at position 3766 of SEQ ID NO: 1883485
cacggcuugaguggauaaa

SEQ ID NO: 2197155 - RNA, 19 nt, Artificial Sequence
  Description of Artificial Sequence: Synthetic oligonucleotide
  Antisense strand to SEQ ID NO: 2197154
uuuauccacucaagccgug

SEQ ID NO: 2197156 - RNA, 19 nt, Artificial Sequence
  Description of Artificial Sequence: Synthetic oligonucleotide
  Sense strand starting at position 2629 of SEQ ID NO: 1883485
gaagucuaguguccaaauc

SEQ ID NO: 2197157 - RNA, 19 nt, Artificial Sequence
  Description of Artificial Sequence: Synthetic oligonucleotide
  Antisense strand to SEQ ID NO: 2197156
gauuuggacacuagacuuc

SEQ ID NO: 2197158 - RNA, 19 nt, Artificial Sequence
  Description of Artificial Sequence: Synthetic oligonucleotide
  Sense strand starting at position 3820 of SEQ ID NO: 1883485
gugccaucggcugagaaac

SEQ ID NO: 2197159 - RNA, 19 nt, Artificial Sequence
  Description of Artificial Sequence: Synthetic oligonucleotide
  Antisense strand to SEQ ID NO: 2197158
guuucucagccgauggcac

SEQ ID NO: 2197160 - RNA, 19 nt, Artificial Sequence
  Description of Artificial Sequence: Synthetic oligonucleotide
  Sense strand starting at position 973 of SEQ ID NO: 1883485
agaggagugguguguuuga

SEQ ID NO: 2197161 - RNA, 19 nt, Artificial Sequence
  Description of Artificial Sequence: Synthetic oligonucleotide
  Antisense strand to SEQ ID NO: 2197160
ucaaacacaccacuccucu

SEQ ID NO: 2197162 - RNA, 19 nt, Artificial Sequence
  Description of Artificial Sequence: Synthetic oligonucleotide
  Sense strand starting at position 3385 of SEQ ID NO: 1883485
ugacuugcuggaugguuua

SEQ ID NO: 2197163 - RNA, 19 nt, Artificial Sequence
  Description of Artificial Sequence: Synthetic oligonucleotide
  Antisense strand to SEQ ID NO: 2197162
uaaaccauccagcaaguca

SEQ ID NO: 2197164 - RNA, 19 nt, Artificial Sequence
  Description of Artificial Sequence: Synthetic oligonucleotide
  Sense strand starting at position 2373 of SEQ ID NO: 1883485
ucaaaucaauuggaaugaa

SEQ ID NO: 2197165 - RNA, 19 nt, Artificial Sequence
  Description of Artificial Sequence: Synthetic oligonucleotide
  Antisense strand to SEQ ID NO: 2197164
uucauuccaauugauuuga

SEQ ID NO: 2197166 - RNA, 19 nt, Artificial Sequence
  Description of Artificial Sequence: Synthetic oligonucleotide
  Sense strand starting at position 977 of SEQ ID NO: 1883485
gagugguguguuugaggga

SEQ ID NO: 2197167 - RNA, 19 nt, Artificial Sequence
  Description of Artificial Sequence: Synthetic oligonucleotide
  Antisense strand to SEQ ID NO: 2197166
ucccucaaacacaccacuc

SEQ ID NO: 2197168 - RNA, 19 nt, Artificial Sequence
  Description of Artificial Sequence: Synthetic oligonucleotide
  Sense strand starting at position 2383 of SEQ ID NO: 1883485
uggaaugaauucgugucuu

SEQ ID NO: 2197169 - RNA, 19 nt, Artificial Sequence
  Description of Artificial Sequence: Synthetic oligonucleotide
  Antisense strand to SEQ ID NO: 2197168
aagacacgaauucauucca

SEQ ID NO: 2197170 - RNA, 19 nt, Artificial Sequence
  Description of Artificial Sequence: Synthetic oligonucleotide
  Sense strand starting at position 2382 of SEQ ID NO: 1883485
uuggaaugaauucgugucu

SEQ ID NO: 2197171 - RNA, 19 nt, Artificial Sequence
  Description of Artificial Sequence: Synthetic oligonucleotide
  Antisense strand to SEQ ID NO: 2197170
agacacgaauucauuccaa

SEQ ID NO: 2197172 - RNA, 19 nt, Artificial Sequence
  Description of Artificial Sequence: Synthetic oligonucleotide
  Sense strand starting at position 2359 of SEQ ID NO: 1883485
acaacaguggcccgucaaa

SEQ ID NO: 2197173 - RNA, 19 nt, Artificial Sequence
  Description of Artificial Sequence: Synthetic oligonucleotide
  Antisense strand to SEQ ID NO: 2197172
uuugacgggccacuguugu

SEQ ID NO: 2197174 - RNA, 19 nt, Artificial Sequence
  Description of Artificial Sequence: Synthetic oligonucleotide
  Sense strand starting at position 3301 of SEQ ID NO: 1883485
acuugaucuggcugagcuu

SEQ ID NO: 2197175 - RNA, 19 nt, Artificial Sequence
  Description of Artificial Sequence: Synthetic oligonucleotide
  Antisense strand to SEQ ID NO: 2197174
aagcucagccagaucaagu

SEQ ID NO: 2197176 - RNA, 19 nt, Artificial Sequence
  Description of Artificial Sequence: Synthetic oligonucleotide
  Sense strand starting at position 2307 of SEQ ID NO: 1883485
ggagucggcgcucaaacau

SEQ ID NO: 2197177 - RNA, 19 nt, Artificial Sequence
  Description of Artificial Sequence: Synthetic oligonucleotide
  Antisense strand to SEQ ID NO: 2197176
auguuugagcgccgacucc

SEQ ID NO: 2197178 - RNA, 19 nt, Artificial Sequence
  Description of Artificial Sequence: Synthetic oligonucleotide
  Sense strand starting at position 1042 of SEQ ID NO: 1883485
aucagagucuucuauuugu

SEQ ID NO: 2197179 - RNA, 19 nt, Artificial Sequence
  Description of Artificial Sequence: Synthetic oligonucleotide
  Antisense strand to SEQ ID NO: 2197178
acaaauagaagacucugau

SEQ ID NO: 2197180 - RNA, 19 nt, Artificial Sequence
  Description of Artificial Sequence: Synthetic oligonucleotide
  Sense strand starting at position 2994 of SEQ ID NO: 1883485
uggcaagguuugucucgaa

SEQ ID NO: 2197181 - RNA, 19 nt, Artificial Sequence
  Description of Artificial Sequence: Synthetic oligonucleotide
  Antisense strand to SEQ ID NO: 2197180
uucgagacaaaccuugcca

SEQ ID NO: 2197182 - RNA, 19 nt, Artificial Sequence
  Description of Artificial Sequence: Synthetic oligonucleotide
  Sense strand starting at position 2411 of SEQ ID NO: 1883485
agagauuucuugggcacuc

SEQ ID NO: 2197183 - RNA, 19 nt, Artificial Sequence
  Description of Artificial Sequence: Synthetic oligonucleotide
  Antisense strand to SEQ ID NO: 2197182
gagugcccaagaaaucucu

SEQ ID NO: 2197184 - RNA, 19 nt, Artificial Sequence
  Description of Artificial Sequence: Synthetic oligonucleotide
  Sense strand starting at position 3681 of SEQ ID NO: 1883485
gcaugaucagacugcguga

SEQ ID NO: 2197185 - RNA, 19 nt, Artificial Sequence
  Description of Artificial Sequence: Synthetic oligonucleotide
  Antisense strand to SEQ ID NO: 2197184
ucacgcagucugaucaugc

SEQ ID NO: 2197186 - RNA, 19 nt, Artificial Sequence
  Description of Artificial Sequence: Synthetic oligonucleotide
  Sense strand starting at position 3819 of SEQ ID NO: 1883485
ugugccaucggcugagaaa

SEQ ID NO: 2197187 - RNA, 19 nt, Artificial Sequence
  Description of Artificial Sequence: Synthetic oligonucleotide
  Antisense strand to SEQ ID NO: 2197186
uuucucagccgauggcaca

SEQ ID NO: 2197188 - RNA, 19 nt, Artificial Sequence
  Description of Artificial Sequence: Synthetic oligonucleotide
  Sense strand starting at position 2391 of SEQ ID NO: 1883485
auucgugucuuguuaauaa

SEQ ID NO: 2197189 - RNA, 19 nt, Artificial Sequence
  Description of Artificial Sequence: Synthetic oligonucleotide
  Antisense strand to SEQ ID NO: 2197188
uuauuaacaagacacgaau

SEQ ID NO: 2197190 - RNA, 19 nt, Artificial Sequence
  Description of Artificial Sequence: Synthetic oligonucleotide
  Sense strand starting at position 3588 of SEQ ID NO: 1883485
cugcauugcuagccagaug

SEQ ID NO: 2197191 - RNA, 19 nt, Artificial Sequence
  Description of Artificial Sequence: Synthetic oligonucleotide
  Antisense strand to SEQ ID NO: 2197190
caucuggcuagcaaugcag

SEQ ID NO: 2197192 - RNA, 19 nt, Artificial Sequence
  Description of Artificial Sequence: Synthetic oligonucleotide
  Sense strand starting at position 2387 of SEQ ID NO: 1883485
augaauucgugucuuguua

SEQ ID NO: 2197193 - RNA, 19 nt, Artificial Sequence
  Description of Artificial Sequence: Synthetic oligonucleotide
  Antisense strand to SEQ ID NO: 2197192
uaacaagacacgaauucau

SEQ ID NO: 2197194 - RNA, 19 nt, Artificial Sequence
  Description of Artificial Sequence: Synthetic oligonucleotide
  Sense strand starting at position 785 of SEQ ID NO: 1883485
gccuuugagcuuuggccaa

SEQ ID NO: 2197195 - RNA, 19 nt, Artificial Sequence
  Description of Artificial Sequence: Synthetic oligonucleotide
  Antisense strand to SEQ ID NO: 2197194
uuggccaaagcucaaaggc

SEQ ID NO: 2197196 - RNA, 19 nt, Artificial Sequence
  Description of Artificial Sequence: Synthetic oligonucleotide
  Sense strand starting at position 955 of SEQ ID NO: 1883485
uccugaaaguuggagugaa

SEQ ID NO: 2197197 - RNA, 19 nt, Artificial Sequence
  Description of Artificial Sequence: Synthetic oligonucleotide
  Antisense strand to SEQ ID NO: 2197196
uucacuccaacuuucagga

SEQ ID NO: 2197198 - RNA, 19 nt, Artificial Sequence
  Description of Artificial Sequence: Synthetic oligonucleotide
  Sense strand starting at position 3445 of SEQ ID NO: 1883485
ggagcugacuuaggacaga

SEQ ID NO: 2197199 - RNA, 19 nt, Artificial Sequence
  Description of Artificial Sequence: Synthetic oligonucleotide
  Antisense strand to SEQ ID NO: 2197198
ucuguccuaagucagcucc

SEQ ID NO: 2197200 - RNA, 19 nt, Artificial Sequence
  Description of Artificial Sequence: Synthetic oligonucleotide
  Sense strand starting at position 586 of SEQ ID NO: 1883485
aggaaauaaugcuaguucu

SEQ ID NO: 2197201 - RNA, 19 nt, Artificial Sequence
  Description of Artificial Sequence: Synthetic oligonucleotide
  Antisense strand to SEQ ID NO: 2197200
agaacuagcauuauuuccu

SEQ ID NO: 2197202 - RNA, 19 nt, Artificial Sequence
  Description of Artificial Sequence: Synthetic oligonucleotide
  Sense strand starting at position 2253 of SEQ ID NO: 1883485
cgaggaucuuagcaugaac

SEQ ID NO: 2197203 - RNA, 19 nt, Artificial Sequence
  Description of Artificial Sequence: Synthetic oligonucleotide
  Antisense strand to SEQ ID NO: 2197202
guucaugcuaagauccucg

SEQ ID NO: 2197204 - RNA, 19 nt, Artificial Sequence
  Description of Artificial Sequence: Synthetic oligonucleotide
  Sense strand starting at position 805 of SEQ ID NO: 1883485
ccagacagguccugauauc

SEQ ID NO: 2197205 - RNA, 19 nt, Artificial Sequence
  Description of Artificial Sequence: Synthetic oligonucleotide
  Antisense strand to SEQ ID NO: 2197204
gauaucaggaccugucugg

SEQ ID NO: 2197206 - RNA, 19 nt, Artificial Sequence
  Description of Artificial Sequence: Synthetic oligonucleotide
  Sense strand starting at position 2749 of SEQ ID NO: 1883485
gcaucugacuccuagggua

SEQ ID NO: 2197207 - RNA, 19 nt, Artificial Sequence
  Description of Artificial Sequence: Synthetic oligonucleotide
  Antisense strand to SEQ ID NO: 2197206
uacccuaggagucagaugc

SEQ ID NO: 2197208 - RNA, 19 nt, Artificial Sequence
  Description of Artificial Sequence: Synthetic oligonucleotide
  Sense strand starting at position 330 of SEQ ID NO: 1883486
gagaauguuuaauuaugac

SEQ ID NO: 2197209 - RNA, 19 nt, Artificial Sequence
  Description of Artificial Sequence: Synthetic oligonucleotide
  Antisense strand to SEQ ID NO: 2197208
gucauaauuaaacauucuc

SEQ ID NO: 2197210 - RNA, 19 nt, Artificial Sequence
  Description of Artificial Sequence: Synthetic oligonucleotide
  Sense strand starting at position 2932 of SEQ ID NO: 1883486
aaccgaugucauuaaacug

SEQ ID NO: 2197211 - RNA, 19 nt, Artificial Sequence
  Description of Artificial Sequence: Synthetic oligonucleotide
  Antisense strand to SEQ ID NO: 2197210
caguuuaaugacaucgguu

SEQ ID NO: 2197212 - RNA, 19 nt, Artificial Sequence
  Description of Artificial Sequence: Synthetic oligonucleotide
  Sense strand starting at position 323 of SEQ ID NO: 1883486
cuuuaaggagaauguuuaa

SEQ ID NO: 2197213 - RNA, 19 nt, Artificial Sequence
  Description of Artificial Sequence: Synthetic oligonucleotide
  Antisense strand to SEQ ID NO: 2197212
uuaaacauucuccuuaaag

SEQ ID NO: 2197214 - RNA, 19 nt, Artificial Sequence
  Description of Artificial Sequence: Synthetic oligonucleotide
  Sense strand starting at position 389 of SEQ ID NO: 1883486
ugaagugaaucucuaauau

SEQ ID NO: 2197215 - RNA, 19 nt, Artificial Sequence
  Description of Artificial Sequence: Synthetic oligonucleotide
  Antisense strand to SEQ ID NO: 2197214
auauuagagauucacuuca

SEQ ID NO: 2197216 - RNA, 19 nt, Artificial Sequence
  Description of Artificial Sequence: Synthetic oligonucleotide
  Sense strand starting at position 320 of SEQ ID NO: 1883486
guccuuuaaggagaauguu

SEQ ID NO: 2197217 - RNA, 19 nt, Artificial Sequence
  Description of Artificial Sequence: Synthetic oligonucleotide
  Antisense strand to SEQ ID NO: 2197216
aacauucuccuuaaaggac

SEQ ID NO: 2197218 - RNA, 19 nt, Artificial Sequence
  Description of Artificial Sequence: Synthetic oligonucleotide
  Sense strand starting at position 314 of SEQ ID NO: 1883486
auuaguguccuuuaaggag

SEQ ID NO: 2197219 - RNA, 19 nt, Artificial Sequence
  Description of Artificial Sequence: Synthetic oligonucleotide
  Antisense strand to SEQ ID NO: 2197218
cuccuuaaaggacacuaau

SEQ ID NO: 2197220 - RNA, 19 nt, Artificial Sequence
  Description of Artificial Sequence: Synthetic oligonucleotide
  Sense strand starting at position 2155 of SEQ ID NO: 1883486
gacguugugauccaaagga

SEQ ID NO: 2197221 - RNA, 19 nt, Artificial Sequence
  Description of Artificial Sequence: Synthetic oligonucleotide
  Antisense strand to SEQ ID NO: 2197220
uccuuuggaucacaacguc

SEQ ID NO: 2197222 - RNA, 19 nt, Artificial Sequence
  Description of Artificial Sequence: Synthetic oligonucleotide
  Sense strand starting at position 2693 of SEQ ID NO: 1883486
caguucguucgcuuccaga

SEQ ID NO: 2197223 - RNA, 19 nt, Artificial Sequence
  Description of Artificial Sequence: Synthetic oligonucleotide
  Antisense strand to SEQ ID NO: 2197222
ucuggaagcgaacgaacug

SEQ ID NO: 2197224 - RNA, 19 nt, Artificial Sequence
  Description of Artificial Sequence: Synthetic oligonucleotide
  Sense strand starting at position 2760 of SEQ ID NO: 1883486
gcaugugaagauugacaaa

SEQ ID NO: 2197225 - RNA, 19 nt, Artificial Sequence
  Description of Artificial Sequence: Synthetic oligonucleotide
  Antisense strand to SEQ ID NO: 2197224
uuugucaaucuucacaugc

SEQ ID NO: 2197226 - RNA, 19 nt, Artificial Sequence
  Description of Artificial Sequence: Synthetic oligonucleotide
  Sense strand starting at position 3176 of SEQ ID NO: 1883486
agucauaugccagacuuua

SEQ ID NO: 2197227 - RNA, 19 nt, Artificial Sequence
  Description of Artificial Sequence: Synthetic oligonucleotide
  Antisense strand to SEQ ID NO: 2197226
uaaagucuggcauaugacu

SEQ ID NO: 2197228 - RNA, 19 nt, Artificial Sequence
  Description of Artificial Sequence: Synthetic oligonucleotide
  Sense strand starting at position 1222 of SEQ ID NO: 1883486
cgaguuacucauuaguaaa

SEQ ID NO: 2197229 - RNA, 19 nt, Artificial Sequence
  Description of Artificial Sequence: Synthetic oligonucleotide
  Antisense strand to SEQ ID NO: 2197228
uuuacuaaugaguaacucg

SEQ ID NO: 2197230 - RNA, 19 nt, Artificial Sequence
  Description of Artificial Sequence: Synthetic oligonucleotide
  Sense strand starting at position 2695 of SEQ ID NO: 1883486
guucguucgcuuccagacu

SEQ ID NO: 2197231 - RNA, 19 nt, Artificial Sequence
  Description of Artificial Sequence: Synthetic oligonucleotide
  Antisense strand to SEQ ID NO: 2197230
agucuggaagcgaacgaac

SEQ ID NO: 2197232 - RNA, 19 nt, Artificial Sequence
  Description of Artificial Sequence: Synthetic oligonucleotide
  Sense strand starting at position 1494 of SEQ ID NO: 1883486
cagggaaggucuucucuca

SEQ ID NO: 2197233 - RNA, 19 nt, Artificial Sequence
  Description of Artificial Sequence: Synthetic oligonucleotide
  Antisense strand to SEQ ID NO: 2197232
ugagagaagaccuucccug

SEQ ID NO: 2197234 - RNA, 19 nt, Artificial Sequence
  Description of Artificial Sequence: Synthetic oligonucleotide
  Sense strand starting at position 717 of SEQ ID NO: 1883486
ccuaauaguagguauguca

SEQ ID NO: 2197235 - RNA, 19 nt, Artificial Sequence
  Description of Artificial Sequence: Synthetic oligonucleotide
  Antisense strand to SEQ ID NO: 2197234
ugacauaccuacuauuagg

SEQ ID NO: 2197236 - RNA, 19 nt, Artificial Sequence
  Description of Artificial Sequence: Synthetic oligonucleotide
  Sense strand starting at position 3203 of SEQ ID NO: 1883486
uugaaagcuuucucauaag

SEQ ID NO: 2197237 - RNA, 19 nt, Artificial Sequence
  Description of Artificial Sequence: Synthetic oligonucleotide
  Antisense strand to SEQ ID NO: 2197236
cuuaugagaaagcuuucaa

SEQ ID NO: 2197238 - RNA, 19 nt, Artificial Sequence
  Description of Artificial Sequence: Synthetic oligonucleotide
  Sense strand starting at position 3191 of SEQ ID NO: 1883486
uuuaaacucugcuugaaag

SEQ ID NO: 2197239 - RNA, 19 nt, Artificial Sequence
  Description of Artificial Sequence: Synthetic oligonucleotide
  Antisense strand to SEQ ID NO: 2197238
cuuucaagcagaguuuaaa

SEQ ID NO: 2197240 - RNA, 19 nt, Artificial Sequence
  Description of Artificial Sequence: Synthetic oligonucleotide
  Sense strand starting at position 1740 of SEQ ID NO: 1883486
cggcucucggcgaaacagu

SEQ ID NO: 2197241 - RNA, 19 nt, Artificial Sequence
  Description of Artificial Sequence: Synthetic oligonucleotide
  Antisense strand to SEQ ID NO: 2197240
acuguuucgccgagagccg

SEQ ID NO: 2197242 - RNA, 19 nt, Artificial Sequence
  Description of Artificial Sequence: Synthetic oligonucleotide
  Sense strand starting at position 1290 of SEQ ID NO: 1883486
acuaucuaccucggaauca

SEQ ID NO: 2197243 - RNA, 19 nt, Artificial Sequence
  Description of Artificial Sequence: Synthetic oligonucleotide
  Antisense strand to SEQ ID NO: 2197242
ugauuccgagguagauagu

SEQ ID NO: 2197244 - RNA, 19 nt, Artificial Sequence
  Description of Artificial Sequence: Synthetic oligonucleotide
  Sense strand starting at position 720 of SEQ ID NO: 1883486
aauaguagguaugucauaa

SEQ ID NO: 2197245 - RNA, 19 nt, Artificial Sequence
  Description of Artificial Sequence: Synthetic oligonucleotide
  Antisense strand to SEQ ID NO: 2197244
uuaugacauaccuacuauu

SEQ ID NO: 2197246 - RNA, 19 nt, Artificial Sequence
  Description of Artificial Sequence: Synthetic oligonucleotide
  Sense strand starting at position 1451 of SEQ ID NO: 1883486
cccugacuucuccauguca

SEQ ID NO: 2197247 - RNA, 19 nt, Artificial Sequence
  Description of Artificial Sequence: Synthetic oligonucleotide
  Antisense strand to SEQ ID NO: 2197246
ugacauggagaagucaggg

SEQ ID NO: 2197248 - RNA, 19 nt, Artificial Sequence
  Description of Artificial Sequence: Synthetic oligonucleotide
  Sense strand starting at position 989 of SEQ ID NO: 1883486
ggcagauccagguggacau

SEQ ID NO: 2197249 - RNA, 19 nt, Artificial Sequence
  Description of Artificial Sequence: Synthetic oligonucleotide
  Antisense strand to SEQ ID NO: 2197248
auguccaccuggaucugcc

SEQ ID NO: 2197250 - RNA, 19 nt, Artificial Sequence
  Description of Artificial Sequence: Synthetic oligonucleotide
  Sense strand starting at position 3335 of SEQ ID NO: 1883486
uuacuuguugcugaacuaa

SEQ ID NO: 2197251 - RNA, 19 nt, Artificial Sequence
  Description of Artificial Sequence: Synthetic oligonucleotide
  Antisense strand to SEQ ID NO: 2197250
uuaguucagcaacaaguaa

SEQ ID NO: 2197252 - RNA, 19 nt, Artificial Sequence
  Description of Artificial Sequence: Synthetic oligonucleotide
  Sense strand starting at position 3309 of SEQ ID NO: 1883486
gcuguuacucuucugcgua

SEQ ID NO: 2197253 - RNA, 19 nt, Artificial Sequence
  Description of Artificial Sequence: Synthetic oligonucleotide
  Antisense strand to SEQ ID NO: 2197252
uacgcagaagaguaacagc

SEQ ID NO: 2197254 - RNA, 19 nt, Artificial Sequence
  Description of Artificial Sequence: Synthetic oligonucleotide
  Sense strand starting at position 2079 of SEQ ID NO: 1883486
cuaguaacugccugagaaa

SEQ ID NO: 2197255 - RNA, 19 nt, Artificial Sequence
  Description of Artificial Sequence: Synthetic oligonucleotide
  Antisense strand to SEQ ID NO: 2197254
uuucucaggcaguuacuag

SEQ ID NO: 2197256 - RNA, 19 nt, Artificial Sequence
  Description of Artificial Sequence: Synthetic oligonucleotide
  Sense strand starting at position 3944 of SEQ ID NO: 1883486
uuauaagaccagugauguu

SEQ ID NO: 2197257 - RNA, 19 nt, Artificial Sequence
  Description of Artificial Sequence: Synthetic oligonucleotide
  Antisense strand to SEQ ID NO: 2197256
aacaucacuggucuuauaa

SEQ ID NO: 2197258 - RNA, 19 nt, Artificial Sequence
  Description of Artificial Sequence: Synthetic oligonucleotide
  Sense strand starting at position 3015 of SEQ ID NO: 1883486
acagauaacucguccuaca

SEQ ID NO: 2197259 - RNA, 19 nt, Artificial Sequence
  Description of Artificial Sequence: Synthetic oligonucleotide
  Antisense strand to SEQ ID NO: 2197258
uguaggacgaguuaucugu

SEQ ID NO: 2197260 - RNA, 19 nt, Artificial Sequence
  Description of Artificial Sequence: Synthetic oligonucleotide
  Sense strand starting at position 2078 of SEQ ID NO: 1883486
ucuaguaacugccugagaa

SEQ ID NO: 2197261 - RNA, 19 nt, Artificial Sequence
  Description of Artificial Sequence: Synthetic oligonucleotide
  Antisense strand to SEQ ID NO: 2197260
uucucaggcaguuacuaga

SEQ ID NO: 2197262 - RNA, 19 nt, Artificial Sequence
  Description of Artificial Sequence: Synthetic oligonucleotide
  Sense strand starting at position 2238 of SEQ ID NO: 1883486
caggcauaucgugagacga

SEQ ID NO: 2197263 - RNA, 19 nt, Artificial Sequence
  Description of Artificial Sequence: Synthetic oligonucleotide
  Antisense strand to SEQ ID NO: 2197262
ucgucucacgauaugccug

SEQ ID NO: 2197264 - RNA, 19 nt, Artificial Sequence
  Description of Artificial Sequence: Synthetic oligonucleotide
  Sense strand starting at position 2142 of SEQ ID NO: 1883486
ggacuuucugaaggacguu

SEQ ID NO: 2197265 - RNA, 19 nt, Artificial Sequence
  Description of Artificial Sequence: Synthetic oligonucleotide
  Antisense strand to SEQ ID NO: 2197264
aacguccuucagaaagucc

SEQ ID NO: 2197266 - RNA, 19 nt, Artificial Sequence
  Description of Artificial Sequence: Synthetic oligonucleotide
  Sense strand starting at position 312 of SEQ ID NO: 1883486
acauuaguguccuuuaagg

SEQ ID NO: 2197267 - RNA, 19 nt, Artificial Sequence
  Description of Artificial Sequence: Synthetic oligonucleotide
  Antisense strand to SEQ ID NO: 2197266
ccuuaaaggacacuaaugu

SEQ ID NO: 2197268 - RNA, 19 nt, Artificial Sequence
  Description of Artificial Sequence: Synthetic oligonucleotide
  Sense strand starting at position 839 of SEQ ID NO: 1883486
ggcuaucuucagggaguag

SEQ ID NO: 2197269 - RNA, 19 nt, Artificial Sequence
  Description of Artificial Sequence: Synthetic oligonucleotide
  Antisense strand to SEQ ID NO: 2197268
cuacucccugaagauagcc

SEQ ID NO: 2197270 - RNA, 19 nt, Artificial Sequence
  Description of Artificial Sequence: Synthetic oligonucleotide
  Sense strand starting at position 2182 of SEQ ID NO: 1883486
ggaggucucuacuucccau

SEQ ID NO: 2197271 - RNA, 19 nt, Artificial Sequence
  Description of Artificial Sequence: Synthetic oligonucleotide
  Antisense strand to SEQ ID NO: 2197270
augggaaguagagaccucc

SEQ ID NO: 2197272 - RNA, 19 nt, Artificial Sequence
  Description of Artificial Sequence: Synthetic oligonucleotide
  Sense strand starting at position 2703 of SEQ ID NO: 1883486
gcuuccagacucggagaua

SEQ ID NO: 2197273 - RNA, 19 nt, Artificial Sequence
  Description of Artificial Sequence: Synthetic oligonucleotide
  Antisense strand to SEQ ID NO: 2197272
uaucuccgagucuggaagc

SEQ ID NO: 2197274 - RNA, 19 nt, Artificial Sequence
  Description of Artificial Sequence: Synthetic oligonucleotide
  Sense strand starting at position 2185 of SEQ ID NO: 1883486
ggucucuacuucccauaca

SEQ ID NO: 2197275 - RNA, 19 nt, Artificial Sequence
  Description of Artificial Sequence: Synthetic oligonucleotide
  Antisense strand to SEQ ID NO: 2197274
uguaugggaaguagagacc

SEQ ID NO: 2197276 - RNA, 19 nt, Artificial Sequence
  Description of Artificial Sequence: Synthetic oligonucleotide
  Sense strand starting at position 1768 of SEQ ID NO: 1883486
cguagugcgcuguccagau

SEQ ID NO: 2197277 - RNA, 19 nt, Artificial Sequence
  Description of Artificial Sequence: Synthetic oligonucleotide
  Antisense strand to SEQ ID NO: 2197276
aucuggacagcgcacuacg

SEQ ID NO: 2197278 - RNA, 19 nt, Artificial Sequence
  Description of Artificial Sequence: Synthetic oligonucleotide
  Sense strand starting at position 3767 of SEQ ID NO: 1883486
ucgugaacccauuacuguu

SEQ ID NO: 2197279 - RNA, 19 nt, Artificial Sequence
  Description of Artificial Sequence: Synthetic oligonucleotide
  Antisense strand to SEQ ID NO: 2197278
aacaguaauggguucacga

SEQ ID NO: 2197280 - RNA, 19 nt, Artificial Sequence
  Description of Artificial Sequence: Synthetic oligonucleotide
  Sense strand starting at position 1210 of SEQ ID NO: 1883486
gaagacaacacgcgaguua

SEQ ID NO: 2197281 - RNA, 19 nt, Artificial Sequence
  Description of Artificial Sequence: Synthetic oligonucleotide
  Antisense strand to SEQ ID NO: 2197280
uaacucgcguguugucuuc

SEQ ID NO: 2197282 - RNA, 19 nt, Artificial Sequence
  Description of Artificial Sequence: Synthetic oligonucleotide
  Sense strand starting at position 826 of SEQ ID NO: 1883486
gaaacuuaacgguggcuau

SEQ ID NO: 2197283 - RNA, 19 nt, Artificial Sequence
  Description of Artificial Sequence: Synthetic oligonucleotide
  Antisense strand to SEQ ID NO: 2197282
auagccaccguuaaguuuc

SEQ ID NO: 2197284 - RNA, 19 nt, Artificial Sequence
  Description of Artificial Sequence: Synthetic oligonucleotide
  Sense strand starting at position 2212 of SEQ ID NO: 1883486
cuaaguugucuguagcaga

SEQ ID NO: 2197285 - RNA, 19 nt, Artificial Sequence
  Description of Artificial Sequence: Synthetic oligonucleotide
  Antisense strand to SEQ ID NO: 2197284
ucugcuacagacaacuuag

SEQ ID NO: 2197286 - RNA, 19 nt, Artificial Sequence
  Description of Artificial Sequence: Synthetic oligonucleotide
  Sense strand starting at position 2904 of SEQ ID NO: 1883486
ggaauagagucagagauaa

SEQ ID NO: 2197287 - RNA, 19 nt, Artificial Sequence
  Description of Artificial Sequence: Synthetic oligonucleotide
  Antisense strand to SEQ ID NO: 2197286
uuaucucugacucuauucc

SEQ ID NO: 2197288 - RNA, 19 nt, Artificial Sequence
  Description of Artificial Sequence: Synthetic oligonucleotide
  Sense strand starting at position 633 of SEQ ID NO: 1883487
gaauaacuucccuguagga

SEQ ID NO: 2197289 - RNA, 19 nt, Artificial Sequence
  Description of Artificial Sequence: Synthetic oligonucleotide
  Antisense strand to SEQ ID NO: 2197288
uccuacagggaaguuauuc

SEQ ID NO: 2197290 - RNA, 19 nt, Artificial Sequence
  Description of Artificial Sequence: Synthetic oligonucleotide
  Sense strand starting at position 220 of SEQ ID NO: 1883487
ggguaaagggcauaugcau

SEQ ID NO: 2197291 - RNA, 19 nt, Artificial Sequence
  Description of Artificial Sequence: Synthetic oligonucleotide
  Antisense strand to SEQ ID NO: 2197290
augcauaugcccuuuaccc

SEQ ID NO: 2197292 - RNA, 19 nt, Artificial Sequence
  Description of Artificial Sequence: Synthetic oligonucleotide
  Sense strand starting at position 1595 of SEQ ID NO: 1883487
ggaauugccagcgauggaa

SEQ ID NO: 2197293 - RNA, 19 nt, Artificial Sequence
  Description of Artificial Sequence: Synthetic oligonucleotide
  Antisense strand to SEQ ID NO: 2197292
uuccaucgcuggcaauucc

SEQ ID NO: 2197294 - RNA, 19 nt, Artificial Sequence
  Description of Artificial Sequence: Synthetic oligonucleotide
  Sense strand starting at position 1424 of SEQ ID NO: 1883487
aggguuuaauuugagaacu

SEQ ID NO: 2197295 - RNA, 19 nt, Artificial Sequence
  Description of Artificial Sequence: Synthetic oligonucleotide
  Antisense strand to SEQ ID NO: 2197294
aguucucaaauuaaacccu

SEQ ID NO: 2197296 - RNA, 19 nt, Artificial Sequence
  Description of Artificial Sequence: Synthetic oligonucleotide
  Sense strand starting at position 1426 of SEQ ID NO: 1883487
gguuuaauuugagaacucu

SEQ ID NO: 2197297 - RNA, 19 nt, Artificial Sequence
  Description of Artificial Sequence: Synthetic oligonucleotide
  Antisense strand to SEQ ID NO: 2197296
agaguucucaaauuaaacc

SEQ ID NO: 2197298 - RNA, 19 nt, Artificial Sequence
  Description of Artificial Sequence: Synthetic oligonucleotide
  Sense strand starting at position 1594 of SEQ ID NO: 1883487
gggaauugccagcgaugga

SEQ ID NO: 2197299 - RNA, 19 nt, Artificial Sequence
  Description of Artificial Sequence: Synthetic oligonucleotide
  Antisense strand to SEQ ID NO: 2197298
uccaucgcuggcaauuccc

SEQ ID NO: 2197300 - RNA, 19 nt, Artificial Sequence
  Description of Artificial Sequence: Synthetic oligonucleotide
  Sense strand starting at position 3418 of SEQ ID NO: 1883487
gaagucaacucagagagga

SEQ ID NO: 2197301 - RNA, 19 nt, Artificial Sequence
  Description of Artificial Sequence: Synthetic oligonucleotide
  Antisense strand to SEQ ID NO: 2197300
uccucucugaguugacuuc

SEQ ID NO: 2197302 - RNA, 19 nt, Artificial Sequence
  Description of Artificial Sequence: Synthetic oligonucleotide
  Sense strand starting at position 1434 of SEQ ID NO: 1883487
uugagaacucuucgccuac

SEQ ID NO: 2197303 - RNA, 19 nt, Artificial Sequence
  Description of Artificial Sequence: Synthetic oligonucleotide
  Antisense strand to SEQ ID NO: 2197302
guaggcgaagaguucucaa

SEQ ID NO: 2197304 - RNA, 19 nt, Artificial Sequence
  Description of Artificial Sequence: Synthetic oligonucleotide
  Sense strand starting at position 1537 of SEQ ID NO: 1883487
cguguauaugcuuaacuuu

SEQ ID NO: 2197305 - RNA, 19 nt, Artificial Sequence
  Description of Artificial Sequence: Synthetic oligonucleotide
  Antisense strand to SEQ ID NO: 2197304
aaaguuaagcauauacacg

SEQ ID NO: 2197306 - RNA, 19 nt, Artificial Sequence
  Description of Artificial Sequence: Synthetic oligonucleotide
  Sense strand starting at position 3802 of SEQ ID NO: 1883487
ggcggcuggaccugaguaa

SEQ ID NO: 2197307 - RNA, 19 nt, Artificial Sequence
  Description of Artificial Sequence: Synthetic oligonucleotide
  Antisense strand to SEQ ID NO: 2197306
uuacucagguccagccgcc

SEQ ID NO: 2197308 - RNA, 19 nt, Artificial Sequence
  Description of Artificial Sequence: Synthetic oligonucleotide
  Sense strand starting at position 1395 of SEQ ID NO: 1883487
cuagguggauucggauuua

SEQ ID NO: 2197309 - RNA, 19 nt, Artificial Sequence
  Description of Artificial Sequence: Synthetic oligonucleotide
  Antisense strand to SEQ ID NO: 2197308
uaaauccgaauccaccuag

SEQ ID NO: 2197310 - RNA, 19 nt, Artificial Sequence
  Description of Artificial Sequence: Synthetic oligonucleotide
  Sense strand starting at position 1536 of SEQ ID NO: 1883487
acguguauaugcuuaacuu

SEQ ID NO: 2197311 - RNA, 19 nt, Artificial Sequence
  Description of Artificial Sequence: Synthetic oligonucleotide
  Antisense strand to SEQ ID NO: 2197310
aaguuaagcauauacacgu

SEQ ID NO: 2197312 - RNA, 19 nt, Artificial Sequence
  Description of Artificial Sequence: Synthetic oligonucleotide
  Sense strand starting at position 8 of SEQ ID NO: 1883487
cacaguauguuugugugua

SEQ ID NO: 2197313 - RNA, 19 nt, Artificial Sequence
  Description of Artificial Sequence: Synthetic oligonucleotide
  Antisense strand to SEQ ID NO: 2197312
uacacacaaacauacugug

SEQ ID NO: 2197314 - RNA, 19 nt, Artificial Sequence
  Description of Artificial Sequence: Synthetic oligonucleotide
  Sense strand starting at position 1081 of SEQ ID NO: 1883487
ccuauucuguugcauuuau

SEQ ID NO: 2197315 - RNA, 19 nt, Artificial Sequence
  Description of Artificial Sequence: Synthetic oligonucleotide
  Antisense strand to SEQ ID NO: 2197314
auaaaugcaacagaauagg

SEQ ID NO: 2197316 - RNA, 19 nt, Artificial Sequence
  Description of Artificial Sequence: Synthetic oligonucleotide
  Sense strand starting at position 810 of SEQ ID NO: 1883487
cgaggucauucuuaggaag

SEQ ID NO: 2197317 - RNA, 19 nt, Artificial Sequence
  Description of Artificial Sequence: Synthetic oligonucleotide
  Antisense strand to SEQ ID NO: 2197316
cuuccuaagaaugaccucg

SEQ ID NO: 2197318 - RNA, 19 nt, Artificial Sequence
  Description of Artificial Sequence: Synthetic oligonucleotide
  Sense strand starting at position 16 of SEQ ID NO: 1883487
guuuguguguaugugcaaa

SEQ ID NO: 2197319 - RNA, 19 nt, Artificial Sequence
  Description of Artificial Sequence: Synthetic oligonucleotide
  Antisense strand to SEQ ID NO: 2197318
uuugcacauacacacaaac

SEQ ID NO: 2197320 - RNA, 19 nt, Artificial Sequence
  Description of Artificial Sequence: Synthetic oligonucleotide
  Sense strand starting at position 1225 of SEQ ID NO: 1883487
gauagacagugucaugcaa

SEQ ID NO: 2197321 - RNA, 19 nt, Artificial Sequence
  Description of Artificial Sequence: Synthetic oligonucleotide
  Antisense strand to SEQ ID NO: 2197320
uugcaugacacugucuauc

SEQ ID NO: 2197322 - RNA, 19 nt, Artificial Sequence
  Description of Artificial Sequence: Synthetic oligonucleotide
  Sense strand starting at position 801 of SEQ ID NO: 1883487
gccugcuugcgaggucauu

SEQ ID NO: 2197323 - RNA, 19 nt, Artificial Sequence
  Description of Artificial Sequence: Synthetic oligonucleotide
  Antisense strand to SEQ ID NO: 2197322
aaugaccucgcaagcaggc

SEQ ID NO: 2197324 - RNA, 19 nt, Artificial Sequence
  Description of Artificial Sequence: Synthetic oligonucleotide
  Sense strand starting at position 1079 of SEQ ID NO: 1883487
uuccuauucuguugcauuu

SEQ ID NO: 2197325 - RNA, 19 nt, Artificial Sequence
  Description of Artificial Sequence: Synthetic oligonucleotide
  Antisense strand to SEQ ID NO: 2197324
aaaugcaacagaauaggaa

SEQ ID NO: 2197326 - RNA, 19 nt, Artificial Sequence
  Description of Artificial Sequence: Synthetic oligonucleotide
  Sense strand starting at position 3815 of SEQ ID NO: 1883487
gaguaaggcucacagcgau

SEQ ID NO: 2197327 - RNA, 19 nt, Artificial Sequence
  Description of Artificial Sequence: Synthetic oligonucleotide
  Antisense strand to SEQ ID NO: 2197326
aucgcugugagccuuacuc

SEQ ID NO: 2197328 - RNA, 19 nt, Artificial Sequence
  Description of Artificial Sequence: Synthetic oligonucleotide
  Sense strand starting at position 3848 of SEQ ID NO: 1883488
ccagaaaugcaacauaguu

SEQ ID NO: 2197329 - RNA, 19 nt, Artificial Sequence
  Description of Artificial Sequence: Synthetic oligonucleotide
  Antisense strand to SEQ ID NO: 2197328
aacuauguugcauuucugg

SEQ ID NO: 2197330 - RNA, 19 nt, Artificial Sequence
  Description of Artificial Sequence: Synthetic oligonucleotide
  Sense strand starting at position 2350 of SEQ ID NO: 1883488
gcaggugugcugccuaaau

SEQ ID NO: 2197331 - RNA, 19 nt, Artificial Sequence
  Description of Artificial Sequence: Synthetic oligonucleotide
  Antisense strand to SEQ ID NO: 2197330
auuuaggcagcacaccugc

SEQ ID NO: 2197332 - RNA, 19 nt, Artificial Sequence
  Description of Artificial Sequence: Synthetic oligonucleotide
  Sense strand starting at position 2182 of SEQ ID NO: 1883488
aguaucagagcggaauuaa

SEQ ID NO: 2197333 - RNA, 19 nt, Artificial Sequence
  Description of Artificial Sequence: Synthetic oligonucleotide
  Antisense strand to SEQ ID NO: 2197332
uuaauuccgcucugauacu

SEQ ID NO: 2197334 - RNA, 19 nt, Artificial Sequence
  Description of Artificial Sequence: Synthetic oligonucleotide
  Sense strand starting at position 3410 of SEQ ID NO: 1883488
cgaaucugauuacuacaga

SEQ ID NO: 2197335 - RNA, 19 nt, Artificial Sequence
  Description of Artificial Sequence: Synthetic oligonucleotide
  Antisense strand to SEQ ID NO: 2197334
ucuguaguaaucagauucg

SEQ ID NO: 2197336 - RNA, 19 nt, Artificial Sequence
  Description of Artificial Sequence: Synthetic oligonucleotide
  Sense strand starting at position 112 of SEQ ID NO: 1883488
cggccaaucacgcuucuuu

SEQ ID NO: 2197337 - RNA, 19 nt, Artificial Sequence
  Description of Artificial Sequence: Synthetic oligonucleotide
  Antisense strand to SEQ ID NO: 2197336
aaagaagcgugauuggccg

SEQ ID NO: 2197338 - RNA, 19 nt, Artificial Sequence
  Description of Artificial Sequence: Synthetic oligonucleotide
  Sense strand starting at position 3959 of SEQ ID NO: 1883488
guugaaauugacuacuggu

SEQ ID NO: 2197339 - RNA, 19 nt, Artificial Sequence
  Description of Artificial Sequence: Synthetic oligonucleotide
  Antisense strand to SEQ ID NO: 2197338
accaguagucaauuucaac

SEQ ID NO: 2197340 - RNA, 19 nt, Artificial Sequence
  Description of Artificial Sequence: Synthetic oligonucleotide
  Sense strand starting at position 2881 of SEQ ID NO: 1883488
gagcuagagucauuaaaga

SEQ ID NO: 2197341 - RNA, 19 nt, Artificial Sequence
  Description of Artificial Sequence: Synthetic oligonucleotide
  Antisense strand to SEQ ID NO: 2197340
ucuuuaaugacucuagcuc

SEQ ID NO: 2197342 - RNA, 19 nt, Artificial Sequence
  Description of Artificial Sequence: Synthetic oligonucleotide
  Sense strand starting at position 3162 of SEQ ID NO: 1883488
ugcccaacugaguauauga

SEQ ID NO: 2197343 - RNA, 19 nt, Artificial Sequence
  Description of Artificial Sequence: Synthetic oligonucleotide
  Antisense strand to SEQ ID NO: 2197342
ucauauacucaguugggca

SEQ ID NO: 2197344 - RNA, 19 nt, Artificial Sequence
  Description of Artificial Sequence: Synthetic oligonucleotide
  Sense strand starting at position 2032 of SEQ ID NO: 1883488
cuugaugagcagcagauau

SEQ ID NO: 2197345 - RNA, 19 nt, Artificial Sequence
  Description of Artificial Sequence: Synthetic oligonucleotide
  Antisense strand to SEQ ID NO: 2197344
auaucugcugcucaucaag

SEQ ID NO: 2197346 - RNA, 19 nt, Artificial Sequence
  Description of Artificial Sequence: Synthetic oligonucleotide
  Sense strand starting at position 2535 of SEQ ID NO: 1883488
uuagauuacugucccaaag

SEQ ID NO: 2197347 - RNA, 19 nt, Artificial Sequence
  Description of Artificial Sequence: Synthetic oligonucleotide
  Antisense strand to SEQ ID NO: 2197346
cuuugggacaguaaucuaa

SEQ ID NO: 2197348 - RNA, 19 nt, Artificial Sequence
  Description of Artificial Sequence: Synthetic oligonucleotide
  Sense strand starting at position 2911 of SEQ ID NO: 1883488
auaagaguacucugacccu

SEQ ID NO: 2197349 - RNA, 19 nt, Artificial Sequence
  Description of Artificial Sequence: Synthetic oligonucleotide
  Antisense strand to SEQ ID NO: 2197348
agggucagaguacucuuau

SEQ ID NO: 2197350 - RNA, 19 nt, Artificial Sequence
  Description of Artificial Sequence: Synthetic oligonucleotide
  Sense strand starting at position 3154 of SEQ ID NO: 1883488
ugacucuuugcccaacuga

SEQ ID NO: 2197351 - RNA, 19 nt, Artificial Sequence
  Description of Artificial Sequence: Synthetic oligonucleotide
  Antisense strand to SEQ ID NO: 2197350
ucaguugggcaaagaguca

SEQ ID NO: 2197352 - RNA, 19 nt, Artificial Sequence
  Description of Artificial Sequence: Synthetic oligonucleotide
  Sense strand starting at position 3169 of SEQ ID NO: 1883488
cugaguauaugaguauuga

SEQ ID NO: 2197353 - RNA, 19 nt, Artificial Sequence
  Description of Artificial Sequence: Synthetic oligonucleotide
  Antisense strand to SEQ ID NO: 2197352
ucaauacucauauacucag

SEQ ID NO: 2197354 - RNA, 19 nt, Artificial Sequence
  Description of Artificial Sequence: Synthetic oligonucleotide
  Sense strand starting at position 3407 of SEQ ID NO: 1883488
ccacgaaucugauuacuac

SEQ ID NO: 2197355 - RNA, 19 nt, Artificial Sequence
  Description of Artificial Sequence: Synthetic oligonucleotide
  Antisense strand to SEQ ID NO: 2197354
guaguaaucagauucgugg

SEQ ID NO: 2197356 - RNA, 19 nt, Artificial Sequence
  Description of Artificial Sequence: Synthetic oligonucleotide
  Sense strand starting at position 286 of SEQ ID NO: 1883488
ugucguauugaauauauag

SEQ ID NO: 2197357 - RNA, 19 nt, Artificial Sequence
  Description of Artificial Sequence: Synthetic oligonucleotide
  Antisense strand to SEQ ID NO: 2197356
cuauauauucaauacgaca

SEQ ID NO: 2197358 - RNA, 19 nt, Artificial Sequence
  Description of Artificial Sequence: Synthetic oligonucleotide
  Sense strand starting at position 3955 of SEQ ID NO: 1883488
gguaguugaaauugacuac

SEQ ID NO: 2197359 - RNA, 19 nt, Artificial Sequence
  Description of Artificial Sequence: Synthetic oligonucleotide
  Antisense strand to SEQ ID NO: 2197358
guagucaauuucaacuacc

SEQ ID NO: 2197360 - RNA, 19 nt, Artificial Sequence
  Description of Artificial Sequence: Synthetic oligonucleotide
  Sense strand starting at position 235 of SEQ ID NO: 1883488
uguagauuauaugccaaau

SEQ ID NO: 2197361 - RNA, 19 nt, Artificial Sequence
  Description of Artificial Sequence: Synthetic oligonucleotide
  Antisense strand to SEQ ID NO: 2197360
auuuggcauauaaucuaca

SEQ ID NO: 2197362 - RNA, 19 nt, Artificial Sequence
  Description of Artificial Sequence: Synthetic oligonucleotide
  Sense strand starting at position 3711 of SEQ ID NO: 1883488
cucaucucgauguaaggua

SEQ ID NO: 2197363 - RNA, 19 nt, Artificial Sequence
  Description of Artificial Sequence: Synthetic oligonucleotide
  Antisense strand to SEQ ID NO: 2197362
uaccuuacaucgagaugag

SEQ ID NO: 2197364 - RNA, 19 nt, Artificial Sequence
  Description of Artificial Sequence: Synthetic oligonucleotide
  Sense strand starting at position 2272 of SEQ ID NO: 1883488
uuacucagccauuagucua

SEQ ID NO: 2197365 - RNA, 19 nt, Artificial Sequence
  Description of Artificial Sequence: Synthetic oligonucleotide
  Antisense strand to SEQ ID NO: 2197364
uagacuaauggcugaguaa

SEQ ID NO: 2197366 - RNA, 19 nt, Artificial Sequence
  Description of Artificial Sequence: Synthetic oligonucleotide
  Sense strand starting at position 2180 of SEQ ID NO: 1883488
caaguaucagagcggaauu

SEQ ID NO: 2197367 - RNA, 19 nt, Artificial Sequence
  Description of Artificial Sequence: Synthetic oligonucleotide
  Antisense strand to SEQ ID NO: 2197366
aauuccgcucugauacuug

SEQ ID NO: 2197368 - RNA, 19 nt, Artificial Sequence
  Description of Artificial Sequence: Synthetic oligonucleotide
  Sense strand starting at position 2464 of SEQ ID NO: 1883488
uguacuucuuauccagauc

SEQ ID NO: 2197369 - RNA, 19 nt, Artificial Sequence
  Description of Artificial Sequence: Synthetic oligonucleotide
  Antisense strand to SEQ ID NO: 2197368
gaucuggauaagaaguaca

SEQ ID NO: 2197370 - RNA, 19 nt, Artificial Sequence
  Description of Artificial Sequence: Synthetic oligonucleotide
  Sense strand starting at position 2601 of SEQ ID NO: 1883488
uccuuauuugucugucugu

SEQ ID NO: 2197371 - RNA, 19 nt, Artificial Sequence
  Description of Artificial Sequence: Synthetic oligonucleotide
  Antisense strand to SEQ ID NO: 2197370
acagacagacaaauaagga

SEQ ID NO: 2197372 - RNA, 19 nt, Artificial Sequence
  Description of Artificial Sequence: Synthetic oligonucleotide
  Sense strand starting at position 3886 of SEQ ID NO: 1883488
agucuuaacugguuuccaa

SEQ ID NO: 2197373 - RNA, 19 nt, Artificial Sequence
  Description of Artificial Sequence: Synthetic oligonucleotide
  Antisense strand to SEQ ID NO: 2197372
uuggaaaccaguuaagacu

SEQ ID NO: 2197374 - RNA, 19 nt, Artificial Sequence
  Description of Artificial Sequence: Synthetic oligonucleotide
  Sense strand starting at position 3707 of SEQ ID NO: 1883488
cuagcucaucucgauguaa

SEQ ID NO: 2197375 - RNA, 19 nt, Artificial Sequence
  Description of Artificial Sequence: Synthetic oligonucleotide
  Antisense strand to SEQ ID NO: 2197374
uuacaucgagaugagcuag

SEQ ID NO: 2197376 - RNA, 19 nt, Artificial Sequence
  Description of Artificial Sequence: Synthetic oligonucleotide
  Sense strand starting at position 3502 of SEQ ID NO: 1883488
aagguucugaguggucuga

SEQ ID NO: 2197377 - RNA, 19 nt, Artificial Sequence
  Description of Artificial Sequence: Synthetic oligonucleotide
  Antisense strand to SEQ ID NO: 2197376
ucagaccacucagaaccuu

SEQ ID NO: 2197378 - RNA, 19 nt, Artificial Sequence
  Description of Artificial Sequence: Synthetic oligonucleotide
  Sense strand starting at position 2233 of SEQ ID NO: 1883488
cguacuccacagcauuauu

SEQ ID NO: 2197379 - RNA, 19 nt, Artificial Sequence
  Description of Artificial Sequence: Synthetic oligonucleotide
  Antisense strand to SEQ ID NO: 2197378
aauaaugcuguggaguacg

SEQ ID NO: 2197380 - RNA, 19 nt, Artificial Sequence
  Description of Artificial Sequence: Synthetic oligonucleotide
  Sense strand starting at position 2463 of SEQ ID NO: 1883488
guguacuucuuauccagau

SEQ ID NO: 2197381 - RNA, 19 nt, Artificial Sequence
  Description of Artificial Sequence: Synthetic oligonucleotide
  Antisense strand to SEQ ID NO: 2197380
aucuggauaagaaguacac

SEQ ID NO: 2197382 - RNA, 19 nt, Artificial Sequence
  Description of Artificial Sequence: Synthetic oligonucleotide
  Sense strand starting at position 3658 of SEQ ID NO: 1883488
uuucuuaaaugcccucgaa

SEQ ID NO: 2197383 - RNA, 19 nt, Artificial Sequence
  Description of Artificial Sequence: Synthetic oligonucleotide
  Antisense strand to SEQ ID NO: 2197382
uucgagggcauuuaagaaa

SEQ ID NO: 2197384 - RNA, 19 nt, Artificial Sequence
  Description of Artificial Sequence: Synthetic oligonucleotide
  Sense strand starting at position 3504 of SEQ ID NO: 1883488
gguucugaguggucugaug

SEQ ID NO: 2197385 - RNA, 19 nt, Artificial Sequence
  Description of Artificial Sequence: Synthetic oligonucleotide
  Antisense strand to SEQ ID NO: 2197384
caucagaccacucagaacc

SEQ ID NO: 2197386 - RNA, 19 nt, Artificial Sequence
  Description of Artificial Sequence: Synthetic oligonucleotide
  Sense strand starting at position 3661 of SEQ ID NO: 1883488
cuuaaaugcccucgaauuc

SEQ ID NO: 2197387 - RNA, 19 nt, Artificial Sequence
  Description of Artificial Sequence: Synthetic oligonucleotide
  Antisense strand to SEQ ID NO: 2197386
gaauucgagggcauuuaag

SEQ ID NO: 2197388 - RNA, 19 nt, Artificial Sequence
  Description of Artificial Sequence: Synthetic oligonucleotide
  Sense strand starting at position 2522 of SEQ ID NO: 1883488
ugcauauucuuguuuagau

SEQ ID NO: 2197389 - RNA, 19 nt, Artificial Sequence
  Description of Artificial Sequence: Synthetic oligonucleotide
  Antisense strand to SEQ ID NO: 2197388
aucuaaacaagaauaugca

SEQ ID NO: 2197390 - RNA, 19 nt, Artificial Sequence
  Description of Artificial Sequence: Synthetic oligonucleotide
  Sense strand starting at position 3151 of SEQ ID NO: 1883488
guaugacucuuugcccaac

SEQ ID NO: 2197391 - RNA, 19 nt, Artificial Sequence
  Description of Artificial Sequence: Synthetic oligonucleotide
  Antisense strand to SEQ ID NO: 2197390
guugggcaaagagucauac

SEQ ID NO: 2197392 - RNA, 19 nt, Artificial Sequence
  Description of Artificial Sequence: Synthetic oligonucleotide
  Sense strand starting at position 3149 of SEQ ID NO: 1883488
auguaugacucuuugccca

SEQ ID NO: 2197393 - RNA, 19 nt, Artificial Sequence
  Description of Artificial Sequence: Synthetic oligonucleotide
  Antisense strand to SEQ ID NO: 2197392
ugggcaaagagucauacau

SEQ ID NO: 2197394 - RNA, 19 nt, Artificial Sequence
  Description of Artificial Sequence: Synthetic oligonucleotide
  Sense strand starting at position 2523 of SEQ ID NO: 1883488
gcauauucuuguuuagauu

SEQ ID NO: 2197395 - RNA, 19 nt, Artificial Sequence
  Description of Artificial Sequence: Synthetic oligonucleotide
  Antisense strand to SEQ ID NO: 2197394
aaucuaaacaagaauaugc

SEQ ID NO: 2197396 - RNA, 19 nt, Artificial Sequence
  Description of Artificial Sequence: Synthetic oligonucleotide
  Sense strand starting at position 2352 of SEQ ID NO: 1883488
aggugugcugccuaaaucu

SEQ ID NO: 2197397 - RNA, 19 nt, Artificial Sequence
  Description of Artificial Sequence: Synthetic oligonucleotide
  Antisense strand to SEQ ID NO: 2197396
agauuuaggcagcacaccu

SEQ ID NO: 2197398 - RNA, 19 nt, Artificial Sequence
  Description of Artificial Sequence: Synthetic oligonucleotide
  Sense strand starting at position 3275 of SEQ ID NO: 1883488
uccuguuaaucuguuccau

SEQ ID NO: 2197399 - RNA, 19 nt, Artificial Sequence
  Description of Artificial Sequence: Synthetic oligonucleotide
  Antisense strand to SEQ ID NO: 2197398
auggaacagauuaacagga

SEQ ID NO: 2197400 - RNA, 19 nt, Artificial Sequence
  Description of Artificial Sequence: Synthetic oligonucleotide
  Sense strand starting at position 3277 of SEQ ID NO: 1883488
cuguuaaucuguuccauuc

SEQ ID NO: 2197401 - RNA, 19 nt, Artificial Sequence
  Description of Artificial Sequence: Synthetic oligonucleotide
  Antisense strand to SEQ ID NO: 2197400
gaauggaacagauuaacag

SEQ ID NO: 2197402 - RNA, 19 nt, Artificial Sequence
  Description of Artificial Sequence: Synthetic oligonucleotide
  Sense strand starting at position 3640 of SEQ ID NO: 1883488
ugcauugguucuuuaaucu

SEQ ID NO: 2197403 - RNA, 19 nt, Artificial Sequence
  Description of Artificial Sequence: Synthetic oligonucleotide
  Antisense strand to SEQ ID NO: 2197402
agauuaaagaaccaaugca

SEQ ID NO: 2197404 - RNA, 19 nt, Artificial Sequence
  Description of Artificial Sequence: Synthetic oligonucleotide
  Sense strand starting at position 3639 of SEQ ID NO: 1883488
uugcauugguucuuuaauc

SEQ ID NO: 2197405 - RNA, 19 nt, Artificial Sequence
  Description of Artificial Sequence: Synthetic oligonucleotide
  Antisense strand to SEQ ID NO: 2197404
gauuaaagaaccaaugcaa

SEQ ID NO: 2197406 - RNA, 19 nt, Artificial Sequence
  Description of Artificial Sequence: Synthetic oligonucleotide
  Sense strand starting at position 2230 of SEQ ID NO: 1883488
gcacguacuccacagcauu

SEQ ID NO: 2197407 - RNA, 19 nt, Artificial Sequence
  Description of Artificial Sequence: Synthetic oligonucleotide
  Antisense strand to SEQ ID NO: 2197406
aaugcuguggaguacgugc

SEQ ID NO: 2197408 - RNA, 19 nt, Artificial Sequence
  Description of Artificial Sequence: Synthetic oligonucleotide
  Sense strand starting at position 2532 of SEQ ID NO: 1883491
acagcaauuccagaaaguu

SEQ ID NO: 2197409 - RNA, 19 nt, Artificial Sequence
  Description of Artificial Sequence: Synthetic oligonucleotide
  Antisense strand to SEQ ID NO: 2197408
aacuuucuggaauugcugu

SEQ ID NO: 2197410 - RNA, 19 nt, Artificial Sequence
  Description of Artificial Sequence: Synthetic oligonucleotide
  Sense strand starting at position 3525 of SEQ ID NO: 1883491
uggauuggaucauucuaau

SEQ ID NO: 2197411 - RNA, 19 nt, Artificial Sequence
  Description of Artificial Sequence: Synthetic oligonucleotide
  Antisense strand to SEQ ID NO: 2197410
auuagaaugauccaaucca

SEQ ID NO: 2197412 - RNA, 19 nt, Artificial Sequence
  Description of Artificial Sequence: Synthetic oligonucleotide
  Sense strand starting at position 2796 of SEQ ID NO: 1883491
gguuauucucaauaucuga

SEQ ID NO: 2197413 - RNA, 19 nt, Artificial Sequence
  Description of Artificial Sequence: Synthetic oligonucleotide
  Antisense strand to SEQ ID NO: 2197412
ucagauauugagaauaacc

SEQ ID NO: 2197414 - RNA, 19 nt, Artificial Sequence
  Description of Artificial Sequence: Synthetic oligonucleotide
  Sense strand starting at position 3040 of SEQ ID NO: 1883491
cguugcagugagcucuaua

SEQ ID NO: 2197415 - RNA, 19 nt, Artificial Sequence
  Description of Artificial Sequence: Synthetic oligonucleotide
  Antisense strand to SEQ ID NO: 2197414
uauagagcucacugcaacg

SEQ ID NO: 2197416 - RNA, 19 nt, Artificial Sequence
  Description of Artificial Sequence: Synthetic oligonucleotide
  Sense strand starting at position 576 of SEQ ID NO: 1883491
ggacaaaguauguaaagcu

SEQ ID NO: 2197417 - RNA, 19 nt, Artificial Sequence
  Description of Artificial Sequence: Synthetic oligonucleotide
  Antisense strand to SEQ ID NO: 2197416
agcuuuacauacuuugucc

SEQ ID NO: 2197418 - RNA, 19 nt, Artificial Sequence
  Description of Artificial Sequence: Synthetic oligonucleotide
  Sense strand starting at position 1038 of SEQ ID NO: 1883491
auaacuguguaacuaagaa

SEQ ID NO: 2197419 - RNA, 19 nt, Artificial Sequence
  Description of Artificial Sequence: Synthetic oligonucleotide
  Antisense strand to SEQ ID NO: 2197418
uucuuaguuacacaguuau

SEQ ID NO: 2197420 - RNA, 19 nt, Artificial Sequence
  Description of Artificial Sequence: Synthetic oligonucleotide
  Sense strand starting at position 2540 of SEQ ID NO: 1883491
uccagaaaguucccuaaga

SEQ ID NO: 2197421 - RNA, 19 nt, Artificial Sequence
  Description of Artificial Sequence: Synthetic oligonucleotide
  Antisense strand to SEQ ID NO: 2197420
ucuuagggaacuuucugga

SEQ ID NO: 2197422 - RNA, 19 nt, Artificial Sequence
  Description of Artificial Sequence: Synthetic oligonucleotide
  Sense strand starting at position 2406 of SEQ ID NO: 1883491
aaagaauggagcgguaaga

SEQ ID NO: 2197423 - RNA, 19 nt, Artificial Sequence
  Description of Artificial Sequence: Synthetic oligonucleotide
  Antisense strand to SEQ ID NO: 2197422
ucuuaccgcuccauucuuu

SEQ ID NO: 2197424 - RNA, 19 nt, Artificial Sequence
  Description of Artificial Sequence: Synthetic oligonucleotide
  Sense strand starting at position 1035 of SEQ ID NO: 1883491
guaauaacuguguaacuaa

SEQ ID NO: 2197425 - RNA, 19 nt, Artificial Sequence
  Description of Artificial Sequence: Synthetic oligonucleotide
  Antisense strand to SEQ ID NO: 2197424
uuaguuacacaguuauuac

SEQ ID NO: 2197426 - RNA, 19 nt, Artificial Sequence
  Description of Artificial Sequence: Synthetic oligonucleotide
  Sense strand starting at position 2009 of SEQ ID NO: 1883491
gcuguaucgcgaccaguga

SEQ ID NO: 2197427 - RNA, 19 nt, Artificial Sequence
  Description of Artificial Sequence: Synthetic oligonucleotide
  Antisense strand to SEQ ID NO: 2197426
ucacuggucgcgauacagc

SEQ ID NO: 2197428 - RNA, 19 nt, Artificial Sequence
  Description of Artificial Sequence: Synthetic oligonucleotide
  Sense strand starting at position 3298 of SEQ ID NO: 1883491
agagaagaugcagguuuau

SEQ ID NO: 2197429 - RNA, 19 nt, Artificial Sequence
  Description of Artificial Sequence: Synthetic oligonucleotide
  Antisense strand to SEQ ID NO: 2197428
auaaaccugcaucuucucu

SEQ ID NO: 2197430 - RNA, 19 nt, Artificial Sequence
  Description of Artificial Sequence: Synthetic oligonucleotide
  Sense strand starting at position 3372 of SEQ ID NO: 1883491
ggccuuacagcugaggaau

SEQ ID NO: 2197431 - RNA, 19 nt, Artificial Sequence
  Description of Artificial Sequence: Synthetic oligonucleotide
  Antisense strand to SEQ ID NO: 2197430
auuccucagcuguaaggcc

SEQ ID NO: 2197432 - RNA, 19 nt, Artificial Sequence
  Description of Artificial Sequence: Synthetic oligonucleotide
  Sense strand starting at position 3854 of SEQ ID NO: 1883491
ggcggaacucgccuguagu

SEQ ID NO: 2197433 - RNA, 19 nt, Artificial Sequence
  Description of Artificial Sequence: Synthetic oligonucleotide
  Antisense strand to SEQ ID NO: 2197432
acuacaggcgaguuccgcc

SEQ ID NO: 2197434 - RNA, 19 nt, Artificial Sequence
  Description of Artificial Sequence: Synthetic oligonucleotide
  Sense strand starting at position 2674 of SEQ ID NO: 1883491
ugaauuagguuucugaauu

SEQ ID NO: 2197435 - RNA, 19 nt, Artificial Sequence
  Description of Artificial Sequence: Synthetic oligonucleotide
  Antisense strand to SEQ ID NO: 2197434
aauucagaaaccuaauuca

SEQ ID NO: 2197436 - RNA, 19 nt, Artificial Sequence
  Description of Artificial Sequence: Synthetic oligonucleotide
  Sense strand starting at position 1641 of SEQ ID NO: 1883491
gggcccauucucuaauauu

SEQ ID NO: 2197437 - RNA, 19 nt, Artificial Sequence
  Description of Artificial Sequence: Synthetic oligonucleotide
  Antisense strand to SEQ ID NO: 2197436
aauauuagagaaugggccc

SEQ ID NO: 2197438 - RNA, 19 nt, Artificial Sequence
  Description of Artificial Sequence: Synthetic oligonucleotide
  Sense strand starting at position 409 of SEQ ID NO: 1883491
agaucaaggucucugaagu

SEQ ID NO: 2197439 - RNA, 19 nt, Artificial Sequence
  Description of Artificial Sequence: Synthetic oligonucleotide
  Antisense strand to SEQ ID NO: 2197438
acuucagagaccuugaucu

SEQ ID NO: 2197440 - RNA, 19 nt, Artificial Sequence
  Description of Artificial Sequence: Synthetic oligonucleotide
  Sense strand starting at position 2218 of SEQ ID NO: 1883491
cucugaauugggugacauu

SEQ ID NO: 2197441 - RNA, 19 nt, Artificial Sequence
  Description of Artificial Sequence: Synthetic oligonucleotide
  Antisense strand to SEQ ID NO: 2197440
aaugucacccaauucagag

SEQ ID NO: 2197442 - RNA, 19 nt, Artificial Sequence
  Description of Artificial Sequence: Synthetic oligonucleotide
  Sense strand starting at position 214 of SEQ ID NO: 1883491
aguccugagccaggagaau

SEQ ID NO: 2197443 - RNA, 19 nt, Artificial Sequence
  Description of Artificial Sequence: Synthetic oligonucleotide
  Antisense strand to SEQ ID NO: 2197442
auucuccuggcucaggacu

SEQ ID NO: 2197444 - RNA, 19 nt, Artificial Sequence
  Description of Artificial Sequence: Synthetic oligonucleotide
  Sense strand starting at position 3642 of SEQ ID NO: 1883491
gcaagaucacauggcacaa

SEQ ID NO: 2197445 - RNA, 19 nt, Artificial Sequence
  Description of Artificial Sequence: Synthetic oligonucleotide
  Antisense strand to SEQ ID NO: 2197444
uugugccaugugaucuugc

SEQ ID NO: 2197446 - RNA, 19 nt, Artificial Sequence
  Description of Artificial Sequence: Synthetic oligonucleotide
  Sense strand starting at position 2844 of SEQ ID NO: 1883491
gaugaugucugauuaccuu

SEQ ID NO: 2197447 - RNA, 19 nt, Artificial Sequence
  Description of Artificial Sequence: Synthetic oligonucleotide
  Antisense strand to SEQ ID NO: 2197446
aagguaaucagacaucauc

SEQ ID NO: 2197448 - RNA, 19 nt, Artificial Sequence
  Description of Artificial Sequence: Synthetic oligonucleotide
  Sense strand starting at position 2449 of SEQ ID NO: 1883491
ugcuguguacacuaaauga

SEQ ID NO: 2197449 - RNA, 19 nt, Artificial Sequence
  Description of Artificial Sequence: Synthetic oligonucleotide
  Antisense strand to SEQ ID NO: 2197448
ucauuuaguguacacagca

SEQ ID NO: 2197450 - RNA, 19 nt, Artificial Sequence
  Description of Artificial Sequence: Synthetic oligonucleotide
  Sense strand starting at position 3371 of SEQ ID NO: 1883491
aggccuuacagcugaggaa

SEQ ID NO: 2197451 - RNA, 19 nt, Artificial Sequence
  Description of Artificial Sequence: Synthetic oligonucleotide
  Antisense strand to SEQ ID NO: 2197450
uuccucagcuguaaggccu

SEQ ID NO: 2197452 - RNA, 19 nt, Artificial Sequence
  Description of Artificial Sequence: Synthetic oligonucleotide
  Sense strand starting at position 1640 of SEQ ID NO: 1883491
agggcccauucucuaauau

SEQ ID NO: 2197453 - RNA, 19 nt, Artificial Sequence
  Description of Artificial Sequence: Synthetic oligonucleotide
  Antisense strand to SEQ ID NO: 2197452
auauuagagaaugggcccu

SEQ ID NO: 2197454 - RNA, 19 nt, Artificial Sequence
  Description of Artificial Sequence: Synthetic oligonucleotide
  Sense strand starting at position 410 of SEQ ID NO: 1883491
gaucaaggucucugaaguu

SEQ ID NO: 2197455 - RNA, 19 nt, Artificial Sequence
  Description of Artificial Sequence: Synthetic oligonucleotide
  Antisense strand to SEQ ID NO: 2197454
aacuucagagaccuugauc

SEQ ID NO: 2197456 - RNA, 19 nt, Artificial Sequence
  Description of Artificial Sequence: Synthetic oligonucleotide
  Sense strand starting at position 1034 of SEQ ID NO: 1883491
aguaauaacuguguaacua

SEQ ID NO: 2197457 - RNA, 19 nt, Artificial Sequence
  Description of Artificial Sequence: Synthetic oligonucleotide
  Antisense strand to SEQ ID NO: 2197456
uaguuacacaguuauuacu

SEQ ID NO: 2197458 - RNA, 19 nt, Artificial Sequence
  Description of Artificial Sequence: Synthetic oligonucleotide
  Sense strand starting at position 2879 of SEQ ID NO: 1883491
gaauccuguuagguauauu

SEQ ID NO: 2197459 - RNA, 19 nt, Artificial Sequence
  Description of Artificial Sequence: Synthetic oligonucleotide
  Antisense strand to SEQ ID NO: 2197458
aauauaccuaacaggauuc

SEQ ID NO: 2197460 - RNA, 19 nt, Artificial Sequence
  Description of Artificial Sequence: Synthetic oligonucleotide
  Sense strand starting at position 2600 of SEQ ID NO: 1883491
aaucccuaucucggaggua

SEQ ID NO: 2197461 - RNA, 19 nt, Artificial Sequence
  Description of Artificial Sequence: Synthetic oligonucleotide
  Antisense strand to SEQ ID NO: 2197460
uaccuccgagauagggauu

SEQ ID NO: 2197462 - RNA, 19 nt, Artificial Sequence
  Description of Artificial Sequence: Synthetic oligonucleotide
  Sense strand starting at position 2508 of SEQ ID NO: 1883491
auaagaugcguguacugau

SEQ ID NO: 2197463 - RNA, 19 nt, Artificial Sequence
  Description of Artificial Sequence: Synthetic oligonucleotide
  Antisense strand to SEQ ID NO: 2197462
aucaguacacgcaucuuau

SEQ ID NO: 2197464 - RNA, 19 nt, Artificial Sequence
  Description of Artificial Sequence: Synthetic oligonucleotide
  Sense strand starting at position 632 of SEQ ID NO: 1883491
cuuguuaauagcgaaggua

SEQ ID NO: 2197465 - RNA, 19 nt, Artificial Sequence
  Description of Artificial Sequence: Synthetic oligonucleotide
  Antisense strand to SEQ ID NO: 2197464
uaccuucgcuauuaacaag

SEQ ID NO: 2197466 - RNA, 19 nt, Artificial Sequence
  Description of Artificial Sequence: Synthetic oligonucleotide
  Sense strand starting at position 589 of SEQ ID NO: 1883491
aaagcucagugucugauaa

SEQ ID NO: 2197467 - RNA, 19 nt, Artificial Sequence
  Description of Artificial Sequence: Synthetic oligonucleotide
  Antisense strand to SEQ ID NO: 2197466
uuaucagacacugagcuuu

SEQ ID NO: 2197468 - RNA, 19 nt, Artificial Sequence
  Description of Artificial Sequence: Synthetic oligonucleotide
  Sense strand starting at position 2812 of SEQ ID NO: 1883491
ugaucagguuccuuauucu

SEQ ID NO: 2197469 - RNA, 19 nt, Artificial Sequence
  Description of Artificial Sequence: Synthetic oligonucleotide
  Antisense strand to SEQ ID NO: 2197468
agaauaaggaaccugauca

SEQ ID NO: 2197470 - RNA, 19 nt, Artificial Sequence
  Description of Artificial Sequence: Synthetic oligonucleotide
  Sense strand starting at position 590 of SEQ ID NO: 1883491
aagcucagugucugauaaa

SEQ ID NO: 2197471 - RNA, 19 nt, Artificial Sequence
  Description of Artificial Sequence: Synthetic oligonucleotide
  Antisense strand to SEQ ID NO: 2197470
uuuaucagacacugagcuu

SEQ ID NO: 2197472 - RNA, 19 nt, Artificial Sequence
  Description of Artificial Sequence: Synthetic oligonucleotide
  Sense strand starting at position 3043 of SEQ ID NO: 1883491
ugcagugagcucuauauac

SEQ ID NO: 2197473 - RNA, 19 nt, Artificial Sequence
  Description of Artificial Sequence: Synthetic oligonucleotide
  Antisense strand to SEQ ID NO: 2197472
guauauagagcucacugca

SEQ ID NO: 2197474 - RNA, 19 nt, Artificial Sequence
  Description of Artificial Sequence: Synthetic oligonucleotide
  Sense strand starting at position 2446 of SEQ ID NO: 1883491
uagugcuguguacacuaaa

SEQ ID NO: 2197475 - RNA, 19 nt, Artificial Sequence
  Description of Artificial Sequence: Synthetic oligonucleotide
  Antisense strand to SEQ ID NO: 2197474
uuuaguguacacagcacua

SEQ ID NO: 2197476 - RNA, 19 nt, Artificial Sequence
  Description of Artificial Sequence: Synthetic oligonucleotide
  Sense strand starting at position 2790 of SEQ ID NO: 1883491
uuaugugguuauucucaau

SEQ ID NO: 2197477 - RNA, 19 nt, Artificial Sequence
  Description of Artificial Sequence: Synthetic oligonucleotide
  Antisense strand to SEQ ID NO: 2197476
auugagaauaaccacauaa

SEQ ID NO: 2197478 - RNA, 19 nt, Artificial Sequence
  Description of Artificial Sequence: Synthetic oligonucleotide
  Sense strand starting at position 2279 of SEQ ID NO: 1883491
gcuucucgauacuccauaa

SEQ ID NO: 2197479 - RNA, 19 nt, Artificial Sequence
  Description of Artificial Sequence: Synthetic oligonucleotide
  Antisense strand to SEQ ID NO: 2197478
uuauggaguaucgagaagc

SEQ ID NO: 2197480 - RNA, 19 nt, Artificial Sequence
  Description of Artificial Sequence: Synthetic oligonucleotide
  Sense strand starting at position 3622 of SEQ ID NO: 1883491
guguauuaguggccagaaa

SEQ ID NO: 2197481 - RNA, 19 nt, Artificial Sequence
  Description of Artificial Sequence: Synthetic oligonucleotide
  Antisense strand to SEQ ID NO: 2197480
uuucuggccacuaauacac

SEQ ID NO: 2197482 - RNA, 19 nt, Artificial Sequence
  Description of Artificial Sequence: Synthetic oligonucleotide
  Sense strand starting at position 3608 of SEQ ID NO: 1883491
guccauugucuauagugua

SEQ ID NO: 2197483 - RNA, 19 nt, Artificial Sequence
  Description of Artificial Sequence: Synthetic oligonucleotide
  Antisense strand to SEQ ID NO: 2197482
uacacuauagacaauggac

SEQ ID NO: 2197484 - RNA, 19 nt, Artificial Sequence
  Description of Artificial Sequence: Synthetic oligonucleotide
  Sense strand starting at position 3613 of SEQ ID NO: 1883491
uugucuauaguguauuagu

SEQ ID NO: 2197485 - RNA, 19 nt, Artificial Sequence
  Description of Artificial Sequence: Synthetic oligonucleotide
  Antisense strand to SEQ ID NO: 2197484
acuaauacacuauagacaa

SEQ ID NO: 2197486 - RNA, 19 nt, Artificial Sequence
  Description of Artificial Sequence: Synthetic oligonucleotide
  Sense strand starting at position 2208 of SEQ ID NO: 1883491
gccucacagucucugaauu

SEQ ID NO: 2197487 - RNA, 19 nt, Artificial Sequence
  Description of Artificial Sequence: Synthetic oligonucleotide
  Antisense strand to SEQ ID NO: 2197486
aauucagagacugugaggc

SEQ ID NO: 2197488 - RNA, 19 nt, Artificial Sequence
  Description of Artificial Sequence: Synthetic oligonucleotide
  Sense strand starting at position 2561 of SEQ ID NO: 1883490
acagcaauuccagaaaguu

SEQ ID NO: 2197489 - RNA, 19 nt, Artificial Sequence
  Description of Artificial Sequence: Synthetic oligonucleotide
  Antisense strand to SEQ ID NO: 2197488
aacuuucuggaauugcugu

SEQ ID NO: 2197490 - RNA, 19 nt, Artificial Sequence
  Description of Artificial Sequence: Synthetic oligonucleotide
  Sense strand starting at position 3554 of SEQ ID NO: 1883490
uggauuggaucauucuaau

SEQ ID NO: 2197491 - RNA, 19 nt, Artificial Sequence
  Description of Artificial Sequence: Synthetic oligonucleotide
  Antisense strand to SEQ ID NO: 2197490
auuagaaugauccaaucca

SEQ ID NO: 2197492 - RNA, 19 nt, Artificial Sequence
  Description of Artificial Sequence: Synthetic oligonucleotide
  Sense strand starting at position 2825 of SEQ ID NO: 1883490
gguuauucucaauaucuga

SEQ ID NO: 2197493 - RNA, 19 nt, Artificial Sequence
  Description of Artificial Sequence: Synthetic oligonucleotide
  Antisense strand to SEQ ID NO: 2197492
ucagauauugagaauaacc

SEQ ID NO: 2197494 - RNA, 19 nt, Artificial Sequence
  Description of Artificial Sequence: Synthetic oligonucleotide
  Sense strand starting at position 3069 of SEQ ID NO: 1883490
cguugcagugagcucuaua

SEQ ID NO: 2197495 - RNA, 19 nt, Artificial Sequence
  Description of Artificial Sequence: Synthetic oligonucleotide
  Antisense strand to SEQ ID NO: 2197494
uauagagcucacugcaacg

SEQ ID NO: 2197496 - RNA, 19 nt, Artificial Sequence
  Description of Artificial Sequence: Synthetic oligonucleotide
  Sense strand starting at position 605 of SEQ ID NO: 1883490
ggacaaaguauguaaagcu

SEQ ID NO: 2197497 - RNA, 19 nt, Artificial Sequence
  Description of Artificial Sequence: Synthetic oligonucleotide
  Antisense strand to SEQ ID NO: 2197496
agcuuuacauacuuugucc

SEQ ID NO: 2197498 - RNA, 19 nt, Artificial Sequence
  Description of Artificial Sequence: Synthetic oligonucleotide
  Sense strand starting at position 1067 of SEQ ID NO: 1883490
auaacuguguaacuaagaa

SEQ ID NO: 2197499 - RNA, 19 nt, Artificial Sequence
  Description of Artificial Sequence: Synthetic oligonucleotide
  Antisense strand to SEQ ID NO: 2197498
uucuuaguuacacaguuau

SEQ ID NO: 2197500 - RNA, 19 nt, Artificial Sequence
  Description of Artificial Sequence: Synthetic oligonucleotide
  Sense strand starting at position 2569 of SEQ ID NO: 1883490
uccagaaaguucccuaaga

SEQ ID NO: 2197501 - RNA, 19 nt, Artificial Sequence
  Description of Artificial Sequence: Synthetic oligonucleotide
  Antisense strand to SEQ ID NO: 2197500
ucuuagggaacuuucugga

SEQ ID NO: 2197502 - RNA, 19 nt, Artificial Sequence
  Description of Artificial Sequence: Synthetic oligonucleotide
  Sense strand starting at position 2435 of SEQ ID NO: 1883490
aaagaauggagcgguaaga

SEQ ID NO: 2197503 - RNA, 19 nt, Artificial Sequence
  Description of Artificial Sequence: Synthetic oligonucleotide
  Antisense strand to SEQ ID NO: 2197502
ucuuaccgcuccauucuuu

SEQ ID NO: 2197504 - RNA, 19 nt, Artificial Sequence
  Description of Artificial Sequence: Synthetic oligonucleotide
  Sense strand starting at position 1064 of SEQ ID NO: 1883490
guaauaacuguguaacuaa

SEQ ID NO: 2197505 - RNA, 19 nt, Artificial Sequence
  Description of Artificial Sequence: Synthetic oligonucleotide
  Antisense strand to SEQ ID NO: 2197504
uuaguuacacaguuauuac

SEQ ID NO: 2197506 - RNA, 19 nt, Artificial Sequence
  Description of Artificial Sequence: Synthetic oligonucleotide
  Sense strand starting at position 2038 of SEQ ID NO: 1883490
gcuguaucgcgaccaguga

SEQ ID NO: 2197507 - RNA, 19 nt, Artificial Sequence
  Description of Artificial Sequence: Synthetic oligonucleotide
  Antisense strand to SEQ ID NO: 2197506
ucacuggucgcgauacagc

SEQ ID NO: 2197508 - RNA, 19 nt, Artificial Sequence
  Description of Artificial Sequence: Synthetic oligonucleotide
  Sense strand starting at position 3327 of SEQ ID NO: 1883490
agagaagaugcagguuuau

SEQ ID NO: 2197509 - RNA, 19 nt, Artificial Sequence
  Description of Artificial Sequence: Synthetic oligonucleotide
  Antisense strand to SEQ ID NO: 2197508
auaaaccugcaucuucucu

SEQ ID NO: 2197510 - RNA, 19 nt, Artificial Sequence
  Description of Artificial Sequence: Synthetic oligonucleotide
  Sense strand starting at position 3401 of SEQ ID NO: 1883490
ggccuuacagcugaggaau

SEQ ID NO: 2197511 - RNA, 19 nt, Artificial Sequence
  Description of Artificial Sequence: Synthetic oligonucleotide
  Antisense strand to SEQ ID NO: 2197510
auuccucagcuguaaggcc

SEQ ID NO: 2197512 - RNA, 19 nt, Artificial Sequence
  Description of Artificial Sequence: Synthetic oligonucleotide
  Sense strand starting at position 3883 of SEQ ID NO: 1883490
ggcggaacucgccuguagu

SEQ ID NO: 2197513 - RNA, 19 nt, Artificial Sequence
  Description of Artificial Sequence: Synthetic oligonucleotide
  Antisense strand to SEQ ID NO: 2197512
acuacaggcgaguuccgcc

SEQ ID NO: 2197514 - RNA, 19 nt, Artificial Sequence
  Description of Artificial Sequence: Synthetic oligonucleotide
  Sense strand starting at position 2703 of SEQ ID NO: 1883490
ugaauuagguuucugaauu

SEQ ID NO: 2197515 - RNA, 19 nt, Artificial Sequence
  Description of Artificial Sequence: Synthetic oligonucleotide
  Antisense strand to SEQ ID NO: 2197514
aauucagaaaccuaauuca

SEQ ID NO: 2197516 - RNA, 19 nt, Artificial Sequence
  Description of Artificial Sequence: Synthetic oligonucleotide
  Sense strand starting at position 1670 of SEQ ID NO: 1883490
gggcccauucucuaauauu

SEQ ID NO: 2197517 - RNA, 19 nt, Artificial Sequence
  Description of Artificial Sequence: Synthetic oligonucleotide
  Antisense strand to SEQ ID NO: 2197516
aauauuagagaaugggccc

SEQ ID NO: 2197518 - RNA, 19 nt, Artificial Sequence
  Description of Artificial Sequence: Synthetic oligonucleotide
  Sense strand starting at position 438 of SEQ ID NO: 1883490
agaucaaggucucugaagu

SEQ ID NO: 2197519 - RNA, 19 nt, Artificial Sequence
  Description of Artificial Sequence: Synthetic oligonucleotide
  Antisense strand to SEQ ID NO: 2197518
acuucagagaccuugaucu

SEQ ID NO: 2197520 - RNA, 19 nt, Artificial Sequence
  Description of Artificial Sequence: Synthetic oligonucleotide
  Sense strand starting at position 2247 of SEQ ID NO: 1883490
cucugaauugggugacauu

SEQ ID NO: 2197521 - RNA, 19 nt, Artificial Sequence
  Description of Artificial Sequence: Synthetic oligonucleotide
  Antisense strand to SEQ ID NO: 2197520
aaugucacccaauucagag

SEQ ID NO: 2197522 - RNA, 19 nt, Artificial Sequence
  Description of Artificial Sequence: Synthetic oligonucleotide
  Sense strand starting at position 243 of SEQ ID NO: 1883490
aguccugagccaggagaau

SEQ ID NO: 2197523 - RNA, 19 nt, Artificial Sequence
  Description of Artificial Sequence: Synthetic oligonucleotide
  Antisense strand to SEQ ID NO: 2197522
auucuccuggcucaggacu

SEQ ID NO: 2197524 - RNA, 19 nt, Artificial Sequence
  Description of Artificial Sequence: Synthetic oligonucleotide
  Sense strand starting at position 3671 of SEQ ID NO: 1883490
gcaagaucacauggcacaa

SEQ ID NO: 2197525 - RNA, 19 nt, Artificial Sequence
  Description of Artificial Sequence: Synthetic oligonucleotide
  Antisense strand to SEQ ID NO: 2197524
uugugccaugugaucuugc

SEQ ID NO: 2197526 - RNA, 19 nt, Artificial Sequence
  Description of Artificial Sequence: Synthetic oligonucleotide
  Sense strand starting at position 2873 of SEQ ID NO: 1883490
gaugaugucugauuaccuu

SEQ ID NO: 2197527 - RNA, 19 nt, Artificial Sequence
  Description of Artificial Sequence: Synthetic oligonucleotide
  Antisense strand to SEQ ID NO: 2197526
aagguaaucagacaucauc

SEQ ID NO: 2197528 - RNA, 19 nt, Artificial Sequence
  Description of Artificial Sequence: Synthetic oligonucleotide
  Sense strand starting at position 2478 of SEQ ID NO: 1883490
ugcuguguacacuaaauga

SEQ ID NO: 2197529 - RNA, 19 nt, Artificial Sequence
  Description of Artificial Sequence: Synthetic oligonucleotide
  Antisense strand to SEQ ID NO: 2197528
ucauuuaguguacacagca

SEQ ID NO: 2197530 - RNA, 19 nt, Artificial Sequence
  Description of Artificial Sequence: Synthetic oligonucleotide
  Sense strand starting at position 3400 of SEQ ID NO: 1883490
aggccuuacagcugaggaa

SEQ ID NO: 2197531 - RNA, 19 nt, Artificial Sequence
  Description of Artificial Sequence: Synthetic oligonucleotide
  Antisense strand to SEQ ID NO: 2197530
uuccucagcuguaaggccu

SEQ ID NO: 2197532 - RNA, 19 nt, Artificial Sequence
  Description of Artificial Sequence: Synthetic oligonucleotide
  Sense strand starting at position 1669 of SEQ ID NO: 1883490
agggcccauucucuaauau

SEQ ID NO: 2197533 - RNA, 19 nt, Artificial Sequence
  Description of Artificial Sequence: Synthetic oligonucleotide
  Antisense strand to SEQ ID NO: 2197532
auauuagagaaugggcccu

SEQ ID NO: 2197534 - RNA, 19 nt, Artificial Sequence
  Description of Artificial Sequence: Synthetic oligonucleotide
  Sense strand starting at position 439 of SEQ ID NO: 1883490
gaucaaggucucugaaguu

SEQ ID NO: 2197535 - RNA, 19 nt, Artificial Sequence
  Description of Artificial Sequence: Synthetic oligonucleotide
  Antisense strand to SEQ ID NO: 2197534
aacuucagagaccuugauc

SEQ ID NO: 2197536 - RNA, 19 nt, Artificial Sequence
  Description of Artificial Sequence: Synthetic oligonucleotide
  Sense strand starting at position 1063 of SEQ ID NO: 1883490
aguaauaacuguguaacua

SEQ ID NO: 2197537 - RNA, 19 nt, Artificial Sequence
  Description of Artificial Sequence: Synthetic oligonucleotide
  Antisense strand to SEQ ID NO: 2197536
uaguuacacaguuauuacu

SEQ ID NO: 2197538 - RNA, 19 nt, Artificial Sequence
  Description of Artificial Sequence: Synthetic oligonucleotide
  Sense strand starting at position 2908 of SEQ ID NO: 1883490
gaauccuguuagguauauu

SEQ ID NO: 2197539 - RNA, 19 nt, Artificial Sequence
  Description of Artificial Sequence: Synthetic oligonucleotide
  Antisense strand to SEQ ID NO: 2197538
aauauaccuaacaggauuc

SEQ ID NO: 2197540 - RNA, 19 nt, Artificial Sequence
  Description of Artificial Sequence: Synthetic oligonucleotide
  Sense strand starting at position 2629 of SEQ ID NO: 1883490
aaucccuaucucggaggua

SEQ ID NO: 2197541 - RNA, 19 nt, Artificial Sequence
  Description of Artificial Sequence: Synthetic oligonucleotide
  Antisense strand to SEQ ID NO: 2197540
uaccuccgagauagggauu

SEQ ID NO: 2197542 - RNA, 19 nt, Artificial Sequence
  Description of Artificial Sequence: Synthetic oligonucleotide
  Sense strand starting at position 2537 of SEQ ID NO: 1883490
auaagaugcguguacugau

SEQ ID NO: 2197543 - RNA, 19 nt, Artificial Sequence
  Description of Artificial Sequence: Synthetic oligonucleotide
  Antisense strand to SEQ ID NO: 2197542
aucaguacacgcaucuuau

SEQ ID NO: 2197544 - RNA, 19 nt, Artificial Sequence
  Description of Artificial Sequence: Synthetic oligonucleotide
  Sense strand starting at position 661 of SEQ ID NO: 1883490
cuuguuaauagcgaaggua

SEQ ID NO: 2197545 - RNA, 19 nt, Artificial Sequence
  Description of Artificial Sequence: Synthetic oligonucleotide
  Antisense strand to SEQ ID NO: 2197544
uaccuucgcuauuaacaag

SEQ ID NO: 2197546 - RNA, 19 nt, Artificial Sequence
  Description of Artificial Sequence: Synthetic oligonucleotide
  Sense strand starting at position 618 of SEQ ID NO: 1883490
aaagcucagugucugauaa

SEQ ID NO: 2197547 - RNA, 19 nt, Artificial Sequence
  Description of Artificial Sequence: Synthetic oligonucleotide
  Antisense strand to SEQ ID NO: 2197546
uuaucagacacugagcuuu

SEQ ID NO: 2197548 - RNA, 19 nt, Artificial Sequence
  Description of Artificial Sequence: Synthetic oligonucleotide
  Sense strand starting at position 2841 of SEQ ID NO: 1883490
ugaucagguuccuuauucu

SEQ ID NO: 2197549 - RNA, 19 nt, Artificial Sequence
  Description of Artificial Sequence: Synthetic oligonucleotide
  Antisense strand to SEQ ID NO: 2197548
agaauaaggaaccugauca

SEQ ID NO: 2197550 - RNA, 19 nt, Artificial Sequence
  Description of Artificial Sequence: Synthetic oligonucleotide
  Sense strand starting at position 619 of SEQ ID NO: 1883490
aagcucagugucugauaaa

SEQ ID NO: 2197551 - RNA, 19 nt, Artificial Sequence
  Description of Artificial Sequence: Synthetic oligonucleotide
  Antisense strand to SEQ ID NO: 2197550
uuuaucagacacugagcuu

SEQ ID NO: 2197552 - RNA, 19 nt, Artificial Sequence
  Description of Artificial Sequence: Synthetic oligonucleotide
  Sense strand starting at position 3072 of SEQ ID NO: 1883490
ugcagugagcucuauauac

SEQ ID NO: 2197553 - RNA, 19 nt, Artificial Sequence
  Description of Artificial Sequence: Synthetic oligonucleotide
  Antisense strand to SEQ ID NO: 2197552
guauauagagcucacugca

SEQ ID NO: 2197554 - RNA, 19 nt, Artificial Sequence
  Description of Artificial Sequence: Synthetic oligonucleotide
  Sense strand starting at position 2475 of SEQ ID NO: 1883490
uagugcuguguacacuaaa

SEQ ID NO: 2197555 - RNA, 19 nt, Artificial Sequence
  Description of Artificial Sequence: Synthetic oligonucleotide
  Antisense strand to SEQ ID NO: 2197554
uuuaguguacacagcacua

SEQ ID NO: 2197556 - RNA, 19 nt, Artificial Sequence
  Description of Artificial Sequence: Synthetic oligonucleotide
  Sense strand starting at position 2819 of SEQ ID NO: 1883490
uuaugugguuauucucaau

SEQ ID NO: 2197557 - RNA, 19 nt, Artificial Sequence
  Description of Artificial Sequence: Synthetic oligonucleotide
  Antisense strand to SEQ ID NO: 2197556
auugagaauaaccacauaa

SEQ ID NO: 2197558 - RNA, 19 nt, Artificial Sequence
  Description of Artificial Sequence: Synthetic oligonucleotide
  Sense strand starting at position 2308 of SEQ ID NO: 1883490
gcuucucgauacuccauaa

SEQ ID NO: 2197559 - RNA, 19 nt, Artificial Sequence
  Description of Artificial Sequence: Synthetic oligonucleotide
  Antisense strand to SEQ ID NO: 2197558
uuauggaguaucgagaagc

SEQ ID NO: 2197560 - RNA, 19 nt, Artificial Sequence
  Description of Artificial Sequence: Synthetic oligonucleotide
  Sense strand starting at position 3651 of SEQ ID NO: 1883490
guguauuaguggccagaaa

SEQ ID NO: 2197561 - RNA, 19 nt, Artificial Sequence
  Description of Artificial Sequence: Synthetic oligonucleotide
  Antisense strand to SEQ ID NO: 2197560
uuucuggccacuaauacac

SEQ ID NO: 2197562 - RNA, 19 nt, Artificial Sequence
  Description of Artificial Sequence: Synthetic oligonucleotide
  Sense strand starting at position 3637 of SEQ ID NO: 1883490
guccauugucuauagugua

SEQ ID NO: 2197563 - RNA, 19 nt, Artificial Sequence
  Description of Artificial Sequence: Synthetic oligonucleotide
  Antisense strand to SEQ ID NO: 2197562
uacacuauagacaauggac

SEQ ID NO: 2197564 - RNA, 19 nt, Artificial Sequence
  Description of Artificial Sequence: Synthetic oligonucleotide
  Sense strand starting at position 3642 of SEQ ID NO: 1883490
uugucuauaguguauuagu

SEQ ID NO: 2197565 - RNA, 19 nt, Artificial Sequence
  Description of Artificial Sequence: Synthetic oligonucleotide
  Antisense strand to SEQ ID NO: 2197564
acuaauacacuauagacaa

SEQ ID NO: 2197566 - RNA, 19 nt, Artificial Sequence
  Description of Artificial Sequence: Synthetic oligonucleotide
  Sense strand starting at position 2237 of SEQ ID NO: 1883490
gccucacagucucugaauu

SEQ ID NO: 2197567 - RNA, 19 nt, Artificial Sequence
  Description of Artificial Sequence: Synthetic oligonucleotide
  Antisense strand to SEQ ID NO: 2197566
aauucagagacugugaggc

SEQ ID NO: 2197568 - RNA, 19 nt, Artificial Sequence
  Description of Artificial Sequence: Synthetic oligonucleotide
  Sense strand starting at position 2597 of SEQ ID NO: 1883489
acagcaauuccagaaaguu

SEQ ID NO: 2197569 - RNA, 19 nt, Artificial Sequence
  Description of Artificial Sequence: Synthetic oligonucleotide
  Antisense strand to SEQ ID NO: 2197568
aacuuucuggaauugcugu

SEQ ID NO: 2197570 - RNA, 19 nt, Artificial Sequence
  Description of Artificial Sequence: Synthetic oligonucleotide
  Sense strand starting at position 3590 of SEQ ID NO: 1883489
uggauuggaucauucuaau

SEQ ID NO: 2197571 - RNA, 19 nt, Artificial Sequence
  Description of Artificial Sequence: Synthetic oligonucleotide
  Antisense strand to SEQ ID NO: 2197570
auuagaaugauccaaucca

SEQ ID NO: 2197572 - RNA, 19 nt, Artificial Sequence
  Description of Artificial Sequence: Synthetic oligonucleotide
  Sense strand starting at position 2861 of SEQ ID NO: 1883489
gguuauucucaauaucuga

SEQ ID NO: 2197573 - RNA, 19 nt, Artificial Sequence
  Description of Artificial Sequence: Synthetic oligonucleotide
  Antisense strand to SEQ ID NO: 2197572
ucagauauugagaauaacc

SEQ ID NO: 2197574 - RNA, 19 nt, Artificial Sequence
  Description of Artificial Sequence: Synthetic oligonucleotide
  Sense strand starting at position 3105 of SEQ ID NO: 1883489
cguugcagugagcucuaua

SEQ ID NO: 2197575 - RNA, 19 nt, Artificial Sequence
  Description of Artificial Sequence: Synthetic oligonucleotide
  Antisense strand to SEQ ID NO: 2197574
uauagagcucacugcaacg

SEQ ID NO: 2197576 - RNA, 19 nt, Artificial Sequence
  Description of Artificial Sequence: Synthetic oligonucleotide
  Sense strand starting at position 641 of SEQ ID NO: 1883489
ggacaaaguauguaaagcu

SEQ ID NO: 2197577 - RNA, 19 nt, Artificial Sequence
  Description of Artificial Sequence: Synthetic oligonucleotide
  Antisense strand to SEQ ID NO: 2197576
agcuuuacauacuuugucc

SEQ ID NO: 2197578 - RNA, 19 nt, Artificial Sequence
  Description of Artificial Sequence: Synthetic oligonucleotide
  Sense strand starting at position 1103 of SEQ ID NO: 1883489
auaacuguguaacuaagaa

SEQ ID NO: 2197579 - RNA, 19 nt, Artificial Sequence
  Description of Artificial Sequence: Synthetic oligonucleotide
  Antisense strand to SEQ ID NO: 2197578
uucuuaguuacacaguuau

SEQ ID NO: 2197580 - RNA, 19 nt, Artificial Sequence
  Description of Artificial Sequence: Synthetic oligonucleotide
  Sense strand starting at position 2605 of SEQ ID NO: 1883489
uccagaaaguucccuaaga

SEQ ID NO: 2197581 - RNA, 19 nt, Artificial Sequence
  Description of Artificial Sequence: Synthetic oligonucleotide
  Antisense strand to SEQ ID NO: 2197580
ucuuagggaacuuucugga

SEQ ID NO: 2197582 - RNA, 19 nt, Artificial Sequence
  Description of Artificial Sequence: Synthetic oligonucleotide
  Sense strand starting at position 2471 of SEQ ID NO: 1883489
aaagaauggagcgguaaga

SEQ ID NO: 2197583 - RNA, 19 nt, Artificial Sequence
  Description of Artificial Sequence: Synthetic oligonucleotide
  Antisense strand to SEQ ID NO: 2197582
ucuuaccgcuccauucuuu

SEQ ID NO: 2197584 - RNA, 19 nt, Artificial Sequence
  Description of Artificial Sequence: Synthetic oligonucleotide
  Sense strand starting at position 1100 of SEQ ID NO: 1883489
guaauaacuguguaacuaa

SEQ ID NO: 2197585 - RNA, 19 nt, Artificial Sequence
  Description of Artificial Sequence: Synthetic oligonucleotide
  Antisense strand to SEQ ID NO: 2197584
uuaguuacacaguuauuac

SEQ ID NO: 2197586 - RNA, 19 nt, Artificial Sequence
  Description of Artificial Sequence: Synthetic oligonucleotide
  Sense strand starting at position 2074 of SEQ ID NO: 1883489
gcuguaucgcgaccaguga

SEQ ID NO: 2197587 - RNA, 19 nt, Artificial Sequence
  Description of Artificial Sequence: Synthetic oligonucleotide
  Antisense strand to SEQ ID NO: 2197586
ucacuggucgcgauacagc

SEQ ID NO: 2197588 - RNA, 19 nt, Artificial Sequence
  Description of Artificial Sequence: Synthetic oligonucleotide
  Sense strand starting at position 3363 of SEQ ID NO: 1883489
agagaagaugcagguuuau

SEQ ID NO: 2197589 - RNA, 19 nt, Artificial Sequence
  Description of Artificial Sequence: Synthetic oligonucleotide
  Antisense strand to SEQ ID NO: 2197588
auaaaccugcaucuucucu

SEQ ID NO: 2197590 - RNA, 19 nt, Artificial Sequence
  Description of Artificial Sequence: Synthetic oligonucleotide
  Sense strand starting at position 3437 of SEQ ID NO: 1883489
ggccuuacagcugaggaau

SEQ ID NO: 2197591 - RNA, 19 nt, Artificial Sequence
  Description of Artificial Sequence: Synthetic oligonucleotide
  Antisense strand to SEQ ID NO: 2197590
auuccucagcuguaaggcc

SEQ ID NO: 2197592 - RNA, 19 nt, Artificial Sequence
  Description of Artificial Sequence: Synthetic oligonucleotide
  Sense strand starting at position 3919 of SEQ ID NO: 1883489
ggcggaacucgccuguagu

SEQ ID NO: 2197593 - RNA, 19 nt, Artificial Sequence
  Description of Artificial Sequence: Synthetic oligonucleotide
  Antisense strand to SEQ ID NO: 2197592
acuacaggcgaguuccgcc

SEQ ID NO: 2197594 - RNA, 19 nt, Artificial Sequence
  Description of Artificial Sequence: Synthetic oligonucleotide
  Sense strand starting at position 2739 of SEQ ID NO: 1883489
ugaauuagguuucugaauu

SEQ ID NO: 2197595 - RNA, 19 nt, Artificial Sequence
  Description of Artificial Sequence: Synthetic oligonucleotide
  Antisense strand to SEQ ID NO: 2197594
aauucagaaaccuaauuca

SEQ ID NO: 2197596 - RNA, 19 nt, Artificial Sequence
  Description of Artificial Sequence: Synthetic oligonucleotide
  Sense strand starting at position 1706 of SEQ ID NO: 1883489
gggcccauucucuaauauu

SEQ ID NO: 2197597 - RNA, 19 nt, Artificial Sequence
  Description of Artificial Sequence: Synthetic oligonucleotide
  Antisense strand to SEQ ID NO: 2197596
aauauuagagaaugggccc

SEQ ID NO: 2197598 - RNA, 19 nt, Artificial Sequence
  Description of Artificial Sequence: Synthetic oligonucleotide
  Sense strand starting at position 474 of SEQ ID NO: 1883489
agaucaaggucucugaagu

SEQ ID NO: 2197599 - RNA, 19 nt, Artificial Sequence
  Description of Artificial Sequence: Synthetic oligonucleotide
  Antisense strand to SEQ ID NO: 2197598
acuucagagaccuugaucu

SEQ ID NO: 2197600 - RNA, 19 nt, Artificial Sequence
  Description of Artificial Sequence: Synthetic oligonucleotide
  Sense strand starting at position 2283 of SEQ ID NO: 1883489
cucugaauugggugacauu

SEQ ID NO: 2197601 - RNA, 19 nt, Artificial Sequence
  Description of Artificial Sequence: Synthetic oligonucleotide
  Antisense strand to SEQ ID NO: 2197600
aaugucacccaauucagag

SEQ ID NO: 2197602 - RNA, 19 nt, Artificial Sequence
  Description of Artificial Sequence: Synthetic oligonucleotide
  Sense strand starting at position 279 of SEQ ID NO: 1883489
aguccugagccaggagaau

SEQ ID NO: 2197603 - RNA, 19 nt, Artificial Sequence
  Description of Artificial Sequence: Synthetic oligonucleotide
  Antisense strand to SEQ ID NO: 2197602
auucuccuggcucaggacu

SEQ ID NO: 2197604 - RNA, 19 nt, Artificial Sequence
  Description of Artificial Sequence: Synthetic oligonucleotide
  Sense strand starting at position 3707 of SEQ ID NO: 1883489
gcaagaucacauggcacaa

SEQ ID NO: 2197605 - RNA, 19 nt, Artificial Sequence
  Description of Artificial Sequence: Synthetic oligonucleotide
  Antisense strand to SEQ ID NO: 2197604
uugugccaugugaucuugc

SEQ ID NO: 2197606 - RNA, 19 nt, Artificial Sequence
  Description of Artificial Sequence: Synthetic oligonucleotide
  Sense strand starting at position 2909 of SEQ ID NO: 1883489
gaugaugucugauuaccuu

SEQ ID NO: 2197607 - RNA, 19 nt, Artificial Sequence
  Description of Artificial Sequence: Synthetic oligonucleotide
  Antisense strand to SEQ ID NO: 2197606
aagguaaucagacaucauc

SEQ ID NO: 2197608 - RNA, 19 nt, Artificial Sequence
  Description of Artificial Sequence: Synthetic oligonucleotide
  Sense strand starting at position 2514 of SEQ ID NO: 1883489
ugcuguguacacuaaauga

SEQ ID NO: 2197609 - RNA, 19 nt, Artificial Sequence
  Description of Artificial Sequence: Synthetic oligonucleotide
  Antisense strand to SEQ ID NO: 2197608
ucauuuaguguacacagca

SEQ ID NO: 2197610 - RNA, 19 nt, Artificial Sequence
  Description of Artificial Sequence: Synthetic oligonucleotide
  Sense strand starting at position 3436 of SEQ ID NO: 1883489
aggccuuacagcugaggaa

SEQ ID NO: 2197611 - RNA, 19 nt, Artificial Sequence
  Description of Artificial Sequence: Synthetic oligonucleotide
  Antisense strand to SEQ ID NO: 2197610
uuccucagcuguaaggccu

SEQ ID NO: 2197612 - RNA, 19 nt, Artificial Sequence
  Description of Artificial Sequence: Synthetic oligonucleotide
  Sense strand starting at position 1705 of SEQ ID NO: 1883489
agggcccauucucuaauau

SEQ ID NO: 2197613 - RNA, 19 nt, Artificial Sequence
  Description of Artificial Sequence: Synthetic oligonucleotide
  Antisense strand to SEQ ID NO: 2197612
auauuagagaaugggcccu

SEQ ID NO: 2197614 - RNA, 19 nt, Artificial Sequence
  Description of Artificial Sequence: Synthetic oligonucleotide
  Sense strand starting at position 475 of SEQ ID NO: 1883489
gaucaaggucucugaaguu

SEQ ID NO: 2197615 - RNA, 19 nt, Artificial Sequence
  Description of Artificial Sequence: Synthetic oligonucleotide
  Antisense strand to SEQ ID NO: 2197614
aacuucagagaccuugauc

SEQ ID NO: 2197616 - RNA, 19 nt, Artificial Sequence
  Description of Artificial Sequence: Synthetic oligonucleotide
  Sense strand starting at position 1099 of SEQ ID NO: 1883489
aguaauaacuguguaacua

SEQ ID NO: 2197617 - RNA, 19 nt, Artificial Sequence
  Description of Artificial Sequence: Synthetic oligonucleotide
  Antisense strand to SEQ ID NO: 2197616
uaguuacacaguuauuacu

SEQ ID NO: 2197618 - RNA, 19 nt, Artificial Sequence
  Description of Artificial Sequence: Synthetic oligonucleotide
  Sense strand starting at position 2944 of SEQ ID NO: 1883489
gaauccuguuagguauauu

SEQ ID NO: 2197619 - RNA, 19 nt, Artificial Sequence
  Description of Artificial Sequence: Synthetic oligonucleotide
  Antisense strand to SEQ ID NO: 2197618
aauauaccuaacaggauuc

SEQ ID NO: 2197620 - RNA, 19 nt, Artificial Sequence
  Description of Artificial Sequence: Synthetic oligonucleotide
  Sense strand starting at position 2665 of SEQ ID NO: 1883489
aaucccuaucucggaggua

SEQ ID NO: 2197621 - RNA, 19 nt, Artificial Sequence
  Description of Artificial Sequence: Synthetic oligonucleotide
  Antisense strand to SEQ ID NO: 2197620
uaccuccgagauagggauu

SEQ ID NO: 2197622 - RNA, 19 nt, Artificial Sequence
  Description of Artificial Sequence: Synthetic oligonucleotide
  Sense strand starting at position 2573 of SEQ ID NO: 1883489
auaagaugcguguacugau

SEQ ID NO: 2197623 - RNA, 19 nt, Artificial Sequence
  Description of Artificial Sequence: Synthetic oligonucleotide
  Antisense strand to SEQ ID NO: 2197622
aucaguacacgcaucuuau

SEQ ID NO: 2197624 - RNA, 19 nt, Artificial Sequence
  Description of Artificial Sequence: Synthetic oligonucleotide
  Sense strand starting at position 697 of SEQ ID NO: 1883489
cuuguuaauagcgaaggua

SEQ ID NO: 2197625 - RNA, 19 nt, Artificial Sequence
  Description of Artificial Sequence: Synthetic oligonucleotide
  Antisense strand to SEQ ID NO: 2197624
uaccuucgcuauuaacaag

SEQ ID NO: 2197626 - RNA, 19 nt, Artificial Sequence
  Description of Artificial Sequence: Synthetic oligonucleotide
  Sense strand starting at position 654 of SEQ ID NO: 1883489
aaagcucagugucugauaa

SEQ ID NO: 2197627 - RNA, 19 nt, Artificial Sequence
  Description of Artificial Sequence: Synthetic oligonucleotide
  Antisense strand to SEQ ID NO: 2197626
uuaucagacacugagcuuu

SEQ ID NO: 2197628 - RNA, 19 nt, Artificial Sequence
  Description of Artificial Sequence: Synthetic oligonucleotide
  Sense strand starting at position 2877 of SEQ ID NO: 1883489
ugaucagguuccuuauucu

SEQ ID NO: 2197629 - RNA, 19 nt, Artificial Sequence
  Description of Artificial Sequence: Synthetic oligonucleotide
  Antisense strand to SEQ ID NO: 2197628
agaauaaggaaccugauca

SEQ ID NO: 2197630 - RNA, 19 nt, Artificial Sequence
  Description of Artificial Sequence: Synthetic oligonucleotide
  Sense strand starting at position 655 of SEQ ID NO: 1883489
aagcucagugucugauaaa

SEQ ID NO: 2197631 - RNA, 19 nt, Artificial Sequence
  Description of Artificial Sequence: Synthetic oligonucleotide
  Antisense strand to SEQ ID NO: 2197630
uuuaucagacacugagcuu

SEQ ID NO: 2197632 - RNA, 19 nt, Artificial Sequence
  Description of Artificial Sequence: Synthetic oligonucleotide
  Sense strand starting at position 3108 of SEQ ID NO: 1883489
ugcagugagcucuauauac

SEQ ID NO: 2197633 - RNA, 19 nt, Artificial Sequence
  Description of Artificial Sequence: Synthetic oligonucleotide
  Antisense strand to SEQ ID NO: 2197632
guauauagagcucacugca

SEQ ID NO: 2197634 - RNA, 19 nt, Artificial Sequence
  Description of Artificial Sequence: Synthetic oligonucleotide
  Sense strand starting at position 2511 of SEQ ID NO: 1883489
uagugcuguguacacuaaa

SEQ ID NO: 2197635 - RNA, 19 nt, Artificial Sequence
  Description of Artificial Sequence: Synthetic oligonucleotide
  Antisense strand to SEQ ID NO: 2197634
uuuaguguacacagcacua

SEQ ID NO: 2197636 - RNA, 19 nt, Artificial Sequence
  Description of Artificial Sequence: Synthetic oligonucleotide
  Sense strand starting at position 2855 of SEQ ID NO: 1883489
uuaugugguuauucucaau

SEQ ID NO: 2197637 - RNA, 19 nt, Artificial Sequence
  Description of Artificial Sequence: Synthetic oligonucleotide
  Antisense strand to SEQ ID NO: 2197636
auugagaauaaccacauaa

SEQ ID NO: 2197638 - RNA, 19 nt, Artificial Sequence
  Description of Artificial Sequence: Synthetic oligonucleotide
  Sense strand starting at position 2344 of SEQ ID NO: 1883489
gcuucucgauacuccauaa

SEQ ID NO: 2197639 - RNA, 19 nt, Artificial Sequence
  Description of Artificial Sequence: Synthetic oligonucleotide
  Antisense strand to SEQ ID NO: 2197638
uuauggaguaucgagaagc

SEQ ID NO: 2197640 - RNA, 19 nt, Artificial Sequence
  Description of Artificial Sequence: Synthetic oligonucleotide
  Sense strand starting at position 3687 of SEQ ID NO: 1883489
guguauuaguggccagaaa

SEQ ID NO: 2197641 - RNA, 19 nt, Artificial Sequence
  Description of Artificial Sequence: Synthetic oligonucleotide
  Antisense strand to SEQ ID NO: 2197640
uuucuggccacuaauacac

SEQ ID NO: 2197642 - RNA, 19 nt, Artificial Sequence
  Description of Artificial Sequence: Synthetic oligonucleotide
  Sense strand starting at position 3673 of SEQ ID NO: 1883489
guccauugucuauagugua

SEQ ID NO: 2197643 - RNA, 19 nt, Artificial Sequence
  Description of Artificial Sequence: Synthetic oligonucleotide
  Antisense strand to SEQ ID NO: 2197642
uacacuauagacaauggac

SEQ ID NO: 2197644 - RNA, 19 nt, Artificial Sequence
  Description of Artificial Sequence: Synthetic oligonucleotide
  Sense strand starting at position 3678 of SEQ ID NO: 1883489
uugucuauaguguauuagu

SEQ ID NO: 2197645 - RNA, 19 nt, Artificial Sequence
  Description of Artificial Sequence: Synthetic oligonucleotide
  Antisense strand to SEQ ID NO: 2197644
acuaauacacuauagacaa

SEQ ID NO: 2197646 - RNA, 19 nt, Artificial Sequence
  Description of Artificial Sequence: Synthetic oligonucleotide
  Sense strand starting at position 2273 of SEQ ID NO: 1883489
gccucacagucucugaauu

SEQ ID NO: 2197647 - RNA, 19 nt, Artificial Sequence
  Description of Artificial Sequence: Synthetic oligonucleotide
  Antisense strand to SEQ ID NO: 2197646
aauucagagacugugaggc

SEQ ID NO: 2197648 - RNA, 19 nt, Artificial Sequence
  Description of Artificial Sequence: Synthetic oligonucleotide
  Sense strand starting at position 3926 of SEQ ID NO: 1883492
uccucugauccaugcauga

SEQ ID NO: 2197649 - RNA, 19 nt, Artificial Sequence
  Description of Artificial Sequence: Synthetic oligonucleotide
  Antisense strand to SEQ ID NO: 2197648
ucaugcauggaucagagga

SEQ ID NO: 2197650 - RNA, 19 nt, Artificial Sequence
  Description of Artificial Sequence: Synthetic oligonucleotide
  Sense strand starting at position 3941 of SEQ ID NO: 1883492
augauuuacuucugugacu

SEQ ID NO: 2197651 - RNA, 19 nt, Artificial Sequence
  Description of Artificial Sequence: Synthetic oligonucleotide
  Antisense strand to SEQ ID NO: 2197650
agucacagaaguaaaucau

SEQ ID NO: 2197652 - RNA, 19 nt, Artificial Sequence
  Description of Artificial Sequence: Synthetic oligonucleotide
  Sense strand starting at position 2227 of SEQ ID NO: 1883493
aguggagacugaguucuga

SEQ ID NO: 2197653 - RNA, 19 nt, Artificial Sequence
  Description of Artificial Sequence: Synthetic oligonucleotide
  Antisense strand to SEQ ID NO: 2197652
ucagaacucagucuccacu

SEQ ID NO: 2197654 - RNA, 19 nt, Artificial Sequence
  Description of Artificial Sequence: Synthetic oligonucleotide
  Sense strand starting at position 3001 of SEQ ID NO: 1883497
gguccuagggcugagauaa

SEQ ID NO: 2197655 - RNA, 19 nt, Artificial Sequence
  Description of Artificial Sequence: Synthetic oligonucleotide
  Antisense strand to SEQ ID NO: 2197654
uuaucucagcccuaggacc

SEQ ID NO: 2197656 - RNA, 19 nt, Artificial Sequence
  Description of Artificial Sequence: Synthetic oligonucleotide
  Sense strand starting at position 876 of SEQ ID NO: 1883497
gugcucggccugucauaaa

SEQ ID NO: 2197657 - RNA, 19 nt, Artificial Sequence
  Description of Artificial Sequence: Synthetic oligonucleotide
  Antisense strand to SEQ ID NO: 2197656
uuuaugacaggccgagcac

SEQ ID NO: 2197658 - RNA, 19 nt, Artificial Sequence
  Description of Artificial Sequence: Synthetic oligonucleotide
  Sense strand starting at position 3075 of SEQ ID NO: 1883497
cuaguaacaguugagacuu

SEQ ID NO: 2197659 - RNA, 19 nt, Artificial Sequence
  Description of Artificial Sequence: Synthetic oligonucleotide
  Antisense strand to SEQ ID NO: 2197658
aagucucaacuguuacuag

SEQ ID NO: 2197660 - RNA, 19 nt, Artificial Sequence
  Description of Artificial Sequence: Synthetic oligonucleotide
  Sense strand starting at position 875 of SEQ ID NO: 1883497
ggugcucggccugucauaa

SEQ ID NO: 2197661 - RNA, 19 nt, Artificial Sequence
  Description of Artificial Sequence: Synthetic oligonucleotide
  Antisense strand to SEQ ID NO: 2197660
uuaugacaggccgagcacc

SEQ ID NO: 2197662 - RNA, 19 nt, Artificial Sequence
  Description of Artificial Sequence: Synthetic oligonucleotide
  Sense strand starting at position 1049 of SEQ ID NO: 1883497
gggugucacccagauugac

SEQ ID NO: 2197663 - RNA, 19 nt, Artificial Sequence
  Description of Artificial Sequence: Synthetic oligonucleotide
  Antisense strand to SEQ ID NO: 2197662
gucaaucugggugacaccc

SEQ ID NO: 2197664 - RNA, 19 nt, Artificial Sequence
  Description of Artificial Sequence: Synthetic oligonucleotide
  Sense strand starting at position 3891 of SEQ ID NO: 1883497
uguuuaauacaugaccgau

SEQ ID NO: 2197665 - RNA, 19 nt, Artificial Sequence
  Description of Artificial Sequence: Synthetic oligonucleotide
  Antisense strand to SEQ ID NO: 2197664
aucggucauguauuaaaca

SEQ ID NO: 2197666 - RNA, 19 nt, Artificial Sequence
  Description of Artificial Sequence: Synthetic oligonucleotide
  Sense strand starting at position 1535 of SEQ ID NO: 1883497
ccagguauucccgccguua

SEQ ID NO: 2197667 - RNA, 19 nt, Artificial Sequence
  Description of Artificial Sequence: Synthetic oligonucleotide
  Antisense strand to SEQ ID NO: 2197666
uaacggcgggaauaccugg

SEQ ID NO: 2197668 - RNA, 19 nt, Artificial Sequence
  Description of Artificial Sequence: Synthetic oligonucleotide
  Sense strand starting at position 3798 of SEQ ID NO: 1883497
uguuguuuccuguuuagcu

SEQ ID NO: 2197669 - RNA, 19 nt, Artificial Sequence
  Description of Artificial Sequence: Synthetic oligonucleotide
  Antisense strand to SEQ ID NO: 2197668
agcuaaacaggaaacaaca

SEQ ID NO: 2197670 - RNA, 19 nt, Artificial Sequence
  Description of Artificial Sequence: Synthetic oligonucleotide
  Sense strand starting at position 3436 of SEQ ID NO: 1883497
gugcaagaccuuuagauca

SEQ ID NO: 2197671 - RNA, 19 nt, Artificial Sequence
  Description of Artificial Sequence: Synthetic oligonucleotide
  Antisense strand to SEQ ID NO: 2197670
ugaucuaaaggucuugcac

SEQ ID NO: 2197672 - RNA, 19 nt, Artificial Sequence
  Description of Artificial Sequence: Synthetic oligonucleotide
  Sense strand starting at position 1010 of SEQ ID NO: 1883497
uugagauaauucuccggag

SEQ ID NO: 2197673 - RNA, 19 nt, Artificial Sequence
  Description of Artificial Sequence: Synthetic oligonucleotide
  Antisense strand to SEQ ID NO: 2197672
cuccggagaauuaucucaa

SEQ ID NO: 2197674 - RNA, 19 nt, Artificial Sequence
  Description of Artificial Sequence: Synthetic oligonucleotide
  Sense strand starting at position 3375 of SEQ ID NO: 1883497
ggagaagacguguagugau

SEQ ID NO: 2197675 - RNA, 19 nt, Artificial Sequence
  Description of Artificial Sequence: Synthetic oligonucleotide
  Antisense strand to SEQ ID NO: 2197674
aucacuacacgucuucucc

SEQ ID NO: 2197676 - RNA, 19 nt, Artificial Sequence
  Description of Artificial Sequence: Synthetic oligonucleotide
  Sense strand starting at position 896 of SEQ ID NO: 1883497
ggacuuaggcuuugacaga

SEQ ID NO: 2197677 - RNA, 19 nt, Artificial Sequence
  Description of Artificial Sequence: Synthetic oligonucleotide
  Antisense strand to SEQ ID NO: 2197676
ucugucaaagccuaagucc

SEQ ID NO: 2197678 - RNA, 19 nt, Artificial Sequence
  Description of Artificial Sequence: Synthetic oligonucleotide
  Sense strand starting at position 1817 of SEQ ID NO: 1883497
uagaaugagacauguguug

SEQ ID NO: 2197679 - RNA, 19 nt, Artificial Sequence
  Description of Artificial Sequence: Synthetic oligonucleotide
  Antisense strand to SEQ ID NO: 2197678
caacacaugucucauucua

SEQ ID NO: 2197680 - RNA, 19 nt, Artificial Sequence
  Description of Artificial Sequence: Synthetic oligonucleotide
  Sense strand starting at position 634 of SEQ ID NO: 1883497
cugugauggagccaaguaa

SEQ ID NO: 2197681 - RNA, 19 nt, Artificial Sequence
  Description of Artificial Sequence: Synthetic oligonucleotide
  Antisense strand to SEQ ID NO: 2197680
uuacuuggcuccaucacag

SEQ ID NO: 2197682 - RNA, 19 nt, Artificial Sequence
  Description of Artificial Sequence: Synthetic oligonucleotide
  Sense strand starting at position 3897 of SEQ ID NO: 1883497
auacaugaccgaugagcaa

SEQ ID NO: 2197683 - RNA, 19 nt, Artificial Sequence
  Description of Artificial Sequence: Synthetic oligonucleotide
  Antisense strand to SEQ ID NO: 2197682
uugcucaucggucauguau

SEQ ID NO: 2197684 - RNA, 19 nt, Artificial Sequence
  Description of Artificial Sequence: Synthetic oligonucleotide
  Sense strand starting at position 2637 of SEQ ID NO: 1883497
cuuuguucugaguaggaug

SEQ ID NO: 2197685 - RNA, 19 nt, Artificial Sequence
  Description of Artificial Sequence: Synthetic oligonucleotide
  Antisense strand to SEQ ID NO: 2197684
cauccuacucagaacaaag

SEQ ID NO: 2197686 - RNA, 19 nt, Artificial Sequence
  Description of Artificial Sequence: Synthetic oligonucleotide
  Sense strand starting at position 999 of SEQ ID NO: 1883497
cuaugcuggacuugagaua

SEQ ID NO: 2197687 - RNA, 19 nt, Artificial Sequence
  Description of Artificial Sequence: Synthetic oligonucleotide
  Antisense strand to SEQ ID NO: 2197686
uaucucaaguccagcauag

SEQ ID NO: 2197688 - RNA, 19 nt, Artificial Sequence
  Description of Artificial Sequence: Synthetic oligonucleotide
  Sense strand starting at position 2648 of SEQ ID NO: 1883497
guaggauggcaccaucuuu

SEQ ID NO: 2197689 - RNA, 19 nt, Artificial Sequence
  Description of Artificial Sequence: Synthetic oligonucleotide
  Antisense strand to SEQ ID NO: 2197688
aaagauggugccauccuac

SEQ ID NO: 2197690 - RNA, 19 nt, Artificial Sequence
  Description of Artificial Sequence: Synthetic oligonucleotide
  Sense strand starting at position 512 of SEQ ID NO: 1883497
cggcccagucaacaaauau

SEQ ID NO: 2197691 - RNA, 19 nt, Artificial Sequence
  Description of Artificial Sequence: Synthetic oligonucleotide
  Antisense strand to SEQ ID NO: 2197690
auauuuguugacugggccg

SEQ ID NO: 2197692 - RNA, 19 nt, Artificial Sequence
  Description of Artificial Sequence: Synthetic oligonucleotide
  Sense strand starting at position 2898 of SEQ ID NO: 1883497
ggaagcagcguagagauua

SEQ ID NO: 2197693 - RNA, 19 nt, Artificial Sequence
  Description of Artificial Sequence: Synthetic oligonucleotide
  Antisense strand to SEQ ID NO: 2197692
uaaucucuacgcugcuucc

SEQ ID NO: 2197694 - RNA, 19 nt, Artificial Sequence
  Description of Artificial Sequence: Synthetic oligonucleotide
  Sense strand starting at position 1011 of SEQ ID NO: 1883497
ugagauaauucuccggagu

SEQ ID NO: 2197695 - RNA, 19 nt, Artificial Sequence
  Description of Artificial Sequence: Synthetic oligonucleotide
  Antisense strand to SEQ ID NO: 2197694
acuccggagaauuaucuca

SEQ ID NO: 2197696 - RNA, 19 nt, Artificial Sequence
  Description of Artificial Sequence: Synthetic oligonucleotide
  Sense strand starting at position 3911 of SEQ ID NO: 1883497
agcaaauggcuccagaugu

SEQ ID NO: 2197697 - RNA, 19 nt, Artificial Sequence
  Description of Artificial Sequence: Synthetic oligonucleotide
  Antisense strand to SEQ ID NO: 2197696
acaucuggagccauuugcu

SEQ ID NO: 2197698 - RNA, 19 nt, Artificial Sequence
  Description of Artificial Sequence: Synthetic oligonucleotide
  Sense strand starting at position 1012 of SEQ ID NO: 1883497
gagauaauucuccggaguc

SEQ ID NO: 2197699 - RNA, 19 nt, Artificial Sequence
  Description of Artificial Sequence: Synthetic oligonucleotide
  Antisense strand to SEQ ID NO: 2197698
gacuccggagaauuaucuc

SEQ ID NO: 2197700 - RNA, 19 nt, Artificial Sequence
  Description of Artificial Sequence: Synthetic oligonucleotide
  Sense strand starting at position 3883 of SEQ ID NO: 1883497
guaguagguguuuaauaca

SEQ ID NO: 2197701 - RNA, 19 nt, Artificial Sequence
  Description of Artificial Sequence: Synthetic oligonucleotide
  Antisense strand to SEQ ID NO: 2197700
uguauuaaacaccuacuac

SEQ ID NO: 2197702 - RNA, 19 nt, Artificial Sequence
  Description of Artificial Sequence: Synthetic oligonucleotide
  Sense strand starting at position 3000 of SEQ ID NO: 1883497
ugguccuagggcugagaua

SEQ ID NO: 2197703 - RNA, 19 nt, Artificial Sequence
  Description of Artificial Sequence: Synthetic oligonucleotide
  Antisense strand to SEQ ID NO: 2197702
uaucucagcccuaggacca

SEQ ID NO: 2197704 - RNA, 19 nt, Artificial Sequence
  Description of Artificial Sequence: Synthetic oligonucleotide
  Sense strand starting at position 3382 of SEQ ID NO: 1883497
acguguagugaugaauucu

SEQ ID NO: 2197705 - RNA, 19 nt, Artificial Sequence
  Description of Artificial Sequence: Synthetic oligonucleotide
  Antisense strand to SEQ ID NO: 2197704
agaauucaucacuacacgu

SEQ ID NO: 2197706 - RNA, 19 nt, Artificial Sequence
  Description of Artificial Sequence: Synthetic oligonucleotide
  Sense strand starting at position 2869 of SEQ ID NO: 1883497
aaggauaguuuguuuccuu

SEQ ID NO: 2197707 - RNA, 19 nt, Artificial Sequence
  Description of Artificial Sequence: Synthetic oligonucleotide
  Antisense strand to SEQ ID NO: 2197706
aaggaaacaaacuauccuu

SEQ ID NO: 2197708 - RNA, 19 nt, Artificial Sequence
  Description of Artificial Sequence: Synthetic oligonucleotide
  Sense strand starting at position 3890 of SEQ ID NO: 1883497
guguuuaauacaugaccga

SEQ ID NO: 2197709 - RNA, 19 nt, Artificial Sequence
  Description of Artificial Sequence: Synthetic oligonucleotide
  Antisense strand to SEQ ID NO: 2197708
ucggucauguauuaaacac

SEQ ID NO: 2197710 - RNA, 19 nt, Artificial Sequence
  Description of Artificial Sequence: Synthetic oligonucleotide
  Sense strand starting at position 1726 of SEQ ID NO: 1883497
cggcgaaaucaaagugcgu

SEQ ID NO: 2197711 - RNA, 19 nt, Artificial Sequence
  Description of Artificial Sequence: Synthetic oligonucleotide
  Antisense strand to SEQ ID NO: 2197710
acgcacuuugauuucgccg

SEQ ID NO: 2197712 - RNA, 19 nt, Artificial Sequence
  Description of Artificial Sequence: Synthetic oligonucleotide
  Sense strand starting at position 158 of SEQ ID NO: 1883497
ggauguuugcuuggugaag

SEQ ID NO: 2197713 - RNA, 19 nt, Artificial Sequence
  Description of Artificial Sequence: Synthetic oligonucleotide
  Antisense strand to SEQ ID NO: 2197712
cuucaccaagcaaacaucc

SEQ ID NO: 2197714 - RNA, 19 nt, Artificial Sequence
  Description of Artificial Sequence: Synthetic oligonucleotide
  Sense strand starting at position 3828 of SEQ ID NO: 1883497
guuagauaacuuggccagu

SEQ ID NO: 2197715 - RNA, 19 nt, Artificial Sequence
  Description of Artificial Sequence: Synthetic oligonucleotide
  Antisense strand to SEQ ID NO: 2197714
acuggccaaguuaucuaac

SEQ ID NO: 2197716 - RNA, 19 nt, Artificial Sequence
  Description of Artificial Sequence: Synthetic oligonucleotide
  Sense strand starting at position 943 of SEQ ID NO: 1883497
gaagguucccuuggcacuu

SEQ ID NO: 2197717 - RNA, 19 nt, Artificial Sequence
  Description of Artificial Sequence: Synthetic oligonucleotide
  Antisense strand to SEQ ID NO: 2197716
aagugccaagggaaccuuc

SEQ ID NO: 2197718 - RNA, 19 nt, Artificial Sequence
  Description of Artificial Sequence: Synthetic oligonucleotide
  Sense strand starting at position 3038 of SEQ ID NO: 1883497
acugucagcguagaaguau

SEQ ID NO: 2197719 - RNA, 19 nt, Artificial Sequence
  Description of Artificial Sequence: Synthetic oligonucleotide
  Antisense strand to SEQ ID NO: 2197718
auacuucuacgcugacagu

SEQ ID NO: 2197720 - RNA, 19 nt, Artificial Sequence
  Description of Artificial Sequence: Synthetic oligonucleotide
  Sense strand starting at position 15 of SEQ ID NO: 1883497
accugaagucugcaguguu

SEQ ID NO: 2197721 - RNA, 19 nt, Artificial Sequence
  Description of Artificial Sequence: Synthetic oligonucleotide
  Antisense strand to SEQ ID NO: 2197720
aacacugcagacuucaggu

SEQ ID NO: 2197722 - RNA, 19 nt, Artificial Sequence
  Description of Artificial Sequence: Synthetic oligonucleotide
  Sense strand starting at position 931 of SEQ ID NO: 1883497
aaagaaaccugggaagguu

SEQ ID NO: 2197723 - RNA, 19 nt, Artificial Sequence
  Description of Artificial Sequence: Synthetic oligonucleotide
  Antisense strand to SEQ ID NO: 2197722
aaccuucccagguuucuuu

SEQ ID NO: 2197724 - RNA, 19 nt, Artificial Sequence
  Description of Artificial Sequence: Synthetic oligonucleotide
  Sense strand starting at position 1245 of SEQ ID NO: 1883497
gcuacuuggucugcagaaa

SEQ ID NO: 2197725 - RNA, 19 nt, Artificial Sequence
  Description of Artificial Sequence: Synthetic oligonucleotide
  Antisense strand to SEQ ID NO: 2197724
uuucugcagaccaaguagc

SEQ ID NO: 2197726 - RNA, 19 nt, Artificial Sequence
  Description of Artificial Sequence: Synthetic oligonucleotide
  Sense strand starting at position 3820 of SEQ ID NO: 1883497
gaggaaggguuagauaacu

SEQ ID NO: 2197727 - RNA, 19 nt, Artificial Sequence
  Description of Artificial Sequence: Synthetic oligonucleotide
  Antisense strand to SEQ ID NO: 2197726
aguuaucuaacccuuccuc

SEQ ID NO: 2197728 - RNA, 19 nt, Artificial Sequence
  Description of Artificial Sequence: Synthetic oligonucleotide
  Sense strand starting at position 549 of SEQ ID NO: 1883497
gguauuguucuaggcacca

SEQ ID NO: 2197729 - RNA, 19 nt, Artificial Sequence
  Description of Artificial Sequence: Synthetic oligonucleotide
  Antisense strand to SEQ ID NO: 2197728
uggugccuagaacaauacc

SEQ ID NO: 2197730 - RNA, 19 nt, Artificial Sequence
  Description of Artificial Sequence: Synthetic oligonucleotide
  Sense strand starting at position 1244 of SEQ ID NO: 1883497
ggcuacuuggucugcagaa

SEQ ID NO: 2197731 - RNA, 19 nt, Artificial Sequence
  Description of Artificial Sequence: Synthetic oligonucleotide
  Antisense strand to SEQ ID NO: 2197730
uucugcagaccaaguagcc

SEQ ID NO: 2197732 - RNA, 19 nt, Artificial Sequence
  Description of Artificial Sequence: Synthetic oligonucleotide
  Sense strand starting at position 2988 of SEQ ID NO: 1883497
gcagaaauagugugguccu

SEQ ID NO: 2197733 - RNA, 19 nt, Artificial Sequence
  Description of Artificial Sequence: Synthetic oligonucleotide
  Antisense strand to SEQ ID NO: 2197732
aggaccacacuauuucugc

SEQ ID NO: 2197734 - RNA, 19 nt, Artificial Sequence
  Description of Artificial Sequence: Synthetic oligonucleotide
  Sense strand starting at position 3367 of SEQ ID NO: 1883496
gguccuagggcugagauaa

SEQ ID NO: 2197735 - RNA, 19 nt, Artificial Sequence
  Description of Artificial Sequence: Synthetic oligonucleotide
  Antisense strand to SEQ ID NO: 2197734
uuaucucagcccuaggacc

SEQ ID NO: 2197736 - RNA, 19 nt, Artificial Sequence
  Description of Artificial Sequence: Synthetic oligonucleotide
  Sense strand starting at position 1242 of SEQ ID NO: 1883496
gugcucggccugucauaaa

SEQ ID NO: 2197737 - RNA, 19 nt, Artificial Sequence
  Description of Artificial Sequence: Synthetic oligonucleotide
  Antisense strand to SEQ ID NO: 2197736
uuuaugacaggccgagcac

SEQ ID NO: 2197738 - RNA, 19 nt, Artificial Sequence
  Description of Artificial Sequence: Synthetic oligonucleotide
  Sense strand starting at position 3441 of SEQ ID NO: 1883496
cuaguaacaguugagacuu

SEQ ID NO: 2197739 - RNA, 19 nt, Artificial Sequence
  Description of Artificial Sequence: Synthetic oligonucleotide
  Antisense strand to SEQ ID NO: 2197738
aagucucaacuguuacuag

SEQ ID NO: 2197740 - RNA, 19 nt, Artificial Sequence
  Description of Artificial Sequence: Synthetic oligonucleotide
  Sense strand starting at position 1241 of SEQ ID NO: 1883496
ggugcucggccugucauaa

SEQ ID NO: 2197741 - RNA, 19 nt, Artificial Sequence
  Description of Artificial Sequence: Synthetic oligonucleotide
  Antisense strand to SEQ ID NO: 2197740
uuaugacaggccgagcacc

SEQ ID NO: 2197742 - RNA, 19 nt, Artificial Sequence
  Description of Artificial Sequence: Synthetic oligonucleotide
  Sense strand starting at position 72 of SEQ ID NO: 1883496
ugggaaauggauugucacu

SEQ ID NO: 2197743 - RNA, 19 nt, Artificial Sequence
  Description of Artificial Sequence: Synthetic oligonucleotide
  Antisense strand to SEQ ID NO: 2197742
agugacaauccauuuccca

SEQ ID NO: 2197744 - RNA, 19 nt, Artificial Sequence
  Description of Artificial Sequence: Synthetic oligonucleotide
  Sense strand starting at position 1415 of SEQ ID NO: 1883496
gggugucacccagauugac

SEQ ID NO: 2197745 - RNA, 19 nt, Artificial Sequence
  Description of Artificial Sequence: Synthetic oligonucleotide
  Antisense strand to SEQ ID NO: 2197744
gucaaucugggugacaccc

SEQ ID NO: 2197746 - RNA, 19 nt, Artificial Sequence
  Description of Artificial Sequence: Synthetic oligonucleotide
  Sense strand starting at position 1901 of SEQ ID NO: 1883496
ccagguauucccgccguua

SEQ ID NO: 2197747 - RNA, 19 nt, Artificial Sequence
  Description of Artificial Sequence: Synthetic oligonucleotide
  Antisense strand to SEQ ID NO: 2197746
uaacggcgggaauaccugg

SEQ ID NO: 2197748 - RNA, 19 nt, Artificial Sequence
  Description of Artificial Sequence: Synthetic oligonucleotide
  Sense strand starting at position 3802 of SEQ ID NO: 1883496
gugcaagaccuuuagauca

SEQ ID NO: 2197749 - RNA, 19 nt, Artificial Sequence
  Description of Artificial Sequence: Synthetic oligonucleotide
  Antisense strand to SEQ ID NO: 2197748
ugaucuaaaggucuugcac

SEQ ID NO: 2197750 - RNA, 19 nt, Artificial Sequence
  Description of Artificial Sequence: Synthetic oligonucleotide
  Sense strand starting at position 74 of SEQ ID NO: 1883496
ggaaauggauugucacuuu

SEQ ID NO: 2197751 - RNA, 19 nt, Artificial Sequence
  Description of Artificial Sequence: Synthetic oligonucleotide
  Antisense strand to SEQ ID NO: 2197750
aaagugacaauccauuucc

SEQ ID NO: 2197752 - RNA, 19 nt, Artificial Sequence
  Description of Artificial Sequence: Synthetic oligonucleotide
  Sense strand starting at position 1376 of SEQ ID NO: 1883496
uugagauaauucuccggag

SEQ ID NO: 2197753 - RNA, 19 nt, Artificial Sequence
  Description of Artificial Sequence: Synthetic oligonucleotide
  Antisense strand to SEQ ID NO: 2197752
cuccggagaauuaucucaa

SEQ ID NO: 2197754 - RNA, 19 nt, Artificial Sequence
  Description of Artificial Sequence: Synthetic oligonucleotide
  Sense strand starting at position 3741 of SEQ ID NO: 1883496
ggagaagacguguagugau

SEQ ID NO: 2197755 - RNA, 19 nt, Artificial Sequence
  Description of Artificial Sequence: Synthetic oligonucleotide
  Antisense strand to SEQ ID NO: 2197754
aucacuacacgucuucucc

SEQ ID NO: 2197756 - RNA, 19 nt, Artificial Sequence
  Description of Artificial Sequence: Synthetic oligonucleotide
  Sense strand starting at position 1262 of SEQ ID NO: 1883496
ggacuuaggcuuugacaga

SEQ ID NO: 2197757 - RNA, 19 nt, Artificial Sequence
  Description of Artificial Sequence: Synthetic oligonucleotide
  Antisense strand to SEQ ID NO: 2197756
ucugucaaagccuaagucc

SEQ ID NO: 2197758 - RNA, 19 nt, Artificial Sequence
  Description of Artificial Sequence: Synthetic oligonucleotide
  Sense strand starting at position 2183 of SEQ ID NO: 1883496
uagaaugagacauguguug

SEQ ID NO: 2197759 - RNA, 19 nt, Artificial Sequence
  Description of Artificial Sequence: Synthetic oligonucleotide
  Antisense strand to SEQ ID NO: 2197758
caacacaugucucauucua

SEQ ID NO: 2197760 - RNA, 19 nt, Artificial Sequence
  Description of Artificial Sequence: Synthetic oligonucleotide
  Sense strand starting at position 1000 of SEQ ID NO: 1883496
cugugauggagccaaguaa

SEQ ID NO: 2197761 - RNA, 19 nt, Artificial Sequence
  Description of Artificial Sequence: Synthetic oligonucleotide
  Antisense strand to SEQ ID NO: 2197760
uuacuuggcuccaucacag

SEQ ID NO: 2197762 - RNA, 19 nt, Artificial Sequence
  Description of Artificial Sequence: Synthetic oligonucleotide
  Sense strand starting at position 3003 of SEQ ID NO: 1883496
cuuuguucugaguaggaug

SEQ ID NO: 2197763 - RNA, 19 nt, Artificial Sequence
  Description of Artificial Sequence: Synthetic oligonucleotide
  Antisense strand to SEQ ID NO: 2197762
cauccuacucagaacaaag

SEQ ID NO: 2197764 - RNA, 19 nt, Artificial Sequence
  Description of Artificial Sequence: Synthetic oligonucleotide
  Sense strand starting at position 1365 of SEQ ID NO: 1883496
cuaugcuggacuugagaua

SEQ ID NO: 2197765 - RNA, 19 nt, Artificial Sequence
  Description of Artificial Sequence: Synthetic oligonucleotide
  Antisense strand to SEQ ID NO: 2197764
uaucucaaguccagcauag

SEQ ID NO: 2197766 - RNA, 19 nt, Artificial Sequence
  Description of Artificial Sequence: Synthetic oligonucleotide
  Sense strand starting at position 3014 of SEQ ID NO: 1883496
guaggauggcaccaucuuu

SEQ ID NO: 2197767 - RNA, 19 nt, Artificial Sequence
  Description of Artificial Sequence: Synthetic oligonucleotide
  Antisense strand to SEQ ID NO: 2197766
aaagauggugccauccuac

SEQ ID NO: 2197768 - RNA, 19 nt, Artificial Sequence
  Description of Artificial Sequence: Synthetic oligonucleotide
  Sense strand starting at position 878 of SEQ ID NO: 1883496
cggcccagucaacaaauau

SEQ ID NO: 2197769 - RNA, 19 nt, Artificial Sequence
  Description of Artificial Sequence: Synthetic oligonucleotide
  Antisense strand to SEQ ID NO: 2197768
auauuuguugacugggccg

SEQ ID NO: 2197770 - RNA, 19 nt, Artificial Sequence
  Description of Artificial Sequence: Synthetic oligonucleotide
  Sense strand starting at position 3264 of SEQ ID NO: 1883496
ggaagcagcguagagauua

SEQ ID NO: 2197771 - RNA, 19 nt, Artificial Sequence
  Description of Artificial Sequence: Synthetic oligonucleotide
  Antisense strand to SEQ ID NO: 2197770
uaaucucuacgcugcuucc

SEQ ID NO: 2197772 - RNA, 19 nt, Artificial Sequence
  Description of Artificial Sequence: Synthetic oligonucleotide
  Sense strand starting at position 1377 of SEQ ID NO: 1883496
ugagauaauucuccggagu

SEQ ID NO: 2197773 - RNA, 19 nt, Artificial Sequence
  Description of Artificial Sequence: Synthetic oligonucleotide
  Antisense strand to SEQ ID NO: 2197772
acuccggagaauuaucuca

SEQ ID NO: 2197774 - RNA, 19 nt, Artificial Sequence
  Description of Artificial Sequence: Synthetic oligonucleotide
  Sense strand starting at position 1378 of SEQ ID NO: 1883496
gagauaauucuccggaguc

SEQ ID NO: 2197775 - RNA, 19 nt, Artificial Sequence
  Description of Artificial Sequence: Synthetic oligonucleotide
  Antisense strand to SEQ ID NO: 2197774
gacuccggagaauuaucuc

SEQ ID NO: 2197776 - RNA, 19 nt, Artificial Sequence
  Description of Artificial Sequence: Synthetic oligonucleotide
  Sense strand starting at position 118 of SEQ ID NO: 1883496
uuggaaauguggucuuuag

SEQ ID NO: 2197777 - RNA, 19 nt, Artificial Sequence
  Description of Artificial Sequence: Synthetic oligonucleotide
  Antisense strand to SEQ ID NO: 2197776
cuaaagaccacauuuccaa

SEQ ID NO: 2197778 - RNA, 19 nt, Artificial Sequence
  Description of Artificial Sequence: Synthetic oligonucleotide
  Sense strand starting at position 258 of SEQ ID NO: 1883496
gcaguauaugguugaaagg

SEQ ID NO: 2197779 - RNA, 19 nt, Artificial Sequence
  Description of Artificial Sequence: Synthetic oligonucleotide
  Antisense strand to SEQ ID NO: 2197778
ccuuucaaccauauacugc

SEQ ID NO: 2197780 - RNA, 19 nt, Artificial Sequence
  Description of Artificial Sequence: Synthetic oligonucleotide
  Sense strand starting at position 3366 of SEQ ID NO: 1883496
ugguccuagggcugagaua

SEQ ID NO: 2197781 - RNA, 19 nt, Artificial Sequence
  Description of Artificial Sequence: Synthetic oligonucleotide
  Antisense strand to SEQ ID NO: 2197780
uaucucagcccuaggacca

SEQ ID NO: 2197782 - RNA, 19 nt, Artificial Sequence
  Description of Artificial Sequence: Synthetic oligonucleotide
  Sense strand starting at position 257 of SEQ ID NO: 1883496
ugcaguauaugguugaaag

SEQ ID NO: 2197783 - RNA, 19 nt, Artificial Sequence
  Description of Artificial Sequence: Synthetic oligonucleotide
  Antisense strand to SEQ ID NO: 2197782
cuuucaaccauauacugca

SEQ ID NO: 2197784 - RNA, 19 nt, Artificial Sequence
  Description of Artificial Sequence: Synthetic oligonucleotide
  Sense strand starting at position 41 of SEQ ID NO: 1883496
agccuaauggugggacuuu

SEQ ID NO: 2197785 - RNA, 19 nt, Artificial Sequence
  Description of Artificial Sequence: Synthetic oligonucleotide
  Antisense strand to SEQ ID NO: 2197784
aaagucccaccauuaggcu

SEQ ID NO: 2197786 - RNA, 19 nt, Artificial Sequence
  Description of Artificial Sequence: Synthetic oligonucleotide
  Sense strand starting at position 3748 of SEQ ID NO: 1883496
acguguagugaugaauucu

SEQ ID NO: 2197787 - RNA, 19 nt, Artificial Sequence
  Description of Artificial Sequence: Synthetic oligonucleotide
  Antisense strand to SEQ ID NO: 2197786
agaauucaucacuacacgu

SEQ ID NO: 2197788 - RNA, 19 nt, Artificial Sequence
  Description of Artificial Sequence: Synthetic oligonucleotide
  Sense strand starting at position 3235 of SEQ ID NO: 1883496
aaggauaguuuguuuccuu

SEQ ID NO: 2197789 - RNA, 19 nt, Artificial Sequence
  Description of Artificial Sequence: Synthetic oligonucleotide
  Antisense strand to SEQ ID NO: 2197788
aaggaaacaaacuauccuu

SEQ ID NO: 2197790 - RNA, 19 nt, Artificial Sequence
  Description of Artificial Sequence: Synthetic oligonucleotide
  Sense strand starting at position 2092 of SEQ ID NO: 1883496
cggcgaaaucaaagugcgu

SEQ ID NO: 2197791 - RNA, 19 nt, Artificial Sequence
  Description of Artificial Sequence: Synthetic oligonucleotide
  Antisense strand to SEQ ID NO: 2197790
acgcacuuugauuucgccg

SEQ ID NO: 2197792 - RNA, 19 nt, Artificial Sequence
  Description of Artificial Sequence: Synthetic oligonucleotide
  Sense strand starting at position 524 of SEQ ID NO: 1883496
ggauguuugcuuggugaag

SEQ ID NO: 2197793 - RNA, 19 nt, Artificial Sequence
  Description of Artificial Sequence: Synthetic oligonucleotide
  Antisense strand to SEQ ID NO: 2197792
cuucaccaagcaaacaucc

SEQ ID NO: 2197794 - RNA, 19 nt, Artificial Sequence
  Description of Artificial Sequence: Synthetic oligonucleotide
  Sense strand starting at position 1309 of SEQ ID NO: 1883496
gaagguucccuuggcacuu

SEQ ID NO: 2197795 - RNA, 19 nt, Artificial Sequence
  Description of Artificial Sequence: Synthetic oligonucleotide
  Antisense strand to SEQ ID NO: 2197794
aagugccaagggaaccuuc

SEQ ID NO: 2197796 - RNA, 19 nt, Artificial Sequence
  Description of Artificial Sequence: Synthetic oligonucleotide
  Sense strand starting at position 3404 of SEQ ID NO: 1883496
acugucagcguagaaguau

SEQ ID NO: 2197797 - RNA, 19 nt, Artificial Sequence
  Description of Artificial Sequence: Synthetic oligonucleotide
  Antisense strand to SEQ ID NO: 2197796
auacuucuacgcugacagu

SEQ ID NO: 2197798 - RNA, 19 nt, Artificial Sequence
  Description of Artificial Sequence: Synthetic oligonucleotide
  Sense strand starting at position 381 of SEQ ID NO: 1883496
accugaagucugcaguguu

SEQ ID NO: 2197799 - RNA, 19 nt, Artificial Sequence
  Description of Artificial Sequence: Synthetic oligonucleotide
  Antisense strand to SEQ ID NO: 2197798
aacacugcagacuucaggu

SEQ ID NO: 2197800 - RNA, 19 nt, Artificial Sequence
  Description of Artificial Sequence: Synthetic oligonucleotide
  Sense strand starting at position 1297 of SEQ ID NO: 1883496
aaagaaaccugggaagguu

SEQ ID NO: 2197801 - RNA, 19 nt, Artificial Sequence
  Description of Artificial Sequence: Synthetic oligonucleotide
  Antisense strand to SEQ ID NO: 2197800
aaccuucccagguuucuuu

SEQ ID NO: 2197802 - RNA, 19 nt, Artificial Sequence
  Description of Artificial Sequence: Synthetic oligonucleotide
  Sense strand starting at position 1611 of SEQ ID NO: 1883496
gcuacuuggucugcagaaa

SEQ ID NO: 2197803 - RNA, 19 nt, Artificial Sequence
  Description of Artificial Sequence: Synthetic oligonucleotide
  Antisense strand to SEQ ID NO: 2197802
uuucugcagaccaaguagc

SEQ ID NO: 2197804 - RNA, 19 nt, Artificial Sequence
  Description of Artificial Sequence: Synthetic oligonucleotide
  Sense strand starting at position 143 of SEQ ID NO: 1883496
aguccuguacuuggcuaaa

SEQ ID NO: 2197805 - RNA, 19 nt, Artificial Sequence
  Description of Artificial Sequence: Synthetic oligonucleotide
  Antisense strand to SEQ ID NO: 2197804
uuuagccaaguacaggacu

SEQ ID NO: 2197806 - RNA, 19 nt, Artificial Sequence
  Description of Artificial Sequence: Synthetic oligonucleotide
  Sense strand starting at position 915 of SEQ ID NO: 1883496
gguauuguucuaggcacca

SEQ ID NO: 2197807 - RNA, 19 nt, Artificial Sequence
  Description of Artificial Sequence: Synthetic oligonucleotide
  Antisense strand to SEQ ID NO: 2197806
uggugccuagaacaauacc

SEQ ID NO: 2197808 - RNA, 19 nt, Artificial Sequence
  Description of Artificial Sequence: Synthetic oligonucleotide
  Sense strand starting at position 1610 of SEQ ID NO: 1883496
ggcuacuuggucugcagaa

SEQ ID NO: 2197809 - RNA, 19 nt, Artificial Sequence
  Description of Artificial Sequence: Synthetic oligonucleotide
  Antisense strand to SEQ ID NO: 2197808
uucugcagaccaaguagcc

SEQ ID NO: 2197810 - RNA, 19 nt, Artificial Sequence
  Description of Artificial Sequence: Synthetic oligonucleotide
  Sense strand starting at position 3354 of SEQ ID NO: 1883496
gcagaaauagugugguccu

SEQ ID NO: 2197811 - RNA, 19 nt, Artificial Sequence
  Description of Artificial Sequence: Synthetic oligonucleotide
  Antisense strand to SEQ ID NO: 2197810
aggaccacacuauuucugc

SEQ ID NO: 2197812 - RNA, 19 nt, Artificial Sequence
  Description of Artificial Sequence: Synthetic oligonucleotide
  Sense strand starting at position 3680 of SEQ ID NO: 1883496
auuagucacugagaacaaa

SEQ ID NO: 2197813 - RNA, 19 nt, Artificial Sequence
  Description of Artificial Sequence: Synthetic oligonucleotide
  Antisense strand to SEQ ID NO: 2197812
uuuguucucagugacuaau

SEQ ID NO: 2197814 - RNA, 19 nt, Artificial Sequence
  Description of Artificial Sequence: Synthetic oligonucleotide
  Sense strand starting at position 1239 of SEQ ID NO: 1883498
gucaaaucucaguugcgca

SEQ ID NO: 2197815 - RNA, 19 nt, Artificial Sequence
  Description of Artificial Sequence: Synthetic oligonucleotide
  Antisense strand to SEQ ID NO: 2197814
ugcgcaacugagauuugac

SEQ ID NO: 2197816 - RNA, 19 nt, Artificial Sequence
  Description of Artificial Sequence: Synthetic oligonucleotide
  Sense strand starting at position 530 of SEQ ID NO: 1883498
ggagcaguagugaggcuuu

SEQ ID NO: 2197817 - RNA, 19 nt, Artificial Sequence
  Description of Artificial Sequence: Synthetic oligonucleotide
  Antisense strand to SEQ ID NO: 2197816
aaagccucacuacugcucc

SEQ ID NO: 2197818 - RNA, 19 nt, Artificial Sequence
  Description of Artificial Sequence: Synthetic oligonucleotide
  Sense strand starting at position 2451 of SEQ ID NO: 1883498
caggauuaucgugaggauu

SEQ ID NO: 2197819 - RNA, 19 nt, Artificial Sequence
  Description of Artificial Sequence: Synthetic oligonucleotide
  Antisense strand to SEQ ID NO: 2197818
aauccucacgauaauccug

SEQ ID NO: 2197820 - RNA, 19 nt, Artificial Sequence
  Description of Artificial Sequence: Synthetic oligonucleotide
  Sense strand starting at position 556 of SEQ ID NO: 1883498
cuaggaguugauggauaug

SEQ ID NO: 2197821 - RNA, 19 nt, Artificial Sequence
  Description of Artificial Sequence: Synthetic oligonucleotide
  Antisense strand to SEQ ID NO: 2197820
cauauccaucaacuccuag

SEQ ID NO: 2197822 - RNA, 19 nt, Artificial Sequence
  Description of Artificial Sequence: Synthetic oligonucleotide
  Sense strand starting at position 1732 of SEQ ID NO: 1883498
aguaguuagcaauaugaaa

SEQ ID NO: 2197823 - RNA, 19 nt, Artificial Sequence
  Description of Artificial Sequence: Synthetic oligonucleotide
  Antisense strand to SEQ ID NO: 2197822
uuucauauugcuaacuacu

SEQ ID NO: 2197824 - RNA, 19 nt, Artificial Sequence
  Description of Artificial Sequence: Synthetic oligonucleotide
  Sense strand starting at position 1591 of SEQ ID NO: 1883498
uguuauuaagcugaaauga

SEQ ID NO: 2197825 - RNA, 19 nt, Artificial Sequence
  Description of Artificial Sequence: Synthetic oligonucleotide
  Antisense strand to SEQ ID NO: 2197824
ucauuucagcuuaauaaca

SEQ ID NO: 2197826 - RNA, 19 nt, Artificial Sequence
  Description of Artificial Sequence: Synthetic oligonucleotide
  Sense strand starting at position 129 of SEQ ID NO: 1883498
accgaacacuauuccagaa

SEQ ID NO: 2197827 - RNA, 19 nt, Artificial Sequence
  Description of Artificial Sequence: Synthetic oligonucleotide
  Antisense strand to SEQ ID NO: 2197826
uucuggaauaguguucggu

SEQ ID NO: 2197828 - RNA, 19 nt, Artificial Sequence
  Description of Artificial Sequence: Synthetic oligonucleotide
  Sense strand starting at position 3908 of SEQ ID NO: 1883498
gcuguaguucucucuuggu

SEQ ID NO: 2197829 - RNA, 19 nt, Artificial Sequence
  Description of Artificial Sequence: Synthetic oligonucleotide
  Antisense strand to SEQ ID NO: 2197828
accaagagagaacuacagc

SEQ ID NO: 2197830 - RNA, 19 nt, Artificial Sequence
  Description of Artificial Sequence: Synthetic oligonucleotide
  Sense strand starting at position 76 of SEQ ID NO: 1883498
gaacaacuaugaguuaagu

SEQ ID NO: 2197831 - RNA, 19 nt, Artificial Sequence
  Description of Artificial Sequence: Synthetic oligonucleotide
  Antisense strand to SEQ ID NO: 2197830
acuuaacucauaguuguuc

SEQ ID NO: 2197832 - RNA, 19 nt, Artificial Sequence
  Description of Artificial Sequence: Synthetic oligonucleotide
  Sense strand starting at position 2054 of SEQ ID NO: 1883498
uuaaucauugaucaagugu

SEQ ID NO: 2197833 - RNA, 19 nt, Artificial Sequence
  Description of Artificial Sequence: Synthetic oligonucleotide
  Antisense strand to SEQ ID NO: 2197832
acacuugaucaaugauuaa

SEQ ID NO: 2197834 - RNA, 19 nt, Artificial Sequence
  Description of Artificial Sequence: Synthetic oligonucleotide
  Sense strand starting at position 1244 of SEQ ID NO: 1883498
aucucaguugcgcaauuua

SEQ ID NO: 2197835 - RNA, 19 nt, Artificial Sequence
  Description of Artificial Sequence: Synthetic oligonucleotide
  Antisense strand to SEQ ID NO: 2197834
uaaauugcgcaacugagau

SEQ ID NO: 2197836 - RNA, 19 nt, Artificial Sequence
  Description of Artificial Sequence: Synthetic oligonucleotide
  Sense strand starting at position 553 of SEQ ID NO: 1883498
ugccuaggaguugauggau

SEQ ID NO: 2197837 - RNA, 19 nt, Artificial Sequence
  Description of Artificial Sequence: Synthetic oligonucleotide
  Antisense strand to SEQ ID NO: 2197836
auccaucaacuccuaggca

SEQ ID NO: 2197838 - RNA, 19 nt, Artificial Sequence
  Description of Artificial Sequence: Synthetic oligonucleotide
  Sense strand starting at position 1700 of SEQ ID NO: 1883498
auuacuugagaguguaaga

SEQ ID NO: 2197839 - RNA, 19 nt, Artificial Sequence
  Description of Artificial Sequence: Synthetic oligonucleotide
  Antisense strand to SEQ ID NO: 2197838
ucuuacacucucaaguaau

SEQ ID NO: 2197840 - RNA, 19 nt, Artificial Sequence
  Description of Artificial Sequence: Synthetic oligonucleotide
  Sense strand starting at position 332 of SEQ ID NO: 1883498
gacaaaccucuuugagggu

SEQ ID NO: 2197841 - RNA, 19 nt, Artificial Sequence
  Description of Artificial Sequence: Synthetic oligonucleotide
  Antisense strand to SEQ ID NO: 2197840
acccucaaagagguuuguc

SEQ ID NO: 2197842 - RNA, 19 nt, Artificial Sequence
  Description of Artificial Sequence: Synthetic oligonucleotide
  Sense strand starting at position 2335 of SEQ ID NO: 1883498
agagcagaacugugauaug

SEQ ID NO: 2197843 - RNA, 19 nt, Artificial Sequence
  Description of Artificial Sequence: Synthetic oligonucleotide
  Antisense strand to SEQ ID NO: 2197842
cauaucacaguucugcucu

SEQ ID NO: 2197844 - RNA, 19 nt, Artificial Sequence
  Description of Artificial Sequence: Synthetic oligonucleotide
  Sense strand starting at position 1620 of SEQ ID NO: 1883498
augaaauacuaggcauagu

SEQ ID NO: 2197845 - RNA, 19 nt, Artificial Sequence
  Description of Artificial Sequence: Synthetic oligonucleotide
  Antisense strand to SEQ ID NO: 2197844
acuaugccuaguauuucau

SEQ ID NO: 2197846 - RNA, 19 nt, Artificial Sequence
  Description of Artificial Sequence: Synthetic oligonucleotide
  Sense strand starting at position 1762 of SEQ ID NO: 1883498
gguuacuguaaguaucaga

SEQ ID NO: 2197847 - RNA, 19 nt, Artificial Sequence
  Description of Artificial Sequence: Synthetic oligonucleotide
  Antisense strand to SEQ ID NO: 2197846
ucugauacuuacaguaacc

SEQ ID NO: 2197848 - RNA, 19 nt, Artificial Sequence
  Description of Artificial Sequence: Synthetic oligonucleotide
  Sense strand starting at position 2498 of SEQ ID NO: 1883498
ccuaaugagcugcacaaau

SEQ ID NO: 2197849 - RNA, 19 nt, Artificial Sequence
  Description of Artificial Sequence: Synthetic oligonucleotide
  Antisense strand to SEQ ID NO: 2197848
auuugugcagcucauuagg

SEQ ID NO: 2197850 - RNA, 19 nt, Artificial Sequence
  Description of Artificial Sequence: Synthetic oligonucleotide
  Sense strand starting at position 2663 of SEQ ID NO: 1883498
uaggguuagguaugaauua

SEQ ID NO: 2197851 - RNA, 19 nt, Artificial Sequence
  Description of Artificial Sequence: Synthetic oligonucleotide
  Antisense strand to SEQ ID NO: 2197850
uaauucauaccuaacccua

SEQ ID NO: 2197852 - RNA, 19 nt, Artificial Sequence
  Description of Artificial Sequence: Synthetic oligonucleotide
  Sense strand starting at position 989 of SEQ ID NO: 1883498
agcagagacucccuggauu

SEQ ID NO: 2197853 - RNA, 19 nt, Artificial Sequence
  Description of Artificial Sequence: Synthetic oligonucleotide
  Antisense strand to SEQ ID NO: 2197852
aauccagggagucucugcu

SEQ ID NO: 2197854 - RNA, 19 nt, Artificial Sequence
  Description of Artificial Sequence: Synthetic oligonucleotide
  Sense strand starting at position 2488 of SEQ ID NO: 1883498
cuuuguaagcccuaaugag

SEQ ID NO: 2197855 - RNA, 19 nt, Artificial Sequence
  Description of Artificial Sequence: Synthetic oligonucleotide
  Antisense strand to SEQ ID NO: 2197854
cucauuagggcuuacaaag

SEQ ID NO: 2197856 - RNA, 19 nt, Artificial Sequence
  Description of Artificial Sequence: Synthetic oligonucleotide
  Sense strand starting at position 581 of SEQ ID NO: 1883498
ccagguacacuguaaaguu

SEQ ID NO: 2197857 - RNA, 19 nt, Artificial Sequence
  Description of Artificial Sequence: Synthetic oligonucleotide
  Antisense strand to SEQ ID NO: 2197856
aacuuuacaguguaccugg

SEQ ID NO: 2197858 - RNA, 19 nt, Artificial Sequence
  Description of Artificial Sequence: Synthetic oligonucleotide
  Sense strand starting at position 1124 of SEQ ID NO: 1883498
aaaguaggguucucugaug

SEQ ID NO: 2197859 - RNA, 19 nt, Artificial Sequence
  Description of Artificial Sequence: Synthetic oligonucleotide
  Antisense strand to SEQ ID NO: 2197858
caucagagaacccuacuuu

SEQ ID NO: 2197860 - RNA, 19 nt, Artificial Sequence
  Description of Artificial Sequence: Synthetic oligonucleotide
  Sense strand starting at position 2653 of SEQ ID NO: 1883498
ugugaacucauaggguuag

SEQ ID NO: 2197861 - RNA, 19 nt, Artificial Sequence
  Description of Artificial Sequence: Synthetic oligonucleotide
  Antisense strand to SEQ ID NO: 2197860
cuaacccuaugaguucaca

SEQ ID NO: 2197862 - RNA, 19 nt, Artificial Sequence
  Description of Artificial Sequence: Synthetic oligonucleotide
  Sense strand starting at position 1636 of SEQ ID NO: 1883498
aguaucuaacauugugaau

SEQ ID NO: 2197863 - RNA, 19 nt, Artificial Sequence
  Description of Artificial Sequence: Synthetic oligonucleotide
  Antisense strand to SEQ ID NO: 2197862
auucacaauguuagauacu

SEQ ID NO: 2197864 - RNA, 19 nt, Artificial Sequence
  Description of Artificial Sequence: Synthetic oligonucleotide
  Sense strand starting at position 1010 of SEQ ID NO: 1883498
ugaucuagaugguuccauu

SEQ ID NO: 2197865 - RNA, 19 nt, Artificial Sequence
  Description of Artificial Sequence: Synthetic oligonucleotide
  Antisense strand to SEQ ID NO: 2197864
aauggaaccaucuagauca

SEQ ID NO: 2197866 - RNA, 19 nt, Artificial Sequence
  Description of Artificial Sequence: Synthetic oligonucleotide
  Sense strand starting at position 2345 of SEQ ID NO: 1883498
ugugauauggacugugaug

SEQ ID NO: 2197867 - RNA, 19 nt, Artificial Sequence
  Description of Artificial Sequence: Synthetic oligonucleotide
  Antisense strand to SEQ ID NO: 2197866
caucacaguccauaucaca

SEQ ID NO: 2197868 - RNA, 19 nt, Artificial Sequence
  Description of Artificial Sequence: Synthetic oligonucleotide
  Sense strand starting at position 897 of SEQ ID NO: 1883498
uugauuggguauccaguaa

SEQ ID NO: 2197869 - RNA, 19 nt, Artificial Sequence
  Description of Artificial Sequence: Synthetic oligonucleotide
  Antisense strand to SEQ ID NO: 2197868
uuacuggauacccaaucaa

SEQ ID NO: 2197870 - RNA, 19 nt, Artificial Sequence
  Description of Artificial Sequence: Synthetic oligonucleotide
  Sense strand starting at position 1285 of SEQ ID NO: 1883498
aguggaucucucugaaucu

SEQ ID NO: 2197871 - RNA, 19 nt, Artificial Sequence
  Description of Artificial Sequence: Synthetic oligonucleotide
  Antisense strand to SEQ ID NO: 2197870
agauucagagagauccacu

SEQ ID NO: 2197872 - RNA, 19 nt, Artificial Sequence
  Description of Artificial Sequence: Synthetic oligonucleotide
  Sense strand starting at position 25 of SEQ ID NO: 1883498
auguaaagugugcaucaga

SEQ ID NO: 2197873 - RNA, 19 nt, Artificial Sequence
  Description of Artificial Sequence: Synthetic oligonucleotide
  Antisense strand to SEQ ID NO: 2197872
ucugaugcacacuuuacau

SEQ ID NO: 2197874 - RNA, 19 nt, Artificial Sequence
  Description of Artificial Sequence: Synthetic oligonucleotide
  Sense strand starting at position 187 of SEQ ID NO: 1883498
uuauguucccgguacagag

SEQ ID NO: 2197875 - RNA, 19 nt, Artificial Sequence
  Description of Artificial Sequence: Synthetic oligonucleotide
  Antisense strand to SEQ ID NO: 2197874
cucuguaccgggaacauaa

SEQ ID NO: 2197876 - RNA, 19 nt, Artificial Sequence
  Description of Artificial Sequence: Synthetic oligonucleotide
  Sense strand starting at position 1282 of SEQ ID NO: 1883498
guuaguggaucucucugaa

SEQ ID NO: 2197877 - RNA, 19 nt, Artificial Sequence
  Description of Artificial Sequence: Synthetic oligonucleotide
  Antisense strand to SEQ ID NO: 2197876
uucagagagauccacuaac

SEQ ID NO: 2197878 - RNA, 19 nt, Artificial Sequence
  Description of Artificial Sequence: Synthetic oligonucleotide
  Sense strand starting at position 2177 of SEQ ID NO: 1883498
auaggcuagcaguaauagu

SEQ ID NO: 2197879 - RNA, 19 nt, Artificial Sequence
  Description of Artificial Sequence: Synthetic oligonucleotide
  Antisense strand to SEQ ID NO: 2197878
acuauuacugcuagccuau

SEQ ID NO: 2197880 - RNA, 19 nt, Artificial Sequence
  Description of Artificial Sequence: Synthetic oligonucleotide
  Sense strand starting at position 476 of SEQ ID NO: 1883498
agggcacagucauugaagu

SEQ ID NO: 2197881 - RNA, 19 nt, Artificial Sequence
  Description of Artificial Sequence: Synthetic oligonucleotide
  Antisense strand to SEQ ID NO: 2197880
acuucaaugacugugcccu

SEQ ID NO: 2197882 - RNA, 19 nt, Artificial Sequence
  Description of Artificial Sequence: Synthetic oligonucleotide
  Sense strand starting at position 1600 of SEQ ID NO: 1883498
gcugaaaugagaugcagua

SEQ ID NO: 2197883 - RNA, 19 nt, Artificial Sequence
  Description of Artificial Sequence: Synthetic oligonucleotide
  Antisense strand to SEQ ID NO: 2197882
uacugcaucucauuucagc

SEQ ID NO: 2197884 - RNA, 19 nt, Artificial Sequence
  Description of Artificial Sequence: Synthetic oligonucleotide
  Sense strand starting at position 258 of SEQ ID NO: 1883498
guacuauguguuugaaaga

SEQ ID NO: 2197885 - RNA, 19 nt, Artificial Sequence
  Description of Artificial Sequence: Synthetic oligonucleotide
  Antisense strand to SEQ ID NO: 2197884
ucuuucaaacacauaguac

SEQ ID NO: 2197886 - RNA, 19 nt, Artificial Sequence
  Description of Artificial Sequence: Synthetic oligonucleotide
  Sense strand starting at position 350 of SEQ ID NO: 1883498
ugugauguuugagcagaga

SEQ ID NO: 2197887 - RNA, 19 nt, Artificial Sequence
  Description of Artificial Sequence: Synthetic oligonucleotide
  Antisense strand to SEQ ID NO: 2197886
ucucugcucaaacaucaca

SEQ ID NO: 2197888 - RNA, 19 nt, Artificial Sequence
  Description of Artificial Sequence: Synthetic oligonucleotide
  Sense strand starting at position 2312 of SEQ ID NO: 1883498
ugaagucagcuuugggacu

SEQ ID NO: 2197889 - RNA, 19 nt, Artificial Sequence
  Description of Artificial Sequence: Synthetic oligonucleotide
  Antisense strand to SEQ ID NO: 2197888
agucccaaagcugacuuca

SEQ ID NO: 2197890 - RNA, 19 nt, Artificial Sequence
  Description of Artificial Sequence: Synthetic oligonucleotide
  Sense strand starting at position 1329 of SEQ ID NO: 1883498
gaaauaagcuaacuugugu

SEQ ID NO: 2197891 - RNA, 19 nt, Artificial Sequence
  Description of Artificial Sequence: Synthetic oligonucleotide
  Antisense strand to SEQ ID NO: 2197890
acacaaguuagcuuauuuc

SEQ ID NO: 2197892 - RNA, 19 nt, Artificial Sequence
  Description of Artificial Sequence: Synthetic oligonucleotide
  Sense strand starting at position 478 of SEQ ID NO: 1883498
ggcacagucauugaagugu

SEQ ID NO: 2197893 - RNA, 19 nt, Artificial Sequence
  Description of Artificial Sequence: Synthetic oligonucleotide
  Antisense strand to SEQ ID NO: 2197892
acacuucaaugacugugcc

SEQ ID NO: 2197894 - RNA, 19 nt, Artificial Sequence
  Description of Artificial Sequence: Synthetic oligonucleotide
  Sense strand starting at position 1326 of SEQ ID NO: 1883499
acaacuuacgcugaaagau

SEQ ID NO: 2197895 - RNA, 19 nt, Artificial Sequence
  Description of Artificial Sequence: Synthetic oligonucleotide
  Antisense strand to SEQ ID NO: 2197894
aucuuucagcguaaguugu

SEQ ID NO: 2197896 - RNA, 19 nt, Artificial Sequence
  Description of Artificial Sequence: Synthetic oligonucleotide
  Sense strand starting at position 46 of SEQ ID NO: 1883499
ugaaguugaugacuacaau

SEQ ID NO: 2197897 - RNA, 19 nt, Artificial Sequence
  Description of Artificial Sequence: Synthetic oligonucleotide
  Antisense strand to SEQ ID NO: 2197896
auuguagucaucaacuuca

SEQ ID NO: 2197898 - RNA, 19 nt, Artificial Sequence
  Description of Artificial Sequence: Synthetic oligonucleotide
  Sense strand starting at position 979 of SEQ ID NO: 1883499
cuuggaaguuaauuagaac

SEQ ID NO: 2197899 - RNA, 19 nt, Artificial Sequence
  Description of Artificial Sequence: Synthetic oligonucleotide
  Antisense strand to SEQ ID NO: 2197898
guucuaauuaacuuccaag

SEQ ID NO: 2197900 - RNA, 19 nt, Artificial Sequence
  Description of Artificial Sequence: Synthetic oligonucleotide
  Sense strand starting at position 2810 of SEQ ID NO: 1883499
aguaguguuagugcagguu

SEQ ID NO: 2197901 - RNA, 19 nt, Artificial Sequence
  Description of Artificial Sequence: Synthetic oligonucleotide
  Antisense strand to SEQ ID NO: 2197900
aaccugcacuaacacuacu

SEQ ID NO: 2197902 - RNA, 19 nt, Artificial Sequence
  Description of Artificial Sequence: Synthetic oligonucleotide
  Sense strand starting at position 1773 of SEQ ID NO: 1883499
accaguauacucgaauaug

SEQ ID NO: 2197903 - RNA, 19 nt, Artificial Sequence
  Description of Artificial Sequence: Synthetic oligonucleotide
  Antisense strand to SEQ ID NO: 2197902
cauauucgaguauacuggu

SEQ ID NO: 2197904 - RNA, 19 nt, Artificial Sequence
  Description of Artificial Sequence: Synthetic oligonucleotide
  Sense strand starting at position 3243 of SEQ ID NO: 1883499
ggauguuagcccaguggug

SEQ ID NO: 2197905 - RNA, 19 nt, Artificial Sequence
  Description of Artificial Sequence: Synthetic oligonucleotide
  Antisense strand to SEQ ID NO: 2197904
caccacugggcuaacaucc

SEQ ID NO: 2197906 - RNA, 19 nt, Artificial Sequence
  Description of Artificial Sequence: Synthetic oligonucleotide
  Sense strand starting at position 969 of SEQ ID NO: 1883499
agacaaauuccuuggaagu

SEQ ID NO: 2197907 - RNA, 19 nt, Artificial Sequence
  Description of Artificial Sequence: Synthetic oligonucleotide
  Antisense strand to SEQ ID NO: 2197906
acuuccaaggaauuugucu

SEQ ID NO: 2197908 - RNA, 19 nt, Artificial Sequence
  Description of Artificial Sequence: Synthetic oligonucleotide
  Sense strand starting at position 2486 of SEQ ID NO: 1883499
gugaccacugaauaguuua

SEQ ID NO: 2197909 - RNA, 19 nt, Artificial Sequence
  Description of Artificial Sequence: Synthetic oligonucleotide
  Antisense strand to SEQ ID NO: 2197908
uaaacuauucaguggucac

SEQ ID NO: 2197910 - RNA, 19 nt, Artificial Sequence
  Description of Artificial Sequence: Synthetic oligonucleotide
  Sense strand starting at position 49 of SEQ ID NO: 1883499
aguugaugacuacaauugu

SEQ ID NO: 2197911 - RNA, 19 nt, Artificial Sequence
  Description of Artificial Sequence: Synthetic oligonucleotide
  Antisense strand to SEQ ID NO: 2197910
acaauuguagucaucaacu

SEQ ID NO: 2197912 - RNA, 19 nt, Artificial Sequence
  Description of Artificial Sequence: Synthetic oligonucleotide
  Sense strand starting at position 1571 of SEQ ID NO: 1883499
ugacuucuucgagaaucug

SEQ ID NO: 2197913 - RNA, 19 nt, Artificial Sequence
  Description of Artificial Sequence: Synthetic oligonucleotide
  Antisense strand to SEQ ID NO: 2197912
cagauucucgaagaaguca

SEQ ID NO: 2197914 - RNA, 19 nt, Artificial Sequence
  Description of Artificial Sequence: Synthetic oligonucleotide
  Sense strand starting at position 815 of SEQ ID NO: 1883499
ugaguaggcacuuaauaug

SEQ ID NO: 2197915 - RNA, 19 nt, Artificial Sequence
  Description of Artificial Sequence: Synthetic oligonucleotide
  Antisense strand to SEQ ID NO: 2197914
cauauuaagugccuacuca

SEQ ID NO: 2197916 - RNA, 19 nt, Artificial Sequence
  Description of Artificial Sequence: Synthetic oligonucleotide
  Sense strand starting at position 902 of SEQ ID NO: 1883499
agaugaauaccuggcacau

SEQ ID NO: 2197917 - RNA, 19 nt, Artificial Sequence
  Description of Artificial Sequence: Synthetic oligonucleotide
  Antisense strand to SEQ ID NO: 2197916
augugccagguauucaucu

SEQ ID NO: 2197918 - RNA, 19 nt, Artificial Sequence
  Description of Artificial Sequence: Synthetic oligonucleotide
  Sense strand starting at position 2137 of SEQ ID NO: 1883499
uuugaaguacccgaacuau

SEQ ID NO: 2197919 - RNA, 19 nt, Artificial Sequence
  Description of Artificial Sequence: Synthetic oligonucleotide
  Antisense strand to SEQ ID NO: 2197918
auaguucggguacuucaaa

SEQ ID NO: 2197920 - RNA, 19 nt, Artificial Sequence
  Description of Artificial Sequence: Synthetic oligonucleotide
  Sense strand starting at position 970 of SEQ ID NO: 1883499
gacaaauuccuuggaaguu

SEQ ID NO: 2197921 - RNA, 19 nt, Artificial Sequence
  Description of Artificial Sequence: Synthetic oligonucleotide
  Antisense strand to SEQ ID NO: 2197920
aacuuccaaggaauuuguc

SEQ ID NO: 2197922 - RNA, 19 nt, Artificial Sequence
  Description of Artificial Sequence: Synthetic oligonucleotide
  Sense strand starting at position 3258 of SEQ ID NO: 1883499
gguguuuauccagaaccac

SEQ ID NO: 2197923 - RNA, 19 nt, Artificial Sequence
  Description of Artificial Sequence: Synthetic oligonucleotide
  Antisense strand to SEQ ID NO: 2197922
gugguucuggauaaacacc

SEQ ID NO: 2197924 - RNA, 19 nt, Artificial Sequence
  Description of Artificial Sequence: Synthetic oligonucleotide
  Sense strand starting at position 739 of SEQ ID NO: 1883499
uauauaguggcagaguuaa

SEQ ID NO: 2197925 - RNA, 19 nt, Artificial Sequence
  Description of Artificial Sequence: Synthetic oligonucleotide
  Antisense strand to SEQ ID NO: 2197924
uuaacucugccacuauaua

SEQ ID NO: 2197926 - RNA, 19 nt, Artificial Sequence
  Description of Artificial Sequence: Synthetic oligonucleotide
  Sense strand starting at position 889 of SEQ ID NO: 1883499
aggccucaugucuagauga

SEQ ID NO: 2197927 - RNA, 19 nt, Artificial Sequence
  Description of Artificial Sequence: Synthetic oligonucleotide
  Antisense strand to SEQ ID NO: 2197926
ucaucuagacaugaggccu

SEQ ID NO: 2197928 - RNA, 19 nt, Artificial Sequence
  Description of Artificial Sequence: Synthetic oligonucleotide
  Sense strand starting at position 583 of SEQ ID NO: 1883499
gccaauaaaguauauguau

SEQ ID NO: 2197929 - RNA, 19 nt, Artificial Sequence
  Description of Artificial Sequence: Synthetic oligonucleotide
  Antisense strand to SEQ ID NO: 2197928
auacauauacuuuauuggc

SEQ ID NO: 2197930 - RNA, 19 nt, Artificial Sequence
  Description of Artificial Sequence: Synthetic oligonucleotide
  Sense strand starting at position 2934 of SEQ ID NO: 1883499
cucuucuuccucgaauaga

SEQ ID NO: 2197931 - RNA, 19 nt, Artificial Sequence
  Description of Artificial Sequence: Synthetic oligonucleotide
  Antisense strand to SEQ ID NO: 2197930
ucuauucgaggaagaagag

SEQ ID NO: 2197932 - RNA, 19 nt, Artificial Sequence
  Description of Artificial Sequence: Synthetic oligonucleotide
  Sense strand starting at position 824 of SEQ ID NO: 1883499
acuuaauaugcugacgacu

SEQ ID NO: 2197933 - RNA, 19 nt, Artificial Sequence
  Description of Artificial Sequence: Synthetic oligonucleotide
  Antisense strand to SEQ ID NO: 2197932
agucgucagcauauuaagu

SEQ ID NO: 2197934 - RNA, 19 nt, Artificial Sequence
  Description of Artificial Sequence: Synthetic oligonucleotide
  Sense strand starting at position 1566 of SEQ ID NO: 1883499
gauuaugacuucuucgaga

SEQ ID NO: 2197935 - RNA, 19 nt, Artificial Sequence
  Description of Artificial Sequence: Synthetic oligonucleotide
  Antisense strand to SEQ ID NO: 2197934
ucucgaagaagucauaauc

SEQ ID NO: 2197936 - RNA, 19 nt, Artificial Sequence
  Description of Artificial Sequence: Synthetic oligonucleotide
  Sense strand starting at position 1325 of SEQ ID NO: 1883499
gacaacuuacgcugaaaga

SEQ ID NO: 2197937 - RNA, 19 nt, Artificial Sequence
  Description of Artificial Sequence: Synthetic oligonucleotide
  Antisense strand to SEQ ID NO: 2197936
ucuuucagcguaaguuguc

SEQ ID NO: 2197938 - RNA, 19 nt, Artificial Sequence
  Description of Artificial Sequence: Synthetic oligonucleotide
  Sense strand starting at position 1105 of SEQ ID NO: 1883499
aggaguuauuaguccuaga

SEQ ID NO: 2197939 - RNA, 19 nt, Artificial Sequence
  Description of Artificial Sequence: Synthetic oligonucleotide
  Antisense strand to SEQ ID NO: 2197938
ucuaggacuaauaacuccu

SEQ ID NO: 2197940 - RNA, 19 nt, Artificial Sequence
  Description of Artificial Sequence: Synthetic oligonucleotide
  Sense strand starting at position 891 of SEQ ID NO: 1883499
gccucaugucuagaugaau

SEQ ID NO: 2197941 - RNA, 19 nt, Artificial Sequence
  Description of Artificial Sequence: Synthetic oligonucleotide
  Antisense strand to SEQ ID NO: 2197940
auucaucuagacaugaggc

SEQ ID NO: 2197942 - RNA, 19 nt, Artificial Sequence
  Description of Artificial Sequence: Synthetic oligonucleotide
  Sense strand starting at position 2944 of SEQ ID NO: 1883499
ucgaauagagccugaauga

SEQ ID NO: 2197943 - RNA, 19 nt, Artificial Sequence
  Description of Artificial Sequence: Synthetic oligonucleotide
  Antisense strand to SEQ ID NO: 2197942
ucauucaggcucuauucga

SEQ ID NO: 2197944 - RNA, 19 nt, Artificial Sequence
  Description of Artificial Sequence: Synthetic oligonucleotide
  Sense strand starting at position 2195 of SEQ ID NO: 1883499
ugccuuuggguagaucaca

SEQ ID NO: 2197945 - RNA, 19 nt, Artificial Sequence
  Description of Artificial Sequence: Synthetic oligonucleotide
  Antisense strand to SEQ ID NO: 2197944
ugugaucuacccaaaggca

SEQ ID NO: 2197946 - RNA, 19 nt, Artificial Sequence
  Description of Artificial Sequence: Synthetic oligonucleotide
  Sense strand starting at position 3203 of SEQ ID NO: 1883499
ugacucuguuaauuagauu

SEQ ID NO: 2197947 - RNA, 19 nt, Artificial Sequence
  Description of Artificial Sequence: Synthetic oligonucleotide
  Antisense strand to SEQ ID NO: 2197946
aaucuaauuaacagaguca

SEQ ID NO: 2197948 - RNA, 19 nt, Artificial Sequence
  Description of Artificial Sequence: Synthetic oligonucleotide
  Sense strand starting at position 1162 of SEQ ID NO: 1883499
gucaucuccugacuagaau

SEQ ID NO: 2197949 - RNA, 19 nt, Artificial Sequence
  Description of Artificial Sequence: Synthetic oligonucleotide
  Antisense strand to SEQ ID NO: 2197948
auucuagucaggagaugac

SEQ ID NO: 2197950 - RNA, 19 nt, Artificial Sequence
  Description of Artificial Sequence: Synthetic oligonucleotide
  Sense strand starting at position 1620 of SEQ ID NO: 1883499
aguuaacaagaaugugcaa

SEQ ID NO: 2197951 - RNA, 19 nt, Artificial Sequence
  Description of Artificial Sequence: Synthetic oligonucleotide
  Antisense strand to SEQ ID NO: 2197950
uugcacauucuuguuaacu

SEQ ID NO: 2197952 - RNA, 19 nt, Artificial Sequence
  Description of Artificial Sequence: Synthetic oligonucleotide
  Sense strand starting at position 1568 of SEQ ID NO: 1883499
uuaugacuucuucgagaau

SEQ ID NO: 2197953 - RNA, 19 nt, Artificial Sequence
  Description of Artificial Sequence: Synthetic oligonucleotide
  Antisense strand to SEQ ID NO: 2197952
auucucgaagaagucauaa

SEQ ID NO: 2197954 - RNA, 19 nt, Artificial Sequence
  Description of Artificial Sequence: Synthetic oligonucleotide
  Sense strand starting at position 194 of SEQ ID NO: 1883499
gagguuaacuuauagauuu

SEQ ID NO: 2197955 - RNA, 19 nt, Artificial Sequence
  Description of Artificial Sequence: Synthetic oligonucleotide
  Antisense strand to SEQ ID NO: 2197954
aaaucuauaaguuaaccuc

SEQ ID NO: 2197956 - RNA, 19 nt, Artificial Sequence
  Description of Artificial Sequence: Synthetic oligonucleotide
  Sense strand starting at position 1743 of SEQ ID NO: 1883499
aaauauguccucuguggga

SEQ ID NO: 2197957 - RNA, 19 nt, Artificial Sequence
  Description of Artificial Sequence: Synthetic oligonucleotide
  Antisense strand to SEQ ID NO: 2197956
ucccacagaggacauauuu

SEQ ID NO: 2197958 - RNA, 19 nt, Artificial Sequence
  Description of Artificial Sequence: Synthetic oligonucleotide
  Sense strand starting at position 1495 of SEQ ID NO: 1883499
uagguauccuaugccaaag

SEQ ID NO: 2197959 - RNA, 19 nt, Artificial Sequence
  Description of Artificial Sequence: Synthetic oligonucleotide
  Antisense strand to SEQ ID NO: 2197958
cuuuggcauaggauaccua

SEQ ID NO: 2197960 - RNA, 19 nt, Artificial Sequence
  Description of Artificial Sequence: Synthetic oligonucleotide
  Sense strand starting at position 1094 of SEQ ID NO: 1883499
guagacauggcaggaguua

SEQ ID NO: 2197961 - RNA, 19 nt, Artificial Sequence
  Description of Artificial Sequence: Synthetic oligonucleotide
  Antisense strand to SEQ ID NO: 2197960
uaacuccugccaugucuac

SEQ ID NO: 2197962 - RNA, 19 nt, Artificial Sequence
  Description of Artificial Sequence: Synthetic oligonucleotide
  Sense strand starting at position 2728 of SEQ ID NO: 1883499
acugaacucuaaggauuua

SEQ ID NO: 2197963 - RNA, 19 nt, Artificial Sequence
  Description of Artificial Sequence: Synthetic oligonucleotide
  Antisense strand to SEQ ID NO: 2197962
uaaauccuuagaguucagu

SEQ ID NO: 2197964 - RNA, 19 nt, Artificial Sequence
  Description of Artificial Sequence: Synthetic oligonucleotide
  Sense strand starting at position 175 of SEQ ID NO: 1883499
uuuauaacucguuagggca

SEQ ID NO: 2197965 - RNA, 19 nt, Artificial Sequence
  Description of Artificial Sequence: Synthetic oligonucleotide
  Antisense strand to SEQ ID NO: 2197964
ugcccuaacgaguuauaaa

SEQ ID NO: 2197966 - RNA, 19 nt, Artificial Sequence
  Description of Artificial Sequence: Synthetic oligonucleotide
  Sense strand starting at position 810 of SEQ ID NO: 1883499
gguaaugaguaggcacuua

SEQ ID NO: 2197967 - RNA, 19 nt, Artificial Sequence
  Description of Artificial Sequence: Synthetic oligonucleotide
  Antisense strand to SEQ ID NO: 2197966
uaagugccuacucauuacc

SEQ ID NO: 2197968 - RNA, 19 nt, Artificial Sequence
  Description of Artificial Sequence: Synthetic oligonucleotide
  Sense strand starting at position 2096 of SEQ ID NO: 1883499
accguuucuccauggagag

SEQ ID NO: 2197969 - RNA, 19 nt, Artificial Sequence
  Description of Artificial Sequence: Synthetic oligonucleotide
  Antisense strand to SEQ ID NO: 2197968
cucuccauggagaaacggu

SEQ ID NO: 2197970 - RNA, 19 nt, Artificial Sequence
  Description of Artificial Sequence: Synthetic oligonucleotide
  Sense strand starting at position 809 of SEQ ID NO: 1883499
ggguaaugaguaggcacuu

SEQ ID NO: 2197971 - RNA, 19 nt, Artificial Sequence
  Description of Artificial Sequence: Synthetic oligonucleotide
  Antisense strand to SEQ ID NO: 2197970
aagugccuacucauuaccc

SEQ ID NO: 2197972 - RNA, 19 nt, Artificial Sequence
  Description of Artificial Sequence: Synthetic oligonucleotide
  Sense strand starting at position 3091 of SEQ ID NO: 1883499
cuguccuagugauucuaga

SEQ ID NO: 2197973 - RNA, 19 nt, Artificial Sequence
  Description of Artificial Sequence: Synthetic oligonucleotide
  Antisense strand to SEQ ID NO: 2197972
ucuagaaucacuaggacag

SEQ ID NO: 2197974 - RNA, 19 nt, Artificial Sequence
  Description of Artificial Sequence: Synthetic oligonucleotide
  Sense strand starting at position 3208 of SEQ ID NO: 1883501
cucccucuucuggaucaga

SEQ ID NO: 2197975 - RNA, 19 nt, Artificial Sequence
  Description of Artificial Sequence: Synthetic oligonucleotide
  Antisense strand to SEQ ID NO: 2197974
ucugauccagaagagggag

SEQ ID NO: 2197976 - RNA, 19 nt, Artificial Sequence
  Description of Artificial Sequence: Synthetic oligonucleotide
  Sense strand starting at position 3678 of SEQ ID NO: 1883501
uauugugaacaaugguaaa

SEQ ID NO: 2197977 - RNA, 19 nt, Artificial Sequence
  Description of Artificial Sequence: Synthetic oligonucleotide
  Antisense strand to SEQ ID NO: 2197976
uuuaccauuguucacaaua

SEQ ID NO: 2197978 - RNA, 19 nt, Artificial Sequence
  Description of Artificial Sequence: Synthetic oligonucleotide
  Sense strand starting at position 3689 of SEQ ID NO: 1883501
augguaaauaagggcuuaa

SEQ ID NO: 2197979 - RNA, 19 nt, Artificial Sequence
  Description of Artificial Sequence: Synthetic oligonucleotide
  Antisense strand to SEQ ID NO: 2197978
uuaagcccuuauuuaccau

SEQ ID NO: 2197980 - RNA, 19 nt, Artificial Sequence
  Description of Artificial Sequence: Synthetic oligonucleotide
  Sense strand starting at position 3714 of SEQ ID NO: 1883501
aggguaagcccucaguaaa

SEQ ID NO: 2197981 - RNA, 19 nt, Artificial Sequence
  Description of Artificial Sequence: Synthetic oligonucleotide
  Antisense strand to SEQ ID NO: 2197980
uuuacugagggcuuacccu

SEQ ID NO: 2197982 - RNA, 19 nt, Artificial Sequence
  Description of Artificial Sequence: Synthetic oligonucleotide
  Sense strand starting at position 1257 of SEQ ID NO: 1883501
gaggaaaguugauucugua

SEQ ID NO: 2197983 - RNA, 19 nt, Artificial Sequence
  Description of Artificial Sequence: Synthetic oligonucleotide
  Antisense strand to SEQ ID NO: 2197982
uacagaaucaacuuuccuc

SEQ ID NO: 2197984 - RNA, 19 nt, Artificial Sequence
  Description of Artificial Sequence: Synthetic oligonucleotide
  Sense strand starting at position 3211 of SEQ ID NO: 1883501
ccucuucuggaucagaguu

SEQ ID NO: 2197985 - RNA, 19 nt, Artificial Sequence
  Description of Artificial Sequence: Synthetic oligonucleotide
  Antisense strand to SEQ ID NO: 2197984
aacucugauccagaagagg

SEQ ID NO: 2197986 - RNA, 19 nt, Artificial Sequence
  Description of Artificial Sequence: Synthetic oligonucleotide
  Sense strand starting at position 939 of SEQ ID NO: 1883501
aguaucacucucugaggga

SEQ ID NO: 2197987 - RNA, 19 nt, Artificial Sequence
  Description of Artificial Sequence: Synthetic oligonucleotide
  Antisense strand to SEQ ID NO: 2197986
ucccucagagagugauacu

SEQ ID NO: 2197988 - RNA, 19 nt, Artificial Sequence
  Description of Artificial Sequence: Synthetic oligonucleotide
  Sense strand starting at position 1319 of SEQ ID NO: 1883501
cugugaaauggacaccgua

SEQ ID NO: 2197989 - RNA, 19 nt, Artificial Sequence
  Description of Artificial Sequence: Synthetic oligonucleotide
  Antisense strand to SEQ ID NO: 2197988
uacgguguccauuucacag

SEQ ID NO: 2197990 - RNA, 19 nt, Artificial Sequence
  Description of Artificial Sequence: Synthetic oligonucleotide
  Sense strand starting at position 3948 of SEQ ID NO: 1883501
uuaucuugcccagaugauc

SEQ ID NO: 2197991 - RNA, 19 nt, Artificial Sequence
  Description of Artificial Sequence: Synthetic oligonucleotide
  Antisense strand to SEQ ID NO: 2197990
gaucaucugggcaagauaa

SEQ ID NO: 2197992 - RNA, 19 nt, Artificial Sequence
  Description of Artificial Sequence: Synthetic oligonucleotide
  Sense strand starting at position 1076 of SEQ ID NO: 1883501
acaaaucagugaucagcau

SEQ ID NO: 2197993 - RNA, 19 nt, Artificial Sequence
  Description of Artificial Sequence: Synthetic oligonucleotide
  Antisense strand to SEQ ID NO: 2197992
augcugaucacugauuugu

SEQ ID NO: 2197994 - RNA, 19 nt, Artificial Sequence
  Description of Artificial Sequence: Synthetic oligonucleotide
  Sense strand starting at position 1119 of SEQ ID NO: 1883501
gcaguaaguguagacacaa

SEQ ID NO: 2197995 - RNA, 19 nt, Artificial Sequence
  Description of Artificial Sequence: Synthetic oligonucleotide
  Antisense strand to SEQ ID NO: 2197994
uugugucuacacuuacugc

SEQ ID NO: 2197996 - RNA, 19 nt, Artificial Sequence
  Description of Artificial Sequence: Synthetic oligonucleotide
  Sense strand starting at position 785 of SEQ ID NO: 1883501
gaucgaggaugguuacauc

SEQ ID NO: 2197997 - RNA, 19 nt, Artificial Sequence
  Description of Artificial Sequence: Synthetic oligonucleotide
  Antisense strand to SEQ ID NO: 2197996
gauguaaccauccucgauc

SEQ ID NO: 2197998 - RNA, 19 nt, Artificial Sequence
  Description of Artificial Sequence: Synthetic oligonucleotide
  Sense strand starting at position 626 of SEQ ID NO: 1883501
ggauuugguucugaacaaa

SEQ ID NO: 2197999 - RNA, 19 nt, Artificial Sequence
  Description of Artificial Sequence: Synthetic oligonucleotide
  Antisense strand to SEQ ID NO: 2197998
uuuguucagaaccaaaucc

SEQ ID NO: 2198000 - RNA, 19 nt, Artificial Sequence
  Description of Artificial Sequence: Synthetic oligonucleotide
  Sense strand starting at position 1200 of SEQ ID NO: 1883501
agaaauggccagugaagug

SEQ ID NO: 2198001 - RNA, 19 nt, Artificial Sequence
  Description of Artificial Sequence: Synthetic oligonucleotide
  Antisense strand to SEQ ID NO: 2198000
cacuucacuggccauuucu

SEQ ID NO: 2198002 - RNA, 19 nt, Artificial Sequence
  Description of Artificial Sequence: Synthetic oligonucleotide
  Sense strand starting at position 1261 of SEQ ID NO: 1883501
aaaguugauucuguaugau

SEQ ID NO: 2198003 - RNA, 19 nt, Artificial Sequence
  Description of Artificial Sequence: Synthetic oligonucleotide
  Antisense strand to SEQ ID NO: 2198002
aucauacagaaucaacuuu

SEQ ID NO: 2198004 - RNA, 19 nt, Artificial Sequence
  Description of Artificial Sequence: Synthetic oligonucleotide
  Sense strand starting at position 991 of SEQ ID NO: 1883501
ugcugagggcaagauguau

SEQ ID NO: 2198005 - RNA, 19 nt, Artificial Sequence
  Description of Artificial Sequence: Synthetic oligonucleotide
  Antisense strand to SEQ ID NO: 2198004
auacaucuugcccucagca

SEQ ID NO: 2198006 - RNA, 19 nt, Artificial Sequence
  Description of Artificial Sequence: Synthetic oligonucleotide
  Sense strand starting at position 1522 of SEQ ID NO: 1883501
gggucaaaucgaggucaag

SEQ ID NO: 2198007 - RNA, 19 nt, Artificial Sequence
  Description of Artificial Sequence: Synthetic oligonucleotide
  Antisense strand to SEQ ID NO: 2198006
cuugaccucgauuugaccc

SEQ ID NO: 2198008 - RNA, 19 nt, Artificial Sequence
  Description of Artificial Sequence: Synthetic oligonucleotide
  Sense strand starting at position 3598 of SEQ ID NO: 1883501
ccaagugacuucucucuga

SEQ ID NO: 2198009 - RNA, 19 nt, Artificial Sequence
  Description of Artificial Sequence: Synthetic oligonucleotide
  Antisense strand to SEQ ID NO: 2198008
ucagagagaagucacuugg

SEQ ID NO: 2198010 - RNA, 19 nt, Artificial Sequence
  Description of Artificial Sequence: Synthetic oligonucleotide
  Sense strand starting at position 380 of SEQ ID NO: 1883501
ugcauaagguagucugaaa

SEQ ID NO: 2198011 - RNA, 19 nt, Artificial Sequence
  Description of Artificial Sequence: Synthetic oligonucleotide
  Antisense strand to SEQ ID NO: 2198010
uuucagacuaccuuaugca

SEQ ID NO: 2198012 - RNA, 19 nt, Artificial Sequence
  Description of Artificial Sequence: Synthetic oligonucleotide
  Sense strand starting at position 372 of SEQ ID NO: 1883501
ggccauucugcauaaggua

SEQ ID NO: 2198013 - RNA, 19 nt, Artificial Sequence
  Description of Artificial Sequence: Synthetic oligonucleotide
  Antisense strand to SEQ ID NO: 2198012
uaccuuaugcagaauggcc

SEQ ID NO: 2198014 - RNA, 19 nt, Artificial Sequence
  Description of Artificial Sequence: Synthetic oligonucleotide
  Sense strand starting at position 2544 of SEQ ID NO: 1883501
ggaggagucucagcucuca

SEQ ID NO: 2198015 - RNA, 19 nt, Artificial Sequence
  Description of Artificial Sequence: Synthetic oligonucleotide
  Antisense strand to SEQ ID NO: 2198014
ugagagcugagacuccucc

SEQ ID NO: 2198016 - RNA, 19 nt, Artificial Sequence
  Description of Artificial Sequence: Synthetic oligonucleotide
  Sense strand starting at position 1512 of SEQ ID NO: 1883501
ugaggccucugggucaaau

SEQ ID NO: 2198017 - RNA, 19 nt, Artificial Sequence
  Description of Artificial Sequence: Synthetic oligonucleotide
  Antisense strand to SEQ ID NO: 2198016
auuugacccagaggccuca

SEQ ID NO: 2198018 - RNA, 19 nt, Artificial Sequence
  Description of Artificial Sequence: Synthetic oligonucleotide
  Sense strand starting at position 407 of SEQ ID NO: 1883501
gucauaaggugacauuuaa

SEQ ID NO: 2198019 - RNA, 19 nt, Artificial Sequence
  Description of Artificial Sequence: Synthetic oligonucleotide
  Antisense strand to SEQ ID NO: 2198018
uuaaaugucaccuuaugac

SEQ ID NO: 2198020 - RNA, 19 nt, Artificial Sequence
  Description of Artificial Sequence: Synthetic oligonucleotide
  Sense strand starting at position 1400 of SEQ ID NO: 1883501
cuguuauucccugaugguu

SEQ ID NO: 2198021 - RNA, 19 nt, Artificial Sequence
  Description of Artificial Sequence: Synthetic oligonucleotide
  Antisense strand to SEQ ID NO: 2198020
aaccaucagggaauaacag

SEQ ID NO: 2198022 - RNA, 19 nt, Artificial Sequence
  Description of Artificial Sequence: Synthetic oligonucleotide
  Sense strand starting at position 1106 of SEQ ID NO: 1883501
aaaucauuccgaggcagua

SEQ ID NO: 2198023 - RNA, 19 nt, Artificial Sequence
  Description of Artificial Sequence: Synthetic oligonucleotide
  Antisense strand to SEQ ID NO: 2198022
uacugccucggaaugauuu

SEQ ID NO: 2198024 - RNA, 19 nt, Artificial Sequence
  Description of Artificial Sequence: Synthetic oligonucleotide
  Sense strand starting at position 3602 of SEQ ID NO: 1883501
gugacuucucucugaaccu

SEQ ID NO: 2198025 - RNA, 19 nt, Artificial Sequence
  Description of Artificial Sequence: Synthetic oligonucleotide
  Antisense strand to SEQ ID NO: 2198024
agguucagagagaagucac

SEQ ID NO: 2198026 - RNA, 19 nt, Artificial Sequence
  Description of Artificial Sequence: Synthetic oligonucleotide
  Sense strand starting at position 3587 of SEQ ID NO: 1883501
gaucguuugggccaaguga

SEQ ID NO: 2198027 - RNA, 19 nt, Artificial Sequence
  Description of Artificial Sequence: Synthetic oligonucleotide
  Antisense strand to SEQ ID NO: 2198026
ucacuuggcccaaacgauc

SEQ ID NO: 2198028 - RNA, 19 nt, Artificial Sequence
  Description of Artificial Sequence: Synthetic oligonucleotide
  Sense strand starting at position 1264 of SEQ ID NO: 1883501
guugauucuguaugaucac

SEQ ID NO: 2198029 - RNA, 19 nt, Artificial Sequence
  Description of Artificial Sequence: Synthetic oligonucleotide
  Antisense strand to SEQ ID NO: 2198028
gugaucauacagaaucaac

SEQ ID NO: 2198030 - RNA, 19 nt, Artificial Sequence
  Description of Artificial Sequence: Synthetic oligonucleotide
  Sense strand starting at position 344 of SEQ ID NO: 1883501
caagcaguuuaagcagauu

SEQ ID NO: 2198031 - RNA, 19 nt, Artificial Sequence
  Description of Artificial Sequence: Synthetic oligonucleotide
  Antisense strand to SEQ ID NO: 2198030
aaucugcuuaaacugcuug

SEQ ID NO: 2198032 - RNA, 19 nt, Artificial Sequence
  Description of Artificial Sequence: Synthetic oligonucleotide
  Sense strand starting at position 1003 of SEQ ID NO: 1883501
gauguauuguguuugagau

SEQ ID NO: 2198033 - RNA, 19 nt, Artificial Sequence
  Description of Artificial Sequence: Synthetic oligonucleotide
  Antisense strand to SEQ ID NO: 2198032
aucucaaacacaauacauc

SEQ ID NO: 2198034 - RNA, 19 nt, Artificial Sequence
  Description of Artificial Sequence: Synthetic oligonucleotide
  Sense strand starting at position 1004 of SEQ ID NO: 1883501
auguauuguguuugagaug

SEQ ID NO: 2198035 - RNA, 19 nt, Artificial Sequence
  Description of Artificial Sequence: Synthetic oligonucleotide
  Antisense strand to SEQ ID NO: 2198034
caucucaaacacaauacau

SEQ ID NO: 2198036 - RNA, 19 nt, Artificial Sequence
  Description of Artificial Sequence: Synthetic oligonucleotide
  Sense strand starting at position 1399 of SEQ ID NO: 1883501
acuguuauucccugauggu

SEQ ID NO: 2198037 - RNA, 19 nt, Artificial Sequence
  Description of Artificial Sequence: Synthetic oligonucleotide
  Antisense strand to SEQ ID NO: 2198036
accaucagggaauaacagu

SEQ ID NO: 2198038 - RNA, 19 nt, Artificial Sequence
  Description of Artificial Sequence: Synthetic oligonucleotide
  Sense strand starting at position 625 of SEQ ID NO: 1883501
uggauuugguucugaacaa

SEQ ID NO: 2198039 - RNA, 19 nt, Artificial Sequence
  Description of Artificial Sequence: Synthetic oligonucleotide
  Antisense strand to SEQ ID NO: 2198038
uuguucagaaccaaaucca

SEQ ID NO: 2198040 - RNA, 19 nt, Artificial Sequence
  Description of Artificial Sequence: Synthetic oligonucleotide
  Sense strand starting at position 3724 of SEQ ID NO: 1883501
cucaguaaauugucacugu

SEQ ID NO: 2198041 - RNA, 19 nt, Artificial Sequence
  Description of Artificial Sequence: Synthetic oligonucleotide
  Antisense strand to SEQ ID NO: 2198040
acagugacaauuuacugag

SEQ ID NO: 2198042 - RNA, 19 nt, Artificial Sequence
  Description of Artificial Sequence: Synthetic oligonucleotide
  Sense strand starting at position 3622 of SEQ ID NO: 1883501
auauuucucuucugggaua

SEQ ID NO: 2198043 - RNA, 19 nt, Artificial Sequence
  Description of Artificial Sequence: Synthetic oligonucleotide
  Antisense strand to SEQ ID NO: 2198042
uaucccagaagagaaauau

SEQ ID NO: 2198044 - RNA, 19 nt, Artificial Sequence
  Description of Artificial Sequence: Synthetic oligonucleotide
  Sense strand starting at position 3727 of SEQ ID NO: 1883501
aguaaauugucacugugug

SEQ ID NO: 2198045 - RNA, 19 nt, Artificial Sequence
  Description of Artificial Sequence: Synthetic oligonucleotide
  Antisense strand to SEQ ID NO: 2198044
cacacagugacaauuuacu

SEQ ID NO: 2198046 - RNA, 19 nt, Artificial Sequence
  Description of Artificial Sequence: Synthetic oligonucleotide
  Sense strand starting at position 3412 of SEQ ID NO: 1883501
ggaguuugggucugcuuag

SEQ ID NO: 2198047 - RNA, 19 nt, Artificial Sequence
  Description of Artificial Sequence: Synthetic oligonucleotide
  Antisense strand to SEQ ID NO: 2198046
cuaagcagacccaaacucc

SEQ ID NO: 2198048 - RNA, 19 nt, Artificial Sequence
  Description of Artificial Sequence: Synthetic oligonucleotide
  Sense strand starting at position 3672 of SEQ ID NO: 1883501
ggaagauauugugaacaau

SEQ ID NO: 2198049 - RNA, 19 nt, Artificial Sequence
  Description of Artificial Sequence: Synthetic oligonucleotide
  Antisense strand to SEQ ID NO: 2198048
auuguucacaauaucuucc

SEQ ID NO: 2198050 - RNA, 19 nt, Artificial Sequence
  Description of Artificial Sequence: Synthetic oligonucleotide
  Sense strand starting at position 1085 of SEQ ID NO: 1883501
ugaucagcauuuggauauu

SEQ ID NO: 2198051 - RNA, 19 nt, Artificial Sequence
  Description of Artificial Sequence: Synthetic oligonucleotide
  Antisense strand to SEQ ID NO: 2198050
aauauccaaaugcugauca

SEQ ID NO: 2198052 - RNA, 19 nt, Artificial Sequence
  Description of Artificial Sequence: Synthetic oligonucleotide
  Sense strand starting at position 3859 of SEQ ID NO: 1883501
guguacucuggguguuaga

SEQ ID NO: 2198053 - RNA, 19 nt, Artificial Sequence
  Description of Artificial Sequence: Synthetic oligonucleotide
  Antisense strand to SEQ ID NO: 2198052
ucuaacacccagaguacac

SEQ ID NO: 2198054 - RNA, 19 nt, Artificial Sequence
  Description of Artificial Sequence: Synthetic oligonucleotide
  Sense strand starting at position 2297 of SEQ ID NO: 1883500
cucccucuucuggaucaga

SEQ ID NO: 2198055 - RNA, 19 nt, Artificial Sequence
  Description of Artificial Sequence: Synthetic oligonucleotide
  Antisense strand to SEQ ID NO: 2198054
ucugauccagaagagggag

SEQ ID NO: 2198056 - RNA, 19 nt, Artificial Sequence
  Description of Artificial Sequence: Synthetic oligonucleotide
  Sense strand starting at position 3550 of SEQ ID NO: 1883500
agugucugacuugagacau

SEQ ID NO: 2198057 - RNA, 19 nt, Artificial Sequence
  Description of Artificial Sequence: Synthetic oligonucleotide
  Antisense strand to SEQ ID NO: 2198056
augucucaagucagacacu

SEQ ID NO: 2198058 - RNA, 19 nt, Artificial Sequence
  Description of Artificial Sequence: Synthetic oligonucleotide
  Sense strand starting at position 2767 of SEQ ID NO: 1883500
uauugugaacaaugguaaa

SEQ ID NO: 2198059 - RNA, 19 nt, Artificial Sequence
  Description of Artificial Sequence: Synthetic oligonucleotide
  Antisense strand to SEQ ID NO: 2198058
uuuaccauuguucacaaua

SEQ ID NO: 2198060 - RNA, 19 nt, Artificial Sequence
  Description of Artificial Sequence: Synthetic oligonucleotide
  Sense strand starting at position 3354 of SEQ ID NO: 1883500
gcucaauuucgccaguaau

SEQ ID NO: 2198061 - RNA, 19 nt, Artificial Sequence
  Description of Artificial Sequence: Synthetic oligonucleotide
  Antisense strand to SEQ ID NO: 2198060
auuacuggcgaaauugagc

SEQ ID NO: 2198062 - RNA, 19 nt, Artificial Sequence
  Description of Artificial Sequence: Synthetic oligonucleotide
  Sense strand starting at position 2778 of SEQ ID NO: 1883500
augguaaauaagggcuuaa

SEQ ID NO: 2198063 - RNA, 19 nt, Artificial Sequence
  Description of Artificial Sequence: Synthetic oligonucleotide
  Antisense strand to SEQ ID NO: 2198062
uuaagcccuuauuuaccau

SEQ ID NO: 2198064 - RNA, 19 nt, Artificial Sequence
  Description of Artificial Sequence: Synthetic oligonucleotide
  Sense strand starting at position 3490 of SEQ ID NO: 1883500
augauuauucugggaagca

SEQ ID NO: 2198065 - RNA, 19 nt, Artificial Sequence
  Description of Artificial Sequence: Synthetic oligonucleotide
  Antisense strand to SEQ ID NO: 2198064
ugcuucccagaauaaucau

SEQ ID NO: 2198066 - RNA, 19 nt, Artificial Sequence
  Description of Artificial Sequence: Synthetic oligonucleotide
  Sense strand starting at position 3651 of SEQ ID NO: 1883500
ugagaucguguacauuaaa

SEQ ID NO: 2198067 - RNA, 19 nt, Artificial Sequence
  Description of Artificial Sequence: Synthetic oligonucleotide
  Antisense strand to SEQ ID NO: 2198066
uuuaauguacacgaucuca

SEQ ID NO: 2198068 - RNA, 19 nt, Artificial Sequence
  Description of Artificial Sequence: Synthetic oligonucleotide
  Sense strand starting at position 2803 of SEQ ID NO: 1883500
aggguaagcccucaguaaa

SEQ ID NO: 2198069 - RNA, 19 nt, Artificial Sequence
  Description of Artificial Sequence: Synthetic oligonucleotide
  Antisense strand to SEQ ID NO: 2198068
uuuacugagggcuuacccu

SEQ ID NO: 2198070 - RNA, 19 nt, Artificial Sequence
  Description of Artificial Sequence: Synthetic oligonucleotide
  Sense strand starting at position 346 of SEQ ID NO: 1883500
gaggaaaguugauucugua

SEQ ID NO: 2198071 - RNA, 19 nt, Artificial Sequence
  Description of Artificial Sequence: Synthetic oligonucleotide
  Antisense strand to SEQ ID NO: 2198070
uacagaaucaacuuuccuc

SEQ ID NO: 2198072 - RNA, 19 nt, Artificial Sequence
  Description of Artificial Sequence: Synthetic oligonucleotide
  Sense strand starting at position 2300 of SEQ ID NO: 1883500
ccucuucuggaucagaguu

SEQ ID NO: 2198073 - RNA, 19 nt, Artificial Sequence
  Description of Artificial Sequence: Synthetic oligonucleotide
  Antisense strand to SEQ ID NO: 2198072
aacucugauccagaagagg

SEQ ID NO: 2198074 - RNA, 19 nt, Artificial Sequence
  Description of Artificial Sequence: Synthetic oligonucleotide
  Sense strand starting at position 28 of SEQ ID NO: 1883500
aguaucacucucugaggga

SEQ ID NO: 2198075 - RNA, 19 nt, Artificial Sequence
  Description of Artificial Sequence: Synthetic oligonucleotide
  Antisense strand to SEQ ID NO: 2198074
ucccucagagagugauacu

SEQ ID NO: 2198076 - RNA, 19 nt, Artificial Sequence
  Description of Artificial Sequence: Synthetic oligonucleotide
  Sense strand starting at position 408 of SEQ ID NO: 1883500
cugugaaauggacaccgua

SEQ ID NO: 2198077 - RNA, 19 nt, Artificial Sequence
  Description of Artificial Sequence: Synthetic oligonucleotide
  Antisense strand to SEQ ID NO: 2198076
uacgguguccauuucacag

SEQ ID NO: 2198078 - RNA, 19 nt, Artificial Sequence
  Description of Artificial Sequence: Synthetic oligonucleotide
  Sense strand starting at position 3037 of SEQ ID NO: 1883500
uuaucuugcccagaugauc

SEQ ID NO: 2198079 - RNA, 19 nt, Artificial Sequence
  Description of Artificial Sequence: Synthetic oligonucleotide
  Antisense strand to SEQ ID NO: 2198078
gaucaucugggcaagauaa

SEQ ID NO: 2198080 - RNA, 19 nt, Artificial Sequence
  Description of Artificial Sequence: Synthetic oligonucleotide
  Sense strand starting at position 3654 of SEQ ID NO: 1883500
gaucguguacauuaaauac

SEQ ID NO: 2198081 - RNA, 19 nt, Artificial Sequence
  Description of Artificial Sequence: Synthetic oligonucleotide
  Antisense strand to SEQ ID NO: 2198080
guauuuaauguacacgauc

SEQ ID NO: 2198082 - RNA, 19 nt, Artificial Sequence
  Description of Artificial Sequence: Synthetic oligonucleotide
  Sense strand starting at position 165 of SEQ ID NO: 1883500
acaaaucagugaucagcau

SEQ ID NO: 2198083 - RNA, 19 nt, Artificial Sequence
  Description of Artificial Sequence: Synthetic oligonucleotide
  Antisense strand to SEQ ID NO: 2198082
augcugaucacugauuugu

SEQ ID NO: 2198084 - RNA, 19 nt, Artificial Sequence
  Description of Artificial Sequence: Synthetic oligonucleotide
  Sense strand starting at position 208 of SEQ ID NO: 1883500
gcaguaaguguagacacaa

SEQ ID NO: 2198085 - RNA, 19 nt, Artificial Sequence
  Description of Artificial Sequence: Synthetic oligonucleotide
  Antisense strand to SEQ ID NO: 2198084
uugugucuacacuuacugc

SEQ ID NO: 2198086 - RNA, 19 nt, Artificial Sequence
  Description of Artificial Sequence: Synthetic oligonucleotide
  Sense strand starting at position 3503 of SEQ ID NO: 1883500
gaagcagacuagucccaua

SEQ ID NO: 2198087 - RNA, 19 nt, Artificial Sequence
  Description of Artificial Sequence: Synthetic oligonucleotide
  Antisense strand to SEQ ID NO: 2198086
uaugggacuagucugcuuc

SEQ ID NO: 2198088 - RNA, 19 nt, Artificial Sequence
  Description of Artificial Sequence: Synthetic oligonucleotide
  Sense strand starting at position 289 of SEQ ID NO: 1883500
agaaauggccagugaagug

SEQ ID NO: 2198089 - RNA, 19 nt, Artificial Sequence
  Description of Artificial Sequence: Synthetic oligonucleotide
  Antisense strand to SEQ ID NO: 2198088
cacuucacuggccauuucu

SEQ ID NO: 2198090 - RNA, 19 nt, Artificial Sequence
  Description of Artificial Sequence: Synthetic oligonucleotide
  Sense strand starting at position 350 of SEQ ID NO: 1883500
aaaguugauucuguaugau

SEQ ID NO: 2198091 - RNA, 19 nt, Artificial Sequence
  Description of Artificial Sequence: Synthetic oligonucleotide
  Antisense strand to SEQ ID NO: 2198090
aucauacagaaucaacuuu

SEQ ID NO: 2198092 - RNA, 19 nt, Artificial Sequence
  Description of Artificial Sequence: Synthetic oligonucleotide
  Sense strand starting at position 80 of SEQ ID NO: 1883500
ugcugagggcaagauguau

SEQ ID NO: 2198093 - RNA, 19 nt, Artificial Sequence
  Description of Artificial Sequence: Synthetic oligonucleotide
  Antisense strand to SEQ ID NO: 2198092
auacaucuugcccucagca

SEQ ID NO: 2198094 - RNA, 19 nt, Artificial Sequence
  Description of Artificial Sequence: Synthetic oligonucleotide
  Sense strand starting at position 3410 of SEQ ID NO: 1883500
cuuggaauuggucagacgu

SEQ ID NO: 2198095 - RNA, 19 nt, Artificial Sequence
  Description of Artificial Sequence: Synthetic oligonucleotide
  Antisense strand to SEQ ID NO: 2198094
acgucugaccaauuccaag

SEQ ID NO: 2198096 - RNA, 19 nt, Artificial Sequence
  Description of Artificial Sequence: Synthetic oligonucleotide
  Sense strand starting at position 611 of SEQ ID NO: 1883500
gggucaaaucgaggucaag

SEQ ID NO: 2198097 - RNA, 19 nt, Artificial Sequence
  Description of Artificial Sequence: Synthetic oligonucleotide
  Antisense strand to SEQ ID NO: 2198096
cuugaccucgauuugaccc

SEQ ID NO: 2198098 - RNA, 19 nt, Artificial Sequence
  Description of Artificial Sequence: Synthetic oligonucleotide
  Sense strand starting at position 3547 of SEQ ID NO: 1883500
cuaagugucugacuugaga

SEQ ID NO: 2198099 - RNA, 19 nt, Artificial Sequence
  Description of Artificial Sequence: Synthetic oligonucleotide
  Antisense strand to SEQ ID NO: 2198098
ucucaagucagacacuuag

SEQ ID NO: 2198100 - RNA, 19 nt, Artificial Sequence
  Description of Artificial Sequence: Synthetic oligonucleotide
  Sense strand starting at position 3353 of SEQ ID NO: 1883500
ugcucaauuucgccaguaa

SEQ ID NO: 2198101 - RNA, 19 nt, Artificial Sequence
  Description of Artificial Sequence: Synthetic oligonucleotide
  Antisense strand to SEQ ID NO: 2198100
uuacuggcgaaauugagca

SEQ ID NO: 2198102 - RNA, 19 nt, Artificial Sequence
  Description of Artificial Sequence: Synthetic oligonucleotide
  Sense strand starting at position 2687 of SEQ ID NO: 1883500
ccaagugacuucucucuga

SEQ ID NO: 2198103 - RNA, 19 nt, Artificial Sequence
  Description of Artificial Sequence: Synthetic oligonucleotide
  Antisense strand to SEQ ID NO: 2198102
ucagagagaagucacuugg

SEQ ID NO: 2198104 - RNA, 19 nt, Artificial Sequence
  Description of Artificial Sequence: Synthetic oligonucleotide
  Sense strand starting at position 1633 of SEQ ID NO: 1883500
ggaggagucucagcucuca

SEQ ID NO: 2198105 - RNA, 19 nt, Artificial Sequence
  Description of Artificial Sequence: Synthetic oligonucleotide
  Antisense strand to SEQ ID NO: 2198104
ugagagcugagacuccucc

SEQ ID NO: 2198106 - RNA, 19 nt, Artificial Sequence
  Description of Artificial Sequence: Synthetic oligonucleotide
  Sense strand starting at position 601 of SEQ ID NO: 1883500
ugaggccucugggucaaau

SEQ ID NO: 2198107 - RNA, 19 nt, Artificial Sequence
  Description of Artificial Sequence: Synthetic oligonucleotide
  Antisense strand to SEQ ID NO: 2198106
auuugacccagaggccuca

SEQ ID NO: 2198108 - RNA, 19 nt, Artificial Sequence
  Description of Artificial Sequence: Synthetic oligonucleotide
  Sense strand starting at position 489 of SEQ ID NO: 1883500
cuguuauucccugaugguu

SEQ ID NO: 2198109 - RNA, 19 nt, Artificial Sequence
  Description of Artificial Sequence: Synthetic oligonucleotide
  Antisense strand to SEQ ID NO: 2198108
aaccaucagggaauaacag

SEQ ID NO: 2198110 - RNA, 19 nt, Artificial Sequence
  Description of Artificial Sequence: Synthetic oligonucleotide
  Sense strand starting at position 3612 of SEQ ID NO: 1883500
ugucgaugauuaccuuaca

SEQ ID NO: 2198111 - RNA, 19 nt, Artificial Sequence
  Description of Artificial Sequence: Synthetic oligonucleotide
  Antisense strand to SEQ ID NO: 2198110
uguaagguaaucaucgaca

SEQ ID NO: 2198112 - RNA, 19 nt, Artificial Sequence
  Description of Artificial Sequence: Synthetic oligonucleotide
  Sense strand starting at position 195 of SEQ ID NO: 1883500
aaaucauuccgaggcagua

SEQ ID NO: 2198113 - RNA, 19 nt, Artificial Sequence
  Description of Artificial Sequence: Synthetic oligonucleotide
  Antisense strand to SEQ ID NO: 2198112
uacugccucggaaugauuu

SEQ ID NO: 2198114 - RNA, 19 nt, Artificial Sequence
  Description of Artificial Sequence: Synthetic oligonucleotide
  Sense strand starting at position 2691 of SEQ ID NO: 1883500
gugacuucucucugaaccu

SEQ ID NO: 2198115 - RNA, 19 nt, Artificial Sequence
  Description of Artificial Sequence: Synthetic oligonucleotide
  Antisense strand to SEQ ID NO: 2198114
agguucagagagaagucac

SEQ ID NO: 2198116 - RNA, 19 nt, Artificial Sequence
  Description of Artificial Sequence: Synthetic oligonucleotide
  Sense strand starting at position 2676 of SEQ ID NO: 1883500
gaucguuugggccaaguga

SEQ ID NO: 2198117 - RNA, 19 nt, Artificial Sequence
  Description of Artificial Sequence: Synthetic oligonucleotide
  Antisense strand to SEQ ID NO: 2198116
ucacuuggcccaaacgauc

SEQ ID NO: 2198118 - RNA, 19 nt, Artificial Sequence
  Description of Artificial Sequence: Synthetic oligonucleotide
  Sense strand starting at position 353 of SEQ ID NO: 1883500
guugauucuguaugaucac

SEQ ID NO: 2198119 - RNA, 19 nt, Artificial Sequence
  Description of Artificial Sequence: Synthetic oligonucleotide
  Antisense strand to SEQ ID NO: 2198118
gugaucauacagaaucaac

SEQ ID NO: 2198120 - RNA, 19 nt, Artificial Sequence
  Description of Artificial Sequence: Synthetic oligonucleotide
  Sense strand starting at position 92 of SEQ ID NO: 1883500
gauguauuguguuugagau

SEQ ID NO: 2198121 - RNA, 19 nt, Artificial Sequence
  Description of Artificial Sequence: Synthetic oligonucleotide
  Antisense strand to SEQ ID NO: 2198120
aucucaaacacaauacauc

SEQ ID NO: 2198122 - RNA, 19 nt, Artificial Sequence
  Description of Artificial Sequence: Synthetic oligonucleotide
  Sense strand starting at position 3423 of SEQ ID NO: 1883500
agacgugaacugugguaau

SEQ ID NO: 2198123 - RNA, 19 nt, Artificial Sequence
  Description of Artificial Sequence: Synthetic oligonucleotide
  Antisense strand to SEQ ID NO: 2198122
auuaccacaguucacgucu

SEQ ID NO: 2198124 - RNA, 19 nt, Artificial Sequence
  Description of Artificial Sequence: Synthetic oligonucleotide
  Sense strand starting at position 3107 of SEQ ID NO: 1883500
gaguuugcauuccucauag

SEQ ID NO: 2198125 - RNA, 19 nt, Artificial Sequence
  Description of Artificial Sequence: Synthetic oligonucleotide
  Antisense strand to SEQ ID NO: 2198124
cuaugaggaaugcaaacuc

SEQ ID NO: 2198126 - RNA, 19 nt, Artificial Sequence
  Description of Artificial Sequence: Synthetic oligonucleotide
  Sense strand starting at position 93 of SEQ ID NO: 1883500
auguauuguguuugagaug

SEQ ID NO: 2198127 - RNA, 19 nt, Artificial Sequence
  Description of Artificial Sequence: Synthetic oligonucleotide
  Antisense strand to SEQ ID NO: 2198126
caucucaaacacaauacau

SEQ ID NO: 2198128 - RNA, 19 nt, Artificial Sequence
  Description of Artificial Sequence: Synthetic oligonucleotide
  Sense strand starting at position 488 of SEQ ID NO: 1883500
acuguuauucccugauggu

SEQ ID NO: 2198129 - RNA, 19 nt, Artificial Sequence
  Description of Artificial Sequence: Synthetic oligonucleotide
  Antisense strand to SEQ ID NO: 2198128
accaucagggaauaacagu

SEQ ID NO: 2198130 - RNA, 19 nt, Artificial Sequence
  Description of Artificial Sequence: Synthetic oligonucleotide
  Sense strand starting at position 2813 of SEQ ID NO: 1883500
cucaguaaauugucacugu

SEQ ID NO: 2198131 - RNA, 19 nt, Artificial Sequence
  Description of Artificial Sequence: Synthetic oligonucleotide
  Antisense strand to SEQ ID NO: 2198130
acagugacaauuuacugag

SEQ ID NO: 2198132 - RNA, 19 nt, Artificial Sequence
  Description of Artificial Sequence: Synthetic oligonucleotide
  Sense strand starting at position 3109 of SEQ ID NO: 1883500
guuugcauuccucauagca

SEQ ID NO: 2198133 - RNA, 19 nt, Artificial Sequence
  Description of Artificial Sequence: Synthetic oligonucleotide
  Antisense strand to SEQ ID NO: 2198132
ugcuaugaggaaugcaaac

SEQ ID NO: 2198134 - RNA, 19 nt, Artificial Sequence
  Description of Artificial Sequence: Synthetic oligonucleotide
  Sense strand starting at position 52 of SEQ ID NO: 1883502
gucucaauugcagaaauaa

SEQ ID NO: 2198135 - RNA, 19 nt, Artificial Sequence
  Description of Artificial Sequence: Synthetic oligonucleotide
  Antisense strand to SEQ ID NO: 2198134
uuauuucugcaauugagac

SEQ ID NO: 2198136 - RNA, 19 nt, Artificial Sequence
  Description of Artificial Sequence: Synthetic oligonucleotide
  Sense strand starting at position 846 of SEQ ID NO: 1883502
ugacaugaacuccauguuu

SEQ ID NO: 2198137 - RNA, 19 nt, Artificial Sequence
  Description of Artificial Sequence: Synthetic oligonucleotide
  Antisense strand to SEQ ID NO: 2198136
aaacauggaguucauguca

SEQ ID NO: 2198138 - RNA, 19 nt, Artificial Sequence
  Description of Artificial Sequence: Synthetic oligonucleotide
  Sense strand starting at position 1915 of SEQ ID NO: 1883502
acaagaagguucuuggauc

SEQ ID NO: 2198139 - RNA, 19 nt, Artificial Sequence
  Description of Artificial Sequence: Synthetic oligonucleotide
  Antisense strand to SEQ ID NO: 2198138
gauccaagaaccuucuugu

SEQ ID NO: 2198140 - RNA, 19 nt, Artificial Sequence
  Description of Artificial Sequence: Synthetic oligonucleotide
  Sense strand starting at position 3332 of SEQ ID NO: 1883502
gggcuauuaacaugacaga

SEQ ID NO: 2198141 - RNA, 19 nt, Artificial Sequence
  Description of Artificial Sequence: Synthetic oligonucleotide
  Antisense strand to SEQ ID NO: 2198140
ucugucauguuaauagccc

SEQ ID NO: 2198142 - RNA, 19 nt, Artificial Sequence
  Description of Artificial Sequence: Synthetic oligonucleotide
  Sense strand starting at position 3627 of SEQ ID NO: 1883502
accuguguggaccauaaau

SEQ ID NO: 2198143 - RNA, 19 nt, Artificial Sequence
  Description of Artificial Sequence: Synthetic oligonucleotide
  Antisense strand to SEQ ID NO: 2198142
auuuaugguccacacaggu

SEQ ID NO: 2198144 - RNA, 19 nt, Artificial Sequence
  Description of Artificial Sequence: Synthetic oligonucleotide
  Sense strand starting at position 3162 of SEQ ID NO: 1883502
agugguuguaguggaauuu

SEQ ID NO: 2198145 - RNA, 19 nt, Artificial Sequence
  Description of Artificial Sequence: Synthetic oligonucleotide
  Antisense strand to SEQ ID NO: 2198144
aaauuccacuacaaccacu

SEQ ID NO: 2198146 - RNA, 19 nt, Artificial Sequence
  Description of Artificial Sequence: Synthetic oligonucleotide
  Sense strand starting at position 2873 of SEQ ID NO: 1883502
cuacuuaaguacucaagag

SEQ ID NO: 2198147 - RNA, 19 nt, Artificial Sequence
  Description of Artificial Sequence: Synthetic oligonucleotide
  Antisense strand to SEQ ID NO: 2198146
cucuugaguacuuaaguag

SEQ ID NO: 2198148 - RNA, 19 nt, Artificial Sequence
  Description of Artificial Sequence: Synthetic oligonucleotide
  Sense strand starting at position 2944 of SEQ ID NO: 1883502
acaugacugucucuaagaa

SEQ ID NO: 2198149 - RNA, 19 nt, Artificial Sequence
  Description of Artificial Sequence: Synthetic oligonucleotide
  Antisense strand to SEQ ID NO: 2198148
uucuuagagacagucaugu

SEQ ID NO: 2198150 - RNA, 19 nt, Artificial Sequence
  Description of Artificial Sequence: Synthetic oligonucleotide
  Sense strand starting at position 3584 of SEQ ID NO: 1883502
agguaauuaaguuaagguu

SEQ ID NO: 2198151 - RNA, 19 nt, Artificial Sequence
  Description of Artificial Sequence: Synthetic oligonucleotide
  Antisense strand to SEQ ID NO: 2198150
aaccuuaacuuaauuaccu

SEQ ID NO: 2198152 - RNA, 19 nt, Artificial Sequence
  Description of Artificial Sequence: Synthetic oligonucleotide
  Sense strand starting at position 3479 of SEQ ID NO: 1883502
auacuuuccugacugaaug

SEQ ID NO: 2198153 - RNA, 19 nt, Artificial Sequence
  Description of Artificial Sequence: Synthetic oligonucleotide
  Antisense strand to SEQ ID NO: 2198152
cauucagucaggaaaguau

SEQ ID NO: 2198154 - RNA, 19 nt, Artificial Sequence
  Description of Artificial Sequence: Synthetic oligonucleotide
  Sense strand starting at position 2752 of SEQ ID NO: 1883502
cuaacuucuccaggacaug

SEQ ID NO: 2198155 - RNA, 19 nt, Artificial Sequence
  Description of Artificial Sequence: Synthetic oligonucleotide
  Antisense strand to SEQ ID NO: 2198154
cauguccuggagaaguuag

SEQ ID NO: 2198156 - RNA, 19 nt, Artificial Sequence
  Description of Artificial Sequence: Synthetic oligonucleotide
  Sense strand starting at position 2467 of SEQ ID NO: 1883502
guucuuauucgagauggag

SEQ ID NO: 2198157 - RNA, 19 nt, Artificial Sequence
  Description of Artificial Sequence: Synthetic oligonucleotide
  Antisense strand to SEQ ID NO: 2198156
cuccaucucgaauaagaac

SEQ ID NO: 2198158 - RNA, 19 nt, Artificial Sequence
  Description of Artificial Sequence: Synthetic oligonucleotide
  Sense strand starting at position 1210 of SEQ ID NO: 1883502
gauguuucugggcaagaug

SEQ ID NO: 2198159 - RNA, 19 nt, Artificial Sequence
  Description of Artificial Sequence: Synthetic oligonucleotide
  Antisense strand to SEQ ID NO: 2198158
caucuugcccagaaacauc

SEQ ID NO: 2198160 - RNA, 19 nt, Artificial Sequence
  Description of Artificial Sequence: Synthetic oligonucleotide
  Sense strand starting at position 1225 of SEQ ID NO: 1883502
gaugaucgcccugaauaac

SEQ ID NO: 2198161 - RNA, 19 nt, Artificial Sequence
  Description of Artificial Sequence: Synthetic oligonucleotide
  Antisense strand to SEQ ID NO: 2198160
guuauucagggcgaucauc

SEQ ID NO: 2198162 - RNA, 19 nt, Artificial Sequence
  Description of Artificial Sequence: Synthetic oligonucleotide
  Sense strand starting at position 308 of SEQ ID NO: 1883502
agagcagagccuuagacuu

SEQ ID NO: 2198163 - RNA, 19 nt, Artificial Sequence
  Description of Artificial Sequence: Synthetic oligonucleotide
  Antisense strand to SEQ ID NO: 2198162
aagucuaaggcucugcucu

SEQ ID NO: 2198164 - RNA, 19 nt, Artificial Sequence
  Description of Artificial Sequence: Synthetic oligonucleotide
  Sense strand starting at position 613 of SEQ ID NO: 1883502
caguuuguggaugggaaga

SEQ ID NO: 2198165 - RNA, 19 nt, Artificial Sequence
  Description of Artificial Sequence: Synthetic oligonucleotide
  Antisense strand to SEQ ID NO: 2198164
ucuucccauccacaaacug

SEQ ID NO: 2198166 - RNA, 19 nt, Artificial Sequence
  Description of Artificial Sequence: Synthetic oligonucleotide
  Sense strand starting at position 98 of SEQ ID NO: 1883502
ucuaauagguucuugaaac

SEQ ID NO: 2198167 - RNA, 19 nt, Artificial Sequence
  Description of Artificial Sequence: Synthetic oligonucleotide
  Antisense strand to SEQ ID NO: 2198166
guuucaagaaccuauuaga

SEQ ID NO: 2198168 - RNA, 19 nt, Artificial Sequence
  Description of Artificial Sequence: Synthetic oligonucleotide
  Sense strand starting at position 3024 of SEQ ID NO: 1883502
gugauugcucuccagaagg

SEQ ID NO: 2198169 - RNA, 19 nt, Artificial Sequence
  Description of Artificial Sequence: Synthetic oligonucleotide
  Antisense strand to SEQ ID NO: 2198168
ccuucuggagagcaaucac

SEQ ID NO: 2198170 - RNA, 19 nt, Artificial Sequence
  Description of Artificial Sequence: Synthetic oligonucleotide
  Sense strand starting at position 1148 of SEQ ID NO: 1883502
aaacuugcuccuggaugga

SEQ ID NO: 2198171 - RNA, 19 nt, Artificial Sequence
  Description of Artificial Sequence: Synthetic oligonucleotide
  Antisense strand to SEQ ID NO: 2198170
uccauccaggagcaaguuu

SEQ ID NO: 2198172 - RNA, 19 nt, Artificial Sequence
  Description of Artificial Sequence: Synthetic oligonucleotide
  Sense strand starting at position 1709 of SEQ ID NO: 1883502
cugucuuaggacugagacu

SEQ ID NO: 2198173 - RNA, 19 nt, Artificial Sequence
  Description of Artificial Sequence: Synthetic oligonucleotide
  Antisense strand to SEQ ID NO: 2198172
agucucaguccuaagacag

SEQ ID NO: 2198174 - RNA, 19 nt, Artificial Sequence
  Description of Artificial Sequence: Synthetic oligonucleotide
  Sense strand starting at position 3026 of SEQ ID NO: 1883502
gauugcucuccagaagguu

SEQ ID NO: 2198175 - RNA, 19 nt, Artificial Sequence
  Description of Artificial Sequence: Synthetic oligonucleotide
  Antisense strand to SEQ ID NO: 2198174
aaccuucuggagagcaauc

SEQ ID NO: 2198176 - RNA, 19 nt, Artificial Sequence
  Description of Artificial Sequence: Synthetic oligonucleotide
  Sense strand starting at position 3360 of SEQ ID NO: 1883502
gggaauaucuagcugguga

SEQ ID NO: 2198177 - RNA, 19 nt, Artificial Sequence
  Description of Artificial Sequence: Synthetic oligonucleotide
  Antisense strand to SEQ ID NO: 2198176
ucaccagcuagauauuccc

SEQ ID NO: 2198178 - RNA, 19 nt, Artificial Sequence
  Description of Artificial Sequence: Synthetic oligonucleotide
  Sense strand starting at position 3888 of SEQ ID NO: 1883502
cuuggaagucacgaaguuu

SEQ ID NO: 2198179 - RNA, 19 nt, Artificial Sequence
  Description of Artificial Sequence: Synthetic oligonucleotide
  Antisense strand to SEQ ID NO: 2198178
aaacuucgugacuuccaag

SEQ ID NO: 2198180 - RNA, 19 nt, Artificial Sequence
  Description of Artificial Sequence: Synthetic oligonucleotide
  Sense strand starting at position 3388 of SEQ ID NO: 1883502
uucugucuucuuuauagau

SEQ ID NO: 2198181 - RNA, 19 nt, Artificial Sequence
  Description of Artificial Sequence: Synthetic oligonucleotide
  Antisense strand to SEQ ID NO: 2198180
aucuauaaagaagacagaa

SEQ ID NO: 2198182 - RNA, 19 nt, Artificial Sequence
  Description of Artificial Sequence: Synthetic oligonucleotide
  Sense strand starting at position 435 of SEQ ID NO: 1883502
cuguuacagcuugaauauc

SEQ ID NO: 2198183 - RNA, 19 nt, Artificial Sequence
  Description of Artificial Sequence: Synthetic oligonucleotide
  Antisense strand to SEQ ID NO: 2198182
gauauucaagcuguaacag

SEQ ID NO: 2198184 - RNA, 19 nt, Artificial Sequence
  Description of Artificial Sequence: Synthetic oligonucleotide
  Sense strand starting at position 1224 of SEQ ID NO: 1883502
agaugaucgcccugaauaa

SEQ ID NO: 2198185 - RNA, 19 nt, Artificial Sequence
  Description of Artificial Sequence: Synthetic oligonucleotide
  Antisense strand to SEQ ID NO: 2198184
uuauucagggcgaucaucu

SEQ ID NO: 2198186 - RNA, 19 nt, Artificial Sequence
  Description of Artificial Sequence: Synthetic oligonucleotide
  Sense strand starting at position 2593 of SEQ ID NO: 1883502
ugugauucugcagagugag

SEQ ID NO: 2198187 - RNA, 19 nt, Artificial Sequence
  Description of Artificial Sequence: Synthetic oligonucleotide
  Antisense strand to SEQ ID NO: 2198186
cucacucugcagaaucaca

SEQ ID NO: 2198188 - RNA, 19 nt, Artificial Sequence
  Description of Artificial Sequence: Synthetic oligonucleotide
  Sense strand starting at position 424 of SEQ ID NO: 1883502
aggagauccagcuguuaca

SEQ ID NO: 2198189 - RNA, 19 nt, Artificial Sequence
  Description of Artificial Sequence: Synthetic oligonucleotide
  Antisense strand to SEQ ID NO: 2198188
uguaacagcuggaucuccu

SEQ ID NO: 2198190 - RNA, 19 nt, Artificial Sequence
  Description of Artificial Sequence: Synthetic oligonucleotide
  Sense strand starting at position 3362 of SEQ ID NO: 1883502
gaauaucuagcuggugaug

SEQ ID NO: 2198191 - RNA, 19 nt, Artificial Sequence
  Description of Artificial Sequence: Synthetic oligonucleotide
  Antisense strand to SEQ ID NO: 2198190
caucaccagcuagauauuc

SEQ ID NO: 2198192 - RNA, 19 nt, Artificial Sequence
  Description of Artificial Sequence: Synthetic oligonucleotide
  Sense strand starting at position 3361 of SEQ ID NO: 1883502
ggaauaucuagcuggugau

SEQ ID NO: 2198193 - RNA, 19 nt, Artificial Sequence
  Description of Artificial Sequence: Synthetic oligonucleotide
  Antisense strand to SEQ ID NO: 2198192
aucaccagcuagauauucc

SEQ ID NO: 2198194 - RNA, 19 nt, Artificial Sequence
  Description of Artificial Sequence: Synthetic oligonucleotide
  Sense strand starting at position 2861 of SEQ ID NO: 1883502
gcuggaauguaacuacuua

SEQ ID NO: 2198195 - RNA, 19 nt, Artificial Sequence
  Description of Artificial Sequence: Synthetic oligonucleotide
  Antisense strand to SEQ ID NO: 2198194
uaaguaguuacauuccagc

SEQ ID NO: 2198196 - RNA, 19 nt, Artificial Sequence
  Description of Artificial Sequence: Synthetic oligonucleotide
  Sense strand starting at position 1446 of SEQ ID NO: 1883502
agacucuuaugugucauga

SEQ ID NO: 2198197 - RNA, 19 nt, Artificial Sequence
  Description of Artificial Sequence: Synthetic oligonucleotide
  Antisense strand to SEQ ID NO: 2198196
ucaugacacauaagagucu

SEQ ID NO: 2198198 - RNA, 19 nt, Artificial Sequence
  Description of Artificial Sequence: Synthetic oligonucleotide
  Sense strand starting at position 2933 of SEQ ID NO: 1883502
gguucucugccacaugacu

SEQ ID NO: 2198199 - RNA, 19 nt, Artificial Sequence
  Description of Artificial Sequence: Synthetic oligonucleotide
  Antisense strand to SEQ ID NO: 2198198
agucauguggcagagaacc

SEQ ID NO: 2198200 - RNA, 19 nt, Artificial Sequence
  Description of Artificial Sequence: Synthetic oligonucleotide
  Sense strand starting at position 3023 of SEQ ID NO: 1883502
ggugauugcucuccagaag

SEQ ID NO: 2198201 - RNA, 19 nt, Artificial Sequence
  Description of Artificial Sequence: Synthetic oligonucleotide
  Antisense strand to SEQ ID NO: 2198200
cuucuggagagcaaucacc

SEQ ID NO: 2198202 - RNA, 19 nt, Artificial Sequence
  Description of Artificial Sequence: Synthetic oligonucleotide
  Sense strand starting at position 1209 of SEQ ID NO: 1883502
ugauguuucugggcaagau

SEQ ID NO: 2198203 - RNA, 19 nt, Artificial Sequence
  Description of Artificial Sequence: Synthetic oligonucleotide
  Antisense strand to SEQ ID NO: 2198202
aucuugcccagaaacauca

SEQ ID NO: 2198204 - RNA, 19 nt, Artificial Sequence
  Description of Artificial Sequence: Synthetic oligonucleotide
  Sense strand starting at position 2469 of SEQ ID NO: 1883502
ucuuauucgagauggaguu

SEQ ID NO: 2198205 - RNA, 19 nt, Artificial Sequence
  Description of Artificial Sequence: Synthetic oligonucleotide
  Antisense strand to SEQ ID NO: 2198204
aacuccaucucgaauaaga

SEQ ID NO: 2198206 - RNA, 19 nt, Artificial Sequence
  Description of Artificial Sequence: Synthetic oligonucleotide
  Sense strand starting at position 3132 of SEQ ID NO: 1883502
acaguuaauucucuguaug

SEQ ID NO: 2198207 - RNA, 19 nt, Artificial Sequence
  Description of Artificial Sequence: Synthetic oligonucleotide
  Antisense strand to SEQ ID NO: 2198206
cauacagagaauuaacugu

SEQ ID NO: 2198208 - RNA, 19 nt, Artificial Sequence
  Description of Artificial Sequence: Synthetic oligonucleotide
  Sense strand starting at position 736 of SEQ ID NO: 1883502
agccuuagucacuaagcua

SEQ ID NO: 2198209 - RNA, 19 nt, Artificial Sequence
  Description of Artificial Sequence: Synthetic oligonucleotide
  Antisense strand to SEQ ID NO: 2198208
uagcuuagugacuaaggcu

SEQ ID NO: 2198210 - RNA, 19 nt, Artificial Sequence
  Description of Artificial Sequence: Synthetic oligonucleotide
  Sense strand starting at position 580 of SEQ ID NO: 1883502
ccuccuaggugcucagaaa

SEQ ID NO: 2198211 - RNA, 19 nt, Artificial Sequence
  Description of Artificial Sequence: Synthetic oligonucleotide
  Antisense strand to SEQ ID NO: 2198210
uuucugagcaccuaggagg

SEQ ID NO: 2198212 - RNA, 19 nt, Artificial Sequence
  Description of Artificial Sequence: Synthetic oligonucleotide
  Sense strand starting at position 2998 of SEQ ID NO: 1883502
caguauggcuucuuugaaa

SEQ ID NO: 2198213 - RNA, 19 nt, Artificial Sequence
  Description of Artificial Sequence: Synthetic oligonucleotide
  Antisense strand to SEQ ID NO: 2198212
uuucaaagaagccauacug

SEQ ID NO: 2198214 - RNA, 19 nt, Artificial Sequence
  Description of Artificial Sequence: Synthetic oligonucleotide
  Sense strand starting at position 1377 of SEQ ID NO: 1883503
auggaugauggacgguaaa

SEQ ID NO: 2198215 - RNA, 19 nt, Artificial Sequence
  Description of Artificial Sequence: Synthetic oligonucleotide
  Antisense strand to SEQ ID NO: 2198214
uuuaccguccaucauccau

SEQ ID NO: 2198216 - RNA, 19 nt, Artificial Sequence
  Description of Artificial Sequence: Synthetic oligonucleotide
  Sense strand starting at position 1065 of SEQ ID NO: 1883503
uagagucuugcagcgucau

SEQ ID NO: 2198217 - RNA, 19 nt, Artificial Sequence
  Description of Artificial Sequence: Synthetic oligonucleotide
  Antisense strand to SEQ ID NO: 2198216
augacgcugcaagacucua

SEQ ID NO: 2198218 - RNA, 19 nt, Artificial Sequence
  Description of Artificial Sequence: Synthetic oligonucleotide
  Sense strand starting at position 974 of SEQ ID NO: 1883503
gaauuuguguugucacgaa

SEQ ID NO: 2198219 - RNA, 19 nt, Artificial Sequence
  Description of Artificial Sequence: Synthetic oligonucleotide
  Antisense strand to SEQ ID NO: 2198218
uucgugacaacacaaauuc

SEQ ID NO: 2198220 - RNA, 19 nt, Artificial Sequence
  Description of Artificial Sequence: Synthetic oligonucleotide
  Sense strand starting at position 1269 of SEQ ID NO: 1883503
gcaggaaagcuguauagaa

SEQ ID NO: 2198221 - RNA, 19 nt, Artificial Sequence
  Description of Artificial Sequence: Synthetic oligonucleotide
  Antisense strand to SEQ ID NO: 2198220
uucuauacagcuuuccugc

SEQ ID NO: 2198222 - RNA, 19 nt, Artificial Sequence
  Description of Artificial Sequence: Synthetic oligonucleotide
  Sense strand starting at position 1276 of SEQ ID NO: 1883503
agcuguauagaaugacaaa

SEQ ID NO: 2198223 - RNA, 19 nt, Artificial Sequence
  Description of Artificial Sequence: Synthetic oligonucleotide
  Antisense strand to SEQ ID NO: 2198222
uuugucauucuauacagcu

SEQ ID NO: 2198224 - RNA, 19 nt, Artificial Sequence
  Description of Artificial Sequence: Synthetic oligonucleotide
  Sense strand starting at position 310 of SEQ ID NO: 1883503
uagcauuuggcuggugaug

SEQ ID NO: 2198225 - RNA, 19 nt, Artificial Sequence
  Description of Artificial Sequence: Synthetic oligonucleotide
  Antisense strand to SEQ ID NO: 2198224
caucaccagccaaaugcua

SEQ ID NO: 2198226 - RNA, 19 nt, Artificial Sequence
  Description of Artificial Sequence: Synthetic oligonucleotide
  Sense strand starting at position 482 of SEQ ID NO: 1883503
agaagagugccucacuauu

SEQ ID NO: 2198227 - RNA, 19 nt, Artificial Sequence
  Description of Artificial Sequence: Synthetic oligonucleotide
  Antisense strand to SEQ ID NO: 2198226
aauagugaggcacucuucu

SEQ ID NO: 2198228 - RNA, 19 nt, Artificial Sequence
  Description of Artificial Sequence: Synthetic oligonucleotide
  Sense strand starting at position 54 of SEQ ID NO: 1883503
gagaaauugucugcagaga

SEQ ID NO: 2198229 - RNA, 19 nt, Artificial Sequence
  Description of Artificial Sequence: Synthetic oligonucleotide
  Antisense strand to SEQ ID NO: 2198228
ucucugcagacaauuucuc

SEQ ID NO: 2198230 - RNA, 19 nt, Artificial Sequence
  Description of Artificial Sequence: Synthetic oligonucleotide
  Sense strand starting at position 52 of SEQ ID NO: 1883503
gagagaaauugucugcaga

SEQ ID NO: 2198231 - RNA, 19 nt, Artificial Sequence
  Description of Artificial Sequence: Synthetic oligonucleotide
  Antisense strand to SEQ ID NO: 2198230
ucugcagacaauuucucuc

SEQ ID NO: 2198232 - RNA, 19 nt, Artificial Sequence
  Description of Artificial Sequence: Synthetic oligonucleotide
  Sense strand starting at position 203 of SEQ ID NO: 1883503
cagaauugagcuugacaug

SEQ ID NO: 2198233 - RNA, 19 nt, Artificial Sequence
  Description of Artificial Sequence: Synthetic oligonucleotide
  Antisense strand to SEQ ID NO: 2198232
caugucaagcucaauucug

SEQ ID NO: 2198234 - RNA, 19 nt, Artificial Sequence
  Description of Artificial Sequence: Synthetic oligonucleotide
  Sense strand starting at position 53 of SEQ ID NO: 1883503
agagaaauugucugcagag

SEQ ID NO: 2198235 - RNA, 19 nt, Artificial Sequence
  Description of Artificial Sequence: Synthetic oligonucleotide
  Antisense strand to SEQ ID NO: 2198234
cucugcagacaauuucucu

SEQ ID NO: 2198236 - RNA, 19 nt, Artificial Sequence
  Description of Artificial Sequence: Synthetic oligonucleotide
  Sense strand starting at position 1985 of SEQ ID NO: 1883503
aacguuuggccgucagguu

SEQ ID NO: 2198237 - RNA, 19 nt, Artificial Sequence
  Description of Artificial Sequence: Synthetic oligonucleotide
  Antisense strand to SEQ ID NO: 2198236
aaccugacggccaaacguu

SEQ ID NO: 2198238 - RNA, 19 nt, Artificial Sequence
  Description of Artificial Sequence: Synthetic oligonucleotide
  Sense strand starting at position 1465 of SEQ ID NO: 1883503
gacggaucacuugaguucu

SEQ ID NO: 2198239 - RNA, 19 nt, Artificial Sequence
  Description of Artificial Sequence: Synthetic oligonucleotide
  Antisense strand to SEQ ID NO: 2198238
agaacucaagugauccguc

SEQ ID NO: 2198240 - RNA, 19 nt, Artificial Sequence
  Description of Artificial Sequence: Synthetic oligonucleotide
  Sense strand starting at position 309 of SEQ ID NO: 1883503
cuagcauuuggcuggugau

SEQ ID NO: 2198241 - RNA, 19 nt, Artificial Sequence
  Description of Artificial Sequence: Synthetic oligonucleotide
  Antisense strand to SEQ ID NO: 2198240
aucaccagccaaaugcuag

SEQ ID NO: 2198242 - RNA, 19 nt, Artificial Sequence
  Description of Artificial Sequence: Synthetic oligonucleotide
  Sense strand starting at position 701 of SEQ ID NO: 1883503
gacuaugcuggguaaguga

SEQ ID NO: 2198243 - RNA, 19 nt, Artificial Sequence
  Description of Artificial Sequence: Synthetic oligonucleotide
  Antisense strand to SEQ ID NO: 2198242
ucacuuacccagcauaguc

SEQ ID NO: 2198244 - RNA, 19 nt, Artificial Sequence
  Description of Artificial Sequence: Synthetic oligonucleotide
  Sense strand starting at position 2050 of SEQ ID NO: 1883503
auaagagacgccgaaucuu

SEQ ID NO: 2198245 - RNA, 19 nt, Artificial Sequence
  Description of Artificial Sequence: Synthetic oligonucleotide
  Antisense strand to SEQ ID NO: 2198244
aagauucggcgucucuuau

SEQ ID NO: 2198246 - RNA, 19 nt, Artificial Sequence
  Description of Artificial Sequence: Synthetic oligonucleotide
  Sense strand starting at position 1794 of SEQ ID NO: 1883503
ucccuugguccuuaacuga

SEQ ID NO: 2198247 - RNA, 19 nt, Artificial Sequence
  Description of Artificial Sequence: Synthetic oligonucleotide
  Antisense strand to SEQ ID NO: 2198246
ucaguuaaggaccaaggga

SEQ ID NO: 2198248 - RNA, 19 nt, Artificial Sequence
  Description of Artificial Sequence: Synthetic oligonucleotide
  Sense strand starting at position 209 of SEQ ID NO: 1883503
ugagcuugacauggaucau

SEQ ID NO: 2198249 - RNA, 19 nt, Artificial Sequence
  Description of Artificial Sequence: Synthetic oligonucleotide
  Antisense strand to SEQ ID NO: 2198248
augauccaugucaagcuca

SEQ ID NO: 2198250 - RNA, 19 nt, Artificial Sequence
  Description of Artificial Sequence: Synthetic oligonucleotide
  Sense strand starting at position 208 of SEQ ID NO: 1883503
uugagcuugacauggauca

SEQ ID NO: 2198251 - RNA, 19 nt, Artificial Sequence
  Description of Artificial Sequence: Synthetic oligonucleotide
  Antisense strand to SEQ ID NO: 2198250
ugauccaugucaagcucaa

SEQ ID NO: 2198252 - RNA, 19 nt, Artificial Sequence
  Description of Artificial Sequence: Synthetic oligonucleotide
  Sense strand starting at position 480 of SEQ ID NO: 1883503
acagaagagugccucacua

SEQ ID NO: 2198253 - RNA, 19 nt, Artificial Sequence
  Description of Artificial Sequence: Synthetic oligonucleotide
  Antisense strand to SEQ ID NO: 2198252
uagugaggcacucuucugu

SEQ ID NO: 2198254 - RNA, 19 nt, Artificial Sequence
  Description of Artificial Sequence: Synthetic oligonucleotide
  Sense strand starting at position 39 of SEQ ID NO: 1883503
agcuuccaucuuugagaga

SEQ ID NO: 2198255 - RNA, 19 nt, Artificial Sequence
  Description of Artificial Sequence: Synthetic oligonucleotide
  Antisense strand to SEQ ID NO: 2198254
ucucucaaagauggaagcu

SEQ ID NO: 2198256 - RNA, 19 nt, Artificial Sequence
  Description of Artificial Sequence: Synthetic oligonucleotide
  Sense strand starting at position 3410 of SEQ ID NO: 1883503
uuuggagugguuggaauau

SEQ ID NO: 2198257 - RNA, 19 nt, Artificial Sequence
  Description of Artificial Sequence: Synthetic oligonucleotide
  Antisense strand to SEQ ID NO: 2198256
auauuccaaccacuccaaa

SEQ ID NO: 2198258 - RNA, 19 nt, Artificial Sequence
  Description of Artificial Sequence: Synthetic oligonucleotide
  Sense strand starting at position 3831 of SEQ ID NO: 1883503
agauuugagucauaccaua

SEQ ID NO: 2198259 - RNA, 19 nt, Artificial Sequence
  Description of Artificial Sequence: Synthetic oligonucleotide
  Antisense strand to SEQ ID NO: 2198258
uaugguaugacucaaaucu

SEQ ID NO: 2198260 - RNA, 19 nt, Artificial Sequence
  Description of Artificial Sequence: Synthetic oligonucleotide
  Sense strand starting at position 1944 of SEQ ID NO: 1883503
ugggaaauguaguuucuua

SEQ ID NO: 2198261 - RNA, 19 nt, Artificial Sequence
  Description of Artificial Sequence: Synthetic oligonucleotide
  Antisense strand to SEQ ID NO: 2198260
uaagaaacuacauuuccca

SEQ ID NO: 2198262 - RNA, 19 nt, Artificial Sequence
  Description of Artificial Sequence: Synthetic oligonucleotide
  Sense strand starting at position 1086 of SEQ ID NO: 1883503
ccagaagggacuugcgauu

SEQ ID NO: 2198263 - RNA, 19 nt, Artificial Sequence
  Description of Artificial Sequence: Synthetic oligonucleotide
  Antisense strand to SEQ ID NO: 2198262
aaucgcaagucccuucugg

SEQ ID NO: 2198264 - RNA, 19 nt, Artificial Sequence
  Description of Artificial Sequence: Synthetic oligonucleotide
  Sense strand starting at position 2971 of SEQ ID NO: 1883503
aacagacauuguuuggcau

SEQ ID NO: 2198265 - RNA, 19 nt, Artificial Sequence
  Description of Artificial Sequence: Synthetic oligonucleotide
  Antisense strand to SEQ ID NO: 2198264
augccaaacaaugucuguu

SEQ ID NO: 2198266 - RNA, 19 nt, Artificial Sequence
  Description of Artificial Sequence: Synthetic oligonucleotide
  Sense strand starting at position 1077 of SEQ ID NO: 1883503
gcgucauagccagaaggga

SEQ ID NO: 2198267 - RNA, 19 nt, Artificial Sequence
  Description of Artificial Sequence: Synthetic oligonucleotide
  Antisense strand to SEQ ID NO: 2198266
ucccuucuggcuaugacgc

SEQ ID NO: 2198268 - RNA, 19 nt, Artificial Sequence
  Description of Artificial Sequence: Synthetic oligonucleotide
  Sense strand starting at position 781 of SEQ ID NO: 1883503
gaauucugauguguuacau

SEQ ID NO: 2198269 - RNA, 19 nt, Artificial Sequence
  Description of Artificial Sequence: Synthetic oligonucleotide
  Antisense strand to SEQ ID NO: 2198268
auguaacacaucagaauuc

SEQ ID NO: 2198270 - RNA, 19 nt, Artificial Sequence
  Description of Artificial Sequence: Synthetic oligonucleotide
  Sense strand starting at position 1955 of SEQ ID NO: 1883503
guuucuuaucaguaacgac

SEQ ID NO: 2198271 - RNA, 19 nt, Artificial Sequence
  Description of Artificial Sequence: Synthetic oligonucleotide
  Antisense strand to SEQ ID NO: 2198270
gucguuacugauaagaaac

SEQ ID NO: 2198272 - RNA, 19 nt, Artificial Sequence
  Description of Artificial Sequence: Synthetic oligonucleotide
  Sense strand starting at position 598 of SEQ ID NO: 1883503
uguggucuuccucaaguaa

SEQ ID NO: 2198273 - RNA, 19 nt, Artificial Sequence
  Description of Artificial Sequence: Synthetic oligonucleotide
  Antisense strand to SEQ ID NO: 2198272
uuacuugaggaagaccaca

SEQ ID NO: 2198274 - RNA, 19 nt, Artificial Sequence
  Description of Artificial Sequence: Synthetic oligonucleotide
  Sense strand starting at position 3055 of SEQ ID NO: 1883503
acaguaaauccaggguugu

SEQ ID NO: 2198275 - RNA, 19 nt, Artificial Sequence
  Description of Artificial Sequence: Synthetic oligonucleotide
  Antisense strand to SEQ ID NO: 2198274
acaacccuggauuuacugu

SEQ ID NO: 2198276 - RNA, 19 nt, Artificial Sequence
  Description of Artificial Sequence: Synthetic oligonucleotide
  Sense strand starting at position 3056 of SEQ ID NO: 1883503
caguaaauccaggguugua

SEQ ID NO: 2198277 - RNA, 19 nt, Artificial Sequence
  Description of Artificial Sequence: Synthetic oligonucleotide
  Antisense strand to SEQ ID NO: 2198276
uacaacccuggauuuacug

SEQ ID NO: 2198278 - RNA, 19 nt, Artificial Sequence
  Description of Artificial Sequence: Synthetic oligonucleotide
  Sense strand starting at position 188 of SEQ ID NO: 1883503
ugugcuuugauuggacaga

SEQ ID NO: 2198279 - RNA, 19 nt, Artificial Sequence
  Description of Artificial Sequence: Synthetic oligonucleotide
  Antisense strand to SEQ ID NO: 2198278
ucuguccaaucaaagcaca

SEQ ID NO: 2198280 - RNA, 19 nt, Artificial Sequence
  Description of Artificial Sequence: Synthetic oligonucleotide
  Sense strand starting at position 699 of SEQ ID NO: 1883503
aggacuaugcuggguaagu

SEQ ID NO: 2198281 - RNA, 19 nt, Artificial Sequence
  Description of Artificial Sequence: Synthetic oligonucleotide
  Antisense strand to SEQ ID NO: 2198280
acuuacccagcauaguccu

SEQ ID NO: 2198282 - RNA, 19 nt, Artificial Sequence
  Description of Artificial Sequence: Synthetic oligonucleotide
  Sense strand starting at position 3302 of SEQ ID NO: 1883503
auagcaacacugugaugua

SEQ ID NO: 2198283 - RNA, 19 nt, Artificial Sequence
  Description of Artificial Sequence: Synthetic oligonucleotide
  Antisense strand to SEQ ID NO: 2198282
uacaucacaguguugcuau

SEQ ID NO: 2198284 - RNA, 19 nt, Artificial Sequence
  Description of Artificial Sequence: Synthetic oligonucleotide
  Sense strand starting at position 700 of SEQ ID NO: 1883503
ggacuaugcuggguaagug

SEQ ID NO: 2198285 - RNA, 19 nt, Artificial Sequence
  Description of Artificial Sequence: Synthetic oligonucleotide
  Antisense strand to SEQ ID NO: 2198284
cacuuacccagcauagucc

SEQ ID NO: 2198286 - RNA, 19 nt, Artificial Sequence
  Description of Artificial Sequence: Synthetic oligonucleotide
  Sense strand starting at position 3239 of SEQ ID NO: 1883503
cuucuugugcuuuagaacu

SEQ ID NO: 2198287 - RNA, 19 nt, Artificial Sequence
  Description of Artificial Sequence: Synthetic oligonucleotide
  Antisense strand to SEQ ID NO: 2198286
aguucuaaagcacaagaag

SEQ ID NO: 2198288 - RNA, 19 nt, Artificial Sequence
  Description of Artificial Sequence: Synthetic oligonucleotide
  Sense strand starting at position 494 of SEQ ID NO: 1883503
cacuauuuaugggagcacu

SEQ ID NO: 2198289 - RNA, 19 nt, Artificial Sequence
  Description of Artificial Sequence: Synthetic oligonucleotide
  Antisense strand to SEQ ID NO: 2198288
agugcucccauaaauagug

SEQ ID NO: 2198290 - RNA, 19 nt, Artificial Sequence
  Description of Artificial Sequence: Synthetic oligonucleotide
  Sense strand starting at position 978 of SEQ ID NO: 1883503
uuguguugucacgaaauau

SEQ ID NO: 2198291 - RNA, 19 nt, Artificial Sequence
  Description of Artificial Sequence: Synthetic oligonucleotide
  Antisense strand to SEQ ID NO: 2198290
auauuucgugacaacacaa

SEQ ID NO: 2198292 - RNA, 19 nt, Artificial Sequence
  Description of Artificial Sequence: Synthetic oligonucleotide
  Sense strand starting at position 3020 of SEQ ID NO: 1883503
uuaauuaguuggccacauu

SEQ ID NO: 2198293 - RNA, 19 nt, Artificial Sequence
  Description of Artificial Sequence: Synthetic oligonucleotide
  Antisense strand to SEQ ID NO: 2198292
aauguggccaacuaauuaa

SEQ ID NO: 2198294 - RNA, 19 nt, Artificial Sequence
  Description of Artificial Sequence: Synthetic oligonucleotide
  Sense strand starting at position 3917 of SEQ ID NO: 1883504
ggacgugauccauaccaac

SEQ ID NO: 2198295 - RNA, 19 nt, Artificial Sequence
  Description of Artificial Sequence: Synthetic oligonucleotide
  Antisense strand to SEQ ID NO: 2198294
guugguauggaucacgucc

SEQ ID NO: 2198296 - RNA, 19 nt, Artificial Sequence
  Description of Artificial Sequence: Synthetic oligonucleotide
  Sense strand starting at position 3505 of SEQ ID NO: 1883504
uuccauguccucgcuaguu

SEQ ID NO: 2198297 - RNA, 19 nt, Artificial Sequence
  Description of Artificial Sequence: Synthetic oligonucleotide
  Antisense strand to SEQ ID NO: 2198296
aacuagcgaggacauggaa

SEQ ID NO: 2198298 - RNA, 19 nt, Artificial Sequence
  Description of Artificial Sequence: Synthetic oligonucleotide
  Sense strand starting at position 3377 of SEQ ID NO: 1883504
gguuaauuugcuggagcca

SEQ ID NO: 2198299 - RNA, 19 nt, Artificial Sequence
  Description of Artificial Sequence: Synthetic oligonucleotide
  Antisense strand to SEQ ID NO: 2198298
uggcuccagcaaauuaacc

SEQ ID NO: 2198300 - RNA, 19 nt, Artificial Sequence
  Description of Artificial Sequence: Synthetic oligonucleotide
  Sense strand starting at position 2824 of SEQ ID NO: 1883504
ggacacgugcuugaggaaa

SEQ ID NO: 2198301 - RNA, 19 nt, Artificial Sequence
  Description of Artificial Sequence: Synthetic oligonucleotide
  Antisense strand to SEQ ID NO: 2198300
uuuccucaagcacgugucc

SEQ ID NO: 2198302 - RNA, 19 nt, Artificial Sequence
  Description of Artificial Sequence: Synthetic oligonucleotide
  Sense strand starting at position 3386 of SEQ ID NO: 1883504
gcuggagccacucauagaa

SEQ ID NO: 2198303 - RNA, 19 nt, Artificial Sequence
  Description of Artificial Sequence: Synthetic oligonucleotide
  Antisense strand to SEQ ID NO: 2198302
uucuaugaguggcuccagc

SEQ ID NO: 2198304 - RNA, 19 nt, Artificial Sequence
  Description of Artificial Sequence: Synthetic oligonucleotide
  Sense strand starting at position 3439 of SEQ ID NO: 1883504
aaggguauugauugcaaag

SEQ ID NO: 2198305 - RNA, 19 nt, Artificial Sequence
  Description of Artificial Sequence: Synthetic oligonucleotide
  Antisense strand to SEQ ID NO: 2198304
cuuugcaaucaauacccuu

SEQ ID NO: 2198306 - RNA, 19 nt, Artificial Sequence
  Description of Artificial Sequence: Synthetic oligonucleotide
  Sense strand starting at position 3239 of SEQ ID NO: 1883504
gggugagagcuccauccca

SEQ ID NO: 2198307 - RNA, 19 nt, Artificial Sequence
  Description of Artificial Sequence: Synthetic oligonucleotide
  Antisense strand to SEQ ID NO: 2198306
ugggauggagcucucaccc

SEQ ID NO: 2198308 - RNA, 19 nt, Artificial Sequence
  Description of Artificial Sequence: Synthetic oligonucleotide
  Sense strand starting at position 3911 of SEQ ID NO: 1883504
uuguauggacgugauccau

SEQ ID NO: 2198309 - RNA, 19 nt, Artificial Sequence
  Description of Artificial Sequence: Synthetic oligonucleotide
  Antisense strand to SEQ ID NO: 2198308
auggaucacguccauacaa

SEQ ID NO: 2198310 - RNA, 19 nt, Artificial Sequence
  Description of Artificial Sequence: Synthetic oligonucleotide
  Sense strand starting at position 3070 of SEQ ID NO: 1883504
gggaaaugcucucucagug

SEQ ID NO: 2198311 - RNA, 19 nt, Artificial Sequence
  Description of Artificial Sequence: Synthetic oligonucleotide
  Antisense strand to SEQ ID NO: 2198310
cacugagagagcauuuccc

SEQ ID NO: 2198312 - RNA, 19 nt, Artificial Sequence
  Description of Artificial Sequence: Synthetic oligonucleotide
  Sense strand starting at position 2956 of SEQ ID NO: 1883504
aagcccuugucauuggaca

SEQ ID NO: 2198313 - RNA, 19 nt, Artificial Sequence
  Description of Artificial Sequence: Synthetic oligonucleotide
  Antisense strand to SEQ ID NO: 2198312
uguccaaugacaagggcuu

SEQ ID NO: 2198314 - RNA, 19 nt, Artificial Sequence
  Description of Artificial Sequence: Synthetic oligonucleotide
  Sense strand starting at position 2823 of SEQ ID NO: 1883504
uggacacgugcuugaggaa

SEQ ID NO: 2198315 - RNA, 19 nt, Artificial Sequence
  Description of Artificial Sequence: Synthetic oligonucleotide
  Antisense strand to SEQ ID NO: 2198314
uuccucaagcacgugucca

SEQ ID NO: 2198316 - RNA, 19 nt, Artificial Sequence
  Description of Artificial Sequence: Synthetic oligonucleotide
  Sense strand starting at position 2958 of SEQ ID NO: 1883504
gcccuugucauuggacaga

SEQ ID NO: 2198317 - RNA, 19 nt, Artificial Sequence
  Description of Artificial Sequence: Synthetic oligonucleotide
  Antisense strand to SEQ ID NO: 2198316
ucuguccaaugacaagggc

SEQ ID NO: 2198318 - RNA, 19 nt, Artificial Sequence
  Description of Artificial Sequence: Synthetic oligonucleotide
  Sense strand starting at position 2934 of SEQ ID NO: 1883504
aacagaguguacuuugcua

SEQ ID NO: 2198319 - RNA, 19 nt, Artificial Sequence
  Description of Artificial Sequence: Synthetic oligonucleotide
  Antisense strand to SEQ ID NO: 2198318
uagcaaaguacacucuguu

SEQ ID NO: 2198320 - RNA, 19 nt, Artificial Sequence
  Description of Artificial Sequence: Synthetic oligonucleotide
  Sense strand starting at position 2938 of SEQ ID NO: 1883504
gaguguacuuugcuaauga

SEQ ID NO: 2198321 - RNA, 19 nt, Artificial Sequence
  Description of Artificial Sequence: Synthetic oligonucleotide
  Antisense strand to SEQ ID NO: 2198320
ucauuagcaaaguacacuc

SEQ ID NO: 2198322 - RNA, 19 nt, Artificial Sequence
  Description of Artificial Sequence: Synthetic oligonucleotide
  Sense strand starting at position 3558 of SEQ ID NO: 1883504
ccagaaguucccugagccu

SEQ ID NO: 2198323 - RNA, 19 nt, Artificial Sequence
  Description of Artificial Sequence: Synthetic oligonucleotide
  Antisense strand to SEQ ID NO: 2198322
aggcucagggaacuucugg

SEQ ID NO: 2198324 - RNA, 19 nt, Artificial Sequence
  Description of Artificial Sequence: Synthetic oligonucleotide
  Sense strand starting at position 3910 of SEQ ID NO: 1883504
cuuguauggacgugaucca

SEQ ID NO: 2198325 - RNA, 19 nt, Artificial Sequence
  Description of Artificial Sequence: Synthetic oligonucleotide
  Antisense strand to SEQ ID NO: 2198324
uggaucacguccauacaag

SEQ ID NO: 2198326 - RNA, 19 nt, Artificial Sequence
  Description of Artificial Sequence: Synthetic oligonucleotide
  Sense strand starting at position 2936 of SEQ ID NO: 1883504
cagaguguacuuugcuaau

SEQ ID NO: 2198327 - RNA, 19 nt, Artificial Sequence
  Description of Artificial Sequence: Synthetic oligonucleotide
  Antisense strand to SEQ ID NO: 2198326
auuagcaaaguacacucug

SEQ ID NO: 2198328 - RNA, 19 nt, Artificial Sequence
  Description of Artificial Sequence: Synthetic oligonucleotide
  Sense strand starting at position 3906 of SEQ ID NO: 1883504
gugucuuguauggacguga

SEQ ID NO: 2198329 - RNA, 19 nt, Artificial Sequence
  Description of Artificial Sequence: Synthetic oligonucleotide
  Antisense strand to SEQ ID NO: 2198328
ucacguccauacaagacac

SEQ ID NO: 2198330 - RNA, 19 nt, Artificial Sequence
  Description of Artificial Sequence: Synthetic oligonucleotide
  Sense strand starting at position 3366 of SEQ ID NO: 1883504
caccgucuuuggguuaauu

SEQ ID NO: 2198331 - RNA, 19 nt, Artificial Sequence
  Description of Artificial Sequence: Synthetic oligonucleotide
  Antisense strand to SEQ ID NO: 2198330
aauuaacccaaagacggug

SEQ ID NO: 2198332 - RNA, 19 nt, Artificial Sequence
  Description of Artificial Sequence: Synthetic oligonucleotide
  Sense strand starting at position 3674 of SEQ ID NO: 1883504
ucagaaaggugagaauguu

SEQ ID NO: 2198333 - RNA, 19 nt, Artificial Sequence
  Description of Artificial Sequence: Synthetic oligonucleotide
  Antisense strand to SEQ ID NO: 2198332
aacauucucaccuuucuga

SEQ ID NO: 2198334 - RNA, 19 nt, Artificial Sequence
  Description of Artificial Sequence: Synthetic oligonucleotide
  Sense strand starting at position 3009 of SEQ ID NO: 1883504
aaacguugccaccgugaau

SEQ ID NO: 2198335 - RNA, 19 nt, Artificial Sequence
  Description of Artificial Sequence: Synthetic oligonucleotide
  Antisense strand to SEQ ID NO: 2198334
auucacgguggcaacguuu

SEQ ID NO: 2198336 - RNA, 19 nt, Artificial Sequence
  Description of Artificial Sequence: Synthetic oligonucleotide
  Sense strand starting at position 3682 of SEQ ID NO: 1883504
gugagaauguuagcguccu

SEQ ID NO: 2198337 - RNA, 19 nt, Artificial Sequence
  Description of Artificial Sequence: Synthetic oligonucleotide
  Antisense strand to SEQ ID NO: 2198336
aggacgcuaacauucucac

SEQ ID NO: 2198338 - RNA, 19 nt, Artificial Sequence
  Description of Artificial Sequence: Synthetic oligonucleotide
  Sense strand starting at position 3441 of SEQ ID NO: 1883504
ggguauugauugcaaagga

SEQ ID NO: 2198339 - RNA, 19 nt, Artificial Sequence
  Description of Artificial Sequence: Synthetic oligonucleotide
  Antisense strand to SEQ ID NO: 2198338
uccuuugcaaucaauaccc

SEQ ID NO: 2198340 - RNA, 19 nt, Artificial Sequence
  Description of Artificial Sequence: Synthetic oligonucleotide
  Sense strand starting at position 3406 of SEQ ID NO: 1883504
uagggaaguuaugacguuu

SEQ ID NO: 2198341 - RNA, 19 nt, Artificial Sequence
  Description of Artificial Sequence: Synthetic oligonucleotide
  Antisense strand to SEQ ID NO: 2198340
aaacgucauaacuucccua

SEQ ID NO: 2198342 - RNA, 19 nt, Artificial Sequence
  Description of Artificial Sequence: Synthetic oligonucleotide
  Sense strand starting at position 2575 of SEQ ID NO: 1883504
gcuagagggugucacagau

SEQ ID NO: 2198343 - RNA, 19 nt, Artificial Sequence
  Description of Artificial Sequence: Synthetic oligonucleotide
  Antisense strand to SEQ ID NO: 2198342
aucugugacacccucuagc

SEQ ID NO: 2198344 - RNA, 19 nt, Artificial Sequence
  Description of Artificial Sequence: Synthetic oligonucleotide
  Sense strand starting at position 2939 of SEQ ID NO: 1883504
aguguacuuugcuaaugaa

SEQ ID NO: 2198345 - RNA, 19 nt, Artificial Sequence
  Description of Artificial Sequence: Synthetic oligonucleotide
  Antisense strand to SEQ ID NO: 2198344
uucauuagcaaaguacacu

SEQ ID NO: 2198346 - RNA, 19 nt, Artificial Sequence
  Description of Artificial Sequence: Synthetic oligonucleotide
  Sense strand starting at position 2826 of SEQ ID NO: 1883504
acacgugcuugaggaaaca

SEQ ID NO: 2198347 - RNA, 19 nt, Artificial Sequence
  Description of Artificial Sequence: Synthetic oligonucleotide
  Antisense strand to SEQ ID NO: 2198346
uguuuccucaagcacgugu

SEQ ID NO: 2198348 - RNA, 19 nt, Artificial Sequence
  Description of Artificial Sequence: Synthetic oligonucleotide
  Sense strand starting at position 3601 of SEQ ID NO: 1883504
gcuuccugaugucagcauu

SEQ ID NO: 2198349 - RNA, 19 nt, Artificial Sequence
  Description of Artificial Sequence: Synthetic oligonucleotide
  Antisense strand to SEQ ID NO: 2198348
aaugcugacaucaggaagc

SEQ ID NO: 2198350 - RNA, 19 nt, Artificial Sequence
  Description of Artificial Sequence: Synthetic oligonucleotide
  Sense strand starting at position 388 of SEQ ID NO: 1883505
gagggaacuaugugaguga

SEQ ID NO: 2198351 - RNA, 19 nt, Artificial Sequence
  Description of Artificial Sequence: Synthetic oligonucleotide
  Antisense strand to SEQ ID NO: 2198350
ucacucacauaguucccuc

SEQ ID NO: 2198352 - RNA, 19 nt, Artificial Sequence
  Description of Artificial Sequence: Synthetic oligonucleotide
  Sense strand starting at position 392 of SEQ ID NO: 1883505
gaacuaugugagugagggu

SEQ ID NO: 2198353 - RNA, 19 nt, Artificial Sequence
  Description of Artificial Sequence: Synthetic oligonucleotide
  Antisense strand to SEQ ID NO: 2198352
acccucacucacauaguuc

SEQ ID NO: 2198354 - RNA, 19 nt, Artificial Sequence
  Description of Artificial Sequence: Synthetic oligonucleotide
  Sense strand starting at position 3559 of SEQ ID NO: 1883505
gcuuauguacacgaaauuc

SEQ ID NO: 2198355 - RNA, 19 nt, Artificial Sequence
  Description of Artificial Sequence: Synthetic oligonucleotide
  Antisense strand to SEQ ID NO: 2198354
gaauuucguguacauaagc

SEQ ID NO: 2198356 - RNA, 19 nt, Artificial Sequence
  Description of Artificial Sequence: Synthetic oligonucleotide
  Sense strand starting at position 3533 of SEQ ID NO: 1883505
gcgagaucugcaagagcgu

SEQ ID NO: 2198357 - RNA, 19 nt, Artificial Sequence
  Description of Artificial Sequence: Synthetic oligonucleotide
  Antisense strand to SEQ ID NO: 2198356
acgcucuugcagaucucgc

SEQ ID NO: 2198358 - RNA, 19 nt, Artificial Sequence
  Description of Artificial Sequence: Synthetic oligonucleotide
  Sense strand starting at position 3556 of SEQ ID NO: 1883505
cacgcuuauguacacgaaa

SEQ ID NO: 2198359 - RNA, 19 nt, Artificial Sequence
  Description of Artificial Sequence: Synthetic oligonucleotide
  Antisense strand to SEQ ID NO: 2198358
uuucguguacauaagcgug

SEQ ID NO: 2198360 - RNA, 19 nt, Artificial Sequence
  Description of Artificial Sequence: Synthetic oligonucleotide
  Sense strand starting at position 3534 of SEQ ID NO: 1883505
cgagaucugcaagagcguu

SEQ ID NO: 2198361 - RNA, 19 nt, Artificial Sequence
  Description of Artificial Sequence: Synthetic oligonucleotide
  Antisense strand to SEQ ID NO: 2198360
aacgcucuugcagaucucg

SEQ ID NO: 2198362 - RNA, 19 nt, Artificial Sequence
  Description of Artificial Sequence: Synthetic oligonucleotide
  Sense strand starting at position 3558 of SEQ ID NO: 1883505
cgcuuauguacacgaaauu

SEQ ID NO: 2198363 - RNA, 19 nt, Artificial Sequence
  Description of Artificial Sequence: Synthetic oligonucleotide
  Antisense strand to SEQ ID NO: 2198362
aauuucguguacauaagcg

SEQ ID NO: 2198364 - RNA, 19 nt, Artificial Sequence
  Description of Artificial Sequence: Synthetic oligonucleotide
  Sense strand starting at position 2848 of SEQ ID NO: 1883505
cggcaagagagcuguggua

SEQ ID NO: 2198365 - RNA, 19 nt, Artificial Sequence
  Description of Artificial Sequence: Synthetic oligonucleotide
  Antisense strand to SEQ ID NO: 2198364
uaccacagcucucuugccg

SEQ ID NO: 2198366 - RNA, 19 nt, Artificial Sequence
  Description of Artificial Sequence: Synthetic oligonucleotide
  Sense strand starting at position 700 of SEQ ID NO: 1883505
cuuugccucugugcugaaa

SEQ ID NO: 2198367 - RNA, 19 nt, Artificial Sequence
  Description of Artificial Sequence: Synthetic oligonucleotide
  Antisense strand to SEQ ID NO: 2198366
uuucagcacagaggcaaag

SEQ ID NO: 2198368 - RNA, 19 nt, Artificial Sequence
  Description of Artificial Sequence: Synthetic oligonucleotide
  Sense strand starting at position 819 of SEQ ID NO: 1883505
gguggacauugugaagaca

SEQ ID NO: 2198369 - RNA, 19 nt, Artificial Sequence
  Description of Artificial Sequence: Synthetic oligonucleotide
  Antisense strand to SEQ ID NO: 2198368
ugucuucacaauguccacc

SEQ ID NO: 2198370 - RNA, 19 nt, Artificial Sequence
  Description of Artificial Sequence: Synthetic oligonucleotide
  Sense strand starting at position 3645 of SEQ ID NO: 1883505
gcccucuucugccagaaag

SEQ ID NO: 2198371 - RNA, 19 nt, Artificial Sequence
  Description of Artificial Sequence: Synthetic oligonucleotide
  Antisense strand to SEQ ID NO: 2198370
cuuucuggcagaagagggc

SEQ ID NO: 2198372 - RNA, 19 nt, Artificial Sequence
  Description of Artificial Sequence: Synthetic oligonucleotide
  Sense strand starting at position 1570 of SEQ ID NO: 1883506
gugcgaucucuggcucacu

SEQ ID NO: 2198373 - RNA, 19 nt, Artificial Sequence
  Description of Artificial Sequence: Synthetic oligonucleotide
  Antisense strand to SEQ ID NO: 2198372
agugagccagagaucgcac

SEQ ID NO: 2198374 - RNA, 19 nt, Artificial Sequence
  Description of Artificial Sequence: Synthetic oligonucleotide
  Sense strand starting at position 3838 of SEQ ID NO: 1883506
guaagaacacuugaaacgu

SEQ ID NO: 2198375 - RNA, 19 nt, Artificial Sequence
  Description of Artificial Sequence: Synthetic oligonucleotide
  Antisense strand to SEQ ID NO: 2198374
acguuucaaguguucuuac

SEQ ID NO: 2198376 - RNA, 19 nt, Artificial Sequence
  Description of Artificial Sequence: Synthetic oligonucleotide
  Sense strand starting at position 3175 of SEQ ID NO: 1883506
cgaugauuagucuagaauu

SEQ ID NO: 2198377 - RNA, 19 nt, Artificial Sequence
  Description of Artificial Sequence: Synthetic oligonucleotide
  Antisense strand to SEQ ID NO: 2198376
aauucuagacuaaucaucg

SEQ ID NO: 2198378 - RNA, 19 nt, Artificial Sequence
  Description of Artificial Sequence: Synthetic oligonucleotide
  Sense strand starting at position 1304 of SEQ ID NO: 1883506
agagaucuuccaggaaugu

SEQ ID NO: 2198379 - RNA, 19 nt, Artificial Sequence
  Description of Artificial Sequence: Synthetic oligonucleotide
  Antisense strand to SEQ ID NO: 2198378
acauuccuggaagaucucu

SEQ ID NO: 2198380 - RNA, 19 nt, Artificial Sequence
  Description of Artificial Sequence: Synthetic oligonucleotide
  Sense strand starting at position 3782 of SEQ ID NO: 1883506
agaagaucuagguaugccu

SEQ ID NO: 2198381 - RNA, 19 nt, Artificial Sequence
  Description of Artificial Sequence: Synthetic oligonucleotide
  Antisense strand to SEQ ID NO: 2198380
aggcauaccuagaucuucu

SEQ ID NO: 2198382 - RNA, 19 nt, Artificial Sequence
  Description of Artificial Sequence: Synthetic oligonucleotide
  Sense strand starting at position 3173 of SEQ ID NO: 1883506
aacgaugauuagucuagaa

SEQ ID NO: 2198383 - RNA, 19 nt, Artificial Sequence
  Description of Artificial Sequence: Synthetic oligonucleotide
  Antisense strand to SEQ ID NO: 2198382
uucuagacuaaucaucguu

SEQ ID NO: 2198384 - RNA, 19 nt, Artificial Sequence
  Description of Artificial Sequence: Synthetic oligonucleotide
  Sense strand starting at position 187 of SEQ ID NO: 1883506
acuugaugacuacgauuaa

SEQ ID NO: 2198385 - RNA, 19 nt, Artificial Sequence
  Description of Artificial Sequence: Synthetic oligonucleotide
  Antisense strand to SEQ ID NO: 2198384
uuaaucguagucaucaagu

SEQ ID NO: 2198386 - RNA, 19 nt, Artificial Sequence
  Description of Artificial Sequence: Synthetic oligonucleotide
  Sense strand starting at position 693 of SEQ ID NO: 1883506
caggguaaauuaguacuga

SEQ ID NO: 2198387 - RNA, 19 nt, Artificial Sequence
  Description of Artificial Sequence: Synthetic oligonucleotide
  Antisense strand to SEQ ID NO: 2198386
ucaguacuaauuuacccug

SEQ ID NO: 2198388 - RNA, 19 nt, Artificial Sequence
  Description of Artificial Sequence: Synthetic oligonucleotide
  Sense strand starting at position 3231 of SEQ ID NO: 1883506
guagccauugauuaauuga

SEQ ID NO: 2198389 - RNA, 19 nt, Artificial Sequence
  Description of Artificial Sequence: Synthetic oligonucleotide
  Antisense strand to SEQ ID NO: 2198388
ucaauuaaucaauggcuac

SEQ ID NO: 2198390 - RNA, 19 nt, Artificial Sequence
  Description of Artificial Sequence: Synthetic oligonucleotide
  Sense strand starting at position 1101 of SEQ ID NO: 1883506
cuguaauggccauagaauc

SEQ ID NO: 2198391 - RNA, 19 nt, Artificial Sequence
  Description of Artificial Sequence: Synthetic oligonucleotide
  Antisense strand to SEQ ID NO: 2198390
gauucuauggccauuacag

SEQ ID NO: 2198392 - RNA, 19 nt, Artificial Sequence
  Description of Artificial Sequence: Synthetic oligonucleotide
  Sense strand starting at position 624 of SEQ ID NO: 1883506
acauuucugugcuuguuaa

SEQ ID NO: 2198393 - RNA, 19 nt, Artificial Sequence
  Description of Artificial Sequence: Synthetic oligonucleotide
  Antisense strand to SEQ ID NO: 2198392
uuaacaagcacagaaaugu

SEQ ID NO: 2198394 - RNA, 19 nt, Artificial Sequence
  Description of Artificial Sequence: Synthetic oligonucleotide
  Sense strand starting at position 3172 of SEQ ID NO: 1883506
uaacgaugauuagucuaga

SEQ ID NO: 2198395 - RNA, 19 nt, Artificial Sequence
  Description of Artificial Sequence: Synthetic oligonucleotide
  Antisense strand to SEQ ID NO: 2198394
ucuagacuaaucaucguua

SEQ ID NO: 2198396 - RNA, 19 nt, Artificial Sequence
  Description of Artificial Sequence: Synthetic oligonucleotide
  Sense strand starting at position 3167 of SEQ ID NO: 1883506
ggguuuaacgaugauuagu

SEQ ID NO: 2198397 - RNA, 19 nt, Artificial Sequence
  Description of Artificial Sequence: Synthetic oligonucleotide
  Antisense strand to SEQ ID NO: 2198396
acuaaucaucguuaaaccc

SEQ ID NO: 2198398 - RNA, 19 nt, Artificial Sequence
  Description of Artificial Sequence: Synthetic oligonucleotide
  Sense strand starting at position 834 of SEQ ID NO: 1883506
gguuacugucuuuaucaaa

SEQ ID NO: 2198399 - RNA, 19 nt, Artificial Sequence
  Description of Artificial Sequence: Synthetic oligonucleotide
  Antisense strand to SEQ ID NO: 2198398
uuugauaaagacaguaacc

SEQ ID NO: 2198400 - RNA, 19 nt, Artificial Sequence
  Description of Artificial Sequence: Synthetic oligonucleotide
  Sense strand starting at position 185 of SEQ ID NO: 1883506
gcacuugaugacuacgauu

SEQ ID NO: 2198401 - RNA, 19 nt, Artificial Sequence
  Description of Artificial Sequence: Synthetic oligonucleotide
  Antisense strand to SEQ ID NO: 2198400
aaucguagucaucaagugc

SEQ ID NO: 2198402 - RNA, 19 nt, Artificial Sequence
  Description of Artificial Sequence: Synthetic oligonucleotide
  Sense strand starting at position 3702 of SEQ ID NO: 1883506
ccuuaaggcguauaugaga

SEQ ID NO: 2198403 - RNA, 19 nt, Artificial Sequence
  Description of Artificial Sequence: Synthetic oligonucleotide
  Antisense strand to SEQ ID NO: 2198402
ucucauauacgccuuaagg

SEQ ID NO: 2198404 - RNA, 19 nt, Artificial Sequence
  Description of Artificial Sequence: Synthetic oligonucleotide
  Sense strand starting at position 3215 of SEQ ID NO: 1883506
gagggagaccaguguggua

SEQ ID NO: 2198405 - RNA, 19 nt, Artificial Sequence
  Description of Artificial Sequence: Synthetic oligonucleotide
  Antisense strand to SEQ ID NO: 2198404
uaccacacuggucucccuc

SEQ ID NO: 2198406 - RNA, 19 nt, Artificial Sequence
  Description of Artificial Sequence: Synthetic oligonucleotide
  Sense strand starting at position 3166 of SEQ ID NO: 1883506
uggguuuaacgaugauuag

SEQ ID NO: 2198407 - RNA, 19 nt, Artificial Sequence
  Description of Artificial Sequence: Synthetic oligonucleotide
  Antisense strand to SEQ ID NO: 2198406
cuaaucaucguuaaaccca

SEQ ID NO: 2198408 - RNA, 19 nt, Artificial Sequence
  Description of Artificial Sequence: Synthetic oligonucleotide
  Sense strand starting at position 1276 of SEQ ID NO: 1883506
uguaacuuccuccauaagu

SEQ ID NO: 2198409 - RNA, 19 nt, Artificial Sequence
  Description of Artificial Sequence: Synthetic oligonucleotide
  Antisense strand to SEQ ID NO: 2198408
acuuauggaggaaguuaca

SEQ ID NO: 2198410 - RNA, 19 nt, Artificial Sequence
  Description of Artificial Sequence: Synthetic oligonucleotide
  Sense strand starting at position 1049 of SEQ ID NO: 1883506
guaaauauacugcaauugu

SEQ ID NO: 2198411 - RNA, 19 nt, Artificial Sequence
  Description of Artificial Sequence: Synthetic oligonucleotide
  Antisense strand to SEQ ID NO: 2198410
acaauugcaguauauuuac

SEQ ID NO: 2198412 - RNA, 19 nt, Artificial Sequence
  Description of Artificial Sequence: Synthetic oligonucleotide
  Sense strand starting at position 7 of SEQ ID NO: 1883506
aacagaaugcuguaugucu

SEQ ID NO: 2198413 - RNA, 19 nt, Artificial Sequence
  Description of Artificial Sequence: Synthetic oligonucleotide
  Antisense strand to SEQ ID NO: 2198412
agacauacagcauucuguu

SEQ ID NO: 2198414 - RNA, 19 nt, Artificial Sequence
  Description of Artificial Sequence: Synthetic oligonucleotide
  Sense strand starting at position 1099 of SEQ ID NO: 1883506
ugcuguaauggccauagaa

SEQ ID NO: 2198415 - RNA, 19 nt, Artificial Sequence
  Description of Artificial Sequence: Synthetic oligonucleotide
  Antisense strand to SEQ ID NO: 2198414
uucuauggccauuacagca

SEQ ID NO: 2198416 - RNA, 19 nt, Artificial Sequence
  Description of Artificial Sequence: Synthetic oligonucleotide
  Sense strand starting at position 3851 of SEQ ID NO: 1883506
aaacgugacuaguccaaau

SEQ ID NO: 2198417 - RNA, 19 nt, Artificial Sequence
  Description of Artificial Sequence: Synthetic oligonucleotide
  Antisense strand to SEQ ID NO: 2198416
auuuggacuagucacguuu

SEQ ID NO: 2198418 - RNA, 19 nt, Artificial Sequence
  Description of Artificial Sequence: Synthetic oligonucleotide
  Sense strand starting at position 3228 of SEQ ID NO: 1883506
gugguagccauugauuaau

SEQ ID NO: 2198419 - RNA, 19 nt, Artificial Sequence
  Description of Artificial Sequence: Synthetic oligonucleotide
  Antisense strand to SEQ ID NO: 2198418
auuaaucaauggcuaccac

SEQ ID NO: 2198420 - RNA, 19 nt, Artificial Sequence
  Description of Artificial Sequence: Synthetic oligonucleotide
  Sense strand starting at position 3870 of SEQ ID NO: 1883506
ggaaaugugcucuaaguuu

SEQ ID NO: 2198421 - RNA, 19 nt, Artificial Sequence
  Description of Artificial Sequence: Synthetic oligonucleotide
  Antisense strand to SEQ ID NO: 2198420
aaacuuagagcacauuucc

SEQ ID NO: 2198422 - RNA, 19 nt, Artificial Sequence
  Description of Artificial Sequence: Synthetic oligonucleotide
  Sense strand starting at position 1612 of SEQ ID NO: 1883506
agugaaucuuccuccucag

SEQ ID NO: 2198423 - RNA, 19 nt, Artificial Sequence
  Description of Artificial Sequence: Synthetic oligonucleotide
  Antisense strand to SEQ ID NO: 2198422
cugaggaggaagauucacu

SEQ ID NO: 2198424 - RNA, 19 nt, Artificial Sequence
  Description of Artificial Sequence: Synthetic oligonucleotide
  Sense strand starting at position 2860 of SEQ ID NO: 1883506
ucaugacuuguguagguua

SEQ ID NO: 2198425 - RNA, 19 nt, Artificial Sequence
  Description of Artificial Sequence: Synthetic oligonucleotide
  Antisense strand to SEQ ID NO: 2198424
uaaccuacacaagucauga

SEQ ID NO: 2198426 - RNA, 19 nt, Artificial Sequence
  Description of Artificial Sequence: Synthetic oligonucleotide
  Sense strand starting at position 3239 of SEQ ID NO: 1883506
ugauuaauugaacguccua

SEQ ID NO: 2198427 - RNA, 19 nt, Artificial Sequence
  Description of Artificial Sequence: Synthetic oligonucleotide
  Antisense strand to SEQ ID NO: 2198426
uaggacguucaauuaauca

SEQ ID NO: 2198428 - RNA, 19 nt, Artificial Sequence
  Description of Artificial Sequence: Synthetic oligonucleotide
  Sense strand starting at position 1456 of SEQ ID NO: 1883506
cugugaagcuucuuaaaca

SEQ ID NO: 2198429 - RNA, 19 nt, Artificial Sequence
  Description of Artificial Sequence: Synthetic oligonucleotide
  Antisense strand to SEQ ID NO: 2198428
uguuuaagaagcuucacag

SEQ ID NO: 2198430 - RNA, 19 nt, Artificial Sequence
  Description of Artificial Sequence: Synthetic oligonucleotide
  Sense strand starting at position 2863 of SEQ ID NO: 1883506
ugacuuguguagguuaaga

SEQ ID NO: 2198431 - RNA, 19 nt, Artificial Sequence
  Description of Artificial Sequence: Synthetic oligonucleotide
  Antisense strand to SEQ ID NO: 2198430
ucuuaaccuacacaaguca

SEQ ID NO: 2198432 - RNA, 19 nt, Artificial Sequence
  Description of Artificial Sequence: Synthetic oligonucleotide
  Sense strand starting at position 202 of SEQ ID NO: 1883506
uuaagaucuuuccugcuga

SEQ ID NO: 2198433 - RNA, 19 nt, Artificial Sequence
  Description of Artificial Sequence: Synthetic oligonucleotide
  Antisense strand to SEQ ID NO: 2198432
ucagcaggaaagaucuuaa

SEQ ID NO: 2198434 - RNA, 19 nt, Artificial Sequence
  Description of Artificial Sequence: Synthetic oligonucleotide
  Sense strand starting at position 3897 of SEQ ID NO: 1883506
cacgaaauuucguggauuu

SEQ ID NO: 2198435 - RNA, 19 nt, Artificial Sequence
  Description of Artificial Sequence: Synthetic oligonucleotide
  Antisense strand to SEQ ID NO: 2198434
aaauccacgaaauuucgug

SEQ ID NO: 2198436 - RNA, 19 nt, Artificial Sequence
  Description of Artificial Sequence: Synthetic oligonucleotide
  Sense strand starting at position 621 of SEQ ID NO: 1883506
gguacauuucugugcuugu

SEQ ID NO: 2198437 - RNA, 19 nt, Artificial Sequence
  Description of Artificial Sequence: Synthetic oligonucleotide
  Antisense strand to SEQ ID NO: 2198436
acaagcacagaaauguacc

SEQ ID NO: 2198438 - RNA, 19 nt, Artificial Sequence
  Description of Artificial Sequence: Synthetic oligonucleotide
  Sense strand starting at position 100 of SEQ ID NO: 1883506
aaaugagcguuuguaaaga

SEQ ID NO: 2198439 - RNA, 19 nt, Artificial Sequence
  Description of Artificial Sequence: Synthetic oligonucleotide
  Antisense strand to SEQ ID NO: 2198438
ucuuuacaaacgcucauuu

SEQ ID NO: 2198440 - RNA, 19 nt, Artificial Sequence
  Description of Artificial Sequence: Synthetic oligonucleotide
  Sense strand starting at position 238 of SEQ ID NO: 1883506
ucuuccucuguuugagaca

SEQ ID NO: 2198441 - RNA, 19 nt, Artificial Sequence
  Description of Artificial Sequence: Synthetic oligonucleotide
  Antisense strand to SEQ ID NO: 2198440
ugucucaaacagaggaaga

SEQ ID NO: 2198442 - RNA, 19 nt, Artificial Sequence
  Description of Artificial Sequence: Synthetic oligonucleotide
  Sense strand starting at position 247 of SEQ ID NO: 1883506
guuugagacagacggguuu

SEQ ID NO: 2198443 - RNA, 19 nt, Artificial Sequence
  Description of Artificial Sequence: Synthetic oligonucleotide
  Antisense strand to SEQ ID NO: 2198442
aaacccgucugucucaaac

SEQ ID NO: 2198444 - RNA, 19 nt, Artificial Sequence
  Description of Artificial Sequence: Synthetic oligonucleotide
  Sense strand starting at position 622 of SEQ ID NO: 1883506
guacauuucugugcuuguu

SEQ ID NO: 2198445 - RNA, 19 nt, Artificial Sequence
  Description of Artificial Sequence: Synthetic oligonucleotide
  Antisense strand to SEQ ID NO: 2198444
aacaagcacagaaauguac

SEQ ID NO: 2198446 - RNA, 19 nt, Artificial Sequence
  Description of Artificial Sequence: Synthetic oligonucleotide
  Sense strand starting at position 3700 of SEQ ID NO: 1883506
ggccuuaaggcguauauga

SEQ ID NO: 2198447 - RNA, 19 nt, Artificial Sequence
  Description of Artificial Sequence: Synthetic oligonucleotide
  Antisense strand to SEQ ID NO: 2198446
ucauauacgccuuaaggcc

SEQ ID NO: 2198448 - RNA, 19 nt, Artificial Sequence
  Description of Artificial Sequence: Synthetic oligonucleotide
  Sense strand starting at position 833 of SEQ ID NO: 1883506
ugguuacugucuuuaucaa

SEQ ID NO: 2198449 - RNA, 19 nt, Artificial Sequence
  Description of Artificial Sequence: Synthetic oligonucleotide
  Antisense strand to SEQ ID NO: 2198448
uugauaaagacaguaacca

SEQ ID NO: 2198450 - RNA, 19 nt, Artificial Sequence
  Description of Artificial Sequence: Synthetic oligonucleotide
  Sense strand starting at position 3716 of SEQ ID NO: 1883506
ugagaaucauuggcggguu

SEQ ID NO: 2198451 - RNA, 19 nt, Artificial Sequence
  Description of Artificial Sequence: Synthetic oligonucleotide
  Antisense strand to SEQ ID NO: 2198450
aacccgccaaugauucuca

SEQ ID NO: 2198452 - RNA, 19 nt, Artificial Sequence
  Description of Artificial Sequence: Synthetic oligonucleotide
  Sense strand starting at position 3603 of SEQ ID NO: 1883507
caguaagaauucuuggaca

SEQ ID NO: 2198453 - RNA, 19 nt, Artificial Sequence
  Description of Artificial Sequence: Synthetic oligonucleotide
  Antisense strand to SEQ ID NO: 2198452
uguccaagaauucuuacug

SEQ ID NO: 2198454 - RNA, 19 nt, Artificial Sequence
  Description of Artificial Sequence: Synthetic oligonucleotide
  Sense strand starting at position 3541 of SEQ ID NO: 1883507
uccacuacugauggauuaa

SEQ ID NO: 2198455 - RNA, 19 nt, Artificial Sequence
  Description of Artificial Sequence: Synthetic oligonucleotide
  Antisense strand to SEQ ID NO: 2198454
uuaauccaucaguagugga

SEQ ID NO: 2198456 - RNA, 19 nt, Artificial Sequence
  Description of Artificial Sequence: Synthetic oligonucleotide
  Sense strand starting at position 3513 of SEQ ID NO: 1883507
aacuacgugccaugauuua

SEQ ID NO: 2198457 - RNA, 19 nt, Artificial Sequence
  Description of Artificial Sequence: Synthetic oligonucleotide
  Antisense strand to SEQ ID NO: 2198456
uaaaucauggcacguaguu

SEQ ID NO: 2198458 - RNA, 19 nt, Artificial Sequence
  Description of Artificial Sequence: Synthetic oligonucleotide
  Sense strand starting at position 3605 of SEQ ID NO: 1883507
guaagaauucuuggacaua

SEQ ID NO: 2198459 - RNA, 19 nt, Artificial Sequence
  Description of Artificial Sequence: Synthetic oligonucleotide
  Antisense strand to SEQ ID NO: 2198458
uauguccaagaauucuuac

SEQ ID NO: 2198460 - RNA, 19 nt, Artificial Sequence
  Description of Artificial Sequence: Synthetic oligonucleotide
  Sense strand starting at position 316 of SEQ ID NO: 1883507
gcuuauugucagcauuuau

SEQ ID NO: 2198461 - RNA, 19 nt, Artificial Sequence
  Description of Artificial Sequence: Synthetic oligonucleotide
  Antisense strand to SEQ ID NO: 2198460
auaaaugcugacaauaagc

SEQ ID NO: 2198462 - RNA, 19 nt, Artificial Sequence
  Description of Artificial Sequence: Synthetic oligonucleotide
  Sense strand starting at position 3868 of SEQ ID NO: 1883507
cugacuacugcugagauua

SEQ ID NO: 2198463 - RNA, 19 nt, Artificial Sequence
  Description of Artificial Sequence: Synthetic oligonucleotide
  Antisense strand to SEQ ID NO: 2198462
uaaucucagcaguagucag

SEQ ID NO: 2198464 - RNA, 19 nt, Artificial Sequence
  Description of Artificial Sequence: Synthetic oligonucleotide
  Sense strand starting at position 190 of SEQ ID NO: 1883507
agcaaauauugauucuaga

SEQ ID NO: 2198465 - RNA, 19 nt, Artificial Sequence
  Description of Artificial Sequence: Synthetic oligonucleotide
  Antisense strand to SEQ ID NO: 2198464
ucuagaaucaauauuugcu

SEQ ID NO: 2198466 - RNA, 19 nt, Artificial Sequence
  Description of Artificial Sequence: Synthetic oligonucleotide
  Sense strand starting at position 2534 of SEQ ID NO: 1883507
ucgccugaugaggaauaau

SEQ ID NO: 2198467 - RNA, 19 nt, Artificial Sequence
  Description of Artificial Sequence: Synthetic oligonucleotide
  Antisense strand to SEQ ID NO: 2198466
auuauuccucaucaggcga

SEQ ID NO: 2198468 - RNA, 19 nt, Artificial Sequence
  Description of Artificial Sequence: Synthetic oligonucleotide
  Sense strand starting at position 2179 of SEQ ID NO: 1883507
uugugaaggguugggaaga

SEQ ID NO: 2198469 - RNA, 19 nt, Artificial Sequence
  Description of Artificial Sequence: Synthetic oligonucleotide
  Antisense strand to SEQ ID NO: 2198468
ucuucccaacccuucacaa

SEQ ID NO: 2198470 - RNA, 19 nt, Artificial Sequence
  Description of Artificial Sequence: Synthetic oligonucleotide
  Sense strand starting at position 2704 of SEQ ID NO: 1883507
ugaaaugucaguggauaag

SEQ ID NO: 2198471 - RNA, 19 nt, Artificial Sequence
  Description of Artificial Sequence: Synthetic oligonucleotide
  Antisense strand to SEQ ID NO: 2198470
cuuauccacugacauuuca

SEQ ID NO: 2198472 - RNA, 19 nt, Artificial Sequence
  Description of Artificial Sequence: Synthetic oligonucleotide
  Sense strand starting at position 2835 of SEQ ID NO: 1883507
auugaagugcauuaaucau

SEQ ID NO: 2198473 - RNA, 19 nt, Artificial Sequence
  Description of Artificial Sequence: Synthetic oligonucleotide
  Antisense strand to SEQ ID NO: 2198472
augauuaaugcacuucaau

SEQ ID NO: 2198474 - RNA, 19 nt, Artificial Sequence
  Description of Artificial Sequence: Synthetic oligonucleotide
  Sense strand starting at position 483 of SEQ ID NO: 1883507
uagaaucccguuuaucaag

SEQ ID NO: 2198475 - RNA, 19 nt, Artificial Sequence
  Description of Artificial Sequence: Synthetic oligonucleotide
  Antisense strand to SEQ ID NO: 2198474
cuugauaaacgggauucua

SEQ ID NO: 2198476 - RNA, 19 nt, Artificial Sequence
  Description of Artificial Sequence: Synthetic oligonucleotide
  Sense strand starting at position 3374 of SEQ ID NO: 1883507
auuaacaaucuggguugau

SEQ ID NO: 2198477 - RNA, 19 nt, Artificial Sequence
  Description of Artificial Sequence: Synthetic oligonucleotide
  Antisense strand to SEQ ID NO: 2198476
aucaacccagauuguuaau

SEQ ID NO: 2198478 - RNA, 19 nt, Artificial Sequence
  Description of Artificial Sequence: Synthetic oligonucleotide
  Sense strand starting at position 315 of SEQ ID NO: 1883507
agcuuauugucagcauuua

SEQ ID NO: 2198479 - RNA, 19 nt, Artificial Sequence
  Description of Artificial Sequence: Synthetic oligonucleotide
  Antisense strand to SEQ ID NO: 2198478
uaaaugcugacaauaagcu

SEQ ID NO: 2198480 - RNA, 19 nt, Artificial Sequence
  Description of Artificial Sequence: Synthetic oligonucleotide
  Sense strand starting at position 1882 of SEQ ID NO: 1883507
gggcucuuaccugagguaa

SEQ ID NO: 2198481 - RNA, 19 nt, Artificial Sequence
  Description of Artificial Sequence: Synthetic oligonucleotide
  Antisense strand to SEQ ID NO: 2198480
uuaccucagguaagagccc

SEQ ID NO: 2198482 - RNA, 19 nt, Artificial Sequence
  Description of Artificial Sequence: Synthetic oligonucleotide
  Sense strand starting at position 3375 of SEQ ID NO: 1883507
uuaacaaucuggguugauu

SEQ ID NO: 2198483 - RNA, 19 nt, Artificial Sequence
  Description of Artificial Sequence: Synthetic oligonucleotide
  Antisense strand to SEQ ID NO: 2198482
aaucaacccagauuguuaa

SEQ ID NO: 2198484 - RNA, 19 nt, Artificial Sequence
  Description of Artificial Sequence: Synthetic oligonucleotide
  Sense strand starting at position 2703 of SEQ ID NO: 1883507
gugaaaugucaguggauaa

SEQ ID NO: 2198485 - RNA, 19 nt, Artificial Sequence
  Description of Artificial Sequence: Synthetic oligonucleotide
  Antisense strand to SEQ ID NO: 2198484
uuauccacugacauuucac

SEQ ID NO: 2198486 - RNA, 19 nt, Artificial Sequence
  Description of Artificial Sequence: Synthetic oligonucleotide
  Sense strand starting at position 3615 of SEQ ID NO: 1883507
uuggacauaugcucuugaa

SEQ ID NO: 2198487 - RNA, 19 nt, Artificial Sequence
  Description of Artificial Sequence: Synthetic oligonucleotide
  Antisense strand to SEQ ID NO: 2198486
uucaagagcauauguccaa

SEQ ID NO: 2198488 - RNA, 19 nt, Artificial Sequence
  Description of Artificial Sequence: Synthetic oligonucleotide
  Sense strand starting at position 3761 of SEQ ID NO: 1883507
gggucaucauucuccugaa

SEQ ID NO: 2198489 - RNA, 19 nt, Artificial Sequence
  Description of Artificial Sequence: Synthetic oligonucleotide
  Antisense strand to SEQ ID NO: 2198488
uucaggagaaugaugaccc

SEQ ID NO: 2198490 - RNA, 19 nt, Artificial Sequence
  Description of Artificial Sequence: Synthetic oligonucleotide
  Sense strand starting at position 3901 of SEQ ID NO: 1883507
guuuaugaauccuuuggau

SEQ ID NO: 2198491 - RNA, 19 nt, Artificial Sequence
  Description of Artificial Sequence: Synthetic oligonucleotide
  Antisense strand to SEQ ID NO: 2198490
auccaaaggauucauaaac

SEQ ID NO: 2198492 - RNA, 19 nt, Artificial Sequence
  Description of Artificial Sequence: Synthetic oligonucleotide
  Sense strand starting at position 1653 of SEQ ID NO: 1883507
ucuaguugaugggcugaaa

SEQ ID NO: 2198493 - RNA, 19 nt, Artificial Sequence
  Description of Artificial Sequence: Synthetic oligonucleotide
  Antisense strand to SEQ ID NO: 2198492
uuucagcccaucaacuaga

SEQ ID NO: 2198494 - RNA, 19 nt, Artificial Sequence
  Description of Artificial Sequence: Synthetic oligonucleotide
  Sense strand starting at position 2702 of SEQ ID NO: 1883507
ugugaaaugucaguggaua

SEQ ID NO: 2198495 - RNA, 19 nt, Artificial Sequence
  Description of Artificial Sequence: Synthetic oligonucleotide
  Antisense strand to SEQ ID NO: 2198494
uauccacugacauuucaca

SEQ ID NO: 2198496 - RNA, 19 nt, Artificial Sequence
  Description of Artificial Sequence: Synthetic oligonucleotide
  Sense strand starting at position 3793 of SEQ ID NO: 1883507
ugaauauauugcucuuuag

SEQ ID NO: 2198497 - RNA, 19 nt, Artificial Sequence
  Description of Artificial Sequence: Synthetic oligonucleotide
  Antisense strand to SEQ ID NO: 2198496
cuaaagagcaauauauuca

SEQ ID NO: 2198498 - RNA, 19 nt, Artificial Sequence
  Description of Artificial Sequence: Synthetic oligonucleotide
  Sense strand starting at position 2798 of SEQ ID NO: 1883507
guuugacaauaaucaguuu

SEQ ID NO: 2198499 - RNA, 19 nt, Artificial Sequence
  Description of Artificial Sequence: Synthetic oligonucleotide
  Antisense strand to SEQ ID NO: 2198498
aaacugauuauugucaaac

SEQ ID NO: 2198500 - RNA, 19 nt, Artificial Sequence
  Description of Artificial Sequence: Synthetic oligonucleotide
  Sense strand starting at position 3579 of SEQ ID NO: 1883507
uggaaacaaugacaaauaa

SEQ ID NO: 2198501 - RNA, 19 nt, Artificial Sequence
  Description of Artificial Sequence: Synthetic oligonucleotide
  Antisense strand to SEQ ID NO: 2198500
uuauuugucauuguuucca

SEQ ID NO: 2198502 - RNA, 19 nt, Artificial Sequence
  Description of Artificial Sequence: Synthetic oligonucleotide
  Sense strand starting at position 3328 of SEQ ID NO: 1883507
cagagaaaguaaucgccau

SEQ ID NO: 2198503 - RNA, 19 nt, Artificial Sequence
  Description of Artificial Sequence: Synthetic oligonucleotide
  Antisense strand to SEQ ID NO: 2198502
auggcgauuacuuucucug

SEQ ID NO: 2198504 - RNA, 19 nt, Artificial Sequence
  Description of Artificial Sequence: Synthetic oligonucleotide
  Sense strand starting at position 1283 of SEQ ID NO: 1883507
auaauaagauccgccggaa

SEQ ID NO: 2198505 - RNA, 19 nt, Artificial Sequence
  Description of Artificial Sequence: Synthetic oligonucleotide
  Antisense strand to SEQ ID NO: 2198504
uuccggcggaucuuauuau

SEQ ID NO: 2198506 - RNA, 19 nt, Artificial Sequence
  Description of Artificial Sequence: Synthetic oligonucleotide
  Sense strand starting at position 3762 of SEQ ID NO: 1883507
ggucaucauucuccugaau

SEQ ID NO: 2198507 - RNA, 19 nt, Artificial Sequence
  Description of Artificial Sequence: Synthetic oligonucleotide
  Antisense strand to SEQ ID NO: 2198506
auucaggagaaugaugacc

SEQ ID NO: 2198508 - RNA, 19 nt, Artificial Sequence
  Description of Artificial Sequence: Synthetic oligonucleotide
  Sense strand starting at position 649 of SEQ ID NO: 1883507
uuugaauugcagcaauucu

SEQ ID NO: 2198509 - RNA, 19 nt, Artificial Sequence
  Description of Artificial Sequence: Synthetic oligonucleotide
  Antisense strand to SEQ ID NO: 2198508
agaauugcugcaauucaaa

SEQ ID NO: 2198510 - RNA, 19 nt, Artificial Sequence
  Description of Artificial Sequence: Synthetic oligonucleotide
  Sense strand starting at position 3728 of SEQ ID NO: 1883507
uguauagcaguuuacauua

SEQ ID NO: 2198511 - RNA, 19 nt, Artificial Sequence
  Description of Artificial Sequence: Synthetic oligonucleotide
  Antisense strand to SEQ ID NO: 2198510
uaauguaaacugcuauaca

SEQ ID NO: 2198512 - RNA, 19 nt, Artificial Sequence
  Description of Artificial Sequence: Synthetic oligonucleotide
  Sense strand starting at position 2714 of SEQ ID NO: 1883507
guggauaagucacuuuauu

SEQ ID NO: 2198513 - RNA, 19 nt, Artificial Sequence
  Description of Artificial Sequence: Synthetic oligonucleotide
  Antisense strand to SEQ ID NO: 2198512
aauaaagugacuuauccac

SEQ ID NO: 2198514 - RNA, 19 nt, Artificial Sequence
  Description of Artificial Sequence: Synthetic oligonucleotide
  Sense strand starting at position 3329 of SEQ ID NO: 1883507
agagaaaguaaucgccauu

SEQ ID NO: 2198515 - RNA, 19 nt, Artificial Sequence
  Description of Artificial Sequence: Synthetic oligonucleotide
  Antisense strand to SEQ ID NO: 2198514
aauggcgauuacuuucucu

SEQ ID NO: 2198516 - RNA, 19 nt, Artificial Sequence
  Description of Artificial Sequence: Synthetic oligonucleotide
  Sense strand starting at position 2134 of SEQ ID NO: 1883507
ggagugugacgguggagaa

SEQ ID NO: 2198517 - RNA, 19 nt, Artificial Sequence
  Description of Artificial Sequence: Synthetic oligonucleotide
  Antisense strand to SEQ ID NO: 2198516
uucuccaccgucacacucc

SEQ ID NO: 2198518 - RNA, 19 nt, Artificial Sequence
  Description of Artificial Sequence: Synthetic oligonucleotide
  Sense strand starting at position 1805 of SEQ ID NO: 1883507
auacuucuuuggucccaua

SEQ ID NO: 2198519 - RNA, 19 nt, Artificial Sequence
  Description of Artificial Sequence: Synthetic oligonucleotide
  Antisense strand to SEQ ID NO: 2198518
uaugggaccaaagaaguau

SEQ ID NO: 2198520 - RNA, 19 nt, Artificial Sequence
  Description of Artificial Sequence: Synthetic oligonucleotide
  Sense strand starting at position 3931 of SEQ ID NO: 1883507
ugaauugucuaauuaugca

SEQ ID NO: 2198521 - RNA, 19 nt, Artificial Sequence
  Description of Artificial Sequence: Synthetic oligonucleotide
  Antisense strand to SEQ ID NO: 2198520
ugcauaauuagacaauuca

SEQ ID NO: 2198522 - RNA, 19 nt, Artificial Sequence
  Description of Artificial Sequence: Synthetic oligonucleotide
  Sense strand starting at position 1881 of SEQ ID NO: 1883507
agggcucuuaccugaggua

SEQ ID NO: 2198523 - RNA, 19 nt, Artificial Sequence
  Description of Artificial Sequence: Synthetic oligonucleotide
  Antisense strand to SEQ ID NO: 2198522
uaccucagguaagagcccu

SEQ ID NO: 2198524 - RNA, 19 nt, Artificial Sequence
  Description of Artificial Sequence: Synthetic oligonucleotide
  Sense strand starting at position 1787 of SEQ ID NO: 1883507
agagauuccugagcugcca

SEQ ID NO: 2198525 - RNA, 19 nt, Artificial Sequence
  Description of Artificial Sequence: Synthetic oligonucleotide
  Antisense strand to SEQ ID NO: 2198524
uggcagcucaggaaucucu

SEQ ID NO: 2198526 - RNA, 19 nt, Artificial Sequence
  Description of Artificial Sequence: Synthetic oligonucleotide
  Sense strand starting at position 3209 of SEQ ID NO: 1883507
gagcaagauuccguaucag

SEQ ID NO: 2198527 - RNA, 19 nt, Artificial Sequence
  Description of Artificial Sequence: Synthetic oligonucleotide
  Antisense strand to SEQ ID NO: 2198526
cugauacggaaucuugcuc

SEQ ID NO: 2198528 - RNA, 19 nt, Artificial Sequence
  Description of Artificial Sequence: Synthetic oligonucleotide
  Sense strand starting at position 3631 of SEQ ID NO: 1883507
gaauacuuucuguggcaua

SEQ ID NO: 2198529 - RNA, 19 nt, Artificial Sequence
  Description of Artificial Sequence: Synthetic oligonucleotide
  Antisense strand to SEQ ID NO: 2198528
uaugccacagaaaguauuc

SEQ ID NO: 2198530 - RNA, 19 nt, Artificial Sequence
  Description of Artificial Sequence: Synthetic oligonucleotide
  Sense strand starting at position 3665 of SEQ ID NO: 1883507
gcuggcugaaauuguaaga

SEQ ID NO: 2198531 - RNA, 19 nt, Artificial Sequence
  Description of Artificial Sequence: Synthetic oligonucleotide
  Antisense strand to SEQ ID NO: 2198530
ucuuacaauuucagccagc

SEQ ID NO: 2198532 - RNA, 19 nt, Artificial Sequence
  Description of Artificial Sequence: Synthetic oligonucleotide
  Sense strand starting at position 1772 of SEQ ID NO: 1883508
auaaacauuggcuaaguua

SEQ ID NO: 2198533 - RNA, 19 nt, Artificial Sequence
  Description of Artificial Sequence: Synthetic oligonucleotide
  Antisense strand to SEQ ID NO: 2198532
uaacuuagccaauguuuau

SEQ ID NO: 2198534 - RNA, 19 nt, Artificial Sequence
  Description of Artificial Sequence: Synthetic oligonucleotide
  Sense strand starting at position 185 of SEQ ID NO: 1883508
guguuagggauuuguuauu

SEQ ID NO: 2198535 - RNA, 19 nt, Artificial Sequence
  Description of Artificial Sequence: Synthetic oligonucleotide
  Antisense strand to SEQ ID NO: 2198534
aauaacaaaucccuaacac

SEQ ID NO: 2198536 - RNA, 19 nt, Artificial Sequence
  Description of Artificial Sequence: Synthetic oligonucleotide
  Sense strand starting at position 2792 of SEQ ID NO: 1883508
gggagaaaguggucuugga

SEQ ID NO: 2198537 - RNA, 19 nt, Artificial Sequence
  Description of Artificial Sequence: Synthetic oligonucleotide
  Antisense strand to SEQ ID NO: 2198536
uccaagaccacuuucuccc

SEQ ID NO: 2198538 - RNA, 19 nt, Artificial Sequence
  Description of Artificial Sequence: Synthetic oligonucleotide
  Sense strand starting at position 3194 of SEQ ID NO: 1883508
uuacuuuaguaaucaggaa

SEQ ID NO: 2198539 - RNA, 19 nt, Artificial Sequence
  Description of Artificial Sequence: Synthetic oligonucleotide
  Antisense strand to SEQ ID NO: 2198538
uuccugauuacuaaaguaa

SEQ ID NO: 2198540 - RNA, 19 nt, Artificial Sequence
  Description of Artificial Sequence: Synthetic oligonucleotide
  Sense strand starting at position 2418 of SEQ ID NO: 1883508
gaaggaucucacugaggca

SEQ ID NO: 2198541 - RNA, 19 nt, Artificial Sequence
  Description of Artificial Sequence: Synthetic oligonucleotide
  Antisense strand to SEQ ID NO: 2198540
ugccucagugagauccuuc

SEQ ID NO: 2198542 - RNA, 19 nt, Artificial Sequence
  Description of Artificial Sequence: Synthetic oligonucleotide
  Sense strand starting at position 1720 of SEQ ID NO: 1883508
gucaaugauagguagagca

SEQ ID NO: 2198543 - RNA, 19 nt, Artificial Sequence
  Description of Artificial Sequence: Synthetic oligonucleotide
  Antisense strand to SEQ ID NO: 2198542
ugcucuaccuaucauugac

SEQ ID NO: 2198544 - RNA, 19 nt, Artificial Sequence
  Description of Artificial Sequence: Synthetic oligonucleotide
  Sense strand starting at position 2445 of SEQ ID NO: 1883508
uaucuugugcguuccaagu

SEQ ID NO: 2198545 - RNA, 19 nt, Artificial Sequence
  Description of Artificial Sequence: Synthetic oligonucleotide
  Antisense strand to SEQ ID NO: 2198544
acuuggaacgcacaagaua

SEQ ID NO: 2198546 - RNA, 19 nt, Artificial Sequence
  Description of Artificial Sequence: Synthetic oligonucleotide
  Sense strand starting at position 2663 of SEQ ID NO: 1883508
gagguaauguaaucuacag

SEQ ID NO: 2198547 - RNA, 19 nt, Artificial Sequence
  Description of Artificial Sequence: Synthetic oligonucleotide
  Antisense strand to SEQ ID NO: 2198546
cuguagauuacauuaccuc

SEQ ID NO: 2198548 - RNA, 19 nt, Artificial Sequence
  Description of Artificial Sequence: Synthetic oligonucleotide
  Sense strand starting at position 520 of SEQ ID NO: 1883508
agacuugaacugugaccua

SEQ ID NO: 2198549 - RNA, 19 nt, Artificial Sequence
  Description of Artificial Sequence: Synthetic oligonucleotide
  Antisense strand to SEQ ID NO: 2198548
uaggucacaguucaagucu

SEQ ID NO: 2198550 - RNA, 19 nt, Artificial Sequence
  Description of Artificial Sequence: Synthetic oligonucleotide
  Sense strand starting at position 2655 of SEQ ID NO: 1883508
ugugauuggagguaaugua

SEQ ID NO: 2198551 - RNA, 19 nt, Artificial Sequence
  Description of Artificial Sequence: Synthetic oligonucleotide
  Antisense strand to SEQ ID NO: 2198550
uacauuaccuccaaucaca

SEQ ID NO: 2198552 - RNA, 19 nt, Artificial Sequence
  Description of Artificial Sequence: Synthetic oligonucleotide
  Sense strand starting at position 1693 of SEQ ID NO: 1883508
caauuuagaugacaaguga

SEQ ID NO: 2198553 - RNA, 19 nt, Artificial Sequence
  Description of Artificial Sequence: Synthetic oligonucleotide
  Antisense strand to SEQ ID NO: 2198552
ucacuugucaucuaaauug

SEQ ID NO: 2198554 - RNA, 19 nt, Artificial Sequence
  Description of Artificial Sequence: Synthetic oligonucleotide
  Sense strand starting at position 3591 of SEQ ID NO: 1883508
aaccuuucuggguagucaa

SEQ ID NO: 2198555 - RNA, 19 nt, Artificial Sequence
  Description of Artificial Sequence: Synthetic oligonucleotide
  Antisense strand to SEQ ID NO: 2198554
uugacuacccagaaagguu

SEQ ID NO: 2198556 - RNA, 19 nt, Artificial Sequence
  Description of Artificial Sequence: Synthetic oligonucleotide
  Sense strand starting at position 119 of SEQ ID NO: 1883508
auguguuuggauuauaauc

SEQ ID NO: 2198557 - RNA, 19 nt, Artificial Sequence
  Description of Artificial Sequence: Synthetic oligonucleotide
  Antisense strand to SEQ ID NO: 2198556
gauuauaauccaaacacau

SEQ ID NO: 2198558 - RNA, 19 nt, Artificial Sequence
  Description of Artificial Sequence: Synthetic oligonucleotide
  Sense strand starting at position 139 of SEQ ID NO: 1883508
auguaaugagucugaauga

SEQ ID NO: 2198559 - RNA, 19 nt, Artificial Sequence
  Description of Artificial Sequence: Synthetic oligonucleotide
  Antisense strand to SEQ ID NO: 2198558
ucauucagacucauuacau

SEQ ID NO: 2198560 - RNA, 19 nt, Artificial Sequence
  Description of Artificial Sequence: Synthetic oligonucleotide
  Sense strand starting at position 3524 of SEQ ID NO: 1883508
gcuuuaaggcauuacaaac

SEQ ID NO: 2198561 - RNA, 19 nt, Artificial Sequence
  Description of Artificial Sequence: Synthetic oligonucleotide
  Antisense strand to SEQ ID NO: 2198560
guuuguaaugccuuaaagc

SEQ ID NO: 2198562 - RNA, 19 nt, Artificial Sequence
  Description of Artificial Sequence: Synthetic oligonucleotide
  Sense strand starting at position 3651 of SEQ ID NO: 1883508
aauugcauuugggaaagga

SEQ ID NO: 2198563 - RNA, 19 nt, Artificial Sequence
  Description of Artificial Sequence: Synthetic oligonucleotide
  Antisense strand to SEQ ID NO: 2198562
uccuuucccaaaugcaauu

SEQ ID NO: 2198564 - RNA, 19 nt, Artificial Sequence
  Description of Artificial Sequence: Synthetic oligonucleotide
  Sense strand starting at position 929 of SEQ ID NO: 1883508
uuccuagaccuguaagcaa

SEQ ID NO: 2198565 - RNA, 19 nt, Artificial Sequence
  Description of Artificial Sequence: Synthetic oligonucleotide
  Antisense strand to SEQ ID NO: 2198564
uugcuuacaggucuaggaa

SEQ ID NO: 2198566 - RNA, 19 nt, Artificial Sequence
  Description of Artificial Sequence: Synthetic oligonucleotide
  Sense strand starting at position 780 of SEQ ID NO: 1883508
cguuccuaccuguuucgua

SEQ ID NO: 2198567 - RNA, 19 nt, Artificial Sequence
  Description of Artificial Sequence: Synthetic oligonucleotide
  Antisense strand to SEQ ID NO: 2198566
uacgaaacagguaggaacg

SEQ ID NO: 2198568 - RNA, 19 nt, Artificial Sequence
  Description of Artificial Sequence: Synthetic oligonucleotide
  Sense strand starting at position 531 of SEQ ID NO: 1883508
gugaccuaugguggagaua

SEQ ID NO: 2198569 - RNA, 19 nt, Artificial Sequence
  Description of Artificial Sequence: Synthetic oligonucleotide
  Antisense strand to SEQ ID NO: 2198568
uaucuccaccauaggucac

SEQ ID NO: 2198570 - RNA, 19 nt, Artificial Sequence
  Description of Artificial Sequence: Synthetic oligonucleotide
  Sense strand starting at position 923 of SEQ ID NO: 1883508
agcagauuccuagaccugu

SEQ ID NO: 2198571 - RNA, 19 nt, Artificial Sequence
  Description of Artificial Sequence: Synthetic oligonucleotide
  Antisense strand to SEQ ID NO: 2198570
acaggucuaggaaucugcu

SEQ ID NO: 2198572 - RNA, 19 nt, Artificial Sequence
  Description of Artificial Sequence: Synthetic oligonucleotide
  Sense strand starting at position 3661 of SEQ ID NO: 1883508
gggaaaggaguguguuaac

SEQ ID NO: 2198573 - RNA, 19 nt, Artificial Sequence
  Description of Artificial Sequence: Synthetic oligonucleotide
  Antisense strand to SEQ ID NO: 2198572
guuaacacacuccuuuccc

SEQ ID NO: 2198574 - RNA, 19 nt, Artificial Sequence
  Description of Artificial Sequence: Synthetic oligonucleotide
  Sense strand starting at position 758 of SEQ ID NO: 1883508
cauacauuccugggaugug

SEQ ID NO: 2198575 - RNA, 19 nt, Artificial Sequence
  Description of Artificial Sequence: Synthetic oligonucleotide
  Antisense strand to SEQ ID NO: 2198574
cacaucccaggaauguaug

SEQ ID NO: 2198576 - RNA, 19 nt, Artificial Sequence
  Description of Artificial Sequence: Synthetic oligonucleotide
  Sense strand starting at position 2172 of SEQ ID NO: 1883508
aagagaggcccuugugaua

SEQ ID NO: 2198577 - RNA, 19 nt, Artificial Sequence
  Description of Artificial Sequence: Synthetic oligonucleotide
  Antisense strand to SEQ ID NO: 2198576
uaucacaagggccucucuu

SEQ ID NO: 2198578 - RNA, 19 nt, Artificial Sequence
  Description of Artificial Sequence: Synthetic oligonucleotide
  Sense strand starting at position 1599 of SEQ ID NO: 1883508
uccauaauaccuuggcaag

SEQ ID NO: 2198579 - RNA, 19 nt, Artificial Sequence
  Description of Artificial Sequence: Synthetic oligonucleotide
  Antisense strand to SEQ ID NO: 2198578
cuugccaagguauuaugga

SEQ ID NO: 2198580 - RNA, 19 nt, Artificial Sequence
  Description of Artificial Sequence: Synthetic oligonucleotide
  Sense strand starting at position 527 of SEQ ID NO: 1883508
aacugugaccuauggugga

SEQ ID NO: 2198581 - RNA, 19 nt, Artificial Sequence
  Description of Artificial Sequence: Synthetic oligonucleotide
  Antisense strand to SEQ ID NO: 2198580
uccaccauaggucacaguu

SEQ ID NO: 2198582 - RNA, 19 nt, Artificial Sequence
  Description of Artificial Sequence: Synthetic oligonucleotide
  Sense strand starting at position 2702 of SEQ ID NO: 1883508
gggagaaucgcccagcuga

SEQ ID NO: 2198583 - RNA, 19 nt, Artificial Sequence
  Description of Artificial Sequence: Synthetic oligonucleotide
  Antisense strand to SEQ ID NO: 2198582
ucagcugggcgauucuccc

SEQ ID NO: 2198584 - RNA, 19 nt, Artificial Sequence
  Description of Artificial Sequence: Synthetic oligonucleotide
  Sense strand starting at position 356 of SEQ ID NO: 1883508
agauuaugguacuuuguga

SEQ ID NO: 2198585 - RNA, 19 nt, Artificial Sequence
  Description of Artificial Sequence: Synthetic oligonucleotide
  Antisense strand to SEQ ID NO: 2198584
ucacaaaguaccauaaucu

SEQ ID NO: 2198586 - RNA, 19 nt, Artificial Sequence
  Description of Artificial Sequence: Synthetic oligonucleotide
  Sense strand starting at position 757 of SEQ ID NO: 1883508
ucauacauuccugggaugu

SEQ ID NO: 2198587 - RNA, 19 nt, Artificial Sequence
  Description of Artificial Sequence: Synthetic oligonucleotide
  Antisense strand to SEQ ID NO: 2198586
acaucccaggaauguauga

SEQ ID NO: 2198588 - RNA, 19 nt, Artificial Sequence
  Description of Artificial Sequence: Synthetic oligonucleotide
  Sense strand starting at position 857 of SEQ ID NO: 1883508
auagauuucuagcaauagg

SEQ ID NO: 2198589 - RNA, 19 nt, Artificial Sequence
  Description of Artificial Sequence: Synthetic oligonucleotide
  Antisense strand to SEQ ID NO: 2198588
ccuauugcuagaaaucuau

SEQ ID NO: 2198590 - RNA, 19 nt, Artificial Sequence
  Description of Artificial Sequence: Synthetic oligonucleotide
  Sense strand starting at position 3659 of SEQ ID NO: 1883508
uugggaaaggaguguguua

SEQ ID NO: 2198591 - RNA, 19 nt, Artificial Sequence
  Description of Artificial Sequence: Synthetic oligonucleotide
  Antisense strand to SEQ ID NO: 2198590
uaacacacuccuuucccaa

SEQ ID NO: 2198592 - RNA, 19 nt, Artificial Sequence
  Description of Artificial Sequence: Synthetic oligonucleotide
  Sense strand starting at position 1779 of SEQ ID NO: 1883508
uuggcuaaguuaucaauga

SEQ ID NO: 2198593 - RNA, 19 nt, Artificial Sequence
  Description of Artificial Sequence: Synthetic oligonucleotide
  Antisense strand to SEQ ID NO: 2198592
ucauugauaacuuagccaa

SEQ ID NO: 2198594 - RNA, 19 nt, Artificial Sequence
  Description of Artificial Sequence: Synthetic oligonucleotide
  Sense strand starting at position 2021 of SEQ ID NO: 1883508
cgccuucugcugcuaguua

SEQ ID NO: 2198595 - RNA, 19 nt, Artificial Sequence
  Description of Artificial Sequence: Synthetic oligonucleotide
  Antisense strand to SEQ ID NO: 2198594
uaacuagcagcagaaggcg

SEQ ID NO: 2198596 - RNA, 19 nt, Artificial Sequence
  Description of Artificial Sequence: Synthetic oligonucleotide
  Sense strand starting at position 111 of SEQ ID NO: 1883508
ucuaauauauguguuugga

SEQ ID NO: 2198597 - RNA, 19 nt, Artificial Sequence
  Description of Artificial Sequence: Synthetic oligonucleotide
  Antisense strand to SEQ ID NO: 2198596
uccaaacacauauauuaga

SEQ ID NO: 2198598 - RNA, 19 nt, Artificial Sequence
  Description of Artificial Sequence: Synthetic oligonucleotide
  Sense strand starting at position 179 of SEQ ID NO: 1883508
uuauuuguguuagggauuu

SEQ ID NO: 2198599 - RNA, 19 nt, Artificial Sequence
  Description of Artificial Sequence: Synthetic oligonucleotide
  Antisense strand to SEQ ID NO: 2198598
aaaucccuaacacaaauaa

SEQ ID NO: 2198600 - RNA, 19 nt, Artificial Sequence
  Description of Artificial Sequence: Synthetic oligonucleotide
  Sense strand starting at position 1805 of SEQ ID NO: 1883508
ugcuauaaguaucucauga

SEQ ID NO: 2198601 - RNA, 19 nt, Artificial Sequence
  Description of Artificial Sequence: Synthetic oligonucleotide
  Antisense strand to SEQ ID NO: 2198600
ucaugagauacuuauagca

SEQ ID NO: 2198602 - RNA, 19 nt, Artificial Sequence
  Description of Artificial Sequence: Synthetic oligonucleotide
  Sense strand starting at position 2274 of SEQ ID NO: 1883508
ugcucaaucucuuugauga

SEQ ID NO: 2198603 - RNA, 19 nt, Artificial Sequence
  Description of Artificial Sequence: Synthetic oligonucleotide
  Antisense strand to SEQ ID NO: 2198602
ucaucaaagagauugagca

SEQ ID NO: 2198604 - RNA, 19 nt, Artificial Sequence
  Description of Artificial Sequence: Synthetic oligonucleotide
  Sense strand starting at position 148 of SEQ ID NO: 1883508
gucugaaugauugggcauu

SEQ ID NO: 2198605 - RNA, 19 nt, Artificial Sequence
  Description of Artificial Sequence: Synthetic oligonucleotide
  Antisense strand to SEQ ID NO: 2198604
aaugcccaaucauucagac

SEQ ID NO: 2198606 - RNA, 19 nt, Artificial Sequence
  Description of Artificial Sequence: Synthetic oligonucleotide
  Sense strand starting at position 1600 of SEQ ID NO: 1883508
ccauaauaccuuggcaagu

SEQ ID NO: 2198607 - RNA, 19 nt, Artificial Sequence
  Description of Artificial Sequence: Synthetic oligonucleotide
  Antisense strand to SEQ ID NO: 2198606
acuugccaagguauuaugg

SEQ ID NO: 2198608 - RNA, 19 nt, Artificial Sequence
  Description of Artificial Sequence: Synthetic oligonucleotide
  Sense strand starting at position 2825 of SEQ ID NO: 1883508
gggugcuccuaaccucaaa

SEQ ID NO: 2198609 - RNA, 19 nt, Artificial Sequence
  Description of Artificial Sequence: Synthetic oligonucleotide
  Antisense strand to SEQ ID NO: 2198608
uuugagguuaggagcaccc

SEQ ID NO: 2198610 - RNA, 19 nt, Artificial Sequence
  Description of Artificial Sequence: Synthetic oligonucleotide
  Sense strand starting at position 2275 of SEQ ID NO: 1883508
gcucaaucucuuugaugau

SEQ ID NO: 2198611 - RNA, 19 nt, Artificial Sequence
  Description of Artificial Sequence: Synthetic oligonucleotide
  Antisense strand to SEQ ID NO: 2198610
aucaucaaagagauugagc

SEQ ID NO: 2198612 - RNA, 19 nt, Artificial Sequence
  Description of Artificial Sequence: Synthetic oligonucleotide
  Sense strand starting at position 2603 of SEQ ID NO: 1883509
gaccucauuccugacguaa

SEQ ID NO: 2198613 - RNA, 19 nt, Artificial Sequence
  Description of Artificial Sequence: Synthetic oligonucleotide
  Antisense strand to SEQ ID NO: 2198612
uuacgucaggaaugagguc

SEQ ID NO: 2198614 - RNA, 19 nt, Artificial Sequence
  Description of Artificial Sequence: Synthetic oligonucleotide
  Sense strand starting at position 2494 of SEQ ID NO: 1883509
gaccucagguaaucuaagu

SEQ ID NO: 2198615 - RNA, 19 nt, Artificial Sequence
  Description of Artificial Sequence: Synthetic oligonucleotide
  Antisense strand to SEQ ID NO: 2198614
acuuagauuaccugagguc

SEQ ID NO: 2198616 - RNA, 19 nt, Artificial Sequence
  Description of Artificial Sequence: Synthetic oligonucleotide
  Sense strand starting at position 3015 of SEQ ID NO: 1883509
cuguguaagaguugaauug

SEQ ID NO: 2198617 - RNA, 19 nt, Artificial Sequence
  Description of Artificial Sequence: Synthetic oligonucleotide
  Antisense strand to SEQ ID NO: 2198616
caauucaacucuuacacag

SEQ ID NO: 2198618 - RNA, 19 nt, Artificial Sequence
  Description of Artificial Sequence: Synthetic oligonucleotide
  Sense strand starting at position 867 of SEQ ID NO: 1883509
gcacacaacuaggaauauu

SEQ ID NO: 2198619 - RNA, 19 nt, Artificial Sequence
  Description of Artificial Sequence: Synthetic oligonucleotide
  Antisense strand to SEQ ID NO: 2198618
aauauuccuaguugugugc

SEQ ID NO: 2198620 - RNA, 19 nt, Artificial Sequence
  Description of Artificial Sequence: Synthetic oligonucleotide
  Sense strand starting at position 3406 of SEQ ID NO: 1883509
cuauccugaugccagauaa

SEQ ID NO: 2198621 - RNA, 19 nt, Artificial Sequence
  Description of Artificial Sequence: Synthetic oligonucleotide
  Antisense strand to SEQ ID NO: 2198620
uuaucuggcaucaggauag

SEQ ID NO: 2198622 - RNA, 19 nt, Artificial Sequence
  Description of Artificial Sequence: Synthetic oligonucleotide
  Sense strand starting at position 3403 of SEQ ID NO: 1883509
cuacuauccugaugccaga

SEQ ID NO: 2198623 - RNA, 19 nt, Artificial Sequence
  Description of Artificial Sequence: Synthetic oligonucleotide
  Antisense strand to SEQ ID NO: 2198622
ucuggcaucaggauaguag

SEQ ID NO: 2198624 - RNA, 19 nt, Artificial Sequence
  Description of Artificial Sequence: Synthetic oligonucleotide
  Sense strand starting at position 2602 of SEQ ID NO: 1883509
ugaccucauuccugacgua

SEQ ID NO: 2198625 - RNA, 19 nt, Artificial Sequence
  Description of Artificial Sequence: Synthetic oligonucleotide
  Antisense strand to SEQ ID NO: 2198624
uacgucaggaaugagguca

SEQ ID NO: 2198626 - RNA, 19 nt, Artificial Sequence
  Description of Artificial Sequence: Synthetic oligonucleotide
  Sense strand starting at position 3011 of SEQ ID NO: 1883509
gugucuguguaagaguuga

SEQ ID NO: 2198627 - RNA, 19 nt, Artificial Sequence
  Description of Artificial Sequence: Synthetic oligonucleotide
  Antisense strand to SEQ ID NO: 2198626
ucaacucuuacacagacac

SEQ ID NO: 2198628 - RNA, 19 nt, Artificial Sequence
  Description of Artificial Sequence: Synthetic oligonucleotide
  Sense strand starting at position 1530 of SEQ ID NO: 1883510
cccagaucuguccagaauu

SEQ ID NO: 2198629 - RNA, 19 nt, Artificial Sequence
  Description of Artificial Sequence: Synthetic oligonucleotide
  Antisense strand to SEQ ID NO: 2198628
aauucuggacagaucuggg

SEQ ID NO: 2198630 - RNA, 19 nt, Artificial Sequence
  Description of Artificial Sequence: Synthetic oligonucleotide
  Sense strand starting at position 1448 of SEQ ID NO: 1883510
acuguuaucagccagggaa

SEQ ID NO: 2198631 - RNA, 19 nt, Artificial Sequence
  Description of Artificial Sequence: Synthetic oligonucleotide
  Antisense strand to SEQ ID NO: 2198630
uucccuggcugauaacagu

SEQ ID NO: 2198632 - RNA, 19 nt, Artificial Sequence
  Description of Artificial Sequence: Synthetic oligonucleotide
  Sense strand starting at position 15 of SEQ ID NO: 1883510
aaaguauaauacgugggaa

SEQ ID NO: 2198633 - RNA, 19 nt, Artificial Sequence
  Description of Artificial Sequence: Synthetic oligonucleotide
  Antisense strand to SEQ ID NO: 2198632
uucccacguauuauacuuu

SEQ ID NO: 2198634 - RNA, 19 nt, Artificial Sequence
  Description of Artificial Sequence: Synthetic oligonucleotide
  Sense strand starting at position 889 of SEQ ID NO: 1883510
cggagacaaccgcaauuaa

SEQ ID NO: 2198635 - RNA, 19 nt, Artificial Sequence
  Description of Artificial Sequence: Synthetic oligonucleotide
  Antisense strand to SEQ ID NO: 2198634
uuaauugcgguugucuccg

SEQ ID NO: 2198636 - RNA, 19 nt, Artificial Sequence
  Description of Artificial Sequence: Synthetic oligonucleotide
  Sense strand starting at position 303 of SEQ ID NO: 1883510
cuagaucaugggcauuagu

SEQ ID NO: 2198637 - RNA, 19 nt, Artificial Sequence
  Description of Artificial Sequence: Synthetic oligonucleotide
  Antisense strand to SEQ ID NO: 2198636
acuaaugcccaugaucuag

SEQ ID NO: 2198638 - RNA, 19 nt, Artificial Sequence
  Description of Artificial Sequence: Synthetic oligonucleotide
  Sense strand starting at position 2970 of SEQ ID NO: 1883510
gguucucagcuguugcgau

SEQ ID NO: 2198639 - RNA, 19 nt, Artificial Sequence
  Description of Artificial Sequence: Synthetic oligonucleotide
  Antisense strand to SEQ ID NO: 2198638
aucgcaacagcugagaacc

SEQ ID NO: 2198640 - RNA, 19 nt, Artificial Sequence
  Description of Artificial Sequence: Synthetic oligonucleotide
  Sense strand starting at position 17 of SEQ ID NO: 1883510
aguauaauacgugggaaca

SEQ ID NO: 2198641 - RNA, 19 nt, Artificial Sequence
  Description of Artificial Sequence: Synthetic oligonucleotide
  Antisense strand to SEQ ID NO: 2198640
uguucccacguauuauacu

SEQ ID NO: 2198642 - RNA, 19 nt, Artificial Sequence
  Description of Artificial Sequence: Synthetic oligonucleotide
  Sense strand starting at position 1361 of SEQ ID NO: 1883510
ccuacauuagugcauauua

SEQ ID NO: 2198643 - RNA, 19 nt, Artificial Sequence
  Description of Artificial Sequence: Synthetic oligonucleotide
  Antisense strand to SEQ ID NO: 2198642
uaauaugcacuaauguagg

SEQ ID NO: 2198644 - RNA, 19 nt, Artificial Sequence
  Description of Artificial Sequence: Synthetic oligonucleotide
  Sense strand starting at position 306 of SEQ ID NO: 1883510
gaucaugggcauuagugua

SEQ ID NO: 2198645 - RNA, 19 nt, Artificial Sequence
  Description of Artificial Sequence: Synthetic oligonucleotide
  Antisense strand to SEQ ID NO: 2198644
uacacuaaugcccaugauc

SEQ ID NO: 2198646 - RNA, 19 nt, Artificial Sequence
  Description of Artificial Sequence: Synthetic oligonucleotide
  Sense strand starting at position 768 of SEQ ID NO: 1883510
ggcuuaacacgugauggau

SEQ ID NO: 2198647 - RNA, 19 nt, Artificial Sequence
  Description of Artificial Sequence: Synthetic oligonucleotide
  Antisense strand to SEQ ID NO: 2198646
auccaucacguguuaagcc

SEQ ID NO: 2198648 - RNA, 19 nt, Artificial Sequence
  Description of Artificial Sequence: Synthetic oligonucleotide
  Sense strand starting at position 354 of SEQ ID NO: 1883510
ccacuuccuggcuaugauu

SEQ ID NO: 2198649 - RNA, 19 nt, Artificial Sequence
  Description of Artificial Sequence: Synthetic oligonucleotide
  Antisense strand to SEQ ID NO: 2198648
aaucauagccaggaagugg

SEQ ID NO: 2198650 - RNA, 19 nt, Artificial Sequence
  Description of Artificial Sequence: Synthetic oligonucleotide
  Sense strand starting at position 18 of SEQ ID NO: 1883510
guauaauacgugggaacau

SEQ ID NO: 2198651 - RNA, 19 nt, Artificial Sequence
  Description of Artificial Sequence: Synthetic oligonucleotide
  Antisense strand to SEQ ID NO: 2198650
auguucccacguauuauac

SEQ ID NO: 2198652 - RNA, 19 nt, Artificial Sequence
  Description of Artificial Sequence: Synthetic oligonucleotide
  Sense strand starting at position 311 of SEQ ID NO: 1883510
ugggcauuaguguaaaucu

SEQ ID NO: 2198653 - RNA, 19 nt, Artificial Sequence
  Description of Artificial Sequence: Synthetic oligonucleotide
  Antisense strand to SEQ ID NO: 2198652
agauuuacacuaaugccca

SEQ ID NO: 2198654 - RNA, 19 nt, Artificial Sequence
  Description of Artificial Sequence: Synthetic oligonucleotide
  Sense strand starting at position 3354 of SEQ ID NO: 1883510
gugggaguuuguucagaga

SEQ ID NO: 2198655 - RNA, 19 nt, Artificial Sequence
  Description of Artificial Sequence: Synthetic oligonucleotide
  Antisense strand to SEQ ID NO: 2198654
ucucugaacaaacucccac

SEQ ID NO: 2198656 - RNA, 19 nt, Artificial Sequence
  Description of Artificial Sequence: Synthetic oligonucleotide
  Sense strand starting at position 300 of SEQ ID NO: 1883510
aagcuagaucaugggcauu

SEQ ID NO: 2198657 - RNA, 19 nt, Artificial Sequence
  Description of Artificial Sequence: Synthetic oligonucleotide
  Antisense strand to SEQ ID NO: 2198656
aaugcccaugaucuagcuu

SEQ ID NO: 2198658 - RNA, 19 nt, Artificial Sequence
  Description of Artificial Sequence: Synthetic oligonucleotide
  Sense strand starting at position 878 of SEQ ID NO: 1883510
cccaauucugucggagaca

SEQ ID NO: 2198659 - RNA, 19 nt, Artificial Sequence
  Description of Artificial Sequence: Synthetic oligonucleotide
  Antisense strand to SEQ ID NO: 2198658
ugucuccgacagaauuggg

SEQ ID NO: 2198660 - RNA, 19 nt, Artificial Sequence
  Description of Artificial Sequence: Synthetic oligonucleotide
  Sense strand starting at position 1450 of SEQ ID NO: 1883510
uguuaucagccagggaauu

SEQ ID NO: 2198661 - RNA, 19 nt, Artificial Sequence
  Description of Artificial Sequence: Synthetic oligonucleotide
  Antisense strand to SEQ ID NO: 2198660
aauucccuggcugauaaca

SEQ ID NO: 2198662 - RNA, 19 nt, Artificial Sequence
  Description of Artificial Sequence: Synthetic oligonucleotide
  Sense strand starting at position 3577 of SEQ ID NO: 1883510
cugcguucuagggaccaua

SEQ ID NO: 2198663 - RNA, 19 nt, Artificial Sequence
  Description of Artificial Sequence: Synthetic oligonucleotide
  Antisense strand to SEQ ID NO: 2198662
uauggucccuagaacgcag

SEQ ID NO: 2198664 - RNA, 19 nt, Artificial Sequence
  Description of Artificial Sequence: Synthetic oligonucleotide
  Sense strand starting at position 915 of SEQ ID NO: 1883510
uugugcaucuuaucagaca

SEQ ID NO: 2198665 - RNA, 19 nt, Artificial Sequence
  Description of Artificial Sequence: Synthetic oligonucleotide
  Antisense strand to SEQ ID NO: 2198664
ugucugauaagaugcacaa

SEQ ID NO: 2198666 - RNA, 19 nt, Artificial Sequence
  Description of Artificial Sequence: Synthetic oligonucleotide
  Sense strand starting at position 353 of SEQ ID NO: 1883510
uccacuuccuggcuaugau

SEQ ID NO: 2198667 - RNA, 19 nt, Artificial Sequence
  Description of Artificial Sequence: Synthetic oligonucleotide
  Antisense strand to SEQ ID NO: 2198666
aucauagccaggaagugga

SEQ ID NO: 2198668 - RNA, 19 nt, Artificial Sequence
  Description of Artificial Sequence: Synthetic oligonucleotide
  Sense strand starting at position 767 of SEQ ID NO: 1883510
uggcuuaacacgugaugga

SEQ ID NO: 2198669 - RNA, 19 nt, Artificial Sequence
  Description of Artificial Sequence: Synthetic oligonucleotide
  Antisense strand to SEQ ID NO: 2198668
uccaucacguguuaagcca

SEQ ID NO: 2198670 - RNA, 19 nt, Artificial Sequence
  Description of Artificial Sequence: Synthetic oligonucleotide
  Sense strand starting at position 3323 of SEQ ID NO: 1883510
ugcugauacuuccugugga

SEQ ID NO: 2198671 - RNA, 19 nt, Artificial Sequence
  Description of Artificial Sequence: Synthetic oligonucleotide
  Antisense strand to SEQ ID NO: 2198670
uccacaggaaguaucagca

SEQ ID NO: 2198672 - RNA, 19 nt, Artificial Sequence
  Description of Artificial Sequence: Synthetic oligonucleotide
  Sense strand starting at position 821 of SEQ ID NO: 1883510
auuaucuaucugugcacau

SEQ ID NO: 2198673 - RNA, 19 nt, Artificial Sequence
  Description of Artificial Sequence: Synthetic oligonucleotide
  Antisense strand to SEQ ID NO: 2198672
augugcacagauagauaau

SEQ ID NO: 2198674 - RNA, 19 nt, Artificial Sequence
  Description of Artificial Sequence: Synthetic oligonucleotide
  Sense strand starting at position 971 of SEQ ID NO: 1883510
cguccuucuacgcaaagau

SEQ ID NO: 2198675 - RNA, 19 nt, Artificial Sequence
  Description of Artificial Sequence: Synthetic oligonucleotide
  Antisense strand to SEQ ID NO: 2198674
aucuuugcguagaaggacg

SEQ ID NO: 2198676 - RNA, 19 nt, Artificial Sequence
  Description of Artificial Sequence: Synthetic oligonucleotide
  Sense strand starting at position 1970 of SEQ ID NO: 1883510
ccgcuagaauucuccucau

SEQ ID NO: 2198677 - RNA, 19 nt, Artificial Sequence
  Description of Artificial Sequence: Synthetic oligonucleotide
  Antisense strand to SEQ ID NO: 2198676
augaggagaauucuagcgg

SEQ ID NO: 2198678 - RNA, 19 nt, Artificial Sequence
  Description of Artificial Sequence: Synthetic oligonucleotide
  Sense strand starting at position 3211 of SEQ ID NO: 1883510
uccaccucuucuguuagua

SEQ ID NO: 2198679 - RNA, 19 nt, Artificial Sequence
  Description of Artificial Sequence: Synthetic oligonucleotide
  Antisense strand to SEQ ID NO: 2198678
uacuaacagaagaggugga

SEQ ID NO: 2198680 - RNA, 19 nt, Artificial Sequence
  Description of Artificial Sequence: Synthetic oligonucleotide
  Sense strand starting at position 1377 of SEQ ID NO: 1883510
uuaaacauuguucgucuua

SEQ ID NO: 2198681 - RNA, 19 nt, Artificial Sequence
  Description of Artificial Sequence: Synthetic oligonucleotide
  Antisense strand to SEQ ID NO: 2198680
uaagacgaacaauguuuaa

SEQ ID NO: 2198682 - RNA, 19 nt, Artificial Sequence
  Description of Artificial Sequence: Synthetic oligonucleotide
  Sense strand starting at position 1550 of SEQ ID NO: 1883510
uguugucucggguaucauc

SEQ ID NO: 2198683 - RNA, 19 nt, Artificial Sequence
  Description of Artificial Sequence: Synthetic oligonucleotide
  Antisense strand to SEQ ID NO: 2198682
gaugauacccgagacaaca

SEQ ID NO: 2198684 - RNA, 19 nt, Artificial Sequence
  Description of Artificial Sequence: Synthetic oligonucleotide
  Sense strand starting at position 833 of SEQ ID NO: 1883510
ugcacaugguaguaaauuu

SEQ ID NO: 2198685 - RNA, 19 nt, Artificial Sequence
  Description of Artificial Sequence: Synthetic oligonucleotide
  Antisense strand to SEQ ID NO: 2198684
aaauuuacuaccaugugca

SEQ ID NO: 2198686 - RNA, 19 nt, Artificial Sequence
  Description of Artificial Sequence: Synthetic oligonucleotide
  Sense strand starting at position 662 of SEQ ID NO: 1883510
cggcccuggcuaugauauu

SEQ ID NO: 2198687 - RNA, 19 nt, Artificial Sequence
  Description of Artificial Sequence: Synthetic oligonucleotide
  Antisense strand to SEQ ID NO: 2198686
aauaucauagccagggccg

SEQ ID NO: 2198688 - RNA, 19 nt, Artificial Sequence
  Description of Artificial Sequence: Synthetic oligonucleotide
  Sense strand starting at position 1697 of SEQ ID NO: 1883510
ccguuauacuuaguagcau

SEQ ID NO: 2198689 - RNA, 19 nt, Artificial Sequence
  Description of Artificial Sequence: Synthetic oligonucleotide
  Antisense strand to SEQ ID NO: 2198688
augcuacuaaguauaacgg

SEQ ID NO: 2198690 - RNA, 19 nt, Artificial Sequence
  Description of Artificial Sequence: Synthetic oligonucleotide
  Sense strand starting at position 253 of SEQ ID NO: 1883510
gguguugcgugacugacaa

SEQ ID NO: 2198691 - RNA, 19 nt, Artificial Sequence
  Description of Artificial Sequence: Synthetic oligonucleotide
  Antisense strand to SEQ ID NO: 2198690
uugucagucacgcaacacc

SEQ ID NO: 2198692 - RNA, 19 nt, Artificial Sequence
  Description of Artificial Sequence: Synthetic oligonucleotide
  Sense strand starting at position 3357 of SEQ ID NO: 1883510
ggaguuuguucagagagac

SEQ ID NO: 2198693 - RNA, 19 nt, Artificial Sequence
  Description of Artificial Sequence: Synthetic oligonucleotide
  Antisense strand to SEQ ID NO: 2198692
gucucucugaacaaacucc

SEQ ID NO: 2198694 - RNA, 19 nt, Artificial Sequence
  Description of Artificial Sequence: Synthetic oligonucleotide
  Sense strand starting at position 1341 of SEQ ID NO: 1883510
uaagguaucuuagaaguca

SEQ ID NO: 2198695 - RNA, 19 nt, Artificial Sequence
  Description of Artificial Sequence: Synthetic oligonucleotide
  Antisense strand to SEQ ID NO: 2198694
ugacuucuaagauaccuua

SEQ ID NO: 2198696 - RNA, 19 nt, Artificial Sequence
  Description of Artificial Sequence: Synthetic oligonucleotide
  Sense strand starting at position 19 of SEQ ID NO: 1883510
uauaauacgugggaacauu

SEQ ID NO: 2198697 - RNA, 19 nt, Artificial Sequence
  Description of Artificial Sequence: Synthetic oligonucleotide
  Antisense strand to SEQ ID NO: 2198696
aauguucccacguauuaua

SEQ ID NO: 2198698 - RNA, 19 nt, Artificial Sequence
  Description of Artificial Sequence: Synthetic oligonucleotide
  Sense strand starting at position 970 of SEQ ID NO: 1883510
gcguccuucuacgcaaaga

SEQ ID NO: 2198699 - RNA, 19 nt, Artificial Sequence
  Description of Artificial Sequence: Synthetic oligonucleotide
  Antisense strand to SEQ ID NO: 2198698
ucuuugcguagaaggacgc

SEQ ID NO: 2198700 - RNA, 19 nt, Artificial Sequence
  Description of Artificial Sequence: Synthetic oligonucleotide
  Sense strand starting at position 879 of SEQ ID NO: 1883510
ccaauucugucggagacaa

SEQ ID NO: 2198701 - RNA, 19 nt, Artificial Sequence
  Description of Artificial Sequence: Synthetic oligonucleotide
  Antisense strand to SEQ ID NO: 2198700
uugucuccgacagaauugg

SEQ ID NO: 2198702 - RNA, 19 nt, Artificial Sequence
  Description of Artificial Sequence: Synthetic oligonucleotide
  Sense strand starting at position 250 of SEQ ID NO: 1883510
acggguguugcgugacuga

SEQ ID NO: 2198703 - RNA, 19 nt, Artificial Sequence
  Description of Artificial Sequence: Synthetic oligonucleotide
  Antisense strand to SEQ ID NO: 2198702
ucagucacgcaacacccgu

SEQ ID NO: 2198704 - RNA, 19 nt, Artificial Sequence
  Description of Artificial Sequence: Synthetic oligonucleotide
  Sense strand starting at position 671 of SEQ ID NO: 1883510
cuaugauauugcuaaguuu

SEQ ID NO: 2198705 - RNA, 19 nt, Artificial Sequence
  Description of Artificial Sequence: Synthetic oligonucleotide
  Antisense strand to SEQ ID NO: 2198704
aaacuuagcaauaucauag

SEQ ID NO: 2198706 - RNA, 19 nt, Artificial Sequence
  Description of Artificial Sequence: Synthetic oligonucleotide
  Sense strand starting at position 320 of SEQ ID NO: 1883510
guguaaaucucccaggguu

SEQ ID NO: 2198707 - RNA, 19 nt, Artificial Sequence
  Description of Artificial Sequence: Synthetic oligonucleotide
  Antisense strand to SEQ ID NO: 2198706
aacccugggagauuuacac

SEQ ID NO: 2198708 - RNA, 19 nt, Artificial Sequence
  Description of Artificial Sequence: Synthetic oligonucleotide
  Sense strand starting at position 3654 of SEQ ID NO: 1883511
uguguuagaauagaaaguu

SEQ ID NO: 2198709 - RNA, 19 nt, Artificial Sequence
  Description of Artificial Sequence: Synthetic oligonucleotide
  Antisense strand to SEQ ID NO: 2198708
aacuuucuauucuaacaca

SEQ ID NO: 2198710 - RNA, 19 nt, Artificial Sequence
  Description of Artificial Sequence: Synthetic oligonucleotide
  Sense strand starting at position 3522 of SEQ ID NO: 1883511
agguuaugaucuccuagaa

SEQ ID NO: 2198711 - RNA, 19 nt, Artificial Sequence
  Description of Artificial Sequence: Synthetic oligonucleotide
  Antisense strand to SEQ ID NO: 2198710
uucuaggagaucauaaccu

SEQ ID NO: 2198712 - RNA, 19 nt, Artificial Sequence
  Description of Artificial Sequence: Synthetic oligonucleotide
  Sense strand starting at position 205 of SEQ ID NO: 1883511
ggaggauaugaucgguaca

SEQ ID NO: 2198713 - RNA, 19 nt, Artificial Sequence
  Description of Artificial Sequence: Synthetic oligonucleotide
  Antisense strand to SEQ ID NO: 2198712
uguaccgaucauauccucc

SEQ ID NO: 2198714 - RNA, 19 nt, Artificial Sequence
  Description of Artificial Sequence: Synthetic oligonucleotide
  Sense strand starting at position 2956 of SEQ ID NO: 1883511
aauccauugcguuuguguu

SEQ ID NO: 2198715 - RNA, 19 nt, Artificial Sequence
  Description of Artificial Sequence: Synthetic oligonucleotide
  Antisense strand to SEQ ID NO: 2198714
aacacaaacgcaauggauu

SEQ ID NO: 2198716 - RNA, 19 nt, Artificial Sequence
  Description of Artificial Sequence: Synthetic oligonucleotide
  Sense strand starting at position 2012 of SEQ ID NO: 1883511
uuguaagagacguaucuag

SEQ ID NO: 2198717 - RNA, 19 nt, Artificial Sequence
  Description of Artificial Sequence: Synthetic oligonucleotide
  Antisense strand to SEQ ID NO: 2198716
cuagauacgucucuuacaa

SEQ ID NO: 2198718 - RNA, 19 nt, Artificial Sequence
  Description of Artificial Sequence: Synthetic oligonucleotide
  Sense strand starting at position 2259 of SEQ ID NO: 1883511
uagccauuuccguauguuu

SEQ ID NO: 2198719 - RNA, 19 nt, Artificial Sequence
  Description of Artificial Sequence: Synthetic oligonucleotide
  Antisense strand to SEQ ID NO: 2198718
aaacauacggaaauggcua

SEQ ID NO: 2198720 - RNA, 19 nt, Artificial Sequence
  Description of Artificial Sequence: Synthetic oligonucleotide
  Sense strand starting at position 3332 of SEQ ID NO: 1883511
aguauuagucccugggaaa

SEQ ID NO: 2198721 - RNA, 19 nt, Artificial Sequence
  Description of Artificial Sequence: Synthetic oligonucleotide
  Antisense strand to SEQ ID NO: 2198720
uuucccagggacuaauacu

SEQ ID NO: 2198722 - RNA, 19 nt, Artificial Sequence
  Description of Artificial Sequence: Synthetic oligonucleotide
  Sense strand starting at position 1940 of SEQ ID NO: 1883511
acuuccuacugaguuugaa

SEQ ID NO: 2198723 - RNA, 19 nt, Artificial Sequence
  Description of Artificial Sequence: Synthetic oligonucleotide
  Antisense strand to SEQ ID NO: 2198722
uucaaacucaguaggaagu

SEQ ID NO: 2198724 - RNA, 19 nt, Artificial Sequence
  Description of Artificial Sequence: Synthetic oligonucleotide
  Sense strand starting at position 2608 of SEQ ID NO: 1883511
agauaagucugagcaucua

SEQ ID NO: 2198725 - RNA, 19 nt, Artificial Sequence
  Description of Artificial Sequence: Synthetic oligonucleotide
  Antisense strand to SEQ ID NO: 2198724
uagaugcucagacuuaucu

SEQ ID NO: 2198726 - RNA, 19 nt, Artificial Sequence
  Description of Artificial Sequence: Synthetic oligonucleotide
  Sense strand starting at position 393 of SEQ ID NO: 1883511
ggcuaaagccacugaaaua

SEQ ID NO: 2198727 - RNA, 19 nt, Artificial Sequence
  Description of Artificial Sequence: Synthetic oligonucleotide
  Antisense strand to SEQ ID NO: 2198726
uauuucaguggcuuuagcc

SEQ ID NO: 2198728 - RNA, 19 nt, Artificial Sequence
  Description of Artificial Sequence: Synthetic oligonucleotide
  Sense strand starting at position 3602 of SEQ ID NO: 1883511
agauguuaucuuuauagcu

SEQ ID NO: 2198729 - RNA, 19 nt, Artificial Sequence
  Description of Artificial Sequence: Synthetic oligonucleotide
  Antisense strand to SEQ ID NO: 2198728
agcuauaaagauaacaucu

SEQ ID NO: 2198730 - RNA, 19 nt, Artificial Sequence
  Description of Artificial Sequence: Synthetic oligonucleotide
  Sense strand starting at position 2616 of SEQ ID NO: 1883511
cugagcaucuagguaugaa

SEQ ID NO: 2198731 - RNA, 19 nt, Artificial Sequence
  Description of Artificial Sequence: Synthetic oligonucleotide
  Antisense strand to SEQ ID NO: 2198730
uucauaccuagaugcucag

SEQ ID NO: 2198732 - RNA, 19 nt, Artificial Sequence
  Description of Artificial Sequence: Synthetic oligonucleotide
  Sense strand starting at position 3282 of SEQ ID NO: 1883511
gcguuuggauccuuuauuu

SEQ ID NO: 2198733 - RNA, 19 nt, Artificial Sequence
  Description of Artificial Sequence: Synthetic oligonucleotide
  Antisense strand to SEQ ID NO: 2198732
aaauaaaggauccaaacgc

SEQ ID NO: 2198734 - RNA, 19 nt, Artificial Sequence
  Description of Artificial Sequence: Synthetic oligonucleotide
  Sense strand starting at position 3331 of SEQ ID NO: 1883511
caguauuagucccugggaa

SEQ ID NO: 2198735 - RNA, 19 nt, Artificial Sequence
  Description of Artificial Sequence: Synthetic oligonucleotide
  Antisense strand to SEQ ID NO: 2198734
uucccagggacuaauacug

SEQ ID NO: 2198736 - RNA, 19 nt, Artificial Sequence
  Description of Artificial Sequence: Synthetic oligonucleotide
  Sense strand starting at position 3333 of SEQ ID NO: 1883511
guauuagucccugggaaau

SEQ ID NO: 2198737 - RNA, 19 nt, Artificial Sequence
  Description of Artificial Sequence: Synthetic oligonucleotide
  Antisense strand to SEQ ID NO: 2198736
auuucccagggacuaauac

SEQ ID NO: 2198738 - RNA, 19 nt, Artificial Sequence
  Description of Artificial Sequence: Synthetic oligonucleotide
  Sense strand starting at position 955 of SEQ ID NO: 1883511
ggagguucugcguaaggag

SEQ ID NO: 2198739 - RNA, 19 nt, Artificial Sequence
  Description of Artificial Sequence: Synthetic oligonucleotide
  Antisense strand to SEQ ID NO: 2198738
cuccuuacgcagaaccucc

SEQ ID NO: 2198740 - RNA, 19 nt, Artificial Sequence
  Description of Artificial Sequence: Synthetic oligonucleotide
  Sense strand starting at position 2619 of SEQ ID NO: 1883511
agcaucuagguaugaaagu

SEQ ID NO: 2198741 - RNA, 19 nt, Artificial Sequence
  Description of Artificial Sequence: Synthetic oligonucleotide
  Antisense strand to SEQ ID NO: 2198740
acuuucauaccuagaugcu

SEQ ID NO: 2198742 - RNA, 19 nt, Artificial Sequence
  Description of Artificial Sequence: Synthetic oligonucleotide
  Sense strand starting at position 2258 of SEQ ID NO: 1883511
uuagccauuuccguauguu

SEQ ID NO: 2198743 - RNA, 19 nt, Artificial Sequence
  Description of Artificial Sequence: Synthetic oligonucleotide
  Antisense strand to SEQ ID NO: 2198742
aacauacggaaauggcuaa

SEQ ID NO: 2198744 - RNA, 19 nt, Artificial Sequence
  Description of Artificial Sequence: Synthetic oligonucleotide
  Sense strand starting at position 3319 of SEQ ID NO: 1883511
auuggcuaagcucaguauu

SEQ ID NO: 2198745 - RNA, 19 nt, Artificial Sequence
  Description of Artificial Sequence: Synthetic oligonucleotide
  Antisense strand to SEQ ID NO: 2198744
aauacugagcuuagccaau

SEQ ID NO: 2198746 - RNA, 19 nt, Artificial Sequence
  Description of Artificial Sequence: Synthetic oligonucleotide
  Sense strand starting at position 2421 of SEQ ID NO: 1883511
ucaugaauucgcgugccgu

SEQ ID NO: 2198747 - RNA, 19 nt, Artificial Sequence
  Description of Artificial Sequence: Synthetic oligonucleotide
  Antisense strand to SEQ ID NO: 2198746
acggcacgcgaauucauga

SEQ ID NO: 2198748 - RNA, 19 nt, Artificial Sequence
  Description of Artificial Sequence: Synthetic oligonucleotide
  Sense strand starting at position 2885 of SEQ ID NO: 1883511
cagcgugcucaucagaaag

SEQ ID NO: 2198749 - RNA, 19 nt, Artificial Sequence
  Description of Artificial Sequence: Synthetic oligonucleotide
  Antisense strand to SEQ ID NO: 2198748
cuuucugaugagcacgcug

SEQ ID NO: 2198750 - RNA, 19 nt, Artificial Sequence
  Description of Artificial Sequence: Synthetic oligonucleotide
  Sense strand starting at position 3215 of SEQ ID NO: 1883511
auagcuggcauucggagaa

SEQ ID NO: 2198751 - RNA, 19 nt, Artificial Sequence
  Description of Artificial Sequence: Synthetic oligonucleotide
  Antisense strand to SEQ ID NO: 2198750
uucuccgaaugccagcuau

SEQ ID NO: 2198752 - RNA, 19 nt, Artificial Sequence
  Description of Artificial Sequence: Synthetic oligonucleotide
  Sense strand starting at position 416 of SEQ ID NO: 1883511
guuaauuucuccgaaagga

SEQ ID NO: 2198753 - RNA, 19 nt, Artificial Sequence
  Description of Artificial Sequence: Synthetic oligonucleotide
  Antisense strand to SEQ ID NO: 2198752
uccuuucggagaaauuaac

SEQ ID NO: 2198754 - RNA, 19 nt, Artificial Sequence
  Description of Artificial Sequence: Synthetic oligonucleotide
  Sense strand starting at position 3016 of SEQ ID NO: 1883511
gcuugacuauuugaaaucu

SEQ ID NO: 2198755 - RNA, 19 nt, Artificial Sequence
  Description of Artificial Sequence: Synthetic oligonucleotide
  Antisense strand to SEQ ID NO: 2198754
agauuucaaauagucaagc

SEQ ID NO: 2198756 - RNA, 19 nt, Artificial Sequence
  Description of Artificial Sequence: Synthetic oligonucleotide
  Sense strand starting at position 2349 of SEQ ID NO: 1883511
auauuuccaugguaaugua

SEQ ID NO: 2198757 - RNA, 19 nt, Artificial Sequence
  Description of Artificial Sequence: Synthetic oligonucleotide
  Antisense strand to SEQ ID NO: 2198756
uacauuaccauggaaauau

SEQ ID NO: 2198758 - RNA, 19 nt, Artificial Sequence
  Description of Artificial Sequence: Synthetic oligonucleotide
  Sense strand starting at position 2261 of SEQ ID NO: 1883511
gccauuuccguauguuucu

SEQ ID NO: 2198759 - RNA, 19 nt, Artificial Sequence
  Description of Artificial Sequence: Synthetic oligonucleotide
  Antisense strand to SEQ ID NO: 2198758
agaaacauacggaaauggc

SEQ ID NO: 2198760 - RNA, 19 nt, Artificial Sequence
  Description of Artificial Sequence: Synthetic oligonucleotide
  Sense strand starting at position 3645 of SEQ ID NO: 1883511
uugaguuucuguguuagaa

SEQ ID NO: 2198761 - RNA, 19 nt, Artificial Sequence
  Description of Artificial Sequence: Synthetic oligonucleotide
  Antisense strand to SEQ ID NO: 2198760
uucuaacacagaaacucaa

SEQ ID NO: 2198762 - RNA, 19 nt, Artificial Sequence
  Description of Artificial Sequence: Synthetic oligonucleotide
  Sense strand starting at position 954 of SEQ ID NO: 1883511
gggagguucugcguaagga

SEQ ID NO: 2198763 - RNA, 19 nt, Artificial Sequence
  Description of Artificial Sequence: Synthetic oligonucleotide
  Antisense strand to SEQ ID NO: 2198762
uccuuacgcagaaccuccc

SEQ ID NO: 2198764 - RNA, 19 nt, Artificial Sequence
  Description of Artificial Sequence: Synthetic oligonucleotide
  Sense strand starting at position 336 of SEQ ID NO: 1883511
aucaguuguaccugcagga

SEQ ID NO: 2198765 - RNA, 19 nt, Artificial Sequence
  Description of Artificial Sequence: Synthetic oligonucleotide
  Antisense strand to SEQ ID NO: 2198764
uccugcagguacaacugau

SEQ ID NO: 2198766 - RNA, 19 nt, Artificial Sequence
  Description of Artificial Sequence: Synthetic oligonucleotide
  Sense strand starting at position 3322 of SEQ ID NO: 1883511
ggcuaagcucaguauuagu

SEQ ID NO: 2198767 - RNA, 19 nt, Artificial Sequence
  Description of Artificial Sequence: Synthetic oligonucleotide
  Antisense strand to SEQ ID NO: 2198766
acuaauacugagcuuagcc

SEQ ID NO: 2198768 - RNA, 19 nt, Artificial Sequence
  Description of Artificial Sequence: Synthetic oligonucleotide
  Sense strand starting at position 3321 of SEQ ID NO: 1883511
uggcuaagcucaguauuag

SEQ ID NO: 2198769 - RNA, 19 nt, Artificial Sequence
  Description of Artificial Sequence: Synthetic oligonucleotide
  Antisense strand to SEQ ID NO: 2198768
cuaauacugagcuuagcca

SEQ ID NO: 2198770 - RNA, 19 nt, Artificial Sequence
  Description of Artificial Sequence: Synthetic oligonucleotide
  Sense strand starting at position 1911 of SEQ ID NO: 1883511
ggcgcuuucagcgggauuu

SEQ ID NO: 2198771 - RNA, 19 nt, Artificial Sequence
  Description of Artificial Sequence: Synthetic oligonucleotide
  Antisense strand to SEQ ID NO: 2198770
aaaucccgcugaaagcgcc

SEQ ID NO: 2198772 - RNA, 19 nt, Artificial Sequence
  Description of Artificial Sequence: Synthetic oligonucleotide
  Sense strand starting at position 2394 of SEQ ID NO: 1883511
gacucuugugcagguuuaa

SEQ ID NO: 2198773 - RNA, 19 nt, Artificial Sequence
  Description of Artificial Sequence: Synthetic oligonucleotide
  Antisense strand to SEQ ID NO: 2198772
uuaaaccugcacaagaguc

SEQ ID NO: 2198774 - RNA, 19 nt, Artificial Sequence
  Description of Artificial Sequence: Synthetic oligonucleotide
  Sense strand starting at position 2010 of SEQ ID NO: 1883511
guuuguaagagacguaucu

SEQ ID NO: 2198775 - RNA, 19 nt, Artificial Sequence
  Description of Artificial Sequence: Synthetic oligonucleotide
  Antisense strand to SEQ ID NO: 2198774
agauacgucucuuacaaac

SEQ ID NO: 2198776 - RNA, 19 nt, Artificial Sequence
  Description of Artificial Sequence: Synthetic oligonucleotide
  Sense strand starting at position 2075 of SEQ ID NO: 1883511
ucccauuucucguaggaag

SEQ ID NO: 2198777 - RNA, 19 nt, Artificial Sequence
  Description of Artificial Sequence: Synthetic oligonucleotide
  Antisense strand to SEQ ID NO: 2198776
cuuccuacgagaaauggga

SEQ ID NO: 2198778 - RNA, 19 nt, Artificial Sequence
  Description of Artificial Sequence: Synthetic oligonucleotide
  Sense strand starting at position 3106 of SEQ ID NO: 1883511
gugacuggaacgugcuuaa

SEQ ID NO: 2198779 - RNA, 19 nt, Artificial Sequence
  Description of Artificial Sequence: Synthetic oligonucleotide
  Antisense strand to SEQ ID NO: 2198778
uuaagcacguuccagucac

SEQ ID NO: 2198780 - RNA, 19 nt, Artificial Sequence
  Description of Artificial Sequence: Synthetic oligonucleotide
  Sense strand starting at position 2153 of SEQ ID NO: 1883511
uguaaauuguccucgaccu

SEQ ID NO: 2198781 - RNA, 19 nt, Artificial Sequence
  Description of Artificial Sequence: Synthetic oligonucleotide
  Antisense strand to SEQ ID NO: 2198780
aggucgaggacaauuuaca

SEQ ID NO: 2198782 - RNA, 19 nt, Artificial Sequence
  Description of Artificial Sequence: Synthetic oligonucleotide
  Sense strand starting at position 2334 of SEQ ID NO: 1883511
cuuagagccuccgugauau

SEQ ID NO: 2198783 - RNA, 19 nt, Artificial Sequence
  Description of Artificial Sequence: Synthetic oligonucleotide
  Antisense strand to SEQ ID NO: 2198782
auaucacggaggcucuaag

SEQ ID NO: 2198784 - RNA, 19 nt, Artificial Sequence
  Description of Artificial Sequence: Synthetic oligonucleotide
  Sense strand starting at position 2154 of SEQ ID NO: 1883511
guaaauuguccucgaccuc

SEQ ID NO: 2198785 - RNA, 19 nt, Artificial Sequence
  Description of Artificial Sequence: Synthetic oligonucleotide
  Antisense strand to SEQ ID NO: 2198784
gaggucgaggacaauuuac

SEQ ID NO: 2198786 - RNA, 19 nt, Artificial Sequence
  Description of Artificial Sequence: Synthetic oligonucleotide
  Sense strand starting at position 2129 of SEQ ID NO: 1883511
gcuccauuccuuuguuaua

SEQ ID NO: 2198787 - RNA, 19 nt, Artificial Sequence
  Description of Artificial Sequence: Synthetic oligonucleotide
  Antisense strand to SEQ ID NO: 2198786
uauaacaaaggaauggagc

SEQ ID NO: 2198788 - RNA, 19 nt, Artificial Sequence
  Description of Artificial Sequence: Synthetic oligonucleotide
  Sense strand starting at position 2775 of SEQ ID NO: 1883512
aaguauuaucccgcgcuga

SEQ ID NO: 2198789 - RNA, 19 nt, Artificial Sequence
  Description of Artificial Sequence: Synthetic oligonucleotide
  Antisense strand to SEQ ID NO: 2198788
ucagcgcgggauaauacuu

SEQ ID NO: 2198790 - RNA, 19 nt, Artificial Sequence
  Description of Artificial Sequence: Synthetic oligonucleotide
  Sense strand starting at position 963 of SEQ ID NO: 1883512
acauccuuucuggaaagca

SEQ ID NO: 2198791 - RNA, 19 nt, Artificial Sequence
  Description of Artificial Sequence: Synthetic oligonucleotide
  Antisense strand to SEQ ID NO: 2198790
ugcuuuccagaaaggaugu

SEQ ID NO: 2198792 - RNA, 19 nt, Artificial Sequence
  Description of Artificial Sequence: Synthetic oligonucleotide
  Sense strand starting at position 3736 of SEQ ID NO: 1883512
cuaaaugaucaaugaggca

SEQ ID NO: 2198793 - RNA, 19 nt, Artificial Sequence
  Description of Artificial Sequence: Synthetic oligonucleotide
  Antisense strand to SEQ ID NO: 2198792
ugccucauugaucauuuag

SEQ ID NO: 2198794 - RNA, 19 nt, Artificial Sequence
  Description of Artificial Sequence: Synthetic oligonucleotide
  Sense strand starting at position 2555 of SEQ ID NO: 1883512
aaaguuccucgacauaaug

SEQ ID NO: 2198795 - RNA, 19 nt, Artificial Sequence
  Description of Artificial Sequence: Synthetic oligonucleotide
  Antisense strand to SEQ ID NO: 2198794
cauuaugucgaggaacuuu

SEQ ID NO: 2198796 - RNA, 19 nt, Artificial Sequence
  Description of Artificial Sequence: Synthetic oligonucleotide
  Sense strand starting at position 2134 of SEQ ID NO: 1883512
aauaaagcuguguauagaa

SEQ ID NO: 2198797 - RNA, 19 nt, Artificial Sequence
  Description of Artificial Sequence: Synthetic oligonucleotide
  Antisense strand to SEQ ID NO: 2198796
uucuauacacagcuuuauu

SEQ ID NO: 2198798 - RNA, 19 nt, Artificial Sequence
  Description of Artificial Sequence: Synthetic oligonucleotide
  Sense strand starting at position 1618 of SEQ ID NO: 1883512
gcauaagaaugacuaccua

SEQ ID NO: 2198799 - RNA, 19 nt, Artificial Sequence
  Description of Artificial Sequence: Synthetic oligonucleotide
  Antisense strand to SEQ ID NO: 2198798
uagguagucauucuuaugc

SEQ ID NO: 2198800 - RNA, 19 nt, Artificial Sequence
  Description of Artificial Sequence: Synthetic oligonucleotide
  Sense strand starting at position 1345 of SEQ ID NO: 1883512
ggucaaugugucuaagaaa

SEQ ID NO: 2198801 - RNA, 19 nt, Artificial Sequence
  Description of Artificial Sequence: Synthetic oligonucleotide
  Antisense strand to SEQ ID NO: 2198800
uuucuuagacacauugacc

SEQ ID NO: 2198802 - RNA, 19 nt, Artificial Sequence
  Description of Artificial Sequence: Synthetic oligonucleotide
  Sense strand starting at position 1274 of SEQ ID NO: 1883512
gagguagaacaaugguacu

SEQ ID NO: 2198803 - RNA, 19 nt, Artificial Sequence
  Description of Artificial Sequence: Synthetic oligonucleotide
  Antisense strand to SEQ ID NO: 2198802
aguaccauuguucuaccuc

SEQ ID NO: 2198804 - RNA, 19 nt, Artificial Sequence
  Description of Artificial Sequence: Synthetic oligonucleotide
  Sense strand starting at position 2777 of SEQ ID NO: 1883512
guauuaucccgcgcugaac

SEQ ID NO: 2198805 - RNA, 19 nt, Artificial Sequence
  Description of Artificial Sequence: Synthetic oligonucleotide
  Antisense strand to SEQ ID NO: 2198804
guucagcgcgggauaauac

SEQ ID NO: 2198806 - RNA, 19 nt, Artificial Sequence
  Description of Artificial Sequence: Synthetic oligonucleotide
  Sense strand starting at position 817 of SEQ ID NO: 1883512
guauuucugugacuuccuu

SEQ ID NO: 2198807 - RNA, 19 nt, Artificial Sequence
  Description of Artificial Sequence: Synthetic oligonucleotide
  Antisense strand to SEQ ID NO: 2198806
aaggaagucacagaaauac

SEQ ID NO: 2198808 - RNA, 19 nt, Artificial Sequence
  Description of Artificial Sequence: Synthetic oligonucleotide
  Sense strand starting at position 2136 of SEQ ID NO: 1883512
uaaagcuguguauagaaau

SEQ ID NO: 2198809 - RNA, 19 nt, Artificial Sequence
  Description of Artificial Sequence: Synthetic oligonucleotide
  Antisense strand to SEQ ID NO: 2198808
auuucuauacacagcuuua

SEQ ID NO: 2198810 - RNA, 19 nt, Artificial Sequence
  Description of Artificial Sequence: Synthetic oligonucleotide
  Sense strand starting at position 3913 of SEQ ID NO: 1883512
gaucaacuacccggagauu

SEQ ID NO: 2198811 - RNA, 19 nt, Artificial Sequence
  Description of Artificial Sequence: Synthetic oligonucleotide
  Antisense strand to SEQ ID NO: 2198810
aaucuccggguaguugauc

SEQ ID NO: 2198812 - RNA, 19 nt, Artificial Sequence
  Description of Artificial Sequence: Synthetic oligonucleotide
  Sense strand starting at position 3912 of SEQ ID NO: 1883512
ugaucaacuacccggagau

SEQ ID NO: 2198813 - RNA, 19 nt, Artificial Sequence
  Description of Artificial Sequence: Synthetic oligonucleotide
  Antisense strand to SEQ ID NO: 2198812
aucuccggguaguugauca

SEQ ID NO: 2198814 - RNA, 19 nt, Artificial Sequence
  Description of Artificial Sequence: Synthetic oligonucleotide
  Sense strand starting at position 135 of SEQ ID NO: 1883512
cuaucuuccaaggguagga

SEQ ID NO: 2198815 - RNA, 19 nt, Artificial Sequence
  Description of Artificial Sequence: Synthetic oligonucleotide
  Antisense strand to SEQ ID NO: 2198814
uccuacccuuggaagauag

SEQ ID NO: 2198816 - RNA, 19 nt, Artificial Sequence
  Description of Artificial Sequence: Synthetic oligonucleotide
  Sense strand starting at position 3794 of SEQ ID NO: 1883512
gaggguauuugcucagcuu

SEQ ID NO: 2198817 - RNA, 19 nt, Artificial Sequence
  Description of Artificial Sequence: Synthetic oligonucleotide
  Antisense strand to SEQ ID NO: 2198816
aagcugagcaaauacccuc

SEQ ID NO: 2198818 - RNA, 19 nt, Artificial Sequence
  Description of Artificial Sequence: Synthetic oligonucleotide
  Sense strand starting at position 1609 of SEQ ID NO: 1883512
cacacagucgcauaagaau

SEQ ID NO: 2198819 - RNA, 19 nt, Artificial Sequence
  Description of Artificial Sequence: Synthetic oligonucleotide
  Antisense strand to SEQ ID NO: 2198818
auucuuaugcgacugugug

SEQ ID NO: 2198820 - RNA, 19 nt, Artificial Sequence
  Description of Artificial Sequence: Synthetic oligonucleotide
  Sense strand starting at position 47 of SEQ ID NO: 1883512
ggaagaagugauggcucau

SEQ ID NO: 2198821 - RNA, 19 nt, Artificial Sequence
  Description of Artificial Sequence: Synthetic oligonucleotide
  Antisense strand to SEQ ID NO: 2198820
augagccaucacuucuucc

SEQ ID NO: 2198822 - RNA, 19 nt, Artificial Sequence
  Description of Artificial Sequence: Synthetic oligonucleotide
  Sense strand starting at position 3819 of SEQ ID NO: 1883512
cagugauuugcguauuagu

SEQ ID NO: 2198823 - RNA, 19 nt, Artificial Sequence
  Description of Artificial Sequence: Synthetic oligonucleotide
  Antisense strand to SEQ ID NO: 2198822
acuaauacgcaaaucacug

SEQ ID NO: 2198824 - RNA, 19 nt, Artificial Sequence
  Description of Artificial Sequence: Synthetic oligonucleotide
  Sense strand starting at position 3594 of SEQ ID NO: 1883512
gaguuaacuugggcaaaua

SEQ ID NO: 2198825 - RNA, 19 nt, Artificial Sequence
  Description of Artificial Sequence: Synthetic oligonucleotide
  Antisense strand to SEQ ID NO: 2198824
uauuugcccaaguuaacuc

SEQ ID NO: 2198826 - RNA, 19 nt, Artificial Sequence
  Description of Artificial Sequence: Synthetic oligonucleotide
  Sense strand starting at position 3652 of SEQ ID NO: 1883512
uggccuggaugaucuauga

SEQ ID NO: 2198827 - RNA, 19 nt, Artificial Sequence
  Description of Artificial Sequence: Synthetic oligonucleotide
  Antisense strand to SEQ ID NO: 2198826
ucauagaucauccaggcca

SEQ ID NO: 2198828 - RNA, 19 nt, Artificial Sequence
  Description of Artificial Sequence: Synthetic oligonucleotide
  Sense strand starting at position 2124 of SEQ ID NO: 1883512
guguccuaggaauaaagcu

SEQ ID NO: 2198829 - RNA, 19 nt, Artificial Sequence
  Description of Artificial Sequence: Synthetic oligonucleotide
  Antisense strand to SEQ ID NO: 2198828
agcuuuauuccuaggacac

SEQ ID NO: 2198830 - RNA, 19 nt, Artificial Sequence
  Description of Artificial Sequence: Synthetic oligonucleotide
  Sense strand starting at position 3775 of SEQ ID NO: 1883512
aaaguugcugaugggaauu

SEQ ID NO: 2198831 - RNA, 19 nt, Artificial Sequence
  Description of Artificial Sequence: Synthetic oligonucleotide
  Antisense strand to SEQ ID NO: 2198830
aauucccaucagcaacuuu

SEQ ID NO: 2198832 - RNA, 19 nt, Artificial Sequence
  Description of Artificial Sequence: Synthetic oligonucleotide
  Sense strand starting at position 3646 of SEQ ID NO: 1883512
ccuagauggccuggaugau

SEQ ID NO: 2198833 - RNA, 19 nt, Artificial Sequence
  Description of Artificial Sequence: Synthetic oligonucleotide
  Antisense strand to SEQ ID NO: 2198832
aucauccaggccaucuagg

SEQ ID NO: 2198834 - RNA, 19 nt, Artificial Sequence
  Description of Artificial Sequence: Synthetic oligonucleotide
  Sense strand starting at position 2133 of SEQ ID NO: 1883512
gaauaaagcuguguauaga

SEQ ID NO: 2198835 - RNA, 19 nt, Artificial Sequence
  Description of Artificial Sequence: Synthetic oligonucleotide
  Antisense strand to SEQ ID NO: 2198834
ucuauacacagcuuuauuc

SEQ ID NO: 2198836 - RNA, 19 nt, Artificial Sequence
  Description of Artificial Sequence: Synthetic oligonucleotide
  Sense strand starting at position 1588 of SEQ ID NO: 1883512
gcaucagagcuauauucug

SEQ ID NO: 2198837 - RNA, 19 nt, Artificial Sequence
  Description of Artificial Sequence: Synthetic oligonucleotide
  Antisense strand to SEQ ID NO: 2198836
cagaauauagcucugaugc

SEQ ID NO: 2198838 - RNA, 19 nt, Artificial Sequence
  Description of Artificial Sequence: Synthetic oligonucleotide
  Sense strand starting at position 1344 of SEQ ID NO: 1883512
aggucaaugugucuaagaa

SEQ ID NO: 2198839 - RNA, 19 nt, Artificial Sequence
  Description of Artificial Sequence: Synthetic oligonucleotide
  Antisense strand to SEQ ID NO: 2198838
uucuuagacacauugaccu

SEQ ID NO: 2198840 - RNA, 19 nt, Artificial Sequence
  Description of Artificial Sequence: Synthetic oligonucleotide
  Sense strand starting at position 2542 of SEQ ID NO: 1883512
cugugacuuccucaaaguu

SEQ ID NO: 2198841 - RNA, 19 nt, Artificial Sequence
  Description of Artificial Sequence: Synthetic oligonucleotide
  Antisense strand to SEQ ID NO: 2198840
aacuuugaggaagucacag

SEQ ID NO: 2198842 - RNA, 19 nt, Artificial Sequence
  Description of Artificial Sequence: Synthetic oligonucleotide
  Sense strand starting at position 823 of SEQ ID NO: 1883512
cugugacuuccuugaagac

SEQ ID NO: 2198843 - RNA, 19 nt, Artificial Sequence
  Description of Artificial Sequence: Synthetic oligonucleotide
  Antisense strand to SEQ ID NO: 2198842
gucuucaaggaagucacag

SEQ ID NO: 2198844 - RNA, 19 nt, Artificial Sequence
  Description of Artificial Sequence: Synthetic oligonucleotide
  Sense strand starting at position 3009 of SEQ ID NO: 1883512
ccuugcauugguuaugaca

SEQ ID NO: 2198845 - RNA, 19 nt, Artificial Sequence
  Description of Artificial Sequence: Synthetic oligonucleotide
  Antisense strand to SEQ ID NO: 2198844
ugucauaaccaaugcaagg

SEQ ID NO: 2198846 - RNA, 19 nt, Artificial Sequence
  Description of Artificial Sequence: Synthetic oligonucleotide
  Sense strand starting at position 2132 of SEQ ID NO: 1883512
ggaauaaagcuguguauag

SEQ ID NO: 2198847 - RNA, 19 nt, Artificial Sequence
  Description of Artificial Sequence: Synthetic oligonucleotide
  Antisense strand to SEQ ID NO: 2198846
cuauacacagcuuuauucc

SEQ ID NO: 2198848 - RNA, 19 nt, Artificial Sequence
  Description of Artificial Sequence: Synthetic oligonucleotide
  Sense strand starting at position 3050 of SEQ ID NO: 1883512
ucacauucugauuguauca

SEQ ID NO: 2198849 - RNA, 19 nt, Artificial Sequence
  Description of Artificial Sequence: Synthetic oligonucleotide
  Antisense strand to SEQ ID NO: 2198848
ugauacaaucagaauguga

SEQ ID NO: 2198850 - RNA, 19 nt, Artificial Sequence
  Description of Artificial Sequence: Synthetic oligonucleotide
  Sense strand starting at position 2540 of SEQ ID NO: 1883512
uucugugacuuccucaaag

SEQ ID NO: 2198851 - RNA, 19 nt, Artificial Sequence
  Description of Artificial Sequence: Synthetic oligonucleotide
  Antisense strand to SEQ ID NO: 2198850
cuuugaggaagucacagaa

SEQ ID NO: 2198852 - RNA, 19 nt, Artificial Sequence
  Description of Artificial Sequence: Synthetic oligonucleotide
  Sense strand starting at position 3830 of SEQ ID NO: 1883512
guauuaguaaugugaggau

SEQ ID NO: 2198853 - RNA, 19 nt, Artificial Sequence
  Description of Artificial Sequence: Synthetic oligonucleotide
  Antisense strand to SEQ ID NO: 2198852
auccucacauuacuaauac

SEQ ID NO: 2198854 - RNA, 19 nt, Artificial Sequence
  Description of Artificial Sequence: Synthetic oligonucleotide
  Sense strand starting at position 2497 of SEQ ID NO: 1883512
uguguauggguguauaaua

SEQ ID NO: 2198855 - RNA, 19 nt, Artificial Sequence
  Description of Artificial Sequence: Synthetic oligonucleotide
  Antisense strand to SEQ ID NO: 2198854
uauuauacacccauacaca

SEQ ID NO: 2198856 - RNA, 19 nt, Artificial Sequence
  Description of Artificial Sequence: Synthetic oligonucleotide
  Sense strand starting at position 3834 of SEQ ID NO: 1883512
uaguaaugugaggauucgu

SEQ ID NO: 2198857 - RNA, 19 nt, Artificial Sequence
  Description of Artificial Sequence: Synthetic oligonucleotide
  Antisense strand to SEQ ID NO: 2198856
acgaauccucacauuacua

SEQ ID NO: 2198858 - RNA, 19 nt, Artificial Sequence
  Description of Artificial Sequence: Synthetic oligonucleotide
  Sense strand starting at position 1416 of SEQ ID NO: 1883512
uccuuuggguucucagaau

SEQ ID NO: 2198859 - RNA, 19 nt, Artificial Sequence
  Description of Artificial Sequence: Synthetic oligonucleotide
  Antisense strand to SEQ ID NO: 2198858
auucugagaacccaaagga

SEQ ID NO: 2198860 - RNA, 19 nt, Artificial Sequence
  Description of Artificial Sequence: Synthetic oligonucleotide
  Sense strand starting at position 821 of SEQ ID NO: 1883512
uucugugacuuccuugaag

SEQ ID NO: 2198861 - RNA, 19 nt, Artificial Sequence
  Description of Artificial Sequence: Synthetic oligonucleotide
  Antisense strand to SEQ ID NO: 2198860
cuucaaggaagucacagaa

SEQ ID NO: 2198862 - RNA, 19 nt, Artificial Sequence
  Description of Artificial Sequence: Synthetic oligonucleotide
  Sense strand starting at position 3278 of SEQ ID NO: 1883512
uugggugacuucccaacuu

SEQ ID NO: 2198863 - RNA, 19 nt, Artificial Sequence
  Description of Artificial Sequence: Synthetic oligonucleotide
  Antisense strand to SEQ ID NO: 2198862
aaguugggaagucacccaa

SEQ ID NO: 2198864 - RNA, 19 nt, Artificial Sequence
  Description of Artificial Sequence: Synthetic oligonucleotide
  Sense strand starting at position 3251 of SEQ ID NO: 1883512
uugggugacuucccaaagu

SEQ ID NO: 2198865 - RNA, 19 nt, Artificial Sequence
  Description of Artificial Sequence: Synthetic oligonucleotide
  Antisense strand to SEQ ID NO: 2198864
acuuugggaagucacccaa

SEQ ID NO: 2198866 - RNA, 19 nt, Artificial Sequence
  Description of Artificial Sequence: Synthetic oligonucleotide
  Sense strand starting at position 3584 of SEQ ID NO: 1883512
cuaacuagcugaguuaacu

SEQ ID NO: 2198867 - RNA, 19 nt, Artificial Sequence
  Description of Artificial Sequence: Synthetic oligonucleotide
  Antisense strand to SEQ ID NO: 2198866
aguuaacucagcuaguuag

SEQ ID NO: 2198868 - RNA, 19 nt, Artificial Sequence
  Description of Artificial Sequence: Synthetic oligonucleotide
  Sense strand starting at position 923 of SEQ ID NO: 1883513
cugcaaguugcuuuguuua

SEQ ID NO: 2198869 - RNA, 19 nt, Artificial Sequence
  Description of Artificial Sequence: Synthetic oligonucleotide
  Antisense strand to SEQ ID NO: 2198868
uaaacaaagcaacuugcag

SEQ ID NO: 2198870 - RNA, 19 nt, Artificial Sequence
  Description of Artificial Sequence: Synthetic oligonucleotide
  Sense strand starting at position 1760 of SEQ ID NO: 1883513
gaaucacugguuuaaaugu

SEQ ID NO: 2198871 - RNA, 19 nt, Artificial Sequence
  Description of Artificial Sequence: Synthetic oligonucleotide
  Antisense strand to SEQ ID NO: 2198870
acauuuaaaccagugauuc

SEQ ID NO: 2198872 - RNA, 19 nt, Artificial Sequence
  Description of Artificial Sequence: Synthetic oligonucleotide
  Sense strand starting at position 1776 of SEQ ID NO: 1883513
ugucaauguaaaggaauga

SEQ ID NO: 2198873 - RNA, 19 nt, Artificial Sequence
  Description of Artificial Sequence: Synthetic oligonucleotide
  Antisense strand to SEQ ID NO: 2198872
ucauuccuuuacauugaca

SEQ ID NO: 2198874 - RNA, 19 nt, Artificial Sequence
  Description of Artificial Sequence: Synthetic oligonucleotide
  Sense strand starting at position 3797 of SEQ ID NO: 1883513
uuuguuuagcuggaagaga

SEQ ID NO: 2198875 - RNA, 19 nt, Artificial Sequence
  Description of Artificial Sequence: Synthetic oligonucleotide
  Antisense strand to SEQ ID NO: 2198874
ucucuuccagcuaaacaaa

SEQ ID NO: 2198876 - RNA, 19 nt, Artificial Sequence
  Description of Artificial Sequence: Synthetic oligonucleotide
  Sense strand starting at position 1460 of SEQ ID NO: 1883513
gugugaucucgggcaugcu

SEQ ID NO: 2198877 - RNA, 19 nt, Artificial Sequence
  Description of Artificial Sequence: Synthetic oligonucleotide
  Antisense strand to SEQ ID NO: 2198876
agcaugcccgagaucacac

SEQ ID NO: 2198878 - RNA, 19 nt, Artificial Sequence
  Description of Artificial Sequence: Synthetic oligonucleotide
  Sense strand starting at position 793 of SEQ ID NO: 1883513
uugcauauccuccaggaau

SEQ ID NO: 2198879 - RNA, 19 nt, Artificial Sequence
  Description of Artificial Sequence: Synthetic oligonucleotide
  Antisense strand to SEQ ID NO: 2198878
auuccuggaggauaugcaa

SEQ ID NO: 2198880 - RNA, 19 nt, Artificial Sequence
  Description of Artificial Sequence: Synthetic oligonucleotide
  Sense strand starting at position 440 of SEQ ID NO: 1883513
uuauauagggcuuacuuua

SEQ ID NO: 2198881 - RNA, 19 nt, Artificial Sequence
  Description of Artificial Sequence: Synthetic oligonucleotide
  Antisense strand to SEQ ID NO: 2198880
uaaaguaagcccuauauaa

SEQ ID NO: 2198882 - RNA, 19 nt, Artificial Sequence
  Description of Artificial Sequence: Synthetic oligonucleotide
  Sense strand starting at position 2728 of SEQ ID NO: 1883513
gcggcucaugcuguaacau

SEQ ID NO: 2198883 - RNA, 19 nt, Artificial Sequence
  Description of Artificial Sequence: Synthetic oligonucleotide
  Antisense strand to SEQ ID NO: 2198882
auguuacagcaugagccgc

SEQ ID NO: 2198884 - RNA, 19 nt, Artificial Sequence
  Description of Artificial Sequence: Synthetic oligonucleotide
  Sense strand starting at position 2451 of SEQ ID NO: 1883513
ggaguggugcugucgccaa

SEQ ID NO: 2198885 - RNA, 19 nt, Artificial Sequence
  Description of Artificial Sequence: Synthetic oligonucleotide
  Antisense strand to SEQ ID NO: 2198884
uuggcgacagcaccacucc

SEQ ID NO: 2198886 - RNA, 19 nt, Artificial Sequence
  Description of Artificial Sequence: Synthetic oligonucleotide
  Sense strand starting at position 214 of SEQ ID NO: 1883513
caaaucagcggguagacau

SEQ ID NO: 2198887 - RNA, 19 nt, Artificial Sequence
  Description of Artificial Sequence: Synthetic oligonucleotide
  Antisense strand to SEQ ID NO: 2198886
augucuacccgcugauuug

SEQ ID NO: 2198888 - RNA, 19 nt, Artificial Sequence
  Description of Artificial Sequence: Synthetic oligonucleotide
  Sense strand starting at position 3115 of SEQ ID NO: 1883513
acugaaacguauccaaaug

SEQ ID NO: 2198889 - RNA, 19 nt, Artificial Sequence
  Description of Artificial Sequence: Synthetic oligonucleotide
  Antisense strand to SEQ ID NO: 2198888
cauuuggauacguuucagu

SEQ ID NO: 2198890 - RNA, 19 nt, Artificial Sequence
  Description of Artificial Sequence: Synthetic oligonucleotide
  Sense strand starting at position 3550 of SEQ ID NO: 1883513
aguugauggguccaucauu

SEQ ID NO: 2198891 - RNA, 19 nt, Artificial Sequence
  Description of Artificial Sequence: Synthetic oligonucleotide
  Antisense strand to SEQ ID NO: 2198890
aaugauggacccaucaacu

SEQ ID NO: 2198892 - RNA, 19 nt, Artificial Sequence
  Description of Artificial Sequence: Synthetic oligonucleotide
  Sense strand starting at position 1168 of SEQ ID NO: 1883513
uuucuuaguggugaaauug

SEQ ID NO: 2198893 - RNA, 19 nt, Artificial Sequence
  Description of Artificial Sequence: Synthetic oligonucleotide
  Antisense strand to SEQ ID NO: 2198892
caauuucaccacuaagaaa

SEQ ID NO: 2198894 - RNA, 19 nt, Artificial Sequence
  Description of Artificial Sequence: Synthetic oligonucleotide
  Sense strand starting at position 2901 of SEQ ID NO: 1883513
guugacaacugaguaaauu

SEQ ID NO: 2198895 - RNA, 19 nt, Artificial Sequence
  Description of Artificial Sequence: Synthetic oligonucleotide
  Antisense strand to SEQ ID NO: 2198894
aauuuacucaguugucaac

SEQ ID NO: 2198896 - RNA, 19 nt, Artificial Sequence
  Description of Artificial Sequence: Synthetic oligonucleotide
  Sense strand starting at position 3753 of SEQ ID NO: 1883513
agagaaauaucuguauguu

SEQ ID NO: 2198897 - RNA, 19 nt, Artificial Sequence
  Description of Artificial Sequence: Synthetic oligonucleotide
  Antisense strand to SEQ ID NO: 2198896
aacauacagauauuucucu

SEQ ID NO: 2198898 - RNA, 19 nt, Artificial Sequence
  Description of Artificial Sequence: Synthetic oligonucleotide
  Sense strand starting at position 100 of SEQ ID NO: 1883513
ggugaugccauugauugac

SEQ ID NO: 2198899 - RNA, 19 nt, Artificial Sequence
  Description of Artificial Sequence: Synthetic oligonucleotide
  Antisense strand to SEQ ID NO: 2198898
gucaaucaauggcaucacc

SEQ ID NO: 2198900 - RNA, 19 nt, Artificial Sequence
  Description of Artificial Sequence: Synthetic oligonucleotide
  Sense strand starting at position 3911 of SEQ ID NO: 1883513
ugacuccuaguccaguaua

SEQ ID NO: 2198901 - RNA, 19 nt, Artificial Sequence
  Description of Artificial Sequence: Synthetic oligonucleotide
  Antisense strand to SEQ ID NO: 2198900
uauacuggacuaggaguca

SEQ ID NO: 2198902 - RNA, 19 nt, Artificial Sequence
  Description of Artificial Sequence: Synthetic oligonucleotide
  Sense strand starting at position 181 of SEQ ID NO: 1883513
uuaagauguguaugaacca

SEQ ID NO: 2198903 - RNA, 19 nt, Artificial Sequence
  Description of Artificial Sequence: Synthetic oligonucleotide
  Antisense strand to SEQ ID NO: 2198902
ugguucauacacaucuuaa

SEQ ID NO: 2198904 - RNA, 19 nt, Artificial Sequence
  Description of Artificial Sequence: Synthetic oligonucleotide
  Sense strand starting at position 38 of SEQ ID NO: 1883513
guugguaugagagguaaag

SEQ ID NO: 2198905 - RNA, 19 nt, Artificial Sequence
  Description of Artificial Sequence: Synthetic oligonucleotide
  Antisense strand to SEQ ID NO: 2198904
cuuuaccucucauaccaac

SEQ ID NO: 2198906 - RNA, 19 nt, Artificial Sequence
  Description of Artificial Sequence: Synthetic oligonucleotide
  Sense strand starting at position 3817 of SEQ ID NO: 1883513
uuuagaagugaguaagcuu

SEQ ID NO: 2198907 - RNA, 19 nt, Artificial Sequence
  Description of Artificial Sequence: Synthetic oligonucleotide
  Antisense strand to SEQ ID NO: 2198906
aagcuuacucacuucuaaa

SEQ ID NO: 2198908 - RNA, 19 nt, Artificial Sequence
  Description of Artificial Sequence: Synthetic oligonucleotide
  Sense strand starting at position 1932 of SEQ ID NO: 1883513
cgccauuagcgguuagguu

SEQ ID NO: 2198909 - RNA, 19 nt, Artificial Sequence
  Description of Artificial Sequence: Synthetic oligonucleotide
  Antisense strand to SEQ ID NO: 2198908
aaccuaaccgcuaauggcg

SEQ ID NO: 2198910 - RNA, 19 nt, Artificial Sequence
  Description of Artificial Sequence: Synthetic oligonucleotide
  Sense strand starting at position 1112 of SEQ ID NO: 1883513
ccagaaaucuuuguaguaa

SEQ ID NO: 2198911 - RNA, 19 nt, Artificial Sequence
  Description of Artificial Sequence: Synthetic oligonucleotide
  Antisense strand to SEQ ID NO: 2198910
uuacuacaaagauuucugg

SEQ ID NO: 2198912 - RNA, 19 nt, Artificial Sequence
  Description of Artificial Sequence: Synthetic oligonucleotide
  Sense strand starting at position 1364 of SEQ ID NO: 1883513
ucucuuuaugaguagggca

SEQ ID NO: 2198913 - RNA, 19 nt, Artificial Sequence
  Description of Artificial Sequence: Synthetic oligonucleotide
  Antisense strand to SEQ ID NO: 2198912
ugcccuacucauaaagaga

SEQ ID NO: 2198914 - RNA, 19 nt, Artificial Sequence
  Description of Artificial Sequence: Synthetic oligonucleotide
  Sense strand starting at position 1123 of SEQ ID NO: 1883513
uguaguaaaucuuuggaua

SEQ ID NO: 2198915 - RNA, 19 nt, Artificial Sequence
  Description of Artificial Sequence: Synthetic oligonucleotide
  Antisense strand to SEQ ID NO: 2198914
uauccaaagauuuacuaca

SEQ ID NO: 2198916 - RNA, 19 nt, Artificial Sequence
  Description of Artificial Sequence: Synthetic oligonucleotide
  Sense strand starting at position 1048 of SEQ ID NO: 1883513
uccucuaucgauggacaau

SEQ ID NO: 2198917 - RNA, 19 nt, Artificial Sequence
  Description of Artificial Sequence: Synthetic oligonucleotide
  Antisense strand to SEQ ID NO: 2198916
auuguccaucgauagagga

SEQ ID NO: 2198918 - RNA, 19 nt, Artificial Sequence
  Description of Artificial Sequence: Synthetic oligonucleotide
  Sense strand starting at position 1047 of SEQ ID NO: 1883513
uuccucuaucgauggacaa

SEQ ID NO: 2198919 - RNA, 19 nt, Artificial Sequence
  Description of Artificial Sequence: Synthetic oligonucleotide
  Antisense strand to SEQ ID NO: 2198918
uuguccaucgauagaggaa

SEQ ID NO: 2198920 - RNA, 19 nt, Artificial Sequence
  Description of Artificial Sequence: Synthetic oligonucleotide
  Sense strand starting at position 1517 of SEQ ID NO: 1883513
aguacauaucuuuaggcuu

SEQ ID NO: 2198921 - RNA, 19 nt, Artificial Sequence
  Description of Artificial Sequence: Synthetic oligonucleotide
  Antisense strand to SEQ ID NO: 2198920
aagccuaaagauauguacu

SEQ ID NO: 2198922 - RNA, 19 nt, Artificial Sequence
  Description of Artificial Sequence: Synthetic oligonucleotide
  Sense strand starting at position 1124 of SEQ ID NO: 1883513
guaguaaaucuuuggauau

SEQ ID NO: 2198923 - RNA, 19 nt, Artificial Sequence
  Description of Artificial Sequence: Synthetic oligonucleotide
  Antisense strand to SEQ ID NO: 2198922
auauccaaagauuuacuac

SEQ ID NO: 2198924 - RNA, 19 nt, Artificial Sequence
  Description of Artificial Sequence: Synthetic oligonucleotide
  Sense strand starting at position 1268 of SEQ ID NO: 1883513
ccuuacaucuugguacaca

SEQ ID NO: 2198925 - RNA, 19 nt, Artificial Sequence
  Description of Artificial Sequence: Synthetic oligonucleotide
  Antisense strand to SEQ ID NO: 2198924
uguguaccaagauguaagg

SEQ ID NO: 2198926 - RNA, 19 nt, Artificial Sequence
  Description of Artificial Sequence: Synthetic oligonucleotide
  Sense strand starting at position 1957 of SEQ ID NO: 1883513
gccgaagagcugcaagaaa

SEQ ID NO: 2198927 - RNA, 19 nt, Artificial Sequence
  Description of Artificial Sequence: Synthetic oligonucleotide
  Antisense strand to SEQ ID NO: 2198926
uuucuugcagcucuucggc

SEQ ID NO: 2198928 - RNA, 19 nt, Artificial Sequence
  Description of Artificial Sequence: Synthetic oligonucleotide
  Sense strand starting at position 211 of SEQ ID NO: 1883513
ugacaaaucagcggguaga

SEQ ID NO: 2198929 - RNA, 19 nt, Artificial Sequence
  Description of Artificial Sequence: Synthetic oligonucleotide
  Antisense strand to SEQ ID NO: 2198928
ucuacccgcugauuuguca

SEQ ID NO: 2198930 - RNA, 19 nt, Artificial Sequence
  Description of Artificial Sequence: Synthetic oligonucleotide
  Sense strand starting at position 1564 of SEQ ID NO: 1883513
ccuucuuaugcguucgcua

SEQ ID NO: 2198931 - RNA, 19 nt, Artificial Sequence
  Description of Artificial Sequence: Synthetic oligonucleotide
  Antisense strand to SEQ ID NO: 2198930
uagcgaacgcauaagaagg

SEQ ID NO: 2198932 - RNA, 19 nt, Artificial Sequence
  Description of Artificial Sequence: Synthetic oligonucleotide
  Sense strand starting at position 3384 of SEQ ID NO: 1883513
gaguuaaauugcuuaccag

SEQ ID NO: 2198933 - RNA, 19 nt, Artificial Sequence
  Description of Artificial Sequence: Synthetic oligonucleotide
  Antisense strand to SEQ ID NO: 2198932
cugguaagcaauuuaacuc

SEQ ID NO: 2198934 - RNA, 19 nt, Artificial Sequence
  Description of Artificial Sequence: Synthetic oligonucleotide
  Sense strand starting at position 3385 of SEQ ID NO: 1883513
aguuaaauugcuuaccagu

SEQ ID NO: 2198935 - RNA, 19 nt, Artificial Sequence
  Description of Artificial Sequence: Synthetic oligonucleotide
  Antisense strand to SEQ ID NO: 2198934
acugguaagcaauuuaacu

SEQ ID NO: 2198936 - RNA, 19 nt, Artificial Sequence
  Description of Artificial Sequence: Synthetic oligonucleotide
  Sense strand starting at position 2793 of SEQ ID NO: 1883513
uguuaaaggcucuagcaua

SEQ ID NO: 2198937 - RNA, 19 nt, Artificial Sequence
  Description of Artificial Sequence: Synthetic oligonucleotide
  Antisense strand to SEQ ID NO: 2198936
uaugcuagagccuuuaaca

SEQ ID NO: 2198938 - RNA, 19 nt, Artificial Sequence
  Description of Artificial Sequence: Synthetic oligonucleotide
  Sense strand starting at position 161 of SEQ ID NO: 1883513
aggguuuggauguguuaaa

SEQ ID NO: 2198939 - RNA, 19 nt, Artificial Sequence
  Description of Artificial Sequence: Synthetic oligonucleotide
  Antisense strand to SEQ ID NO: 2198938
uuuaacacauccaaacccu

SEQ ID NO: 2198940 - RNA, 19 nt, Artificial Sequence
  Description of Artificial Sequence: Synthetic oligonucleotide
  Sense strand starting at position 3007 of SEQ ID NO: 1883513
cacgucauucuccagugaa

SEQ ID NO: 2198941 - RNA, 19 nt, Artificial Sequence
  Description of Artificial Sequence: Synthetic oligonucleotide
  Antisense strand to SEQ ID NO: 2198940
uucacuggagaaugacgug

SEQ ID NO: 2198942 - RNA, 19 nt, Artificial Sequence
  Description of Artificial Sequence: Synthetic oligonucleotide
  Sense strand starting at position 3398 of SEQ ID NO: 1883513
accaguaagcgugacauua

SEQ ID NO: 2198943 - RNA, 19 nt, Artificial Sequence
  Description of Artificial Sequence: Synthetic oligonucleotide
  Antisense strand to SEQ ID NO: 2198942
uaaugucacgcuuacuggu

SEQ ID NO: 2198944 - RNA, 19 nt, Artificial Sequence
  Description of Artificial Sequence: Synthetic oligonucleotide
  Sense strand starting at position 3112 of SEQ ID NO: 1883513
gcgacugaaacguauccaa

SEQ ID NO: 2198945 - RNA, 19 nt, Artificial Sequence
  Description of Artificial Sequence: Synthetic oligonucleotide
  Antisense strand to SEQ ID NO: 2198944
uuggauacguuucagucgc

SEQ ID NO: 2198946 - RNA, 19 nt, Artificial Sequence
  Description of Artificial Sequence: Synthetic oligonucleotide
  Sense strand starting at position 1380 of SEQ ID NO: 1883513
gcagcaagaccugauuguu

SEQ ID NO: 2198947 - RNA, 19 nt, Artificial Sequence
  Description of Artificial Sequence: Synthetic oligonucleotide
  Antisense strand to SEQ ID NO: 2198946
aacaaucaggucuugcugc

SEQ ID NO: 2198948 - RNA, 19 nt, Artificial Sequence
  Description of Artificial Sequence: Synthetic oligonucleotide
  Sense strand starting at position 3059 of SEQ ID NO: 1883514
gugagagagcccgaugaaa

SEQ ID NO: 2198949 - RNA, 19 nt, Artificial Sequence
  Description of Artificial Sequence: Synthetic oligonucleotide
  Antisense strand to SEQ ID NO: 2198948
uuucaucgggcucucucac

SEQ ID NO: 2198950 - RNA, 19 nt, Artificial Sequence
  Description of Artificial Sequence: Synthetic oligonucleotide
  Sense strand starting at position 1022 of SEQ ID NO: 1883514
cuuugaugacaguaguaau

SEQ ID NO: 2198951 - RNA, 19 nt, Artificial Sequence
  Description of Artificial Sequence: Synthetic oligonucleotide
  Antisense strand to SEQ ID NO: 2198950
auuacuacugucaucaaag

SEQ ID NO: 2198952 - RNA, 19 nt, Artificial Sequence
  Description of Artificial Sequence: Synthetic oligonucleotide
  Sense strand starting at position 3349 of SEQ ID NO: 1883514
agccuucccuagucauuua

SEQ ID NO: 2198953 - RNA, 19 nt, Artificial Sequence
  Description of Artificial Sequence: Synthetic oligonucleotide
  Antisense strand to SEQ ID NO: 2198952
uaaaugacuagggaaggcu

SEQ ID NO: 2198954 - RNA, 19 nt, Artificial Sequence
  Description of Artificial Sequence: Synthetic oligonucleotide
  Sense strand starting at position 3090 of SEQ ID NO: 1883514
gguuggugaguggauagau

SEQ ID NO: 2198955 - RNA, 19 nt, Artificial Sequence
  Description of Artificial Sequence: Synthetic oligonucleotide
  Antisense strand to SEQ ID NO: 2198954
aucuauccacucaccaacc

SEQ ID NO: 2198956 - RNA, 19 nt, Artificial Sequence
  Description of Artificial Sequence: Synthetic oligonucleotide
  Sense strand starting at position 2223 of SEQ ID NO: 1883514
guuaauuuacgcgggagau

SEQ ID NO: 2198957 - RNA, 19 nt, Artificial Sequence
  Description of Artificial Sequence: Synthetic oligonucleotide
  Antisense strand to SEQ ID NO: 2198956
aucucccgcguaaauuaac

SEQ ID NO: 2198958 - RNA, 19 nt, Artificial Sequence
  Description of Artificial Sequence: Synthetic oligonucleotide
  Sense strand starting at position 786 of SEQ ID NO: 1883514
cauaguagagcuggauaaa

SEQ ID NO: 2198959 - RNA, 19 nt, Artificial Sequence
  Description of Artificial Sequence: Synthetic oligonucleotide
  Antisense strand to SEQ ID NO: 2198958
uuuauccagcucuacuaug

SEQ ID NO: 2198960 - RNA, 19 nt, Artificial Sequence
  Description of Artificial Sequence: Synthetic oligonucleotide
  Sense strand starting at position 2213 of SEQ ID NO: 1883514
gcccuaguccguuaauuua

SEQ ID NO: 2198961 - RNA, 19 nt, Artificial Sequence
  Description of Artificial Sequence: Synthetic oligonucleotide
  Antisense strand to SEQ ID NO: 2198960
uaaauuaacggacuagggc

SEQ ID NO: 2198962 - RNA, 19 nt, Artificial Sequence
  Description of Artificial Sequence: Synthetic oligonucleotide
  Sense strand starting at position 750 of SEQ ID NO: 1883514
caauuaggaucuguugacu

SEQ ID NO: 2198963 - RNA, 19 nt, Artificial Sequence
  Description of Artificial Sequence: Synthetic oligonucleotide
  Antisense strand to SEQ ID NO: 2198962
agucaacagauccuaauug

SEQ ID NO: 2198964 - RNA, 19 nt, Artificial Sequence
  Description of Artificial Sequence: Synthetic oligonucleotide
  Sense strand starting at position 2980 of SEQ ID NO: 1883514
auaaucuuggcagagcuua

SEQ ID NO: 2198965 - RNA, 19 nt, Artificial Sequence
  Description of Artificial Sequence: Synthetic oligonucleotide
  Antisense strand to SEQ ID NO: 2198964
uaagcucugccaagauuau

SEQ ID NO: 2198966 - RNA, 19 nt, Artificial Sequence
  Description of Artificial Sequence: Synthetic oligonucleotide
  Sense strand starting at position 1154 of SEQ ID NO: 1883514
cucuguuggguggauauua

SEQ ID NO: 2198967 - RNA, 19 nt, Artificial Sequence
  Description of Artificial Sequence: Synthetic oligonucleotide
  Antisense strand to SEQ ID NO: 2198966
uaauauccacccaacagag

SEQ ID NO: 2198968 - RNA, 19 nt, Artificial Sequence
  Description of Artificial Sequence: Synthetic oligonucleotide
  Sense strand starting at position 3346 of SEQ ID NO: 1883514
agaagccuucccuagucau

SEQ ID NO: 2198969 - RNA, 19 nt, Artificial Sequence
  Description of Artificial Sequence: Synthetic oligonucleotide
  Antisense strand to SEQ ID NO: 2198968
augacuagggaaggcuucu

SEQ ID NO: 2198970 - RNA, 19 nt, Artificial Sequence
  Description of Artificial Sequence: Synthetic oligonucleotide
  Sense strand starting at position 3647 of SEQ ID NO: 1883514
auaccuauccugcaagguu

SEQ ID NO: 2198971 - RNA, 19 nt, Artificial Sequence
  Description of Artificial Sequence: Synthetic oligonucleotide
  Antisense strand to SEQ ID NO: 2198970
aaccuugcaggauagguau

SEQ ID NO: 2198972 - RNA, 19 nt, Artificial Sequence
  Description of Artificial Sequence: Synthetic oligonucleotide
  Sense strand starting at position 2222 of SEQ ID NO: 1883514
cguuaauuuacgcgggaga

SEQ ID NO: 2198973 - RNA, 19 nt, Artificial Sequence
  Description of Artificial Sequence: Synthetic oligonucleotide
  Antisense strand to SEQ ID NO: 2198972
ucucccgcguaaauuaacg

SEQ ID NO: 2198974 - RNA, 19 nt, Artificial Sequence
  Description of Artificial Sequence: Synthetic oligonucleotide
  Sense strand starting at position 3087 of SEQ ID NO: 1883514
aaugguuggugaguggaua

SEQ ID NO: 2198975 - RNA, 19 nt, Artificial Sequence
  Description of Artificial Sequence: Synthetic oligonucleotide
  Antisense strand to SEQ ID NO: 2198974
uauccacucaccaaccauu

SEQ ID NO: 2198976 - RNA, 19 nt, Artificial Sequence
  Description of Artificial Sequence: Synthetic oligonucleotide
  Sense strand starting at position 895 of SEQ ID NO: 1883514
agcagaguugcgcucuguu

SEQ ID NO: 2198977 - RNA, 19 nt, Artificial Sequence
  Description of Artificial Sequence: Synthetic oligonucleotide
  Antisense strand to SEQ ID NO: 2198976
aacagagcgcaacucugcu

SEQ ID NO: 2198978 - RNA, 19 nt, Artificial Sequence
  Description of Artificial Sequence: Synthetic oligonucleotide
  Sense strand starting at position 3973 of SEQ ID NO: 1883514
ugagauagguguguccaaa

SEQ ID NO: 2198979 - RNA, 19 nt, Artificial Sequence
  Description of Artificial Sequence: Synthetic oligonucleotide
  Antisense strand to SEQ ID NO: 2198978
uuuggacacaccuaucuca

SEQ ID NO: 2198980 - RNA, 19 nt, Artificial Sequence
  Description of Artificial Sequence: Synthetic oligonucleotide
  Sense strand starting at position 1151 of SEQ ID NO: 1883514
caacucuguuggguggaua

SEQ ID NO: 2198981 - RNA, 19 nt, Artificial Sequence
  Description of Artificial Sequence: Synthetic oligonucleotide
  Antisense strand to SEQ ID NO: 2198980
uauccacccaacagaguug

SEQ ID NO: 2198982 - RNA, 19 nt, Artificial Sequence
  Description of Artificial Sequence: Synthetic oligonucleotide
  Sense strand starting at position 1799 of SEQ ID NO: 1883514
aguccaucauggcuacaga

SEQ ID NO: 2198983 - RNA, 19 nt, Artificial Sequence
  Description of Artificial Sequence: Synthetic oligonucleotide
  Antisense strand to SEQ ID NO: 2198982
ucuguagccaugauggacu

SEQ ID NO: 2198984 - RNA, 19 nt, Artificial Sequence
  Description of Artificial Sequence: Synthetic oligonucleotide
  Sense strand starting at position 3972 of SEQ ID NO: 1883514
augagauagguguguccaa

SEQ ID NO: 2198985 - RNA, 19 nt, Artificial Sequence
  Description of Artificial Sequence: Synthetic oligonucleotide
  Antisense strand to SEQ ID NO: 2198984
uuggacacaccuaucucau

SEQ ID NO: 2198986 - RNA, 19 nt, Artificial Sequence
  Description of Artificial Sequence: Synthetic oligonucleotide
  Sense strand starting at position 1152 of SEQ ID NO: 1883514
aacucuguuggguggauau

SEQ ID NO: 2198987 - RNA, 19 nt, Artificial Sequence
  Description of Artificial Sequence: Synthetic oligonucleotide
  Antisense strand to SEQ ID NO: 2198986
auauccacccaacagaguu

SEQ ID NO: 2198988 - RNA, 19 nt, Artificial Sequence
  Description of Artificial Sequence: Synthetic oligonucleotide
  Sense strand starting at position 1190 of SEQ ID NO: 1883514
ugggaaagccggugaaauc

SEQ ID NO: 2198989 - RNA, 19 nt, Artificial Sequence
  Description of Artificial Sequence: Synthetic oligonucleotide
  Antisense strand to SEQ ID NO: 2198988
gauuucaccggcuuuccca

SEQ ID NO: 2198990 - RNA, 19 nt, Artificial Sequence
  Description of Artificial Sequence: Synthetic oligonucleotide
  Sense strand starting at position 3106 of SEQ ID NO: 1883514
gauagugacuuucccagua

SEQ ID NO: 2198991 - RNA, 19 nt, Artificial Sequence
  Description of Artificial Sequence: Synthetic oligonucleotide
  Antisense strand to SEQ ID NO: 2198990
uacugggaaagucacuauc

SEQ ID NO: 2198992 - RNA, 19 nt, Artificial Sequence
  Description of Artificial Sequence: Synthetic oligonucleotide
  Sense strand starting at position 3708 of SEQ ID NO: 1883514
aguaauucuguguauccca

SEQ ID NO: 2198993 - RNA, 19 nt, Artificial Sequence
  Description of Artificial Sequence: Synthetic oligonucleotide
  Antisense strand to SEQ ID NO: 2198992
ugggauacacagaauuacu

SEQ ID NO: 2198994 - RNA, 19 nt, Artificial Sequence
  Description of Artificial Sequence: Synthetic oligonucleotide
  Sense strand starting at position 2520 of SEQ ID NO: 1883514
aggcaccuguggucagaaa

SEQ ID NO: 2198995 - RNA, 19 nt, Artificial Sequence
  Description of Artificial Sequence: Synthetic oligonucleotide
  Antisense strand to SEQ ID NO: 2198994
uuucugaccacaggugccu

SEQ ID NO: 2198996 - RNA, 19 nt, Artificial Sequence
  Description of Artificial Sequence: Synthetic oligonucleotide
  Sense strand starting at position 2190 of SEQ ID NO: 1883514
aucuuuguugagggccaaa

SEQ ID NO: 2198997 - RNA, 19 nt, Artificial Sequence
  Description of Artificial Sequence: Synthetic oligonucleotide
  Antisense strand to SEQ ID NO: 2198996
uuuggcccucaacaaagau

SEQ ID NO: 2198998 - RNA, 19 nt, Artificial Sequence
  Description of Artificial Sequence: Synthetic oligonucleotide
  Sense strand starting at position 2412 of SEQ ID NO: 1883514
uuugcagacuuaguuugaa

SEQ ID NO: 2198999 - RNA, 19 nt, Artificial Sequence
  Description of Artificial Sequence: Synthetic oligonucleotide
  Antisense strand to SEQ ID NO: 2198998
uucaaacuaagucugcaaa

SEQ ID NO: 2199000 - RNA, 19 nt, Artificial Sequence
  Description of Artificial Sequence: Synthetic oligonucleotide
  Sense strand starting at position 1421 of SEQ ID NO: 1883514
gucccuguucuccaccaau

SEQ ID NO: 2199001 - RNA, 19 nt, Artificial Sequence
  Description of Artificial Sequence: Synthetic oligonucleotide
  Antisense strand to SEQ ID NO: 2199000
auugguggagaacagggac

SEQ ID NO: 2199002 - RNA, 19 nt, Artificial Sequence
  Description of Artificial Sequence: Synthetic oligonucleotide
  Sense strand starting at position 2988 of SEQ ID NO: 1883514
ggcagagcuuaagcaauga

SEQ ID NO: 2199003 - RNA, 19 nt, Artificial Sequence
  Description of Artificial Sequence: Synthetic oligonucleotide
  Antisense strand to SEQ ID NO: 2199002
ucauugcuuaagcucugcc

SEQ ID NO: 2199004 - RNA, 19 nt, Artificial Sequence
  Description of Artificial Sequence: Synthetic oligonucleotide
  Sense strand starting at position 3670 of SEQ ID NO: 1883514
ugagaauaaucagagauac

SEQ ID NO: 2199005 - RNA, 19 nt, Artificial Sequence
  Description of Artificial Sequence: Synthetic oligonucleotide
  Antisense strand to SEQ ID NO: 2199004
guaucucugauuauucuca

SEQ ID NO: 2199006 - RNA, 19 nt, Artificial Sequence
  Description of Artificial Sequence: Synthetic oligonucleotide
  Sense strand starting at position 3082 of SEQ ID NO: 1883514
cuugaaaugguuggugagu

SEQ ID NO: 2199007 - RNA, 19 nt, Artificial Sequence
  Description of Artificial Sequence: Synthetic oligonucleotide
  Antisense strand to SEQ ID NO: 2199006
acucaccaaccauuucaag

SEQ ID NO: 2199008 - RNA, 19 nt, Artificial Sequence
  Description of Artificial Sequence: Synthetic oligonucleotide
  Sense strand starting at position 995 of SEQ ID NO: 1883514
uggccauuauucccugauu

SEQ ID NO: 2199009 - RNA, 19 nt, Artificial Sequence
  Description of Artificial Sequence: Synthetic oligonucleotide
  Antisense strand to SEQ ID NO: 2199008
aaucagggaauaauggcca

SEQ ID NO: 2199010 - RNA, 19 nt, Artificial Sequence
  Description of Artificial Sequence: Synthetic oligonucleotide
  Sense strand starting at position 996 of SEQ ID NO: 1883514
ggccauuauucccugauuc

SEQ ID NO: 2199011 - RNA, 19 nt, Artificial Sequence
  Description of Artificial Sequence: Synthetic oligonucleotide
  Antisense strand to SEQ ID NO: 2199010
gaaucagggaauaauggcc

SEQ ID NO: 2199012 - RNA, 19 nt, Artificial Sequence
  Description of Artificial Sequence: Synthetic oligonucleotide
  Sense strand starting at position 987 of SEQ ID NO: 1883514
gccacucuuggccauuauu

SEQ ID NO: 2199013 - RNA, 19 nt, Artificial Sequence
  Description of Artificial Sequence: Synthetic oligonucleotide
  Antisense strand to SEQ ID NO: 2199012
aauaauggccaagaguggc

SEQ ID NO: 2199014 - RNA, 19 nt, Artificial Sequence
  Description of Artificial Sequence: Synthetic oligonucleotide
  Sense strand starting at position 2415 of SEQ ID NO: 1883514
gcagacuuaguuugaagca

SEQ ID NO: 2199015 - RNA, 19 nt, Artificial Sequence
  Description of Artificial Sequence: Synthetic oligonucleotide
  Antisense strand to SEQ ID NO: 2199014
ugcuucaaacuaagucugc

SEQ ID NO: 2199016 - RNA, 19 nt, Artificial Sequence
  Description of Artificial Sequence: Synthetic oligonucleotide
  Sense strand starting at position 284 of SEQ ID NO: 1883514
gugccucauacaugaaggu

SEQ ID NO: 2199017 - RNA, 19 nt, Artificial Sequence
  Description of Artificial Sequence: Synthetic oligonucleotide
  Antisense strand to SEQ ID NO: 2199016
accuucauguaugaggcac

SEQ ID NO: 2199018 - RNA, 19 nt, Artificial Sequence
  Description of Artificial Sequence: Synthetic oligonucleotide
  Sense strand starting at position 776 of SEQ ID NO: 1883514
gcagcuuguccauaguaga

SEQ ID NO: 2199019 - RNA, 19 nt, Artificial Sequence
  Description of Artificial Sequence: Synthetic oligonucleotide
  Antisense strand to SEQ ID NO: 2199018
ucuacuauggacaagcugc

SEQ ID NO: 2199020 - RNA, 19 nt, Artificial Sequence
  Description of Artificial Sequence: Synthetic oligonucleotide
  Sense strand starting at position 1282 of SEQ ID NO: 1883514
gguucuuaaucauugcacu

SEQ ID NO: 2199021 - RNA, 19 nt, Artificial Sequence
  Description of Artificial Sequence: Synthetic oligonucleotide
  Antisense strand to SEQ ID NO: 2199020
agugcaaugauuaagaacc

SEQ ID NO: 2199022 - RNA, 19 nt, Artificial Sequence
  Description of Artificial Sequence: Synthetic oligonucleotide
  Sense strand starting at position 3706 of SEQ ID NO: 1883514
auaguaauucuguguaucc

SEQ ID NO: 2199023 - RNA, 19 nt, Artificial Sequence
  Description of Artificial Sequence: Synthetic oligonucleotide
  Antisense strand to SEQ ID NO: 2199022
ggauacacagaauuacuau

SEQ ID NO: 2199024 - RNA, 19 nt, Artificial Sequence
  Description of Artificial Sequence: Synthetic oligonucleotide
  Sense strand starting at position 1355 of SEQ ID NO: 1883514
cggcuacacucucuccaua

SEQ ID NO: 2199025 - RNA, 19 nt, Artificial Sequence
  Description of Artificial Sequence: Synthetic oligonucleotide
  Antisense strand to SEQ ID NO: 2199024
uauggagagaguguagccg

SEQ ID NO: 2199026 - RNA, 19 nt, Artificial Sequence
  Description of Artificial Sequence: Synthetic oligonucleotide
  Sense strand starting at position 703 of SEQ ID NO: 1883514
acucuuaagugucccaguu

SEQ ID NO: 2199027 - RNA, 19 nt, Artificial Sequence
  Description of Artificial Sequence: Synthetic oligonucleotide
  Antisense strand to SEQ ID NO: 2199026
aacugggacacuuaagagu

SEQ ID NO: 2199028 - RNA, 19 nt, Artificial Sequence
  Description of Artificial Sequence: Synthetic oligonucleotide
  Sense strand starting at position 779 of SEQ ID NO: 1883515
cgagaacuuuauccauaag

SEQ ID NO: 2199029 - RNA, 19 nt, Artificial Sequence
  Description of Artificial Sequence: Synthetic oligonucleotide
  Antisense strand to SEQ ID NO: 2199028
cuuauggauaaaguucucg

SEQ ID NO: 2199030 - RNA, 19 nt, Artificial Sequence
  Description of Artificial Sequence: Synthetic oligonucleotide
  Sense strand starting at position 3568 of SEQ ID NO: 1883515
cguguuucccgagcacacu

SEQ ID NO: 2199031 - RNA, 19 nt, Artificial Sequence
  Description of Artificial Sequence: Synthetic oligonucleotide
  Antisense strand to SEQ ID NO: 2199030
agugugcucgggaaacacg

SEQ ID NO: 2199032 - RNA, 19 nt, Artificial Sequence
  Description of Artificial Sequence: Synthetic oligonucleotide
  Sense strand starting at position 3075 of SEQ ID NO: 1883515
uggucaaaugcuuaugaug

SEQ ID NO: 2199033 - RNA, 19 nt, Artificial Sequence
  Description of Artificial Sequence: Synthetic oligonucleotide
  Antisense strand to SEQ ID NO: 2199032
caucauaagcauuugacca

SEQ ID NO: 2199034 - RNA, 19 nt, Artificial Sequence
  Description of Artificial Sequence: Synthetic oligonucleotide
  Sense strand starting at position 2359 of SEQ ID NO: 1883515
cuacucauccagugaugaa

SEQ ID NO: 2199035 - RNA, 19 nt, Artificial Sequence
  Description of Artificial Sequence: Synthetic oligonucleotide
  Antisense strand to SEQ ID NO: 2199034
uucaucacuggaugaguag

SEQ ID NO: 2199036 - RNA, 19 nt, Artificial Sequence
  Description of Artificial Sequence: Synthetic oligonucleotide
  Sense strand starting at position 116 of SEQ ID NO: 1883515
uaaagaguggucggagaau

SEQ ID NO: 2199037 - RNA, 19 nt, Artificial Sequence
  Description of Artificial Sequence: Synthetic oligonucleotide
  Antisense strand to SEQ ID NO: 2199036
auucuccgaccacucuuua

SEQ ID NO: 2199038 - RNA, 19 nt, Artificial Sequence
  Description of Artificial Sequence: Synthetic oligonucleotide
  Sense strand starting at position 2926 of SEQ ID NO: 1883515
cagaguucccacgaaguca

SEQ ID NO: 2199039 - RNA, 19 nt, Artificial Sequence
  Description of Artificial Sequence: Synthetic oligonucleotide
  Antisense strand to SEQ ID NO: 2199038
ugacuucgugggaacucug

SEQ ID NO: 2199040 - RNA, 19 nt, Artificial Sequence
  Description of Artificial Sequence: Synthetic oligonucleotide
  Sense strand starting at position 85 of SEQ ID NO: 1883515
guaaauaugaagugugaau

SEQ ID NO: 2199041 - RNA, 19 nt, Artificial Sequence
  Description of Artificial Sequence: Synthetic oligonucleotide
  Antisense strand to SEQ ID NO: 2199040
auucacacuucauauuuac

SEQ ID NO: 2199042 - RNA, 19 nt, Artificial Sequence
  Description of Artificial Sequence: Synthetic oligonucleotide
  Sense strand starting at position 776 of SEQ ID NO: 1883515
uugcgagaacuuuauccau

SEQ ID NO: 2199043 - RNA, 19 nt, Artificial Sequence
  Description of Artificial Sequence: Synthetic oligonucleotide
  Antisense strand to SEQ ID NO: 2199042
auggauaaaguucucgcaa

SEQ ID NO: 2199044 - RNA, 19 nt, Artificial Sequence
  Description of Artificial Sequence: Synthetic oligonucleotide
  Sense strand starting at position 2713 of SEQ ID NO: 1883515
guggucuugggauaugcaa

SEQ ID NO: 2199045 - RNA, 19 nt, Artificial Sequence
  Description of Artificial Sequence: Synthetic oligonucleotide
  Antisense strand to SEQ ID NO: 2199044
uugcauaucccaagaccac

SEQ ID NO: 2199046 - RNA, 19 nt, Artificial Sequence
  Description of Artificial Sequence: Synthetic oligonucleotide
  Sense strand starting at position 778 of SEQ ID NO: 1883515
gcgagaacuuuauccauaa

SEQ ID NO: 2199047 - RNA, 19 nt, Artificial Sequence
  Description of Artificial Sequence: Synthetic oligonucleotide
  Antisense strand to SEQ ID NO: 2199046
uuauggauaaaguucucgc

SEQ ID NO: 2199048 - RNA, 19 nt, Artificial Sequence
  Description of Artificial Sequence: Synthetic oligonucleotide
  Sense strand starting at position 2709 of SEQ ID NO: 1883515
caggguggucuugggauau

SEQ ID NO: 2199049 - RNA, 19 nt, Artificial Sequence
  Description of Artificial Sequence: Synthetic oligonucleotide
  Antisense strand to SEQ ID NO: 2199048
auaucccaagaccacccug

SEQ ID NO: 2199050 - RNA, 19 nt, Artificial Sequence
  Description of Artificial Sequence: Synthetic oligonucleotide
  Sense strand starting at position 2715 of SEQ ID NO: 1883515
ggucuugggauaugcaaca

SEQ ID NO: 2199051 - RNA, 19 nt, Artificial Sequence
  Description of Artificial Sequence: Synthetic oligonucleotide
  Antisense strand to SEQ ID NO: 2199050
uguugcauaucccaagacc

SEQ ID NO: 2199052 - RNA, 19 nt, Artificial Sequence
  Description of Artificial Sequence: Synthetic oligonucleotide
  Sense strand starting at position 3074 of SEQ ID NO: 1883515
auggucaaaugcuuaugau

SEQ ID NO: 2199053 - RNA, 19 nt, Artificial Sequence
  Description of Artificial Sequence: Synthetic oligonucleotide
  Antisense strand to SEQ ID NO: 2199052
aucauaagcauuugaccau

SEQ ID NO: 2199054 - RNA, 19 nt, Artificial Sequence
  Description of Artificial Sequence: Synthetic oligonucleotide
  Sense strand starting at position 770 of SEQ ID NO: 1883515
aagccauugcgagaacuuu

SEQ ID NO: 2199055 - RNA, 19 nt, Artificial Sequence
  Description of Artificial Sequence: Synthetic oligonucleotide
  Antisense strand to SEQ ID NO: 2199054
aaaguucucgcaauggcuu

SEQ ID NO: 2199056 - RNA, 19 nt, Artificial Sequence
  Description of Artificial Sequence: Synthetic oligonucleotide
  Sense strand starting at position 114 of SEQ ID NO: 1883515
gcuaaagaguggucggaga

SEQ ID NO: 2199057 - RNA, 19 nt, Artificial Sequence
  Description of Artificial Sequence: Synthetic oligonucleotide
  Antisense strand to SEQ ID NO: 2199056
ucuccgaccacucuuuagc

SEQ ID NO: 2199058 - RNA, 19 nt, Artificial Sequence
  Description of Artificial Sequence: Synthetic oligonucleotide
  Sense strand starting at position 3715 of SEQ ID NO: 1883515
gugggcuuucuccagugaa

SEQ ID NO: 2199059 - RNA, 19 nt, Artificial Sequence
  Description of Artificial Sequence: Synthetic oligonucleotide
  Antisense strand to SEQ ID NO: 2199058
uucacuggagaaagcccac

SEQ ID NO: 2199060 - RNA, 19 nt, Artificial Sequence
  Description of Artificial Sequence: Synthetic oligonucleotide
  Sense strand starting at position 2038 of SEQ ID NO: 1883515
guacaauguuaugcaacca

SEQ ID NO: 2199061 - RNA, 19 nt, Artificial Sequence
  Description of Artificial Sequence: Synthetic oligonucleotide
  Antisense strand to SEQ ID NO: 2199060
ugguugcauaacauuguac

SEQ ID NO: 2199062 - RNA, 19 nt, Artificial Sequence
  Description of Artificial Sequence: Synthetic oligonucleotide
  Sense strand starting at position 2913 of SEQ ID NO: 1883515
ucuuacuguuucccagagu

SEQ ID NO: 2199063 - RNA, 19 nt, Artificial Sequence
  Description of Artificial Sequence: Synthetic oligonucleotide
  Antisense strand to SEQ ID NO: 2199062
acucugggaaacaguaaga

SEQ ID NO: 2199064 - RNA, 19 nt, Artificial Sequence
  Description of Artificial Sequence: Synthetic oligonucleotide
  Sense strand starting at position 2343 of SEQ ID NO: 1883515
acuggaaauugcucgucua

SEQ ID NO: 2199065 - RNA, 19 nt, Artificial Sequence
  Description of Artificial Sequence: Synthetic oligonucleotide
  Antisense strand to SEQ ID NO: 2199064
uagacgagcaauuuccagu

SEQ ID NO: 2199066 - RNA, 19 nt, Artificial Sequence
  Description of Artificial Sequence: Synthetic oligonucleotide
  Sense strand starting at position 366 of SEQ ID NO: 1883515
cagaaaugaucggaaacca

SEQ ID NO: 2199067 - RNA, 19 nt, Artificial Sequence
  Description of Artificial Sequence: Synthetic oligonucleotide
  Antisense strand to SEQ ID NO: 2199066
ugguuuccgaucauuucug

SEQ ID NO: 2199068 - RNA, 19 nt, Artificial Sequence
  Description of Artificial Sequence: Synthetic oligonucleotide
  Sense strand starting at position 2890 of SEQ ID NO: 1883515
cucacuugguugcuguaaa

SEQ ID NO: 2199069 - RNA, 19 nt, Artificial Sequence
  Description of Artificial Sequence: Synthetic oligonucleotide
  Antisense strand to SEQ ID NO: 2199068
uuuacagcaaccaagugag

SEQ ID NO: 2199070 - RNA, 19 nt, Artificial Sequence
  Description of Artificial Sequence: Synthetic oligonucleotide
  Sense strand starting at position 2346 of SEQ ID NO: 1883515
ggaaauugcucgucuacuc

SEQ ID NO: 2199071 - RNA, 19 nt, Artificial Sequence
  Description of Artificial Sequence: Synthetic oligonucleotide
  Antisense strand to SEQ ID NO: 2199070
gaguagacgagcaauuucc

SEQ ID NO: 2199072 - RNA, 19 nt, Artificial Sequence
  Description of Artificial Sequence: Synthetic oligonucleotide
  Sense strand starting at position 2344 of SEQ ID NO: 1883515
cuggaaauugcucgucuac

SEQ ID NO: 2199073 - RNA, 19 nt, Artificial Sequence
  Description of Artificial Sequence: Synthetic oligonucleotide
  Antisense strand to SEQ ID NO: 2199072
guagacgagcaauuuccag

SEQ ID NO: 2199074 - RNA, 19 nt, Artificial Sequence
  Description of Artificial Sequence: Synthetic oligonucleotide
  Sense strand starting at position 3163 of SEQ ID NO: 1883515
cugggcaucugucugucaa

SEQ ID NO: 2199075 - RNA, 19 nt, Artificial Sequence
  Description of Artificial Sequence: Synthetic oligonucleotide
  Antisense strand to SEQ ID NO: 2199074
uugacagacagaugcccag

SEQ ID NO: 2199076 - RNA, 19 nt, Artificial Sequence
  Description of Artificial Sequence: Synthetic oligonucleotide
  Sense strand starting at position 2540 of SEQ ID NO: 1883515
acuccuauggucugucagu

SEQ ID NO: 2199077 - RNA, 19 nt, Artificial Sequence
  Description of Artificial Sequence: Synthetic oligonucleotide
  Antisense strand to SEQ ID NO: 2199076
acugacagaccauaggagu

SEQ ID NO: 2199078 - RNA, 19 nt, Artificial Sequence
  Description of Artificial Sequence: Synthetic oligonucleotide
  Sense strand starting at position 2610 of SEQ ID NO: 1883515
caguuccuccgaugaguuc

SEQ ID NO: 2199079 - RNA, 19 nt, Artificial Sequence
  Description of Artificial Sequence: Synthetic oligonucleotide
  Antisense strand to SEQ ID NO: 2199078
gaacucaucggaggaacug

SEQ ID NO: 2199080 - RNA, 19 nt, Artificial Sequence
  Description of Artificial Sequence: Synthetic oligonucleotide
  Sense strand starting at position 3164 of SEQ ID NO: 1883515
ugggcaucugucugucaac

SEQ ID NO: 2199081 - RNA, 19 nt, Artificial Sequence
  Description of Artificial Sequence: Synthetic oligonucleotide
  Antisense strand to SEQ ID NO: 2199080
guugacagacagaugccca

SEQ ID NO: 2199082 - RNA, 19 nt, Artificial Sequence
  Description of Artificial Sequence: Synthetic oligonucleotide
  Sense strand starting at position 3083 of SEQ ID NO: 1883515
ugcuuaugaugugccaauu

SEQ ID NO: 2199083 - RNA, 19 nt, Artificial Sequence
  Description of Artificial Sequence: Synthetic oligonucleotide
  Antisense strand to SEQ ID NO: 2199082
aauuggcacaucauaagca

SEQ ID NO: 2199084 - RNA, 19 nt, Artificial Sequence
  Description of Artificial Sequence: Synthetic oligonucleotide
  Sense strand starting at position 294 of SEQ ID NO: 1883515
gcccauacgcaacgagauu

SEQ ID NO: 2199085 - RNA, 19 nt, Artificial Sequence
  Description of Artificial Sequence: Synthetic oligonucleotide
  Antisense strand to SEQ ID NO: 2199084
aaucucguugcguaugggc

SEQ ID NO: 2199086 - RNA, 19 nt, Artificial Sequence
  Description of Artificial Sequence: Synthetic oligonucleotide
  Sense strand starting at position 765 of SEQ ID NO: 1883515
acgugaagccauugcgaga

SEQ ID NO: 2199087 - RNA, 19 nt, Artificial Sequence
  Description of Artificial Sequence: Synthetic oligonucleotide
  Antisense strand to SEQ ID NO: 2199086
ucucgcaauggcuucacgu

SEQ ID NO: 2199088 - RNA, 19 nt, Artificial Sequence
  Description of Artificial Sequence: Synthetic oligonucleotide
  Sense strand starting at position 938 of SEQ ID NO: 1883515
ucgggaaacuuagaucauc

SEQ ID NO: 2199089 - RNA, 19 nt, Artificial Sequence
  Description of Artificial Sequence: Synthetic oligonucleotide
  Antisense strand to SEQ ID NO: 2199088
gaugaucuaaguuucccga

SEQ ID NO: 2199090 - RNA, 19 nt, Artificial Sequence
  Description of Artificial Sequence: Synthetic oligonucleotide
  Sense strand starting at position 2333 of SEQ ID NO: 1883515
guaugaauauacuggaaau

SEQ ID NO: 2199091 - RNA, 19 nt, Artificial Sequence
  Description of Artificial Sequence: Synthetic oligonucleotide
  Antisense strand to SEQ ID NO: 2199090
auuuccaguauauucauac

SEQ ID NO: 2199092 - RNA, 19 nt, Artificial Sequence
  Description of Artificial Sequence: Synthetic oligonucleotide
  Sense strand starting at position 929 of SEQ ID NO: 1883515
ugagaaaccucgggaaacu

SEQ ID NO: 2199093 - RNA, 19 nt, Artificial Sequence
  Description of Artificial Sequence: Synthetic oligonucleotide
  Antisense strand to SEQ ID NO: 2199092
aguuucccgagguuucuca

SEQ ID NO: 2199094 - RNA, 19 nt, Artificial Sequence
  Description of Artificial Sequence: Synthetic oligonucleotide
  Sense strand starting at position 2362 of SEQ ID NO: 1883515
cucauccagugaugaacau

SEQ ID NO: 2199095 - RNA, 19 nt, Artificial Sequence
  Description of Artificial Sequence: Synthetic oligonucleotide
  Antisense strand to SEQ ID NO: 2199094
auguucaucacuggaugag

SEQ ID NO: 2199096 - RNA, 19 nt, Artificial Sequence
  Description of Artificial Sequence: Synthetic oligonucleotide
  Sense strand starting at position 2621 of SEQ ID NO: 1883515
augaguuccucuggacaua

SEQ ID NO: 2199097 - RNA, 19 nt, Artificial Sequence
  Description of Artificial Sequence: Synthetic oligonucleotide
  Antisense strand to SEQ ID NO: 2199096
uauguccagaggaacucau

SEQ ID NO: 2199098 - RNA, 19 nt, Artificial Sequence
  Description of Artificial Sequence: Synthetic oligonucleotide
  Sense strand starting at position 239 of SEQ ID NO: 1883515
ucuugagacucucaagugu

SEQ ID NO: 2199099 - RNA, 19 nt, Artificial Sequence
  Description of Artificial Sequence: Synthetic oligonucleotide
  Antisense strand to SEQ ID NO: 2199098
acacuugagagucucaaga

SEQ ID NO: 2199100 - RNA, 19 nt, Artificial Sequence
  Description of Artificial Sequence: Synthetic oligonucleotide
  Sense strand starting at position 2035 of SEQ ID NO: 1883515
uuaguacaauguuaugcaa

SEQ ID NO: 2199101 - RNA, 19 nt, Artificial Sequence
  Description of Artificial Sequence: Synthetic oligonucleotide
  Antisense strand to SEQ ID NO: 2199100
uugcauaacauuguacuaa

SEQ ID NO: 2199102 - RNA, 19 nt, Artificial Sequence
  Description of Artificial Sequence: Synthetic oligonucleotide
  Sense strand starting at position 1318 of SEQ ID NO: 1883515
gagucacacugcuagcaaa

SEQ ID NO: 2199103 - RNA, 19 nt, Artificial Sequence
  Description of Artificial Sequence: Synthetic oligonucleotide
  Antisense strand to SEQ ID NO: 2199102
uuugcuagcagugugacuc

SEQ ID NO: 2199104 - RNA, 19 nt, Artificial Sequence
  Description of Artificial Sequence: Synthetic oligonucleotide
  Sense strand starting at position 2914 of SEQ ID NO: 1883515
cuuacuguuucccagaguu

SEQ ID NO: 2199105 - RNA, 19 nt, Artificial Sequence
  Description of Artificial Sequence: Synthetic oligonucleotide
  Antisense strand to SEQ ID NO: 2199104
aacucugggaaacaguaag

SEQ ID NO: 2199106 - RNA, 19 nt, Artificial Sequence
  Description of Artificial Sequence: Synthetic oligonucleotide
  Sense strand starting at position 2608 of SEQ ID NO: 1883515
uccaguuccuccgaugagu

SEQ ID NO: 2199107 - RNA, 19 nt, Artificial Sequence
  Description of Artificial Sequence: Synthetic oligonucleotide
  Antisense strand to SEQ ID NO: 2199106
acucaucggaggaacugga

SEQ ID NO: 2199108 - RNA, 19 nt, Artificial Sequence
  Description of Artificial Sequence: Synthetic oligonucleotide
  Sense strand starting at position 243 of SEQ ID NO: 1883516
uccuaagugcuauaaagaa

SEQ ID NO: 2199109 - RNA, 19 nt, Artificial Sequence
  Description of Artificial Sequence: Synthetic oligonucleotide
  Antisense strand to SEQ ID NO: 2199108
uucuuuauagcacuuagga

SEQ ID NO: 2199110 - RNA, 19 nt, Artificial Sequence
  Description of Artificial Sequence: Synthetic oligonucleotide
  Sense strand starting at position 3710 of SEQ ID NO: 1883516
ucucuuugacauggaaaua

SEQ ID NO: 2199111 - RNA, 19 nt, Artificial Sequence
  Description of Artificial Sequence: Synthetic oligonucleotide
  Antisense strand to SEQ ID NO: 2199110
uauuuccaugucaaagaga

SEQ ID NO: 2199112 - RNA, 19 nt, Artificial Sequence
  Description of Artificial Sequence: Synthetic oligonucleotide
  Sense strand starting at position 2920 of SEQ ID NO: 1883516
gaauauccugggugggaau

SEQ ID NO: 2199113 - RNA, 19 nt, Artificial Sequence
  Description of Artificial Sequence: Synthetic oligonucleotide
  Antisense strand to SEQ ID NO: 2199112
auucccacccaggauauuc

SEQ ID NO: 2199114 - RNA, 19 nt, Artificial Sequence
  Description of Artificial Sequence: Synthetic oligonucleotide
  Sense strand starting at position 2810 of SEQ ID NO: 1883516
gugguucucgcaguaccau

SEQ ID NO: 2199115 - RNA, 19 nt, Artificial Sequence
  Description of Artificial Sequence: Synthetic oligonucleotide
  Antisense strand to SEQ ID NO: 2199114
augguacugcgagaaccac

SEQ ID NO: 2199116 - RNA, 19 nt, Artificial Sequence
  Description of Artificial Sequence: Synthetic oligonucleotide
  Sense strand starting at position 2704 of SEQ ID NO: 1883516
uggugugauuucguaaaca

SEQ ID NO: 2199117 - RNA, 19 nt, Artificial Sequence
  Description of Artificial Sequence: Synthetic oligonucleotide
  Antisense strand to SEQ ID NO: 2199116
uguuuacgaaaucacacca

SEQ ID NO: 2199118 - RNA, 19 nt, Artificial Sequence
  Description of Artificial Sequence: Synthetic oligonucleotide
  Sense strand starting at position 3034 of SEQ ID NO: 1883516
ggagaauuauugcuaacca

SEQ ID NO: 2199119 - RNA, 19 nt, Artificial Sequence
  Description of Artificial Sequence: Synthetic oligonucleotide
  Antisense strand to SEQ ID NO: 2199118
ugguuagcaauaauucucc

SEQ ID NO: 2199120 - RNA, 19 nt, Artificial Sequence
  Description of Artificial Sequence: Synthetic oligonucleotide
  Sense strand starting at position 3295 of SEQ ID NO: 1883516
gccugagugauugaaacug

SEQ ID NO: 2199121 - RNA, 19 nt, Artificial Sequence
  Description of Artificial Sequence: Synthetic oligonucleotide
  Antisense strand to SEQ ID NO: 2199120
caguuucaaucacucaggc

SEQ ID NO: 2199122 - RNA, 19 nt, Artificial Sequence
  Description of Artificial Sequence: Synthetic oligonucleotide
  Sense strand starting at position 15 of SEQ ID NO: 1883516
uuucuuccaggaugaacua

SEQ ID NO: 2199123 - RNA, 19 nt, Artificial Sequence
  Description of Artificial Sequence: Synthetic oligonucleotide
  Antisense strand to SEQ ID NO: 2199122
uaguucauccuggaagaaa

SEQ ID NO: 2199124 - RNA, 19 nt, Artificial Sequence
  Description of Artificial Sequence: Synthetic oligonucleotide
  Sense strand starting at position 1214 of SEQ ID NO: 1883516
ccagaaaggaucggugaug

SEQ ID NO: 2199125 - RNA, 19 nt, Artificial Sequence
  Description of Artificial Sequence: Synthetic oligonucleotide
  Antisense strand to SEQ ID NO: 2199124
caucaccgauccuuucugg

SEQ ID NO: 2199126 - RNA, 19 nt, Artificial Sequence
  Description of Artificial Sequence: Synthetic oligonucleotide
  Sense strand starting at position 3446 of SEQ ID NO: 1883516
aacagaauccaagguaguu

SEQ ID NO: 2199127 - RNA, 19 nt, Artificial Sequence
  Description of Artificial Sequence: Synthetic oligonucleotide
  Antisense strand to SEQ ID NO: 2199126
aacuaccuuggauucuguu

SEQ ID NO: 2199128 - RNA, 19 nt, Artificial Sequence
  Description of Artificial Sequence: Synthetic oligonucleotide
  Sense strand starting at position 431 of SEQ ID NO: 1883516
gguaaauucugagugaaau

SEQ ID NO: 2199129 - RNA, 19 nt, Artificial Sequence
  Description of Artificial Sequence: Synthetic oligonucleotide
  Antisense strand to SEQ ID NO: 2199128
auuucacucagaauuuacc

SEQ ID NO: 2199130 - RNA, 19 nt, Artificial Sequence
  Description of Artificial Sequence: Synthetic oligonucleotide
  Sense strand starting at position 167 of SEQ ID NO: 1883516
aggaucugguucccauaga

SEQ ID NO: 2199131 - RNA, 19 nt, Artificial Sequence
  Description of Artificial Sequence: Synthetic oligonucleotide
  Antisense strand to SEQ ID NO: 2199130
ucuaugggaaccagauccu

SEQ ID NO: 2199132 - RNA, 19 nt, Artificial Sequence
  Description of Artificial Sequence: Synthetic oligonucleotide
  Sense strand starting at position 490 of SEQ ID NO: 1883516
uauuuagaguggcuacgua

SEQ ID NO: 2199133 - RNA, 19 nt, Artificial Sequence
  Description of Artificial Sequence: Synthetic oligonucleotide
  Antisense strand to SEQ ID NO: 2199132
uacguagccacucuaaaua

SEQ ID NO: 2199134 - RNA, 19 nt, Artificial Sequence
  Description of Artificial Sequence: Synthetic oligonucleotide
  Sense strand starting at position 1213 of SEQ ID NO: 1883516
uccagaaaggaucggugau

SEQ ID NO: 2199135 - RNA, 19 nt, Artificial Sequence
  Description of Artificial Sequence: Synthetic oligonucleotide
  Antisense strand to SEQ ID NO: 2199134
aucaccgauccuuucugga

SEQ ID NO: 2199136 - RNA, 19 nt, Artificial Sequence
  Description of Artificial Sequence: Synthetic oligonucleotide
  Sense strand starting at position 2919 of SEQ ID NO: 1883516
cgaauauccugggugggaa

SEQ ID NO: 2199137 - RNA, 19 nt, Artificial Sequence
  Description of Artificial Sequence: Synthetic oligonucleotide
  Antisense strand to SEQ ID NO: 2199136
uucccacccaggauauucg

SEQ ID NO: 2199138 - RNA, 19 nt, Artificial Sequence
  Description of Artificial Sequence: Synthetic oligonucleotide
  Sense strand starting at position 3270 of SEQ ID NO: 1883516
gugaguuagagguagaggu

SEQ ID NO: 2199139 - RNA, 19 nt, Artificial Sequence
  Description of Artificial Sequence: Synthetic oligonucleotide
  Antisense strand to SEQ ID NO: 2199138
accucuaccucuaacucac

SEQ ID NO: 2199140 - RNA, 19 nt, Artificial Sequence
  Description of Artificial Sequence: Synthetic oligonucleotide
  Sense strand starting at position 432 of SEQ ID NO: 1883516
guaaauucugagugaaauc

SEQ ID NO: 2199141 - RNA, 19 nt, Artificial Sequence
  Description of Artificial Sequence: Synthetic oligonucleotide
  Antisense strand to SEQ ID NO: 2199140
gauuucacucagaauuuac

SEQ ID NO: 2199142 - RNA, 19 nt, Artificial Sequence
  Description of Artificial Sequence: Synthetic oligonucleotide
  Sense strand starting at position 295 of SEQ ID NO: 1883516
ggaagcauuucugaggaag

SEQ ID NO: 2199143 - RNA, 19 nt, Artificial Sequence
  Description of Artificial Sequence: Synthetic oligonucleotide
  Antisense strand to SEQ ID NO: 2199142
cuuccucagaaaugcuucc

SEQ ID NO: 2199144 - RNA, 19 nt, Artificial Sequence
  Description of Artificial Sequence: Synthetic oligonucleotide
  Sense strand starting at position 508 of SEQ ID NO: 1883516
aagagugaucgcuaaaucu

SEQ ID NO: 2199145 - RNA, 19 nt, Artificial Sequence
  Description of Artificial Sequence: Synthetic oligonucleotide
  Antisense strand to SEQ ID NO: 2199144
agauuuagcgaucacucuu

SEQ ID NO: 2199146 - RNA, 19 nt, Artificial Sequence
  Description of Artificial Sequence: Synthetic oligonucleotide
  Sense strand starting at position 3353 of SEQ ID NO: 1883516
guagaacuguuccugagaa

SEQ ID NO: 2199147 - RNA, 19 nt, Artificial Sequence
  Description of Artificial Sequence: Synthetic oligonucleotide
  Antisense strand to SEQ ID NO: 2199146
uucucaggaacaguucuac

SEQ ID NO: 2199148 - RNA, 19 nt, Artificial Sequence
  Description of Artificial Sequence: Synthetic oligonucleotide
  Sense strand starting at position 2918 of SEQ ID NO: 1883516
ccgaauauccuggguggga

SEQ ID NO: 2199149 - RNA, 19 nt, Artificial Sequence
  Description of Artificial Sequence: Synthetic oligonucleotide
  Antisense strand to SEQ ID NO: 2199148
ucccacccaggauauucgg

SEQ ID NO: 2199150 - RNA, 19 nt, Artificial Sequence
  Description of Artificial Sequence: Synthetic oligonucleotide
  Sense strand starting at position 3304 of SEQ ID NO: 1883516
auugaaacugcucgggaca

SEQ ID NO: 2199151 - RNA, 19 nt, Artificial Sequence
  Description of Artificial Sequence: Synthetic oligonucleotide
  Antisense strand to SEQ ID NO: 2199150
ugucccgagcaguuucaau

SEQ ID NO: 2199152 - RNA, 19 nt, Artificial Sequence
  Description of Artificial Sequence: Synthetic oligonucleotide
  Sense strand starting at position 3305 of SEQ ID NO: 1883516
uugaaacugcucgggacaa

SEQ ID NO: 2199153 - RNA, 19 nt, Artificial Sequence
  Description of Artificial Sequence: Synthetic oligonucleotide
  Antisense strand to SEQ ID NO: 2199152
uugucccgagcaguuucaa

SEQ ID NO: 2199154 - RNA, 19 nt, Artificial Sequence
  Description of Artificial Sequence: Synthetic oligonucleotide
  Sense strand starting at position 3127 of SEQ ID NO: 1883516
guggaggacccgugagaua

SEQ ID NO: 2199155 - RNA, 19 nt, Artificial Sequence
  Description of Artificial Sequence: Synthetic oligonucleotide
  Antisense strand to SEQ ID NO: 2199154
uaucucacggguccuccac

SEQ ID NO: 2199156 - RNA, 19 nt, Artificial Sequence
  Description of Artificial Sequence: Synthetic oligonucleotide
  Sense strand starting at position 3331 of SEQ ID NO: 1883516
auguuuagcaaacgacaga

SEQ ID NO: 2199157 - RNA, 19 nt, Artificial Sequence
  Description of Artificial Sequence: Synthetic oligonucleotide
  Antisense strand to SEQ ID NO: 2199156
ucugucguuugcuaaacau

SEQ ID NO: 2199158 - RNA, 19 nt, Artificial Sequence
  Description of Artificial Sequence: Synthetic oligonucleotide
  Sense strand starting at position 3631 of SEQ ID NO: 1883516
augcuucgccaggaauaua

SEQ ID NO: 2199159 - RNA, 19 nt, Artificial Sequence
  Description of Artificial Sequence: Synthetic oligonucleotide
  Antisense strand to SEQ ID NO: 2199158
uauauuccuggcgaagcau

SEQ ID NO: 2199160 - RNA, 19 nt, Artificial Sequence
  Description of Artificial Sequence: Synthetic oligonucleotide
  Sense strand starting at position 3264 of SEQ ID NO: 1883516
uucuuugugaguuagaggu

SEQ ID NO: 2199161 - RNA, 19 nt, Artificial Sequence
  Description of Artificial Sequence: Synthetic oligonucleotide
  Antisense strand to SEQ ID NO: 2199160
accucuaacucacaaagaa

SEQ ID NO: 2199162 - RNA, 19 nt, Artificial Sequence
  Description of Artificial Sequence: Synthetic oligonucleotide
  Sense strand starting at position 1477 of SEQ ID NO: 1883516
gcggcugucgugaagguua

SEQ ID NO: 2199163 - RNA, 19 nt, Artificial Sequence
  Description of Artificial Sequence: Synthetic oligonucleotide
  Antisense strand to SEQ ID NO: 2199162
uaaccuucacgacagccgc

SEQ ID NO: 2199164 - RNA, 19 nt, Artificial Sequence
  Description of Artificial Sequence: Synthetic oligonucleotide
  Sense strand starting at position 2855 of SEQ ID NO: 1883516
cccucaaucgugggaaacu

SEQ ID NO: 2199165 - RNA, 19 nt, Artificial Sequence
  Description of Artificial Sequence: Synthetic oligonucleotide
  Antisense strand to SEQ ID NO: 2199164
aguuucccacgauugaggg

SEQ ID NO: 2199166 - RNA, 19 nt, Artificial Sequence
  Description of Artificial Sequence: Synthetic oligonucleotide
  Sense strand starting at position 3926 of SEQ ID NO: 1883516
ugacaagacccugguuguu

SEQ ID NO: 2199167 - RNA, 19 nt, Artificial Sequence
  Description of Artificial Sequence: Synthetic oligonucleotide
  Antisense strand to SEQ ID NO: 2199166
aacaaccagggucuuguca

SEQ ID NO: 2199168 - RNA, 19 nt, Artificial Sequence
  Description of Artificial Sequence: Synthetic oligonucleotide
  Sense strand starting at position 2681 of SEQ ID NO: 1883516
gcgcauucggcacuuguuu

SEQ ID NO: 2199169 - RNA, 19 nt, Artificial Sequence
  Description of Artificial Sequence: Synthetic oligonucleotide
  Antisense strand to SEQ ID NO: 2199168
aaacaagugccgaaugcgc

SEQ ID NO: 2199170 - RNA, 19 nt, Artificial Sequence
  Description of Artificial Sequence: Synthetic oligonucleotide
  Sense strand starting at position 3392 of SEQ ID NO: 1883516
agucaucucagacgacagu

SEQ ID NO: 2199171 - RNA, 19 nt, Artificial Sequence
  Description of Artificial Sequence: Synthetic oligonucleotide
  Antisense strand to SEQ ID NO: 2199170
acugucgucugagaugacu

SEQ ID NO: 2199172 - RNA, 19 nt, Artificial Sequence
  Description of Artificial Sequence: Synthetic oligonucleotide
  Sense strand starting at position 3262 of SEQ ID NO: 1883516
cuuucuuugugaguuagag

SEQ ID NO: 2199173 - RNA, 19 nt, Artificial Sequence
  Description of Artificial Sequence: Synthetic oligonucleotide
  Antisense strand to SEQ ID NO: 2199172
cucuaacucacaaagaaag

SEQ ID NO: 2199174 - RNA, 19 nt, Artificial Sequence
  Description of Artificial Sequence: Synthetic oligonucleotide
  Sense strand starting at position 3293 of SEQ ID NO: 1883516
cggccugagugauugaaac

SEQ ID NO: 2199175 - RNA, 19 nt, Artificial Sequence
  Description of Artificial Sequence: Synthetic oligonucleotide
  Antisense strand to SEQ ID NO: 2199174
guuucaaucacucaggccg

SEQ ID NO: 2199176 - RNA, 19 nt, Artificial Sequence
  Description of Artificial Sequence: Synthetic oligonucleotide
  Sense strand starting at position 2797 of SEQ ID NO: 1883516
acgacuuagacaugugguu

SEQ ID NO: 2199177 - RNA, 19 nt, Artificial Sequence
  Description of Artificial Sequence: Synthetic oligonucleotide
  Antisense strand to SEQ ID NO: 2199176
aaccacaugucuaagucgu

SEQ ID NO: 2199178 - RNA, 19 nt, Artificial Sequence
  Description of Artificial Sequence: Synthetic oligonucleotide
  Sense strand starting at position 3487 of SEQ ID NO: 1883516
ugacacagccaguguaauu

SEQ ID NO: 2199179 - RNA, 19 nt, Artificial Sequence
  Description of Artificial Sequence: Synthetic oligonucleotide
  Antisense strand to SEQ ID NO: 2199178
aauuacacuggcuguguca

SEQ ID NO: 2199180 - RNA, 19 nt, Artificial Sequence
  Description of Artificial Sequence: Synthetic oligonucleotide
  Sense strand starting at position 2359 of SEQ ID NO: 1883516
ggucccagucugcaguuaa

SEQ ID NO: 2199181 - RNA, 19 nt, Artificial Sequence
  Description of Artificial Sequence: Synthetic oligonucleotide
  Antisense strand to SEQ ID NO: 2199180
uuaacugcagacugggacc

SEQ ID NO: 2199182 - RNA, 19 nt, Artificial Sequence
  Description of Artificial Sequence: Synthetic oligonucleotide
  Sense strand starting at position 3701 of SEQ ID NO: 1883516
uguuaauugucucuuugac

SEQ ID NO: 2199183 - RNA, 19 nt, Artificial Sequence
  Description of Artificial Sequence: Synthetic oligonucleotide
  Antisense strand to SEQ ID NO: 2199182
gucaaagagacaauuaaca

SEQ ID NO: 2199184 - RNA, 19 nt, Artificial Sequence
  Description of Artificial Sequence: Synthetic oligonucleotide
  Sense strand starting at position 3497 of SEQ ID NO: 1883516
aguguaauuuccuauaacc

SEQ ID NO: 2199185 - RNA, 19 nt, Artificial Sequence
  Description of Artificial Sequence: Synthetic oligonucleotide
  Antisense strand to SEQ ID NO: 2199184
gguuauaggaaauuacacu

SEQ ID NO: 2199186 - RNA, 19 nt, Artificial Sequence
  Description of Artificial Sequence: Synthetic oligonucleotide
  Sense strand starting at position 3157 of SEQ ID NO: 1883516
ggcagcgacuuccugaaau

SEQ ID NO: 2199187 - RNA, 19 nt, Artificial Sequence
  Description of Artificial Sequence: Synthetic oligonucleotide
  Antisense strand to SEQ ID NO: 2199186
auuucaggaagucgcugcc

SEQ ID NO: 2199188 - RNA, 19 nt, Artificial Sequence
  Description of Artificial Sequence: Synthetic oligonucleotide
  Sense strand starting at position 3305 of SEQ ID NO: 1883517
acugcagugucauuuacag

SEQ ID NO: 2199189 - RNA, 19 nt, Artificial Sequence
  Description of Artificial Sequence: Synthetic oligonucleotide
  Antisense strand to SEQ ID NO: 2199188
cuguaaaugacacugcagu

SEQ ID NO: 2199190 - RNA, 19 nt, Artificial Sequence
  Description of Artificial Sequence: Synthetic oligonucleotide
  Sense strand starting at position 2595 of SEQ ID NO: 1883517
guggucuucccugaggaaa

SEQ ID NO: 2199191 - RNA, 19 nt, Artificial Sequence
  Description of Artificial Sequence: Synthetic oligonucleotide
  Antisense strand to SEQ ID NO: 2199190
uuuccucagggaagaccac

SEQ ID NO: 2199192 - RNA, 19 nt, Artificial Sequence
  Description of Artificial Sequence: Synthetic oligonucleotide
  Sense strand starting at position 3234 of SEQ ID NO: 1883517
cugagaaccugcccuaaau

SEQ ID NO: 2199193 - RNA, 19 nt, Artificial Sequence
  Description of Artificial Sequence: Synthetic oligonucleotide
  Antisense strand to SEQ ID NO: 2199192
auuuagggcagguucucag

SEQ ID NO: 2199194 - RNA, 19 nt, Artificial Sequence
  Description of Artificial Sequence: Synthetic oligonucleotide
  Sense strand starting at position 2576 of SEQ ID NO: 1883517
aggcaucuagcccaaacuu

SEQ ID NO: 2199195 - RNA, 19 nt, Artificial Sequence
  Description of Artificial Sequence: Synthetic oligonucleotide
  Antisense strand to SEQ ID NO: 2199194
aaguuugggcuagaugccu

SEQ ID NO: 2199196 - RNA, 19 nt, Artificial Sequence
  Description of Artificial Sequence: Synthetic oligonucleotide
  Sense strand starting at position 3555 of SEQ ID NO: 1883517
gcuguuauacuuuaugaac

SEQ ID NO: 2199197 - RNA, 19 nt, Artificial Sequence
  Description of Artificial Sequence: Synthetic oligonucleotide
  Antisense strand to SEQ ID NO: 2199196
guucauaaaguauaacagc

SEQ ID NO: 2199198 - RNA, 19 nt, Artificial Sequence
  Description of Artificial Sequence: Synthetic oligonucleotide
  Sense strand starting at position 3982 of SEQ ID NO: 1883517
cuguacucuguugagaagu

SEQ ID NO: 2199199 - RNA, 19 nt, Artificial Sequence
  Description of Artificial Sequence: Synthetic oligonucleotide
  Antisense strand to SEQ ID NO: 2199198
acuucucaacagaguacag

SEQ ID NO: 2199200 - RNA, 19 nt, Artificial Sequence
  Description of Artificial Sequence: Synthetic oligonucleotide
  Sense strand starting at position 3283 of SEQ ID NO: 1883517
cccuuugugcuccaggaua

SEQ ID NO: 2199201 - RNA, 19 nt, Artificial Sequence
  Description of Artificial Sequence: Synthetic oligonucleotide
  Antisense strand to SEQ ID NO: 2199200
uauccuggagcacaaaggg

SEQ ID NO: 2199202 - RNA, 19 nt, Artificial Sequence
  Description of Artificial Sequence: Synthetic oligonucleotide
  Sense strand starting at position 2594 of SEQ ID NO: 1883517
uguggucuucccugaggaa

SEQ ID NO: 2199203 - RNA, 19 nt, Artificial Sequence
  Description of Artificial Sequence: Synthetic oligonucleotide
  Antisense strand to SEQ ID NO: 2199202
uuccucagggaagaccaca

SEQ ID NO: 2199204 - RNA, 19 nt, Artificial Sequence
  Description of Artificial Sequence: Synthetic oligonucleotide
  Sense strand starting at position 3472 of SEQ ID NO: 1883517
agaagaagguuacagagau

SEQ ID NO: 2199205 - RNA, 19 nt, Artificial Sequence
  Description of Artificial Sequence: Synthetic oligonucleotide
  Antisense strand to SEQ ID NO: 2199204
aucucuguaaccuucuucu

SEQ ID NO: 2199206 - RNA, 19 nt, Artificial Sequence
  Description of Artificial Sequence: Synthetic oligonucleotide
  Sense strand starting at position 3942 of SEQ ID NO: 1883517
gcccacauucuuuguggaa

SEQ ID NO: 2199207 - RNA, 19 nt, Artificial Sequence
  Description of Artificial Sequence: Synthetic oligonucleotide
  Antisense strand to SEQ ID NO: 2199206
uuccacaaagaaugugggc

SEQ ID NO: 2199208 - RNA, 19 nt, Artificial Sequence
  Description of Artificial Sequence: Synthetic oligonucleotide
  Sense strand starting at position 776 of SEQ ID NO: 1883517
ugaccuguccuuugaguca

SEQ ID NO: 2199209 - RNA, 19 nt, Artificial Sequence
  Description of Artificial Sequence: Synthetic oligonucleotide
  Antisense strand to SEQ ID NO: 2199208
ugacucaaaggacagguca

SEQ ID NO: 2199210 - RNA, 19 nt, Artificial Sequence
  Description of Artificial Sequence: Synthetic oligonucleotide
  Sense strand starting at position 3285 of SEQ ID NO: 1883517
cuuugugcuccaggauauu

SEQ ID NO: 2199211 - RNA, 19 nt, Artificial Sequence
  Description of Artificial Sequence: Synthetic oligonucleotide
  Antisense strand to SEQ ID NO: 2199210
aauauccuggagcacaaag

SEQ ID NO: 2199212 - RNA, 19 nt, Artificial Sequence
  Description of Artificial Sequence: Synthetic oligonucleotide
  Sense strand starting at position 774 of SEQ ID NO: 1883517
ggugaccuguccuuugagu

SEQ ID NO: 2199213 - RNA, 19 nt, Artificial Sequence
  Description of Artificial Sequence: Synthetic oligonucleotide
  Antisense strand to SEQ ID NO: 2199212
acucaaaggacaggucacc

SEQ ID NO: 2199214 - RNA, 19 nt, Artificial Sequence
  Description of Artificial Sequence: Synthetic oligonucleotide
  Sense strand starting at position 529 of SEQ ID NO: 1883517
gugcgaggucugcauugua

SEQ ID NO: 2199215 - RNA, 19 nt, Artificial Sequence
  Description of Artificial Sequence: Synthetic oligonucleotide
  Antisense strand to SEQ ID NO: 2199214
uacaaugcagaccucgcac

SEQ ID NO: 2199216 - RNA, 19 nt, Artificial Sequence
  Description of Artificial Sequence: Synthetic oligonucleotide
  Sense strand starting at position 2597 of SEQ ID NO: 1883517
ggucuucccugaggaaaga

SEQ ID NO: 2199217 - RNA, 19 nt, Artificial Sequence
  Description of Artificial Sequence: Synthetic oligonucleotide
  Antisense strand to SEQ ID NO: 2199216
ucuuuccucagggaagacc

SEQ ID NO: 2199218 - RNA, 19 nt, Artificial Sequence
  Description of Artificial Sequence: Synthetic oligonucleotide
  Sense strand starting at position 3223 of SEQ ID NO: 1883517
cuacucuaguucugagaac

SEQ ID NO: 2199219 - RNA, 19 nt, Artificial Sequence
  Description of Artificial Sequence: Synthetic oligonucleotide
  Antisense strand to SEQ ID NO: 2199218
guucucagaacuagaguag

SEQ ID NO: 2199220 - RNA, 19 nt, Artificial Sequence
  Description of Artificial Sequence: Synthetic oligonucleotide
  Sense strand starting at position 3981 of SEQ ID NO: 1883517
ucuguacucuguugagaag

SEQ ID NO: 2199221 - RNA, 19 nt, Artificial Sequence
  Description of Artificial Sequence: Synthetic oligonucleotide
  Antisense strand to SEQ ID NO: 2199220
cuucucaacagaguacaga

SEQ ID NO: 2199222 - RNA, 19 nt, Artificial Sequence
  Description of Artificial Sequence: Synthetic oligonucleotide
  Sense strand starting at position 3548 of SEQ ID NO: 1883517
ggguacagcuguuauacuu

SEQ ID NO: 2199223 - RNA, 19 nt, Artificial Sequence
  Description of Artificial Sequence: Synthetic oligonucleotide
  Antisense strand to SEQ ID NO: 2199222
aaguauaacagcuguaccc

SEQ ID NO: 2199224 - RNA, 19 nt, Artificial Sequence
  Description of Artificial Sequence: Synthetic oligonucleotide
  Sense strand starting at position 2040 of SEQ ID NO: 1883518
ucuuuaugagaucaucagu

SEQ ID NO: 2199225 - RNA, 19 nt, Artificial Sequence
  Description of Artificial Sequence: Synthetic oligonucleotide
  Antisense strand to SEQ ID NO: 2199224
acugaugaucucauaaaga

SEQ ID NO: 2199226 - RNA, 19 nt, Artificial Sequence
  Description of Artificial Sequence: Synthetic oligonucleotide
  Sense strand starting at position 2184 of SEQ ID NO: 1883518
uguguucuugugaggguga

SEQ ID NO: 2199227 - RNA, 19 nt, Artificial Sequence
  Description of Artificial Sequence: Synthetic oligonucleotide
  Antisense strand to SEQ ID NO: 2199226
ucacccucacaagaacaca

SEQ ID NO: 2199228 - RNA, 19 nt, Artificial Sequence
  Description of Artificial Sequence: Synthetic oligonucleotide
  Sense strand starting at position 2370 of SEQ ID NO: 1883518
ucucuuuguguguuuguau

SEQ ID NO: 2199229 - RNA, 19 nt, Artificial Sequence
  Description of Artificial Sequence: Synthetic oligonucleotide
  Antisense strand to SEQ ID NO: 2199228
auacaaacacacaaagaga

SEQ ID NO: 2199230 - RNA, 19 nt, Artificial Sequence
  Description of Artificial Sequence: Synthetic oligonucleotide
  Sense strand starting at position 3118 of SEQ ID NO: 1883518
auuauugucagguugcguu

SEQ ID NO: 2199231 - RNA, 19 nt, Artificial Sequence
  Description of Artificial Sequence: Synthetic oligonucleotide
  Antisense strand to SEQ ID NO: 2199230
aacgcaaccugacaauaau

SEQ ID NO: 2199232 - RNA, 19 nt, Artificial Sequence
  Description of Artificial Sequence: Synthetic oligonucleotide
  Sense strand starting at position 3056 of SEQ ID NO: 1883518
ugucuucugccauuguguu

SEQ ID NO: 2199233 - RNA, 19 nt, Artificial Sequence
  Description of Artificial Sequence: Synthetic oligonucleotide
  Antisense strand to SEQ ID NO: 2199232
aacacaauggcagaagaca

SEQ ID NO: 2199234 - RNA, 19 nt, Artificial Sequence
  Description of Artificial Sequence: Synthetic oligonucleotide
  Sense strand starting at position 2970 of SEQ ID NO: 1883518
gccauuguuguguuauugu

SEQ ID NO: 2199235 - RNA, 19 nt, Artificial Sequence
  Description of Artificial Sequence: Synthetic oligonucleotide
  Antisense strand to SEQ ID NO: 2199234
acaauaacacaacaauggc

SEQ ID NO: 2199236 - RNA, 19 nt, Artificial Sequence
  Description of Artificial Sequence: Synthetic oligonucleotide
  Sense strand starting at position 2480 of SEQ ID NO: 1883518
guuaccaucccugaaguga

SEQ ID NO: 2199237 - RNA, 19 nt, Artificial Sequence
  Description of Artificial Sequence: Synthetic oligonucleotide
  Antisense strand to SEQ ID NO: 2199236
ucacuucagggaugguaac

SEQ ID NO: 2199238 - RNA, 19 nt, Artificial Sequence
  Description of Artificial Sequence: Synthetic oligonucleotide
  Sense strand starting at position 291 of SEQ ID NO: 1883518
ugaucauugguguacaauu

SEQ ID NO: 2199239 - RNA, 19 nt, Artificial Sequence
  Description of Artificial Sequence: Synthetic oligonucleotide
  Antisense strand to SEQ ID NO: 2199238
aauuguacaccaaugauca

SEQ ID NO: 2199240 - RNA, 19 nt, Artificial Sequence
  Description of Artificial Sequence: Synthetic oligonucleotide
  Sense strand starting at position 247 of SEQ ID NO: 1883518
gguuccugacaaggacuua

SEQ ID NO: 2199241 - RNA, 19 nt, Artificial Sequence
  Description of Artificial Sequence: Synthetic oligonucleotide
  Antisense strand to SEQ ID NO: 2199240
uaaguccuugucaggaacc

SEQ ID NO: 2199242 - RNA, 19 nt, Artificial Sequence
  Description of Artificial Sequence: Synthetic oligonucleotide
  Sense strand starting at position 2838 of SEQ ID NO: 1883518
ccugcugcuugauuuaauu

SEQ ID NO: 2199243 - RNA, 19 nt, Artificial Sequence
  Description of Artificial Sequence: Synthetic oligonucleotide
  Antisense strand to SEQ ID NO: 2199242
aauuaaaucaagcagcagg

SEQ ID NO: 2199244 - RNA, 19 nt, Artificial Sequence
  Description of Artificial Sequence: Synthetic oligonucleotide
  Sense strand starting at position 673 of SEQ ID NO: 1883518
agucuuaucgaacagcaaa

SEQ ID NO: 2199245 - RNA, 19 nt, Artificial Sequence
  Description of Artificial Sequence: Synthetic oligonucleotide
  Antisense strand to SEQ ID NO: 2199244
uuugcuguucgauaagacu

SEQ ID NO: 2199246 - RNA, 19 nt, Artificial Sequence
  Description of Artificial Sequence: Synthetic oligonucleotide
  Sense strand starting at position 1617 of SEQ ID NO: 1883518
acagguuaaucagcuggaa

SEQ ID NO: 2199247 - RNA, 19 nt, Artificial Sequence
  Description of Artificial Sequence: Synthetic oligonucleotide
  Antisense strand to SEQ ID NO: 2199246
uuccagcugauuaaccugu

SEQ ID NO: 2199248 - RNA, 19 nt, Artificial Sequence
  Description of Artificial Sequence: Synthetic oligonucleotide
  Sense strand starting at position 1415 of SEQ ID NO: 1883518
auuguaucugggugaaagg

SEQ ID NO: 2199249 - RNA, 19 nt, Artificial Sequence
  Description of Artificial Sequence: Synthetic oligonucleotide
  Antisense strand to SEQ ID NO: 2199248
ccuuucacccagauacaau

SEQ ID NO: 2199250 - RNA, 19 nt, Artificial Sequence
  Description of Artificial Sequence: Synthetic oligonucleotide
  Sense strand starting at position 942 of SEQ ID NO: 1883518
ccagucuugccugagaaca

SEQ ID NO: 2199251 - RNA, 19 nt, Artificial Sequence
  Description of Artificial Sequence: Synthetic oligonucleotide
  Antisense strand to SEQ ID NO: 2199250
uguucucaggcaagacugg

SEQ ID NO: 2199252 - RNA, 19 nt, Artificial Sequence
  Description of Artificial Sequence: Synthetic oligonucleotide
  Sense strand starting at position 2032 of SEQ ID NO: 1883518
uggccucuucuuuaugaga

SEQ ID NO: 2199253 - RNA, 19 nt, Artificial Sequence
  Description of Artificial Sequence: Synthetic oligonucleotide
  Antisense strand to SEQ ID NO: 2199252
ucucauaaagaagaggcca

SEQ ID NO: 2199254 - RNA, 19 nt, Artificial Sequence
  Description of Artificial Sequence: Synthetic oligonucleotide
  Sense strand starting at position 1414 of SEQ ID NO: 1883518
uauuguaucugggugaaag

SEQ ID NO: 2199255 - RNA, 19 nt, Artificial Sequence
  Description of Artificial Sequence: Synthetic oligonucleotide
  Antisense strand to SEQ ID NO: 2199254
cuuucacccagauacaaua

SEQ ID NO: 2199256 - RNA, 19 nt, Artificial Sequence
  Description of Artificial Sequence: Synthetic oligonucleotide
  Sense strand starting at position 1619 of SEQ ID NO: 1883518
agguuaaucagcuggaaug

SEQ ID NO: 2199257 - RNA, 19 nt, Artificial Sequence
  Description of Artificial Sequence: Synthetic oligonucleotide
  Antisense strand to SEQ ID NO: 2199256
cauuccagcugauuaaccu

SEQ ID NO: 2199258 - RNA, 19 nt, Artificial Sequence
  Description of Artificial Sequence: Synthetic oligonucleotide
  Sense strand starting at position 3295 of SEQ ID NO: 1883518
uggucaguguugauguguu

SEQ ID NO: 2199259 - RNA, 19 nt, Artificial Sequence
  Description of Artificial Sequence: Synthetic oligonucleotide
  Antisense strand to SEQ ID NO: 2199258
aacacaucaacacugacca

SEQ ID NO: 2199260 - RNA, 19 nt, Artificial Sequence
  Description of Artificial Sequence: Synthetic oligonucleotide
  Sense strand starting at position 1316 of SEQ ID NO: 1883518
ugucucuggcuugagauga

SEQ ID NO: 2199261 - RNA, 19 nt, Artificial Sequence
  Description of Artificial Sequence: Synthetic oligonucleotide
  Antisense strand to SEQ ID NO: 2199260
ucaucucaagccagagaca

SEQ ID NO: 2199262 - RNA, 19 nt, Artificial Sequence
  Description of Artificial Sequence: Synthetic oligonucleotide
  Sense strand starting at position 2164 of SEQ ID NO: 1883518
ccucucugagagugugaaa

SEQ ID NO: 2199263 - RNA, 19 nt, Artificial Sequence
  Description of Artificial Sequence: Synthetic oligonucleotide
  Antisense strand to SEQ ID NO: 2199262
uuucacacucucagagagg

SEQ ID NO: 2199264 - RNA, 19 nt, Artificial Sequence
  Description of Artificial Sequence: Synthetic oligonucleotide
  Sense strand starting at position 1326 of SEQ ID NO: 1883518
uugagaugaucugucuucu

SEQ ID NO: 2199265 - RNA, 19 nt, Artificial Sequence
  Description of Artificial Sequence: Synthetic oligonucleotide
  Antisense strand to SEQ ID NO: 2199264
agaagacagaucaucucaa

SEQ ID NO: 2199266 - RNA, 19 nt, Artificial Sequence
  Description of Artificial Sequence: Synthetic oligonucleotide
  Sense strand starting at position 668 of SEQ ID NO: 1883518
ccacuagucuuaucgaaca

SEQ ID NO: 2199267 - RNA, 19 nt, Artificial Sequence
  Description of Artificial Sequence: Synthetic oligonucleotide
  Antisense strand to SEQ ID NO: 2199266
uguucgauaagacuagugg

SEQ ID NO: 2199268 - RNA, 19 nt, Artificial Sequence
  Description of Artificial Sequence: Synthetic oligonucleotide
  Sense strand starting at position 2611 of SEQ ID NO: 1883518
aagugaaguugcuuuggga

SEQ ID NO: 2199269 - RNA, 19 nt, Artificial Sequence
  Description of Artificial Sequence: Synthetic oligonucleotide
  Antisense strand to SEQ ID NO: 2199268
ucccaaagcaacuucacuu

SEQ ID NO: 2199270 - RNA, 19 nt, Artificial Sequence
  Description of Artificial Sequence: Synthetic oligonucleotide
  Sense strand starting at position 1332 of SEQ ID NO: 1883518
ugaucugucuucuuacuag

SEQ ID NO: 2199271 - RNA, 19 nt, Artificial Sequence
  Description of Artificial Sequence: Synthetic oligonucleotide
  Antisense strand to SEQ ID NO: 2199270
cuaguaagaagacagauca

SEQ ID NO: 2199272 - RNA, 19 nt, Artificial Sequence
  Description of Artificial Sequence: Synthetic oligonucleotide
  Sense strand starting at position 288 of SEQ ID NO: 1883518
ucuugaucauugguguaca

SEQ ID NO: 2199273 - RNA, 19 nt, Artificial Sequence
  Description of Artificial Sequence: Synthetic oligonucleotide
  Antisense strand to SEQ ID NO: 2199272
uguacaccaaugaucaaga

SEQ ID NO: 2199274 - RNA, 19 nt, Artificial Sequence
  Description of Artificial Sequence: Synthetic oligonucleotide
  Sense strand starting at position 720 of SEQ ID NO: 1883518
gcaaaccuuugccuacaga

SEQ ID NO: 2199275 - RNA, 19 nt, Artificial Sequence
  Description of Artificial Sequence: Synthetic oligonucleotide
  Antisense strand to SEQ ID NO: 2199274
ucuguaggcaaagguuugc

SEQ ID NO: 2199276 - RNA, 19 nt, Artificial Sequence
  Description of Artificial Sequence: Synthetic oligonucleotide
  Sense strand starting at position 548 of SEQ ID NO: 1883518
guuuaugauguuuauagcu

SEQ ID NO: 2199277 - RNA, 19 nt, Artificial Sequence
  Description of Artificial Sequence: Synthetic oligonucleotide
  Antisense strand to SEQ ID NO: 2199276
agcuauaaacaucauaaac

SEQ ID NO: 2199278 - RNA, 19 nt, Artificial Sequence
  Description of Artificial Sequence: Synthetic oligonucleotide
  Sense strand starting at position 3175 of SEQ ID NO: 1883518
gguguuaucccauagccau

SEQ ID NO: 2199279 - RNA, 19 nt, Artificial Sequence
  Description of Artificial Sequence: Synthetic oligonucleotide
  Antisense strand to SEQ ID NO: 2199278
auggcuaugggauaacacc

SEQ ID NO: 2199280 - RNA, 19 nt, Artificial Sequence
  Description of Artificial Sequence: Synthetic oligonucleotide
  Sense strand starting at position 2158 of SEQ ID NO: 1883518
aggccaccucucugagagu

SEQ ID NO: 2199281 - RNA, 19 nt, Artificial Sequence
  Description of Artificial Sequence: Synthetic oligonucleotide
  Antisense strand to SEQ ID NO: 2199280
acucucagagagguggccu

SEQ ID NO: 2199282 - RNA, 19 nt, Artificial Sequence
  Description of Artificial Sequence: Synthetic oligonucleotide
  Sense strand starting at position 2186 of SEQ ID NO: 1883518
uguucuugugagggugaga

SEQ ID NO: 2199283 - RNA, 19 nt, Artificial Sequence
  Description of Artificial Sequence: Synthetic oligonucleotide
  Antisense strand to SEQ ID NO: 2199282
ucucacccucacaagaaca

SEQ ID NO: 2199284 - RNA, 19 nt, Artificial Sequence
  Description of Artificial Sequence: Synthetic oligonucleotide
  Sense strand starting at position 2179 of SEQ ID NO: 1883518
gaaacuguguucuugugag

SEQ ID NO: 2199285 - RNA, 19 nt, Artificial Sequence
  Description of Artificial Sequence: Synthetic oligonucleotide
  Antisense strand to SEQ ID NO: 2199284
cucacaagaacacaguuuc

SEQ ID NO: 2199286 - RNA, 19 nt, Artificial Sequence
  Description of Artificial Sequence: Synthetic oligonucleotide
  Sense strand starting at position 1411 of SEQ ID NO: 1883518
guauauuguaucuggguga

SEQ ID NO: 2199287 - RNA, 19 nt, Artificial Sequence
  Description of Artificial Sequence: Synthetic oligonucleotide
  Antisense strand to SEQ ID NO: 2199286
ucacccagauacaauauac

SEQ ID NO: 2199288 - RNA, 19 nt, Artificial Sequence
  Description of Artificial Sequence: Synthetic oligonucleotide
  Sense strand starting at position 1402 of SEQ ID NO: 1883518
gcgggaccuguauauugua

SEQ ID NO: 2199289 - RNA, 19 nt, Artificial Sequence
  Description of Artificial Sequence: Synthetic oligonucleotide
  Antisense strand to SEQ ID NO: 2199288
uacaauauacaggucccgc

SEQ ID NO: 2199290 - RNA, 19 nt, Artificial Sequence
  Description of Artificial Sequence: Synthetic oligonucleotide
  Sense strand starting at position 941 of SEQ ID NO: 1883518
cccagucuugccugagaac

SEQ ID NO: 2199291 - RNA, 19 nt, Artificial Sequence
  Description of Artificial Sequence: Synthetic oligonucleotide
  Antisense strand to SEQ ID NO: 2199290
guucucaggcaagacuggg

SEQ ID NO: 2199292 - RNA, 19 nt, Artificial Sequence
  Description of Artificial Sequence: Synthetic oligonucleotide
  Sense strand starting at position 753 of SEQ ID NO: 1883518
cuuucuguugccugaaaga

SEQ ID NO: 2199293 - RNA, 19 nt, Artificial Sequence
  Description of Artificial Sequence: Synthetic oligonucleotide
  Antisense strand to SEQ ID NO: 2199292
ucuuucaggcaacagaaag

SEQ ID NO: 2199294 - RNA, 19 nt, Artificial Sequence
  Description of Artificial Sequence: Synthetic oligonucleotide
  Sense strand starting at position 3420 of SEQ ID NO: 1883518
cuuggcauguuuccuggaa

SEQ ID NO: 2199295 - RNA, 19 nt, Artificial Sequence
  Description of Artificial Sequence: Synthetic oligonucleotide
  Antisense strand to SEQ ID NO: 2199294
uuccaggaaacaugccaag

SEQ ID NO: 2199296 - RNA, 19 nt, Artificial Sequence
  Description of Artificial Sequence: Synthetic oligonucleotide
  Sense strand starting at position 2781 of SEQ ID NO: 1883518
agcugauuccuuuggagca

SEQ ID NO: 2199297 - RNA, 19 nt, Artificial Sequence
  Description of Artificial Sequence: Synthetic oligonucleotide
  Antisense strand to SEQ ID NO: 2199296
ugcuccaaaggaaucagcu

SEQ ID NO: 2199298 - RNA, 19 nt, Artificial Sequence
  Description of Artificial Sequence: Synthetic oligonucleotide
  Sense strand starting at position 286 of SEQ ID NO: 1883518
ucucuugaucauuggugua

SEQ ID NO: 2199299 - RNA, 19 nt, Artificial Sequence
  Description of Artificial Sequence: Synthetic oligonucleotide
  Antisense strand to SEQ ID NO: 2199298
uacaccaaugaucaagaga

SEQ ID NO: 2199300 - RNA, 19 nt, Artificial Sequence
  Description of Artificial Sequence: Synthetic oligonucleotide
  Sense strand starting at position 2321 of SEQ ID NO: 1883518
uauccuuguguuugagacu

SEQ ID NO: 2199301 - RNA, 19 nt, Artificial Sequence
  Description of Artificial Sequence: Synthetic oligonucleotide
  Antisense strand to SEQ ID NO: 2199300
agucucaaacacaaggaua

SEQ ID NO: 2199302 - RNA, 19 nt, Artificial Sequence
  Description of Artificial Sequence: Synthetic oligonucleotide
  Sense strand starting at position 3424 of SEQ ID NO: 1883518
gcauguuuccuggaagcuc

SEQ ID NO: 2199303 - RNA, 19 nt, Artificial Sequence
  Description of Artificial Sequence: Synthetic oligonucleotide
  Antisense strand to SEQ ID NO: 2199302
gagcuuccaggaaacaugc

SEQ ID NO: 2199304 - RNA, 19 nt, Artificial Sequence
  Description of Artificial Sequence: Synthetic oligonucleotide
  Sense strand starting at position 1295 of SEQ ID NO: 1883519
gcagguuauuaauuuaguu

SEQ ID NO: 2199305 - RNA, 19 nt, Artificial Sequence
  Description of Artificial Sequence: Synthetic oligonucleotide
  Antisense strand to SEQ ID NO: 2199304
aacuaaauuaauaaccugc

SEQ ID NO: 2199306 - RNA, 19 nt, Artificial Sequence
  Description of Artificial Sequence: Synthetic oligonucleotide
  Sense strand starting at position 3927 of SEQ ID NO: 1883519
auuggaggaauauguuuau

SEQ ID NO: 2199307 - RNA, 19 nt, Artificial Sequence
  Description of Artificial Sequence: Synthetic oligonucleotide
  Antisense strand to SEQ ID NO: 2199306
auaaacauauuccuccaau

SEQ ID NO: 2199308 - RNA, 19 nt, Artificial Sequence
  Description of Artificial Sequence: Synthetic oligonucleotide
  Sense strand starting at position 884 of SEQ ID NO: 1883519
acucauggugucuacauga

SEQ ID NO: 2199309 - RNA, 19 nt, Artificial Sequence
  Description of Artificial Sequence: Synthetic oligonucleotide
  Antisense strand to SEQ ID NO: 2199308
ucauguagacaccaugagu

SEQ ID NO: 2199310 - RNA, 19 nt, Artificial Sequence
  Description of Artificial Sequence: Synthetic oligonucleotide
  Sense strand starting at position 1344 of SEQ ID NO: 1883519
guggaaguuaauuagcauu

SEQ ID NO: 2199311 - RNA, 19 nt, Artificial Sequence
  Description of Artificial Sequence: Synthetic oligonucleotide
  Antisense strand to SEQ ID NO: 2199310
aaugcuaauuaacuuccac

SEQ ID NO: 2199312 - RNA, 19 nt, Artificial Sequence
  Description of Artificial Sequence: Synthetic oligonucleotide
  Sense strand starting at position 246 of SEQ ID NO: 1883519
gggaucagugcccagaguu

SEQ ID NO: 2199313 - RNA, 19 nt, Artificial Sequence
  Description of Artificial Sequence: Synthetic oligonucleotide
  Antisense strand to SEQ ID NO: 2199312
aacucugggcacugauccc

SEQ ID NO: 2199314 - RNA, 19 nt, Artificial Sequence
  Description of Artificial Sequence: Synthetic oligonucleotide
  Sense strand starting at position 1335 of SEQ ID NO: 1883519
cuauacugcguggaaguua

SEQ ID NO: 2199315 - RNA, 19 nt, Artificial Sequence
  Description of Artificial Sequence: Synthetic oligonucleotide
  Antisense strand to SEQ ID NO: 2199314
uaacuuccacgcaguauag

SEQ ID NO: 2199316 - RNA, 19 nt, Artificial Sequence
  Description of Artificial Sequence: Synthetic oligonucleotide
  Sense strand starting at position 1292 of SEQ ID NO: 1883519
agggcagguuauuaauuua

SEQ ID NO: 2199317 - RNA, 19 nt, Artificial Sequence
  Description of Artificial Sequence: Synthetic oligonucleotide
  Antisense strand to SEQ ID NO: 2199316
uaaauuaauaaccugcccu

SEQ ID NO: 2199318 - RNA, 19 nt, Artificial Sequence
  Description of Artificial Sequence: Synthetic oligonucleotide
  Sense strand starting at position 1085 of SEQ ID NO: 1883519
aaagcuuccuagguguuua

SEQ ID NO: 2199319 - RNA, 19 nt, Artificial Sequence
  Description of Artificial Sequence: Synthetic oligonucleotide
  Antisense strand to SEQ ID NO: 2199318
uaaacaccuaggaagcuuu

SEQ ID NO: 2199320 - RNA, 19 nt, Artificial Sequence
  Description of Artificial Sequence: Synthetic oligonucleotide
  Sense strand starting at position 1036 of SEQ ID NO: 1883519
auaugaggauacuacauau

SEQ ID NO: 2199321 - RNA, 19 nt, Artificial Sequence
  Description of Artificial Sequence: Synthetic oligonucleotide
  Antisense strand to SEQ ID NO: 2199320
auauguaguauccucauau

SEQ ID NO: 2199322 - RNA, 19 nt, Artificial Sequence
  Description of Artificial Sequence: Synthetic oligonucleotide
  Sense strand starting at position 1343 of SEQ ID NO: 1883519
cguggaaguuaauuagcau

SEQ ID NO: 2199323 - RNA, 19 nt, Artificial Sequence
  Description of Artificial Sequence: Synthetic oligonucleotide
  Antisense strand to SEQ ID NO: 2199322
augcuaauuaacuuccacg

SEQ ID NO: 2199324 - RNA, 19 nt, Artificial Sequence
  Description of Artificial Sequence: Synthetic oligonucleotide
  Sense strand starting at position 1286 of SEQ ID NO: 1883519
guaguuagggcagguuauu

SEQ ID NO: 2199325 - RNA, 19 nt, Artificial Sequence
  Description of Artificial Sequence: Synthetic oligonucleotide
  Antisense strand to SEQ ID NO: 2199324
aauaaccugcccuaacuac

SEQ ID NO: 2199326 - RNA, 19 nt, Artificial Sequence
  Description of Artificial Sequence: Synthetic oligonucleotide
  Sense strand starting at position 3894 of SEQ ID NO: 1883519
uagcguagugagggugaau

SEQ ID NO: 2199327 - RNA, 19 nt, Artificial Sequence
  Description of Artificial Sequence: Synthetic oligonucleotide
  Antisense strand to SEQ ID NO: 2199326
auucacccucacuacgcua

SEQ ID NO: 2199328 - RNA, 19 nt, Artificial Sequence
  Description of Artificial Sequence: Synthetic oligonucleotide
  Sense strand starting at position 1225 of SEQ ID NO: 1883519
ccaagaacuuucuacugag

SEQ ID NO: 2199329 - RNA, 19 nt, Artificial Sequence
  Description of Artificial Sequence: Synthetic oligonucleotide
  Antisense strand to SEQ ID NO: 2199328
cucaguagaaaguucuugg

SEQ ID NO: 2199330 - RNA, 19 nt, Artificial Sequence
  Description of Artificial Sequence: Synthetic oligonucleotide
  Sense strand starting at position 1331 of SEQ ID NO: 1883519
gucccuauacugcguggaa

SEQ ID NO: 2199331 - RNA, 19 nt, Artificial Sequence
  Description of Artificial Sequence: Synthetic oligonucleotide
  Antisense strand to SEQ ID NO: 2199330
uuccacgcaguauagggac

SEQ ID NO: 2199332 - RNA, 19 nt, Artificial Sequence
  Description of Artificial Sequence: Synthetic oligonucleotide
  Sense strand starting at position 1333 of SEQ ID NO: 1883519
cccuauacugcguggaagu

SEQ ID NO: 2199333 - RNA, 19 nt, Artificial Sequence
  Description of Artificial Sequence: Synthetic oligonucleotide
  Antisense strand to SEQ ID NO: 2199332
acuuccacgcaguauaggg

SEQ ID NO: 2199334 - RNA, 19 nt, Artificial Sequence
  Description of Artificial Sequence: Synthetic oligonucleotide
  Sense strand starting at position 1334 of SEQ ID NO: 1883519
ccuauacugcguggaaguu

SEQ ID NO: 2199335 - RNA, 19 nt, Artificial Sequence
  Description of Artificial Sequence: Synthetic oligonucleotide
  Antisense strand to SEQ ID NO: 2199334
aacuuccacgcaguauagg

SEQ ID NO: 2199336 - RNA, 19 nt, Artificial Sequence
  Description of Artificial Sequence: Synthetic oligonucleotide
  Sense strand starting at position 1228 of SEQ ID NO: 1883519
agaacuuucuacugagaaa

SEQ ID NO: 2199337 - RNA, 19 nt, Artificial Sequence
  Description of Artificial Sequence: Synthetic oligonucleotide
  Antisense strand to SEQ ID NO: 2199336
uuucucaguagaaaguucu

SEQ ID NO: 2199338 - RNA, 19 nt, Artificial Sequence
  Description of Artificial Sequence: Synthetic oligonucleotide
  Sense strand starting at position 891 of SEQ ID NO: 1883519
gugucuacaugagaaggaa

SEQ ID NO: 2199339 - RNA, 19 nt, Artificial Sequence
  Description of Artificial Sequence: Synthetic oligonucleotide
  Antisense strand to SEQ ID NO: 2199338
uuccuucucauguagacac

SEQ ID NO: 2199340 - RNA, 19 nt, Artificial Sequence
  Description of Artificial Sequence: Synthetic oligonucleotide
  Sense strand starting at position 1231 of SEQ ID NO: 1883519
acuuucuacugagaaacga

SEQ ID NO: 2199341 - RNA, 19 nt, Artificial Sequence
  Description of Artificial Sequence: Synthetic oligonucleotide
  Antisense strand to SEQ ID NO: 2199340
ucguuucucaguagaaagu

SEQ ID NO: 2199342 - RNA, 19 nt, Artificial Sequence
  Description of Artificial Sequence: Synthetic oligonucleotide
  Sense strand starting at position 782 of SEQ ID NO: 1883519
gagagcucuucccaugaag

SEQ ID NO: 2199343 - RNA, 19 nt, Artificial Sequence
  Description of Artificial Sequence: Synthetic oligonucleotide
  Antisense strand to SEQ ID NO: 2199342
cuucaugggaagagcucuc

SEQ ID NO: 2199344 - RNA, 19 nt, Artificial Sequence
  Description of Artificial Sequence: Synthetic oligonucleotide
  Sense strand starting at position 2420 of SEQ ID NO: 1883519
gcuuuaucacucugcuguu

SEQ ID NO: 2199345 - RNA, 19 nt, Artificial Sequence
  Description of Artificial Sequence: Synthetic oligonucleotide
  Antisense strand to SEQ ID NO: 2199344
aacagcagagugauaaagc

SEQ ID NO: 2199346 - RNA, 19 nt, Artificial Sequence
  Description of Artificial Sequence: Synthetic oligonucleotide
  Sense strand starting at position 1055 of SEQ ID NO: 1883519
gauguagaaucauagccca

SEQ ID NO: 2199347 - RNA, 19 nt, Artificial Sequence
  Description of Artificial Sequence: Synthetic oligonucleotide
  Antisense strand to SEQ ID NO: 2199346
ugggcuaugauucuacauc

SEQ ID NO: 2199348 - RNA, 19 nt, Artificial Sequence
  Description of Artificial Sequence: Synthetic oligonucleotide
  Sense strand starting at position 1558 of SEQ ID NO: 1883519
cggccacuuucucaaugaa

SEQ ID NO: 2199349 - RNA, 19 nt, Artificial Sequence
  Description of Artificial Sequence: Synthetic oligonucleotide
  Antisense strand to SEQ ID NO: 2199348
uucauugagaaaguggccg

SEQ ID NO: 2199350 - RNA, 19 nt, Artificial Sequence
  Description of Artificial Sequence: Synthetic oligonucleotide
  Sense strand starting at position 275 of SEQ ID NO: 1883519
cuugaugcuuccuguuguu

SEQ ID NO: 2199351 - RNA, 19 nt, Artificial Sequence
  Description of Artificial Sequence: Synthetic oligonucleotide
  Antisense strand to SEQ ID NO: 2199350
aacaacaggaagcaucaag

SEQ ID NO: 2199352 - RNA, 19 nt, Artificial Sequence
  Description of Artificial Sequence: Synthetic oligonucleotide
  Sense strand starting at position 1720 of SEQ ID NO: 1883520
agaagucaccaggguuuga

SEQ ID NO: 2199353 - RNA, 19 nt, Artificial Sequence
  Description of Artificial Sequence: Synthetic oligonucleotide
  Antisense strand to SEQ ID NO: 2199352
ucaaacccuggugacuucu

SEQ ID NO: 2199354 - RNA, 19 nt, Artificial Sequence
  Description of Artificial Sequence: Synthetic oligonucleotide
  Sense strand starting at position 3706 of SEQ ID NO: 1883520
cucggaauaagccacgaau

SEQ ID NO: 2199355 - RNA, 19 nt, Artificial Sequence
  Description of Artificial Sequence: Synthetic oligonucleotide
  Antisense strand to SEQ ID NO: 2199354
auucguggcuuauuccgag

SEQ ID NO: 2199356 - RNA, 19 nt, Artificial Sequence
  Description of Artificial Sequence: Synthetic oligonucleotide
  Sense strand starting at position 3270 of SEQ ID NO: 1883520
uccauucuauagcuagaga

SEQ ID NO: 2199357 - RNA, 19 nt, Artificial Sequence
  Description of Artificial Sequence: Synthetic oligonucleotide
  Antisense strand to SEQ ID NO: 2199356
ucucuagcuauagaaugga

SEQ ID NO: 2199358 - RNA, 19 nt, Artificial Sequence
  Description of Artificial Sequence: Synthetic oligonucleotide
  Sense strand starting at position 1402 of SEQ ID NO: 1883520
guuuacucagcugagaucu

SEQ ID NO: 2199359 - RNA, 19 nt, Artificial Sequence
  Description of Artificial Sequence: Synthetic oligonucleotide
  Antisense strand to SEQ ID NO: 2199358
agaucucagcugaguaaac

SEQ ID NO: 2199360 - RNA, 19 nt, Artificial Sequence
  Description of Artificial Sequence: Synthetic oligonucleotide
  Sense strand starting at position 2203 of SEQ ID NO: 1883520
uccucucagcuguaagaug

SEQ ID NO: 2199361 - RNA, 19 nt, Artificial Sequence
  Description of Artificial Sequence: Synthetic oligonucleotide
  Antisense strand to SEQ ID NO: 2199360
caucuuacagcugagagga

SEQ ID NO: 2199362 - RNA, 19 nt, Artificial Sequence
  Description of Artificial Sequence: Synthetic oligonucleotide
  Sense strand starting at position 2740 of SEQ ID NO: 1883520
aggucagagucauccuucu

SEQ ID NO: 2199363 - RNA, 19 nt, Artificial Sequence
  Description of Artificial Sequence: Synthetic oligonucleotide
  Antisense strand to SEQ ID NO: 2199362
agaaggaugacucugaccu

SEQ ID NO: 2199364 - RNA, 19 nt, Artificial Sequence
  Description of Artificial Sequence: Synthetic oligonucleotide
  Sense strand starting at position 1399 of SEQ ID NO: 1883520
uuuguuuacucagcugaga

SEQ ID NO: 2199365 - RNA, 19 nt, Artificial Sequence
  Description of Artificial Sequence: Synthetic oligonucleotide
  Antisense strand to SEQ ID NO: 2199364
ucucagcugaguaaacaaa

SEQ ID NO: 2199366 - RNA, 19 nt, Artificial Sequence
  Description of Artificial Sequence: Synthetic oligonucleotide
  Sense strand starting at position 1028 of SEQ ID NO: 1883520
gagguccauuucuaaagca

SEQ ID NO: 2199367 - RNA, 19 nt, Artificial Sequence
  Description of Artificial Sequence: Synthetic oligonucleotide
  Antisense strand to SEQ ID NO: 2199366
ugcuuuagaaauggaccuc

SEQ ID NO: 2199368 - RNA, 19 nt, Artificial Sequence
  Description of Artificial Sequence: Synthetic oligonucleotide
  Sense strand starting at position 2823 of SEQ ID NO: 1883520
cuccgucuucccugaagac

SEQ ID NO: 2199369 - RNA, 19 nt, Artificial Sequence
  Description of Artificial Sequence: Synthetic oligonucleotide
  Antisense strand to SEQ ID NO: 2199368
gucuucagggaagacggag

SEQ ID NO: 2199370 - RNA, 19 nt, Artificial Sequence
  Description of Artificial Sequence: Synthetic oligonucleotide
  Sense strand starting at position 3776 of SEQ ID NO: 1883520
gcagcaguggccuauuacu

SEQ ID NO: 2199371 - RNA, 19 nt, Artificial Sequence
  Description of Artificial Sequence: Synthetic oligonucleotide
  Antisense strand to SEQ ID NO: 2199370
aguaauaggccacugcugc

SEQ ID NO: 2199372 - RNA, 19 nt, Artificial Sequence
  Description of Artificial Sequence: Synthetic oligonucleotide
  Sense strand starting at position 1226 of SEQ ID NO: 1883520
uguucugucugcuuggaau

SEQ ID NO: 2199373 - RNA, 19 nt, Artificial Sequence
  Description of Artificial Sequence: Synthetic oligonucleotide
  Antisense strand to SEQ ID NO: 2199372
auuccaagcagacagaaca

SEQ ID NO: 2199374 - RNA, 19 nt, Artificial Sequence
  Description of Artificial Sequence: Synthetic oligonucleotide
  Sense strand starting at position 1181 of SEQ ID NO: 1883520
ccgagcauuuccuggaaag

SEQ ID NO: 2199375 - RNA, 19 nt, Artificial Sequence
  Description of Artificial Sequence: Synthetic oligonucleotide
  Antisense strand to SEQ ID NO: 2199374
cuuuccaggaaaugcucgg

SEQ ID NO: 2199376 - RNA, 19 nt, Artificial Sequence
  Description of Artificial Sequence: Synthetic oligonucleotide
  Sense strand starting at position 1170 of SEQ ID NO: 1883520
gucccauuccuccgagcau

SEQ ID NO: 2199377 - RNA, 19 nt, Artificial Sequence
  Description of Artificial Sequence: Synthetic oligonucleotide
  Antisense strand to SEQ ID NO: 2199376
augcucggaggaaugggac

SEQ ID NO: 2199378 - RNA, 19 nt, Artificial Sequence
  Description of Artificial Sequence: Synthetic oligonucleotide
  Sense strand starting at position 2156 of SEQ ID NO: 1883520
ccggguucccgcugauagu

SEQ ID NO: 2199379 - RNA, 19 nt, Artificial Sequence
  Description of Artificial Sequence: Synthetic oligonucleotide
  Antisense strand to SEQ ID NO: 2199378
acuaucagcgggaacccgg

SEQ ID NO: 2199380 - RNA, 19 nt, Artificial Sequence
  Description of Artificial Sequence: Synthetic oligonucleotide
  Sense strand starting at position 739 of SEQ ID NO: 1883520
uuacaugccucuuaugaug

SEQ ID NO: 2199381 - RNA, 19 nt, Artificial Sequence
  Description of Artificial Sequence: Synthetic oligonucleotide
  Antisense strand to SEQ ID NO: 2199380
caucauaagaggcauguaa

SEQ ID NO: 2199382 - RNA, 19 nt, Artificial Sequence
  Description of Artificial Sequence: Synthetic oligonucleotide
  Sense strand starting at position 1334 of SEQ ID NO: 1883520
accucaaacuacuguguca

SEQ ID NO: 2199383 - RNA, 19 nt, Artificial Sequence
  Description of Artificial Sequence: Synthetic oligonucleotide
  Antisense strand to SEQ ID NO: 2199382
ugacacaguaguuugaggu

SEQ ID NO: 2199384 - RNA, 19 nt, Artificial Sequence
  Description of Artificial Sequence: Synthetic oligonucleotide
  Sense strand starting at position 1171 of SEQ ID NO: 1883520
ucccauuccuccgagcauu

SEQ ID NO: 2199385 - RNA, 19 nt, Artificial Sequence
  Description of Artificial Sequence: Synthetic oligonucleotide
  Antisense strand to SEQ ID NO: 2199384
aaugcucggaggaauggga

SEQ ID NO: 2199386 - RNA, 19 nt, Artificial Sequence
  Description of Artificial Sequence: Synthetic oligonucleotide
  Sense strand starting at position 1191 of SEQ ID NO: 1883520
ccuggaaagucgugacucu

SEQ ID NO: 2199387 - RNA, 19 nt, Artificial Sequence
  Description of Artificial Sequence: Synthetic oligonucleotide
  Antisense strand to SEQ ID NO: 2199386
agagucacgacuuuccagg

SEQ ID NO: 2199388 - RNA, 19 nt, Artificial Sequence
  Description of Artificial Sequence: Synthetic oligonucleotide
  Sense strand starting at position 1211 of SEQ ID NO: 1883520
gggcuuugcucauacuguu

SEQ ID NO: 2199389 - RNA, 19 nt, Artificial Sequence
  Description of Artificial Sequence: Synthetic oligonucleotide
  Antisense strand to SEQ ID NO: 2199388
aacaguaugagcaaagccc

SEQ ID NO: 2199390 - RNA, 19 nt, Artificial Sequence
  Description of Artificial Sequence: Synthetic oligonucleotide
  Sense strand starting at position 853 of SEQ ID NO: 1883520
cuucucaugucuggugagu

SEQ ID NO: 2199391 - RNA, 19 nt, Artificial Sequence
  Description of Artificial Sequence: Synthetic oligonucleotide
  Antisense strand to SEQ ID NO: 2199390
acucaccagacaugagaag

SEQ ID NO: 2199392 - RNA, 19 nt, Artificial Sequence
  Description of Artificial Sequence: Synthetic oligonucleotide
  Sense strand starting at position 2165 of SEQ ID NO: 1883520
cgcugauaguggugaaccu

SEQ ID NO: 2199393 - RNA, 19 nt, Artificial Sequence
  Description of Artificial Sequence: Synthetic oligonucleotide
  Antisense strand to SEQ ID NO: 2199392
agguucaccacuaucagcg

SEQ ID NO: 2199394 - RNA, 19 nt, Artificial Sequence
  Description of Artificial Sequence: Synthetic oligonucleotide
  Sense strand starting at position 855 of SEQ ID NO: 1883520
ucucaugucuggugagugu

SEQ ID NO: 2199395 - RNA, 19 nt, Artificial Sequence
  Description of Artificial Sequence: Synthetic oligonucleotide
  Antisense strand to SEQ ID NO: 2199394
acacucaccagacaugaga

SEQ ID NO: 2199396 - RNA, 19 nt, Artificial Sequence
  Description of Artificial Sequence: Synthetic oligonucleotide
  Sense strand starting at position 3782 of SEQ ID NO: 1883520
guggccuauuacugcuauu

SEQ ID NO: 2199397 - RNA, 19 nt, Artificial Sequence
  Description of Artificial Sequence: Synthetic oligonucleotide
  Antisense strand to SEQ ID NO: 2199396
aauagcaguaauaggccac

SEQ ID NO: 2199398 - RNA, 19 nt, Artificial Sequence
  Description of Artificial Sequence: Synthetic oligonucleotide
  Sense strand starting at position 3197 of SEQ ID NO: 1883520
gcagucggcuccuguaaga

SEQ ID NO: 2199399 - RNA, 19 nt, Artificial Sequence
  Description of Artificial Sequence: Synthetic oligonucleotide
  Antisense strand to SEQ ID NO: 2199398
ucuuacaggagccgacugc

SEQ ID NO: 2199400 - RNA, 19 nt, Artificial Sequence
  Description of Artificial Sequence: Synthetic oligonucleotide
  Sense strand starting at position 2790 of SEQ ID NO: 1883521
gaaacuaacugaucuaggu

SEQ ID NO: 2199401 - RNA, 19 nt, Artificial Sequence
  Description of Artificial Sequence: Synthetic oligonucleotide
  Antisense strand to SEQ ID NO: 2199400
accuagaucaguuaguuuc

SEQ ID NO: 2199402 - RNA, 19 nt, Artificial Sequence
  Description of Artificial Sequence: Synthetic oligonucleotide
  Sense strand starting at position 2652 of SEQ ID NO: 1883521
gagguauuggauggacuca

SEQ ID NO: 2199403 - RNA, 19 nt, Artificial Sequence
  Description of Artificial Sequence: Synthetic oligonucleotide
  Antisense strand to SEQ ID NO: 2199402
ugaguccauccaauaccuc

SEQ ID NO: 2199404 - RNA, 19 nt, Artificial Sequence
  Description of Artificial Sequence: Synthetic oligonucleotide
  Sense strand starting at position 835 of SEQ ID NO: 1883521
gaguuagaaccacaaugcu

SEQ ID NO: 2199405 - RNA, 19 nt, Artificial Sequence
  Description of Artificial Sequence: Synthetic oligonucleotide
  Antisense strand to SEQ ID NO: 2199404
agcauugugguucuaacuc

SEQ ID NO: 2199406 - RNA, 19 nt, Artificial Sequence
  Description of Artificial Sequence: Synthetic oligonucleotide
  Sense strand starting at position 1849 of SEQ ID NO: 1883521
gcaagagauuacuuuaaua

SEQ ID NO: 2199407 - RNA, 19 nt, Artificial Sequence
  Description of Artificial Sequence: Synthetic oligonucleotide
  Antisense strand to SEQ ID NO: 2199406
uauuaaaguaaucucuugc

SEQ ID NO: 2199408 - RNA, 19 nt, Artificial Sequence
  Description of Artificial Sequence: Synthetic oligonucleotide
  Sense strand starting at position 3831 of SEQ ID NO: 1883521
cuguuuaguccacagaaag

SEQ ID NO: 2199409 - RNA, 19 nt, Artificial Sequence
  Description of Artificial Sequence: Synthetic oligonucleotide
  Antisense strand to SEQ ID NO: 2199408
cuuucuguggacuaaacag

SEQ ID NO: 2199410 - RNA, 19 nt, Artificial Sequence
  Description of Artificial Sequence: Synthetic oligonucleotide
  Sense strand starting at position 2891 of SEQ ID NO: 1883521
caauaauugggaggucacu

SEQ ID NO: 2199411 - RNA, 19 nt, Artificial Sequence
  Description of Artificial Sequence: Synthetic oligonucleotide
  Antisense strand to SEQ ID NO: 2199410
agugaccucccaauuauug

SEQ ID NO: 2199412 - RNA, 19 nt, Artificial Sequence
  Description of Artificial Sequence: Synthetic oligonucleotide
  Sense strand starting at position 949 of SEQ ID NO: 1883521
gcuuacuagccacaagaaa

SEQ ID NO: 2199413 - RNA, 19 nt, Artificial Sequence
  Description of Artificial Sequence: Synthetic oligonucleotide
  Antisense strand to SEQ ID NO: 2199412
uuucuuguggcuaguaagc

SEQ ID NO: 2199414 - RNA, 19 nt, Artificial Sequence
  Description of Artificial Sequence: Synthetic oligonucleotide
  Sense strand starting at position 2160 of SEQ ID NO: 1883521
ggagauguucuccaaguca

SEQ ID NO: 2199415 - RNA, 19 nt, Artificial Sequence
  Description of Artificial Sequence: Synthetic oligonucleotide
  Antisense strand to SEQ ID NO: 2199414
ugacuuggagaacaucucc

SEQ ID NO: 2199416 - RNA, 19 nt, Artificial Sequence
  Description of Artificial Sequence: Synthetic oligonucleotide
  Sense strand starting at position 1084 of SEQ ID NO: 1883521
guauguuaaccacauaauc

SEQ ID NO: 2199417 - RNA, 19 nt, Artificial Sequence
  Description of Artificial Sequence: Synthetic oligonucleotide
  Antisense strand to SEQ ID NO: 2199416
gauuaugugguuaacauac

SEQ ID NO: 2199418 - RNA, 19 nt, Artificial Sequence
  Description of Artificial Sequence: Synthetic oligonucleotide
  Sense strand starting at position 2384 of SEQ ID NO: 1883521
ugaucuaaacugugaucaa

SEQ ID NO: 2199419 - RNA, 19 nt, Artificial Sequence
  Description of Artificial Sequence: Synthetic oligonucleotide
  Antisense strand to SEQ ID NO: 2199418
uugaucacaguuuagauca

SEQ ID NO: 2199420 - RNA, 19 nt, Artificial Sequence
  Description of Artificial Sequence: Synthetic oligonucleotide
  Sense strand starting at position 733 of SEQ ID NO: 1883521
ucauuaguagcagaauacu

SEQ ID NO: 2199421 - RNA, 19 nt, Artificial Sequence
  Description of Artificial Sequence: Synthetic oligonucleotide
  Antisense strand to SEQ ID NO: 2199420
aguauucugcuacuaauga

SEQ ID NO: 2199422 - RNA, 19 nt, Artificial Sequence
  Description of Artificial Sequence: Synthetic oligonucleotide
  Sense strand starting at position 1100 of SEQ ID NO: 1883521
aucauagaacugugcaaag

SEQ ID NO: 2199423 - RNA, 19 nt, Artificial Sequence
  Description of Artificial Sequence: Synthetic oligonucleotide
  Antisense strand to SEQ ID NO: 2199422
cuuugcacaguucuaugau

SEQ ID NO: 2199424 - RNA, 19 nt, Artificial Sequence
  Description of Artificial Sequence: Synthetic oligonucleotide
  Sense strand starting at position 3829 of SEQ ID NO: 1883521
uccuguuuaguccacagaa

SEQ ID NO: 2199425 - RNA, 19 nt, Artificial Sequence
  Description of Artificial Sequence: Synthetic oligonucleotide
  Antisense strand to SEQ ID NO: 2199424
uucuguggacuaaacagga

SEQ ID NO: 2199426 - RNA, 19 nt, Artificial Sequence
  Description of Artificial Sequence: Synthetic oligonucleotide
  Sense strand starting at position 1073 of SEQ ID NO: 1883521
caagaacagcuguauguua

SEQ ID NO: 2199427 - RNA, 19 nt, Artificial Sequence
  Description of Artificial Sequence: Synthetic oligonucleotide
  Antisense strand to SEQ ID NO: 2199426
uaacauacagcuguucuug

SEQ ID NO: 2199428 - RNA, 19 nt, Artificial Sequence
  Description of Artificial Sequence: Synthetic oligonucleotide
  Sense strand starting at position 739 of SEQ ID NO: 1883521
guagcagaauacuugggau

SEQ ID NO: 2199429 - RNA, 19 nt, Artificial Sequence
  Description of Artificial Sequence: Synthetic oligonucleotide
  Antisense strand to SEQ ID NO: 2199428
aucccaaguauucugcuac

SEQ ID NO: 2199430 - RNA, 19 nt, Artificial Sequence
  Description of Artificial Sequence: Synthetic oligonucleotide
  Sense strand starting at position 3925 of SEQ ID NO: 1883521
uuuaguagaaucugguaga

SEQ ID NO: 2199431 - RNA, 19 nt, Artificial Sequence
  Description of Artificial Sequence: Synthetic oligonucleotide
  Antisense strand to SEQ ID NO: 2199430
ucuaccagauucuacuaaa

SEQ ID NO: 2199432 - RNA, 19 nt, Artificial Sequence
  Description of Artificial Sequence: Synthetic oligonucleotide
  Sense strand starting at position 976 of SEQ ID NO: 1883521
aguggagaaauguguauua

SEQ ID NO: 2199433 - RNA, 19 nt, Artificial Sequence
  Description of Artificial Sequence: Synthetic oligonucleotide
  Antisense strand to SEQ ID NO: 2199432
uaauacacauuucuccacu

SEQ ID NO: 2199434 - RNA, 19 nt, Artificial Sequence
  Description of Artificial Sequence: Synthetic oligonucleotide
  Sense strand starting at position 3772 of SEQ ID NO: 1883521
guccuaguucuuuacuaaa

SEQ ID NO: 2199435 - RNA, 19 nt, Artificial Sequence
  Description of Artificial Sequence: Synthetic oligonucleotide
  Antisense strand to SEQ ID NO: 2199434
uuuaguaaagaacuaggac

SEQ ID NO: 2199436 - RNA, 19 nt, Artificial Sequence
  Description of Artificial Sequence: Synthetic oligonucleotide
  Sense strand starting at position 1651 of SEQ ID NO: 1883521
ugaaucugacacugucuua

SEQ ID NO: 2199437 - RNA, 19 nt, Artificial Sequence
  Description of Artificial Sequence: Synthetic oligonucleotide
  Antisense strand to SEQ ID NO: 2199436
uaagacagugucagauuca

SEQ ID NO: 2199438 - RNA, 19 nt, Artificial Sequence
  Description of Artificial Sequence: Synthetic oligonucleotide
  Sense strand starting at position 1109 of SEQ ID NO: 1883521
cugugcaaaggcuaauaau

SEQ ID NO: 2199439 - RNA, 19 nt, Artificial Sequence
  Description of Artificial Sequence: Synthetic oligonucleotide
  Antisense strand to SEQ ID NO: 2199438
auuauuagccuuugcacag

SEQ ID NO: 2199440 - RNA, 19 nt, Artificial Sequence
  Description of Artificial Sequence: Synthetic oligonucleotide
  Sense strand starting at position 2714 of SEQ ID NO: 1883521
aguuuaugcgaugauaauu

SEQ ID NO: 2199441 - RNA, 19 nt, Artificial Sequence
  Description of Artificial Sequence: Synthetic oligonucleotide
  Antisense strand to SEQ ID NO: 2199440
aauuaucaucgcauaaacu

SEQ ID NO: 2199442 - RNA, 19 nt, Artificial Sequence
  Description of Artificial Sequence: Synthetic oligonucleotide
  Sense strand starting at position 2525 of SEQ ID NO: 1883521
ucuuacugcuaccugagaa

SEQ ID NO: 2199443 - RNA, 19 nt, Artificial Sequence
  Description of Artificial Sequence: Synthetic oligonucleotide
  Antisense strand to SEQ ID NO: 2199442
uucucagguagcaguaaga

SEQ ID NO: 2199444 - RNA, 19 nt, Artificial Sequence
  Description of Artificial Sequence: Synthetic oligonucleotide
  Sense strand starting at position 2228 of SEQ ID NO: 1883521
agguuauugcauuagguua

SEQ ID NO: 2199445 - RNA, 19 nt, Artificial Sequence
  Description of Artificial Sequence: Synthetic oligonucleotide
  Antisense strand to SEQ ID NO: 2199444
uaaccuaaugcaauaaccu

SEQ ID NO: 2199446 - RNA, 19 nt, Artificial Sequence
  Description of Artificial Sequence: Synthetic oligonucleotide
  Sense strand starting at position 2159 of SEQ ID NO: 1883521
gggagauguucuccaaguc

SEQ ID NO: 2199447 - RNA, 19 nt, Artificial Sequence
  Description of Artificial Sequence: Synthetic oligonucleotide
  Antisense strand to SEQ ID NO: 2199446
gacuuggagaacaucuccc

SEQ ID NO: 2199448 - RNA, 19 nt, Artificial Sequence
  Description of Artificial Sequence: Synthetic oligonucleotide
  Sense strand starting at position 1029 of SEQ ID NO: 1883521
auguuuggauauucucuau

SEQ ID NO: 2199449 - RNA, 19 nt, Artificial Sequence
  Description of Artificial Sequence: Synthetic oligonucleotide
  Antisense strand to SEQ ID NO: 2199448
auagagaauauccaaacau

SEQ ID NO: 2199450 - RNA, 19 nt, Artificial Sequence
  Description of Artificial Sequence: Synthetic oligonucleotide
  Sense strand starting at position 1140 of SEQ ID NO: 1883521
cacugacaguuugcagaua

SEQ ID NO: 2199451 - RNA, 19 nt, Artificial Sequence
  Description of Artificial Sequence: Synthetic oligonucleotide
  Antisense strand to SEQ ID NO: 2199450
uaucugcaaacugucagug

SEQ ID NO: 2199452 - RNA, 19 nt, Artificial Sequence
  Description of Artificial Sequence: Synthetic oligonucleotide
  Sense strand starting at position 1021 of SEQ ID NO: 1883521
auguuacuauguuuggaua

SEQ ID NO: 2199453 - RNA, 19 nt, Artificial Sequence
  Description of Artificial Sequence: Synthetic oligonucleotide
  Antisense strand to SEQ ID NO: 2199452
uauccaaacauaguaacau

SEQ ID NO: 2199454 - RNA, 19 nt, Artificial Sequence
  Description of Artificial Sequence: Synthetic oligonucleotide
  Sense strand starting at position 1019 of SEQ ID NO: 1883521
caauguuacuauguuugga

SEQ ID NO: 2199455 - RNA, 19 nt, Artificial Sequence
  Description of Artificial Sequence: Synthetic oligonucleotide
  Antisense strand to SEQ ID NO: 2199454
uccaaacauaguaacauug

SEQ ID NO: 2199456 - RNA, 19 nt, Artificial Sequence
  Description of Artificial Sequence: Synthetic oligonucleotide
  Sense strand starting at position 2097 of SEQ ID NO: 1883521
ccgagugaaucugcagaca

SEQ ID NO: 2199457 - RNA, 19 nt, Artificial Sequence
  Description of Artificial Sequence: Synthetic oligonucleotide
  Antisense strand to SEQ ID NO: 2199456
ugucugcagauucacucgg

SEQ ID NO: 2199458 - RNA, 19 nt, Artificial Sequence
  Description of Artificial Sequence: Synthetic oligonucleotide
  Sense strand starting at position 1022 of SEQ ID NO: 1883521
uguuacuauguuuggauau

SEQ ID NO: 2199459 - RNA, 19 nt, Artificial Sequence
  Description of Artificial Sequence: Synthetic oligonucleotide
  Antisense strand to SEQ ID NO: 2199458
auauccaaacauaguaaca

SEQ ID NO: 2199460 - RNA, 19 nt, Artificial Sequence
  Description of Artificial Sequence: Synthetic oligonucleotide
  Sense strand starting at position 3771 of SEQ ID NO: 1883521
aguccuaguucuuuacuaa

SEQ ID NO: 2199461 - RNA, 19 nt, Artificial Sequence
  Description of Artificial Sequence: Synthetic oligonucleotide
  Antisense strand to SEQ ID NO: 2199460
uuaguaaagaacuaggacu

SEQ ID NO: 2199462 - RNA, 19 nt, Artificial Sequence
  Description of Artificial Sequence: Synthetic oligonucleotide
  Sense strand starting at position 2723 of SEQ ID NO: 1883521
gaugauaauuuagguuaug

SEQ ID NO: 2199463 - RNA, 19 nt, Artificial Sequence
  Description of Artificial Sequence: Synthetic oligonucleotide
  Antisense strand to SEQ ID NO: 2199462
cauaaccuaaauuaucauc

SEQ ID NO: 2199464 - RNA, 19 nt, Artificial Sequence
  Description of Artificial Sequence: Synthetic oligonucleotide
  Sense strand starting at position 1010 of SEQ ID NO: 1883521
guauauucucaauguuacu

SEQ ID NO: 2199465 - RNA, 19 nt, Artificial Sequence
  Description of Artificial Sequence: Synthetic oligonucleotide
  Antisense strand to SEQ ID NO: 2199464
aguaacauugagaauauac

SEQ ID NO: 2199466 - RNA, 19 nt, Artificial Sequence
  Description of Artificial Sequence: Synthetic oligonucleotide
  Sense strand starting at position 3686 of SEQ ID NO: 1883521
gacuuaaugcgcugggaga

SEQ ID NO: 2199467 - RNA, 19 nt, Artificial Sequence
  Description of Artificial Sequence: Synthetic oligonucleotide
  Antisense strand to SEQ ID NO: 2199466
ucucccagcgcauuaaguc

SEQ ID NO: 2199468 - RNA, 19 nt, Artificial Sequence
  Description of Artificial Sequence: Synthetic oligonucleotide
  Sense strand starting at position 3917 of SEQ ID NO: 1883521
agcugagcuuuaguagaau

SEQ ID NO: 2199469 - RNA, 19 nt, Artificial Sequence
  Description of Artificial Sequence: Synthetic oligonucleotide
  Antisense strand to SEQ ID NO: 2199468
auucuacuaaagcucagcu

SEQ ID NO: 2199470 - RNA, 19 nt, Artificial Sequence
  Description of Artificial Sequence: Synthetic oligonucleotide
  Sense strand starting at position 724 of SEQ ID NO: 1883521
uacccagugucauuaguag

SEQ ID NO: 2199471 - RNA, 19 nt, Artificial Sequence
  Description of Artificial Sequence: Synthetic oligonucleotide
  Antisense strand to SEQ ID NO: 2199470
cuacuaaugacacugggua

SEQ ID NO: 2199472 - RNA, 19 nt, Artificial Sequence
  Description of Artificial Sequence: Synthetic oligonucleotide
  Sense strand starting at position 2713 of SEQ ID NO: 1883521
caguuuaugcgaugauaau

SEQ ID NO: 2199473 - RNA, 19 nt, Artificial Sequence
  Description of Artificial Sequence: Synthetic oligonucleotide
  Antisense strand to SEQ ID NO: 2199472
auuaucaucgcauaaacug

SEQ ID NO: 2199474 - RNA, 19 nt, Artificial Sequence
  Description of Artificial Sequence: Synthetic oligonucleotide
  Sense strand starting at position 2269 of SEQ ID NO: 1883521
agcuacucuuuggcuauaa

SEQ ID NO: 2199475 - RNA, 19 nt, Artificial Sequence
  Description of Artificial Sequence: Synthetic oligonucleotide
  Antisense strand to SEQ ID NO: 2199474
uuauagccaaagaguagcu

SEQ ID NO: 2199476 - RNA, 19 nt, Artificial Sequence
  Description of Artificial Sequence: Synthetic oligonucleotide
  Sense strand starting at position 1015 of SEQ ID NO: 1883521
uucucaauguuacuauguu

SEQ ID NO: 2199477 - RNA, 19 nt, Artificial Sequence
  Description of Artificial Sequence: Synthetic oligonucleotide
  Antisense strand to SEQ ID NO: 2199476
aacauaguaacauugagaa

SEQ ID NO: 2199478 - RNA, 19 nt, Artificial Sequence
  Description of Artificial Sequence: Synthetic oligonucleotide
  Sense strand starting at position 1081 of SEQ ID NO: 1883521
gcuguauguuaaccacaua

SEQ ID NO: 2199479 - RNA, 19 nt, Artificial Sequence
  Description of Artificial Sequence: Synthetic oligonucleotide
  Antisense strand to SEQ ID NO: 2199478
uaugugguuaacauacagc

SEQ ID NO: 2199480 - RNA, 19 nt, Artificial Sequence
  Description of Artificial Sequence: Synthetic oligonucleotide
  Sense strand starting at position 38 of SEQ ID NO: 1883522
caauauuuguuauccgagu

SEQ ID NO: 2199481 - RNA, 19 nt, Artificial Sequence
  Description of Artificial Sequence: Synthetic oligonucleotide
  Antisense strand to SEQ ID NO: 2199480
acucggauaacaaauauug

SEQ ID NO: 2199482 - RNA, 19 nt, Artificial Sequence
  Description of Artificial Sequence: Synthetic oligonucleotide
  Sense strand starting at position 3130 of SEQ ID NO: 1883522
aaugucuucccaggagaaa

SEQ ID NO: 2199483 - RNA, 19 nt, Artificial Sequence
  Description of Artificial Sequence: Synthetic oligonucleotide
  Antisense strand to SEQ ID NO: 2199482
uuucuccugggaagacauu

SEQ ID NO: 2199484 - RNA, 19 nt, Artificial Sequence
  Description of Artificial Sequence: Synthetic oligonucleotide
  Sense strand starting at position 2413 of SEQ ID NO: 1883522
guaugaucccaauagcaag

SEQ ID NO: 2199485 - RNA, 19 nt, Artificial Sequence
  Description of Artificial Sequence: Synthetic oligonucleotide
  Antisense strand to SEQ ID NO: 2199484
cuugcuauugggaucauac

SEQ ID NO: 2199486 - RNA, 19 nt, Artificial Sequence
  Description of Artificial Sequence: Synthetic oligonucleotide
  Sense strand starting at position 3117 of SEQ ID NO: 1883522
gaaacaguucuugaauguc

SEQ ID NO: 2199487 - RNA, 19 nt, Artificial Sequence
  Description of Artificial Sequence: Synthetic oligonucleotide
  Antisense strand to SEQ ID NO: 2199486
gacauucaagaacuguuuc

SEQ ID NO: 2199488 - RNA, 19 nt, Artificial Sequence
  Description of Artificial Sequence: Synthetic oligonucleotide
  Sense strand starting at position 258 of SEQ ID NO: 1883522
cgggcuuaacaagaucuau

SEQ ID NO: 2199489 - RNA, 19 nt, Artificial Sequence
  Description of Artificial Sequence: Synthetic oligonucleotide
  Antisense strand to SEQ ID NO: 2199488
auagaucuuguuaagcccg

SEQ ID NO: 2199490 - RNA, 19 nt, Artificial Sequence
  Description of Artificial Sequence: Synthetic oligonucleotide
  Sense strand starting at position 279 of SEQ ID NO: 1883522
uuaucaaggcuagggaauu

SEQ ID NO: 2199491 - RNA, 19 nt, Artificial Sequence
  Description of Artificial Sequence: Synthetic oligonucleotide
  Antisense strand to SEQ ID NO: 2199490
aauucccuagccuugauaa

SEQ ID NO: 2199492 - RNA, 19 nt, Artificial Sequence
  Description of Artificial Sequence: Synthetic oligonucleotide
  Sense strand starting at position 1124 of SEQ ID NO: 1883522
guguauuauauguagaaug

SEQ ID NO: 2199493 - RNA, 19 nt, Artificial Sequence
  Description of Artificial Sequence: Synthetic oligonucleotide
  Antisense strand to SEQ ID NO: 2199492
cauucuacauauaauacac

SEQ ID NO: 2199494 - RNA, 19 nt, Artificial Sequence
  Description of Artificial Sequence: Synthetic oligonucleotide
  Sense strand starting at position 1126 of SEQ ID NO: 1883522
guauuauauguagaauggu

SEQ ID NO: 2199495 - RNA, 19 nt, Artificial Sequence
  Description of Artificial Sequence: Synthetic oligonucleotide
  Antisense strand to SEQ ID NO: 2199494
accauucuacauauaauac

SEQ ID NO: 2199496 - RNA, 19 nt, Artificial Sequence
  Description of Artificial Sequence: Synthetic oligonucleotide
  Sense strand starting at position 2289 of SEQ ID NO: 1883522
ggagauguucuccaagcug

SEQ ID NO: 2199497 - RNA, 19 nt, Artificial Sequence
  Description of Artificial Sequence: Synthetic oligonucleotide
  Antisense strand to SEQ ID NO: 2199496
cagcuuggagaacaucucc

SEQ ID NO: 2199498 - RNA, 19 nt, Artificial Sequence
  Description of Artificial Sequence: Synthetic oligonucleotide
  Sense strand starting at position 3115 of SEQ ID NO: 1883522
cggaaacaguucuugaaug

SEQ ID NO: 2199499 - RNA, 19 nt, Artificial Sequence
  Description of Artificial Sequence: Synthetic oligonucleotide
  Antisense strand to SEQ ID NO: 2199498
cauucaagaacuguuuccg

SEQ ID NO: 2199500 - RNA, 19 nt, Artificial Sequence
  Description of Artificial Sequence: Synthetic oligonucleotide
  Sense strand starting at position 1111 of SEQ ID NO: 1883522
ucacaauggagauguguau

SEQ ID NO: 2199501 - RNA, 19 nt, Artificial Sequence
  Description of Artificial Sequence: Synthetic oligonucleotide
  Antisense strand to SEQ ID NO: 2199500
auacacaucuccauuguga

SEQ ID NO: 2199502 - RNA, 19 nt, Artificial Sequence
  Description of Artificial Sequence: Synthetic oligonucleotide
  Sense strand starting at position 2275 of SEQ ID NO: 1883522
gcuugacaccucugggaga

SEQ ID NO: 2199503 - RNA, 19 nt, Artificial Sequence
  Description of Artificial Sequence: Synthetic oligonucleotide
  Antisense strand to SEQ ID NO: 2199502
ucucccagaggugucaagc

SEQ ID NO: 2199504 - RNA, 19 nt, Artificial Sequence
  Description of Artificial Sequence: Synthetic oligonucleotide
  Sense strand starting at position 641 of SEQ ID NO: 1883522
guguauagaguccaucaug

SEQ ID NO: 2199505 - RNA, 19 nt, Artificial Sequence
  Description of Artificial Sequence: Synthetic oligonucleotide
  Antisense strand to SEQ ID NO: 2199504
caugauggacucuauacac

SEQ ID NO: 2199506 - RNA, 19 nt, Artificial Sequence
  Description of Artificial Sequence: Synthetic oligonucleotide
  Sense strand starting at position 2060 of SEQ ID NO: 1883522
gcguucauggcuguuguga

SEQ ID NO: 2199507 - RNA, 19 nt, Artificial Sequence
  Description of Artificial Sequence: Synthetic oligonucleotide
  Antisense strand to SEQ ID NO: 2199506
ucacaacagccaugaacgc

SEQ ID NO: 2199508 - RNA, 19 nt, Artificial Sequence
  Description of Artificial Sequence: Synthetic oligonucleotide
  Sense strand starting at position 2890 of SEQ ID NO: 1883522
ccuuaugggcgagaaguua

SEQ ID NO: 2199509 - RNA, 19 nt, Artificial Sequence
  Description of Artificial Sequence: Synthetic oligonucleotide
  Antisense strand to SEQ ID NO: 2199508
uaacuucucgcccauaagg

SEQ ID NO: 2199510 - RNA, 19 nt, Artificial Sequence
  Description of Artificial Sequence: Synthetic oligonucleotide
  Sense strand starting at position 2888 of SEQ ID NO: 1883522
uaccuuaugggcgagaagu

SEQ ID NO: 2199511 - RNA, 19 nt, Artificial Sequence
  Description of Artificial Sequence: Synthetic oligonucleotide
  Antisense strand to SEQ ID NO: 2199510
acuucucgcccauaaggua

SEQ ID NO: 2199512 - RNA, 19 nt, Artificial Sequence
  Description of Artificial Sequence: Synthetic oligonucleotide
  Sense strand starting at position 619 of SEQ ID NO: 1883522
aagcauuagguaugauuau

SEQ ID NO: 2199513 - RNA, 19 nt, Artificial Sequence
  Description of Artificial Sequence: Synthetic oligonucleotide
  Antisense strand to SEQ ID NO: 2199512
auaaucauaccuaaugcuu

SEQ ID NO: 2199514 - RNA, 19 nt, Artificial Sequence
  Description of Artificial Sequence: Synthetic oligonucleotide
  Sense strand starting at position 1172 of SEQ ID NO: 1883522
caagaacagcugcauguua

SEQ ID NO: 2199515 - RNA, 19 nt, Artificial Sequence
  Description of Artificial Sequence: Synthetic oligonucleotide
  Antisense strand to SEQ ID NO: 2199514
uaacaugcagcuguucuug

SEQ ID NO: 2199516 - RNA, 19 nt, Artificial Sequence
  Description of Artificial Sequence: Synthetic oligonucleotide
  Sense strand starting at position 2357 of SEQ ID NO: 1883522
aaguuauugcauuagguua

SEQ ID NO: 2199517 - RNA, 19 nt, Artificial Sequence
  Description of Artificial Sequence: Synthetic oligonucleotide
  Antisense strand to SEQ ID NO: 2199516
uaaccuaaugcaauaacuu

SEQ ID NO: 2199518 - RNA, 19 nt, Artificial Sequence
  Description of Artificial Sequence: Synthetic oligonucleotide
  Sense strand starting at position 290 of SEQ ID NO: 1883522
agggaauuaggcugucauc

SEQ ID NO: 2199519 - RNA, 19 nt, Artificial Sequence
  Description of Artificial Sequence: Synthetic oligonucleotide
  Antisense strand to SEQ ID NO: 2199518
gaugacagccuaauucccu

SEQ ID NO: 2199520 - RNA, 19 nt, Artificial Sequence
  Description of Artificial Sequence: Synthetic oligonucleotide
  Sense strand starting at position 1238 of SEQ ID NO: 1883522
uacugacaguuugcagaua

SEQ ID NO: 2199521 - RNA, 19 nt, Artificial Sequence
  Description of Artificial Sequence: Synthetic oligonucleotide
  Antisense strand to SEQ ID NO: 2199520
uaucugcaaacugucagua

SEQ ID NO: 2199522 - RNA, 19 nt, Artificial Sequence
  Description of Artificial Sequence: Synthetic oligonucleotide
  Sense strand starting at position 1145 of SEQ ID NO: 1883522
uuguauauucuccauguua

SEQ ID NO: 2199523 - RNA, 19 nt, Artificial Sequence
  Description of Artificial Sequence: Synthetic oligonucleotide
  Antisense strand to SEQ ID NO: 2199522
uaacauggagaauauacaa

SEQ ID NO: 2199524 - RNA, 19 nt, Artificial Sequence
  Description of Artificial Sequence: Synthetic oligonucleotide
  Sense strand starting at position 690 of SEQ ID NO: 1883522
ugcaauaauuucuaugaag

SEQ ID NO: 2199525 - RNA, 19 nt, Artificial Sequence
  Description of Artificial Sequence: Synthetic oligonucleotide
  Antisense strand to SEQ ID NO: 2199524
cuucauagaaauuauugca

SEQ ID NO: 2199526 - RNA, 19 nt, Artificial Sequence
  Description of Artificial Sequence: Synthetic oligonucleotide
  Sense strand starting at position 1217 of SEQ ID NO: 1883522
ggcuauaauuuauaaugac

SEQ ID NO: 2199527 - RNA, 19 nt, Artificial Sequence
  Description of Artificial Sequence: Synthetic oligonucleotide
  Antisense strand to SEQ ID NO: 2199526
gucauuauaaauuauagcc

SEQ ID NO: 2199528 - RNA, 19 nt, Artificial Sequence
  Description of Artificial Sequence: Synthetic oligonucleotide
  Sense strand starting at position 965 of SEQ ID NO: 1883522
caguuugcagcauagaauu

SEQ ID NO: 2199529 - RNA, 19 nt, Artificial Sequence
  Description of Artificial Sequence: Synthetic oligonucleotide
  Antisense strand to SEQ ID NO: 2199528
aauucuaugcugcaaacug

SEQ ID NO: 2199530 - RNA, 19 nt, Artificial Sequence
  Description of Artificial Sequence: Synthetic oligonucleotide
  Sense strand starting at position 1208 of SEQ ID NO: 1883522
cugugcaaaggcuauaauu

SEQ ID NO: 2199531 - RNA, 19 nt, Artificial Sequence
  Description of Artificial Sequence: Synthetic oligonucleotide
  Antisense strand to SEQ ID NO: 2199530
aauuauagccuuugcacag

SEQ ID NO: 2199532 - RNA, 19 nt, Artificial Sequence
  Description of Artificial Sequence: Synthetic oligonucleotide
  Sense strand starting at position 3063 of SEQ ID NO: 1883522
uuggcuaaugcauagcaga

SEQ ID NO: 2199533 - RNA, 19 nt, Artificial Sequence
  Description of Artificial Sequence: Synthetic oligonucleotide
  Antisense strand to SEQ ID NO: 2199532
ucugcuaugcauuagccaa

SEQ ID NO: 2199534 - RNA, 19 nt, Artificial Sequence
  Description of Artificial Sequence: Synthetic oligonucleotide
  Sense strand starting at position 589 of SEQ ID NO: 1883522
uggacauacguucaacgua

SEQ ID NO: 2199535 - RNA, 19 nt, Artificial Sequence
  Description of Artificial Sequence: Synthetic oligonucleotide
  Antisense strand to SEQ ID NO: 2199534
uacguugaacguaugucca

SEQ ID NO: 2199536 - RNA, 19 nt, Artificial Sequence
  Description of Artificial Sequence: Synthetic oligonucleotide
  Sense strand starting at position 2288 of SEQ ID NO: 1883522
gggagauguucuccaagcu

SEQ ID NO: 2199537 - RNA, 19 nt, Artificial Sequence
  Description of Artificial Sequence: Synthetic oligonucleotide
  Antisense strand to SEQ ID NO: 2199536
agcuuggagaacaucuccc

SEQ ID NO: 2199538 - RNA, 19 nt, Artificial Sequence
  Description of Artificial Sequence: Synthetic oligonucleotide
  Sense strand starting at position 2886 of SEQ ID NO: 1883522
gguaccuuaugggcgagaa

SEQ ID NO: 2199539 - RNA, 19 nt, Artificial Sequence
  Description of Artificial Sequence: Synthetic oligonucleotide
  Antisense strand to SEQ ID NO: 2199538
uucucgcccauaagguacc

SEQ ID NO: 2199540 - RNA, 19 nt, Artificial Sequence
  Description of Artificial Sequence: Synthetic oligonucleotide
  Sense strand starting at position 3921 of SEQ ID NO: 1883522
ggccuagaauuguuuauua

SEQ ID NO: 2199541 - RNA, 19 nt, Artificial Sequence
  Description of Artificial Sequence: Synthetic oligonucleotide
  Antisense strand to SEQ ID NO: 2199540
uaauaaacaauucuaggcc

SEQ ID NO: 2199542 - RNA, 19 nt, Artificial Sequence
  Description of Artificial Sequence: Synthetic oligonucleotide
  Sense strand starting at position 632 of SEQ ID NO: 1883522
gauuauugcguguauagag

SEQ ID NO: 2199543 - RNA, 19 nt, Artificial Sequence
  Description of Artificial Sequence: Synthetic oligonucleotide
  Antisense strand to SEQ ID NO: 2199542
cucuauacacgcaauaauc

SEQ ID NO: 2199544 - RNA, 19 nt, Artificial Sequence
  Description of Artificial Sequence: Synthetic oligonucleotide
  Sense strand starting at position 2887 of SEQ ID NO: 1883522
guaccuuaugggcgagaag

SEQ ID NO: 2199545 - RNA, 19 nt, Artificial Sequence
  Description of Artificial Sequence: Synthetic oligonucleotide
  Antisense strand to SEQ ID NO: 2199544
cuucucgcccauaagguac

SEQ ID NO: 2199546 - RNA, 19 nt, Artificial Sequence
  Description of Artificial Sequence: Synthetic oligonucleotide
  Sense strand starting at position 1454 of SEQ ID NO: 1883522
cccucauugcuuugaggac

SEQ ID NO: 2199547 - RNA, 19 nt, Artificial Sequence
  Description of Artificial Sequence: Synthetic oligonucleotide
  Antisense strand to SEQ ID NO: 2199546
guccucaaagcaaugaggg

SEQ ID NO: 2199548 - RNA, 19 nt, Artificial Sequence
  Description of Artificial Sequence: Synthetic oligonucleotide
  Sense strand starting at position 963 of SEQ ID NO: 1883522
agcaguuugcagcauagaa

SEQ ID NO: 2199549 - RNA, 19 nt, Artificial Sequence
  Description of Artificial Sequence: Synthetic oligonucleotide
  Antisense strand to SEQ ID NO: 2199548
uucuaugcugcaaacugcu

SEQ ID NO: 2199550 - RNA, 19 nt, Artificial Sequence
  Description of Artificial Sequence: Synthetic oligonucleotide
  Sense strand starting at position 1132 of SEQ ID NO: 1883522
uauguagaaugguuuguau

SEQ ID NO: 2199551 - RNA, 19 nt, Artificial Sequence
  Description of Artificial Sequence: Synthetic oligonucleotide
  Antisense strand to SEQ ID NO: 2199550
auacaaaccauucuacaua

SEQ ID NO: 2199552 - RNA, 19 nt, Artificial Sequence
  Description of Artificial Sequence: Synthetic oligonucleotide
  Sense strand starting at position 1135 of SEQ ID NO: 1883522
guagaaugguuuguauauu

SEQ ID NO: 2199553 - RNA, 19 nt, Artificial Sequence
  Description of Artificial Sequence: Synthetic oligonucleotide
  Antisense strand to SEQ ID NO: 2199552
aauauacaaaccauucuac

SEQ ID NO: 2199554 - RNA, 19 nt, Artificial Sequence
  Description of Artificial Sequence: Synthetic oligonucleotide
  Sense strand starting at position 1134 of SEQ ID NO: 1883522
uguagaaugguuuguauau

SEQ ID NO: 2199555 - RNA, 19 nt, Artificial Sequence
  Description of Artificial Sequence: Synthetic oligonucleotide
  Antisense strand to SEQ ID NO: 2199554
auauacaaaccauucuaca

SEQ ID NO: 2199556 - RNA, 19 nt, Artificial Sequence
  Description of Artificial Sequence: Synthetic oligonucleotide
  Sense strand starting at position 1147 of SEQ ID NO: 1883522
guauauucuccauguuaca

SEQ ID NO: 2199557 - RNA, 19 nt, Artificial Sequence
  Description of Artificial Sequence: Synthetic oligonucleotide
  Antisense strand to SEQ ID NO: 2199556
uguaacauggagaauauac

SEQ ID NO: 2199558 - RNA, 19 nt, Artificial Sequence
  Description of Artificial Sequence: Synthetic oligonucleotide
  Sense strand starting at position 1302 of SEQ ID NO: 1883522
cucugaaagugucccagua

SEQ ID NO: 2199559 - RNA, 19 nt, Artificial Sequence
  Description of Artificial Sequence: Synthetic oligonucleotide
  Antisense strand to SEQ ID NO: 2199558
uacugggacacuuucagag

SEQ ID NO: 2199560 - RNA, 19 nt, Artificial Sequence
  Description of Artificial Sequence: Synthetic oligonucleotide
  Sense strand starting at position 212 of SEQ ID NO: 1883523
ucugccauagaguaaagau

SEQ ID NO: 2199561 - RNA, 19 nt, Artificial Sequence
  Description of Artificial Sequence: Synthetic oligonucleotide
  Antisense strand to SEQ ID NO: 2199560
aucuuuacucuauggcaga

SEQ ID NO: 2199562 - RNA, 19 nt, Artificial Sequence
  Description of Artificial Sequence: Synthetic oligonucleotide
  Sense strand starting at position 2386 of SEQ ID NO: 1883523
agaguuagucgcguaaggu

SEQ ID NO: 2199563 - RNA, 19 nt, Artificial Sequence
  Description of Artificial Sequence: Synthetic oligonucleotide
  Antisense strand to SEQ ID NO: 2199562
accuuacgcgacuaacucu

SEQ ID NO: 2199564 - RNA, 19 nt, Artificial Sequence
  Description of Artificial Sequence: Synthetic oligonucleotide
  Sense strand starting at position 2384 of SEQ ID NO: 1883523
gcagaguuagucgcguaag

SEQ ID NO: 2199565 - RNA, 19 nt, Artificial Sequence
  Description of Artificial Sequence: Synthetic oligonucleotide
  Antisense strand to SEQ ID NO: 2199564
cuuacgcgacuaacucugc

SEQ ID NO: 2199566 - RNA, 19 nt, Artificial Sequence
  Description of Artificial Sequence: Synthetic oligonucleotide
  Sense strand starting at position 2320 of SEQ ID NO: 1883523
gguauucgaaggcaucuaa

SEQ ID NO: 2199567 - RNA, 19 nt, Artificial Sequence
  Description of Artificial Sequence: Synthetic oligonucleotide
  Antisense strand to SEQ ID NO: 2199566
uuagaugccuucgaauacc

SEQ ID NO: 2199568 - RNA, 19 nt, Artificial Sequence
  Description of Artificial Sequence: Synthetic oligonucleotide
  Sense strand starting at position 952 of SEQ ID NO: 1883523
uggcaauuccuugagggca

SEQ ID NO: 2199569 - RNA, 19 nt, Artificial Sequence
  Description of Artificial Sequence: Synthetic oligonucleotide
  Antisense strand to SEQ ID NO: 2199568
ugcccucaaggaauugcca

SEQ ID NO: 2199570 - RNA, 19 nt, Artificial Sequence
  Description of Artificial Sequence: Synthetic oligonucleotide
  Sense strand starting at position 2696 of SEQ ID NO: 1883523
gguuccugacuaggugaau

SEQ ID NO: 2199571 - RNA, 19 nt, Artificial Sequence
  Description of Artificial Sequence: Synthetic oligonucleotide
  Antisense strand to SEQ ID NO: 2199570
auucaccuagucaggaacc

SEQ ID NO: 2199572 - RNA, 19 nt, Artificial Sequence
  Description of Artificial Sequence: Synthetic oligonucleotide
  Sense strand starting at position 2504 of SEQ ID NO: 1883523
aauacuggcuugcugagaa

SEQ ID NO: 2199573 - RNA, 19 nt, Artificial Sequence
  Description of Artificial Sequence: Synthetic oligonucleotide
  Antisense strand to SEQ ID NO: 2199572
uucucagcaagccaguauu

SEQ ID NO: 2199574 - RNA, 19 nt, Artificial Sequence
  Description of Artificial Sequence: Synthetic oligonucleotide
  Sense strand starting at position 219 of SEQ ID NO: 1883523
uagaguaaagauugccuuu

SEQ ID NO: 2199575 - RNA, 19 nt, Artificial Sequence
  Description of Artificial Sequence: Synthetic oligonucleotide
  Antisense strand to SEQ ID NO: 2199574
aaaggcaaucuuuacucua

SEQ ID NO: 2199576 - RNA, 19 nt, Artificial Sequence
  Description of Artificial Sequence: Synthetic oligonucleotide
  Sense strand starting at position 3968 of SEQ ID NO: 1883523
gagagaagcuugcuccuga

SEQ ID NO: 2199577 - RNA, 19 nt, Artificial Sequence
  Description of Artificial Sequence: Synthetic oligonucleotide
  Antisense strand to SEQ ID NO: 2199576
ucaggagcaagcuucucuc

SEQ ID NO: 2199578 - RNA, 19 nt, Artificial Sequence
  Description of Artificial Sequence: Synthetic oligonucleotide
  Sense strand starting at position 221 of SEQ ID NO: 1883523
gaguaaagauugccuuucu

SEQ ID NO: 2199579 - RNA, 19 nt, Artificial Sequence
  Description of Artificial Sequence: Synthetic oligonucleotide
  Antisense strand to SEQ ID NO: 2199578
agaaaggcaaucuuuacuc

SEQ ID NO: 2199580 - RNA, 19 nt, Artificial Sequence
  Description of Artificial Sequence: Synthetic oligonucleotide
  Sense strand starting at position 2780 of SEQ ID NO: 1883523
gugaguucaguuugagaca

SEQ ID NO: 2199581 - RNA, 19 nt, Artificial Sequence
  Description of Artificial Sequence: Synthetic oligonucleotide
  Antisense strand to SEQ ID NO: 2199580
ugucucaaacugaacucac

SEQ ID NO: 2199582 - RNA, 19 nt, Artificial Sequence
  Description of Artificial Sequence: Synthetic oligonucleotide
  Sense strand starting at position 207 of SEQ ID NO: 1883523
uuuguucugccauagagua

SEQ ID NO: 2199583 - RNA, 19 nt, Artificial Sequence
  Description of Artificial Sequence: Synthetic oligonucleotide
  Antisense strand to SEQ ID NO: 2199582
uacucuauggcagaacaaa

SEQ ID NO: 2199584 - RNA, 19 nt, Artificial Sequence
  Description of Artificial Sequence: Synthetic oligonucleotide
  Sense strand starting at position 222 of SEQ ID NO: 1883523
aguaaagauugccuuucuu

SEQ ID NO: 2199585 - RNA, 19 nt, Artificial Sequence
  Description of Artificial Sequence: Synthetic oligonucleotide
  Antisense strand to SEQ ID NO: 2199584
aagaaaggcaaucuuuacu

SEQ ID NO: 2199586 - RNA, 19 nt, Artificial Sequence
  Description of Artificial Sequence: Synthetic oligonucleotide
  Sense strand starting at position 2318 of SEQ ID NO: 1883523
cugguauucgaaggcaucu

SEQ ID NO: 2199587 - RNA, 19 nt, Artificial Sequence
  Description of Artificial Sequence: Synthetic oligonucleotide
  Antisense strand to SEQ ID NO: 2199586
agaugccuucgaauaccag

SEQ ID NO: 2199588 - RNA, 19 nt, Artificial Sequence
  Description of Artificial Sequence: Synthetic oligonucleotide
  Sense strand starting at position 898 of SEQ ID NO: 1883523
auacgaauuuccugguuga

SEQ ID NO: 2199589 - RNA, 19 nt, Artificial Sequence
  Description of Artificial Sequence: Synthetic oligonucleotide
  Antisense strand to SEQ ID NO: 2199588
ucaaccaggaaauucguau

SEQ ID NO: 2199590 - RNA, 19 nt, Artificial Sequence
  Description of Artificial Sequence: Synthetic oligonucleotide
  Sense strand starting at position 2387 of SEQ ID NO: 1883523
gaguuagucgcguaaggug

SEQ ID NO: 2199591 - RNA, 19 nt, Artificial Sequence
  Description of Artificial Sequence: Synthetic oligonucleotide
  Antisense strand to SEQ ID NO: 2199590
caccuuacgcgacuaacuc

SEQ ID NO: 2199592 - RNA, 19 nt, Artificial Sequence
  Description of Artificial Sequence: Synthetic oligonucleotide
  Sense strand starting at position 887 of SEQ ID NO: 1883523
aucaguaccugauacgaau

SEQ ID NO: 2199593 - RNA, 19 nt, Artificial Sequence
  Description of Artificial Sequence: Synthetic oligonucleotide
  Antisense strand to SEQ ID NO: 2199592
auucguaucagguacugau

SEQ ID NO: 2199594 - RNA, 19 nt, Artificial Sequence
  Description of Artificial Sequence: Synthetic oligonucleotide
  Sense strand starting at position 616 of SEQ ID NO: 1883523
agagccacguuggagaaau

SEQ ID NO: 2199595 - RNA, 19 nt, Artificial Sequence
  Description of Artificial Sequence: Synthetic oligonucleotide
  Antisense strand to SEQ ID NO: 2199594
auuucuccaacguggcucu

SEQ ID NO: 2199596 - RNA, 19 nt, Artificial Sequence
  Description of Artificial Sequence: Synthetic oligonucleotide
  Sense strand starting at position 65 of SEQ ID NO: 1883523
agagaacaaugcuggcaaa

SEQ ID NO: 2199597 - RNA, 19 nt, Artificial Sequence
  Description of Artificial Sequence: Synthetic oligonucleotide
  Antisense strand to SEQ ID NO: 2199596
uuugccagcauuguucucu

SEQ ID NO: 2199598 - RNA, 19 nt, Artificial Sequence
  Description of Artificial Sequence: Synthetic oligonucleotide
  Sense strand starting at position 2383 of SEQ ID NO: 1883523
ugcagaguuagucgcguaa

SEQ ID NO: 2199599 - RNA, 19 nt, Artificial Sequence
  Description of Artificial Sequence: Synthetic oligonucleotide
  Antisense strand to SEQ ID NO: 2199598
uuacgcgacuaacucugca

SEQ ID NO: 2199600 - RNA, 19 nt, Artificial Sequence
  Description of Artificial Sequence: Synthetic oligonucleotide
  Sense strand starting at position 2508 of SEQ ID NO: 1883523
cuggcuugcugagaauagu

SEQ ID NO: 2199601 - RNA, 19 nt, Artificial Sequence
  Description of Artificial Sequence: Synthetic oligonucleotide
  Antisense strand to SEQ ID NO: 2199600
acuauucucagcaagccag

SEQ ID NO: 2199602 - RNA, 19 nt, Artificial Sequence
  Description of Artificial Sequence: Synthetic oligonucleotide
  Sense strand starting at position 585 of SEQ ID NO: 1883523
gguccugucuuauagaguc

SEQ ID NO: 2199603 - RNA, 19 nt, Artificial Sequence
  Description of Artificial Sequence: Synthetic oligonucleotide
  Antisense strand to SEQ ID NO: 2199602
gacucuauaagacaggacc

SEQ ID NO: 2199604 - RNA, 19 nt, Artificial Sequence
  Description of Artificial Sequence: Synthetic oligonucleotide
  Sense strand starting at position 109 of SEQ ID NO: 1883523
gguuucgucucugggcaga

SEQ ID NO: 2199605 - RNA, 19 nt, Artificial Sequence
  Description of Artificial Sequence: Synthetic oligonucleotide
  Antisense strand to SEQ ID NO: 2199604
ucugcccagagacgaaacc

SEQ ID NO: 2199606 - RNA, 19 nt, Artificial Sequence
  Description of Artificial Sequence: Synthetic oligonucleotide
  Sense strand starting at position 578 of SEQ ID NO: 1883523
uagucacgguccugucuua

SEQ ID NO: 2199607 - RNA, 19 nt, Artificial Sequence
  Description of Artificial Sequence: Synthetic oligonucleotide
  Antisense strand to SEQ ID NO: 2199606
uaagacaggaccgugacua

SEQ ID NO: 2199608 - RNA, 19 nt, Artificial Sequence
  Description of Artificial Sequence: Synthetic oligonucleotide
  Sense strand starting at position 202 of SEQ ID NO: 1883523
gucccuuuguucugccaua

SEQ ID NO: 2199609 - RNA, 19 nt, Artificial Sequence
  Description of Artificial Sequence: Synthetic oligonucleotide
  Antisense strand to SEQ ID NO: 2199608
uauggcagaacaaagggac

SEQ ID NO: 2199610 - RNA, 19 nt, Artificial Sequence
  Description of Artificial Sequence: Synthetic oligonucleotide
  Sense strand starting at position 2385 of SEQ ID NO: 1883523
cagaguuagucgcguaagg

SEQ ID NO: 2199611 - RNA, 19 nt, Artificial Sequence
  Description of Artificial Sequence: Synthetic oligonucleotide
  Antisense strand to SEQ ID NO: 2199610
ccuuacgcgacuaacucug

SEQ ID NO: 2199612 - RNA, 19 nt, Artificial Sequence
  Description of Artificial Sequence: Synthetic oligonucleotide
  Sense strand starting at position 931 of SEQ ID NO: 1883523
gccugucucuccugccaau

SEQ ID NO: 2199613 - RNA, 19 nt, Artificial Sequence
  Description of Artificial Sequence: Synthetic oligonucleotide
  Antisense strand to SEQ ID NO: 2199612
auuggcaggagagacaggc

SEQ ID NO: 2199614 - RNA, 19 nt, Artificial Sequence
  Description of Artificial Sequence: Synthetic oligonucleotide
  Sense strand starting at position 3012 of SEQ ID NO: 1883524
gggaguugcguucucguca

SEQ ID NO: 2199615 - RNA, 19 nt, Artificial Sequence
  Description of Artificial Sequence: Synthetic oligonucleotide
  Antisense strand to SEQ ID NO: 2199614
ugacgagaacgcaacuccc

SEQ ID NO: 2199616 - RNA, 19 nt, Artificial Sequence
  Description of Artificial Sequence: Synthetic oligonucleotide
  Sense strand starting at position 3271 of SEQ ID NO: 1883524
cgcauuaacggugaauaaa

SEQ ID NO: 2199617 - RNA, 19 nt, Artificial Sequence
  Description of Artificial Sequence: Synthetic oligonucleotide
  Antisense strand to SEQ ID NO: 2199616
uuuauucaccguuaaugcg

SEQ ID NO: 2199618 - RNA, 19 nt, Artificial Sequence
  Description of Artificial Sequence: Synthetic oligonucleotide
  Sense strand starting at position 3299 of SEQ ID NO: 1883524
gguugcagccaugaauaau

SEQ ID NO: 2199619 - RNA, 19 nt, Artificial Sequence
  Description of Artificial Sequence: Synthetic oligonucleotide
  Antisense strand to SEQ ID NO: 2199618
auuauucauggcugcaacc

SEQ ID NO: 2199620 - RNA, 19 nt, Artificial Sequence
  Description of Artificial Sequence: Synthetic oligonucleotide
  Sense strand starting at position 3109 of SEQ ID NO: 1883524
cagaguucucgucagguca

SEQ ID NO: 2199621 - RNA, 19 nt, Artificial Sequence
  Description of Artificial Sequence: Synthetic oligonucleotide
  Antisense strand to SEQ ID NO: 2199620
ugaccugacgagaacucug

SEQ ID NO: 2199622 - RNA, 19 nt, Artificial Sequence
  Description of Artificial Sequence: Synthetic oligonucleotide
  Sense strand starting at position 2393 of SEQ ID NO: 1883524
ccugguguuucccuauaau

SEQ ID NO: 2199623 - RNA, 19 nt, Artificial Sequence
  Description of Artificial Sequence: Synthetic oligonucleotide
  Antisense strand to SEQ ID NO: 2199622
auuauagggaaacaccagg

SEQ ID NO: 2199624 - RNA, 19 nt, Artificial Sequence
  Description of Artificial Sequence: Synthetic oligonucleotide
  Sense strand starting at position 2476 of SEQ ID NO: 1883524
gccaguacaccuugagcaa

SEQ ID NO: 2199625 - RNA, 19 nt, Artificial Sequence
  Description of Artificial Sequence: Synthetic oligonucleotide
  Antisense strand to SEQ ID NO: 2199624
uugcucaagguguacuggc

SEQ ID NO: 2199626 - RNA, 19 nt, Artificial Sequence
  Description of Artificial Sequence: Synthetic oligonucleotide
  Sense strand starting at position 3296 of SEQ ID NO: 1883524
cccgguugcagccaugaau

SEQ ID NO: 2199627 - RNA, 19 nt, Artificial Sequence
  Description of Artificial Sequence: Synthetic oligonucleotide
  Antisense strand to SEQ ID NO: 2199626
auucauggcugcaaccggg

SEQ ID NO: 2199628 - RNA, 19 nt, Artificial Sequence
  Description of Artificial Sequence: Synthetic oligonucleotide
  Sense strand starting at position 3270 of SEQ ID NO: 1883524
gcgcauuaacggugaauaa

SEQ ID NO: 2199629 - RNA, 19 nt, Artificial Sequence
  Description of Artificial Sequence: Synthetic oligonucleotide
  Antisense strand to SEQ ID NO: 2199628
uuauucaccguuaaugcgc

SEQ ID NO: 2199630 - RNA, 19 nt, Artificial Sequence
  Description of Artificial Sequence: Synthetic oligonucleotide
  Sense strand starting at position 3268 of SEQ ID NO: 1883524
gggcgcauuaacggugaau

SEQ ID NO: 2199631 - RNA, 19 nt, Artificial Sequence
  Description of Artificial Sequence: Synthetic oligonucleotide
  Antisense strand to SEQ ID NO: 2199630
auucaccguuaaugcgccc

SEQ ID NO: 2199632 - RNA, 19 nt, Artificial Sequence
  Description of Artificial Sequence: Synthetic oligonucleotide
  Sense strand starting at position 3167 of SEQ ID NO: 1883524
cugcguucugcucaguaca

SEQ ID NO: 2199633 - RNA, 19 nt, Artificial Sequence
  Description of Artificial Sequence: Synthetic oligonucleotide
  Antisense strand to SEQ ID NO: 2199632
uguacugagcagaacgcag

SEQ ID NO: 2199634 - RNA, 19 nt, Artificial Sequence
  Description of Artificial Sequence: Synthetic oligonucleotide
  Sense strand starting at position 3169 of SEQ ID NO: 1883524
gcguucugcucaguacaga

SEQ ID NO: 2199635 - RNA, 19 nt, Artificial Sequence
  Description of Artificial Sequence: Synthetic oligonucleotide
  Antisense strand to SEQ ID NO: 2199634
ucuguacugagcagaacgc

SEQ ID NO: 2199636 - RNA, 19 nt, Artificial Sequence
  Description of Artificial Sequence: Synthetic oligonucleotide
  Sense strand starting at position 2384 of SEQ ID NO: 1883524
gcauaugcuccugguguuu

SEQ ID NO: 2199637 - RNA, 19 nt, Artificial Sequence
  Description of Artificial Sequence: Synthetic oligonucleotide
  Antisense strand to SEQ ID NO: 2199636
aaacaccaggagcauaugc

SEQ ID NO: 2199638 - RNA, 19 nt, Artificial Sequence
  Description of Artificial Sequence: Synthetic oligonucleotide
  Sense strand starting at position 2260 of SEQ ID NO: 1883524
agacauugguggugggaua

SEQ ID NO: 2199639 - RNA, 19 nt, Artificial Sequence
  Description of Artificial Sequence: Synthetic oligonucleotide
  Antisense strand to SEQ ID NO: 2199638
uaucccaccaccaaugucu

SEQ ID NO: 2199640 - RNA, 19 nt, Artificial Sequence
  Description of Artificial Sequence: Synthetic oligonucleotide
  Sense strand starting at position 3017 of SEQ ID NO: 1883524
uugcguucucgucagcaca

SEQ ID NO: 2199641 - RNA, 19 nt, Artificial Sequence
  Description of Artificial Sequence: Synthetic oligonucleotide
  Antisense strand to SEQ ID NO: 2199640
ugugcugacgagaacgcaa

SEQ ID NO: 2199642 - RNA, 19 nt, Artificial Sequence
  Description of Artificial Sequence: Synthetic oligonucleotide
  Sense strand starting at position 3684 of SEQ ID NO: 1883524
gguuuaggguuagagguua

SEQ ID NO: 2199643 - RNA, 19 nt, Artificial Sequence
  Description of Artificial Sequence: Synthetic oligonucleotide
  Antisense strand to SEQ ID NO: 2199642
uaaccucuaacccuaaacc

SEQ ID NO: 2199644 - RNA, 19 nt, Artificial Sequence
  Description of Artificial Sequence: Synthetic oligonucleotide
  Sense strand starting at position 3111 of SEQ ID NO: 1883524
gaguucucgucaggucaga

SEQ ID NO: 2199645 - RNA, 19 nt, Artificial Sequence
  Description of Artificial Sequence: Synthetic oligonucleotide
  Antisense strand to SEQ ID NO: 2199644
ucugaccugacgagaacuc

SEQ ID NO: 2199646 - RNA, 19 nt, Artificial Sequence
  Description of Artificial Sequence: Synthetic oligonucleotide
  Sense strand starting at position 3499 of SEQ ID NO: 1883524
ccacauuccucaugugcuu

SEQ ID NO: 2199647 - RNA, 19 nt, Artificial Sequence
  Description of Artificial Sequence: Synthetic oligonucleotide
  Antisense strand to SEQ ID NO: 2199646
aagcacaugaggaaugugg

SEQ ID NO: 2199648 - RNA, 19 nt, Artificial Sequence
  Description of Artificial Sequence: Synthetic oligonucleotide
  Sense strand starting at position 2383 of SEQ ID NO: 1883524
agcauaugcuccugguguu

SEQ ID NO: 2199649 - RNA, 19 nt, Artificial Sequence
  Description of Artificial Sequence: Synthetic oligonucleotide
  Antisense strand to SEQ ID NO: 2199648
aacaccaggagcauaugcu

SEQ ID NO: 2199650 - RNA, 19 nt, Artificial Sequence
  Description of Artificial Sequence: Synthetic oligonucleotide
  Sense strand starting at position 3487 of SEQ ID NO: 1883525
ggaaacuaucuuugacauu

SEQ ID NO: 2199651 - RNA, 19 nt, Artificial Sequence
  Description of Artificial Sequence: Synthetic oligonucleotide
  Antisense strand to SEQ ID NO: 2199650
aaugucaaagauaguuucc

SEQ ID NO: 2199652 - RNA, 19 nt, Artificial Sequence
  Description of Artificial Sequence: Synthetic oligonucleotide
  Sense strand starting at position 658 of SEQ ID NO: 1883525
ugcuauagugaucaagaau

SEQ ID NO: 2199653 - RNA, 19 nt, Artificial Sequence
  Description of Artificial Sequence: Synthetic oligonucleotide
  Antisense strand to SEQ ID NO: 2199652
auucuugaucacuauagca

SEQ ID NO: 2199654 - RNA, 19 nt, Artificial Sequence
  Description of Artificial Sequence: Synthetic oligonucleotide
  Sense strand starting at position 1166 of SEQ ID NO: 1883525
gacggucuucgagagggaa

SEQ ID NO: 2199655 - RNA, 19 nt, Artificial Sequence
  Description of Artificial Sequence: Synthetic oligonucleotide
  Antisense strand to SEQ ID NO: 2199654
uucccucucgaagaccguc

SEQ ID NO: 2199656 - RNA, 19 nt, Artificial Sequence
  Description of Artificial Sequence: Synthetic oligonucleotide
  Sense strand starting at position 2917 of SEQ ID NO: 1883525
agaaaucgcucauuugcau

SEQ ID NO: 2199657 - RNA, 19 nt, Artificial Sequence
  Description of Artificial Sequence: Synthetic oligonucleotide
  Antisense strand to SEQ ID NO: 2199656
augcaaaugagcgauuucu

SEQ ID NO: 2199658 - RNA, 19 nt, Artificial Sequence
  Description of Artificial Sequence: Synthetic oligonucleotide
  Sense strand starting at position 730 of SEQ ID NO: 1883525
cucuuaucgcguguacaca

SEQ ID NO: 2199659 - RNA, 19 nt, Artificial Sequence
  Description of Artificial Sequence: Synthetic oligonucleotide
  Antisense strand to SEQ ID NO: 2199658
uguguacacgcgauaagag

SEQ ID NO: 2199660 - RNA, 19 nt, Artificial Sequence
  Description of Artificial Sequence: Synthetic oligonucleotide
  Sense strand starting at position 1267 of SEQ ID NO: 1883525
aggagucagccuuaggacu

SEQ ID NO: 2199661 - RNA, 19 nt, Artificial Sequence
  Description of Artificial Sequence: Synthetic oligonucleotide
  Antisense strand to SEQ ID NO: 2199660
aguccuaaggcugacuccu

SEQ ID NO: 2199662 - RNA, 19 nt, Artificial Sequence
  Description of Artificial Sequence: Synthetic oligonucleotide
  Sense strand starting at position 3285 of SEQ ID NO: 1883525
gauuauaccugggucauaa

SEQ ID NO: 2199663 - RNA, 19 nt, Artificial Sequence
  Description of Artificial Sequence: Synthetic oligonucleotide
  Antisense strand to SEQ ID NO: 2199662
uuaugacccagguauaauc

SEQ ID NO: 2199664 - RNA, 19 nt, Artificial Sequence
  Description of Artificial Sequence: Synthetic oligonucleotide
  Sense strand starting at position 1305 of SEQ ID NO: 1883525
uuagucacuccagaguuaa

SEQ ID NO: 2199665 - RNA, 19 nt, Artificial Sequence
  Description of Artificial Sequence: Synthetic oligonucleotide
  Antisense strand to SEQ ID NO: 2199664
uuaacucuggagugacuaa

SEQ ID NO: 2199666 - RNA, 19 nt, Artificial Sequence
  Description of Artificial Sequence: Synthetic oligonucleotide
  Sense strand starting at position 3284 of SEQ ID NO: 1883525
agauuauaccugggucaua

SEQ ID NO: 2199667 - RNA, 19 nt, Artificial Sequence
  Description of Artificial Sequence: Synthetic oligonucleotide
  Antisense strand to SEQ ID NO: 2199666
uaugacccagguauaaucu

SEQ ID NO: 2199668 - RNA, 19 nt, Artificial Sequence
  Description of Artificial Sequence: Synthetic oligonucleotide
  Sense strand starting at position 3305 of SEQ ID NO: 1883525
ugcacugcuguccauuuau

SEQ ID NO: 2199669 - RNA, 19 nt, Artificial Sequence
  Description of Artificial Sequence: Synthetic oligonucleotide
  Antisense strand to SEQ ID NO: 2199668
auaaauggacagcagugca

SEQ ID NO: 2199670 - RNA, 19 nt, Artificial Sequence
  Description of Artificial Sequence: Synthetic oligonucleotide
  Sense strand starting at position 3282 of SEQ ID NO: 1883525
ugagauuauaccuggguca

SEQ ID NO: 2199671 - RNA, 19 nt, Artificial Sequence
  Description of Artificial Sequence: Synthetic oligonucleotide
  Antisense strand to SEQ ID NO: 2199670
ugacccagguauaaucuca

SEQ ID NO: 2199672 - RNA, 19 nt, Artificial Sequence
  Description of Artificial Sequence: Synthetic oligonucleotide
  Sense strand starting at position 3283 of SEQ ID NO: 1883525
gagauuauaccugggucau

SEQ ID NO: 2199673 - RNA, 19 nt, Artificial Sequence
  Description of Artificial Sequence: Synthetic oligonucleotide
  Antisense strand to SEQ ID NO: 2199672
augacccagguauaaucuc

SEQ ID NO: 2199674 - RNA, 19 nt, Artificial Sequence
  Description of Artificial Sequence: Synthetic oligonucleotide
  Sense strand starting at position 657 of SEQ ID NO: 1883525
augcuauagugaucaagaa

SEQ ID NO: 2199675 - RNA, 19 nt, Artificial Sequence
  Description of Artificial Sequence: Synthetic oligonucleotide
  Antisense strand to SEQ ID NO: 2199674
uucuugaucacuauagcau

SEQ ID NO: 2199676 - RNA, 19 nt, Artificial Sequence
  Description of Artificial Sequence: Synthetic oligonucleotide
  Sense strand starting at position 3075 of SEQ ID NO: 1883525
cuaguuauuuaggaagaag

SEQ ID NO: 2199677 - RNA, 19 nt, Artificial Sequence
  Description of Artificial Sequence: Synthetic oligonucleotide
  Antisense strand to SEQ ID NO: 2199676
cuucuuccuaaauaacuag

SEQ ID NO: 2199678 - RNA, 19 nt, Artificial Sequence
  Description of Artificial Sequence: Synthetic oligonucleotide
  Sense strand starting at position 1145 of SEQ ID NO: 1883525
uccuuauuagugcagauaa

SEQ ID NO: 2199679 - RNA, 19 nt, Artificial Sequence
  Description of Artificial Sequence: Synthetic oligonucleotide
  Antisense strand to SEQ ID NO: 2199678
uuaucugcacuaauaagga

SEQ ID NO: 2199680 - RNA, 19 nt, Artificial Sequence
  Description of Artificial Sequence: Synthetic oligonucleotide
  Sense strand starting at position 1252 of SEQ ID NO: 1883525
guuacagcucuuuacagga

SEQ ID NO: 2199681 - RNA, 19 nt, Artificial Sequence
  Description of Artificial Sequence: Synthetic oligonucleotide
  Antisense strand to SEQ ID NO: 2199680
uccuguaaagagcuguaac

SEQ ID NO: 2199682 - RNA, 19 nt, Artificial Sequence
  Description of Artificial Sequence: Synthetic oligonucleotide
  Sense strand starting at position 1137 of SEQ ID NO: 1883525
uggguaauuccuuauuagu

SEQ ID NO: 2199683 - RNA, 19 nt, Artificial Sequence
  Description of Artificial Sequence: Synthetic oligonucleotide
  Antisense strand to SEQ ID NO: 2199682
acuaauaaggaauuaccca

SEQ ID NO: 2199684 - RNA, 19 nt, Artificial Sequence
  Description of Artificial Sequence: Synthetic oligonucleotide
  Sense strand starting at position 3422 of SEQ ID NO: 1883525
agaaaugcgcagcaauaaa

SEQ ID NO: 2199685 - RNA, 19 nt, Artificial Sequence
  Description of Artificial Sequence: Synthetic oligonucleotide
  Antisense strand to SEQ ID NO: 2199684
uuuauugcugcgcauuucu

SEQ ID NO: 2199686 - RNA, 19 nt, Artificial Sequence
  Description of Artificial Sequence: Synthetic oligonucleotide
  Sense strand starting at position 1136 of SEQ ID NO: 1883525
cuggguaauuccuuauuag

SEQ ID NO: 2199687 - RNA, 19 nt, Artificial Sequence
  Description of Artificial Sequence: Synthetic oligonucleotide
  Antisense strand to SEQ ID NO: 2199686
cuaauaaggaauuacccag

SEQ ID NO: 2199688 - RNA, 19 nt, Artificial Sequence
  Description of Artificial Sequence: Synthetic oligonucleotide
  Sense strand starting at position 2729 of SEQ ID NO: 1883525
ccgggagauacgugaagau

SEQ ID NO: 2199689 - RNA, 19 nt, Artificial Sequence
  Description of Artificial Sequence: Synthetic oligonucleotide
  Antisense strand to SEQ ID NO: 2199688
aucuucacguaucucccgg

SEQ ID NO: 2199690 - RNA, 19 nt, Artificial Sequence
  Description of Artificial Sequence: Synthetic oligonucleotide
  Sense strand starting at position 3419 of SEQ ID NO: 1883525
agaagaaaugcgcagcaau

SEQ ID NO: 2199691 - RNA, 19 nt, Artificial Sequence
  Description of Artificial Sequence: Synthetic oligonucleotide
  Antisense strand to SEQ ID NO: 2199690
auugcugcgcauuucuucu

SEQ ID NO: 2199692 - RNA, 19 nt, Artificial Sequence
  Description of Artificial Sequence: Synthetic oligonucleotide
  Sense strand starting at position 2720 of SEQ ID NO: 1883525
aggacagugccgggagaua

SEQ ID NO: 2199693 - RNA, 19 nt, Artificial Sequence
  Description of Artificial Sequence: Synthetic oligonucleotide
  Antisense strand to SEQ ID NO: 2199692
uaucucccggcacuguccu

SEQ ID NO: 2199694 - RNA, 19 nt, Artificial Sequence
  Description of Artificial Sequence: Synthetic oligonucleotide
  Sense strand starting at position 925 of SEQ ID NO: 1883525
cggguuugcacacaauuaa

SEQ ID NO: 2199695 - RNA, 19 nt, Artificial Sequence
  Description of Artificial Sequence: Synthetic oligonucleotide
  Antisense strand to SEQ ID NO: 2199694
uuaauugugugcaaacccg

SEQ ID NO: 2199696 - RNA, 19 nt, Artificial Sequence
  Description of Artificial Sequence: Synthetic oligonucleotide
  Sense strand starting at position 3157 of SEQ ID NO: 1883525
gauuccauggcaggucaaa

SEQ ID NO: 2199697 - RNA, 19 nt, Artificial Sequence
  Description of Artificial Sequence: Synthetic oligonucleotide
  Antisense strand to SEQ ID NO: 2199696
uuugaccugccauggaauc

SEQ ID NO: 2199698 - RNA, 19 nt, Artificial Sequence
  Description of Artificial Sequence: Synthetic oligonucleotide
  Sense strand starting at position 655 of SEQ ID NO: 1883525
gcaugcuauagugaucaag

SEQ ID NO: 2199699 - RNA, 19 nt, Artificial Sequence
  Description of Artificial Sequence: Synthetic oligonucleotide
  Antisense strand to SEQ ID NO: 2199698
cuugaucacuauagcaugc

SEQ ID NO: 2199700 - RNA, 19 nt, Artificial Sequence
  Description of Artificial Sequence: Synthetic oligonucleotide
  Sense strand starting at position 2769 of SEQ ID NO: 1883525
ggaauucccacgcaugagu

SEQ ID NO: 2199701 - RNA, 19 nt, Artificial Sequence
  Description of Artificial Sequence: Synthetic oligonucleotide
  Antisense strand to SEQ ID NO: 2199700
acucaugcgugggaauucc

SEQ ID NO: 2199702 - RNA, 19 nt, Artificial Sequence
  Description of Artificial Sequence: Synthetic oligonucleotide
  Sense strand starting at position 2166 of SEQ ID NO: 1883525
cgcugugagccgucggaca

SEQ ID NO: 2199703 - RNA, 19 nt, Artificial Sequence
  Description of Artificial Sequence: Synthetic oligonucleotide
  Antisense strand to SEQ ID NO: 2199702
uguccgacggcucacagcg

SEQ ID NO: 2199704 - RNA, 19 nt, Artificial Sequence
  Description of Artificial Sequence: Synthetic oligonucleotide
  Sense strand starting at position 3335 of SEQ ID NO: 1883525
auugcauagccauggauaa

SEQ ID NO: 2199705 - RNA, 19 nt, Artificial Sequence
  Description of Artificial Sequence: Synthetic oligonucleotide
  Antisense strand to SEQ ID NO: 2199704
uuauccauggcuaugcaau

SEQ ID NO: 2199706 - RNA, 19 nt, Artificial Sequence
  Description of Artificial Sequence: Synthetic oligonucleotide
  Sense strand starting at position 728 of SEQ ID NO: 1883525
ugcucuuaucgcguguaca

SEQ ID NO: 2199707 - RNA, 19 nt, Artificial Sequence
  Description of Artificial Sequence: Synthetic oligonucleotide
  Antisense strand to SEQ ID NO: 2199706
uguacacgcgauaagagca

SEQ ID NO: 2199708 - RNA, 19 nt, Artificial Sequence
  Description of Artificial Sequence: Synthetic oligonucleotide
  Sense strand starting at position 3202 of SEQ ID NO: 1883525
ucuggugaguauccacaua

SEQ ID NO: 2199709 - RNA, 19 nt, Artificial Sequence
  Description of Artificial Sequence: Synthetic oligonucleotide
  Antisense strand to SEQ ID NO: 2199708
uauguggauacucaccaga

SEQ ID NO: 2199710 - RNA, 19 nt, Artificial Sequence
  Description of Artificial Sequence: Synthetic oligonucleotide
  Sense strand starting at position 516 of SEQ ID NO: 1883525
gccuauaugacaggcagau

SEQ ID NO: 2199711 - RNA, 19 nt, Artificial Sequence
  Description of Artificial Sequence: Synthetic oligonucleotide
  Antisense strand to SEQ ID NO: 2199710
aucugccugucauauaggc

SEQ ID NO: 2199712 - RNA, 19 nt, Artificial Sequence
  Description of Artificial Sequence: Synthetic oligonucleotide
  Sense strand starting at position 3074 of SEQ ID NO: 1883525
acuaguuauuuaggaagaa

SEQ ID NO: 2199713 - RNA, 19 nt, Artificial Sequence
  Description of Artificial Sequence: Synthetic oligonucleotide
  Antisense strand to SEQ ID NO: 2199712
uucuuccuaaauaacuagu

SEQ ID NO: 2199714 - RNA, 19 nt, Artificial Sequence
  Description of Artificial Sequence: Synthetic oligonucleotide
  Sense strand starting at position 456 of SEQ ID NO: 1883525
uguggauugaguggcagaa

SEQ ID NO: 2199715 - RNA, 19 nt, Artificial Sequence
  Description of Artificial Sequence: Synthetic oligonucleotide
  Antisense strand to SEQ ID NO: 2199714
uucugccacucaauccaca

SEQ ID NO: 2199716 - RNA, 19 nt, Artificial Sequence
  Description of Artificial Sequence: Synthetic oligonucleotide
  Sense strand starting at position 3196 of SEQ ID NO: 1883525
ugcauaucuggugaguauc

SEQ ID NO: 2199717 - RNA, 19 nt, Artificial Sequence
  Description of Artificial Sequence: Synthetic oligonucleotide
  Antisense strand to SEQ ID NO: 2199716
gauacucaccagauaugca

SEQ ID NO: 2199718 - RNA, 19 nt, Artificial Sequence
  Description of Artificial Sequence: Synthetic oligonucleotide
  Sense strand starting at position 2738 of SEQ ID NO: 1883525
acgugaagauuccuuccca

SEQ ID NO: 2199719 - RNA, 19 nt, Artificial Sequence
  Description of Artificial Sequence: Synthetic oligonucleotide
  Antisense strand to SEQ ID NO: 2199718
ugggaaggaaucuucacgu

SEQ ID NO: 2199720 - RNA, 19 nt, Artificial Sequence
  Description of Artificial Sequence: Synthetic oligonucleotide
  Sense strand starting at position 3336 of SEQ ID NO: 1883525
uugcauagccauggauaau

SEQ ID NO: 2199721 - RNA, 19 nt, Artificial Sequence
  Description of Artificial Sequence: Synthetic oligonucleotide
  Antisense strand to SEQ ID NO: 2199720
auuauccauggcuaugcaa

SEQ ID NO: 2199722 - RNA, 19 nt, Artificial Sequence
  Description of Artificial Sequence: Synthetic oligonucleotide
  Sense strand starting at position 2739 of SEQ ID NO: 1883525
cgugaagauuccuucccag

SEQ ID NO: 2199723 - RNA, 19 nt, Artificial Sequence
  Description of Artificial Sequence: Synthetic oligonucleotide
  Antisense strand to SEQ ID NO: 2199722
cugggaaggaaucuucacg

SEQ ID NO: 2199724 - RNA, 19 nt, Artificial Sequence
  Description of Artificial Sequence: Synthetic oligonucleotide
  Sense strand starting at position 327 of SEQ ID NO: 1883525
agguacuauuggccaaagu

SEQ ID NO: 2199725 - RNA, 19 nt, Artificial Sequence
  Description of Artificial Sequence: Synthetic oligonucleotide
  Antisense strand to SEQ ID NO: 2199724
acuuuggccaauaguaccu

SEQ ID NO: 2199726 - RNA, 19 nt, Artificial Sequence
  Description of Artificial Sequence: Synthetic oligonucleotide
  Sense strand starting at position 1626 of SEQ ID NO: 1883525
gcgcuuguacgcaaacgau

SEQ ID NO: 2199727 - RNA, 19 nt, Artificial Sequence
  Description of Artificial Sequence: Synthetic oligonucleotide
  Antisense strand to SEQ ID NO: 2199726
aucguuugcguacaagcgc

SEQ ID NO: 2199728 - RNA, 19 nt, Artificial Sequence
  Description of Artificial Sequence: Synthetic oligonucleotide
  Sense strand starting at position 2767 of SEQ ID NO: 1883525
cuggaauucccacgcauga

SEQ ID NO: 2199729 - RNA, 19 nt, Artificial Sequence
  Description of Artificial Sequence: Synthetic oligonucleotide
  Antisense strand to SEQ ID NO: 2199728
ucaugcgugggaauuccag

SEQ ID NO: 2199730 - RNA, 19 nt, Artificial Sequence
  Description of Artificial Sequence: Synthetic oligonucleotide
  Sense strand starting at position 1639 of SEQ ID NO: 1883526
ccaagcagagccuguauuu

SEQ ID NO: 2199731 - RNA, 19 nt, Artificial Sequence
  Description of Artificial Sequence: Synthetic oligonucleotide
  Antisense strand to SEQ ID NO: 2199730
aaauacaggcucugcuugg

SEQ ID NO: 2199732 - RNA, 19 nt, Artificial Sequence
  Description of Artificial Sequence: Synthetic oligonucleotide
  Sense strand starting at position 437 of SEQ ID NO: 1883526
agcucucugcaucaaggaa

SEQ ID NO: 2199733 - RNA, 19 nt, Artificial Sequence
  Description of Artificial Sequence: Synthetic oligonucleotide
  Antisense strand to SEQ ID NO: 2199732
uuccuugaugcagagagcu

SEQ ID NO: 2199734 - RNA, 19 nt, Artificial Sequence
  Description of Artificial Sequence: Synthetic oligonucleotide
  Sense strand starting at position 3695 of SEQ ID NO: 1883526
acggguguccaagaccuua

SEQ ID NO: 2199735 - RNA, 19 nt, Artificial Sequence
  Description of Artificial Sequence: Synthetic oligonucleotide
  Antisense strand to SEQ ID NO: 2199734
uaaggucuuggacacccgu

SEQ ID NO: 2199736 - RNA, 19 nt, Artificial Sequence
  Description of Artificial Sequence: Synthetic oligonucleotide
  Sense strand starting at position 520 of SEQ ID NO: 1883526
ccauuugugcaaugucuuu

SEQ ID NO: 2199737 - RNA, 19 nt, Artificial Sequence
  Description of Artificial Sequence: Synthetic oligonucleotide
  Antisense strand to SEQ ID NO: 2199736
aaagacauugcacaaaugg

SEQ ID NO: 2199738 - RNA, 19 nt, Artificial Sequence
  Description of Artificial Sequence: Synthetic oligonucleotide
  Sense strand starting at position 3737 of SEQ ID NO: 1883526
ugaccauagaguugggcau

SEQ ID NO: 2199739 - RNA, 19 nt, Artificial Sequence
  Description of Artificial Sequence: Synthetic oligonucleotide
  Antisense strand to SEQ ID NO: 2199738
augcccaacucuaugguca

SEQ ID NO: 2199740 - RNA, 19 nt, Artificial Sequence
  Description of Artificial Sequence: Synthetic oligonucleotide
  Sense strand starting at position 3738 of SEQ ID NO: 1883526
gaccauagaguugggcauu

SEQ ID NO: 2199741 - RNA, 19 nt, Artificial Sequence
  Description of Artificial Sequence: Synthetic oligonucleotide
  Antisense strand to SEQ ID NO: 2199740
aaugcccaacucuaugguc

SEQ ID NO: 2199742 - RNA, 19 nt, Artificial Sequence
  Description of Artificial Sequence: Synthetic oligonucleotide
  Sense strand starting at position 3195 of SEQ ID NO: 1883526
acacuauuguccucuggac

SEQ ID NO: 2199743 - RNA, 19 nt, Artificial Sequence
  Description of Artificial Sequence: Synthetic oligonucleotide
  Antisense strand to SEQ ID NO: 2199742
guccagaggacaauagugu

SEQ ID NO: 2199744 - RNA, 19 nt, Artificial Sequence
  Description of Artificial Sequence: Synthetic oligonucleotide
  Sense strand starting at position 3197 of SEQ ID NO: 1883526
acuauuguccucuggacau

SEQ ID NO: 2199745 - RNA, 19 nt, Artificial Sequence
  Description of Artificial Sequence: Synthetic oligonucleotide
  Antisense strand to SEQ ID NO: 2199744
auguccagaggacaauagu

SEQ ID NO: 2199746 - RNA, 19 nt, Artificial Sequence
  Description of Artificial Sequence: Synthetic oligonucleotide
  Sense strand starting at position 3706 of SEQ ID NO: 1883526
agaccuuagccuuggguga

SEQ ID NO: 2199747 - RNA, 19 nt, Artificial Sequence
  Description of Artificial Sequence: Synthetic oligonucleotide
  Antisense strand to SEQ ID NO: 2199746
ucacccaaggcuaaggucu

SEQ ID NO: 2199748 - RNA, 19 nt, Artificial Sequence
  Description of Artificial Sequence: Synthetic oligonucleotide
  Sense strand starting at position 2923 of SEQ ID NO: 1883526
gggcacauuccugggugau

SEQ ID NO: 2199749 - RNA, 19 nt, Artificial Sequence
  Description of Artificial Sequence: Synthetic oligonucleotide
  Antisense strand to SEQ ID NO: 2199748
aucacccaggaaugugccc

SEQ ID NO: 2199750 - RNA, 19 nt, Artificial Sequence
  Description of Artificial Sequence: Synthetic oligonucleotide
  Sense strand starting at position 2428 of SEQ ID NO: 1883526
gccucuacuccagguagga

SEQ ID NO: 2199751 - RNA, 19 nt, Artificial Sequence
  Description of Artificial Sequence: Synthetic oligonucleotide
  Antisense strand to SEQ ID NO: 2199750
uccuaccuggaguagaggc

SEQ ID NO: 2199752 - RNA, 19 nt, Artificial Sequence
  Description of Artificial Sequence: Synthetic oligonucleotide
  Sense strand starting at position 2924 of SEQ ID NO: 1883526
ggcacauuccugggugauc

SEQ ID NO: 2199753 - RNA, 19 nt, Artificial Sequence
  Description of Artificial Sequence: Synthetic oligonucleotide
  Antisense strand to SEQ ID NO: 2199752
gaucacccaggaaugugcc

SEQ ID NO: 2199754 - RNA, 19 nt, Artificial Sequence
  Description of Artificial Sequence: Synthetic oligonucleotide
  Sense strand starting at position 3750 of SEQ ID NO: 1883526
gggcauucuccaggcuaca

SEQ ID NO: 2199755 - RNA, 19 nt, Artificial Sequence
  Description of Artificial Sequence: Synthetic oligonucleotide
  Antisense strand to SEQ ID NO: 2199754
uguagccuggagaaugccc

SEQ ID NO: 2199756 - RNA, 19 nt, Artificial Sequence
  Description of Artificial Sequence: Synthetic oligonucleotide
  Sense strand starting at position 1208 of SEQ ID NO: 1883526
ccuggacuucuccgaguca

SEQ ID NO: 2199757 - RNA, 19 nt, Artificial Sequence
  Description of Artificial Sequence: Synthetic oligonucleotide
  Antisense strand to SEQ ID NO: 2199756
ugacucggagaaguccagg

SEQ ID NO: 2199758 - RNA, 19 nt, Artificial Sequence
  Description of Artificial Sequence: Synthetic oligonucleotide
  Sense strand starting at position 3635 of SEQ ID NO: 1883526
agugaguuugagugugagu

SEQ ID NO: 2199759 - RNA, 19 nt, Artificial Sequence
  Description of Artificial Sequence: Synthetic oligonucleotide
  Antisense strand to SEQ ID NO: 2199758
acucacacucaaacucacu

SEQ ID NO: 2199760 - RNA, 19 nt, Artificial Sequence
  Description of Artificial Sequence: Synthetic oligonucleotide
  Sense strand starting at position 3541 of SEQ ID NO: 1883526
aaggguuuccuccgcugau

SEQ ID NO: 2199761 - RNA, 19 nt, Artificial Sequence
  Description of Artificial Sequence: Synthetic oligonucleotide
  Antisense strand to SEQ ID NO: 2199760
aucagcggaggaaacccuu

SEQ ID NO: 2199762 - RNA, 19 nt, Artificial Sequence
  Description of Artificial Sequence: Synthetic oligonucleotide
  Sense strand starting at position 1209 of SEQ ID NO: 1883526
cuggacuucuccgagucau

SEQ ID NO: 2199763 - RNA, 19 nt, Artificial Sequence
  Description of Artificial Sequence: Synthetic oligonucleotide
  Antisense strand to SEQ ID NO: 2199762
augacucggagaaguccag

SEQ ID NO: 2199764 - RNA, 19 nt, Artificial Sequence
  Description of Artificial Sequence: Synthetic oligonucleotide
  Sense strand starting at position 1648 of SEQ ID NO: 1883526
gccuguauuugucaucggu

SEQ ID NO: 2199765 - RNA, 19 nt, Artificial Sequence
  Description of Artificial Sequence: Synthetic oligonucleotide
  Antisense strand to SEQ ID NO: 2199764
accgaugacaaauacaggc

SEQ ID NO: 2199766 - RNA, 19 nt, Artificial Sequence
  Description of Artificial Sequence: Synthetic oligonucleotide
  Sense strand starting at position 865 of SEQ ID NO: 1883527
guagguagugaagaaucua

SEQ ID NO: 2199767 - RNA, 19 nt, Artificial Sequence
  Description of Artificial Sequence: Synthetic oligonucleotide
  Antisense strand to SEQ ID NO: 2199766
uagauucuucacuaccuac

SEQ ID NO: 2199768 - RNA, 19 nt, Artificial Sequence
  Description of Artificial Sequence: Synthetic oligonucleotide
  Sense strand starting at position 1416 of SEQ ID NO: 1883527
ggagaucaucuagggccaa

SEQ ID NO: 2199769 - RNA, 19 nt, Artificial Sequence
  Description of Artificial Sequence: Synthetic oligonucleotide
  Antisense strand to SEQ ID NO: 2199768
uuggcccuagaugaucucc

SEQ ID NO: 2199770 - RNA, 19 nt, Artificial Sequence
  Description of Artificial Sequence: Synthetic oligonucleotide
  Sense strand starting at position 1910 of SEQ ID NO: 1883527
cuuugacgucgcaaggguu

SEQ ID NO: 2199771 - RNA, 19 nt, Artificial Sequence
  Description of Artificial Sequence: Synthetic oligonucleotide
  Antisense strand to SEQ ID NO: 2199770
aacccuugcgacgucaaag

SEQ ID NO: 2199772 - RNA, 19 nt, Artificial Sequence
  Description of Artificial Sequence: Synthetic oligonucleotide
  Sense strand starting at position 1279 of SEQ ID NO: 1883527
agagauucugaggguguua

SEQ ID NO: 2199773 - RNA, 19 nt, Artificial Sequence
  Description of Artificial Sequence: Synthetic oligonucleotide
  Antisense strand to SEQ ID NO: 2199772
uaacacccucagaaucucu

SEQ ID NO: 2199774 - RNA, 19 nt, Artificial Sequence
  Description of Artificial Sequence: Synthetic oligonucleotide
  Sense strand starting at position 38 of SEQ ID NO: 1883527
acgugacacccaggacaau

SEQ ID NO: 2199775 - RNA, 19 nt, Artificial Sequence
  Description of Artificial Sequence: Synthetic oligonucleotide
  Antisense strand to SEQ ID NO: 2199774
auuguccugggugucacgu

SEQ ID NO: 2199776 - RNA, 19 nt, Artificial Sequence
  Description of Artificial Sequence: Synthetic oligonucleotide
  Sense strand starting at position 1665 of SEQ ID NO: 1883527
uagagauuccguuagguca

SEQ ID NO: 2199777 - RNA, 19 nt, Artificial Sequence
  Description of Artificial Sequence: Synthetic oligonucleotide
  Antisense strand to SEQ ID NO: 2199776
ugaccuaacggaaucucua

SEQ ID NO: 2199778 - RNA, 19 nt, Artificial Sequence
  Description of Artificial Sequence: Synthetic oligonucleotide
  Sense strand starting at position 1932 of SEQ ID NO: 1883527
gaagguucuccugggauuc

SEQ ID NO: 2199779 - RNA, 19 nt, Artificial Sequence
  Description of Artificial Sequence: Synthetic oligonucleotide
  Antisense strand to SEQ ID NO: 2199778
gaaucccaggagaaccuuc

SEQ ID NO: 2199780 - RNA, 19 nt, Artificial Sequence
  Description of Artificial Sequence: Synthetic oligonucleotide
  Sense strand starting at position 966 of SEQ ID NO: 1883527
agaccucauggguguccaa

SEQ ID NO: 2199781 - RNA, 19 nt, Artificial Sequence
  Description of Artificial Sequence: Synthetic oligonucleotide
  Antisense strand to SEQ ID NO: 2199780
uuggacacccaugaggucu

SEQ ID NO: 2199782 - RNA, 19 nt, Artificial Sequence
  Description of Artificial Sequence: Synthetic oligonucleotide
  Sense strand starting at position 1765 of SEQ ID NO: 1883527
guaagaagugcugaccuuu

SEQ ID NO: 2199783 - RNA, 19 nt, Artificial Sequence
  Description of Artificial Sequence: Synthetic oligonucleotide
  Antisense strand to SEQ ID NO: 2199782
aaaggucagcacuucuuac

SEQ ID NO: 2199784 - RNA, 19 nt, Artificial Sequence
  Description of Artificial Sequence: Synthetic oligonucleotide
  Sense strand starting at position 1973 of SEQ ID NO: 1883527
ccuucucaacccggagauu

SEQ ID NO: 2199785 - RNA, 19 nt, Artificial Sequence
  Description of Artificial Sequence: Synthetic oligonucleotide
  Antisense strand to SEQ ID NO: 2199784
aaucuccggguugagaagg

SEQ ID NO: 2199786 - RNA, 19 nt, Artificial Sequence
  Description of Artificial Sequence: Synthetic oligonucleotide
  Sense strand starting at position 2118 of SEQ ID NO: 1883527
gugguugagugaucccaga

SEQ ID NO: 2199787 - RNA, 19 nt, Artificial Sequence
  Description of Artificial Sequence: Synthetic oligonucleotide
  Antisense strand to SEQ ID NO: 2199786
ucugggaucacucaaccac

SEQ ID NO: 2199788 - RNA, 19 nt, Artificial Sequence
  Description of Artificial Sequence: Synthetic oligonucleotide
  Sense strand starting at position 1663 of SEQ ID NO: 1883527
guuagagauuccguuaggu

SEQ ID NO: 2199789 - RNA, 19 nt, Artificial Sequence
  Description of Artificial Sequence: Synthetic oligonucleotide
  Antisense strand to SEQ ID NO: 2199788
accuaacggaaucucuaac

SEQ ID NO: 2199790 - RNA, 19 nt, Artificial Sequence
  Description of Artificial Sequence: Synthetic oligonucleotide
  Sense strand starting at position 3422 of SEQ ID NO: 1883527
uguaaaguuucgguaaguc

SEQ ID NO: 2199791 - RNA, 19 nt, Artificial Sequence
  Description of Artificial Sequence: Synthetic oligonucleotide
  Antisense strand to SEQ ID NO: 2199790
gacuuaccgaaacuuuaca

SEQ ID NO: 2199792 - RNA, 19 nt, Artificial Sequence
  Description of Artificial Sequence: Synthetic oligonucleotide
  Sense strand starting at position 3965 of SEQ ID NO: 1883527
ggaggcagauccugaaaga

SEQ ID NO: 2199793 - RNA, 19 nt, Artificial Sequence
  Description of Artificial Sequence: Synthetic oligonucleotide
  Antisense strand to SEQ ID NO: 2199792
ucuuucaggaucugccucc

SEQ ID NO: 2199794 - RNA, 19 nt, Artificial Sequence
  Description of Artificial Sequence: Synthetic oligonucleotide
  Sense strand starting at position 1284 of SEQ ID NO: 1883527
uucugaggguguuaaggaa

SEQ ID NO: 2199795 - RNA, 19 nt, Artificial Sequence
  Description of Artificial Sequence: Synthetic oligonucleotide
  Antisense strand to SEQ ID NO: 2199794
uuccuuaacacccucagaa

SEQ ID NO: 2199796 - RNA, 19 nt, Artificial Sequence
  Description of Artificial Sequence: Synthetic oligonucleotide
  Sense strand starting at position 861 of SEQ ID NO: 1883527
gaagguagguagugaagaa

SEQ ID NO: 2199797 - RNA, 19 nt, Artificial Sequence
  Description of Artificial Sequence: Synthetic oligonucleotide
  Antisense strand to SEQ ID NO: 2199796
uucuucacuaccuaccuuc

SEQ ID NO: 2199798 - RNA, 19 nt, Artificial Sequence
  Description of Artificial Sequence: Synthetic oligonucleotide
  Sense strand starting at position 2708 of SEQ ID NO: 1883527
ggaggcaucugugagcaga

SEQ ID NO: 2199799 - RNA, 19 nt, Artificial Sequence
  Description of Artificial Sequence: Synthetic oligonucleotide
  Antisense strand to SEQ ID NO: 2199798
ucugcucacagaugccucc

SEQ ID NO: 2199800 - RNA, 19 nt, Artificial Sequence
  Description of Artificial Sequence: Synthetic oligonucleotide
  Sense strand starting at position 1278 of SEQ ID NO: 1883527
uagagauucugaggguguu

SEQ ID NO: 2199801 - RNA, 19 nt, Artificial Sequence
  Description of Artificial Sequence: Synthetic oligonucleotide
  Antisense strand to SEQ ID NO: 2199800
aacacccucagaaucucua

SEQ ID NO: 2199802 - RNA, 19 nt, Artificial Sequence
  Description of Artificial Sequence: Synthetic oligonucleotide
  Sense strand starting at position 176 of SEQ ID NO: 1883527
gguaaaggcuggugacuaa

SEQ ID NO: 2199803 - RNA, 19 nt, Artificial Sequence
  Description of Artificial Sequence: Synthetic oligonucleotide
  Antisense strand to SEQ ID NO: 2199802
uuagucaccagccuuuacc

SEQ ID NO: 2199804 - RNA, 19 nt, Artificial Sequence
  Description of Artificial Sequence: Synthetic oligonucleotide
  Sense strand starting at position 2847 of SEQ ID NO: 1883527
ggaggagacucccgucagu

SEQ ID NO: 2199805 - RNA, 19 nt, Artificial Sequence
  Description of Artificial Sequence: Synthetic oligonucleotide
  Antisense strand to SEQ ID NO: 2199804
acugacgggagucuccucc

SEQ ID NO: 2199806 - RNA, 19 nt, Artificial Sequence
  Description of Artificial Sequence: Synthetic oligonucleotide
  Sense strand starting at position 1667 of SEQ ID NO: 1883527
gagauuccguuaggucaca

SEQ ID NO: 2199807 - RNA, 19 nt, Artificial Sequence
  Description of Artificial Sequence: Synthetic oligonucleotide
  Antisense strand to SEQ ID NO: 2199806
ugugaccuaacggaaucuc

SEQ ID NO: 2199808 - RNA, 19 nt, Artificial Sequence
  Description of Artificial Sequence: Synthetic oligonucleotide
  Sense strand starting at position 3420 of SEQ ID NO: 1883527
uuuguaaaguuucgguaag

SEQ ID NO: 2199809 - RNA, 19 nt, Artificial Sequence
  Description of Artificial Sequence: Synthetic oligonucleotide
  Antisense strand to SEQ ID NO: 2199808
cuuaccgaaacuuuacaaa

SEQ ID NO: 2199810 - RNA, 19 nt, Artificial Sequence
  Description of Artificial Sequence: Synthetic oligonucleotide
  Sense strand starting at position 3421 of SEQ ID NO: 1883527
uuguaaaguuucgguaagu

SEQ ID NO: 2199811 - RNA, 19 nt, Artificial Sequence
  Description of Artificial Sequence: Synthetic oligonucleotide
  Antisense strand to SEQ ID NO: 2199810
acuuaccgaaacuuuacaa

SEQ ID NO: 2199812 - RNA, 19 nt, Artificial Sequence
  Description of Artificial Sequence: Synthetic oligonucleotide
  Sense strand starting at position 693 of SEQ ID NO: 1883528
aucgcugacgcauuaguau

SEQ ID NO: 2199813 - RNA, 19 nt, Artificial Sequence
  Description of Artificial Sequence: Synthetic oligonucleotide
  Antisense strand to SEQ ID NO: 2199812
auacuaaugcgucagcgau

SEQ ID NO: 2199814 - RNA, 19 nt, Artificial Sequence
  Description of Artificial Sequence: Synthetic oligonucleotide
  Sense strand starting at position 747 of SEQ ID NO: 1883528
uacgauuuauacuucguga

SEQ ID NO: 2199815 - RNA, 19 nt, Artificial Sequence
  Description of Artificial Sequence: Synthetic oligonucleotide
  Antisense strand to SEQ ID NO: 2199814
ucacgaaguauaaaucgua

SEQ ID NO: 2199816 - RNA, 19 nt, Artificial Sequence
  Description of Artificial Sequence: Synthetic oligonucleotide
  Sense strand starting at position 3765 of SEQ ID NO: 1883528
gaguguaggagaugaaacu

SEQ ID NO: 2199817 - RNA, 19 nt, Artificial Sequence
  Description of Artificial Sequence: Synthetic oligonucleotide
  Antisense strand to SEQ ID NO: 2199816
aguuucaucuccuacacuc

SEQ ID NO: 2199818 - RNA, 19 nt, Artificial Sequence
  Description of Artificial Sequence: Synthetic oligonucleotide
  Sense strand starting at position 3021 of SEQ ID NO: 1883528
ggaugacagucaguaacaa

SEQ ID NO: 2199819 - RNA, 19 nt, Artificial Sequence
  Description of Artificial Sequence: Synthetic oligonucleotide
  Antisense strand to SEQ ID NO: 2199818
uuguuacugacugucaucc

SEQ ID NO: 2199820 - RNA, 19 nt, Artificial Sequence
  Description of Artificial Sequence: Synthetic oligonucleotide
  Sense strand starting at position 750 of SEQ ID NO: 1883528
gauuuauacuucgugaugu

SEQ ID NO: 2199821 - RNA, 19 nt, Artificial Sequence
  Description of Artificial Sequence: Synthetic oligonucleotide
  Antisense strand to SEQ ID NO: 2199820
acaucacgaaguauaaauc

SEQ ID NO: 2199822 - RNA, 19 nt, Artificial Sequence
  Description of Artificial Sequence: Synthetic oligonucleotide
  Sense strand starting at position 786 of SEQ ID NO: 1883528
uuugcaguaguagaagaaa

SEQ ID NO: 2199823 - RNA, 19 nt, Artificial Sequence
  Description of Artificial Sequence: Synthetic oligonucleotide
  Antisense strand to SEQ ID NO: 2199822
uuucuucuacuacugcaaa

SEQ ID NO: 2199824 - RNA, 19 nt, Artificial Sequence
  Description of Artificial Sequence: Synthetic oligonucleotide
  Sense strand starting at position 3739 of SEQ ID NO: 1883528
ccuauaugacuaggaguag

SEQ ID NO: 2199825 - RNA, 19 nt, Artificial Sequence
  Description of Artificial Sequence: Synthetic oligonucleotide
  Antisense strand to SEQ ID NO: 2199824
cuacuccuagucauauagg

SEQ ID NO: 2199826 - RNA, 19 nt, Artificial Sequence
  Description of Artificial Sequence: Synthetic oligonucleotide
  Sense strand starting at position 3531 of SEQ ID NO: 1883528
auuauuaggaucgggauca

SEQ ID NO: 2199827 - RNA, 19 nt, Artificial Sequence
  Description of Artificial Sequence: Synthetic oligonucleotide
  Antisense strand to SEQ ID NO: 2199826
ugaucccgauccuaauaau

SEQ ID NO: 2199828 - RNA, 19 nt, Artificial Sequence
  Description of Artificial Sequence: Synthetic oligonucleotide
  Sense strand starting at position 749 of SEQ ID NO: 1883528
cgauuuauacuucgugaug

SEQ ID NO: 2199829 - RNA, 19 nt, Artificial Sequence
  Description of Artificial Sequence: Synthetic oligonucleotide
  Antisense strand to SEQ ID NO: 2199828
caucacgaaguauaaaucg

SEQ ID NO: 2199830 - RNA, 19 nt, Artificial Sequence
  Description of Artificial Sequence: Synthetic oligonucleotide
  Sense strand starting at position 2245 of SEQ ID NO: 1883528
gcgcuuuaccuuccacagu

SEQ ID NO: 2199831 - RNA, 19 nt, Artificial Sequence
  Description of Artificial Sequence: Synthetic oligonucleotide
  Antisense strand to SEQ ID NO: 2199830
acuguggaagguaaagcgc

SEQ ID NO: 2199832 - RNA, 19 nt, Artificial Sequence
  Description of Artificial Sequence: Synthetic oligonucleotide
  Sense strand starting at position 2902 of SEQ ID NO: 1883528
cugguaaauguuuauugag

SEQ ID NO: 2199833 - RNA, 19 nt, Artificial Sequence
  Description of Artificial Sequence: Synthetic oligonucleotide
  Antisense strand to SEQ ID NO: 2199832
cucaauaaacauuuaccag

SEQ ID NO: 2199834 - RNA, 19 nt, Artificial Sequence
  Description of Artificial Sequence: Synthetic oligonucleotide
  Sense strand starting at position 960 of SEQ ID NO: 1883528
gcgguucgcacacuuauca

SEQ ID NO: 2199835 - RNA, 19 nt, Artificial Sequence
  Description of Artificial Sequence: Synthetic oligonucleotide
  Antisense strand to SEQ ID NO: 2199834
ugauaagugugcgaaccgc

SEQ ID NO: 2199836 - RNA, 19 nt, Artificial Sequence
  Description of Artificial Sequence: Synthetic oligonucleotide
  Sense strand starting at position 1463 of SEQ ID NO: 1883528
gggaaacgugaguaucuua

SEQ ID NO: 2199837 - RNA, 19 nt, Artificial Sequence
  Description of Artificial Sequence: Synthetic oligonucleotide
  Antisense strand to SEQ ID NO: 2199836
uaagauacucacguuuccc

SEQ ID NO: 2199838 - RNA, 19 nt, Artificial Sequence
  Description of Artificial Sequence: Synthetic oligonucleotide
  Sense strand starting at position 3626 of SEQ ID NO: 1883528
gugaauuagagaggaguuu

SEQ ID NO: 2199839 - RNA, 19 nt, Artificial Sequence
  Description of Artificial Sequence: Synthetic oligonucleotide
  Antisense strand to SEQ ID NO: 2199838
aaacuccucucuaauucac

SEQ ID NO: 2199840 - RNA, 19 nt, Artificial Sequence
  Description of Artificial Sequence: Synthetic oligonucleotide
  Sense strand starting at position 1241 of SEQ ID NO: 1883528
cuugauauucgagacuuuc

SEQ ID NO: 2199841 - RNA, 19 nt, Artificial Sequence
  Description of Artificial Sequence: Synthetic oligonucleotide
  Antisense strand to SEQ ID NO: 2199840
gaaagucucgaauaucaag

SEQ ID NO: 2199842 - RNA, 19 nt, Artificial Sequence
  Description of Artificial Sequence: Synthetic oligonucleotide
  Sense strand starting at position 935 of SEQ ID NO: 1883528
auuuauggauccuauggaa

SEQ ID NO: 2199843 - RNA, 19 nt, Artificial Sequence
  Description of Artificial Sequence: Synthetic oligonucleotide
  Antisense strand to SEQ ID NO: 2199842
uuccauaggauccauaaau

SEQ ID NO: 2199844 - RNA, 19 nt, Artificial Sequence
  Description of Artificial Sequence: Synthetic oligonucleotide
  Sense strand starting at position 3969 of SEQ ID NO: 1883528
caguuaugaguccaaguag

SEQ ID NO: 2199845 - RNA, 19 nt, Artificial Sequence
  Description of Artificial Sequence: Synthetic oligonucleotide
  Antisense strand to SEQ ID NO: 2199844
cuacuuggacucauaacug

SEQ ID NO: 2199846 - RNA, 19 nt, Artificial Sequence
  Description of Artificial Sequence: Synthetic oligonucleotide
  Sense strand starting at position 1315 of SEQ ID NO: 1883528
ugaaaugcacguuauuaaa

SEQ ID NO: 2199847 - RNA, 19 nt, Artificial Sequence
  Description of Artificial Sequence: Synthetic oligonucleotide
  Antisense strand to SEQ ID NO: 2199846
uuuaauaacgugcauuuca

SEQ ID NO: 2199848 - RNA, 19 nt, Artificial Sequence
  Description of Artificial Sequence: Synthetic oligonucleotide
  Sense strand starting at position 3287 of SEQ ID NO: 1883528
cuaaauauugcaugggacu

SEQ ID NO: 2199849 - RNA, 19 nt, Artificial Sequence
  Description of Artificial Sequence: Synthetic oligonucleotide
  Antisense strand to SEQ ID NO: 2199848
agucccaugcaauauuuag

SEQ ID NO: 2199850 - RNA, 19 nt, Artificial Sequence
  Description of Artificial Sequence: Synthetic oligonucleotide
  Sense strand starting at position 373 of SEQ ID NO: 1883528
acuaacgcuagugagaauu

SEQ ID NO: 2199851 - RNA, 19 nt, Artificial Sequence
  Description of Artificial Sequence: Synthetic oligonucleotide
  Antisense strand to SEQ ID NO: 2199850
aauucucacuagcguuagu

SEQ ID NO: 2199852 - RNA, 19 nt, Artificial Sequence
  Description of Artificial Sequence: Synthetic oligonucleotide
  Sense strand starting at position 231 of SEQ ID NO: 1883528
gauggagaguucuuuccua

SEQ ID NO: 2199853 - RNA, 19 nt, Artificial Sequence
  Description of Artificial Sequence: Synthetic oligonucleotide
  Antisense strand to SEQ ID NO: 2199852
uaggaaagaacucuccauc

SEQ ID NO: 2199854 - RNA, 19 nt, Artificial Sequence
  Description of Artificial Sequence: Synthetic oligonucleotide
  Sense strand starting at position 3615 of SEQ ID NO: 1883528
gcuugaaggaugugaauua

SEQ ID NO: 2199855 - RNA, 19 nt, Artificial Sequence
  Description of Artificial Sequence: Synthetic oligonucleotide
  Antisense strand to SEQ ID NO: 2199854
uaauucacauccuucaagc

SEQ ID NO: 2199856 - RNA, 19 nt, Artificial Sequence
  Description of Artificial Sequence: Synthetic oligonucleotide
  Sense strand starting at position 1466 of SEQ ID NO: 1883528
aaacgugaguaucuuaaag

SEQ ID NO: 2199857 - RNA, 19 nt, Artificial Sequence
  Description of Artificial Sequence: Synthetic oligonucleotide
  Antisense strand to SEQ ID NO: 2199856
cuuuaagauacucacguuu

SEQ ID NO: 2199858 - RNA, 19 nt, Artificial Sequence
  Description of Artificial Sequence: Synthetic oligonucleotide
  Sense strand starting at position 3613 of SEQ ID NO: 1883528
uggcuugaaggaugugaau

SEQ ID NO: 2199859 - RNA, 19 nt, Artificial Sequence
  Description of Artificial Sequence: Synthetic oligonucleotide
  Antisense strand to SEQ ID NO: 2199858
auucacauccuucaagcca

SEQ ID NO: 2199860 - RNA, 19 nt, Artificial Sequence
  Description of Artificial Sequence: Synthetic oligonucleotide
  Sense strand starting at position 3889 of SEQ ID NO: 1883528
acaccuucggauugacauu

SEQ ID NO: 2199861 - RNA, 19 nt, Artificial Sequence
  Description of Artificial Sequence: Synthetic oligonucleotide
  Antisense strand to SEQ ID NO: 2199860
aaugucaauccgaaggugu

SEQ ID NO: 2199862 - RNA, 19 nt, Artificial Sequence
  Description of Artificial Sequence: Synthetic oligonucleotide
  Sense strand starting at position 279 of SEQ ID NO: 1883528
uuuacauaaucggcaacaa

SEQ ID NO: 2199863 - RNA, 19 nt, Artificial Sequence
  Description of Artificial Sequence: Synthetic oligonucleotide
  Antisense strand to SEQ ID NO: 2199862
uuguugccgauuauguaaa

SEQ ID NO: 2199864 - RNA, 19 nt, Artificial Sequence
  Description of Artificial Sequence: Synthetic oligonucleotide
  Sense strand starting at position 1218 of SEQ ID NO: 1883528
aacugaugcgaucacaguu

SEQ ID NO: 2199865 - RNA, 19 nt, Artificial Sequence
  Description of Artificial Sequence: Synthetic oligonucleotide
  Antisense strand to SEQ ID NO: 2199864
aacugugaucgcaucaguu

SEQ ID NO: 2199866 - RNA, 19 nt, Artificial Sequence
  Description of Artificial Sequence: Synthetic oligonucleotide
  Sense strand starting at position 173 of SEQ ID NO: 1883528
gggcuucuggcugacuaca

SEQ ID NO: 2199867 - RNA, 19 nt, Artificial Sequence
  Description of Artificial Sequence: Synthetic oligonucleotide
  Antisense strand to SEQ ID NO: 2199866
uguagucagccagaagccc

SEQ ID NO: 2199868 - RNA, 19 nt, Artificial Sequence
  Description of Artificial Sequence: Synthetic oligonucleotide
  Sense strand starting at position 3914 of SEQ ID NO: 1883528
ccauuacucugccugggaa

SEQ ID NO: 2199869 - RNA, 19 nt, Artificial Sequence
  Description of Artificial Sequence: Synthetic oligonucleotide
  Antisense strand to SEQ ID NO: 2199868
uucccaggcagaguaaugg

SEQ ID NO: 2199870 - RNA, 19 nt, Artificial Sequence
  Description of Artificial Sequence: Synthetic oligonucleotide
  Sense strand starting at position 3233 of SEQ ID NO: 1883528
ugucucugucauuacauau

SEQ ID NO: 2199871 - RNA, 19 nt, Artificial Sequence
  Description of Artificial Sequence: Synthetic oligonucleotide
  Antisense strand to SEQ ID NO: 2199870
auauguaaugacagagaca

SEQ ID NO: 2199872 - RNA, 19 nt, Artificial Sequence
  Description of Artificial Sequence: Synthetic oligonucleotide
  Sense strand starting at position 1060 of SEQ ID NO: 1883528
gucacuauccaaggucaua

SEQ ID NO: 2199873 - RNA, 19 nt, Artificial Sequence
  Description of Artificial Sequence: Synthetic oligonucleotide
  Antisense strand to SEQ ID NO: 2199872
uaugaccuuggauagugac

SEQ ID NO: 2199874 - RNA, 19 nt, Artificial Sequence
  Description of Artificial Sequence: Synthetic oligonucleotide
  Sense strand starting at position 2901 of SEQ ID NO: 1883528
ucugguaaauguuuauuga

SEQ ID NO: 2199875 - RNA, 19 nt, Artificial Sequence
  Description of Artificial Sequence: Synthetic oligonucleotide
  Antisense strand to SEQ ID NO: 2199874
ucaauaaacauuuaccaga

SEQ ID NO: 2199876 - RNA, 19 nt, Artificial Sequence
  Description of Artificial Sequence: Synthetic oligonucleotide
  Sense strand starting at position 1005 of SEQ ID NO: 1883528
gagguaucauggccuuaau

SEQ ID NO: 2199877 - RNA, 19 nt, Artificial Sequence
  Description of Artificial Sequence: Synthetic oligonucleotide
  Antisense strand to SEQ ID NO: 2199876
auuaaggccaugauaccuc

SEQ ID NO: 2199878 - RNA, 19 nt, Artificial Sequence
  Description of Artificial Sequence: Synthetic oligonucleotide
  Sense strand starting at position 383 of SEQ ID NO: 1883528
gugagaauuuaaugaacua

SEQ ID NO: 2199879 - RNA, 19 nt, Artificial Sequence
  Description of Artificial Sequence: Synthetic oligonucleotide
  Antisense strand to SEQ ID NO: 2199878
uaguucauuaaauucucac

SEQ ID NO: 2199880 - RNA, 19 nt, Artificial Sequence
  Description of Artificial Sequence: Synthetic oligonucleotide
  Sense strand starting at position 1348 of SEQ ID NO: 1883528
ucguaagauggccaaaguu

SEQ ID NO: 2199881 - RNA, 19 nt, Artificial Sequence
  Description of Artificial Sequence: Synthetic oligonucleotide
  Antisense strand to SEQ ID NO: 2199880
aacuuuggccaucuuacga

SEQ ID NO: 2199882 - RNA, 19 nt, Artificial Sequence
  Description of Artificial Sequence: Synthetic oligonucleotide
  Sense strand starting at position 2551 of SEQ ID NO: 1883528
agauaauucuuugccuuug

SEQ ID NO: 2199883 - RNA, 19 nt, Artificial Sequence
  Description of Artificial Sequence: Synthetic oligonucleotide
  Antisense strand to SEQ ID NO: 2199882
caaaggcaaagaauuaucu

SEQ ID NO: 2199884 - RNA, 19 nt, Artificial Sequence
  Description of Artificial Sequence: Synthetic oligonucleotide
  Sense strand starting at position 1462 of SEQ ID NO: 1883528
ugggaaacgugaguaucuu

SEQ ID NO: 2199885 - RNA, 19 nt, Artificial Sequence
  Description of Artificial Sequence: Synthetic oligonucleotide
  Antisense strand to SEQ ID NO: 2199884
aagauacucacguuuccca

SEQ ID NO: 2199886 - RNA, 19 nt, Artificial Sequence
  Description of Artificial Sequence: Synthetic oligonucleotide
  Sense strand starting at position 2904 of SEQ ID NO: 1883528
gguaaauguuuauugaguc

SEQ ID NO: 2199887 - RNA, 19 nt, Artificial Sequence
  Description of Artificial Sequence: Synthetic oligonucleotide
  Antisense strand to SEQ ID NO: 2199886
gacucaauaaacauuuacc

SEQ ID NO: 2199888 - RNA, 19 nt, Artificial Sequence
  Description of Artificial Sequence: Synthetic oligonucleotide
  Sense strand starting at position 766 of SEQ ID NO: 1883528
uguccuagaugguuugauu

SEQ ID NO: 2199889 - RNA, 19 nt, Artificial Sequence
  Description of Artificial Sequence: Synthetic oligonucleotide
  Antisense strand to SEQ ID NO: 2199888
aaucaaaccaucuaggaca

SEQ ID NO: 2199890 - RNA, 19 nt, Artificial Sequence
  Description of Artificial Sequence: Synthetic oligonucleotide
  Sense strand starting at position 3226 of SEQ ID NO: 1883528
acauauaugucucugucau

SEQ ID NO: 2199891 - RNA, 19 nt, Artificial Sequence
  Description of Artificial Sequence: Synthetic oligonucleotide
  Antisense strand to SEQ ID NO: 2199890
augacagagacauauaugu

SEQ ID NO: 2199892 - RNA, 19 nt, Artificial Sequence
  Description of Artificial Sequence: Synthetic oligonucleotide
  Sense strand starting at position 1008 of SEQ ID NO: 1883529
cuaucugggcuuuauagga

SEQ ID NO: 2199893 - RNA, 19 nt, Artificial Sequence
  Description of Artificial Sequence: Synthetic oligonucleotide
  Antisense strand to SEQ ID NO: 2199892
uccuauaaagcccagauag

SEQ ID NO: 2199894 - RNA, 19 nt, Artificial Sequence
  Description of Artificial Sequence: Synthetic oligonucleotide
  Sense strand starting at position 2148 of SEQ ID NO: 1883529
gggucacccgugcuguuua

SEQ ID NO: 2199895 - RNA, 19 nt, Artificial Sequence
  Description of Artificial Sequence: Synthetic oligonucleotide
  Antisense strand to SEQ ID NO: 2199894
uaaacagcacgggugaccc

SEQ ID NO: 2199896 - RNA, 19 nt, Artificial Sequence
  Description of Artificial Sequence: Synthetic oligonucleotide
  Sense strand starting at position 594 of SEQ ID NO: 1883529
cccuaugugccagagggaa

SEQ ID NO: 2199897 - RNA, 19 nt, Artificial Sequence
  Description of Artificial Sequence: Synthetic oligonucleotide
  Antisense strand to SEQ ID NO: 2199896
uucccucuggcacauaggg

SEQ ID NO: 2199898 - RNA, 19 nt, Artificial Sequence
  Description of Artificial Sequence: Synthetic oligonucleotide
  Sense strand starting at position 2929 of SEQ ID NO: 1883529
guggguagccugcauuuca

SEQ ID NO: 2199899 - RNA, 19 nt, Artificial Sequence
  Description of Artificial Sequence: Synthetic oligonucleotide
  Antisense strand to SEQ ID NO: 2199898
ugaaaugcaggcuacccac

SEQ ID NO: 2199900 - RNA, 19 nt, Artificial Sequence
  Description of Artificial Sequence: Synthetic oligonucleotide
  Sense strand starting at position 25 of SEQ ID NO: 1883529
agggauucagagcaaucgu

SEQ ID NO: 2199901 - RNA, 19 nt, Artificial Sequence
  Description of Artificial Sequence: Synthetic oligonucleotide
  Antisense strand to SEQ ID NO: 2199900
acgauugcucugaaucccu

SEQ ID NO: 2199902 - RNA, 19 nt, Artificial Sequence
  Description of Artificial Sequence: Synthetic oligonucleotide
  Sense strand starting at position 1032 of SEQ ID NO: 1883529
ucauuuaacugugugucuu

SEQ ID NO: 2199903 - RNA, 19 nt, Artificial Sequence
  Description of Artificial Sequence: Synthetic oligonucleotide
  Antisense strand to SEQ ID NO: 2199902
aagacacacaguuaaauga

SEQ ID NO: 2199904 - RNA, 19 nt, Artificial Sequence
  Description of Artificial Sequence: Synthetic oligonucleotide
  Sense strand starting at position 1031 of SEQ ID NO: 1883529
cucauuuaacugugugucu

SEQ ID NO: 2199905 - RNA, 19 nt, Artificial Sequence
  Description of Artificial Sequence: Synthetic oligonucleotide
  Antisense strand to SEQ ID NO: 2199904
agacacacaguuaaaugag

SEQ ID NO: 2199906 - RNA, 19 nt, Artificial Sequence
  Description of Artificial Sequence: Synthetic oligonucleotide
  Sense strand starting at position 1012 of SEQ ID NO: 1883529
cugggcuuuauaggaaauu

SEQ ID NO: 2199907 - RNA, 19 nt, Artificial Sequence
  Description of Artificial Sequence: Synthetic oligonucleotide
  Antisense strand to SEQ ID NO: 2199906
aauuuccuauaaagcccag

SEQ ID NO: 2199908 - RNA, 19 nt, Artificial Sequence
  Description of Artificial Sequence: Synthetic oligonucleotide
  Sense strand starting at position 3546 of SEQ ID NO: 1883529
cugcuuucuguagaugaga

SEQ ID NO: 2199909 - RNA, 19 nt, Artificial Sequence
  Description of Artificial Sequence: Synthetic oligonucleotide
  Antisense strand to SEQ ID NO: 2199908
ucucaucuacagaaagcag

SEQ ID NO: 2199910 - RNA, 19 nt, Artificial Sequence
  Description of Artificial Sequence: Synthetic oligonucleotide
  Sense strand starting at position 1620 of SEQ ID NO: 1883529
ggccguguagcgucagaua

SEQ ID NO: 2199911 - RNA, 19 nt, Artificial Sequence
  Description of Artificial Sequence: Synthetic oligonucleotide
  Antisense strand to SEQ ID NO: 2199910
uaucugacgcuacacggcc

SEQ ID NO: 2199912 - RNA, 19 nt, Artificial Sequence
  Description of Artificial Sequence: Synthetic oligonucleotide
  Sense strand starting at position 1054 of SEQ ID NO: 1883529
uugauaagguggcuggauu

SEQ ID NO: 2199913 - RNA, 19 nt, Artificial Sequence
  Description of Artificial Sequence: Synthetic oligonucleotide
  Antisense strand to SEQ ID NO: 2199912
aauccagccaccuuaucaa

SEQ ID NO: 2199914 - RNA, 19 nt, Artificial Sequence
  Description of Artificial Sequence: Synthetic oligonucleotide
  Sense strand starting at position 350 of SEQ ID NO: 1883529
ucaggaucucuucgauauu

SEQ ID NO: 2199915 - RNA, 19 nt, Artificial Sequence
  Description of Artificial Sequence: Synthetic oligonucleotide
  Antisense strand to SEQ ID NO: 2199914
aauaucgaagagauccuga

SEQ ID NO: 2199916 - RNA, 19 nt, Artificial Sequence
  Description of Artificial Sequence: Synthetic oligonucleotide
  Sense strand starting at position 3544 of SEQ ID NO: 1883529
cucugcuuucuguagauga

SEQ ID NO: 2199917 - RNA, 19 nt, Artificial Sequence
  Description of Artificial Sequence: Synthetic oligonucleotide
  Antisense strand to SEQ ID NO: 2199916
ucaucuacagaaagcagag

SEQ ID NO: 2199918 - RNA, 19 nt, Artificial Sequence
  Description of Artificial Sequence: Synthetic oligonucleotide
  Sense strand starting at position 1207 of SEQ ID NO: 1883529
cagguugucagcgaugaua

SEQ ID NO: 2199919 - RNA, 19 nt, Artificial Sequence
  Description of Artificial Sequence: Synthetic oligonucleotide
  Antisense strand to SEQ ID NO: 2199918
uaucaucgcugacaaccug

SEQ ID NO: 2199920 - RNA, 19 nt, Artificial Sequence
  Description of Artificial Sequence: Synthetic oligonucleotide
  Sense strand starting at position 2303 of SEQ ID NO: 1883529
augagugccgcuuaacaaa

SEQ ID NO: 2199921 - RNA, 19 nt, Artificial Sequence
  Description of Artificial Sequence: Synthetic oligonucleotide
  Antisense strand to SEQ ID NO: 2199920
uuuguuaagcggcacucau

SEQ ID NO: 2199922 - RNA, 19 nt, Artificial Sequence
  Description of Artificial Sequence: Synthetic oligonucleotide
  Sense strand starting at position 3548 of SEQ ID NO: 1883529
gcuuucuguagaugagacu

SEQ ID NO: 2199923 - RNA, 19 nt, Artificial Sequence
  Description of Artificial Sequence: Synthetic oligonucleotide
  Antisense strand to SEQ ID NO: 2199922
agucucaucuacagaaagc

SEQ ID NO: 2199924 - RNA, 19 nt, Artificial Sequence
  Description of Artificial Sequence: Synthetic oligonucleotide
  Sense strand starting at position 93 of SEQ ID NO: 1883529
ggaaguaaugucuguuuau

SEQ ID NO: 2199925 - RNA, 19 nt, Artificial Sequence
  Description of Artificial Sequence: Synthetic oligonucleotide
  Antisense strand to SEQ ID NO: 2199924
auaaacagacauuacuucc

SEQ ID NO: 2199926 - RNA, 19 nt, Artificial Sequence
  Description of Artificial Sequence: Synthetic oligonucleotide
  Sense strand starting at position 3541 of SEQ ID NO: 1883529
agacucugcuuucuguaga

SEQ ID NO: 2199927 - RNA, 19 nt, Artificial Sequence
  Description of Artificial Sequence: Synthetic oligonucleotide
  Antisense strand to SEQ ID NO: 2199926
ucuacagaaagcagagucu

SEQ ID NO: 2199928 - RNA, 19 nt, Artificial Sequence
  Description of Artificial Sequence: Synthetic oligonucleotide
  Sense strand starting at position 2998 of SEQ ID NO: 1883529
gggccauuguuucuacaac

SEQ ID NO: 2199929 - RNA, 19 nt, Artificial Sequence
  Description of Artificial Sequence: Synthetic oligonucleotide
  Antisense strand to SEQ ID NO: 2199928
guuguagaaacaauggccc

SEQ ID NO: 2199930 - RNA, 19 nt, Artificial Sequence
  Description of Artificial Sequence: Synthetic oligonucleotide
  Sense strand starting at position 96 of SEQ ID NO: 1883529
aguaaugucuguuuauuga

SEQ ID NO: 2199931 - RNA, 19 nt, Artificial Sequence
  Description of Artificial Sequence: Synthetic oligonucleotide
  Antisense strand to SEQ ID NO: 2199930
ucaauaaacagacauuacu

SEQ ID NO: 2199932 - RNA, 19 nt, Artificial Sequence
  Description of Artificial Sequence: Synthetic oligonucleotide
  Sense strand starting at position 3130 of SEQ ID NO: 1883529
ugcugcagugcccaagaaa

SEQ ID NO: 2199933 - RNA, 19 nt, Artificial Sequence
  Description of Artificial Sequence: Synthetic oligonucleotide
  Antisense strand to SEQ ID NO: 2199932
uuucuugggcacugcagca

SEQ ID NO: 2199934 - RNA, 19 nt, Artificial Sequence
  Description of Artificial Sequence: Synthetic oligonucleotide
  Sense strand starting at position 351 of SEQ ID NO: 1883529
caggaucucuucgauauuu

SEQ ID NO: 2199935 - RNA, 19 nt, Artificial Sequence
  Description of Artificial Sequence: Synthetic oligonucleotide
  Antisense strand to SEQ ID NO: 2199934
aaauaucgaagagauccug

SEQ ID NO: 2199936 - RNA, 19 nt, Artificial Sequence
  Description of Artificial Sequence: Synthetic oligonucleotide
  Sense strand starting at position 3259 of SEQ ID NO: 1883529
gagccacucucccugugau

SEQ ID NO: 2199937 - RNA, 19 nt, Artificial Sequence
  Description of Artificial Sequence: Synthetic oligonucleotide
  Antisense strand to SEQ ID NO: 2199936
aucacagggagaguggcuc

SEQ ID NO: 2199938 - RNA, 19 nt, Artificial Sequence
  Description of Artificial Sequence: Synthetic oligonucleotide
  Sense strand starting at position 1257 of SEQ ID NO: 1883529
ugaccacgccuuggugaua

SEQ ID NO: 2199939 - RNA, 19 nt, Artificial Sequence
  Description of Artificial Sequence: Synthetic oligonucleotide
  Antisense strand to SEQ ID NO: 2199938
uaucaccaaggcgugguca

SEQ ID NO: 2199940 - RNA, 19 nt, Artificial Sequence
  Description of Artificial Sequence: Synthetic oligonucleotide
  Sense strand starting at position 2212 of SEQ ID NO: 1883529
uuguguguuacauggugaa

SEQ ID NO: 2199941 - RNA, 19 nt, Artificial Sequence
  Description of Artificial Sequence: Synthetic oligonucleotide
  Antisense strand to SEQ ID NO: 2199940
uucaccauguaacacacaa

SEQ ID NO: 2199942 - RNA, 19 nt, Artificial Sequence
  Description of Artificial Sequence: Synthetic oligonucleotide
  Sense strand starting at position 1209 of SEQ ID NO: 1883529
gguugucagcgaugauaug

SEQ ID NO: 2199943 - RNA, 19 nt, Artificial Sequence
  Description of Artificial Sequence: Synthetic oligonucleotide
  Antisense strand to SEQ ID NO: 2199942
cauaucaucgcugacaacc

SEQ ID NO: 2199944 - RNA, 19 nt, Artificial Sequence
  Description of Artificial Sequence: Synthetic oligonucleotide
  Sense strand starting at position 347 of SEQ ID NO: 1883529
ccgucaggaucucuucgau

SEQ ID NO: 2199945 - RNA, 19 nt, Artificial Sequence
  Description of Artificial Sequence: Synthetic oligonucleotide
  Antisense strand to SEQ ID NO: 2199944
aucgaagagauccugacgg

SEQ ID NO: 2199946 - RNA, 19 nt, Artificial Sequence
  Description of Artificial Sequence: Synthetic oligonucleotide
  Sense strand starting at position 679 of SEQ ID NO: 1883529
cuggcaugcuggucucaga

SEQ ID NO: 2199947 - RNA, 19 nt, Artificial Sequence
  Description of Artificial Sequence: Synthetic oligonucleotide
  Antisense strand to SEQ ID NO: 2199946
ucugagaccagcaugccag

SEQ ID NO: 2199948 - RNA, 19 nt, Artificial Sequence
  Description of Artificial Sequence: Synthetic oligonucleotide
  Sense strand starting at position 1206 of SEQ ID NO: 1883529
ccagguugucagcgaugau

SEQ ID NO: 2199949 - RNA, 19 nt, Artificial Sequence
  Description of Artificial Sequence: Synthetic oligonucleotide
  Antisense strand to SEQ ID NO: 2199948
aucaucgcugacaaccugg

SEQ ID NO: 2199950 - RNA, 19 nt, Artificial Sequence
  Description of Artificial Sequence: Synthetic oligonucleotide
  Sense strand starting at position 2206 of SEQ ID NO: 1883529
cauguauuguguguuacau

SEQ ID NO: 2199951 - RNA, 19 nt, Artificial Sequence
  Description of Artificial Sequence: Synthetic oligonucleotide
  Antisense strand to SEQ ID NO: 2199950
auguaacacacaauacaug

SEQ ID NO: 2199952 - RNA, 19 nt, Artificial Sequence
  Description of Artificial Sequence: Synthetic oligonucleotide
  Sense strand starting at position 3415 of SEQ ID NO: 1883529
gagagucgugccuguggga

SEQ ID NO: 2199953 - RNA, 19 nt, Artificial Sequence
  Description of Artificial Sequence: Synthetic oligonucleotide
  Antisense strand to SEQ ID NO: 2199952
ucccacaggcacgacucuc

SEQ ID NO: 2199954 - RNA, 19 nt, Artificial Sequence
  Description of Artificial Sequence: Synthetic oligonucleotide
  Sense strand starting at position 1036 of SEQ ID NO: 1883529
uuaacugugugucuuguau

SEQ ID NO: 2199955 - RNA, 19 nt, Artificial Sequence
  Description of Artificial Sequence: Synthetic oligonucleotide
  Antisense strand to SEQ ID NO: 2199954
auacaagacacacaguuaa

SEQ ID NO: 2199956 - RNA, 19 nt, Artificial Sequence
  Description of Artificial Sequence: Synthetic oligonucleotide
  Sense strand starting at position 2127 of SEQ ID NO: 1883529
cgaguguccgagcgggaau

SEQ ID NO: 2199957 - RNA, 19 nt, Artificial Sequence
  Description of Artificial Sequence: Synthetic oligonucleotide
  Antisense strand to SEQ ID NO: 2199956
auucccgcucggacacucg

SEQ ID NO: 2199958 - RNA, 19 nt, Artificial Sequence
  Description of Artificial Sequence: Synthetic oligonucleotide
  Sense strand starting at position 2205 of SEQ ID NO: 1883529
gcauguauuguguguuaca

SEQ ID NO: 2199959 - RNA, 19 nt, Artificial Sequence
  Description of Artificial Sequence: Synthetic oligonucleotide
  Antisense strand to SEQ ID NO: 2199958
uguaacacacaauacaugc

SEQ ID NO: 2199960 - RNA, 19 nt, Artificial Sequence
  Description of Artificial Sequence: Synthetic oligonucleotide
  Sense strand starting at position 2232 of SEQ ID NO: 1883529
cagaacagauccugaaguu

SEQ ID NO: 2199961 - RNA, 19 nt, Artificial Sequence
  Description of Artificial Sequence: Synthetic oligonucleotide
  Antisense strand to SEQ ID NO: 2199960
aacuucaggaucuguucug

SEQ ID NO: 2199962 - RNA, 19 nt, Artificial Sequence
  Description of Artificial Sequence: Synthetic oligonucleotide
  Sense strand starting at position 2999 of SEQ ID NO: 1883529
ggccauuguuucuacaaca

SEQ ID NO: 2199963 - RNA, 19 nt, Artificial Sequence
  Description of Artificial Sequence: Synthetic oligonucleotide
  Antisense strand to SEQ ID NO: 2199962
uguuguagaaacaauggcc

SEQ ID NO: 2199964 - RNA, 19 nt, Artificial Sequence
  Description of Artificial Sequence: Synthetic oligonucleotide
  Sense strand starting at position 889 of SEQ ID NO: 1883529
ggacaaggcugccagugau

SEQ ID NO: 2199965 - RNA, 19 nt, Artificial Sequence
  Description of Artificial Sequence: Synthetic oligonucleotide
  Antisense strand to SEQ ID NO: 2199964
aucacuggcagccuugucc

SEQ ID NO: 2199966 - RNA, 19 nt, Artificial Sequence
  Description of Artificial Sequence: Synthetic oligonucleotide
  Sense strand starting at position 2582 of SEQ ID NO: 1883529
gcgcgcuuccugugaagac

SEQ ID NO: 2199967 - RNA, 19 nt, Artificial Sequence
  Description of Artificial Sequence: Synthetic oligonucleotide
  Antisense strand to SEQ ID NO: 2199966
gucuucacaggaagcgcgc

SEQ ID NO: 2199968 - RNA, 19 nt, Artificial Sequence
  Description of Artificial Sequence: Synthetic oligonucleotide
  Sense strand starting at position 100 of SEQ ID NO: 1883529
augucuguuuauugauaga

SEQ ID NO: 2199969 - RNA, 19 nt, Artificial Sequence
  Description of Artificial Sequence: Synthetic oligonucleotide
  Antisense strand to SEQ ID NO: 2199968
ucuaucaauaaacagacau

SEQ ID NO: 2199970 - RNA, 19 nt, Artificial Sequence
  Description of Artificial Sequence: Synthetic oligonucleotide
  Sense strand starting at position 2215 of SEQ ID NO: 1883529
uguguuacauggugaaaca

SEQ ID NO: 2199971 - RNA, 19 nt, Artificial Sequence
  Description of Artificial Sequence: Synthetic oligonucleotide
  Antisense strand to SEQ ID NO: 2199970
uguuucaccauguaacaca

SEQ ID NO: 2199972 - RNA, 19 nt, Artificial Sequence
  Description of Artificial Sequence: Synthetic oligonucleotide
  Sense strand starting at position 1128 of SEQ ID NO: 1883530
ucagucccacuuuagagau

SEQ ID NO: 2199973 - RNA, 19 nt, Artificial Sequence
  Description of Artificial Sequence: Synthetic oligonucleotide
  Antisense strand to SEQ ID NO: 2199972
aucucuaaagugggacuga

SEQ ID NO: 2199974 - RNA, 19 nt, Artificial Sequence
  Description of Artificial Sequence: Synthetic oligonucleotide
  Sense strand starting at position 3727 of SEQ ID NO: 1883530
acagauuccugggucacaa

SEQ ID NO: 2199975 - RNA, 19 nt, Artificial Sequence
  Description of Artificial Sequence: Synthetic oligonucleotide
  Antisense strand to SEQ ID NO: 2199974
uugugacccaggaaucugu

SEQ ID NO: 2199976 - RNA, 19 nt, Artificial Sequence
  Description of Artificial Sequence: Synthetic oligonucleotide
  Sense strand starting at position 2775 of SEQ ID NO: 1883530
gcgucuugggagcauuuca

SEQ ID NO: 2199977 - RNA, 19 nt, Artificial Sequence
  Description of Artificial Sequence: Synthetic oligonucleotide
  Antisense strand to SEQ ID NO: 2199976
ugaaaugcucccaagacgc

SEQ ID NO: 2199978 - RNA, 19 nt, Artificial Sequence
  Description of Artificial Sequence: Synthetic oligonucleotide
  Sense strand starting at position 183 of SEQ ID NO: 1883530
ugaggucugacgggagaau

SEQ ID NO: 2199979 - RNA, 19 nt, Artificial Sequence
  Description of Artificial Sequence: Synthetic oligonucleotide
  Antisense strand to SEQ ID NO: 2199978
auucucccgucagaccuca

SEQ ID NO: 2199980 - RNA, 19 nt, Artificial Sequence
  Description of Artificial Sequence: Synthetic oligonucleotide
  Sense strand starting at position 716 of SEQ ID NO: 1883530
cucagaaguguucagugga

SEQ ID NO: 2199981 - RNA, 19 nt, Artificial Sequence
  Description of Artificial Sequence: Synthetic oligonucleotide
  Antisense strand to SEQ ID NO: 2199980
uccacugaacacuucugag

SEQ ID NO: 2199982 - RNA, 19 nt, Artificial Sequence
  Description of Artificial Sequence: Synthetic oligonucleotide
  Sense strand starting at position 3726 of SEQ ID NO: 1883530
cacagauuccugggucaca

SEQ ID NO: 2199983 - RNA, 19 nt, Artificial Sequence
  Description of Artificial Sequence: Synthetic oligonucleotide
  Antisense strand to SEQ ID NO: 2199982
ugugacccaggaaucugug

SEQ ID NO: 2199984 - RNA, 19 nt, Artificial Sequence
  Description of Artificial Sequence: Synthetic oligonucleotide
  Sense strand starting at position 648 of SEQ ID NO: 1883530
gcaggaaugcagggauauu

SEQ ID NO: 2199985 - RNA, 19 nt, Artificial Sequence
  Description of Artificial Sequence: Synthetic oligonucleotide
  Antisense strand to SEQ ID NO: 2199984
aauaucccugcauuccugc

SEQ ID NO: 2199986 - RNA, 19 nt, Artificial Sequence
  Description of Artificial Sequence: Synthetic oligonucleotide
  Sense strand starting at position 2686 of SEQ ID NO: 1883530
gaagcuuagcuacaguuaa

SEQ ID NO: 2199987 - RNA, 19 nt, Artificial Sequence
  Description of Artificial Sequence: Synthetic oligonucleotide
  Antisense strand to SEQ ID NO: 2199986
uuaacuguagcuaagcuuc

SEQ ID NO: 2199988 - RNA, 19 nt, Artificial Sequence
  Description of Artificial Sequence: Synthetic oligonucleotide
  Sense strand starting at position 3705 of SEQ ID NO: 1883530
cugagaucagccuguagaa

SEQ ID NO: 2199989 - RNA, 19 nt, Artificial Sequence
  Description of Artificial Sequence: Synthetic oligonucleotide
  Antisense strand to SEQ ID NO: 2199988
uucuacaggcugaucucag

SEQ ID NO: 2199990 - RNA, 19 nt, Artificial Sequence
  Description of Artificial Sequence: Synthetic oligonucleotide
  Sense strand starting at position 3909 of SEQ ID NO: 1883530
agagcaagugucugauaag

SEQ ID NO: 2199991 - RNA, 19 nt, Artificial Sequence
  Description of Artificial Sequence: Synthetic oligonucleotide
  Antisense strand to SEQ ID NO: 2199990
cuuaucagacacuugcucu

SEQ ID NO: 2199992 - RNA, 19 nt, Artificial Sequence
  Description of Artificial Sequence: Synthetic oligonucleotide
  Sense strand starting at position 706 of SEQ ID NO: 1883530
gggccuagcacucagaagu

SEQ ID NO: 2199993 - RNA, 19 nt, Artificial Sequence
  Description of Artificial Sequence: Synthetic oligonucleotide
  Antisense strand to SEQ ID NO: 2199992
acuucugagugcuaggccc

SEQ ID NO: 2199994 - RNA, 19 nt, Artificial Sequence
  Description of Artificial Sequence: Synthetic oligonucleotide
  Sense strand starting at position 719 of SEQ ID NO: 1883530
agaaguguucaguggauau

SEQ ID NO: 2199995 - RNA, 19 nt, Artificial Sequence
  Description of Artificial Sequence: Synthetic oligonucleotide
  Antisense strand to SEQ ID NO: 2199994
auauccacugaacacuucu

SEQ ID NO: 2199996 - RNA, 19 nt, Artificial Sequence
  Description of Artificial Sequence: Synthetic oligonucleotide
  Sense strand starting at position 3908 of SEQ ID NO: 1883530
uagagcaagugucugauaa

SEQ ID NO: 2199997 - RNA, 19 nt, Artificial Sequence
  Description of Artificial Sequence: Synthetic oligonucleotide
  Antisense strand to SEQ ID NO: 2199996
uuaucagacacuugcucua

SEQ ID NO: 2199998 - RNA, 19 nt, Artificial Sequence
  Description of Artificial Sequence: Synthetic oligonucleotide
  Sense strand starting at position 1111 of SEQ ID NO: 1883530
gaagguaagcacuguaauc

SEQ ID NO: 2199999 - RNA, 19 nt, Artificial Sequence
  Description of Artificial Sequence: Synthetic oligonucleotide
  Antisense strand to SEQ ID NO: 2199998
gauuacagugcuuaccuuc

SEQ ID NO: 2200000 - RNA, 19 nt, Artificial Sequence
  Description of Artificial Sequence: Synthetic oligonucleotide
  Sense strand starting at position 1459 of SEQ ID NO: 1883530
ggagcucuuucucuuacaa

SEQ ID NO: 2200001 - RNA, 19 nt, Artificial Sequence
  Description of Artificial Sequence: Synthetic oligonucleotide
  Antisense strand to SEQ ID NO: 2200000
uuguaagagaaagagcucc

SEQ ID NO: 2200002 - RNA, 19 nt, Artificial Sequence
  Description of Artificial Sequence: Synthetic oligonucleotide
  Sense strand starting at position 471 of SEQ ID NO: 1883530
uguaucaugcugcacacaa

SEQ ID NO: 2200003 - RNA, 19 nt, Artificial Sequence
  Description of Artificial Sequence: Synthetic oligonucleotide
  Antisense strand to SEQ ID NO: 2200002
uugugugcagcaugauaca

SEQ ID NO: 2200004 - RNA, 19 nt, Artificial Sequence
  Description of Artificial Sequence: Synthetic oligonucleotide
  Sense strand starting at position 1458 of SEQ ID NO: 1883530
gggagcucuuucucuuaca

SEQ ID NO: 2200005 - RNA, 19 nt, Artificial Sequence
  Description of Artificial Sequence: Synthetic oligonucleotide
  Antisense strand to SEQ ID NO: 2200004
uguaagagaaagagcuccc

SEQ ID NO: 2200006 - RNA, 19 nt, Artificial Sequence
  Description of Artificial Sequence: Synthetic oligonucleotide
  Sense strand starting at position 994 of SEQ ID NO: 1883530
ggucuugcaaggugggaua

SEQ ID NO: 2200007 - RNA, 19 nt, Artificial Sequence
  Description of Artificial Sequence: Synthetic oligonucleotide
  Antisense strand to SEQ ID NO: 2200006
uaucccaccuugcaagacc

SEQ ID NO: 2200008 - RNA, 19 nt, Artificial Sequence
  Description of Artificial Sequence: Synthetic oligonucleotide
  Sense strand starting at position 317 of SEQ ID NO: 1883530
gcucuuaacugggcucaaa

SEQ ID NO: 2200009 - RNA, 19 nt, Artificial Sequence
  Description of Artificial Sequence: Synthetic oligonucleotide
  Antisense strand to SEQ ID NO: 2200008
uuugagcccaguuaagagc

SEQ ID NO: 2200010 - RNA, 19 nt, Artificial Sequence
  Description of Artificial Sequence: Synthetic oligonucleotide
  Sense strand starting at position 2834 of SEQ ID NO: 1883530
agacauuccugcgugaaca

SEQ ID NO: 2200011 - RNA, 19 nt, Artificial Sequence
  Description of Artificial Sequence: Synthetic oligonucleotide
  Antisense strand to SEQ ID NO: 2200010
uguucacgcaggaaugucu

SEQ ID NO: 2200012 - RNA, 19 nt, Artificial Sequence
  Description of Artificial Sequence: Synthetic oligonucleotide
  Sense strand starting at position 2833 of SEQ ID NO: 1883530
aagacauuccugcgugaac

SEQ ID NO: 2200013 - RNA, 19 nt, Artificial Sequence
  Description of Artificial Sequence: Synthetic oligonucleotide
  Antisense strand to SEQ ID NO: 2200012
guucacgcaggaaugucuu

SEQ ID NO: 2200014 - RNA, 19 nt, Artificial Sequence
  Description of Artificial Sequence: Synthetic oligonucleotide
  Sense strand starting at position 316 of SEQ ID NO: 1883530
ggcucuuaacugggcucaa

SEQ ID NO: 2200015 - RNA, 19 nt, Artificial Sequence
  Description of Artificial Sequence: Synthetic oligonucleotide
  Antisense strand to SEQ ID NO: 2200014
uugagcccaguuaagagcc

SEQ ID NO: 2200016 - RNA, 19 nt, Artificial Sequence
  Description of Artificial Sequence: Synthetic oligonucleotide
  Sense strand starting at position 2835 of SEQ ID NO: 1883530
gacauuccugcgugaacag

SEQ ID NO: 2200017 - RNA, 19 nt, Artificial Sequence
  Description of Artificial Sequence: Synthetic oligonucleotide
  Antisense strand to SEQ ID NO: 2200016
cuguucacgcaggaauguc

SEQ ID NO: 2200018 - RNA, 19 nt, Artificial Sequence
  Description of Artificial Sequence: Synthetic oligonucleotide
  Sense strand starting at position 2022 of SEQ ID NO: 1883530
ggcggugguccugaccuau

SEQ ID NO: 2200019 - RNA, 19 nt, Artificial Sequence
  Description of Artificial Sequence: Synthetic oligonucleotide
  Antisense strand to SEQ ID NO: 2200018
auaggucaggaccaccgcc

SEQ ID NO: 2200020 - RNA, 19 nt, Artificial Sequence
  Description of Artificial Sequence: Synthetic oligonucleotide
  Sense strand starting at position 1308 of SEQ ID NO: 1883530
gugugucugaugggaagca

SEQ ID NO: 2200021 - RNA, 19 nt, Artificial Sequence
  Description of Artificial Sequence: Synthetic oligonucleotide
  Antisense strand to SEQ ID NO: 2200020
ugcuucccaucagacacac

SEQ ID NO: 2200022 - RNA, 19 nt, Artificial Sequence
  Description of Artificial Sequence: Synthetic oligonucleotide
  Sense strand starting at position 2755 of SEQ ID NO: 1883530
cgucuaugcuacuuaauga

SEQ ID NO: 2200023 - RNA, 19 nt, Artificial Sequence
  Description of Artificial Sequence: Synthetic oligonucleotide
  Antisense strand to SEQ ID NO: 2200022
ucauuaaguagcauagacg

SEQ ID NO: 2200024 - RNA, 19 nt, Artificial Sequence
  Description of Artificial Sequence: Synthetic oligonucleotide
  Sense strand starting at position 2367 of SEQ ID NO: 1883530
ggaccugcgcccugaauga

SEQ ID NO: 2200025 - RNA, 19 nt, Artificial Sequence
  Description of Artificial Sequence: Synthetic oligonucleotide
  Antisense strand to SEQ ID NO: 2200024
ucauucagggcgcaggucc

SEQ ID NO: 2200026 - RNA, 19 nt, Artificial Sequence
  Description of Artificial Sequence: Synthetic oligonucleotide
  Sense strand starting at position 231 of SEQ ID NO: 1883530
uaauguagauaucaggaca

SEQ ID NO: 2200027 - RNA, 19 nt, Artificial Sequence
  Description of Artificial Sequence: Synthetic oligonucleotide
  Antisense strand to SEQ ID NO: 2200026
uguccugauaucuacauua

SEQ ID NO: 2200028 - RNA, 19 nt, Artificial Sequence
  Description of Artificial Sequence: Synthetic oligonucleotide
  Sense strand starting at position 1299 of SEQ ID NO: 1883530
cuucgagaggugugucuga

SEQ ID NO: 2200029 - RNA, 19 nt, Artificial Sequence
  Description of Artificial Sequence: Synthetic oligonucleotide
  Antisense strand to SEQ ID NO: 2200028
ucagacacaccucucgaag

SEQ ID NO: 2200030 - RNA, 19 nt, Artificial Sequence
  Description of Artificial Sequence: Synthetic oligonucleotide
  Sense strand starting at position 1989 of SEQ ID NO: 1883530
ggcuucuucgagcagccaa

SEQ ID NO: 2200031 - RNA, 19 nt, Artificial Sequence
  Description of Artificial Sequence: Synthetic oligonucleotide
  Antisense strand to SEQ ID NO: 2200030
uuggcugcucgaagaagcc

SEQ ID NO: 2200032 - RNA, 19 nt, Artificial Sequence
  Description of Artificial Sequence: Synthetic oligonucleotide
  Sense strand starting at position 1234 of SEQ ID NO: 1883530
gcgccacucuuacuagaca

SEQ ID NO: 2200033 - RNA, 19 nt, Artificial Sequence
  Description of Artificial Sequence: Synthetic oligonucleotide
  Antisense strand to SEQ ID NO: 2200032
ugucuaguaagaguggcgc

SEQ ID NO: 2200034 - RNA, 19 nt, Artificial Sequence
  Description of Artificial Sequence: Synthetic oligonucleotide
  Sense strand starting at position 3043 of SEQ ID NO: 1883530
gaacgaucuugcucagccu

SEQ ID NO: 2200035 - RNA, 19 nt, Artificial Sequence
  Description of Artificial Sequence: Synthetic oligonucleotide
  Antisense strand to SEQ ID NO: 2200034
aggcugagcaagaucguuc

SEQ ID NO: 2200036 - RNA, 19 nt, Artificial Sequence
  Description of Artificial Sequence: Synthetic oligonucleotide
  Sense strand starting at position 1688 of SEQ ID NO: 1883530
gagcgagcgccucacaauu

SEQ ID NO: 2200037 - RNA, 19 nt, Artificial Sequence
  Description of Artificial Sequence: Synthetic oligonucleotide
  Antisense strand to SEQ ID NO: 2200036
aauugugaggcgcucgcuc

SEQ ID NO: 2200038 - RNA, 19 nt, Artificial Sequence
  Description of Artificial Sequence: Synthetic oligonucleotide
  Sense strand starting at position 2507 of SEQ ID NO: 1883530
cgaguaaacugagaccaga

SEQ ID NO: 2200039 - RNA, 19 nt, Artificial Sequence
  Description of Artificial Sequence: Synthetic oligonucleotide
  Antisense strand to SEQ ID NO: 2200038
ucuggucucaguuuacucg

SEQ ID NO: 2200040 - RNA, 19 nt, Artificial Sequence
  Description of Artificial Sequence: Synthetic oligonucleotide
  Sense strand starting at position 658 of SEQ ID NO: 1883530
agggauauuucaggccugu

SEQ ID NO: 2200041 - RNA, 19 nt, Artificial Sequence
  Description of Artificial Sequence: Synthetic oligonucleotide
  Antisense strand to SEQ ID NO: 2200040
acaggccugaaauaucccu

SEQ ID NO: 2200042 - RNA, 19 nt, Artificial Sequence
  Description of Artificial Sequence: Synthetic oligonucleotide
  Sense strand starting at position 194 of SEQ ID NO: 1883530
gggagaaucugccauccag

SEQ ID NO: 2200043 - RNA, 19 nt, Artificial Sequence
  Description of Artificial Sequence: Synthetic oligonucleotide
  Antisense strand to SEQ ID NO: 2200042
cuggauggcagauucuccc

SEQ ID NO: 2200044 - RNA, 19 nt, Artificial Sequence
  Description of Artificial Sequence: Synthetic oligonucleotide
  Sense strand starting at position 841 of SEQ ID NO: 1883530
gucaacguucuuuggcauu

SEQ ID NO: 2200045 - RNA, 19 nt, Artificial Sequence
  Description of Artificial Sequence: Synthetic oligonucleotide
  Antisense strand to SEQ ID NO: 2200044
aaugccaaagaacguugac

SEQ ID NO: 2200046 - RNA, 19 nt, Artificial Sequence
  Description of Artificial Sequence: Synthetic oligonucleotide
  Sense strand starting at position 3548 of SEQ ID NO: 1883530
ggugucuccucggcuuaca

SEQ ID NO: 2200047 - RNA, 19 nt, Artificial Sequence
  Description of Artificial Sequence: Synthetic oligonucleotide
  Antisense strand to SEQ ID NO: 2200046
uguaagccgaggagacacc

SEQ ID NO: 2200048 - RNA, 19 nt, Artificial Sequence
  Description of Artificial Sequence: Synthetic oligonucleotide
  Sense strand starting at position 1485 of SEQ ID NO: 1883530
aaagcacuguucgaaggaa

SEQ ID NO: 2200049 - RNA, 19 nt, Artificial Sequence
  Description of Artificial Sequence: Synthetic oligonucleotide
  Antisense strand to SEQ ID NO: 2200048
uuccuucgaacagugcuuu

SEQ ID NO: 2200050 - RNA, 19 nt, Artificial Sequence
  Description of Artificial Sequence: Synthetic oligonucleotide
  Sense strand starting at position 222 of SEQ ID NO: 1883530
augauccacuaauguagau

SEQ ID NO: 2200051 - RNA, 19 nt, Artificial Sequence
  Description of Artificial Sequence: Synthetic oligonucleotide
  Antisense strand to SEQ ID NO: 2200050
aucuacauuaguggaucau

SEQ ID NO: 2200052 - RNA, 19 nt, Artificial Sequence
  Description of Artificial Sequence: Synthetic oligonucleotide
  Sense strand starting at position 3357 of SEQ ID NO: 1883531
guaauauaccaacaggcua

SEQ ID NO: 2200053 - RNA, 19 nt, Artificial Sequence
  Description of Artificial Sequence: Synthetic oligonucleotide
  Antisense strand to SEQ ID NO: 2200052
uagccuguugguauauuac

SEQ ID NO: 2200054 - RNA, 19 nt, Artificial Sequence
  Description of Artificial Sequence: Synthetic oligonucleotide
  Sense strand starting at position 2193 of SEQ ID NO: 1883531
augcuauuuaucgggcaaa

SEQ ID NO: 2200055 - RNA, 19 nt, Artificial Sequence
  Description of Artificial Sequence: Synthetic oligonucleotide
  Antisense strand to SEQ ID NO: 2200054
uuugcccgauaaauagcau

SEQ ID NO: 2200056 - RNA, 19 nt, Artificial Sequence
  Description of Artificial Sequence: Synthetic oligonucleotide
  Sense strand starting at position 2992 of SEQ ID NO: 1883531
cccggcuacaagugaauuu

SEQ ID NO: 2200057 - RNA, 19 nt, Artificial Sequence
  Description of Artificial Sequence: Synthetic oligonucleotide
  Antisense strand to SEQ ID NO: 2200056
aaauucacuuguagccggg

SEQ ID NO: 2200058 - RNA, 19 nt, Artificial Sequence
  Description of Artificial Sequence: Synthetic oligonucleotide
  Sense strand starting at position 2160 of SEQ ID NO: 1883531
gcgucuauuauuugaauga

SEQ ID NO: 2200059 - RNA, 19 nt, Artificial Sequence
  Description of Artificial Sequence: Synthetic oligonucleotide
  Antisense strand to SEQ ID NO: 2200058
ucauucaaauaauagacgc

SEQ ID NO: 2200060 - RNA, 19 nt, Artificial Sequence
  Description of Artificial Sequence: Synthetic oligonucleotide
  Sense strand starting at position 564 of SEQ ID NO: 1883531
cugauagugacaggugaaa

SEQ ID NO: 2200061 - RNA, 19 nt, Artificial Sequence
  Description of Artificial Sequence: Synthetic oligonucleotide
  Antisense strand to SEQ ID NO: 2200060
uuucaccugucacuaucag

SEQ ID NO: 2200062 - RNA, 19 nt, Artificial Sequence
  Description of Artificial Sequence: Synthetic oligonucleotide
  Sense strand starting at position 3580 of SEQ ID NO: 1883531
acgccuguagcucuaguua

SEQ ID NO: 2200063 - RNA, 19 nt, Artificial Sequence
  Description of Artificial Sequence: Synthetic oligonucleotide
  Antisense strand to SEQ ID NO: 2200062
uaacuagagcuacaggcgu

SEQ ID NO: 2200064 - RNA, 19 nt, Artificial Sequence
  Description of Artificial Sequence: Synthetic oligonucleotide
  Sense strand starting at position 3887 of SEQ ID NO: 1883531
gugaguuaccaggaaugua

SEQ ID NO: 2200065 - RNA, 19 nt, Artificial Sequence
  Description of Artificial Sequence: Synthetic oligonucleotide
  Antisense strand to SEQ ID NO: 2200064
uacauuccugguaacucac

SEQ ID NO: 2200066 - RNA, 19 nt, Artificial Sequence
  Description of Artificial Sequence: Synthetic oligonucleotide
  Sense strand starting at position 3160 of SEQ ID NO: 1883531
agaacaaagugccuuuaaa

SEQ ID NO: 2200067 - RNA, 19 nt, Artificial Sequence
  Description of Artificial Sequence: Synthetic oligonucleotide
  Antisense strand to SEQ ID NO: 2200066
uuuaaaggcacuuuguucu

SEQ ID NO: 2200068 - RNA, 19 nt, Artificial Sequence
  Description of Artificial Sequence: Synthetic oligonucleotide
  Sense strand starting at position 2261 of SEQ ID NO: 1883531
ugaggacacgggugagauu

SEQ ID NO: 2200069 - RNA, 19 nt, Artificial Sequence
  Description of Artificial Sequence: Synthetic oligonucleotide
  Antisense strand to SEQ ID NO: 2200068
aaucucacccguguccuca

SEQ ID NO: 2200070 - RNA, 19 nt, Artificial Sequence
  Description of Artificial Sequence: Synthetic oligonucleotide
  Sense strand starting at position 554 of SEQ ID NO: 1883531
augagcuauccugauagug

SEQ ID NO: 2200071 - RNA, 19 nt, Artificial Sequence
  Description of Artificial Sequence: Synthetic oligonucleotide
  Antisense strand to SEQ ID NO: 2200070
cacuaucaggauagcucau

SEQ ID NO: 2200072 - RNA, 19 nt, Artificial Sequence
  Description of Artificial Sequence: Synthetic oligonucleotide
  Sense strand starting at position 499 of SEQ ID NO: 1883531
cugcaauaugcugaacaca

SEQ ID NO: 2200073 - RNA, 19 nt, Artificial Sequence
  Description of Artificial Sequence: Synthetic oligonucleotide
  Antisense strand to SEQ ID NO: 2200072
uguguucagcauauugcag

SEQ ID NO: 2200074 - RNA, 19 nt, Artificial Sequence
  Description of Artificial Sequence: Synthetic oligonucleotide
  Sense strand starting at position 2158 of SEQ ID NO: 1883531
uugcgucuauuauuugaau

SEQ ID NO: 2200075 - RNA, 19 nt, Artificial Sequence
  Description of Artificial Sequence: Synthetic oligonucleotide
  Antisense strand to SEQ ID NO: 2200074
auucaaauaauagacgcaa

SEQ ID NO: 2200076 - RNA, 19 nt, Artificial Sequence
  Description of Artificial Sequence: Synthetic oligonucleotide
  Sense strand starting at position 2141 of SEQ ID NO: 1883531
ucuugaaguuaccuagauu

SEQ ID NO: 2200077 - RNA, 19 nt, Artificial Sequence
  Description of Artificial Sequence: Synthetic oligonucleotide
  Antisense strand to SEQ ID NO: 2200076
aaucuagguaacuucaaga

SEQ ID NO: 2200078 - RNA, 19 nt, Artificial Sequence
  Description of Artificial Sequence: Synthetic oligonucleotide
  Sense strand starting at position 3026 of SEQ ID NO: 1883531
agaagaggcccuugcuaaa

SEQ ID NO: 2200079 - RNA, 19 nt, Artificial Sequence
  Description of Artificial Sequence: Synthetic oligonucleotide
  Antisense strand to SEQ ID NO: 2200078
uuuagcaagggccucuucu

SEQ ID NO: 2200080 - RNA, 19 nt, Artificial Sequence
  Description of Artificial Sequence: Synthetic oligonucleotide
  Sense strand starting at position 1237 of SEQ ID NO: 1883531
ucuggaaucgccagcgagu

SEQ ID NO: 2200081 - RNA, 19 nt, Artificial Sequence
  Description of Artificial Sequence: Synthetic oligonucleotide
  Antisense strand to SEQ ID NO: 2200080
acucgcuggcgauuccaga

SEQ ID NO: 2200082 - RNA, 19 nt, Artificial Sequence
  Description of Artificial Sequence: Synthetic oligonucleotide
  Sense strand starting at position 3039 of SEQ ID NO: 1883531
gcuaaauuguauuccaaga

SEQ ID NO: 2200083 - RNA, 19 nt, Artificial Sequence
  Description of Artificial Sequence: Synthetic oligonucleotide
  Antisense strand to SEQ ID NO: 2200082
ucuuggaauacaauuuagc

SEQ ID NO: 2200084 - RNA, 19 nt, Artificial Sequence
  Description of Artificial Sequence: Synthetic oligonucleotide
  Sense strand starting at position 1188 of SEQ ID NO: 1883531
ucaacuguguaaucugaua

SEQ ID NO: 2200085 - RNA, 19 nt, Artificial Sequence
  Description of Artificial Sequence: Synthetic oligonucleotide
  Antisense strand to SEQ ID NO: 2200084
uaucagauuacacaguuga

SEQ ID NO: 2200086 - RNA, 19 nt, Artificial Sequence
  Description of Artificial Sequence: Synthetic oligonucleotide
  Sense strand starting at position 3948 of SEQ ID NO: 1883531
agcguagacugcucuauuu

SEQ ID NO: 2200087 - RNA, 19 nt, Artificial Sequence
  Description of Artificial Sequence: Synthetic oligonucleotide
  Antisense strand to SEQ ID NO: 2200086
aaauagagcagucuacgcu

SEQ ID NO: 2200088 - RNA, 19 nt, Artificial Sequence
  Description of Artificial Sequence: Synthetic oligonucleotide
  Sense strand starting at position 416 of SEQ ID NO: 1883531
agauguuccuucuugacga

SEQ ID NO: 2200089 - RNA, 19 nt, Artificial Sequence
  Description of Artificial Sequence: Synthetic oligonucleotide
  Antisense strand to SEQ ID NO: 2200088
ucgucaagaaggaacaucu

SEQ ID NO: 2200090 - RNA, 19 nt, Artificial Sequence
  Description of Artificial Sequence: Synthetic oligonucleotide
  Sense strand starting at position 2153 of SEQ ID NO: 1883531
cuagauugcgucuauuauu

SEQ ID NO: 2200091 - RNA, 19 nt, Artificial Sequence
  Description of Artificial Sequence: Synthetic oligonucleotide
  Antisense strand to SEQ ID NO: 2200090
aauaauagacgcaaucuag

SEQ ID NO: 2200092 - RNA, 19 nt, Artificial Sequence
  Description of Artificial Sequence: Synthetic oligonucleotide
  Sense strand starting at position 2615 of SEQ ID NO: 1883531
gcaguuaaugcugauccuu

SEQ ID NO: 2200093 - RNA, 19 nt, Artificial Sequence
  Description of Artificial Sequence: Synthetic oligonucleotide
  Antisense strand to SEQ ID NO: 2200092
aaggaucagcauuaacugc

SEQ ID NO: 2200094 - RNA, 19 nt, Artificial Sequence
  Description of Artificial Sequence: Synthetic oligonucleotide
  Sense strand starting at position 2085 of SEQ ID NO: 1883531
cgcccauaaucuuuagauu

SEQ ID NO: 2200095 - RNA, 19 nt, Artificial Sequence
  Description of Artificial Sequence: Synthetic oligonucleotide
  Antisense strand to SEQ ID NO: 2200094
aaucuaaagauuaugggcg

SEQ ID NO: 2200096 - RNA, 19 nt, Artificial Sequence
  Description of Artificial Sequence: Synthetic oligonucleotide
  Sense strand starting at position 2423 of SEQ ID NO: 1883531
ggaaacgccuccgugagaa

SEQ ID NO: 2200097 - RNA, 19 nt, Artificial Sequence
  Description of Artificial Sequence: Synthetic oligonucleotide
  Antisense strand to SEQ ID NO: 2200096
uucucacggaggcguuucc

SEQ ID NO: 2200098 - RNA, 19 nt, Artificial Sequence
  Description of Artificial Sequence: Synthetic oligonucleotide
  Sense strand starting at position 2422 of SEQ ID NO: 1883531
gggaaacgccuccgugaga

SEQ ID NO: 2200099 - RNA, 19 nt, Artificial Sequence
  Description of Artificial Sequence: Synthetic oligonucleotide
  Antisense strand to SEQ ID NO: 2200098
ucucacggaggcguuuccc

SEQ ID NO: 2200100 - RNA, 19 nt, Artificial Sequence
  Description of Artificial Sequence: Synthetic oligonucleotide
  Sense strand starting at position 635 of SEQ ID NO: 1883531
ugaaucaaaucugagauug

SEQ ID NO: 2200101 - RNA, 19 nt, Artificial Sequence
  Description of Artificial Sequence: Synthetic oligonucleotide
  Antisense strand to SEQ ID NO: 2200100
caaucucagauuugauuca

SEQ ID NO: 2200102 - RNA, 19 nt, Artificial Sequence
  Description of Artificial Sequence: Synthetic oligonucleotide
  Sense strand starting at position 2161 of SEQ ID NO: 1883531
cgucuauuauuugaaugac

SEQ ID NO: 2200103 - RNA, 19 nt, Artificial Sequence
  Description of Artificial Sequence: Synthetic oligonucleotide
  Antisense strand to SEQ ID NO: 2200102
gucauucaaauaauagacg

SEQ ID NO: 2200104 - RNA, 19 nt, Artificial Sequence
  Description of Artificial Sequence: Synthetic oligonucleotide
  Sense strand starting at position 3647 of SEQ ID NO: 1883531
cacugugagcugugauuac

SEQ ID NO: 2200105 - RNA, 19 nt, Artificial Sequence
  Description of Artificial Sequence: Synthetic oligonucleotide
  Antisense strand to SEQ ID NO: 2200104
guaaucacagcucacagug

SEQ ID NO: 2200106 - RNA, 19 nt, Artificial Sequence
  Description of Artificial Sequence: Synthetic oligonucleotide
  Sense strand starting at position 2879 of SEQ ID NO: 1883531
ucaagugaguucuuuguuu

SEQ ID NO: 2200107 - RNA, 19 nt, Artificial Sequence
  Description of Artificial Sequence: Synthetic oligonucleotide
  Antisense strand to SEQ ID NO: 2200106
aaacaaagaacucacuuga

SEQ ID NO: 2200108 - RNA, 19 nt, Artificial Sequence
  Description of Artificial Sequence: Synthetic oligonucleotide
  Sense strand starting at position 2435 of SEQ ID NO: 1883531
gugagaacgcauggcuuca

SEQ ID NO: 2200109 - RNA, 19 nt, Artificial Sequence
  Description of Artificial Sequence: Synthetic oligonucleotide
  Antisense strand to SEQ ID NO: 2200108
ugaagccaugcguucucac

SEQ ID NO: 2200110 - RNA, 19 nt, Artificial Sequence
  Description of Artificial Sequence: Synthetic oligonucleotide
  Sense strand starting at position 2150 of SEQ ID NO: 1883531
uaccuagauugcgucuauu

SEQ ID NO: 2200111 - RNA, 19 nt, Artificial Sequence
  Description of Artificial Sequence: Synthetic oligonucleotide
  Antisense strand to SEQ ID NO: 2200110
aauagacgcaaucuaggua

SEQ ID NO: 2200112 - RNA, 19 nt, Artificial Sequence
  Description of Artificial Sequence: Synthetic oligonucleotide
  Sense strand starting at position 2462 of SEQ ID NO: 1883531
ccuugcgcuccugaucuua

SEQ ID NO: 2200113 - RNA, 19 nt, Artificial Sequence
  Description of Artificial Sequence: Synthetic oligonucleotide
  Antisense strand to SEQ ID NO: 2200112
uaagaucaggagcgcaagg

SEQ ID NO: 2200114 - RNA, 19 nt, Artificial Sequence
  Description of Artificial Sequence: Synthetic oligonucleotide
  Sense strand starting at position 3645 of SEQ ID NO: 1883531
gucacugugagcugugauu

SEQ ID NO: 2200115 - RNA, 19 nt, Artificial Sequence
  Description of Artificial Sequence: Synthetic oligonucleotide
  Antisense strand to SEQ ID NO: 2200114
aaucacagcucacagugac

SEQ ID NO: 2200116 - RNA, 19 nt, Artificial Sequence
  Description of Artificial Sequence: Synthetic oligonucleotide
  Sense strand starting at position 317 of SEQ ID NO: 1883531
gcgcccggucuuuaaucaa

SEQ ID NO: 2200117 - RNA, 19 nt, Artificial Sequence
  Description of Artificial Sequence: Synthetic oligonucleotide
  Antisense strand to SEQ ID NO: 2200116
uugauuaaagaccgggcgc

SEQ ID NO: 2200118 - RNA, 19 nt, Artificial Sequence
  Description of Artificial Sequence: Synthetic oligonucleotide
  Sense strand starting at position 2915 of SEQ ID NO: 1883531
gaacucuugucucaaagga

SEQ ID NO: 2200119 - RNA, 19 nt, Artificial Sequence
  Description of Artificial Sequence: Synthetic oligonucleotide
  Antisense strand to SEQ ID NO: 2200118
uccuuugagacaagaguuc

SEQ ID NO: 2200120 - RNA, 19 nt, Artificial Sequence
  Description of Artificial Sequence: Synthetic oligonucleotide
  Sense strand starting at position 2156 of SEQ ID NO: 1883531
gauugcgucuauuauuuga

SEQ ID NO: 2200121 - RNA, 19 nt, Artificial Sequence
  Description of Artificial Sequence: Synthetic oligonucleotide
  Antisense strand to SEQ ID NO: 2200120
ucaaauaauagacgcaauc

SEQ ID NO: 2200122 - RNA, 19 nt, Artificial Sequence
  Description of Artificial Sequence: Synthetic oligonucleotide
  Sense strand starting at position 3332 of SEQ ID NO: 1883531
ggccaagaauucgaaacca

SEQ ID NO: 2200123 - RNA, 19 nt, Artificial Sequence
  Description of Artificial Sequence: Synthetic oligonucleotide
  Antisense strand to SEQ ID NO: 2200122
ugguuucgaauucuuggcc

SEQ ID NO: 2200124 - RNA, 19 nt, Artificial Sequence
  Description of Artificial Sequence: Synthetic oligonucleotide
  Sense strand starting at position 2576 of SEQ ID NO: 1883531
cuuuaugaaucuugaagag

SEQ ID NO: 2200125 - RNA, 19 nt, Artificial Sequence
  Description of Artificial Sequence: Synthetic oligonucleotide
  Antisense strand to SEQ ID NO: 2200124
cucuucaagauucauaaag

SEQ ID NO: 2200126 - RNA, 19 nt, Artificial Sequence
  Description of Artificial Sequence: Synthetic oligonucleotide
  Sense strand starting at position 562 of SEQ ID NO: 1883531
uccugauagugacagguga

SEQ ID NO: 2200127 - RNA, 19 nt, Artificial Sequence
  Description of Artificial Sequence: Synthetic oligonucleotide
  Antisense strand to SEQ ID NO: 2200126
ucaccugucacuaucagga

SEQ ID NO: 2200128 - RNA, 19 nt, Artificial Sequence
  Description of Artificial Sequence: Synthetic oligonucleotide
  Sense strand starting at position 2800 of SEQ ID NO: 1883531
ugggccaagucucaagaau

SEQ ID NO: 2200129 - RNA, 19 nt, Artificial Sequence
  Description of Artificial Sequence: Synthetic oligonucleotide
  Antisense strand to SEQ ID NO: 2200128
auucuugagacuuggccca

SEQ ID NO: 2200130 - RNA, 19 nt, Artificial Sequence
  Description of Artificial Sequence: Synthetic oligonucleotide
  Sense strand starting at position 2192 of SEQ ID NO: 1883531
gaugcuauuuaucgggcaa

SEQ ID NO: 2200131 - RNA, 19 nt, Artificial Sequence
  Description of Artificial Sequence: Synthetic oligonucleotide
  Antisense strand to SEQ ID NO: 2200130
uugcccgauaaauagcauc

SEQ ID NO: 2200132 - RNA, 19 nt, Artificial Sequence
  Description of Artificial Sequence: Synthetic oligonucleotide
  Sense strand starting at position 2096 of SEQ ID NO: 1883533
guguguucuccgcugauaa

SEQ ID NO: 2200133 - RNA, 19 nt, Artificial Sequence
  Description of Artificial Sequence: Synthetic oligonucleotide
  Antisense strand to SEQ ID NO: 2200132
uuaucagcggagaacacac

SEQ ID NO: 2200134 - RNA, 19 nt, Artificial Sequence
  Description of Artificial Sequence: Synthetic oligonucleotide
  Sense strand starting at position 2373 of SEQ ID NO: 1883533
gcaucuuugggccaaggau

SEQ ID NO: 2200135 - RNA, 19 nt, Artificial Sequence
  Description of Artificial Sequence: Synthetic oligonucleotide
  Antisense strand to SEQ ID NO: 2200134
auccuuggcccaaagaugc

SEQ ID NO: 2200136 - RNA, 19 nt, Artificial Sequence
  Description of Artificial Sequence: Synthetic oligonucleotide
  Sense strand starting at position 2485 of SEQ ID NO: 1883533
agccuugaccagugaggga

SEQ ID NO: 2200137 - RNA, 19 nt, Artificial Sequence
  Description of Artificial Sequence: Synthetic oligonucleotide
  Antisense strand to SEQ ID NO: 2200136
ucccucacuggucaaggcu

SEQ ID NO: 2200138 - RNA, 19 nt, Artificial Sequence
  Description of Artificial Sequence: Synthetic oligonucleotide
  Sense strand starting at position 840 of SEQ ID NO: 1883533
cagugaaguguucagagug

SEQ ID NO: 2200139 - RNA, 19 nt, Artificial Sequence
  Description of Artificial Sequence: Synthetic oligonucleotide
  Antisense strand to SEQ ID NO: 2200138
cacucugaacacuucacug

SEQ ID NO: 2200140 - RNA, 19 nt, Artificial Sequence
  Description of Artificial Sequence: Synthetic oligonucleotide
  Sense strand starting at position 928 of SEQ ID NO: 1883533
uggaucugcggucacuuaa

SEQ ID NO: 2200141 - RNA, 19 nt, Artificial Sequence
  Description of Artificial Sequence: Synthetic oligonucleotide
  Antisense strand to SEQ ID NO: 2200140
uuaagugaccgcagaucca

SEQ ID NO: 2200142 - RNA, 19 nt, Artificial Sequence
  Description of Artificial Sequence: Synthetic oligonucleotide
  Sense strand starting at position 1099 of SEQ ID NO: 1883533
gguguggacguaugagaca

SEQ ID NO: 2200143 - RNA, 19 nt, Artificial Sequence
  Description of Artificial Sequence: Synthetic oligonucleotide
  Antisense strand to SEQ ID NO: 2200142
ugucucauacguccacacc

SEQ ID NO: 2200144 - RNA, 19 nt, Artificial Sequence
  Description of Artificial Sequence: Synthetic oligonucleotide
  Sense strand starting at position 101 of SEQ ID NO: 1883533
ugagaaguguucccucgga

SEQ ID NO: 2200145 - RNA, 19 nt, Artificial Sequence
  Description of Artificial Sequence: Synthetic oligonucleotide
  Antisense strand to SEQ ID NO: 2200144
uccgagggaacacuucuca

SEQ ID NO: 2200146 - RNA, 19 nt, Artificial Sequence
  Description of Artificial Sequence: Synthetic oligonucleotide
  Sense strand starting at position 245 of SEQ ID NO: 1883533
agaggaguuguggguuagu

SEQ ID NO: 2200147 - RNA, 19 nt, Artificial Sequence
  Description of Artificial Sequence: Synthetic oligonucleotide
  Antisense strand to SEQ ID NO: 2200146
acuaacccacaacuccucu

SEQ ID NO: 2200148 - RNA, 19 nt, Artificial Sequence
  Description of Artificial Sequence: Synthetic oligonucleotide
  Sense strand starting at position 1573 of SEQ ID NO: 1883533
gggugaaguguuggaguca

SEQ ID NO: 2200149 - RNA, 19 nt, Artificial Sequence
  Description of Artificial Sequence: Synthetic oligonucleotide
  Antisense strand to SEQ ID NO: 2200148
ugacuccaacacuucaccc

SEQ ID NO: 2200150 - RNA, 19 nt, Artificial Sequence
  Description of Artificial Sequence: Synthetic oligonucleotide
  Sense strand starting at position 3363 of SEQ ID NO: 1883533
ggucacugagcugguuuaa

SEQ ID NO: 2200151 - RNA, 19 nt, Artificial Sequence
  Description of Artificial Sequence: Synthetic oligonucleotide
  Antisense strand to SEQ ID NO: 2200150
uuaaaccagcucagugacc

SEQ ID NO: 2200152 - RNA, 19 nt, Artificial Sequence
  Description of Artificial Sequence: Synthetic oligonucleotide
  Sense strand starting at position 3362 of SEQ ID NO: 1883533
uggucacugagcugguuua

SEQ ID NO: 2200153 - RNA, 19 nt, Artificial Sequence
  Description of Artificial Sequence: Synthetic oligonucleotide
  Antisense strand to SEQ ID NO: 2200152
uaaaccagcucagugacca

SEQ ID NO: 2200154 - RNA, 19 nt, Artificial Sequence
  Description of Artificial Sequence: Synthetic oligonucleotide
  Sense strand starting at position 3048 of SEQ ID NO: 1883533
cggccugaugccugggaca

SEQ ID NO: 2200155 - RNA, 19 nt, Artificial Sequence
  Description of Artificial Sequence: Synthetic oligonucleotide
  Antisense strand to SEQ ID NO: 2200154
ugucccaggcaucaggccg

SEQ ID NO: 2200156 - RNA, 19 nt, Artificial Sequence
  Description of Artificial Sequence: Synthetic oligonucleotide
  Sense strand starting at position 406 of SEQ ID NO: 1883533
agcugauuguccucucgga

SEQ ID NO: 2200157 - RNA, 19 nt, Artificial Sequence
  Description of Artificial Sequence: Synthetic oligonucleotide
  Antisense strand to SEQ ID NO: 2200156
uccgagaggacaaucagcu

SEQ ID NO: 2200158 - RNA, 19 nt, Artificial Sequence
  Description of Artificial Sequence: Synthetic oligonucleotide
  Sense strand starting at position 759 of SEQ ID NO: 1883533
gggcguuccucaucugacu

SEQ ID NO: 2200159 - RNA, 19 nt, Artificial Sequence
  Description of Artificial Sequence: Synthetic oligonucleotide
  Antisense strand to SEQ ID NO: 2200158
agucagaugaggaacgccc

SEQ ID NO: 2200160 - RNA, 19 nt, Artificial Sequence
  Description of Artificial Sequence: Synthetic oligonucleotide
  Sense strand starting at position 1655 of SEQ ID NO: 1883533
uggccuccucugugcagaa

SEQ ID NO: 2200161 - RNA, 19 nt, Artificial Sequence
  Description of Artificial Sequence: Synthetic oligonucleotide
  Antisense strand to SEQ ID NO: 2200160
uucugcacagaggaggcca

SEQ ID NO: 2200162 - RNA, 19 nt, Artificial Sequence
  Description of Artificial Sequence: Synthetic oligonucleotide
  Sense strand starting at position 2118 of SEQ ID NO: 1883533
ggacgugucgucggacaaa

SEQ ID NO: 2200163 - RNA, 19 nt, Artificial Sequence
  Description of Artificial Sequence: Synthetic oligonucleotide
  Antisense strand to SEQ ID NO: 2200162
uuuguccgacgacacgucc

SEQ ID NO: 2200164 - RNA, 19 nt, Artificial Sequence
  Description of Artificial Sequence: Synthetic oligonucleotide
  Sense strand starting at position 2117 of SEQ ID NO: 1883533
gggacgugucgucggacaa

SEQ ID NO: 2200165 - RNA, 19 nt, Artificial Sequence
  Description of Artificial Sequence: Synthetic oligonucleotide
  Antisense strand to SEQ ID NO: 2200164
uuguccgacgacacguccc

SEQ ID NO: 2200166 - RNA, 19 nt, Artificial Sequence
  Description of Artificial Sequence: Synthetic oligonucleotide
  Sense strand starting at position 2097 of SEQ ID NO: 1883533
uguguucuccgcugauaac

SEQ ID NO: 2200167 - RNA, 19 nt, Artificial Sequence
  Description of Artificial Sequence: Synthetic oligonucleotide
  Antisense strand to SEQ ID NO: 2200166
guuaucagcggagaacaca

SEQ ID NO: 2200168 - RNA, 19 nt, Artificial Sequence
  Description of Artificial Sequence: Synthetic oligonucleotide
  Sense strand starting at position 254 of SEQ ID NO: 1883533
guggguuagugccuaugca

SEQ ID NO: 2200169 - RNA, 19 nt, Artificial Sequence
  Description of Artificial Sequence: Synthetic oligonucleotide
  Antisense strand to SEQ ID NO: 2200168
ugcauaggcacuaacccac

SEQ ID NO: 2200170 - RNA, 19 nt, Artificial Sequence
  Description of Artificial Sequence: Synthetic oligonucleotide
  Sense strand starting at position 1574 of SEQ ID NO: 1883533
ggugaaguguuggagucag

SEQ ID NO: 2200171 - RNA, 19 nt, Artificial Sequence
  Description of Artificial Sequence: Synthetic oligonucleotide
  Antisense strand to SEQ ID NO: 2200170
cugacuccaacacuucacc

SEQ ID NO: 2200172 - RNA, 19 nt, Artificial Sequence
  Description of Artificial Sequence: Synthetic oligonucleotide
  Sense strand starting at position 243 of SEQ ID NO: 1883533
ggagaggaguuguggguua

SEQ ID NO: 2200173 - RNA, 19 nt, Artificial Sequence
  Description of Artificial Sequence: Synthetic oligonucleotide
  Antisense strand to SEQ ID NO: 2200172
uaacccacaacuccucucc

SEQ ID NO: 2200174 - RNA, 19 nt, Artificial Sequence
  Description of Artificial Sequence: Synthetic oligonucleotide
  Sense strand starting at position 63 of SEQ ID NO: 1883533
gccagcgcccugugucaua

SEQ ID NO: 2200175 - RNA, 19 nt, Artificial Sequence
  Description of Artificial Sequence: Synthetic oligonucleotide
  Antisense strand to SEQ ID NO: 2200174
uaugacacagggcgcuggc

SEQ ID NO: 2200176 - RNA, 19 nt, Artificial Sequence
  Description of Artificial Sequence: Synthetic oligonucleotide
  Sense strand starting at position 2476 of SEQ ID NO: 1883532
gggagcaucccugggagaa

SEQ ID NO: 2200177 - RNA, 19 nt, Artificial Sequence
  Description of Artificial Sequence: Synthetic oligonucleotide
  Antisense strand to SEQ ID NO: 2200176
uucucccagggaugcuccc

SEQ ID NO: 2200178 - RNA, 19 nt, Artificial Sequence
  Description of Artificial Sequence: Synthetic oligonucleotide
  Sense strand starting at position 2477 of SEQ ID NO: 1883532
ggagcaucccugggagaac

SEQ ID NO: 2200179 - RNA, 19 nt, Artificial Sequence
  Description of Artificial Sequence: Synthetic oligonucleotide
  Antisense strand to SEQ ID NO: 2200178
guucucccagggaugcucc

SEQ ID NO: 2200180 - RNA, 19 nt, Artificial Sequence
  Description of Artificial Sequence: Synthetic oligonucleotide
  Sense strand starting at position 611 of SEQ ID NO: 1883532
gggacagacauggguucuu

SEQ ID NO: 2200181 - RNA, 19 nt, Artificial Sequence
  Description of Artificial Sequence: Synthetic oligonucleotide
  Antisense strand to SEQ ID NO: 2200180
aagaacccaugucuguccc

SEQ ID NO: 2200182 - RNA, 19 nt, Artificial Sequence
  Description of Artificial Sequence: Synthetic oligonucleotide
  Sense strand starting at position 2364 of SEQ ID NO: 1883532
ggcuuagagaugggaaagu

SEQ ID NO: 2200183 - RNA, 19 nt, Artificial Sequence
  Description of Artificial Sequence: Synthetic oligonucleotide
  Antisense strand to SEQ ID NO: 2200182
acuuucccaucucuaagcc

SEQ ID NO: 2200184 - RNA, 19 nt, Artificial Sequence
  Description of Artificial Sequence: Synthetic oligonucleotide
  Sense strand starting at position 3766 of SEQ ID NO: 1883532
cguuaacgucaagaggaaa

SEQ ID NO: 2200185 - RNA, 19 nt, Artificial Sequence
  Description of Artificial Sequence: Synthetic oligonucleotide
  Antisense strand to SEQ ID NO: 2200184
uuuccucuugacguuaacg

SEQ ID NO: 2200186 - RNA, 19 nt, Artificial Sequence
  Description of Artificial Sequence: Synthetic oligonucleotide
  Sense strand starting at position 2583 of SEQ ID NO: 1883532
uuuggcagacgugaagaua

SEQ ID NO: 2200187 - RNA, 19 nt, Artificial Sequence
  Description of Artificial Sequence: Synthetic oligonucleotide
  Antisense strand to SEQ ID NO: 2200186
uaucuucacgucugccaaa

SEQ ID NO: 2200188 - RNA, 19 nt, Artificial Sequence
  Description of Artificial Sequence: Synthetic oligonucleotide
  Sense strand starting at position 292 of SEQ ID NO: 1883532
acuggacuccugggugaca

SEQ ID NO: 2200189 - RNA, 19 nt, Artificial Sequence
  Description of Artificial Sequence: Synthetic oligonucleotide
  Antisense strand to SEQ ID NO: 2200188
ugucacccaggaguccagu

SEQ ID NO: 2200190 - RNA, 19 nt, Artificial Sequence
  Description of Artificial Sequence: Synthetic oligonucleotide
  Sense strand starting at position 3081 of SEQ ID NO: 1883532
gguggucugacuugagaaa

SEQ ID NO: 2200191 - RNA, 19 nt, Artificial Sequence
  Description of Artificial Sequence: Synthetic oligonucleotide
  Antisense strand to SEQ ID NO: 2200190
uuucucaagucagaccacc

SEQ ID NO: 2200192 - RNA, 19 nt, Artificial Sequence
  Description of Artificial Sequence: Synthetic oligonucleotide
  Sense strand starting at position 3810 of SEQ ID NO: 1883532
ggagaaguucccgagagcu

SEQ ID NO: 2200193 - RNA, 19 nt, Artificial Sequence
  Description of Artificial Sequence: Synthetic oligonucleotide
  Antisense strand to SEQ ID NO: 2200192
agcucucgggaacuucucc

SEQ ID NO: 2200194 - RNA, 19 nt, Artificial Sequence
  Description of Artificial Sequence: Synthetic oligonucleotide
  Sense strand starting at position 3253 of SEQ ID NO: 1883532
gucauagagcuccaguaga

SEQ ID NO: 2200195 - RNA, 19 nt, Artificial Sequence
  Description of Artificial Sequence: Synthetic oligonucleotide
  Antisense strand to SEQ ID NO: 2200194
ucuacuggagcucuaugac

SEQ ID NO: 2200196 - RNA, 19 nt, Artificial Sequence
  Description of Artificial Sequence: Synthetic oligonucleotide
  Sense strand starting at position 3812 of SEQ ID NO: 1883532
agaaguucccgagagcuca

SEQ ID NO: 2200197 - RNA, 19 nt, Artificial Sequence
  Description of Artificial Sequence: Synthetic oligonucleotide
  Antisense strand to SEQ ID NO: 2200196
ugagcucucgggaacuucu

SEQ ID NO: 2200198 - RNA, 19 nt, Artificial Sequence
  Description of Artificial Sequence: Synthetic oligonucleotide
  Sense strand starting at position 3092 of SEQ ID NO: 1883532
uugagaaagccuuguggag

SEQ ID NO: 2200199 - RNA, 19 nt, Artificial Sequence
  Description of Artificial Sequence: Synthetic oligonucleotide
  Antisense strand to SEQ ID NO: 2200198
cuccacaaggcuuucucaa

SEQ ID NO: 2200200 - RNA, 19 nt, Artificial Sequence
  Description of Artificial Sequence: Synthetic oligonucleotide
  Sense strand starting at position 1191 of SEQ ID NO: 1883532
uucugagguuaguuauaag

SEQ ID NO: 2200201 - RNA, 19 nt, Artificial Sequence
  Description of Artificial Sequence: Synthetic oligonucleotide
  Antisense strand to SEQ ID NO: 2200200
cuuauaacuaaccucagaa

SEQ ID NO: 2200202 - RNA, 19 nt, Artificial Sequence
  Description of Artificial Sequence: Synthetic oligonucleotide
  Sense strand starting at position 1188 of SEQ ID NO: 1883532
auguucugagguuaguuau

SEQ ID NO: 2200203 - RNA, 19 nt, Artificial Sequence
  Description of Artificial Sequence: Synthetic oligonucleotide
  Antisense strand to SEQ ID NO: 2200202
auaacuaaccucagaacau

SEQ ID NO: 2200204 - RNA, 19 nt, Artificial Sequence
  Description of Artificial Sequence: Synthetic oligonucleotide
  Sense strand starting at position 2051 of SEQ ID NO: 1883532
gcuuccugccuggauaaca

SEQ ID NO: 2200205 - RNA, 19 nt, Artificial Sequence
  Description of Artificial Sequence: Synthetic oligonucleotide
  Antisense strand to SEQ ID NO: 2200204
uguuauccaggcaggaagc

SEQ ID NO: 2200206 - RNA, 19 nt, Artificial Sequence
  Description of Artificial Sequence: Synthetic oligonucleotide
  Sense strand starting at position 804 of SEQ ID NO: 1883532
uguguuugggaucauggca

SEQ ID NO: 2200207 - RNA, 19 nt, Artificial Sequence
  Description of Artificial Sequence: Synthetic oligonucleotide
  Antisense strand to SEQ ID NO: 2200206
ugccaugaucccaaacaca

SEQ ID NO: 2200208 - RNA, 19 nt, Artificial Sequence
  Description of Artificial Sequence: Synthetic oligonucleotide
  Sense strand starting at position 2592 of SEQ ID NO: 1883532
cgugaagauaaaugcaguu

SEQ ID NO: 2200209 - RNA, 19 nt, Artificial Sequence
  Description of Artificial Sequence: Synthetic oligonucleotide
  Antisense strand to SEQ ID NO: 2200208
aacugcauuuaucuucacg

SEQ ID NO: 2200210 - RNA, 19 nt, Artificial Sequence
  Description of Artificial Sequence: Synthetic oligonucleotide
  Sense strand starting at position 3473 of SEQ ID NO: 1883532
ucaugugacccucgaguga

SEQ ID NO: 2200211 - RNA, 19 nt, Artificial Sequence
  Description of Artificial Sequence: Synthetic oligonucleotide
  Antisense strand to SEQ ID NO: 2200210
ucacucgagggucacauga

SEQ ID NO: 2200212 - RNA, 19 nt, Artificial Sequence
  Description of Artificial Sequence: Synthetic oligonucleotide
  Sense strand starting at position 2139 of SEQ ID NO: 1883532
gacacaucggguuguguga

SEQ ID NO: 2200213 - RNA, 19 nt, Artificial Sequence
  Description of Artificial Sequence: Synthetic oligonucleotide
  Antisense strand to SEQ ID NO: 2200212
ucacacaacccgauguguc

SEQ ID NO: 2200214 - RNA, 19 nt, Artificial Sequence
  Description of Artificial Sequence: Synthetic oligonucleotide
  Sense strand starting at position 2660 of SEQ ID NO: 1883532
cagggaaugcccugcaguu

SEQ ID NO: 2200215 - RNA, 19 nt, Artificial Sequence
  Description of Artificial Sequence: Synthetic oligonucleotide
  Antisense strand to SEQ ID NO: 2200214
aacugcagggcauucccug

SEQ ID NO: 2200216 - RNA, 19 nt, Artificial Sequence
  Description of Artificial Sequence: Synthetic oligonucleotide
  Sense strand starting at position 2562 of SEQ ID NO: 1883532
uugaacaucuucguguuau

SEQ ID NO: 2200217 - RNA, 19 nt, Artificial Sequence
  Description of Artificial Sequence: Synthetic oligonucleotide
  Antisense strand to SEQ ID NO: 2200216
auaacacgaagauguucaa

SEQ ID NO: 2200218 - RNA, 19 nt, Artificial Sequence
  Description of Artificial Sequence: Synthetic oligonucleotide
  Sense strand starting at position 2112 of SEQ ID NO: 1883532
cccagugcucagggaguuu

SEQ ID NO: 2200219 - RNA, 19 nt, Artificial Sequence
  Description of Artificial Sequence: Synthetic oligonucleotide
  Antisense strand to SEQ ID NO: 2200218
aaacucccugagcacuggg

SEQ ID NO: 2200220 - RNA, 19 nt, Artificial Sequence
  Description of Artificial Sequence: Synthetic oligonucleotide
  Sense strand starting at position 2561 of SEQ ID NO: 1883532
uuugaacaucuucguguua

SEQ ID NO: 2200221 - RNA, 19 nt, Artificial Sequence
  Description of Artificial Sequence: Synthetic oligonucleotide
  Antisense strand to SEQ ID NO: 2200220
uaacacgaagauguucaaa

SEQ ID NO: 2200222 - RNA, 19 nt, Artificial Sequence
  Description of Artificial Sequence: Synthetic oligonucleotide
  Sense strand starting at position 2560 of SEQ ID NO: 1883532
cuuugaacaucuucguguu

SEQ ID NO: 2200223 - RNA, 19 nt, Artificial Sequence
  Description of Artificial Sequence: Synthetic oligonucleotide
  Antisense strand to SEQ ID NO: 2200222
aacacgaagauguucaaag

SEQ ID NO: 2200224 - RNA, 19 nt, Artificial Sequence
  Description of Artificial Sequence: Synthetic oligonucleotide
  Sense strand starting at position 2478 of SEQ ID NO: 1883532
gagcaucccugggagaaca

SEQ ID NO: 2200225 - RNA, 19 nt, Artificial Sequence
  Description of Artificial Sequence: Synthetic oligonucleotide
  Antisense strand to SEQ ID NO: 2200224
uguucucccagggaugcuc

SEQ ID NO: 2200226 - RNA, 19 nt, Artificial Sequence
  Description of Artificial Sequence: Synthetic oligonucleotide
  Sense strand starting at position 2784 of SEQ ID NO: 1883532
gugguauugcuguauuguu

SEQ ID NO: 2200227 - RNA, 19 nt, Artificial Sequence
  Description of Artificial Sequence: Synthetic oligonucleotide
  Antisense strand to SEQ ID NO: 2200226
aacaauacagcaauaccac

SEQ ID NO: 2200228 - RNA, 19 nt, Artificial Sequence
  Description of Artificial Sequence: Synthetic oligonucleotide
  Sense strand starting at position 2049 of SEQ ID NO: 1883532
ccgcuuccugccuggauaa

SEQ ID NO: 2200229 - RNA, 19 nt, Artificial Sequence
  Description of Artificial Sequence: Synthetic oligonucleotide
  Antisense strand to SEQ ID NO: 2200228
uuauccaggcaggaagcgg

SEQ ID NO: 2200230 - RNA, 19 nt, Artificial Sequence
  Description of Artificial Sequence: Synthetic oligonucleotide
  Sense strand starting at position 1183 of SEQ ID NO: 1883532
ugggaauguucugagguua

SEQ ID NO: 2200231 - RNA, 19 nt, Artificial Sequence
  Description of Artificial Sequence: Synthetic oligonucleotide
  Antisense strand to SEQ ID NO: 2200230
uaaccucagaacauuccca

SEQ ID NO: 2200232 - RNA, 19 nt, Artificial Sequence
  Description of Artificial Sequence: Synthetic oligonucleotide
  Sense strand starting at position 3451 of SEQ ID NO: 1883532
ccagcagauucuugaagga

SEQ ID NO: 2200233 - RNA, 19 nt, Artificial Sequence
  Description of Artificial Sequence: Synthetic oligonucleotide
  Antisense strand to SEQ ID NO: 2200232
uccuucaagaaucugcugg

SEQ ID NO: 2200234 - RNA, 19 nt, Artificial Sequence
  Description of Artificial Sequence: Synthetic oligonucleotide
  Sense strand starting at position 1989 of SEQ ID NO: 1883532
cggcuuugcaucugagugu

SEQ ID NO: 2200235 - RNA, 19 nt, Artificial Sequence
  Description of Artificial Sequence: Synthetic oligonucleotide
  Antisense strand to SEQ ID NO: 2200234
acacucagaugcaaagccg

SEQ ID NO: 2200236 - RNA, 19 nt, Artificial Sequence
  Description of Artificial Sequence: Synthetic oligonucleotide
  Sense strand starting at position 2760 of SEQ ID NO: 1883532
uuuagccauucugaugauu

SEQ ID NO: 2200237 - RNA, 19 nt, Artificial Sequence
  Description of Artificial Sequence: Synthetic oligonucleotide
  Antisense strand to SEQ ID NO: 2200236
aaucaucagaauggcuaaa

SEQ ID NO: 2200238 - RNA, 19 nt, Artificial Sequence
  Description of Artificial Sequence: Synthetic oligonucleotide
  Sense strand starting at position 2552 of SEQ ID NO: 1883532
gggcuuagcuuugaacauc

SEQ ID NO: 2200239 - RNA, 19 nt, Artificial Sequence
  Description of Artificial Sequence: Synthetic oligonucleotide
  Antisense strand to SEQ ID NO: 2200238
gauguucaaagcuaagccc

SEQ ID NO: 2200240 - RNA, 19 nt, Artificial Sequence
  Description of Artificial Sequence: Synthetic oligonucleotide
  Sense strand starting at position 1182 of SEQ ID NO: 1883532
cugggaauguucugagguu

SEQ ID NO: 2200241 - RNA, 19 nt, Artificial Sequence
  Description of Artificial Sequence: Synthetic oligonucleotide
  Antisense strand to SEQ ID NO: 2200240
aaccucagaacauucccag

SEQ ID NO: 2200242 - RNA, 19 nt, Artificial Sequence
  Description of Artificial Sequence: Synthetic oligonucleotide
  Sense strand starting at position 2566 of SEQ ID NO: 1883532
acaucuucguguuaucuuu

SEQ ID NO: 2200243 - RNA, 19 nt, Artificial Sequence
  Description of Artificial Sequence: Synthetic oligonucleotide
  Antisense strand to SEQ ID NO: 2200242
aaagauaacacgaagaugu

SEQ ID NO: 2200244 - RNA, 19 nt, Artificial Sequence
  Description of Artificial Sequence: Synthetic oligonucleotide
  Sense strand starting at position 2563 of SEQ ID NO: 1883532
ugaacaucuucguguuauc

SEQ ID NO: 2200245 - RNA, 19 nt, Artificial Sequence
  Description of Artificial Sequence: Synthetic oligonucleotide
  Antisense strand to SEQ ID NO: 2200244
gauaacacgaagauguuca

SEQ ID NO: 2200246 - RNA, 19 nt, Artificial Sequence
  Description of Artificial Sequence: Synthetic oligonucleotide
  Sense strand starting at position 3669 of SEQ ID NO: 1883534
ucuugaccuugcuugauuu

SEQ ID NO: 2200247 - RNA, 19 nt, Artificial Sequence
  Description of Artificial Sequence: Synthetic oligonucleotide
  Antisense strand to SEQ ID NO: 2200246
aaaucaagcaaggucaaga

SEQ ID NO: 2200248 - RNA, 19 nt, Artificial Sequence
  Description of Artificial Sequence: Synthetic oligonucleotide
  Sense strand starting at position 134 of SEQ ID NO: 1883534
gagcuaaguccagaaucug

SEQ ID NO: 2200249 - RNA, 19 nt, Artificial Sequence
  Description of Artificial Sequence: Synthetic oligonucleotide
  Antisense strand to SEQ ID NO: 2200248
cagauucuggacuuagcuc

SEQ ID NO: 2200250 - RNA, 19 nt, Artificial Sequence
  Description of Artificial Sequence: Synthetic oligonucleotide
  Sense strand starting at position 245 of SEQ ID NO: 1883534
gagacauugcagcagauug

SEQ ID NO: 2200251 - RNA, 19 nt, Artificial Sequence
  Description of Artificial Sequence: Synthetic oligonucleotide
  Antisense strand to SEQ ID NO: 2200250
caaucugcugcaaugucuc

SEQ ID NO: 2200252 - RNA, 19 nt, Artificial Sequence
  Description of Artificial Sequence: Synthetic oligonucleotide
  Sense strand starting at position 208 of SEQ ID NO: 1883534
gagaauguucugggugaaa

SEQ ID NO: 2200253 - RNA, 19 nt, Artificial Sequence
  Description of Artificial Sequence: Synthetic oligonucleotide
  Antisense strand to SEQ ID NO: 2200252
uuucacccagaacauucuc

SEQ ID NO: 2200254 - RNA, 19 nt, Artificial Sequence
  Description of Artificial Sequence: Synthetic oligonucleotide
  Sense strand starting at position 210 of SEQ ID NO: 1883534
gaauguucugggugaaaga

SEQ ID NO: 2200255 - RNA, 19 nt, Artificial Sequence
  Description of Artificial Sequence: Synthetic oligonucleotide
  Antisense strand to SEQ ID NO: 2200254
ucuuucacccagaacauuc

SEQ ID NO: 2200256 - RNA, 19 nt, Artificial Sequence
  Description of Artificial Sequence: Synthetic oligonucleotide
  Sense strand starting at position 2399 of SEQ ID NO: 1883534
acaucuagaaagugaucga

SEQ ID NO: 2200257 - RNA, 19 nt, Artificial Sequence
  Description of Artificial Sequence: Synthetic oligonucleotide
  Antisense strand to SEQ ID NO: 2200256
ucgaucacuuucuagaugu

SEQ ID NO: 2200258 - RNA, 19 nt, Artificial Sequence
  Description of Artificial Sequence: Synthetic oligonucleotide
  Sense strand starting at position 247 of SEQ ID NO: 1883534
gacauugcagcagauugau

SEQ ID NO: 2200259 - RNA, 19 nt, Artificial Sequence
  Description of Artificial Sequence: Synthetic oligonucleotide
  Antisense strand to SEQ ID NO: 2200258
aucaaucugcugcaauguc

SEQ ID NO: 2200260 - RNA, 19 nt, Artificial Sequence
  Description of Artificial Sequence: Synthetic oligonucleotide
  Sense strand starting at position 3821 of SEQ ID NO: 1883534
aggaaacugcgucaugaac

SEQ ID NO: 2200261 - RNA, 19 nt, Artificial Sequence
  Description of Artificial Sequence: Synthetic oligonucleotide
  Antisense strand to SEQ ID NO: 2200260
guucaugacgcaguuuccu

SEQ ID NO: 2200262 - RNA, 19 nt, Artificial Sequence
  Description of Artificial Sequence: Synthetic oligonucleotide
  Sense strand starting at position 2402 of SEQ ID NO: 1883534
ucuagaaagugaucgauua

SEQ ID NO: 2200263 - RNA, 19 nt, Artificial Sequence
  Description of Artificial Sequence: Synthetic oligonucleotide
  Antisense strand to SEQ ID NO: 2200262
uaaucgaucacuuucuaga

SEQ ID NO: 2200264 - RNA, 19 nt, Artificial Sequence
  Description of Artificial Sequence: Synthetic oligonucleotide
  Sense strand starting at position 3717 of SEQ ID NO: 1883534
ggcaaaugccuauaguaaa

SEQ ID NO: 2200265 - RNA, 19 nt, Artificial Sequence
  Description of Artificial Sequence: Synthetic oligonucleotide
  Antisense strand to SEQ ID NO: 2200264
uuuacuauaggcauuugcc

SEQ ID NO: 2200266 - RNA, 19 nt, Artificial Sequence
  Description of Artificial Sequence: Synthetic oligonucleotide
  Sense strand starting at position 45 of SEQ ID NO: 1883534
uagguacuugaauguaaac

SEQ ID NO: 2200267 - RNA, 19 nt, Artificial Sequence
  Description of Artificial Sequence: Synthetic oligonucleotide
  Antisense strand to SEQ ID NO: 2200266
guuuacauucaaguaccua

SEQ ID NO: 2200268 - RNA, 19 nt, Artificial Sequence
  Description of Artificial Sequence: Synthetic oligonucleotide
  Sense strand starting at position 2403 of SEQ ID NO: 1883534
cuagaaagugaucgauuau

SEQ ID NO: 2200269 - RNA, 19 nt, Artificial Sequence
  Description of Artificial Sequence: Synthetic oligonucleotide
  Antisense strand to SEQ ID NO: 2200268
auaaucgaucacuuucuag

SEQ ID NO: 2200270 - RNA, 19 nt, Artificial Sequence
  Description of Artificial Sequence: Synthetic oligonucleotide
  Sense strand starting at position 3696 of SEQ ID NO: 1883534
aggauaucuugggcuacuu

SEQ ID NO: 2200271 - RNA, 19 nt, Artificial Sequence
  Description of Artificial Sequence: Synthetic oligonucleotide
  Antisense strand to SEQ ID NO: 2200270
aaguagcccaagauauccu

SEQ ID NO: 2200272 - RNA, 19 nt, Artificial Sequence
  Description of Artificial Sequence: Synthetic oligonucleotide
  Sense strand starting at position 2025 of SEQ ID NO: 1883534
caucaucugccgugauuuc

SEQ ID NO: 2200273 - RNA, 19 nt, Artificial Sequence
  Description of Artificial Sequence: Synthetic oligonucleotide
  Antisense strand to SEQ ID NO: 2200272
gaaaucacggcagaugaug

SEQ ID NO: 2200274 - RNA, 19 nt, Artificial Sequence
  Description of Artificial Sequence: Synthetic oligonucleotide
  Sense strand starting at position 2412 of SEQ ID NO: 1883534
gaucgauuauagucucaac

SEQ ID NO: 2200275 - RNA, 19 nt, Artificial Sequence
  Description of Artificial Sequence: Synthetic oligonucleotide
  Antisense strand to SEQ ID NO: 2200274
guugagacuauaaucgauc

SEQ ID NO: 2200276 - RNA, 19 nt, Artificial Sequence
  Description of Artificial Sequence: Synthetic oligonucleotide
  Sense strand starting at position 3715 of SEQ ID NO: 1883534
uuggcaaaugccuauagua

SEQ ID NO: 2200277 - RNA, 19 nt, Artificial Sequence
  Description of Artificial Sequence: Synthetic oligonucleotide
  Antisense strand to SEQ ID NO: 2200276
uacuauaggcauuugccaa

SEQ ID NO: 2200278 - RNA, 19 nt, Artificial Sequence
  Description of Artificial Sequence: Synthetic oligonucleotide
  Sense strand starting at position 2057 of SEQ ID NO: 1883534
gcucgauugguucugcgca

SEQ ID NO: 2200279 - RNA, 19 nt, Artificial Sequence
  Description of Artificial Sequence: Synthetic oligonucleotide
  Antisense strand to SEQ ID NO: 2200278
ugcgcagaaccaaucgagc

SEQ ID NO: 2200280 - RNA, 19 nt, Artificial Sequence
  Description of Artificial Sequence: Synthetic oligonucleotide
  Sense strand starting at position 3949 of SEQ ID NO: 1883534
augaaucgcugcucaagga

SEQ ID NO: 2200281 - RNA, 19 nt, Artificial Sequence
  Description of Artificial Sequence: Synthetic oligonucleotide
  Antisense strand to SEQ ID NO: 2200280
uccuugagcagcgauucau

SEQ ID NO: 2200282 - RNA, 19 nt, Artificial Sequence
  Description of Artificial Sequence: Synthetic oligonucleotide
  Sense strand starting at position 3819 of SEQ ID NO: 1883534
cgaggaaacugcgucauga

SEQ ID NO: 2200283 - RNA, 19 nt, Artificial Sequence
  Description of Artificial Sequence: Synthetic oligonucleotide
  Antisense strand to SEQ ID NO: 2200282
ucaugacgcaguuuccucg

SEQ ID NO: 2200284 - RNA, 19 nt, Artificial Sequence
  Description of Artificial Sequence: Synthetic oligonucleotide
  Sense strand starting at position 2586 of SEQ ID NO: 1883534
cuauuaaccuguguucuca

SEQ ID NO: 2200285 - RNA, 19 nt, Artificial Sequence
  Description of Artificial Sequence: Synthetic oligonucleotide
  Antisense strand to SEQ ID NO: 2200284
ugagaacacagguuaauag

SEQ ID NO: 2200286 - RNA, 19 nt, Artificial Sequence
  Description of Artificial Sequence: Synthetic oligonucleotide
  Sense strand starting at position 5 of SEQ ID NO: 1883534
acagcauucucgccagaau

SEQ ID NO: 2200287 - RNA, 19 nt, Artificial Sequence
  Description of Artificial Sequence: Synthetic oligonucleotide
  Antisense strand to SEQ ID NO: 2200286
auucuggcgagaaugcugu

SEQ ID NO: 2200288 - RNA, 19 nt, Artificial Sequence
  Description of Artificial Sequence: Synthetic oligonucleotide
  Sense strand starting at position 2062 of SEQ ID NO: 1883534
auugguucugcgcagaauc

SEQ ID NO: 2200289 - RNA, 19 nt, Artificial Sequence
  Description of Artificial Sequence: Synthetic oligonucleotide
  Antisense strand to SEQ ID NO: 2200288
gauucugcgcagaaccaau

SEQ ID NO: 2200290 - RNA, 19 nt, Artificial Sequence
  Description of Artificial Sequence: Synthetic oligonucleotide
  Sense strand starting at position 2585 of SEQ ID NO: 1883534
ccuauuaaccuguguucuc

SEQ ID NO: 2200291 - RNA, 19 nt, Artificial Sequence
  Description of Artificial Sequence: Synthetic oligonucleotide
  Antisense strand to SEQ ID NO: 2200290
gagaacacagguuaauagg

SEQ ID NO: 2200292 - RNA, 19 nt, Artificial Sequence
  Description of Artificial Sequence: Synthetic oligonucleotide
  Sense strand starting at position 2590 of SEQ ID NO: 1883534
uaaccuguguucucagguu

SEQ ID NO: 2200293 - RNA, 19 nt, Artificial Sequence
  Description of Artificial Sequence: Synthetic oligonucleotide
  Antisense strand to SEQ ID NO: 2200292
aaccugagaacacagguua

SEQ ID NO: 2200294 - RNA, 19 nt, Artificial Sequence
  Description of Artificial Sequence: Synthetic oligonucleotide
  Sense strand starting at position 2456 of SEQ ID NO: 1883534
aagcaaugcgguugauuac

SEQ ID NO: 2200295 - RNA, 19 nt, Artificial Sequence
  Description of Artificial Sequence: Synthetic oligonucleotide
  Antisense strand to SEQ ID NO: 2200294
guaaucaaccgcauugcuu

SEQ ID NO: 2200296 - RNA, 19 nt, Artificial Sequence
  Description of Artificial Sequence: Synthetic oligonucleotide
  Sense strand starting at position 3934 of SEQ ID NO: 1883534
ggagcugccucguucauga

SEQ ID NO: 2200297 - RNA, 19 nt, Artificial Sequence
  Description of Artificial Sequence: Synthetic oligonucleotide
  Antisense strand to SEQ ID NO: 2200296
ucaugaacgaggcagcucc

SEQ ID NO: 2200298 - RNA, 19 nt, Artificial Sequence
  Description of Artificial Sequence: Synthetic oligonucleotide
  Sense strand starting at position 2166 of SEQ ID NO: 1883534
ccucguggcugcuuuaaau

SEQ ID NO: 2200299 - RNA, 19 nt, Artificial Sequence
  Description of Artificial Sequence: Synthetic oligonucleotide
  Antisense strand to SEQ ID NO: 2200298
auuuaaagcagccacgagg

SEQ ID NO: 2200300 - RNA, 19 nt, Artificial Sequence
  Description of Artificial Sequence: Synthetic oligonucleotide
  Sense strand starting at position 2059 of SEQ ID NO: 1883534
ucgauugguucugcgcaga

SEQ ID NO: 2200301 - RNA, 19 nt, Artificial Sequence
  Description of Artificial Sequence: Synthetic oligonucleotide
  Antisense strand to SEQ ID NO: 2200300
ucugcgcagaaccaaucga

SEQ ID NO: 2200302 - RNA, 19 nt, Artificial Sequence
  Description of Artificial Sequence: Synthetic oligonucleotide
  Sense strand starting at position 121 of SEQ ID NO: 1883534
acaagaaaguuaugagcua

SEQ ID NO: 2200303 - RNA, 19 nt, Artificial Sequence
  Description of Artificial Sequence: Synthetic oligonucleotide
  Antisense strand to SEQ ID NO: 2200302
uagcucauaacuuucuugu

SEQ ID NO: 2200304 - RNA, 19 nt, Artificial Sequence
  Description of Artificial Sequence: Synthetic oligonucleotide
  Sense strand starting at position 207 of SEQ ID NO: 1883534
agagaauguucugggugaa

SEQ ID NO: 2200305 - RNA, 19 nt, Artificial Sequence
  Description of Artificial Sequence: Synthetic oligonucleotide
  Antisense strand to SEQ ID NO: 2200304
uucacccagaacauucucu

SEQ ID NO: 2200306 - RNA, 19 nt, Artificial Sequence
  Description of Artificial Sequence: Synthetic oligonucleotide
  Sense strand starting at position 3695 of SEQ ID NO: 1883534
aaggauaucuugggcuacu

SEQ ID NO: 2200307 - RNA, 19 nt, Artificial Sequence
  Description of Artificial Sequence: Synthetic oligonucleotide
  Antisense strand to SEQ ID NO: 2200306
aguagcccaagauauccuu

SEQ ID NO: 2200308 - RNA, 19 nt, Artificial Sequence
  Description of Artificial Sequence: Synthetic oligonucleotide
  Sense strand starting at position 2415 of SEQ ID NO: 1883534
cgauuauagucucaacagu

SEQ ID NO: 2200309 - RNA, 19 nt, Artificial Sequence
  Description of Artificial Sequence: Synthetic oligonucleotide
  Antisense strand to SEQ ID NO: 2200308
acuguugagacuauaaucg

SEQ ID NO: 2200310 - RNA, 19 nt, Artificial Sequence
  Description of Artificial Sequence: Synthetic oligonucleotide
  Sense strand starting at position 3823 of SEQ ID NO: 1883534
gaaacugcgucaugaacca

SEQ ID NO: 2200311 - RNA, 19 nt, Artificial Sequence
  Description of Artificial Sequence: Synthetic oligonucleotide
  Antisense strand to SEQ ID NO: 2200310
ugguucaugacgcaguuuc

SEQ ID NO: 2200312 - RNA, 19 nt, Artificial Sequence
  Description of Artificial Sequence: Synthetic oligonucleotide
  Sense strand starting at position 2655 of SEQ ID NO: 1883534
ggcaguagcuccuaaaucu

SEQ ID NO: 2200313 - RNA, 19 nt, Artificial Sequence
  Description of Artificial Sequence: Synthetic oligonucleotide
  Antisense strand to SEQ ID NO: 2200312
agauuuaggagcuacugcc

SEQ ID NO: 2200314 - RNA, 19 nt, Artificial Sequence
  Description of Artificial Sequence: Synthetic oligonucleotide
  Sense strand starting at position 3127 of SEQ ID NO: 1883535
ugucuuaaagcugcguaca

SEQ ID NO: 2200315 - RNA, 19 nt, Artificial Sequence
  Description of Artificial Sequence: Synthetic oligonucleotide
  Antisense strand to SEQ ID NO: 2200314
uguacgcagcuuuaagaca

SEQ ID NO: 2200316 - RNA, 19 nt, Artificial Sequence
  Description of Artificial Sequence: Synthetic oligonucleotide
  Sense strand starting at position 209 of SEQ ID NO: 1883535
agcccugaucauuguauuu

SEQ ID NO: 2200317 - RNA, 19 nt, Artificial Sequence
  Description of Artificial Sequence: Synthetic oligonucleotide
  Antisense strand to SEQ ID NO: 2200316
aaauacaaugaucagggcu

SEQ ID NO: 2200318 - RNA, 19 nt, Artificial Sequence
  Description of Artificial Sequence: Synthetic oligonucleotide
  Sense strand starting at position 3004 of SEQ ID NO: 1883535
cggugacagcagugauuua

SEQ ID NO: 2200319 - RNA, 19 nt, Artificial Sequence
  Description of Artificial Sequence: Synthetic oligonucleotide
  Antisense strand to SEQ ID NO: 2200318
uaaaucacugcugucaccg

SEQ ID NO: 2200320 - RNA, 19 nt, Artificial Sequence
  Description of Artificial Sequence: Synthetic oligonucleotide
  Sense strand starting at position 1544 of SEQ ID NO: 1883535
gugauguccgugcucggaa

SEQ ID NO: 2200321 - RNA, 19 nt, Artificial Sequence
  Description of Artificial Sequence: Synthetic oligonucleotide
  Antisense strand to SEQ ID NO: 2200320
uuccgagcacggacaucac

SEQ ID NO: 2200322 - RNA, 19 nt, Artificial Sequence
  Description of Artificial Sequence: Synthetic oligonucleotide
  Sense strand starting at position 1075 of SEQ ID NO: 1883535
cccagaaagcuugauguua

SEQ ID NO: 2200323 - RNA, 19 nt, Artificial Sequence
  Description of Artificial Sequence: Synthetic oligonucleotide
  Antisense strand to SEQ ID NO: 2200322
uaacaucaagcuuucuggg

SEQ ID NO: 2200324 - RNA, 19 nt, Artificial Sequence
  Description of Artificial Sequence: Synthetic oligonucleotide
  Sense strand starting at position 1929 of SEQ ID NO: 1883535
gcuuuauccggcgcaccaa

SEQ ID NO: 2200325 - RNA, 19 nt, Artificial Sequence
  Description of Artificial Sequence: Synthetic oligonucleotide
  Antisense strand to SEQ ID NO: 2200324
uuggugcgccggauaaagc

SEQ ID NO: 2200326 - RNA, 19 nt, Artificial Sequence
  Description of Artificial Sequence: Synthetic oligonucleotide
  Sense strand starting at position 765 of SEQ ID NO: 1883535
acagcaguuguauaaauua

SEQ ID NO: 2200327 - RNA, 19 nt, Artificial Sequence
  Description of Artificial Sequence: Synthetic oligonucleotide
  Antisense strand to SEQ ID NO: 2200326
uaauuuauacaacugcugu

SEQ ID NO: 2200328 - RNA, 19 nt, Artificial Sequence
  Description of Artificial Sequence: Synthetic oligonucleotide
  Sense strand starting at position 1149 of SEQ ID NO: 1883535
guaacuauccacugaugac

SEQ ID NO: 2200329 - RNA, 19 nt, Artificial Sequence
  Description of Artificial Sequence: Synthetic oligonucleotide
  Antisense strand to SEQ ID NO: 2200328
gucaucaguggauaguuac

SEQ ID NO: 2200330 - RNA, 19 nt, Artificial Sequence
  Description of Artificial Sequence: Synthetic oligonucleotide
  Sense strand starting at position 1327 of SEQ ID NO: 1883535
accucugugccugaauaaa

SEQ ID NO: 2200331 - RNA, 19 nt, Artificial Sequence
  Description of Artificial Sequence: Synthetic oligonucleotide
  Antisense strand to SEQ ID NO: 2200330
uuuauucaggcacagaggu

SEQ ID NO: 2200332 - RNA, 19 nt, Artificial Sequence
  Description of Artificial Sequence: Synthetic oligonucleotide
  Sense strand starting at position 1543 of SEQ ID NO: 1883535
ugugauguccgugcucgga

SEQ ID NO: 2200333 - RNA, 19 nt, Artificial Sequence
  Description of Artificial Sequence: Synthetic oligonucleotide
  Antisense strand to SEQ ID NO: 2200332
uccgagcacggacaucaca

SEQ ID NO: 2200334 - RNA, 19 nt, Artificial Sequence
  Description of Artificial Sequence: Synthetic oligonucleotide
  Sense strand starting at position 3432 of SEQ ID NO: 1883535
acccauaguggugggauua

SEQ ID NO: 2200335 - RNA, 19 nt, Artificial Sequence
  Description of Artificial Sequence: Synthetic oligonucleotide
  Antisense strand to SEQ ID NO: 2200334
uaaucccaccacuaugggu

SEQ ID NO: 2200336 - RNA, 19 nt, Artificial Sequence
  Description of Artificial Sequence: Synthetic oligonucleotide
  Sense strand starting at position 3619 of SEQ ID NO: 1883535
gugaaagucauacgacuaa

SEQ ID NO: 2200337 - RNA, 19 nt, Artificial Sequence
  Description of Artificial Sequence: Synthetic oligonucleotide
  Antisense strand to SEQ ID NO: 2200336
uuagucguaugacuuucac

SEQ ID NO: 2200338 - RNA, 19 nt, Artificial Sequence
  Description of Artificial Sequence: Synthetic oligonucleotide
  Sense strand starting at position 199 of SEQ ID NO: 1883535
acuggauucuagcccugau

SEQ ID NO: 2200339 - RNA, 19 nt, Artificial Sequence
  Description of Artificial Sequence: Synthetic oligonucleotide
  Antisense strand to SEQ ID NO: 2200338
aucagggcuagaauccagu

SEQ ID NO: 2200340 - RNA, 19 nt, Artificial Sequence
  Description of Artificial Sequence: Synthetic oligonucleotide
  Sense strand starting at position 202 of SEQ ID NO: 1883535
ggauucuagcccugaucau

SEQ ID NO: 2200341 - RNA, 19 nt, Artificial Sequence
  Description of Artificial Sequence: Synthetic oligonucleotide
  Antisense strand to SEQ ID NO: 2200340
augaucagggcuagaaucc

SEQ ID NO: 2200342 - RNA, 19 nt, Artificial Sequence
  Description of Artificial Sequence: Synthetic oligonucleotide
  Sense strand starting at position 52 of SEQ ID NO: 1883535
acuguuguacuuuaggcaa

SEQ ID NO: 2200343 - RNA, 19 nt, Artificial Sequence
  Description of Artificial Sequence: Synthetic oligonucleotide
  Antisense strand to SEQ ID NO: 2200342
uugccuaaaguacaacagu

SEQ ID NO: 2200344 - RNA, 19 nt, Artificial Sequence
  Description of Artificial Sequence: Synthetic oligonucleotide
  Sense strand starting at position 1089 of SEQ ID NO: 1883535
uguuaagugccagaaagca

SEQ ID NO: 2200345 - RNA, 19 nt, Artificial Sequence
  Description of Artificial Sequence: Synthetic oligonucleotide
  Antisense strand to SEQ ID NO: 2200344
ugcuuucuggcacuuaaca

SEQ ID NO: 2200346 - RNA, 19 nt, Artificial Sequence
  Description of Artificial Sequence: Synthetic oligonucleotide
  Sense strand starting at position 1326 of SEQ ID NO: 1883535
gaccucugugccugaauaa

SEQ ID NO: 2200347 - RNA, 19 nt, Artificial Sequence
  Description of Artificial Sequence: Synthetic oligonucleotide
  Antisense strand to SEQ ID NO: 2200346
uuauucaggcacagagguc

SEQ ID NO: 2200348 - RNA, 19 nt, Artificial Sequence
  Description of Artificial Sequence: Synthetic oligonucleotide
  Sense strand starting at position 2993 of SEQ ID NO: 1883535
uacugaaggcucggugaca

SEQ ID NO: 2200349 - RNA, 19 nt, Artificial Sequence
  Description of Artificial Sequence: Synthetic oligonucleotide
  Antisense strand to SEQ ID NO: 2200348
ugucaccgagccuucagua

SEQ ID NO: 2200350 - RNA, 19 nt, Artificial Sequence
  Description of Artificial Sequence: Synthetic oligonucleotide
  Sense strand starting at position 3130 of SEQ ID NO: 1883535
cuuaaagcugcguacaaau

SEQ ID NO: 2200351 - RNA, 19 nt, Artificial Sequence
  Description of Artificial Sequence: Synthetic oligonucleotide
  Antisense strand to SEQ ID NO: 2200350
auuuguacgcagcuuuaag

SEQ ID NO: 2200352 - RNA, 19 nt, Artificial Sequence
  Description of Artificial Sequence: Synthetic oligonucleotide
  Sense strand starting at position 55 of SEQ ID NO: 1883535
guuguacuuuaggcaaaua

SEQ ID NO: 2200353 - RNA, 19 nt, Artificial Sequence
  Description of Artificial Sequence: Synthetic oligonucleotide
  Antisense strand to SEQ ID NO: 2200352
uauuugccuaaaguacaac

SEQ ID NO: 2200354 - RNA, 19 nt, Artificial Sequence
  Description of Artificial Sequence: Synthetic oligonucleotide
  Sense strand starting at position 188 of SEQ ID NO: 1883535
gcauaccuguuacuggauu

SEQ ID NO: 2200355 - RNA, 19 nt, Artificial Sequence
  Description of Artificial Sequence: Synthetic oligonucleotide
  Antisense strand to SEQ ID NO: 2200354
aauccaguaacagguaugc

SEQ ID NO: 2200356 - RNA, 19 nt, Artificial Sequence
  Description of Artificial Sequence: Synthetic oligonucleotide
  Sense strand starting at position 1084 of SEQ ID NO: 1883535
cuugauguuaagugccaga

SEQ ID NO: 2200357 - RNA, 19 nt, Artificial Sequence
  Description of Artificial Sequence: Synthetic oligonucleotide
  Antisense strand to SEQ ID NO: 2200356
ucuggcacuuaacaucaag

SEQ ID NO: 2200358 - RNA, 19 nt, Artificial Sequence
  Description of Artificial Sequence: Synthetic oligonucleotide
  Sense strand starting at position 3655 of SEQ ID NO: 1883535
uuaggaauaugggaacuua

SEQ ID NO: 2200359 - RNA, 19 nt, Artificial Sequence
  Description of Artificial Sequence: Synthetic oligonucleotide
  Antisense strand to SEQ ID NO: 2200358
uaaguucccauauuccuaa

SEQ ID NO: 2200360 - RNA, 19 nt, Artificial Sequence
  Description of Artificial Sequence: Synthetic oligonucleotide
  Sense strand starting at position 1176 of SEQ ID NO: 1883535
guggucaaucgcgaaccaa

SEQ ID NO: 2200361 - RNA, 19 nt, Artificial Sequence
  Description of Artificial Sequence: Synthetic oligonucleotide
  Antisense strand to SEQ ID NO: 2200360
uugguucgcgauugaccac

SEQ ID NO: 2200362 - RNA, 19 nt, Artificial Sequence
  Description of Artificial Sequence: Synthetic oligonucleotide
  Sense strand starting at position 761 of SEQ ID NO: 1883535
ggugacagcaguuguauaa

SEQ ID NO: 2200363 - RNA, 19 nt, Artificial Sequence
  Description of Artificial Sequence: Synthetic oligonucleotide
  Antisense strand to SEQ ID NO: 2200362
uuauacaacugcugucacc

SEQ ID NO: 2200364 - RNA, 19 nt, Artificial Sequence
  Description of Artificial Sequence: Synthetic oligonucleotide
  Sense strand starting at position 695 of SEQ ID NO: 1883535
uccuauguguuacuucuga

SEQ ID NO: 2200365 - RNA, 19 nt, Artificial Sequence
  Description of Artificial Sequence: Synthetic oligonucleotide
  Antisense strand to SEQ ID NO: 2200364
ucagaaguaacacauagga

SEQ ID NO: 2200366 - RNA, 19 nt, Artificial Sequence
  Description of Artificial Sequence: Synthetic oligonucleotide
  Sense strand starting at position 3907 of SEQ ID NO: 1883535
cagccagauuugugaaaga

SEQ ID NO: 2200367 - RNA, 19 nt, Artificial Sequence
  Description of Artificial Sequence: Synthetic oligonucleotide
  Antisense strand to SEQ ID NO: 2200366
ucuuucacaaaucuggcug

SEQ ID NO: 2200368 - RNA, 19 nt, Artificial Sequence
  Description of Artificial Sequence: Synthetic oligonucleotide
  Sense strand starting at position 42 of SEQ ID NO: 1883535
gccaaucaccacuguugua

SEQ ID NO: 2200369 - RNA, 19 nt, Artificial Sequence
  Description of Artificial Sequence: Synthetic oligonucleotide
  Antisense strand to SEQ ID NO: 2200368
uacaacaguggugauuggc

SEQ ID NO: 2200370 - RNA, 19 nt, Artificial Sequence
  Description of Artificial Sequence: Synthetic oligonucleotide
  Sense strand starting at position 1325 of SEQ ID NO: 1883535
cgaccucugugccugaaua

SEQ ID NO: 2200371 - RNA, 19 nt, Artificial Sequence
  Description of Artificial Sequence: Synthetic oligonucleotide
  Antisense strand to SEQ ID NO: 2200370
uauucaggcacagaggucg

SEQ ID NO: 2200372 - RNA, 19 nt, Artificial Sequence
  Description of Artificial Sequence: Synthetic oligonucleotide
  Sense strand starting at position 1166 of SEQ ID NO: 1883535
acaccaagccguggucaau

SEQ ID NO: 2200373 - RNA, 19 nt, Artificial Sequence
  Description of Artificial Sequence: Synthetic oligonucleotide
  Antisense strand to SEQ ID NO: 2200372
auugaccacggcuuggugu

SEQ ID NO: 2200374 - RNA, 19 nt, Artificial Sequence
  Description of Artificial Sequence: Synthetic oligonucleotide
  Sense strand starting at position 3129 of SEQ ID NO: 1883535
ucuuaaagcugcguacaaa

SEQ ID NO: 2200375 - RNA, 19 nt, Artificial Sequence
  Description of Artificial Sequence: Synthetic oligonucleotide
  Antisense strand to SEQ ID NO: 2200374
uuuguacgcagcuuuaaga

SEQ ID NO: 2200376 - RNA, 19 nt, Artificial Sequence
  Description of Artificial Sequence: Synthetic oligonucleotide
  Sense strand starting at position 688 of SEQ ID NO: 1883535
guuauaguccuauguguua

SEQ ID NO: 2200377 - RNA, 19 nt, Artificial Sequence
  Description of Artificial Sequence: Synthetic oligonucleotide
  Antisense strand to SEQ ID NO: 2200376
uaacacauaggacuauaac

SEQ ID NO: 2200378 - RNA, 19 nt, Artificial Sequence
  Description of Artificial Sequence: Synthetic oligonucleotide
  Sense strand starting at position 245 of SEQ ID NO: 1883535
uggacuaaauccugaacaa

SEQ ID NO: 2200379 - RNA, 19 nt, Artificial Sequence
  Description of Artificial Sequence: Synthetic oligonucleotide
  Antisense strand to SEQ ID NO: 2200378
uuguucaggauuuagucca

SEQ ID NO: 2200380 - RNA, 19 nt, Artificial Sequence
  Description of Artificial Sequence: Synthetic oligonucleotide
  Sense strand starting at position 3128 of SEQ ID NO: 1883535
gucuuaaagcugcguacaa

SEQ ID NO: 2200381 - RNA, 19 nt, Artificial Sequence
  Description of Artificial Sequence: Synthetic oligonucleotide
  Antisense strand to SEQ ID NO: 2200380
uuguacgcagcuuuaagac

SEQ ID NO: 2200382 - RNA, 19 nt, Artificial Sequence
  Description of Artificial Sequence: Synthetic oligonucleotide
  Sense strand starting at position 110 of SEQ ID NO: 1883535
guaaauuggucuuaccaag

SEQ ID NO: 2200383 - RNA, 19 nt, Artificial Sequence
  Description of Artificial Sequence: Synthetic oligonucleotide
  Antisense strand to SEQ ID NO: 2200382
cuugguaagaccaauuuac

SEQ ID NO: 2200384 - RNA, 19 nt, Artificial Sequence
  Description of Artificial Sequence: Synthetic oligonucleotide
  Sense strand starting at position 3647 of SEQ ID NO: 1883535
uaugcauguuaggaauaug

SEQ ID NO: 2200385 - RNA, 19 nt, Artificial Sequence
  Description of Artificial Sequence: Synthetic oligonucleotide
  Antisense strand to SEQ ID NO: 2200384
cauauuccuaacaugcaua

SEQ ID NO: 2200386 - RNA, 19 nt, Artificial Sequence
  Description of Artificial Sequence: Synthetic oligonucleotide
  Sense strand starting at position 1087 of SEQ ID NO: 1883535
gauguuaagugccagaaag

SEQ ID NO: 2200387 - RNA, 19 nt, Artificial Sequence
  Description of Artificial Sequence: Synthetic oligonucleotide
  Antisense strand to SEQ ID NO: 2200386
cuuucuggcacuuaacauc

SEQ ID NO: 2200388 - RNA, 19 nt, Artificial Sequence
  Description of Artificial Sequence: Synthetic oligonucleotide
  Sense strand starting at position 3617 of SEQ ID NO: 1883535
cagugaaagucauacgacu

SEQ ID NO: 2200389 - RNA, 19 nt, Artificial Sequence
  Description of Artificial Sequence: Synthetic oligonucleotide
  Antisense strand to SEQ ID NO: 2200388
agucguaugacuuucacug

SEQ ID NO: 2200390 - RNA, 19 nt, Artificial Sequence
  Description of Artificial Sequence: Synthetic oligonucleotide
  Sense strand starting at position 66 of SEQ ID NO: 1883535
ggcaaauaaucaggccaaa

SEQ ID NO: 2200391 - RNA, 19 nt, Artificial Sequence
  Description of Artificial Sequence: Synthetic oligonucleotide
  Antisense strand to SEQ ID NO: 2200390
uuuggccugauuauuugcc

SEQ ID NO: 2200392 - RNA, 19 nt, Artificial Sequence
  Description of Artificial Sequence: Synthetic oligonucleotide
  Sense strand starting at position 186 of SEQ ID NO: 1883535
cagcauaccuguuacugga

SEQ ID NO: 2200393 - RNA, 19 nt, Artificial Sequence
  Description of Artificial Sequence: Synthetic oligonucleotide
  Antisense strand to SEQ ID NO: 2200392
uccaguaacagguaugcug

SEQ ID NO: 2200394 - RNA, 19 nt, Artificial Sequence
  Description of Artificial Sequence: Synthetic oligonucleotide
  Sense strand starting at position 2269 of SEQ ID NO: 1883536
guuuaccaggguuagagau

SEQ ID NO: 2200395 - RNA, 19 nt, Artificial Sequence
  Description of Artificial Sequence: Synthetic oligonucleotide
  Antisense strand to SEQ ID NO: 2200394
aucucuaacccugguaaac

SEQ ID NO: 2200396 - RNA, 19 nt, Artificial Sequence
  Description of Artificial Sequence: Synthetic oligonucleotide
  Sense strand starting at position 996 of SEQ ID NO: 1883536
gcacgacugaucuaagaca

SEQ ID NO: 2200397 - RNA, 19 nt, Artificial Sequence
  Description of Artificial Sequence: Synthetic oligonucleotide
  Antisense strand to SEQ ID NO: 2200396
ugucuuagaucagucgugc

SEQ ID NO: 2200398 - RNA, 19 nt, Artificial Sequence
  Description of Artificial Sequence: Synthetic oligonucleotide
  Sense strand starting at position 2186 of SEQ ID NO: 1883536
gcacccguggaauaauaaa

SEQ ID NO: 2200399 - RNA, 19 nt, Artificial Sequence
  Description of Artificial Sequence: Synthetic oligonucleotide
  Antisense strand to SEQ ID NO: 2200398
uuuauuauuccacgggugc

SEQ ID NO: 2200400 - RNA, 19 nt, Artificial Sequence
  Description of Artificial Sequence: Synthetic oligonucleotide
  Sense strand starting at position 2103 of SEQ ID NO: 1883536
agaggccauguuuacaauu

SEQ ID NO: 2200401 - RNA, 19 nt, Artificial Sequence
  Description of Artificial Sequence: Synthetic oligonucleotide
  Antisense strand to SEQ ID NO: 2200400
aauuguaaacauggccucu

SEQ ID NO: 2200402 - RNA, 19 nt, Artificial Sequence
  Description of Artificial Sequence: Synthetic oligonucleotide
  Sense strand starting at position 2976 of SEQ ID NO: 1883536
ccgccuccugaagaaagau

SEQ ID NO: 2200403 - RNA, 19 nt, Artificial Sequence
  Description of Artificial Sequence: Synthetic oligonucleotide
  Antisense strand to SEQ ID NO: 2200402
aucuuucuucaggaggcgg

SEQ ID NO: 2200404 - RNA, 19 nt, Artificial Sequence
  Description of Artificial Sequence: Synthetic oligonucleotide
  Sense strand starting at position 2183 of SEQ ID NO: 1883536
gaagcacccguggaauaau

SEQ ID NO: 2200405 - RNA, 19 nt, Artificial Sequence
  Description of Artificial Sequence: Synthetic oligonucleotide
  Antisense strand to SEQ ID NO: 2200404
auuauuccacgggugcuuc

SEQ ID NO: 2200406 - RNA, 19 nt, Artificial Sequence
  Description of Artificial Sequence: Synthetic oligonucleotide
  Sense strand starting at position 1325 of SEQ ID NO: 1883536
ccaacugucugacucaaga

SEQ ID NO: 2200407 - RNA, 19 nt, Artificial Sequence
  Description of Artificial Sequence: Synthetic oligonucleotide
  Antisense strand to SEQ ID NO: 2200406
ucuugagucagacaguugg

SEQ ID NO: 2200408 - RNA, 19 nt, Artificial Sequence
  Description of Artificial Sequence: Synthetic oligonucleotide
  Sense strand starting at position 2688 of SEQ ID NO: 1883536
gcuugcauuuaguuacaca

SEQ ID NO: 2200409 - RNA, 19 nt, Artificial Sequence
  Description of Artificial Sequence: Synthetic oligonucleotide
  Antisense strand to SEQ ID NO: 2200408
uguguaacuaaaugcaagc

SEQ ID NO: 2200410 - RNA, 19 nt, Artificial Sequence
  Description of Artificial Sequence: Synthetic oligonucleotide
  Sense strand starting at position 3615 of SEQ ID NO: 1883536
auugcuaucccugaugauc

SEQ ID NO: 2200411 - RNA, 19 nt, Artificial Sequence
  Description of Artificial Sequence: Synthetic oligonucleotide
  Antisense strand to SEQ ID NO: 2200410
gaucaucagggauagcaau

SEQ ID NO: 2200412 - RNA, 19 nt, Artificial Sequence
  Description of Artificial Sequence: Synthetic oligonucleotide
  Sense strand starting at position 3598 of SEQ ID NO: 1883536
ccaucuucgagauaggcau

SEQ ID NO: 2200413 - RNA, 19 nt, Artificial Sequence
  Description of Artificial Sequence: Synthetic oligonucleotide
  Antisense strand to SEQ ID NO: 2200412
augccuaucucgaagaugg

SEQ ID NO: 2200414 - RNA, 19 nt, Artificial Sequence
  Description of Artificial Sequence: Synthetic oligonucleotide
  Sense strand starting at position 27 of SEQ ID NO: 1883536
accuacagucauggucaaa

SEQ ID NO: 2200415 - RNA, 19 nt, Artificial Sequence
  Description of Artificial Sequence: Synthetic oligonucleotide
  Antisense strand to SEQ ID NO: 2200414
uuugaccaugacuguaggu

SEQ ID NO: 2200416 - RNA, 19 nt, Artificial Sequence
  Description of Artificial Sequence: Synthetic oligonucleotide
  Sense strand starting at position 3321 of SEQ ID NO: 1883536
aaguucuucccgggaggga

SEQ ID NO: 2200417 - RNA, 19 nt, Artificial Sequence
  Description of Artificial Sequence: Synthetic oligonucleotide
  Antisense strand to SEQ ID NO: 2200416
ucccucccgggaagaacuu

SEQ ID NO: 2200418 - RNA, 19 nt, Artificial Sequence
  Description of Artificial Sequence: Synthetic oligonucleotide
  Sense strand starting at position 2639 of SEQ ID NO: 1883536
agguauauuugguagggaa

SEQ ID NO: 2200419 - RNA, 19 nt, Artificial Sequence
  Description of Artificial Sequence: Synthetic oligonucleotide
  Antisense strand to SEQ ID NO: 2200418
uucccuaccaaauauaccu

SEQ ID NO: 2200420 - RNA, 19 nt, Artificial Sequence
  Description of Artificial Sequence: Synthetic oligonucleotide
  Sense strand starting at position 2266 of SEQ ID NO: 1883536
auuguuuaccaggguuaga

SEQ ID NO: 2200421 - RNA, 19 nt, Artificial Sequence
  Description of Artificial Sequence: Synthetic oligonucleotide
  Antisense strand to SEQ ID NO: 2200420
ucuaacccugguaaacaau

SEQ ID NO: 2200422 - RNA, 19 nt, Artificial Sequence
  Description of Artificial Sequence: Synthetic oligonucleotide
  Sense strand starting at position 1218 of SEQ ID NO: 1883536
uccucauuaccguaucaua

SEQ ID NO: 2200423 - RNA, 19 nt, Artificial Sequence
  Description of Artificial Sequence: Synthetic oligonucleotide
  Antisense strand to SEQ ID NO: 2200422
uaugauacgguaaugagga

SEQ ID NO: 2200424 - RNA, 19 nt, Artificial Sequence
  Description of Artificial Sequence: Synthetic oligonucleotide
  Sense strand starting at position 1295 of SEQ ID NO: 1883536
auaagaugugaugguagca

SEQ ID NO: 2200425 - RNA, 19 nt, Artificial Sequence
  Description of Artificial Sequence: Synthetic oligonucleotide
  Antisense strand to SEQ ID NO: 2200424
ugcuaccaucacaucuuau

SEQ ID NO: 2200426 - RNA, 19 nt, Artificial Sequence
  Description of Artificial Sequence: Synthetic oligonucleotide
  Sense strand starting at position 2182 of SEQ ID NO: 1883536
ggaagcacccguggaauaa

SEQ ID NO: 2200427 - RNA, 19 nt, Artificial Sequence
  Description of Artificial Sequence: Synthetic oligonucleotide
  Antisense strand to SEQ ID NO: 2200426
uuauuccacgggugcuucc

SEQ ID NO: 2200428 - RNA, 19 nt, Artificial Sequence
  Description of Artificial Sequence: Synthetic oligonucleotide
  Sense strand starting at position 1149 of SEQ ID NO: 1883536
acacuaguguuaucuauga

SEQ ID NO: 2200429 - RNA, 19 nt, Artificial Sequence
  Description of Artificial Sequence: Synthetic oligonucleotide
  Antisense strand to SEQ ID NO: 2200428
ucauagauaacacuagugu

SEQ ID NO: 2200430 - RNA, 19 nt, Artificial Sequence
  Description of Artificial Sequence: Synthetic oligonucleotide
  Sense strand starting at position 2516 of SEQ ID NO: 1883536
agauacuucucacuugguu

SEQ ID NO: 2200431 - RNA, 19 nt, Artificial Sequence
  Description of Artificial Sequence: Synthetic oligonucleotide
  Antisense strand to SEQ ID NO: 2200430
aaccaagugagaaguaucu

SEQ ID NO: 2200432 - RNA, 19 nt, Artificial Sequence
  Description of Artificial Sequence: Synthetic oligonucleotide
  Sense strand starting at position 2306 of SEQ ID NO: 1883536
ugaguuucuguccaauucu

SEQ ID NO: 2200433 - RNA, 19 nt, Artificial Sequence
  Description of Artificial Sequence: Synthetic oligonucleotide
  Antisense strand to SEQ ID NO: 2200432
agaauuggacagaaacuca

SEQ ID NO: 2200434 - RNA, 19 nt, Artificial Sequence
  Description of Artificial Sequence: Synthetic oligonucleotide
  Sense strand starting at position 1153 of SEQ ID NO: 1883536
uaguguuaucuaugaugau

SEQ ID NO: 2200435 - RNA, 19 nt, Artificial Sequence
  Description of Artificial Sequence: Synthetic oligonucleotide
  Antisense strand to SEQ ID NO: 2200434
aucaucauagauaacacua

SEQ ID NO: 2200436 - RNA, 19 nt, Artificial Sequence
  Description of Artificial Sequence: Synthetic oligonucleotide
  Sense strand starting at position 2942 of SEQ ID NO: 1883536
aucagcuguggucaguaaa

SEQ ID NO: 2200437 - RNA, 19 nt, Artificial Sequence
  Description of Artificial Sequence: Synthetic oligonucleotide
  Antisense strand to SEQ ID NO: 2200436
uuuacugaccacagcugau

SEQ ID NO: 2200438 - RNA, 19 nt, Artificial Sequence
  Description of Artificial Sequence: Synthetic oligonucleotide
  Sense strand starting at position 335 of SEQ ID NO: 1883536
agaacaacguguuccucaa

SEQ ID NO: 2200439 - RNA, 19 nt, Artificial Sequence
  Description of Artificial Sequence: Synthetic oligonucleotide
  Antisense strand to SEQ ID NO: 2200438
uugaggaacacguuguucu

SEQ ID NO: 2200440 - RNA, 19 nt, Artificial Sequence
  Description of Artificial Sequence: Synthetic oligonucleotide
  Sense strand starting at position 1291 of SEQ ID NO: 1883536
gcuaauaagaugugauggu

SEQ ID NO: 2200441 - RNA, 19 nt, Artificial Sequence
  Description of Artificial Sequence: Synthetic oligonucleotide
  Antisense strand to SEQ ID NO: 2200440
accaucacaucuuauuagc

SEQ ID NO: 2200442 - RNA, 19 nt, Artificial Sequence
  Description of Artificial Sequence: Synthetic oligonucleotide
  Sense strand starting at position 1281 of SEQ ID NO: 1883536
aggcaaugccgcuaauaag

SEQ ID NO: 2200443 - RNA, 19 nt, Artificial Sequence
  Description of Artificial Sequence: Synthetic oligonucleotide
  Antisense strand to SEQ ID NO: 2200442
cuuauuagcggcauugccu

SEQ ID NO: 2200444 - RNA, 19 nt, Artificial Sequence
  Description of Artificial Sequence: Synthetic oligonucleotide
  Sense strand starting at position 1289 of SEQ ID NO: 1883536
ccgcuaauaagaugugaug

SEQ ID NO: 2200445 - RNA, 19 nt, Artificial Sequence
  Description of Artificial Sequence: Synthetic oligonucleotide
  Antisense strand to SEQ ID NO: 2200444
caucacaucuuauuagcgg

SEQ ID NO: 2200446 - RNA, 19 nt, Artificial Sequence
  Description of Artificial Sequence: Synthetic oligonucleotide
  Sense strand starting at position 3096 of SEQ ID NO: 1883536
cgaugacaugaaugcuagu

SEQ ID NO: 2200447 - RNA, 19 nt, Artificial Sequence
  Description of Artificial Sequence: Synthetic oligonucleotide
  Antisense strand to SEQ ID NO: 2200446
acuagcauucaugucaucg

SEQ ID NO: 2200448 - RNA, 19 nt, Artificial Sequence
  Description of Artificial Sequence: Synthetic oligonucleotide
  Sense strand starting at position 988 of SEQ ID NO: 1883536
ccgagaucgcacgacugau

SEQ ID NO: 2200449 - RNA, 19 nt, Artificial Sequence
  Description of Artificial Sequence: Synthetic oligonucleotide
  Antisense strand to SEQ ID NO: 2200448
aucagucgugcgaucucgg

SEQ ID NO: 2200450 - RNA, 19 nt, Artificial Sequence
  Description of Artificial Sequence: Synthetic oligonucleotide
  Sense strand starting at position 628 of SEQ ID NO: 1883536
ucuaucucucccuguuaga

SEQ ID NO: 2200451 - RNA, 19 nt, Artificial Sequence
  Description of Artificial Sequence: Synthetic oligonucleotide
  Antisense strand to SEQ ID NO: 2200450
ucuaacagggagagauaga

SEQ ID NO: 2200452 - RNA, 19 nt, Artificial Sequence
  Description of Artificial Sequence: Synthetic oligonucleotide
  Sense strand starting at position 994 of SEQ ID NO: 1883536
ucgcacgacugaucuaaga

SEQ ID NO: 2200453 - RNA, 19 nt, Artificial Sequence
  Description of Artificial Sequence: Synthetic oligonucleotide
  Antisense strand to SEQ ID NO: 2200452
ucuuagaucagucgugcga

SEQ ID NO: 2200454 - RNA, 19 nt, Artificial Sequence
  Description of Artificial Sequence: Synthetic oligonucleotide
  Sense strand starting at position 3593 of SEQ ID NO: 1883536
ucagcccaucuucgagaua

SEQ ID NO: 2200455 - RNA, 19 nt, Artificial Sequence
  Description of Artificial Sequence: Synthetic oligonucleotide
  Antisense strand to SEQ ID NO: 2200454
uaucucgaagaugggcuga

SEQ ID NO: 2200456 - RNA, 19 nt, Artificial Sequence
  Description of Artificial Sequence: Synthetic oligonucleotide
  Sense strand starting at position 2240 of SEQ ID NO: 1883536
acugucuuguacucaucau

SEQ ID NO: 2200457 - RNA, 19 nt, Artificial Sequence
  Description of Artificial Sequence: Synthetic oligonucleotide
  Antisense strand to SEQ ID NO: 2200456
augaugaguacaagacagu

SEQ ID NO: 2200458 - RNA, 19 nt, Artificial Sequence
  Description of Artificial Sequence: Synthetic oligonucleotide
  Sense strand starting at position 3611 of SEQ ID NO: 1883536
aggcauugcuaucccugau

SEQ ID NO: 2200459 - RNA, 19 nt, Artificial Sequence
  Description of Artificial Sequence: Synthetic oligonucleotide
  Antisense strand to SEQ ID NO: 2200458
aucagggauagcaaugccu

SEQ ID NO: 2200460 - RNA, 19 nt, Artificial Sequence
  Description of Artificial Sequence: Synthetic oligonucleotide
  Sense strand starting at position 2305 of SEQ ID NO: 1883536
cugaguuucuguccaauuc

SEQ ID NO: 2200461 - RNA, 19 nt, Artificial Sequence
  Description of Artificial Sequence: Synthetic oligonucleotide
  Antisense strand to SEQ ID NO: 2200460
gaauuggacagaaacucag

SEQ ID NO: 2200462 - RNA, 19 nt, Artificial Sequence
  Description of Artificial Sequence: Synthetic oligonucleotide
  Sense strand starting at position 2303 of SEQ ID NO: 1883536
cucugaguuucuguccaau

SEQ ID NO: 2200463 - RNA, 19 nt, Artificial Sequence
  Description of Artificial Sequence: Synthetic oligonucleotide
  Antisense strand to SEQ ID NO: 2200462
auuggacagaaacucagag

SEQ ID NO: 2200464 - RNA, 19 nt, Artificial Sequence
  Description of Artificial Sequence: Synthetic oligonucleotide
  Sense strand starting at position 1423 of SEQ ID NO: 1883536
guaacuguuugcccuaaga

SEQ ID NO: 2200465 - RNA, 19 nt, Artificial Sequence
  Description of Artificial Sequence: Synthetic oligonucleotide
  Antisense strand to SEQ ID NO: 2200464
ucuuagggcaaacaguuac

SEQ ID NO: 2200466 - RNA, 19 nt, Artificial Sequence
  Description of Artificial Sequence: Synthetic oligonucleotide
  Sense strand starting at position 339 of SEQ ID NO: 1883536
caacguguuccucaaagcu

SEQ ID NO: 2200467 - RNA, 19 nt, Artificial Sequence
  Description of Artificial Sequence: Synthetic oligonucleotide
  Antisense strand to SEQ ID NO: 2200466
agcuuugaggaacacguug

SEQ ID NO: 2200468 - RNA, 19 nt, Artificial Sequence
  Description of Artificial Sequence: Synthetic oligonucleotide
  Sense strand starting at position 3605 of SEQ ID NO: 1883536
cgagauaggcauugcuauc

SEQ ID NO: 2200469 - RNA, 19 nt, Artificial Sequence
  Description of Artificial Sequence: Synthetic oligonucleotide
  Antisense strand to SEQ ID NO: 2200468
gauagcaaugccuaucucg

SEQ ID NO: 2200470 - RNA, 19 nt, Artificial Sequence
  Description of Artificial Sequence: Synthetic oligonucleotide
  Sense strand starting at position 3574 of SEQ ID NO: 1883536
uguuauguauuccucacuu

SEQ ID NO: 2200471 - RNA, 19 nt, Artificial Sequence
  Description of Artificial Sequence: Synthetic oligonucleotide
  Antisense strand to SEQ ID NO: 2200470
aagugaggaauacauaaca

SEQ ID NO: 2200472 - RNA, 19 nt, Artificial Sequence
  Description of Artificial Sequence: Synthetic oligonucleotide
  Sense strand starting at position 1394 of SEQ ID NO: 1883536
uguguauaaaugggugcau

SEQ ID NO: 2200473 - RNA, 19 nt, Artificial Sequence
  Description of Artificial Sequence: Synthetic oligonucleotide
  Antisense strand to SEQ ID NO: 2200472
augcacccauuuauacaca

SEQ ID NO: 2200474 - RNA, 19 nt, Artificial Sequence
  Description of Artificial Sequence: Synthetic oligonucleotide
  Sense strand starting at position 1713 of SEQ ID NO: 1883537
ggcucucccaggugaaaga

SEQ ID NO: 2200475 - RNA, 19 nt, Artificial Sequence
  Description of Artificial Sequence: Synthetic oligonucleotide
  Antisense strand to SEQ ID NO: 2200474
ucuuucaccugggagagcc

SEQ ID NO: 2200476 - RNA, 19 nt, Artificial Sequence
  Description of Artificial Sequence: Synthetic oligonucleotide
  Sense strand starting at position 1713 of SEQ ID NO: 1883538
ggcucucccaggugaaaga

SEQ ID NO: 2200477 - RNA, 19 nt, Artificial Sequence
  Description of Artificial Sequence: Synthetic oligonucleotide
  Antisense strand to SEQ ID NO: 2200476
ucuuucaccugggagagcc

SEQ ID NO: 2200478 - RNA, 19 nt, Artificial Sequence
  Description of Artificial Sequence: Synthetic oligonucleotide
  Sense strand starting at position 1713 of SEQ ID NO: 1883539
ggcucucccaggugaaaga

SEQ ID NO: 2200479 - RNA, 19 nt, Artificial Sequence
  Description of Artificial Sequence: Synthetic oligonucleotide
  Antisense strand to SEQ ID NO: 2200478
ucuuucaccugggagagcc

SEQ ID NO: 2200480 - RNA, 19 nt, Artificial Sequence
  Description of Artificial Sequence: Synthetic oligonucleotide
  Sense strand starting at position 3747 of SEQ ID NO: 1883540
cguuucagaugaguaggaa

SEQ ID NO: 2200481 - RNA, 19 nt, Artificial Sequence
  Description of Artificial Sequence: Synthetic oligonucleotide
  Antisense strand to SEQ ID NO: 2200480
uuccuacucaucugaaacg

SEQ ID NO: 2200482 - RNA, 19 nt, Artificial Sequence
  Description of Artificial Sequence: Synthetic oligonucleotide
  Sense strand starting at position 3934 of SEQ ID NO: 1883540
aacaaaggccuucguaaga

SEQ ID NO: 2200483 - RNA, 19 nt, Artificial Sequence
  Description of Artificial Sequence: Synthetic oligonucleotide
  Antisense strand to SEQ ID NO: 2200482
ucuuacgaaggccuuuguu

SEQ ID NO: 2200484 - RNA, 19 nt, Artificial Sequence
  Description of Artificial Sequence: Synthetic oligonucleotide
  Sense strand starting at position 3421 of SEQ ID NO: 1883540
guggguuccuugaauggga

SEQ ID NO: 2200485 - RNA, 19 nt, Artificial Sequence
  Description of Artificial Sequence: Synthetic oligonucleotide
  Antisense strand to SEQ ID NO: 2200484
ucccauucaaggaacccac

SEQ ID NO: 2200486 - RNA, 19 nt, Artificial Sequence
  Description of Artificial Sequence: Synthetic oligonucleotide
  Sense strand starting at position 3315 of SEQ ID NO: 1883540
ggcgaagaguucucagaua

SEQ ID NO: 2200487 - RNA, 19 nt, Artificial Sequence
  Description of Artificial Sequence: Synthetic oligonucleotide
  Antisense strand to SEQ ID NO: 2200486
uaucugagaacucuucgcc

SEQ ID NO: 2200488 - RNA, 19 nt, Artificial Sequence
  Description of Artificial Sequence: Synthetic oligonucleotide
  Sense strand starting at position 3809 of SEQ ID NO: 1883540
augaaacuuuaugucgcaa

SEQ ID NO: 2200489 - RNA, 19 nt, Artificial Sequence
  Description of Artificial Sequence: Synthetic oligonucleotide
  Antisense strand to SEQ ID NO: 2200488
uugcgacauaaaguuucau

SEQ ID NO: 2200490 - RNA, 19 nt, Artificial Sequence
  Description of Artificial Sequence: Synthetic oligonucleotide
  Sense strand starting at position 3417 of SEQ ID NO: 1883540
cgagguggguuccuugaau

SEQ ID NO: 2200491 - RNA, 19 nt, Artificial Sequence
  Description of Artificial Sequence: Synthetic oligonucleotide
  Antisense strand to SEQ ID NO: 2200490
auucaaggaacccaccucg

SEQ ID NO: 2200492 - RNA, 19 nt, Artificial Sequence
  Description of Artificial Sequence: Synthetic oligonucleotide
  Sense strand starting at position 3527 of SEQ ID NO: 1883540
gcaugacacuugcuaucua

SEQ ID NO: 2200493 - RNA, 19 nt, Artificial Sequence
  Description of Artificial Sequence: Synthetic oligonucleotide
  Antisense strand to SEQ ID NO: 2200492
uagauagcaagugucaugc

SEQ ID NO: 2200494 - RNA, 19 nt, Artificial Sequence
  Description of Artificial Sequence: Synthetic oligonucleotide
  Sense strand starting at position 2489 of SEQ ID NO: 1883540
acucacucggucugagagu

SEQ ID NO: 2200495 - RNA, 19 nt, Artificial Sequence
  Description of Artificial Sequence: Synthetic oligonucleotide
  Antisense strand to SEQ ID NO: 2200494
acucucagaccgagugagu

SEQ ID NO: 2200496 - RNA, 19 nt, Artificial Sequence
  Description of Artificial Sequence: Synthetic oligonucleotide
  Sense strand starting at position 3214 of SEQ ID NO: 1883540
uaggcauauccacguuuaa

SEQ ID NO: 2200497 - RNA, 19 nt, Artificial Sequence
  Description of Artificial Sequence: Synthetic oligonucleotide
  Antisense strand to SEQ ID NO: 2200496
uuaaacguggauaugccua

SEQ ID NO: 2200498 - RNA, 19 nt, Artificial Sequence
  Description of Artificial Sequence: Synthetic oligonucleotide
  Sense strand starting at position 3497 of SEQ ID NO: 1883540
gaaugaagauaucaagguu

SEQ ID NO: 2200499 - RNA, 19 nt, Artificial Sequence
  Description of Artificial Sequence: Synthetic oligonucleotide
  Antisense strand to SEQ ID NO: 2200498
aaccuugauaucuucauuc

SEQ ID NO: 2200500 - RNA, 19 nt, Artificial Sequence
  Description of Artificial Sequence: Synthetic oligonucleotide
  Sense strand starting at position 3732 of SEQ ID NO: 1883540
gauggauaaugguaacguu

SEQ ID NO: 2200501 - RNA, 19 nt, Artificial Sequence
  Description of Artificial Sequence: Synthetic oligonucleotide
  Antisense strand to SEQ ID NO: 2200500
aacguuaccauuauccauc

SEQ ID NO: 2200502 - RNA, 19 nt, Artificial Sequence
  Description of Artificial Sequence: Synthetic oligonucleotide
  Sense strand starting at position 3740 of SEQ ID NO: 1883540
augguaacguuucagauga

SEQ ID NO: 2200503 - RNA, 19 nt, Artificial Sequence
  Description of Artificial Sequence: Synthetic oligonucleotide
  Antisense strand to SEQ ID NO: 2200502
ucaucugaaacguuaccau

SEQ ID NO: 2200504 - RNA, 19 nt, Artificial Sequence
  Description of Artificial Sequence: Synthetic oligonucleotide
  Sense strand starting at position 3830 of SEQ ID NO: 1883540
auggguuccugauggaauu

SEQ ID NO: 2200505 - RNA, 19 nt, Artificial Sequence
  Description of Artificial Sequence: Synthetic oligonucleotide
  Antisense strand to SEQ ID NO: 2200504
aauuccaucaggaacccau

SEQ ID NO: 2200506 - RNA, 19 nt, Artificial Sequence
  Description of Artificial Sequence: Synthetic oligonucleotide
  Sense strand starting at position 3460 of SEQ ID NO: 1883540
augaacuguuuccauguuu

SEQ ID NO: 2200507 - RNA, 19 nt, Artificial Sequence
  Description of Artificial Sequence: Synthetic oligonucleotide
  Antisense strand to SEQ ID NO: 2200506
aaacauggaaacaguucau

SEQ ID NO: 2200508 - RNA, 19 nt, Artificial Sequence
  Description of Artificial Sequence: Synthetic oligonucleotide
  Sense strand starting at position 3742 of SEQ ID NO: 1883540
gguaacguuucagaugagu

SEQ ID NO: 2200509 - RNA, 19 nt, Artificial Sequence
  Description of Artificial Sequence: Synthetic oligonucleotide
  Antisense strand to SEQ ID NO: 2200508
acucaucugaaacguuacc

SEQ ID NO: 2200510 - RNA, 19 nt, Artificial Sequence
  Description of Artificial Sequence: Synthetic oligonucleotide
  Sense strand starting at position 3735 of SEQ ID NO: 1883540
ggauaaugguaacguuuca

SEQ ID NO: 2200511 - RNA, 19 nt, Artificial Sequence
  Description of Artificial Sequence: Synthetic oligonucleotide
  Antisense strand to SEQ ID NO: 2200510
ugaaacguuaccauuaucc

SEQ ID NO: 2200512 - RNA, 19 nt, Artificial Sequence
  Description of Artificial Sequence: Synthetic oligonucleotide
  Sense strand starting at position 2490 of SEQ ID NO: 1883540
cucacucggucugagaguu

SEQ ID NO: 2200513 - RNA, 19 nt, Artificial Sequence
  Description of Artificial Sequence: Synthetic oligonucleotide
  Antisense strand to SEQ ID NO: 2200512
aacucucagaccgagugag

SEQ ID NO: 2200514 - RNA, 19 nt, Artificial Sequence
  Description of Artificial Sequence: Synthetic oligonucleotide
  Sense strand starting at position 3808 of SEQ ID NO: 1883540
aaugaaacuuuaugucgca

SEQ ID NO: 2200515 - RNA, 19 nt, Artificial Sequence
  Description of Artificial Sequence: Synthetic oligonucleotide
  Antisense strand to SEQ ID NO: 2200514
ugcgacauaaaguuucauu

SEQ ID NO: 2200516 - RNA, 19 nt, Artificial Sequence
  Description of Artificial Sequence: Synthetic oligonucleotide
  Sense strand starting at position 1916 of SEQ ID NO: 1883541
ccucauuagcaugagauca

SEQ ID NO: 2200517 - RNA, 19 nt, Artificial Sequence
  Description of Artificial Sequence: Synthetic oligonucleotide
  Antisense strand to SEQ ID NO: 2200516
ugaucucaugcuaaugagg

SEQ ID NO: 2200518 - RNA, 19 nt, Artificial Sequence
  Description of Artificial Sequence: Synthetic oligonucleotide
  Sense strand starting at position 2671 of SEQ ID NO: 1883541
ccuguagagauggauuagu

SEQ ID NO: 2200519 - RNA, 19 nt, Artificial Sequence
  Description of Artificial Sequence: Synthetic oligonucleotide
  Antisense strand to SEQ ID NO: 2200518
acuaauccaucucuacagg

SEQ ID NO: 2200520 - RNA, 19 nt, Artificial Sequence
  Description of Artificial Sequence: Synthetic oligonucleotide
  Sense strand starting at position 139 of SEQ ID NO: 1883541
gagaaugugacauggguga

SEQ ID NO: 2200521 - RNA, 19 nt, Artificial Sequence
  Description of Artificial Sequence: Synthetic oligonucleotide
  Antisense strand to SEQ ID NO: 2200520
ucacccaugucacauucuc

SEQ ID NO: 2200522 - RNA, 19 nt, Artificial Sequence
  Description of Artificial Sequence: Synthetic oligonucleotide
  Sense strand starting at position 132 of SEQ ID NO: 1883541
cuguaaagagaaugugaca

SEQ ID NO: 2200523 - RNA, 19 nt, Artificial Sequence
  Description of Artificial Sequence: Synthetic oligonucleotide
  Antisense strand to SEQ ID NO: 2200522
ugucacauucucuuuacag

SEQ ID NO: 2200524 - RNA, 19 nt, Artificial Sequence
  Description of Artificial Sequence: Synthetic oligonucleotide
  Sense strand starting at position 1407 of SEQ ID NO: 1883541
ugguucuaauaccuaaaga

SEQ ID NO: 2200525 - RNA, 19 nt, Artificial Sequence
  Description of Artificial Sequence: Synthetic oligonucleotide
  Antisense strand to SEQ ID NO: 2200524
ucuuuagguauuagaacca

SEQ ID NO: 2200526 - RNA, 19 nt, Artificial Sequence
  Description of Artificial Sequence: Synthetic oligonucleotide
  Sense strand starting at position 3720 of SEQ ID NO: 1883541
aucuuuccagacuagucua

SEQ ID NO: 2200527 - RNA, 19 nt, Artificial Sequence
  Description of Artificial Sequence: Synthetic oligonucleotide
  Antisense strand to SEQ ID NO: 2200526
uagacuagucuggaaagau

SEQ ID NO: 2200528 - RNA, 19 nt, Artificial Sequence
  Description of Artificial Sequence: Synthetic oligonucleotide
  Sense strand starting at position 3122 of SEQ ID NO: 1883541
aggacuuugagucauguug

SEQ ID NO: 2200529 - RNA, 19 nt, Artificial Sequence
  Description of Artificial Sequence: Synthetic oligonucleotide
  Antisense strand to SEQ ID NO: 2200528
caacaugacucaaaguccu

SEQ ID NO: 2200530 - RNA, 19 nt, Artificial Sequence
  Description of Artificial Sequence: Synthetic oligonucleotide
  Sense strand starting at position 1851 of SEQ ID NO: 1883541
gccauagguguauaaggga

SEQ ID NO: 2200531 - RNA, 19 nt, Artificial Sequence
  Description of Artificial Sequence: Synthetic oligonucleotide
  Antisense strand to SEQ ID NO: 2200530
ucccuuauacaccuauggc

SEQ ID NO: 2200532 - RNA, 19 nt, Artificial Sequence
  Description of Artificial Sequence: Synthetic oligonucleotide
  Sense strand starting at position 548 of SEQ ID NO: 1883541
accagaagacaguguuaua

SEQ ID NO: 2200533 - RNA, 19 nt, Artificial Sequence
  Description of Artificial Sequence: Synthetic oligonucleotide
  Antisense strand to SEQ ID NO: 2200532
uauaacacugucuucuggu

SEQ ID NO: 2200534 - RNA, 19 nt, Artificial Sequence
  Description of Artificial Sequence: Synthetic oligonucleotide
  Sense strand starting at position 2581 of SEQ ID NO: 1883541
ggcucacuucuggaauacu

SEQ ID NO: 2200535 - RNA, 19 nt, Artificial Sequence
  Description of Artificial Sequence: Synthetic oligonucleotide
  Antisense strand to SEQ ID NO: 2200534
aguauuccagaagugagcc

SEQ ID NO: 2200536 - RNA, 19 nt, Artificial Sequence
  Description of Artificial Sequence: Synthetic oligonucleotide
  Sense strand starting at position 800 of SEQ ID NO: 1883541
aagugacuuccacagguuu

SEQ ID NO: 2200537 - RNA, 19 nt, Artificial Sequence
  Description of Artificial Sequence: Synthetic oligonucleotide
  Antisense strand to SEQ ID NO: 2200536
aaaccuguggaagucacuu

SEQ ID NO: 2200538 - RNA, 19 nt, Artificial Sequence
  Description of Artificial Sequence: Synthetic oligonucleotide
  Sense strand starting at position 2590 of SEQ ID NO: 1883541
cuggaauacuguccaaauc

SEQ ID NO: 2200539 - RNA, 19 nt, Artificial Sequence
  Description of Artificial Sequence: Synthetic oligonucleotide
  Antisense strand to SEQ ID NO: 2200538
gauuuggacaguauuccag

SEQ ID NO: 2200540 - RNA, 19 nt, Artificial Sequence
  Description of Artificial Sequence: Synthetic oligonucleotide
  Sense strand starting at position 2660 of SEQ ID NO: 1883541
ggagaugaaugccuguaga

SEQ ID NO: 2200541 - RNA, 19 nt, Artificial Sequence
  Description of Artificial Sequence: Synthetic oligonucleotide
  Antisense strand to SEQ ID NO: 2200540
ucuacaggcauucaucucc

SEQ ID NO: 2200542 - RNA, 19 nt, Artificial Sequence
  Description of Artificial Sequence: Synthetic oligonucleotide
  Sense strand starting at position 174 of SEQ ID NO: 1883541
ccauucucuugacuggaua

SEQ ID NO: 2200543 - RNA, 19 nt, Artificial Sequence
  Description of Artificial Sequence: Synthetic oligonucleotide
  Antisense strand to SEQ ID NO: 2200542
uauccagucaagagaaugg

SEQ ID NO: 2200544 - RNA, 19 nt, Artificial Sequence
  Description of Artificial Sequence: Synthetic oligonucleotide
  Sense strand starting at position 512 of SEQ ID NO: 1883541
cugaucuucuuccugagaa

SEQ ID NO: 2200545 - RNA, 19 nt, Artificial Sequence
  Description of Artificial Sequence: Synthetic oligonucleotide
  Antisense strand to SEQ ID NO: 2200544
uucucaggaagaagaucag

SEQ ID NO: 2200546 - RNA, 19 nt, Artificial Sequence
  Description of Artificial Sequence: Synthetic oligonucleotide
  Sense strand starting at position 3231 of SEQ ID NO: 1883541
ugauguauuacugagguuc

SEQ ID NO: 2200547 - RNA, 19 nt, Artificial Sequence
  Description of Artificial Sequence: Synthetic oligonucleotide
  Antisense strand to SEQ ID NO: 2200546
gaaccucaguaauacauca

SEQ ID NO: 2200548 - RNA, 19 nt, Artificial Sequence
  Description of Artificial Sequence: Synthetic oligonucleotide
  Sense strand starting at position 3411 of SEQ ID NO: 1883541
aggaaugugccacagaguu

SEQ ID NO: 2200549 - RNA, 19 nt, Artificial Sequence
  Description of Artificial Sequence: Synthetic oligonucleotide
  Antisense strand to SEQ ID NO: 2200548
aacucuguggcacauuccu

SEQ ID NO: 2200550 - RNA, 19 nt, Artificial Sequence
  Description of Artificial Sequence: Synthetic oligonucleotide
  Sense strand starting at position 2390 of SEQ ID NO: 1883541
gauggagaucuuugauguu

SEQ ID NO: 2200551 - RNA, 19 nt, Artificial Sequence
  Description of Artificial Sequence: Synthetic oligonucleotide
  Antisense strand to SEQ ID NO: 2200550
aacaucaaagaucuccauc

SEQ ID NO: 2200552 - RNA, 19 nt, Artificial Sequence
  Description of Artificial Sequence: Synthetic oligonucleotide
  Sense strand starting at position 3725 of SEQ ID NO: 1883541
uccagacuagucuagcaua

SEQ ID NO: 2200553 - RNA, 19 nt, Artificial Sequence
  Description of Artificial Sequence: Synthetic oligonucleotide
  Antisense strand to SEQ ID NO: 2200552
uaugcuagacuagucugga

SEQ ID NO: 2200554 - RNA, 19 nt, Artificial Sequence
  Description of Artificial Sequence: Synthetic oligonucleotide
  Sense strand starting at position 1638 of SEQ ID NO: 1883541
uaacuaaagguauggcaua

SEQ ID NO: 2200555 - RNA, 19 nt, Artificial Sequence
  Description of Artificial Sequence: Synthetic oligonucleotide
  Antisense strand to SEQ ID NO: 2200554
uaugccauaccuuuaguua

SEQ ID NO: 2200556 - RNA, 19 nt, Artificial Sequence
  Description of Artificial Sequence: Synthetic oligonucleotide
  Sense strand starting at position 744 of SEQ ID NO: 1883541
cugugagugagaggaucau

SEQ ID NO: 2200557 - RNA, 19 nt, Artificial Sequence
  Description of Artificial Sequence: Synthetic oligonucleotide
  Antisense strand to SEQ ID NO: 2200556
augauccucucacucacag

SEQ ID NO: 2200558 - RNA, 19 nt, Artificial Sequence
  Description of Artificial Sequence: Synthetic oligonucleotide
  Sense strand starting at position 141 of SEQ ID NO: 1883541
gaaugugacaugggugacu

SEQ ID NO: 2200559 - RNA, 19 nt, Artificial Sequence
  Description of Artificial Sequence: Synthetic oligonucleotide
  Antisense strand to SEQ ID NO: 2200558
agucacccaugucacauuc

SEQ ID NO: 2200560 - RNA, 19 nt, Artificial Sequence
  Description of Artificial Sequence: Synthetic oligonucleotide
  Sense strand starting at position 735 of SEQ ID NO: 1883541
acaaccauacugugaguga

SEQ ID NO: 2200561 - RNA, 19 nt, Artificial Sequence
  Description of Artificial Sequence: Synthetic oligonucleotide
  Antisense strand to SEQ ID NO: 2200560
ucacucacaguaugguugu

SEQ ID NO: 2200562 - RNA, 19 nt, Artificial Sequence
  Description of Artificial Sequence: Synthetic oligonucleotide
  Sense strand starting at position 905 of SEQ ID NO: 1883541
acguuuccaagguaagauu

SEQ ID NO: 2200563 - RNA, 19 nt, Artificial Sequence
  Description of Artificial Sequence: Synthetic oligonucleotide
  Antisense strand to SEQ ID NO: 2200562
aaucuuaccuuggaaacgu

SEQ ID NO: 2200564 - RNA, 19 nt, Artificial Sequence
  Description of Artificial Sequence: Synthetic oligonucleotide
  Sense strand starting at position 618 of SEQ ID NO: 1883541
cuuugacucucagcaagaa

SEQ ID NO: 2200565 - RNA, 19 nt, Artificial Sequence
  Description of Artificial Sequence: Synthetic oligonucleotide
  Antisense strand to SEQ ID NO: 2200564
uucuugcugagagucaaag

SEQ ID NO: 2200566 - RNA, 19 nt, Artificial Sequence
  Description of Artificial Sequence: Synthetic oligonucleotide
  Sense strand starting at position 3117 of SEQ ID NO: 1883541
guacaaggacuuugaguca

SEQ ID NO: 2200567 - RNA, 19 nt, Artificial Sequence
  Description of Artificial Sequence: Synthetic oligonucleotide
  Antisense strand to SEQ ID NO: 2200566
ugacucaaaguccuuguac

SEQ ID NO: 2200568 - RNA, 19 nt, Artificial Sequence
  Description of Artificial Sequence: Synthetic oligonucleotide
  Sense strand starting at position 75 of SEQ ID NO: 1883541
aaguauuaucagcaggguu

SEQ ID NO: 2200569 - RNA, 19 nt, Artificial Sequence
  Description of Artificial Sequence: Synthetic oligonucleotide
  Antisense strand to SEQ ID NO: 2200568
aacccugcugauaauacuu

SEQ ID NO: 2200570 - RNA, 19 nt, Artificial Sequence
  Description of Artificial Sequence: Synthetic oligonucleotide
  Sense strand starting at position 291 of SEQ ID NO: 1883541
ucaguauugggugacucuu

SEQ ID NO: 2200571 - RNA, 19 nt, Artificial Sequence
  Description of Artificial Sequence: Synthetic oligonucleotide
  Antisense strand to SEQ ID NO: 2200570
aagagucacccaauacuga

SEQ ID NO: 2200572 - RNA, 19 nt, Artificial Sequence
  Description of Artificial Sequence: Synthetic oligonucleotide
  Sense strand starting at position 2971 of SEQ ID NO: 1883541
ccuggugagaaugguuaua

SEQ ID NO: 2200573 - RNA, 19 nt, Artificial Sequence
  Description of Artificial Sequence: Synthetic oligonucleotide
  Antisense strand to SEQ ID NO: 2200572
uauaaccauucucaccagg

SEQ ID NO: 2200574 - RNA, 19 nt, Artificial Sequence
  Description of Artificial Sequence: Synthetic oligonucleotide
  Sense strand starting at position 759 of SEQ ID NO: 1883541
ucaucagaugcccauguua

SEQ ID NO: 2200575 - RNA, 19 nt, Artificial Sequence
  Description of Artificial Sequence: Synthetic oligonucleotide
  Antisense strand to SEQ ID NO: 2200574
uaacaugggcaucugauga

SEQ ID NO: 2200576 - RNA, 19 nt, Artificial Sequence
  Description of Artificial Sequence: Synthetic oligonucleotide
  Sense strand starting at position 3104 of SEQ ID NO: 1883541
ggugaugucaaggguacaa

SEQ ID NO: 2200577 - RNA, 19 nt, Artificial Sequence
  Description of Artificial Sequence: Synthetic oligonucleotide
  Antisense strand to SEQ ID NO: 2200576
uuguacccuugacaucacc

SEQ ID NO: 2200578 - RNA, 19 nt, Artificial Sequence
  Description of Artificial Sequence: Synthetic oligonucleotide
  Sense strand starting at position 3717 of SEQ ID NO: 1883541
uguaucuuuccagacuagu

SEQ ID NO: 2200579 - RNA, 19 nt, Artificial Sequence
  Description of Artificial Sequence: Synthetic oligonucleotide
  Antisense strand to SEQ ID NO: 2200578
acuagucuggaaagauaca

SEQ ID NO: 2200580 - RNA, 19 nt, Artificial Sequence
  Description of Artificial Sequence: Synthetic oligonucleotide
  Sense strand starting at position 2778 of SEQ ID NO: 1883541
uuuauuuguuugcuugagu

SEQ ID NO: 2200581 - RNA, 19 nt, Artificial Sequence
  Description of Artificial Sequence: Synthetic oligonucleotide
  Antisense strand to SEQ ID NO: 2200580
acucaagcaaacaaauaaa

SEQ ID NO: 2200582 - RNA, 19 nt, Artificial Sequence
  Description of Artificial Sequence: Synthetic oligonucleotide
  Sense strand starting at position 3120 of SEQ ID NO: 1883541
caaggacuuugagucaugu

SEQ ID NO: 2200583 - RNA, 19 nt, Artificial Sequence
  Description of Artificial Sequence: Synthetic oligonucleotide
  Antisense strand to SEQ ID NO: 2200582
acaugacucaaaguccuug

SEQ ID NO: 2200584 - RNA, 19 nt, Artificial Sequence
  Description of Artificial Sequence: Synthetic oligonucleotide
  Sense strand starting at position 782 of SEQ ID NO: 1883541
aaacaagacugagagauga

SEQ ID NO: 2200585 - RNA, 19 nt, Artificial Sequence
  Description of Artificial Sequence: Synthetic oligonucleotide
  Antisense strand to SEQ ID NO: 2200584
ucaucucucagucuuguuu

SEQ ID NO: 2200586 - RNA, 19 nt, Artificial Sequence
  Description of Artificial Sequence: Synthetic oligonucleotide
  Sense strand starting at position 3009 of SEQ ID NO: 1883541
auucuugggcucgaaaucu

SEQ ID NO: 2200587 - RNA, 19 nt, Artificial Sequence
  Description of Artificial Sequence: Synthetic oligonucleotide
  Antisense strand to SEQ ID NO: 2200586
agauuucgagcccaagaau

SEQ ID NO: 2200588 - RNA, 19 nt, Artificial Sequence
  Description of Artificial Sequence: Synthetic oligonucleotide
  Sense strand starting at position 3103 of SEQ ID NO: 1883541
gggugaugucaaggguaca

SEQ ID NO: 2200589 - RNA, 19 nt, Artificial Sequence
  Description of Artificial Sequence: Synthetic oligonucleotide
  Antisense strand to SEQ ID NO: 2200588
uguacccuugacaucaccc

SEQ ID NO: 2200590 - RNA, 19 nt, Artificial Sequence
  Description of Artificial Sequence: Synthetic oligonucleotide
  Sense strand starting at position 903 of SEQ ID NO: 1883541
gaacguuuccaagguaaga

SEQ ID NO: 2200591 - RNA, 19 nt, Artificial Sequence
  Description of Artificial Sequence: Synthetic oligonucleotide
  Antisense strand to SEQ ID NO: 2200590
ucuuaccuuggaaacguuc

SEQ ID NO: 2200592 - RNA, 19 nt, Artificial Sequence
  Description of Artificial Sequence: Synthetic oligonucleotide
  Sense strand starting at position 2861 of SEQ ID NO: 1883541
cuauacucugccgauuaau

SEQ ID NO: 2200593 - RNA, 19 nt, Artificial Sequence
  Description of Artificial Sequence: Synthetic oligonucleotide
  Antisense strand to SEQ ID NO: 2200592
auuaaucggcagaguauag

SEQ ID NO: 2200594 - RNA, 19 nt, Artificial Sequence
  Description of Artificial Sequence: Synthetic oligonucleotide
  Sense strand starting at position 1393 of SEQ ID NO: 1883541
gaucaaagaguaugugguu

SEQ ID NO: 2200595 - RNA, 19 nt, Artificial Sequence
  Description of Artificial Sequence: Synthetic oligonucleotide
  Antisense strand to SEQ ID NO: 2200594
aaccacauacucuuugauc

SEQ ID NO: 2200596 - RNA, 19 nt, Artificial Sequence
  Description of Artificial Sequence: Synthetic oligonucleotide
  Sense strand starting at position 1665 of SEQ ID NO: 1883542
gacagaugucuuugaggga

SEQ ID NO: 2200597 - RNA, 19 nt, Artificial Sequence
  Description of Artificial Sequence: Synthetic oligonucleotide
  Antisense strand to SEQ ID NO: 2200596
ucccucaaagacaucuguc

SEQ ID NO: 2200598 - RNA, 19 nt, Artificial Sequence
  Description of Artificial Sequence: Synthetic oligonucleotide
  Sense strand starting at position 1786 of SEQ ID NO: 1883542
guugauccucagggaggaa

SEQ ID NO: 2200599 - RNA, 19 nt, Artificial Sequence
  Description of Artificial Sequence: Synthetic oligonucleotide
  Antisense strand to SEQ ID NO: 2200598
uuccucccugaggaucaac

SEQ ID NO: 2200600 - RNA, 19 nt, Artificial Sequence
  Description of Artificial Sequence: Synthetic oligonucleotide
  Sense strand starting at position 2173 of SEQ ID NO: 1883542
gggaucucugugagcgagu

SEQ ID NO: 2200601 - RNA, 19 nt, Artificial Sequence
  Description of Artificial Sequence: Synthetic oligonucleotide
  Antisense strand to SEQ ID NO: 2200600
acucgcucacagagauccc

SEQ ID NO: 2200602 - RNA, 19 nt, Artificial Sequence
  Description of Artificial Sequence: Synthetic oligonucleotide
  Sense strand starting at position 1891 of SEQ ID NO: 1883542
uggauaucugcagaacuuc

SEQ ID NO: 2200603 - RNA, 19 nt, Artificial Sequence
  Description of Artificial Sequence: Synthetic oligonucleotide
  Antisense strand to SEQ ID NO: 2200602
gaaguucugcagauaucca

SEQ ID NO: 2200604 - RNA, 19 nt, Artificial Sequence
  Description of Artificial Sequence: Synthetic oligonucleotide
  Sense strand starting at position 1889 of SEQ ID NO: 1883542
cuuggauaucugcagaacu

SEQ ID NO: 2200605 - RNA, 19 nt, Artificial Sequence
  Description of Artificial Sequence: Synthetic oligonucleotide
  Antisense strand to SEQ ID NO: 2200604
aguucugcagauauccaag

SEQ ID NO: 2200606 - RNA, 19 nt, Artificial Sequence
  Description of Artificial Sequence: Synthetic oligonucleotide
  Sense strand starting at position 367 of SEQ ID NO: 1883542
gucauuucuaacugagugu

SEQ ID NO: 2200607 - RNA, 19 nt, Artificial Sequence
  Description of Artificial Sequence: Synthetic oligonucleotide
  Antisense strand to SEQ ID NO: 2200606
acacucaguuagaaaugac

SEQ ID NO: 2200608 - RNA, 19 nt, Artificial Sequence
  Description of Artificial Sequence: Synthetic oligonucleotide
  Sense strand starting at position 693 of SEQ ID NO: 1883542
cuagauugaguugagucua

SEQ ID NO: 2200609 - RNA, 19 nt, Artificial Sequence
  Description of Artificial Sequence: Synthetic oligonucleotide
  Antisense strand to SEQ ID NO: 2200608
uagacucaacucaaucuag

SEQ ID NO: 2200610 - RNA, 19 nt, Artificial Sequence
  Description of Artificial Sequence: Synthetic oligonucleotide
  Sense strand starting at position 359 of SEQ ID NO: 1883542
cccugcuggucauuucuaa

SEQ ID NO: 2200611 - RNA, 19 nt, Artificial Sequence
  Description of Artificial Sequence: Synthetic oligonucleotide
  Antisense strand to SEQ ID NO: 2200610
uuagaaaugaccagcaggg

SEQ ID NO: 2200612 - RNA, 19 nt, Artificial Sequence
  Description of Artificial Sequence: Synthetic oligonucleotide
  Sense strand starting at position 1750 of SEQ ID NO: 1883542
aggucaagaccuugacuua

SEQ ID NO: 2200613 - RNA, 19 nt, Artificial Sequence
  Description of Artificial Sequence: Synthetic oligonucleotide
  Antisense strand to SEQ ID NO: 2200612
uaagucaaggucuugaccu

SEQ ID NO: 2200614 - RNA, 19 nt, Artificial Sequence
  Description of Artificial Sequence: Synthetic oligonucleotide
  Sense strand starting at position 3357 of SEQ ID NO: 1883542
agggauuggcagggucaaa

SEQ ID NO: 2200615 - RNA, 19 nt, Artificial Sequence
  Description of Artificial Sequence: Synthetic oligonucleotide
  Antisense strand to SEQ ID NO: 2200614
uuugacccugccaaucccu

SEQ ID NO: 2200616 - RNA, 19 nt, Artificial Sequence
  Description of Artificial Sequence: Synthetic oligonucleotide
  Sense strand starting at position 1886 of SEQ ID NO: 1883542
ggacuuggauaucugcaga

SEQ ID NO: 2200617 - RNA, 19 nt, Artificial Sequence
  Description of Artificial Sequence: Synthetic oligonucleotide
  Antisense strand to SEQ ID NO: 2200616
ucugcagauauccaagucc

SEQ ID NO: 2200618 - RNA, 19 nt, Artificial Sequence
  Description of Artificial Sequence: Synthetic oligonucleotide
  Sense strand starting at position 3596 of SEQ ID NO: 1883542
ugagauauugggcaugcau

SEQ ID NO: 2200619 - RNA, 19 nt, Artificial Sequence
  Description of Artificial Sequence: Synthetic oligonucleotide
  Antisense strand to SEQ ID NO: 2200618
augcaugcccaauaucuca

SEQ ID NO: 2200620 - RNA, 19 nt, Artificial Sequence
  Description of Artificial Sequence: Synthetic oligonucleotide
  Sense strand starting at position 3584 of SEQ ID NO: 1883542
agcccaaaccuuugagaua

SEQ ID NO: 2200621 - RNA, 19 nt, Artificial Sequence
  Description of Artificial Sequence: Synthetic oligonucleotide
  Antisense strand to SEQ ID NO: 2200620
uaucucaaagguuugggcu

SEQ ID NO: 2200622 - RNA, 19 nt, Artificial Sequence
  Description of Artificial Sequence: Synthetic oligonucleotide
  Sense strand starting at position 1740 of SEQ ID NO: 1883542
acaaguccuuaggucaaga

SEQ ID NO: 2200623 - RNA, 19 nt, Artificial Sequence
  Description of Artificial Sequence: Synthetic oligonucleotide
  Antisense strand to SEQ ID NO: 2200622
ucuugaccuaaggacuugu

SEQ ID NO: 2200624 - RNA, 19 nt, Artificial Sequence
  Description of Artificial Sequence: Synthetic oligonucleotide
  Sense strand starting at position 3671 of SEQ ID NO: 1883542
auuaguugccauuauaaug

SEQ ID NO: 2200625 - RNA, 19 nt, Artificial Sequence
  Description of Artificial Sequence: Synthetic oligonucleotide
  Antisense strand to SEQ ID NO: 2200624
cauuauaauggcaacuaau

SEQ ID NO: 2200626 - RNA, 19 nt, Artificial Sequence
  Description of Artificial Sequence: Synthetic oligonucleotide
  Sense strand starting at position 3356 of SEQ ID NO: 1883542
cagggauuggcagggucaa

SEQ ID NO: 2200627 - RNA, 19 nt, Artificial Sequence
  Description of Artificial Sequence: Synthetic oligonucleotide
  Antisense strand to SEQ ID NO: 2200626
uugacccugccaaucccug

SEQ ID NO: 2200628 - RNA, 19 nt, Artificial Sequence
  Description of Artificial Sequence: Synthetic oligonucleotide
  Sense strand starting at position 1782 of SEQ ID NO: 1883542
agguguugauccucaggga

SEQ ID NO: 2200629 - RNA, 19 nt, Artificial Sequence
  Description of Artificial Sequence: Synthetic oligonucleotide
  Antisense strand to SEQ ID NO: 2200628
ucccugaggaucaacaccu

SEQ ID NO: 2200630 - RNA, 19 nt, Artificial Sequence
  Description of Artificial Sequence: Synthetic oligonucleotide
  Sense strand starting at position 376 of SEQ ID NO: 1883542
aacugaguguuuccacaga

SEQ ID NO: 2200631 - RNA, 19 nt, Artificial Sequence
  Description of Artificial Sequence: Synthetic oligonucleotide
  Antisense strand to SEQ ID NO: 2200630
ucuguggaaacacucaguu

SEQ ID NO: 2200632 - RNA, 19 nt, Artificial Sequence
  Description of Artificial Sequence: Synthetic oligonucleotide
  Sense strand starting at position 982 of SEQ ID NO: 1883542
ggauuccugccuuaacuuu

SEQ ID NO: 2200633 - RNA, 19 nt, Artificial Sequence
  Description of Artificial Sequence: Synthetic oligonucleotide
  Antisense strand to SEQ ID NO: 2200632
aaaguuaaggcaggaaucc

SEQ ID NO: 2200634 - RNA, 19 nt, Artificial Sequence
  Description of Artificial Sequence: Synthetic oligonucleotide
  Sense strand starting at position 2198 of SEQ ID NO: 1883542
guaggaucugcggagaucu

SEQ ID NO: 2200635 - RNA, 19 nt, Artificial Sequence
  Description of Artificial Sequence: Synthetic oligonucleotide
  Antisense strand to SEQ ID NO: 2200634
agaucuccgcagauccuac

SEQ ID NO: 2200636 - RNA, 19 nt, Artificial Sequence
  Description of Artificial Sequence: Synthetic oligonucleotide
  Sense strand starting at position 1737 of SEQ ID NO: 1883542
guuacaaguccuuagguca

SEQ ID NO: 2200637 - RNA, 19 nt, Artificial Sequence
  Description of Artificial Sequence: Synthetic oligonucleotide
  Antisense strand to SEQ ID NO: 2200636
ugaccuaaggacuuguaac

SEQ ID NO: 2200638 - RNA, 19 nt, Artificial Sequence
  Description of Artificial Sequence: Synthetic oligonucleotide
  Sense strand starting at position 3595 of SEQ ID NO: 1883542
uugagauauugggcaugca

SEQ ID NO: 2200639 - RNA, 19 nt, Artificial Sequence
  Description of Artificial Sequence: Synthetic oligonucleotide
  Antisense strand to SEQ ID NO: 2200638
ugcaugcccaauaucucaa

SEQ ID NO: 2200640 - RNA, 19 nt, Artificial Sequence
  Description of Artificial Sequence: Synthetic oligonucleotide
  Sense strand starting at position 1021 of SEQ ID NO: 1883542
ccauguuccagagacgcua

SEQ ID NO: 2200641 - RNA, 19 nt, Artificial Sequence
  Description of Artificial Sequence: Synthetic oligonucleotide
  Antisense strand to SEQ ID NO: 2200640
uagcgucucuggaacaugg

SEQ ID NO: 2200642 - RNA, 19 nt, Artificial Sequence
  Description of Artificial Sequence: Synthetic oligonucleotide
  Sense strand starting at position 3728 of SEQ ID NO: 1883542
ugauuugccuaggaauaau

SEQ ID NO: 2200643 - RNA, 19 nt, Artificial Sequence
  Description of Artificial Sequence: Synthetic oligonucleotide
  Antisense strand to SEQ ID NO: 2200642
auuauuccuaggcaaauca

SEQ ID NO: 2200644 - RNA, 19 nt, Artificial Sequence
  Description of Artificial Sequence: Synthetic oligonucleotide
  Sense strand starting at position 3769 of SEQ ID NO: 1883542
cugaaacucggaggcuauu

SEQ ID NO: 2200645 - RNA, 19 nt, Artificial Sequence
  Description of Artificial Sequence: Synthetic oligonucleotide
  Antisense strand to SEQ ID NO: 2200644
aauagccuccgaguuucag

SEQ ID NO: 2200646 - RNA, 19 nt, Artificial Sequence
  Description of Artificial Sequence: Synthetic oligonucleotide
  Sense strand starting at position 692 of SEQ ID NO: 1883542
ucuagauugaguugagucu

SEQ ID NO: 2200647 - RNA, 19 nt, Artificial Sequence
  Description of Artificial Sequence: Synthetic oligonucleotide
  Antisense strand to SEQ ID NO: 2200646
agacucaacucaaucuaga

SEQ ID NO: 2200648 - RNA, 19 nt, Artificial Sequence
  Description of Artificial Sequence: Synthetic oligonucleotide
  Sense strand starting at position 1849 of SEQ ID NO: 1883542
ugaaaugccuugccugaaa

SEQ ID NO: 2200649 - RNA, 19 nt, Artificial Sequence
  Description of Artificial Sequence: Synthetic oligonucleotide
  Antisense strand to SEQ ID NO: 2200648
uuucaggcaaggcauuuca

SEQ ID NO: 2200650 - RNA, 19 nt, Artificial Sequence
  Description of Artificial Sequence: Synthetic oligonucleotide
  Sense strand starting at position 374 of SEQ ID NO: 1883542
cuaacugaguguuuccaca

SEQ ID NO: 2200651 - RNA, 19 nt, Artificial Sequence
  Description of Artificial Sequence: Synthetic oligonucleotide
  Antisense strand to SEQ ID NO: 2200650
uguggaaacacucaguuag

SEQ ID NO: 2200652 - RNA, 19 nt, Artificial Sequence
  Description of Artificial Sequence: Synthetic oligonucleotide
  Sense strand starting at position 2187 of SEQ ID NO: 1883542
cgaguguuuggguaggauc

SEQ ID NO: 2200653 - RNA, 19 nt, Artificial Sequence
  Description of Artificial Sequence: Synthetic oligonucleotide
  Antisense strand to SEQ ID NO: 2200652
gauccuacccaaacacucg

SEQ ID NO: 2200654 - RNA, 19 nt, Artificial Sequence
  Description of Artificial Sequence: Synthetic oligonucleotide
  Sense strand starting at position 3667 of SEQ ID NO: 1883542
auggauuaguugccauuau

SEQ ID NO: 2200655 - RNA, 19 nt, Artificial Sequence
  Description of Artificial Sequence: Synthetic oligonucleotide
  Antisense strand to SEQ ID NO: 2200654
auaauggcaacuaauccau

SEQ ID NO: 2200656 - RNA, 19 nt, Artificial Sequence
  Description of Artificial Sequence: Synthetic oligonucleotide
  Sense strand starting at position 699 of SEQ ID NO: 1883542
ugaguugagucuaggagag

SEQ ID NO: 2200657 - RNA, 19 nt, Artificial Sequence
  Description of Artificial Sequence: Synthetic oligonucleotide
  Antisense strand to SEQ ID NO: 2200656
cucuccuagacucaacuca

SEQ ID NO: 2200658 - RNA, 19 nt, Artificial Sequence
  Description of Artificial Sequence: Synthetic oligonucleotide
  Sense strand starting at position 682 of SEQ ID NO: 1883542
ugugcuaagcucuagauug

SEQ ID NO: 2200659 - RNA, 19 nt, Artificial Sequence
  Description of Artificial Sequence: Synthetic oligonucleotide
  Antisense strand to SEQ ID NO: 2200658
caaucuagagcuuagcaca

SEQ ID NO: 2200660 - RNA, 19 nt, Artificial Sequence
  Description of Artificial Sequence: Synthetic oligonucleotide
  Sense strand starting at position 3379 of SEQ ID NO: 1883542
gugguaauuaauuggguuu

SEQ ID NO: 2200661 - RNA, 19 nt, Artificial Sequence
  Description of Artificial Sequence: Synthetic oligonucleotide
  Antisense strand to SEQ ID NO: 2200660
aaacccaauuaauuaccac

SEQ ID NO: 2200662 - RNA, 19 nt, Artificial Sequence
  Description of Artificial Sequence: Synthetic oligonucleotide
  Sense strand starting at position 3563 of SEQ ID NO: 1883542
uaguguagugugggaauau

SEQ ID NO: 2200663 - RNA, 19 nt, Artificial Sequence
  Description of Artificial Sequence: Synthetic oligonucleotide
  Antisense strand to SEQ ID NO: 2200662
auauucccacacuacacua

SEQ ID NO: 2200664 - RNA, 19 nt, Artificial Sequence
  Description of Artificial Sequence: Synthetic oligonucleotide
  Sense strand starting at position 690 of SEQ ID NO: 1883542
gcucuagauugaguugagu

SEQ ID NO: 2200665 - RNA, 19 nt, Artificial Sequence
  Description of Artificial Sequence: Synthetic oligonucleotide
  Antisense strand to SEQ ID NO: 2200664
acucaacucaaucuagagc

SEQ ID NO: 2200666 - RNA, 19 nt, Artificial Sequence
  Description of Artificial Sequence: Synthetic oligonucleotide
  Sense strand starting at position 1851 of SEQ ID NO: 1883542
aaaugccuugccugaaagu

SEQ ID NO: 2200667 - RNA, 19 nt, Artificial Sequence
  Description of Artificial Sequence: Synthetic oligonucleotide
  Antisense strand to SEQ ID NO: 2200666
acuuucaggcaaggcauuu

SEQ ID NO: 2200668 - RNA, 19 nt, Artificial Sequence
  Description of Artificial Sequence: Synthetic oligonucleotide
  Sense strand starting at position 3561 of SEQ ID NO: 1883542
ccuaguguagugugggaau

SEQ ID NO: 2200669 - RNA, 19 nt, Artificial Sequence
  Description of Artificial Sequence: Synthetic oligonucleotide
  Antisense strand to SEQ ID NO: 2200668
auucccacacuacacuagg

SEQ ID NO: 2200670 - RNA, 19 nt, Artificial Sequence
  Description of Artificial Sequence: Synthetic oligonucleotide
  Sense strand starting at position 3840 of SEQ ID NO: 1883542
agagcuugugaauggcagu

SEQ ID NO: 2200671 - RNA, 19 nt, Artificial Sequence
  Description of Artificial Sequence: Synthetic oligonucleotide
  Antisense strand to SEQ ID NO: 2200670
acugccauucacaagcucu

SEQ ID NO: 2200672 - RNA, 19 nt, Artificial Sequence
  Description of Artificial Sequence: Synthetic oligonucleotide
  Sense strand starting at position 976 of SEQ ID NO: 1883542
gccugaggauuccugccuu

SEQ ID NO: 2200673 - RNA, 19 nt, Artificial Sequence
  Description of Artificial Sequence: Synthetic oligonucleotide
  Antisense strand to SEQ ID NO: 2200672
aaggcaggaauccucaggc

SEQ ID NO: 2200674 - RNA, 19 nt, Artificial Sequence
  Description of Artificial Sequence: Synthetic oligonucleotide
  Sense strand starting at position 402 of SEQ ID NO: 1883542
acugaacuuugggaauuau

SEQ ID NO: 2200675 - RNA, 19 nt, Artificial Sequence
  Description of Artificial Sequence: Synthetic oligonucleotide
  Antisense strand to SEQ ID NO: 2200674
auaauucccaaaguucagu

SEQ ID NO: 2200676 - RNA, 19 nt, Artificial Sequence
  Description of Artificial Sequence: Synthetic oligonucleotide
  Sense strand starting at position 3042 of SEQ ID NO: 1883543
ccuguuucccaagagaacu

SEQ ID NO: 2200677 - RNA, 19 nt, Artificial Sequence
  Description of Artificial Sequence: Synthetic oligonucleotide
  Antisense strand to SEQ ID NO: 2200676
aguucucuugggaaacagg

SEQ ID NO: 2200678 - RNA, 19 nt, Artificial Sequence
  Description of Artificial Sequence: Synthetic oligonucleotide
  Sense strand starting at position 3709 of SEQ ID NO: 1883543
gcgguuacagccucaguua

SEQ ID NO: 2200679 - RNA, 19 nt, Artificial Sequence
  Description of Artificial Sequence: Synthetic oligonucleotide
  Antisense strand to SEQ ID NO: 2200678
uaacugaggcuguaaccgc

SEQ ID NO: 2200680 - RNA, 19 nt, Artificial Sequence
  Description of Artificial Sequence: Synthetic oligonucleotide
  Sense strand starting at position 2560 of SEQ ID NO: 1883543
cgucacaugaagggaaaua

SEQ ID NO: 2200681 - RNA, 19 nt, Artificial Sequence
  Description of Artificial Sequence: Synthetic oligonucleotide
  Antisense strand to SEQ ID NO: 2200680
uauuucccuucaugugacg

SEQ ID NO: 2200682 - RNA, 19 nt, Artificial Sequence
  Description of Artificial Sequence: Synthetic oligonucleotide
  Sense strand starting at position 1349 of SEQ ID NO: 1883543
acagaaggacuucgugaaa

SEQ ID NO: 2200683 - RNA, 19 nt, Artificial Sequence
  Description of Artificial Sequence: Synthetic oligonucleotide
  Antisense strand to SEQ ID NO: 2200682
uuucacgaaguccuucugu

SEQ ID NO: 2200684 - RNA, 19 nt, Artificial Sequence
  Description of Artificial Sequence: Synthetic oligonucleotide
  Sense strand starting at position 2922 of SEQ ID NO: 1883543
guuucuccaggagaucuua

SEQ ID NO: 2200685 - RNA, 19 nt, Artificial Sequence
  Description of Artificial Sequence: Synthetic oligonucleotide
  Antisense strand to SEQ ID NO: 2200684
uaagaucuccuggagaaac

SEQ ID NO: 2200686 - RNA, 19 nt, Artificial Sequence
  Description of Artificial Sequence: Synthetic oligonucleotide
  Sense strand starting at position 2920 of SEQ ID NO: 1883543
uaguuucuccaggagaucu

SEQ ID NO: 2200687 - RNA, 19 nt, Artificial Sequence
  Description of Artificial Sequence: Synthetic oligonucleotide
  Antisense strand to SEQ ID NO: 2200686
agaucuccuggagaaacua

SEQ ID NO: 2200688 - RNA, 19 nt, Artificial Sequence
  Description of Artificial Sequence: Synthetic oligonucleotide
  Sense strand starting at position 2103 of SEQ ID NO: 1883543
uaaaucacuguuugggaga

SEQ ID NO: 2200689 - RNA, 19 nt, Artificial Sequence
  Description of Artificial Sequence: Synthetic oligonucleotide
  Antisense strand to SEQ ID NO: 2200688
ucucccaaacagugauuua

SEQ ID NO: 2200690 - RNA, 19 nt, Artificial Sequence
  Description of Artificial Sequence: Synthetic oligonucleotide
  Sense strand starting at position 1572 of SEQ ID NO: 1883543
ggagcucugagucaucaaa

SEQ ID NO: 2200691 - RNA, 19 nt, Artificial Sequence
  Description of Artificial Sequence: Synthetic oligonucleotide
  Antisense strand to SEQ ID NO: 2200690
uuugaugacucagagcucc

SEQ ID NO: 2200692 - RNA, 19 nt, Artificial Sequence
  Description of Artificial Sequence: Synthetic oligonucleotide
  Sense strand starting at position 3127 of SEQ ID NO: 1883543
aucucaaaugcaugaagau

SEQ ID NO: 2200693 - RNA, 19 nt, Artificial Sequence
  Description of Artificial Sequence: Synthetic oligonucleotide
  Antisense strand to SEQ ID NO: 2200692
aucuucaugcauuugagau

SEQ ID NO: 2200694 - RNA, 19 nt, Artificial Sequence
  Description of Artificial Sequence: Synthetic oligonucleotide
  Sense strand starting at position 1352 of SEQ ID NO: 1883543
gaaggacuucgugaaaugu

SEQ ID NO: 2200695 - RNA, 19 nt, Artificial Sequence
  Description of Artificial Sequence: Synthetic oligonucleotide
  Antisense strand to SEQ ID NO: 2200694
acauuucacgaaguccuuc

SEQ ID NO: 2200696 - RNA, 19 nt, Artificial Sequence
  Description of Artificial Sequence: Synthetic oligonucleotide
  Sense strand starting at position 3963 of SEQ ID NO: 1883543
gggagcugucuggaacauu

SEQ ID NO: 2200697 - RNA, 19 nt, Artificial Sequence
  Description of Artificial Sequence: Synthetic oligonucleotide
  Antisense strand to SEQ ID NO: 2200696
aauguuccagacagcuccc

SEQ ID NO: 2200698 - RNA, 19 nt, Artificial Sequence
  Description of Artificial Sequence: Synthetic oligonucleotide
  Sense strand starting at position 1429 of SEQ ID NO: 1883543
caggaagaugcguacauau

SEQ ID NO: 2200699 - RNA, 19 nt, Artificial Sequence
  Description of Artificial Sequence: Synthetic oligonucleotide
  Antisense strand to SEQ ID NO: 2200698
auauguacgcaucuuccug

SEQ ID NO: 2200700 - RNA, 19 nt, Artificial Sequence
  Description of Artificial Sequence: Synthetic oligonucleotide
  Sense strand starting at position 3627 of SEQ ID NO: 1883543
ggucuuugaugacucagag

SEQ ID NO: 2200701 - RNA, 19 nt, Artificial Sequence
  Description of Artificial Sequence: Synthetic oligonucleotide
  Antisense strand to SEQ ID NO: 2200700
cucugagucaucaaagacc

SEQ ID NO: 2200702 - RNA, 19 nt, Artificial Sequence
  Description of Artificial Sequence: Synthetic oligonucleotide
  Sense strand starting at position 2895 of SEQ ID NO: 1883543
gauagugaucaaggcugga

SEQ ID NO: 2200703 - RNA, 19 nt, Artificial Sequence
  Description of Artificial Sequence: Synthetic oligonucleotide
  Antisense strand to SEQ ID NO: 2200702
uccagccuugaucacuauc

SEQ ID NO: 2200704 - RNA, 19 nt, Artificial Sequence
  Description of Artificial Sequence: Synthetic oligonucleotide
  Sense strand starting at position 1098 of SEQ ID NO: 1883543
aaaucaagccauggucaga

SEQ ID NO: 2200705 - RNA, 19 nt, Artificial Sequence
  Description of Artificial Sequence: Synthetic oligonucleotide
  Antisense strand to SEQ ID NO: 2200704
ucugaccauggcuugauuu

SEQ ID NO: 2200706 - RNA, 19 nt, Artificial Sequence
  Description of Artificial Sequence: Synthetic oligonucleotide
  Sense strand starting at position 2055 of SEQ ID NO: 1883543
ucaguuauacgguaaucaa

SEQ ID NO: 2200707 - RNA, 19 nt, Artificial Sequence
  Description of Artificial Sequence: Synthetic oligonucleotide
  Antisense strand to SEQ ID NO: 2200706
uugauuaccguauaacuga

SEQ ID NO: 2200708 - RNA, 19 nt, Artificial Sequence
  Description of Artificial Sequence: Synthetic oligonucleotide
  Sense strand starting at position 2131 of SEQ ID NO: 1883543
aggugagucaccugaugag

SEQ ID NO: 2200709 - RNA, 19 nt, Artificial Sequence
  Description of Artificial Sequence: Synthetic oligonucleotide
  Antisense strand to SEQ ID NO: 2200708
cucaucaggugacucaccu

SEQ ID NO: 2200710 - RNA, 19 nt, Artificial Sequence
  Description of Artificial Sequence: Synthetic oligonucleotide
  Sense strand starting at position 3973 of SEQ ID NO: 1883543
uggaacauuccgcaaguga

SEQ ID NO: 2200711 - RNA, 19 nt, Artificial Sequence
  Description of Artificial Sequence: Synthetic oligonucleotide
  Antisense strand to SEQ ID NO: 2200710
ucacuugcggaauguucca

SEQ ID NO: 2200712 - RNA, 19 nt, Artificial Sequence
  Description of Artificial Sequence: Synthetic oligonucleotide
  Sense strand starting at position 1574 of SEQ ID NO: 1883543
agcucugagucaucaaaga

SEQ ID NO: 2200713 - RNA, 19 nt, Artificial Sequence
  Description of Artificial Sequence: Synthetic oligonucleotide
  Antisense strand to SEQ ID NO: 2200712
ucuuugaugacucagagcu

SEQ ID NO: 2200714 - RNA, 19 nt, Artificial Sequence
  Description of Artificial Sequence: Synthetic oligonucleotide
  Sense strand starting at position 1428 of SEQ ID NO: 1883543
acaggaagaugcguacaua

SEQ ID NO: 2200715 - RNA, 19 nt, Artificial Sequence
  Description of Artificial Sequence: Synthetic oligonucleotide
  Antisense strand to SEQ ID NO: 2200714
uauguacgcaucuuccugu

SEQ ID NO: 2200716 - RNA, 19 nt, Artificial Sequence
  Description of Artificial Sequence: Synthetic oligonucleotide
  Sense strand starting at position 2975 of SEQ ID NO: 1883543
gguugaagccugcagaaug

SEQ ID NO: 2200717 - RNA, 19 nt, Artificial Sequence
  Description of Artificial Sequence: Synthetic oligonucleotide
  Antisense strand to SEQ ID NO: 2200716
cauucugcaggcuucaacc

SEQ ID NO: 2200718 - RNA, 19 nt, Artificial Sequence
  Description of Artificial Sequence: Synthetic oligonucleotide
  Sense strand starting at position 1703 of SEQ ID NO: 1883543
aacugaggcuguuccagaa

SEQ ID NO: 2200719 - RNA, 19 nt, Artificial Sequence
  Description of Artificial Sequence: Synthetic oligonucleotide
  Antisense strand to SEQ ID NO: 2200718
uucuggaacagccucaguu

SEQ ID NO: 2200720 - RNA, 19 nt, Artificial Sequence
  Description of Artificial Sequence: Synthetic oligonucleotide
  Sense strand starting at position 1195 of SEQ ID NO: 1883543
ccuauaaaguugucaccaa

SEQ ID NO: 2200721 - RNA, 19 nt, Artificial Sequence
  Description of Artificial Sequence: Synthetic oligonucleotide
  Antisense strand to SEQ ID NO: 2200720
uuggugacaacuuuauagg

SEQ ID NO: 2200722 - RNA, 19 nt, Artificial Sequence
  Description of Artificial Sequence: Synthetic oligonucleotide
  Sense strand starting at position 2489 of SEQ ID NO: 1883543
ggcaaaccaucuguauaau

SEQ ID NO: 2200723 - RNA, 19 nt, Artificial Sequence
  Description of Artificial Sequence: Synthetic oligonucleotide
  Antisense strand to SEQ ID NO: 2200722
auuauacagaugguuugcc

SEQ ID NO: 2200724 - RNA, 19 nt, Artificial Sequence
  Description of Artificial Sequence: Synthetic oligonucleotide
  Sense strand starting at position 2089 of SEQ ID NO: 1883543
gguaacccauguucuaaau

SEQ ID NO: 2200725 - RNA, 19 nt, Artificial Sequence
  Description of Artificial Sequence: Synthetic oligonucleotide
  Antisense strand to SEQ ID NO: 2200724
auuuagaacauggguuacc

SEQ ID NO: 2200726 - RNA, 19 nt, Artificial Sequence
  Description of Artificial Sequence: Synthetic oligonucleotide
  Sense strand starting at position 3961 of SEQ ID NO: 1883543
cugggagcugucuggaaca

SEQ ID NO: 2200727 - RNA, 19 nt, Artificial Sequence
  Description of Artificial Sequence: Synthetic oligonucleotide
  Antisense strand to SEQ ID NO: 2200726
uguuccagacagcucccag

SEQ ID NO: 2200728 - RNA, 19 nt, Artificial Sequence
  Description of Artificial Sequence: Synthetic oligonucleotide
  Sense strand starting at position 1124 of SEQ ID NO: 1883543
acugcaacacucugagagu

SEQ ID NO: 2200729 - RNA, 19 nt, Artificial Sequence
  Description of Artificial Sequence: Synthetic oligonucleotide
  Antisense strand to SEQ ID NO: 2200728
acucucagaguguugcagu

SEQ ID NO: 2200730 - RNA, 19 nt, Artificial Sequence
  Description of Artificial Sequence: Synthetic oligonucleotide
  Sense strand starting at position 3533 of SEQ ID NO: 1883543
cgcuuuguugcggcauuaa

SEQ ID NO: 2200731 - RNA, 19 nt, Artificial Sequence
  Description of Artificial Sequence: Synthetic oligonucleotide
  Antisense strand to SEQ ID NO: 2200730
uuaaugccgcaacaaagcg

SEQ ID NO: 2200732 - RNA, 19 nt, Artificial Sequence
  Description of Artificial Sequence: Synthetic oligonucleotide
  Sense strand starting at position 2919 of SEQ ID NO: 1883543
guaguuucuccaggagauc

SEQ ID NO: 2200733 - RNA, 19 nt, Artificial Sequence
  Description of Artificial Sequence: Synthetic oligonucleotide
  Antisense strand to SEQ ID NO: 2200732
gaucuccuggagaaacuac

SEQ ID NO: 2200734 - RNA, 19 nt, Artificial Sequence
  Description of Artificial Sequence: Synthetic oligonucleotide
  Sense strand starting at position 3136 of SEQ ID NO: 1883543
gcaugaagauguccuuacu

SEQ ID NO: 2200735 - RNA, 19 nt, Artificial Sequence
  Description of Artificial Sequence: Synthetic oligonucleotide
  Antisense strand to SEQ ID NO: 2200734
aguaaggacaucuucaugc

SEQ ID NO: 2200736 - RNA, 19 nt, Artificial Sequence
  Description of Artificial Sequence: Synthetic oligonucleotide
  Sense strand starting at position 2086 of SEQ ID NO: 1883543
ccagguaacccauguucua

SEQ ID NO: 2200737 - RNA, 19 nt, Artificial Sequence
  Description of Artificial Sequence: Synthetic oligonucleotide
  Antisense strand to SEQ ID NO: 2200736
uagaacauggguuaccugg

SEQ ID NO: 2200738 - RNA, 19 nt, Artificial Sequence
  Description of Artificial Sequence: Synthetic oligonucleotide
  Sense strand starting at position 1227 of SEQ ID NO: 1883543
uacucacuugcggaauguu

SEQ ID NO: 2200739 - RNA, 19 nt, Artificial Sequence
  Description of Artificial Sequence: Synthetic oligonucleotide
  Antisense strand to SEQ ID NO: 2200738
aacauuccgcaagugagua

SEQ ID NO: 2200740 - RNA, 19 nt, Artificial Sequence
  Description of Artificial Sequence: Synthetic oligonucleotide
  Sense strand starting at position 2915 of SEQ ID NO: 1883543
gguaguaguuucuccagga

SEQ ID NO: 2200741 - RNA, 19 nt, Artificial Sequence
  Description of Artificial Sequence: Synthetic oligonucleotide
  Antisense strand to SEQ ID NO: 2200740
uccuggagaaacuacuacc

SEQ ID NO: 2200742 - RNA, 19 nt, Artificial Sequence
  Description of Artificial Sequence: Synthetic oligonucleotide
  Sense strand starting at position 2916 of SEQ ID NO: 1883543
guaguaguuucuccaggag

SEQ ID NO: 2200743 - RNA, 19 nt, Artificial Sequence
  Description of Artificial Sequence: Synthetic oligonucleotide
  Antisense strand to SEQ ID NO: 2200742
cuccuggagaaacuacuac

SEQ ID NO: 2200744 - RNA, 19 nt, Artificial Sequence
  Description of Artificial Sequence: Synthetic oligonucleotide
  Sense strand starting at position 3010 of SEQ ID NO: 1883543
agucuugggucuucuggau

SEQ ID NO: 2200745 - RNA, 19 nt, Artificial Sequence
  Description of Artificial Sequence: Synthetic oligonucleotide
  Antisense strand to SEQ ID NO: 2200744
auccagaagacccaagacu

SEQ ID NO: 2200746 - RNA, 19 nt, Artificial Sequence
  Description of Artificial Sequence: Synthetic oligonucleotide
  Sense strand starting at position 3030 of SEQ ID NO: 1883543
uugagacuauguccuguuu

SEQ ID NO: 2200747 - RNA, 19 nt, Artificial Sequence
  Description of Artificial Sequence: Synthetic oligonucleotide
  Antisense strand to SEQ ID NO: 2200746
aaacaggacauagucucaa

SEQ ID NO: 2200748 - RNA, 19 nt, Artificial Sequence
  Description of Artificial Sequence: Synthetic oligonucleotide
  Sense strand starting at position 3710 of SEQ ID NO: 1883543
cgguuacagccucaguuaa

SEQ ID NO: 2200749 - RNA, 19 nt, Artificial Sequence
  Description of Artificial Sequence: Synthetic oligonucleotide
  Antisense strand to SEQ ID NO: 2200748
uuaacugaggcuguaaccg

SEQ ID NO: 2200750 - RNA, 19 nt, Artificial Sequence
  Description of Artificial Sequence: Synthetic oligonucleotide
  Sense strand starting at position 3061 of SEQ ID NO: 1883543
aggagcaggucuuuguauu

SEQ ID NO: 2200751 - RNA, 19 nt, Artificial Sequence
  Description of Artificial Sequence: Synthetic oligonucleotide
  Antisense strand to SEQ ID NO: 2200750
aauacaaagaccugcuccu

SEQ ID NO: 2200752 - RNA, 19 nt, Artificial Sequence
  Description of Artificial Sequence: Synthetic oligonucleotide
  Sense strand starting at position 2014 of SEQ ID NO: 1883543
uuacauggauuggaauaga

SEQ ID NO: 2200753 - RNA, 19 nt, Artificial Sequence
  Description of Artificial Sequence: Synthetic oligonucleotide
  Antisense strand to SEQ ID NO: 2200752
ucuauuccaauccauguaa

SEQ ID NO: 2200754 - RNA, 19 nt, Artificial Sequence
  Description of Artificial Sequence: Synthetic oligonucleotide
  Sense strand starting at position 2973 of SEQ ID NO: 1883543
cugguugaagccugcagaa

SEQ ID NO: 2200755 - RNA, 19 nt, Artificial Sequence
  Description of Artificial Sequence: Synthetic oligonucleotide
  Antisense strand to SEQ ID NO: 2200754
uucugcaggcuucaaccag

SEQ ID NO: 2200756 - RNA, 19 nt, Artificial Sequence
  Description of Artificial Sequence: Synthetic oligonucleotide
  Sense strand starting at position 2854 of SEQ ID NO: 1883544
uuuguauuccuugaaugaa

SEQ ID NO: 2200757 - RNA, 19 nt, Artificial Sequence
  Description of Artificial Sequence: Synthetic oligonucleotide
  Antisense strand to SEQ ID NO: 2200756
uucauucaaggaauacaaa

SEQ ID NO: 2200758 - RNA, 19 nt, Artificial Sequence
  Description of Artificial Sequence: Synthetic oligonucleotide
  Sense strand starting at position 3708 of SEQ ID NO: 1883544
gcgguuacagccucaguua

SEQ ID NO: 2200759 - RNA, 19 nt, Artificial Sequence
  Description of Artificial Sequence: Synthetic oligonucleotide
  Antisense strand to SEQ ID NO: 2200758
uaacugaggcuguaaccgc

SEQ ID NO: 2200760 - RNA, 19 nt, Artificial Sequence
  Description of Artificial Sequence: Synthetic oligonucleotide
  Sense strand starting at position 2656 of SEQ ID NO: 1883544
ugacguuucccacaggaaa

SEQ ID NO: 2200761 - RNA, 19 nt, Artificial Sequence
  Description of Artificial Sequence: Synthetic oligonucleotide
  Antisense strand to SEQ ID NO: 2200760
uuuccugugggaaacguca

SEQ ID NO: 2200762 - RNA, 19 nt, Artificial Sequence
  Description of Artificial Sequence: Synthetic oligonucleotide
  Sense strand starting at position 1348 of SEQ ID NO: 1883544
acagaaggacuucgugaaa

SEQ ID NO: 2200763 - RNA, 19 nt, Artificial Sequence
  Description of Artificial Sequence: Synthetic oligonucleotide
  Antisense strand to SEQ ID NO: 2200762
uuucacgaaguccuucugu

SEQ ID NO: 2200764 - RNA, 19 nt, Artificial Sequence
  Description of Artificial Sequence: Synthetic oligonucleotide
  Sense strand starting at position 1571 of SEQ ID NO: 1883544
ggagcucugagucaucaaa

SEQ ID NO: 2200765 - RNA, 19 nt, Artificial Sequence
  Description of Artificial Sequence: Synthetic oligonucleotide
  Antisense strand to SEQ ID NO: 2200764
uuugaugacucagagcucc

SEQ ID NO: 2200766 - RNA, 19 nt, Artificial Sequence
  Description of Artificial Sequence: Synthetic oligonucleotide
  Sense strand starting at position 1351 of SEQ ID NO: 1883544
gaaggacuucgugaaaugu

SEQ ID NO: 2200767 - RNA, 19 nt, Artificial Sequence
  Description of Artificial Sequence: Synthetic oligonucleotide
  Antisense strand to SEQ ID NO: 2200766
acauuucacgaaguccuuc

SEQ ID NO: 2200768 - RNA, 19 nt, Artificial Sequence
  Description of Artificial Sequence: Synthetic oligonucleotide
  Sense strand starting at position 3147 of SEQ ID NO: 1883544
uugauuaccguauaacuga

SEQ ID NO: 2200769 - RNA, 19 nt, Artificial Sequence
  Description of Artificial Sequence: Synthetic oligonucleotide
  Antisense strand to SEQ ID NO: 2200768
ucaguuauacgguaaucaa

SEQ ID NO: 2200770 - RNA, 19 nt, Artificial Sequence
  Description of Artificial Sequence: Synthetic oligonucleotide
  Sense strand starting at position 2128 of SEQ ID NO: 1883544
uuagucaggccugaauaca

SEQ ID NO: 2200771 - RNA, 19 nt, Artificial Sequence
  Description of Artificial Sequence: Synthetic oligonucleotide
  Antisense strand to SEQ ID NO: 2200770
uguauucaggccugacuaa

SEQ ID NO: 2200772 - RNA, 19 nt, Artificial Sequence
  Description of Artificial Sequence: Synthetic oligonucleotide
  Sense strand starting at position 3106 of SEQ ID NO: 1883544
aacagugauuuagaacaug

SEQ ID NO: 2200773 - RNA, 19 nt, Artificial Sequence
  Description of Artificial Sequence: Synthetic oligonucleotide
  Antisense strand to SEQ ID NO: 2200772
cauguucuaaaucacuguu

SEQ ID NO: 2200774 - RNA, 19 nt, Artificial Sequence
  Description of Artificial Sequence: Synthetic oligonucleotide
  Sense strand starting at position 1428 of SEQ ID NO: 1883544
caggaagaugcguacauau

SEQ ID NO: 2200775 - RNA, 19 nt, Artificial Sequence
  Description of Artificial Sequence: Synthetic oligonucleotide
  Antisense strand to SEQ ID NO: 2200774
auauguacgcaucuuccug

SEQ ID NO: 2200776 - RNA, 19 nt, Artificial Sequence
  Description of Artificial Sequence: Synthetic oligonucleotide
  Sense strand starting at position 1097 of SEQ ID NO: 1883544
aaaucaagccauggucaga

SEQ ID NO: 2200777 - RNA, 19 nt, Artificial Sequence
  Description of Artificial Sequence: Synthetic oligonucleotide
  Antisense strand to SEQ ID NO: 2200776
ucugaccauggcuugauuu

SEQ ID NO: 2200778 - RNA, 19 nt, Artificial Sequence
  Description of Artificial Sequence: Synthetic oligonucleotide
  Sense strand starting at position 13 of SEQ ID NO: 1883544
aggguuugaguaggaaagu

SEQ ID NO: 2200779 - RNA, 19 nt, Artificial Sequence
  Description of Artificial Sequence: Synthetic oligonucleotide
  Antisense strand to SEQ ID NO: 2200778
acuuuccuacucaaacccu

SEQ ID NO: 2200780 - RNA, 19 nt, Artificial Sequence
  Description of Artificial Sequence: Synthetic oligonucleotide
  Sense strand starting at position 2768 of SEQ ID NO: 1883544
uggcaaauauuaguaccaa

SEQ ID NO: 2200781 - RNA, 19 nt, Artificial Sequence
  Description of Artificial Sequence: Synthetic oligonucleotide
  Antisense strand to SEQ ID NO: 2200780
uugguacuaauauuugcca

SEQ ID NO: 2200782 - RNA, 19 nt, Artificial Sequence
  Description of Artificial Sequence: Synthetic oligonucleotide
  Sense strand starting at position 3972 of SEQ ID NO: 1883544
uggaacauuccgcaaguga

SEQ ID NO: 2200783 - RNA, 19 nt, Artificial Sequence
  Description of Artificial Sequence: Synthetic oligonucleotide
  Antisense strand to SEQ ID NO: 2200782
ucacuugcggaauguucca

SEQ ID NO: 2200784 - RNA, 19 nt, Artificial Sequence
  Description of Artificial Sequence: Synthetic oligonucleotide
  Sense strand starting at position 2814 of SEQ ID NO: 1883544
uguacauuaugaguuacaa

SEQ ID NO: 2200785 - RNA, 19 nt, Artificial Sequence
  Description of Artificial Sequence: Synthetic oligonucleotide
  Antisense strand to SEQ ID NO: 2200784
uuguaacucauaauguaca

SEQ ID NO: 2200786 - RNA, 19 nt, Artificial Sequence
  Description of Artificial Sequence: Synthetic oligonucleotide
  Sense strand starting at position 1573 of SEQ ID NO: 1883544
agcucugagucaucaaaga

SEQ ID NO: 2200787 - RNA, 19 nt, Artificial Sequence
  Description of Artificial Sequence: Synthetic oligonucleotide
  Antisense strand to SEQ ID NO: 2200786
ucuuugaugacucagagcu

SEQ ID NO: 2200788 - RNA, 19 nt, Artificial Sequence
  Description of Artificial Sequence: Synthetic oligonucleotide
  Sense strand starting at position 3145 of SEQ ID NO: 1883544
cuuugauuaccguauaacu

SEQ ID NO: 2200789 - RNA, 19 nt, Artificial Sequence
  Description of Artificial Sequence: Synthetic oligonucleotide
  Antisense strand to SEQ ID NO: 2200788
aguuauacgguaaucaaag

SEQ ID NO: 2200790 - RNA, 19 nt, Artificial Sequence
  Description of Artificial Sequence: Synthetic oligonucleotide
  Sense strand starting at position 1427 of SEQ ID NO: 1883544
acaggaagaugcguacaua

SEQ ID NO: 2200791 - RNA, 19 nt, Artificial Sequence
  Description of Artificial Sequence: Synthetic oligonucleotide
  Antisense strand to SEQ ID NO: 2200790
uauguacgcaucuuccugu

SEQ ID NO: 2200792 - RNA, 19 nt, Artificial Sequence
  Description of Artificial Sequence: Synthetic oligonucleotide
  Sense strand starting at position 1702 of SEQ ID NO: 1883544
aacugaggcuguuccagaa

SEQ ID NO: 2200793 - RNA, 19 nt, Artificial Sequence
  Description of Artificial Sequence: Synthetic oligonucleotide
  Antisense strand to SEQ ID NO: 2200792
uucuggaacagccucaguu

SEQ ID NO: 2200794 - RNA, 19 nt, Artificial Sequence
  Description of Artificial Sequence: Synthetic oligonucleotide
  Sense strand starting at position 2157 of SEQ ID NO: 1883544
ccuaguucucuugggaaac

SEQ ID NO: 2200795 - RNA, 19 nt, Artificial Sequence
  Description of Artificial Sequence: Synthetic oligonucleotide
  Antisense strand to SEQ ID NO: 2200794
guuucccaagagaacuagg

SEQ ID NO: 2200796 - RNA, 19 nt, Artificial Sequence
  Description of Artificial Sequence: Synthetic oligonucleotide
  Sense strand starting at position 1194 of SEQ ID NO: 1883544
ccuauaaaguugucaccaa

SEQ ID NO: 2200797 - RNA, 19 nt, Artificial Sequence
  Description of Artificial Sequence: Synthetic oligonucleotide
  Antisense strand to SEQ ID NO: 2200796
uuggugacaacuuuauagg

SEQ ID NO: 2200798 - RNA, 19 nt, Artificial Sequence
  Description of Artificial Sequence: Synthetic oligonucleotide
  Sense strand starting at position 70 of SEQ ID NO: 1883544
guuccaucugagcagaagu

SEQ ID NO: 2200799 - RNA, 19 nt, Artificial Sequence
  Description of Artificial Sequence: Synthetic oligonucleotide
  Antisense strand to SEQ ID NO: 2200798
acuucugcucagauggaac

SEQ ID NO: 2200800 - RNA, 19 nt, Artificial Sequence
  Description of Artificial Sequence: Synthetic oligonucleotide
  Sense strand starting at position 1236 of SEQ ID NO: 1883544
cggaauguuccagacagcu

SEQ ID NO: 2200801 - RNA, 19 nt, Artificial Sequence
  Description of Artificial Sequence: Synthetic oligonucleotide
  Antisense strand to SEQ ID NO: 2200800
agcugucuggaacauuccg

SEQ ID NO: 2200802 - RNA, 19 nt, Artificial Sequence
  Description of Artificial Sequence: Synthetic oligonucleotide
  Sense strand starting at position 2374 of SEQ ID NO: 1883544
gucuaaagguucuuccaaa

SEQ ID NO: 2200803 - RNA, 19 nt, Artificial Sequence
  Description of Artificial Sequence: Synthetic oligonucleotide
  Antisense strand to SEQ ID NO: 2200802
uuuggaagaaccuuuagac

SEQ ID NO: 2200804 - RNA, 19 nt, Artificial Sequence
  Description of Artificial Sequence: Synthetic oligonucleotide
  Sense strand starting at position 1123 of SEQ ID NO: 1883544
acugcaacacucugagagu

SEQ ID NO: 2200805 - RNA, 19 nt, Artificial Sequence
  Description of Artificial Sequence: Synthetic oligonucleotide
  Antisense strand to SEQ ID NO: 2200804
acucucagaguguugcagu

SEQ ID NO: 2200806 - RNA, 19 nt, Artificial Sequence
  Description of Artificial Sequence: Synthetic oligonucleotide
  Sense strand starting at position 3532 of SEQ ID NO: 1883544
cgcuuuguugcggcauuaa

SEQ ID NO: 2200807 - RNA, 19 nt, Artificial Sequence
  Description of Artificial Sequence: Synthetic oligonucleotide
  Antisense strand to SEQ ID NO: 2200806
uuaaugccgcaacaaagcg

SEQ ID NO: 2200808 - RNA, 19 nt, Artificial Sequence
  Description of Artificial Sequence: Synthetic oligonucleotide
  Sense strand starting at position 3140 of SEQ ID NO: 1883544
ugaggcuuugauuaccgua

SEQ ID NO: 2200809 - RNA, 19 nt, Artificial Sequence
  Description of Artificial Sequence: Synthetic oligonucleotide
  Antisense strand to SEQ ID NO: 2200808
uacgguaaucaaagccuca

SEQ ID NO: 2200810 - RNA, 19 nt, Artificial Sequence
  Description of Artificial Sequence: Synthetic oligonucleotide
  Sense strand starting at position 2365 of SEQ ID NO: 1883544
ggaaucgcugucuaaaggu

SEQ ID NO: 2200811 - RNA, 19 nt, Artificial Sequence
  Description of Artificial Sequence: Synthetic oligonucleotide
  Antisense strand to SEQ ID NO: 2200810
accuuuagacagcgauucc

SEQ ID NO: 2200812 - RNA, 19 nt, Artificial Sequence
  Description of Artificial Sequence: Synthetic oligonucleotide
  Sense strand starting at position 2934 of SEQ ID NO: 1883544
guuugaacuuaucuuguga

SEQ ID NO: 2200813 - RNA, 19 nt, Artificial Sequence
  Description of Artificial Sequence: Synthetic oligonucleotide
  Antisense strand to SEQ ID NO: 2200812
ucacaagauaaguucaaac

SEQ ID NO: 2200814 - RNA, 19 nt, Artificial Sequence
  Description of Artificial Sequence: Synthetic oligonucleotide
  Sense strand starting at position 1226 of SEQ ID NO: 1883544
uacucacuugcggaauguu

SEQ ID NO: 2200815 - RNA, 19 nt, Artificial Sequence
  Description of Artificial Sequence: Synthetic oligonucleotide
  Antisense strand to SEQ ID NO: 2200814
aacauuccgcaagugagua

SEQ ID NO: 2200816 - RNA, 19 nt, Artificial Sequence
  Description of Artificial Sequence: Synthetic oligonucleotide
  Sense strand starting at position 1954 of SEQ ID NO: 1883544
cccggaaucgcugacauuc

SEQ ID NO: 2200817 - RNA, 19 nt, Artificial Sequence
  Description of Artificial Sequence: Synthetic oligonucleotide
  Antisense strand to SEQ ID NO: 2200816
gaaugucagcgauuccggg

SEQ ID NO: 2200818 - RNA, 19 nt, Artificial Sequence
  Description of Artificial Sequence: Synthetic oligonucleotide
  Sense strand starting at position 2264 of SEQ ID NO: 1883544
augguggugcgugagauaa

SEQ ID NO: 2200819 - RNA, 19 nt, Artificial Sequence
  Description of Artificial Sequence: Synthetic oligonucleotide
  Antisense strand to SEQ ID NO: 2200818
uuaucucacgcaccaccau

SEQ ID NO: 2200820 - RNA, 19 nt, Artificial Sequence
  Description of Artificial Sequence: Synthetic oligonucleotide
  Sense strand starting at position 2763 of SEQ ID NO: 1883544
ccgguuggcaaauauuagu

SEQ ID NO: 2200821 - RNA, 19 nt, Artificial Sequence
  Description of Artificial Sequence: Synthetic oligonucleotide
  Antisense strand to SEQ ID NO: 2200820
acuaauauuugccaaccgg

SEQ ID NO: 2200822 - RNA, 19 nt, Artificial Sequence
  Description of Artificial Sequence: Synthetic oligonucleotide
  Sense strand starting at position 132 of SEQ ID NO: 1883544
gauggcuucuggccuggaa

SEQ ID NO: 2200823 - RNA, 19 nt, Artificial Sequence
  Description of Artificial Sequence: Synthetic oligonucleotide
  Antisense strand to SEQ ID NO: 2200822
uuccaggccagaagccauc

SEQ ID NO: 2200824 - RNA, 19 nt, Artificial Sequence
  Description of Artificial Sequence: Synthetic oligonucleotide
  Sense strand starting at position 3178 of SEQ ID NO: 1883544
ggugcuuaggucuauucca

SEQ ID NO: 2200825 - RNA, 19 nt, Artificial Sequence
  Description of Artificial Sequence: Synthetic oligonucleotide
  Antisense strand to SEQ ID NO: 2200824
uggaauagaccuaagcacc

SEQ ID NO: 2200826 - RNA, 19 nt, Artificial Sequence
  Description of Artificial Sequence: Synthetic oligonucleotide
  Sense strand starting at position 2683 of SEQ ID NO: 1883544
ggaaguuaaacuuguggcu

SEQ ID NO: 2200827 - RNA, 19 nt, Artificial Sequence
  Description of Artificial Sequence: Synthetic oligonucleotide
  Antisense strand to SEQ ID NO: 2200826
agccacaaguuuaacuucc

SEQ ID NO: 2200828 - RNA, 19 nt, Artificial Sequence
  Description of Artificial Sequence: Synthetic oligonucleotide
  Sense strand starting at position 3075 of SEQ ID NO: 1883544
ucaggugacucaccuguuu

SEQ ID NO: 2200829 - RNA, 19 nt, Artificial Sequence
  Description of Artificial Sequence: Synthetic oligonucleotide
  Antisense strand to SEQ ID NO: 2200828
aaacaggugagucaccuga

SEQ ID NO: 2200830 - RNA, 19 nt, Artificial Sequence
  Description of Artificial Sequence: Synthetic oligonucleotide
  Sense strand starting at position 2079 of SEQ ID NO: 1883544
ucaugcauuugagauaccu

SEQ ID NO: 2200831 - RNA, 19 nt, Artificial Sequence
  Description of Artificial Sequence: Synthetic oligonucleotide
  Antisense strand to SEQ ID NO: 2200830
agguaucucaaaugcauga

SEQ ID NO: 2200832 - RNA, 19 nt, Artificial Sequence
  Description of Artificial Sequence: Synthetic oligonucleotide
  Sense strand starting at position 3709 of SEQ ID NO: 1883544
cgguuacagccucaguuaa

SEQ ID NO: 2200833 - RNA, 19 nt, Artificial Sequence
  Description of Artificial Sequence: Synthetic oligonucleotide
  Antisense strand to SEQ ID NO: 2200832
uuaacugaggcuguaaccg

SEQ ID NO: 2200834 - RNA, 19 nt, Artificial Sequence
  Description of Artificial Sequence: Synthetic oligonucleotide
  Sense strand starting at position 2350 of SEQ ID NO: 1883544
cuuugucccuguuugggaa

SEQ ID NO: 2200835 - RNA, 19 nt, Artificial Sequence
  Description of Artificial Sequence: Synthetic oligonucleotide
  Antisense strand to SEQ ID NO: 2200834
uucccaaacagggacaaag

SEQ ID NO: 2200836 - RNA, 19 nt, Artificial Sequence
  Description of Artificial Sequence: Synthetic oligonucleotide
  Sense strand starting at position 439 of SEQ ID NO: 1883545
acauuuguuucguccagaa

SEQ ID NO: 2200837 - RNA, 19 nt, Artificial Sequence
  Description of Artificial Sequence: Synthetic oligonucleotide
  Antisense strand to SEQ ID NO: 2200836
uucuggacgaaacaaaugu

SEQ ID NO: 2200838 - RNA, 19 nt, Artificial Sequence
  Description of Artificial Sequence: Synthetic oligonucleotide
  Sense strand starting at position 2237 of SEQ ID NO: 1883545
gccugcuguguucuccaga

SEQ ID NO: 2200839 - RNA, 19 nt, Artificial Sequence
  Description of Artificial Sequence: Synthetic oligonucleotide
  Antisense strand to SEQ ID NO: 2200838
ucuggagaacacagcaggc

SEQ ID NO: 2200840 - RNA, 19 nt, Artificial Sequence
  Description of Artificial Sequence: Synthetic oligonucleotide
  Sense strand starting at position 438 of SEQ ID NO: 1883545
gacauuuguuucguccaga

SEQ ID NO: 2200841 - RNA, 19 nt, Artificial Sequence
  Description of Artificial Sequence: Synthetic oligonucleotide
  Antisense strand to SEQ ID NO: 2200840
ucuggacgaaacaaauguc

SEQ ID NO: 2200842 - RNA, 19 nt, Artificial Sequence
  Description of Artificial Sequence: Synthetic oligonucleotide
  Sense strand starting at position 2989 of SEQ ID NO: 1883545
agaaauaucucacuauggu

SEQ ID NO: 2200843 - RNA, 19 nt, Artificial Sequence
  Description of Artificial Sequence: Synthetic oligonucleotide
  Antisense strand to SEQ ID NO: 2200842
accauagugagauauuucu

SEQ ID NO: 2200844 - RNA, 19 nt, Artificial Sequence
  Description of Artificial Sequence: Synthetic oligonucleotide
  Sense strand starting at position 2578 of SEQ ID NO: 1883545
guagacauucgugaacaag

SEQ ID NO: 2200845 - RNA, 19 nt, Artificial Sequence
  Description of Artificial Sequence: Synthetic oligonucleotide
  Antisense strand to SEQ ID NO: 2200844
cuuguucacgaaugucuac

SEQ ID NO: 2200846 - RNA, 19 nt, Artificial Sequence
  Description of Artificial Sequence: Synthetic oligonucleotide
  Sense strand starting at position 2788 of SEQ ID NO: 1883545
gaagguuaaucagcacaca

SEQ ID NO: 2200847 - RNA, 19 nt, Artificial Sequence
  Description of Artificial Sequence: Synthetic oligonucleotide
  Antisense strand to SEQ ID NO: 2200846
ugugugcugauuaaccuuc

SEQ ID NO: 2200848 - RNA, 19 nt, Artificial Sequence
  Description of Artificial Sequence: Synthetic oligonucleotide
  Sense strand starting at position 1134 of SEQ ID NO: 1883545
uguacucaucuugauccua

SEQ ID NO: 2200849 - RNA, 19 nt, Artificial Sequence
  Description of Artificial Sequence: Synthetic oligonucleotide
  Antisense strand to SEQ ID NO: 2200848
uaggaucaagaugaguaca

SEQ ID NO: 2200850 - RNA, 19 nt, Artificial Sequence
  Description of Artificial Sequence: Synthetic oligonucleotide
  Sense strand starting at position 2581 of SEQ ID NO: 1883545
gacauucgugaacaaguuu

SEQ ID NO: 2200851 - RNA, 19 nt, Artificial Sequence
  Description of Artificial Sequence: Synthetic oligonucleotide
  Antisense strand to SEQ ID NO: 2200850
aaacuuguucacgaauguc

SEQ ID NO: 2200852 - RNA, 19 nt, Artificial Sequence
  Description of Artificial Sequence: Synthetic oligonucleotide
  Sense strand starting at position 2655 of SEQ ID NO: 1883545
ggaucuauggucuaugcau

SEQ ID NO: 2200853 - RNA, 19 nt, Artificial Sequence
  Description of Artificial Sequence: Synthetic oligonucleotide
  Antisense strand to SEQ ID NO: 2200852
augcauagaccauagaucc

SEQ ID NO: 2200854 - RNA, 19 nt, Artificial Sequence
  Description of Artificial Sequence: Synthetic oligonucleotide
  Sense strand starting at position 3346 of SEQ ID NO: 1883545
uugagauacaaguguaagu

SEQ ID NO: 2200855 - RNA, 19 nt, Artificial Sequence
  Description of Artificial Sequence: Synthetic oligonucleotide
  Antisense strand to SEQ ID NO: 2200854
acuuacacuuguaucucaa

SEQ ID NO: 2200856 - RNA, 19 nt, Artificial Sequence
  Description of Artificial Sequence: Synthetic oligonucleotide
  Sense strand starting at position 443 of SEQ ID NO: 1883545
uuguuucguccagaagauc

SEQ ID NO: 2200857 - RNA, 19 nt, Artificial Sequence
  Description of Artificial Sequence: Synthetic oligonucleotide
  Antisense strand to SEQ ID NO: 2200856
gaucuucuggacgaaacaa

SEQ ID NO: 2200858 - RNA, 19 nt, Artificial Sequence
  Description of Artificial Sequence: Synthetic oligonucleotide
  Sense strand starting at position 666 of SEQ ID NO: 1883545
gagcucucggcucaugaua

SEQ ID NO: 2200859 - RNA, 19 nt, Artificial Sequence
  Description of Artificial Sequence: Synthetic oligonucleotide
  Antisense strand to SEQ ID NO: 2200858
uaucaugagccgagagcuc

SEQ ID NO: 2200860 - RNA, 19 nt, Artificial Sequence
  Description of Artificial Sequence: Synthetic oligonucleotide
  Sense strand starting at position 3544 of SEQ ID NO: 1883545
uguguugcauaauugaaau

SEQ ID NO: 2200861 - RNA, 19 nt, Artificial Sequence
  Description of Artificial Sequence: Synthetic oligonucleotide
  Antisense strand to SEQ ID NO: 2200860
auuucaauuaugcaacaca

SEQ ID NO: 2200862 - RNA, 19 nt, Artificial Sequence
  Description of Artificial Sequence: Synthetic oligonucleotide
  Sense strand starting at position 2657 of SEQ ID NO: 1883545
aucuauggucuaugcauau

SEQ ID NO: 2200863 - RNA, 19 nt, Artificial Sequence
  Description of Artificial Sequence: Synthetic oligonucleotide
  Antisense strand to SEQ ID NO: 2200862
auaugcauagaccauagau

SEQ ID NO: 2200864 - RNA, 19 nt, Artificial Sequence
  Description of Artificial Sequence: Synthetic oligonucleotide
  Sense strand starting at position 2907 of SEQ ID NO: 1883545
acuuaugagugaucguauu

SEQ ID NO: 2200865 - RNA, 19 nt, Artificial Sequence
  Description of Artificial Sequence: Synthetic oligonucleotide
  Antisense strand to SEQ ID NO: 2200864
aauacgaucacucauaagu

SEQ ID NO: 2200866 - RNA, 19 nt, Artificial Sequence
  Description of Artificial Sequence: Synthetic oligonucleotide
  Sense strand starting at position 111 of SEQ ID NO: 1883545
gugugucgccggaggcaua

SEQ ID NO: 2200867 - RNA, 19 nt, Artificial Sequence
  Description of Artificial Sequence: Synthetic oligonucleotide
  Antisense strand to SEQ ID NO: 2200866
uaugccuccggcgacacac

SEQ ID NO: 2200868 - RNA, 19 nt, Artificial Sequence
  Description of Artificial Sequence: Synthetic oligonucleotide
  Sense strand starting at position 2575 of SEQ ID NO: 1883545
guuguagacauucgugaac

SEQ ID NO: 2200869 - RNA, 19 nt, Artificial Sequence
  Description of Artificial Sequence: Synthetic oligonucleotide
  Antisense strand to SEQ ID NO: 2200868
guucacgaaugucuacaac

SEQ ID NO: 2200870 - RNA, 19 nt, Artificial Sequence
  Description of Artificial Sequence: Synthetic oligonucleotide
  Sense strand starting at position 2904 of SEQ ID NO: 1883545
gcaacuuaugagugaucgu

SEQ ID NO: 2200871 - RNA, 19 nt, Artificial Sequence
  Description of Artificial Sequence: Synthetic oligonucleotide
  Antisense strand to SEQ ID NO: 2200870
acgaucacucauaaguugc

SEQ ID NO: 2200872 - RNA, 19 nt, Artificial Sequence
  Description of Artificial Sequence: Synthetic oligonucleotide
  Sense strand starting at position 3899 of SEQ ID NO: 1883545
caugcuugcugauugucaa

SEQ ID NO: 2200873 - RNA, 19 nt, Artificial Sequence
  Description of Artificial Sequence: Synthetic oligonucleotide
  Antisense strand to SEQ ID NO: 2200872
uugacaaucagcaagcaug

SEQ ID NO: 2200874 - RNA, 19 nt, Artificial Sequence
  Description of Artificial Sequence: Synthetic oligonucleotide
  Sense strand starting at position 3902 of SEQ ID NO: 1883545
gcuugcugauugucaaauu

SEQ ID NO: 2200875 - RNA, 19 nt, Artificial Sequence
  Description of Artificial Sequence: Synthetic oligonucleotide
  Antisense strand to SEQ ID NO: 2200874
aauuugacaaucagcaagc

SEQ ID NO: 2200876 - RNA, 19 nt, Artificial Sequence
  Description of Artificial Sequence: Synthetic oligonucleotide
  Sense strand starting at position 662 of SEQ ID NO: 1883545
ccaagagcucucggcucau

SEQ ID NO: 2200877 - RNA, 19 nt, Artificial Sequence
  Description of Artificial Sequence: Synthetic oligonucleotide
  Antisense strand to SEQ ID NO: 2200876
augagccgagagcucuugg

SEQ ID NO: 2200878 - RNA, 19 nt, Artificial Sequence
  Description of Artificial Sequence: Synthetic oligonucleotide
  Sense strand starting at position 3903 of SEQ ID NO: 1883545
cuugcugauugucaaauuu

SEQ ID NO: 2200879 - RNA, 19 nt, Artificial Sequence
  Description of Artificial Sequence: Synthetic oligonucleotide
  Antisense strand to SEQ ID NO: 2200878
aaauuugacaaucagcaag

SEQ ID NO: 2200880 - RNA, 19 nt, Artificial Sequence
  Description of Artificial Sequence: Synthetic oligonucleotide
  Sense strand starting at position 428 of SEQ ID NO: 1883545
uugguuuccugacauuugu

SEQ ID NO: 2200881 - RNA, 19 nt, Artificial Sequence
  Description of Artificial Sequence: Synthetic oligonucleotide
  Antisense strand to SEQ ID NO: 2200880
acaaaugucaggaaaccaa

SEQ ID NO: 2200882 - RNA, 19 nt, Artificial Sequence
  Description of Artificial Sequence: Synthetic oligonucleotide
  Sense strand starting at position 2987 of SEQ ID NO: 1883545
guagaaauaucucacuaug

SEQ ID NO: 2200883 - RNA, 19 nt, Artificial Sequence
  Description of Artificial Sequence: Synthetic oligonucleotide
  Antisense strand to SEQ ID NO: 2200882
cauagugagauauuucuac

SEQ ID NO: 2200884 - RNA, 19 nt, Artificial Sequence
  Description of Artificial Sequence: Synthetic oligonucleotide
  Sense strand starting at position 3356 of SEQ ID NO: 1883545
aguguaaguuauugauuug

SEQ ID NO: 2200885 - RNA, 19 nt, Artificial Sequence
  Description of Artificial Sequence: Synthetic oligonucleotide
  Antisense strand to SEQ ID NO: 2200884
caaaucaauaacuuacacu

SEQ ID NO: 2200886 - RNA, 19 nt, Artificial Sequence
  Description of Artificial Sequence: Synthetic oligonucleotide
  Sense strand starting at position 1127 of SEQ ID NO: 1883545
gcugcaguguacucaucuu

SEQ ID NO: 2200887 - RNA, 19 nt, Artificial Sequence
  Description of Artificial Sequence: Synthetic oligonucleotide
  Antisense strand to SEQ ID NO: 2200886
aagaugaguacacugcagc

SEQ ID NO: 2200888 - RNA, 19 nt, Artificial Sequence
  Description of Artificial Sequence: Synthetic oligonucleotide
  Sense strand starting at position 2901 of SEQ ID NO: 1883545
cuagcaacuuaugagugau

SEQ ID NO: 2200889 - RNA, 19 nt, Artificial Sequence
  Description of Artificial Sequence: Synthetic oligonucleotide
  Antisense strand to SEQ ID NO: 2200888
aucacucauaaguugcuag

SEQ ID NO: 2200890 - RNA, 19 nt, Artificial Sequence
  Description of Artificial Sequence: Synthetic oligonucleotide
  Sense strand starting at position 2900 of SEQ ID NO: 1883545
acuagcaacuuaugaguga

SEQ ID NO: 2200891 - RNA, 19 nt, Artificial Sequence
  Description of Artificial Sequence: Synthetic oligonucleotide
  Antisense strand to SEQ ID NO: 2200890
ucacucauaaguugcuagu

SEQ ID NO: 2200892 - RNA, 19 nt, Artificial Sequence
  Description of Artificial Sequence: Synthetic oligonucleotide
  Sense strand starting at position 3539 of SEQ ID NO: 1883545
ggaacuguguugcauaauu

SEQ ID NO: 2200893 - RNA, 19 nt, Artificial Sequence
  Description of Artificial Sequence: Synthetic oligonucleotide
  Antisense strand to SEQ ID NO: 2200892
aauuaugcaacacaguucc

SEQ ID NO: 2200894 - RNA, 19 nt, Artificial Sequence
  Description of Artificial Sequence: Synthetic oligonucleotide
  Sense strand starting at position 2577 of SEQ ID NO: 1883545
uguagacauucgugaacaa

SEQ ID NO: 2200895 - RNA, 19 nt, Artificial Sequence
  Description of Artificial Sequence: Synthetic oligonucleotide
  Antisense strand to SEQ ID NO: 2200894
uuguucacgaaugucuaca

SEQ ID NO: 2200896 - RNA, 19 nt, Artificial Sequence
  Description of Artificial Sequence: Synthetic oligonucleotide
  Sense strand starting at position 3537 of SEQ ID NO: 1883545
uuggaacuguguugcauaa

SEQ ID NO: 2200897 - RNA, 19 nt, Artificial Sequence
  Description of Artificial Sequence: Synthetic oligonucleotide
  Antisense strand to SEQ ID NO: 2200896
uuaugcaacacaguuccaa

SEQ ID NO: 2200898 - RNA, 19 nt, Artificial Sequence
  Description of Artificial Sequence: Synthetic oligonucleotide
  Sense strand starting at position 444 of SEQ ID NO: 1883546
acauuuguuucguccagaa

SEQ ID NO: 2200899 - RNA, 19 nt, Artificial Sequence
  Description of Artificial Sequence: Synthetic oligonucleotide
  Antisense strand to SEQ ID NO: 2200898
uucuggacgaaacaaaugu

SEQ ID NO: 2200900 - RNA, 19 nt, Artificial Sequence
  Description of Artificial Sequence: Synthetic oligonucleotide
  Sense strand starting at position 443 of SEQ ID NO: 1883546
gacauuuguuucguccaga

SEQ ID NO: 2200901 - RNA, 19 nt, Artificial Sequence
  Description of Artificial Sequence: Synthetic oligonucleotide
  Antisense strand to SEQ ID NO: 2200900
ucuggacgaaacaaauguc

SEQ ID NO: 2200902 - RNA, 19 nt, Artificial Sequence
  Description of Artificial Sequence: Synthetic oligonucleotide
  Sense strand starting at position 448 of SEQ ID NO: 1883546
uuguuucguccagaagauc

SEQ ID NO: 2200903 - RNA, 19 nt, Artificial Sequence
  Description of Artificial Sequence: Synthetic oligonucleotide
  Antisense strand to SEQ ID NO: 2200902
gaucuucuggacgaaacaa

SEQ ID NO: 2200904 - RNA, 19 nt, Artificial Sequence
  Description of Artificial Sequence: Synthetic oligonucleotide
  Sense strand starting at position 671 of SEQ ID NO: 1883546
gagcucucggcucaugaua

SEQ ID NO: 2200905 - RNA, 19 nt, Artificial Sequence
  Description of Artificial Sequence: Synthetic oligonucleotide
  Antisense strand to SEQ ID NO: 2200904
uaucaugagccgagagcuc

SEQ ID NO: 2200906 - RNA, 19 nt, Artificial Sequence
  Description of Artificial Sequence: Synthetic oligonucleotide
  Sense strand starting at position 429 of SEQ ID NO: 1883546
cccuuugguuuccugacau

SEQ ID NO: 2200907 - RNA, 19 nt, Artificial Sequence
  Description of Artificial Sequence: Synthetic oligonucleotide
  Antisense strand to SEQ ID NO: 2200906
augucaggaaaccaaaggg

SEQ ID NO: 2200908 - RNA, 19 nt, Artificial Sequence
  Description of Artificial Sequence: Synthetic oligonucleotide
  Sense strand starting at position 428 of SEQ ID NO: 1883546
ucccuuugguuuccugaca

SEQ ID NO: 2200909 - RNA, 19 nt, Artificial Sequence
  Description of Artificial Sequence: Synthetic oligonucleotide
  Antisense strand to SEQ ID NO: 2200908
ugucaggaaaccaaaggga

SEQ ID NO: 2200910 - RNA, 19 nt, Artificial Sequence
  Description of Artificial Sequence: Synthetic oligonucleotide
  Sense strand starting at position 116 of SEQ ID NO: 1883546
gugugucgccggaggcaua

SEQ ID NO: 2200911 - RNA, 19 nt, Artificial Sequence
  Description of Artificial Sequence: Synthetic oligonucleotide
  Antisense strand to SEQ ID NO: 2200910
uaugccuccggcgacacac

SEQ ID NO: 2200912 - RNA, 19 nt, Artificial Sequence
  Description of Artificial Sequence: Synthetic oligonucleotide
  Sense strand starting at position 3899 of SEQ ID NO: 1883546
augcuugcugauugucaaa

SEQ ID NO: 2200913 - RNA, 19 nt, Artificial Sequence
  Description of Artificial Sequence: Synthetic oligonucleotide
  Antisense strand to SEQ ID NO: 2200912
uuugacaaucagcaagcau

SEQ ID NO: 2200914 - RNA, 19 nt, Artificial Sequence
  Description of Artificial Sequence: Synthetic oligonucleotide
  Sense strand starting at position 165 of SEQ ID NO: 1883546
caggcaugugcugguggaa

SEQ ID NO: 2200915 - RNA, 19 nt, Artificial Sequence
  Description of Artificial Sequence: Synthetic oligonucleotide
  Antisense strand to SEQ ID NO: 2200914
uuccaccagcacaugccug

SEQ ID NO: 2200916 - RNA, 19 nt, Artificial Sequence
  Description of Artificial Sequence: Synthetic oligonucleotide
  Sense strand starting at position 3898 of SEQ ID NO: 1883546
caugcuugcugauugucaa

SEQ ID NO: 2200917 - RNA, 19 nt, Artificial Sequence
  Description of Artificial Sequence: Synthetic oligonucleotide
  Antisense strand to SEQ ID NO: 2200916
uugacaaucagcaagcaug

SEQ ID NO: 2200918 - RNA, 19 nt, Artificial Sequence
  Description of Artificial Sequence: Synthetic oligonucleotide
  Sense strand starting at position 3901 of SEQ ID NO: 1883546
gcuugcugauugucaaauu

SEQ ID NO: 2200919 - RNA, 19 nt, Artificial Sequence
  Description of Artificial Sequence: Synthetic oligonucleotide
  Antisense strand to SEQ ID NO: 2200918
aauuugacaaucagcaagc

SEQ ID NO: 2200920 - RNA, 19 nt, Artificial Sequence
  Description of Artificial Sequence: Synthetic oligonucleotide
  Sense strand starting at position 667 of SEQ ID NO: 1883546
ccaagagcucucggcucau

SEQ ID NO: 2200921 - RNA, 19 nt, Artificial Sequence
  Description of Artificial Sequence: Synthetic oligonucleotide
  Antisense strand to SEQ ID NO: 2200920
augagccgagagcucuugg

SEQ ID NO: 2200922 - RNA, 19 nt, Artificial Sequence
  Description of Artificial Sequence: Synthetic oligonucleotide
  Sense strand starting at position 3902 of SEQ ID NO: 1883546
cuugcugauugucaaauuu

SEQ ID NO: 2200923 - RNA, 19 nt, Artificial Sequence
  Description of Artificial Sequence: Synthetic oligonucleotide
  Antisense strand to SEQ ID NO: 2200922
aaauuugacaaucagcaag

SEQ ID NO: 2200924 - RNA, 19 nt, Artificial Sequence
  Description of Artificial Sequence: Synthetic oligonucleotide
  Sense strand starting at position 433 of SEQ ID NO: 1883546
uugguuuccugacauuugu

SEQ ID NO: 2200925 - RNA, 19 nt, Artificial Sequence
  Description of Artificial Sequence: Synthetic oligonucleotide
  Antisense strand to SEQ ID NO: 2200924
acaaaugucaggaaaccaa

SEQ ID NO: 2200926 - RNA, 19 nt, Artificial Sequence
  Description of Artificial Sequence: Synthetic oligonucleotide
  Sense strand starting at position 2419 of SEQ ID NO: 1883547
ugaaguugcgucagggcua

SEQ ID NO: 2200927 - RNA, 19 nt, Artificial Sequence
  Description of Artificial Sequence: Synthetic oligonucleotide
  Antisense strand to SEQ ID NO: 2200926
uagcccugacgcaacuuca

SEQ ID NO: 2200928 - RNA, 19 nt, Artificial Sequence
  Description of Artificial Sequence: Synthetic oligonucleotide
  Sense strand starting at position 2577 of SEQ ID NO: 1883548
cuggcauugauggaaaggu

SEQ ID NO: 2200929 - RNA, 19 nt, Artificial Sequence
  Description of Artificial Sequence: Synthetic oligonucleotide
  Antisense strand to SEQ ID NO: 2200928
accuuuccaucaaugccag

SEQ ID NO: 2200930 - RNA, 19 nt, Artificial Sequence
  Description of Artificial Sequence: Synthetic oligonucleotide
  Sense strand starting at position 3467 of SEQ ID NO: 1883548
ggccaacuaccaugaggaa

SEQ ID NO: 2200931 - RNA, 19 nt, Artificial Sequence
  Description of Artificial Sequence: Synthetic oligonucleotide
  Antisense strand to SEQ ID NO: 2200930
uuccucaugguaguuggcc

SEQ ID NO: 2200932 - RNA, 19 nt, Artificial Sequence
  Description of Artificial Sequence: Synthetic oligonucleotide
  Sense strand starting at position 3582 of SEQ ID NO: 1883548
gucagugaucucuaggaca

SEQ ID NO: 2200933 - RNA, 19 nt, Artificial Sequence
  Description of Artificial Sequence: Synthetic oligonucleotide
  Antisense strand to SEQ ID NO: 2200932
uguccuagagaucacugac

SEQ ID NO: 2200934 - RNA, 19 nt, Artificial Sequence
  Description of Artificial Sequence: Synthetic oligonucleotide
  Sense strand starting at position 3584 of SEQ ID NO: 1883548
cagugaucucuaggacagg

SEQ ID NO: 2200935 - RNA, 19 nt, Artificial Sequence
  Description of Artificial Sequence: Synthetic oligonucleotide
  Antisense strand to SEQ ID NO: 2200934
ccuguccuagagaucacug

SEQ ID NO: 2200936 - RNA, 19 nt, Artificial Sequence
  Description of Artificial Sequence: Synthetic oligonucleotide
  Sense strand starting at position 174 of SEQ ID NO: 1883548
aaggaaagguuucucucua

SEQ ID NO: 2200937 - RNA, 19 nt, Artificial Sequence
  Description of Artificial Sequence: Synthetic oligonucleotide
  Antisense strand to SEQ ID NO: 2200936
uagagagaaaccuuuccuu

SEQ ID NO: 2200938 - RNA, 19 nt, Artificial Sequence
  Description of Artificial Sequence: Synthetic oligonucleotide
  Sense strand starting at position 523 of SEQ ID NO: 1883548
ggagaaccaucccaaauuu

SEQ ID NO: 2200939 - RNA, 19 nt, Artificial Sequence
  Description of Artificial Sequence: Synthetic oligonucleotide
  Antisense strand to SEQ ID NO: 2200938
aaauuugggaugguucucc

SEQ ID NO: 2200940 - RNA, 19 nt, Artificial Sequence
  Description of Artificial Sequence: Synthetic oligonucleotide
  Sense strand starting at position 1220 of SEQ ID NO: 1883548
cguucucgucgaaagcaga

SEQ ID NO: 2200941 - RNA, 19 nt, Artificial Sequence
  Description of Artificial Sequence: Synthetic oligonucleotide
  Antisense strand to SEQ ID NO: 2200940
ucugcuuucgacgagaacg

SEQ ID NO: 2200942 - RNA, 19 nt, Artificial Sequence
  Description of Artificial Sequence: Synthetic oligonucleotide
  Sense strand starting at position 788 of SEQ ID NO: 1883548
agcgguggcguucuuuaaa

SEQ ID NO: 2200943 - RNA, 19 nt, Artificial Sequence
  Description of Artificial Sequence: Synthetic oligonucleotide
  Antisense strand to SEQ ID NO: 2200942
uuuaaagaacgccaccgcu

SEQ ID NO: 2200944 - RNA, 19 nt, Artificial Sequence
  Description of Artificial Sequence: Synthetic oligonucleotide
  Sense strand starting at position 2338 of SEQ ID NO: 1883548
gaucuucuggcugaaacga

SEQ ID NO: 2200945 - RNA, 19 nt, Artificial Sequence
  Description of Artificial Sequence: Synthetic oligonucleotide
  Antisense strand to SEQ ID NO: 2200944
ucguuucagccagaagauc

SEQ ID NO: 2200946 - RNA, 19 nt, Artificial Sequence
  Description of Artificial Sequence: Synthetic oligonucleotide
  Sense strand starting at position 3867 of SEQ ID NO: 1883548
guguuaaugcgugucacug

SEQ ID NO: 2200947 - RNA, 19 nt, Artificial Sequence
  Description of Artificial Sequence: Synthetic oligonucleotide
  Antisense strand to SEQ ID NO: 2200946
cagugacacgcauuaacac

SEQ ID NO: 2200948 - RNA, 19 nt, Artificial Sequence
  Description of Artificial Sequence: Synthetic oligonucleotide
  Sense strand starting at position 2239 of SEQ ID NO: 1883548
cuugucuuccaggaaaggu

SEQ ID NO: 2200949 - RNA, 19 nt, Artificial Sequence
  Description of Artificial Sequence: Synthetic oligonucleotide
  Antisense strand to SEQ ID NO: 2200948
accuuuccuggaagacaag

SEQ ID NO: 2200950 - RNA, 19 nt, Artificial Sequence
  Description of Artificial Sequence: Synthetic oligonucleotide
  Sense strand starting at position 175 of SEQ ID NO: 1883548
aggaaagguuucucucuac

SEQ ID NO: 2200951 - RNA, 19 nt, Artificial Sequence
  Description of Artificial Sequence: Synthetic oligonucleotide
  Antisense strand to SEQ ID NO: 2200950
guagagagaaaccuuuccu

SEQ ID NO: 2200952 - RNA, 19 nt, Artificial Sequence
  Description of Artificial Sequence: Synthetic oligonucleotide
  Sense strand starting at position 2857 of SEQ ID NO: 1883548
gcugauggauaagugaauu

SEQ ID NO: 2200953 - RNA, 19 nt, Artificial Sequence
  Description of Artificial Sequence: Synthetic oligonucleotide
  Antisense strand to SEQ ID NO: 2200952
aauucacuuauccaucagc

SEQ ID NO: 2200954 - RNA, 19 nt, Artificial Sequence
  Description of Artificial Sequence: Synthetic oligonucleotide
  Sense strand starting at position 765 of SEQ ID NO: 1883548
gggagaugugagggucagu

SEQ ID NO: 2200955 - RNA, 19 nt, Artificial Sequence
  Description of Artificial Sequence: Synthetic oligonucleotide
  Antisense strand to SEQ ID NO: 2200954
acugacccucacaucuccc

SEQ ID NO: 2200956 - RNA, 19 nt, Artificial Sequence
  Description of Artificial Sequence: Synthetic oligonucleotide
  Sense strand starting at position 2905 of SEQ ID NO: 1883548
gggaucauucugcacugca

SEQ ID NO: 2200957 - RNA, 19 nt, Artificial Sequence
  Description of Artificial Sequence: Synthetic oligonucleotide
  Antisense strand to SEQ ID NO: 2200956
ugcagugcagaaugauccc

SEQ ID NO: 2200958 - RNA, 19 nt, Artificial Sequence
  Description of Artificial Sequence: Synthetic oligonucleotide
  Sense strand starting at position 1279 of SEQ ID NO: 1883548
augccuuugcuauaagacu

SEQ ID NO: 2200959 - RNA, 19 nt, Artificial Sequence
  Description of Artificial Sequence: Synthetic oligonucleotide
  Antisense strand to SEQ ID NO: 2200958
agucuuauagcaaaggcau

SEQ ID NO: 2200960 - RNA, 19 nt, Artificial Sequence
  Description of Artificial Sequence: Synthetic oligonucleotide
  Sense strand starting at position 2336 of SEQ ID NO: 1883548
uugaucuucuggcugaaac

SEQ ID NO: 2200961 - RNA, 19 nt, Artificial Sequence
  Description of Artificial Sequence: Synthetic oligonucleotide
  Antisense strand to SEQ ID NO: 2200960
guuucagccagaagaucaa

SEQ ID NO: 2200962 - RNA, 19 nt, Artificial Sequence
  Description of Artificial Sequence: Synthetic oligonucleotide
  Sense strand starting at position 72 of SEQ ID NO: 1883548
gccugucaacccgagggau

SEQ ID NO: 2200963 - RNA, 19 nt, Artificial Sequence
  Description of Artificial Sequence: Synthetic oligonucleotide
  Antisense strand to SEQ ID NO: 2200962
aucccucggguugacaggc

SEQ ID NO: 2200964 - RNA, 19 nt, Artificial Sequence
  Description of Artificial Sequence: Synthetic oligonucleotide
  Sense strand starting at position 63 of SEQ ID NO: 1883548
gauggaauugccugucaac

SEQ ID NO: 2200965 - RNA, 19 nt, Artificial Sequence
  Description of Artificial Sequence: Synthetic oligonucleotide
  Antisense strand to SEQ ID NO: 2200964
guugacaggcaauuccauc

SEQ ID NO: 2200966 - RNA, 19 nt, Artificial Sequence
  Description of Artificial Sequence: Synthetic oligonucleotide
  Sense strand starting at position 696 of SEQ ID NO: 1883548
cuccuuccuccgcaugaaa

SEQ ID NO: 2200967 - RNA, 19 nt, Artificial Sequence
  Description of Artificial Sequence: Synthetic oligonucleotide
  Antisense strand to SEQ ID NO: 2200966
uuucaugcggaggaaggag

SEQ ID NO: 2200968 - RNA, 19 nt, Artificial Sequence
  Description of Artificial Sequence: Synthetic oligonucleotide
  Sense strand starting at position 499 of SEQ ID NO: 1883548
gucuccuaucaaggcuuaa

SEQ ID NO: 2200969 - RNA, 19 nt, Artificial Sequence
  Description of Artificial Sequence: Synthetic oligonucleotide
  Antisense strand to SEQ ID NO: 2200968
uuaagccuugauaggagac

SEQ ID NO: 2200970 - RNA, 19 nt, Artificial Sequence
  Description of Artificial Sequence: Synthetic oligonucleotide
  Sense strand starting at position 1159 of SEQ ID NO: 1883548
cgcggugaucucgaggaca

SEQ ID NO: 2200971 - RNA, 19 nt, Artificial Sequence
  Description of Artificial Sequence: Synthetic oligonucleotide
  Antisense strand to SEQ ID NO: 2200970
uguccucgagaucaccgcg

SEQ ID NO: 2200972 - RNA, 19 nt, Artificial Sequence
  Description of Artificial Sequence: Synthetic oligonucleotide
  Sense strand starting at position 3572 of SEQ ID NO: 1883548
ucaugccuccgucagugau

SEQ ID NO: 2200973 - RNA, 19 nt, Artificial Sequence
  Description of Artificial Sequence: Synthetic oligonucleotide
  Antisense strand to SEQ ID NO: 2200972
aucacugacggaggcauga

SEQ ID NO: 2200974 - RNA, 19 nt, Artificial Sequence
  Description of Artificial Sequence: Synthetic oligonucleotide
  Sense strand starting at position 2756 of SEQ ID NO: 1883548
cuaugcagguguccuguaa

SEQ ID NO: 2200975 - RNA, 19 nt, Artificial Sequence
  Description of Artificial Sequence: Synthetic oligonucleotide
  Antisense strand to SEQ ID NO: 2200974
uuacaggacaccugcauag

SEQ ID NO: 2200976 - RNA, 19 nt, Artificial Sequence
  Description of Artificial Sequence: Synthetic oligonucleotide
  Sense strand starting at position 1287 of SEQ ID NO: 1883548
gcuauaagacucugugugu

SEQ ID NO: 2200977 - RNA, 19 nt, Artificial Sequence
  Description of Artificial Sequence: Synthetic oligonucleotide
  Antisense strand to SEQ ID NO: 2200976
acacacagagucuuauagc

SEQ ID NO: 2200978 - RNA, 19 nt, Artificial Sequence
  Description of Artificial Sequence: Synthetic oligonucleotide
  Sense strand starting at position 1216 of SEQ ID NO: 1883548
gggucguucucgucgaaag

SEQ ID NO: 2200979 - RNA, 19 nt, Artificial Sequence
  Description of Artificial Sequence: Synthetic oligonucleotide
  Antisense strand to SEQ ID NO: 2200978
cuuucgacgagaacgaccc

SEQ ID NO: 2200980 - RNA, 19 nt, Artificial Sequence
  Description of Artificial Sequence: Synthetic oligonucleotide
  Sense strand starting at position 1218 of SEQ ID NO: 1883548
gucguucucgucgaaagca

SEQ ID NO: 2200981 - RNA, 19 nt, Artificial Sequence
  Description of Artificial Sequence: Synthetic oligonucleotide
  Antisense strand to SEQ ID NO: 2200980
ugcuuucgacgagaacgac

SEQ ID NO: 2200982 - RNA, 19 nt, Artificial Sequence
  Description of Artificial Sequence: Synthetic oligonucleotide
  Sense strand starting at position 3866 of SEQ ID NO: 1883548
gguguuaaugcgugucacu

SEQ ID NO: 2200983 - RNA, 19 nt, Artificial Sequence
  Description of Artificial Sequence: Synthetic oligonucleotide
  Antisense strand to SEQ ID NO: 2200982
agugacacgcauuaacacc

SEQ ID NO: 2200984 - RNA, 19 nt, Artificial Sequence
  Description of Artificial Sequence: Synthetic oligonucleotide
  Sense strand starting at position 2236 of SEQ ID NO: 1883548
ggccuugucuuccaggaaa

SEQ ID NO: 2200985 - RNA, 19 nt, Artificial Sequence
  Description of Artificial Sequence: Synthetic oligonucleotide
  Antisense strand to SEQ ID NO: 2200984
uuuccuggaagacaaggcc

SEQ ID NO: 2200986 - RNA, 19 nt, Artificial Sequence
  Description of Artificial Sequence: Synthetic oligonucleotide
  Sense strand starting at position 3875 of SEQ ID NO: 1883548
gcgugucacuggaggcaua

SEQ ID NO: 2200987 - RNA, 19 nt, Artificial Sequence
  Description of Artificial Sequence: Synthetic oligonucleotide
  Antisense strand to SEQ ID NO: 2200986
uaugccuccagugacacgc

SEQ ID NO: 2200988 - RNA, 19 nt, Artificial Sequence
  Description of Artificial Sequence: Synthetic oligonucleotide
  Sense strand starting at position 3639 of SEQ ID NO: 1883548
ggguccuucucguagagag

SEQ ID NO: 2200989 - RNA, 19 nt, Artificial Sequence
  Description of Artificial Sequence: Synthetic oligonucleotide
  Antisense strand to SEQ ID NO: 2200988
cucucuacgagaaggaccc

SEQ ID NO: 2200990 - RNA, 19 nt, Artificial Sequence
  Description of Artificial Sequence: Synthetic oligonucleotide
  Sense strand starting at position 1217 of SEQ ID NO: 1883548
ggucguucucgucgaaagc

SEQ ID NO: 2200991 - RNA, 19 nt, Artificial Sequence
  Description of Artificial Sequence: Synthetic oligonucleotide
  Antisense strand to SEQ ID NO: 2200990
gcuuucgacgagaacgacc

SEQ ID NO: 2200992 - RNA, 19 nt, Artificial Sequence
  Description of Artificial Sequence: Synthetic oligonucleotide
  Sense strand starting at position 2334 of SEQ ID NO: 1883548
ccuugaucuucuggcugaa

SEQ ID NO: 2200993 - RNA, 19 nt, Artificial Sequence
  Description of Artificial Sequence: Synthetic oligonucleotide
  Antisense strand to SEQ ID NO: 2200992
uucagccagaagaucaagg

SEQ ID NO: 2200994 - RNA, 19 nt, Artificial Sequence
  Description of Artificial Sequence: Synthetic oligonucleotide
  Sense strand starting at position 1214 of SEQ ID NO: 1883548
aagggucguucucgucgaa

SEQ ID NO: 2200995 - RNA, 19 nt, Artificial Sequence
  Description of Artificial Sequence: Synthetic oligonucleotide
  Antisense strand to SEQ ID NO: 2200994
uucgacgagaacgacccuu

SEQ ID NO: 2200996 - RNA, 19 nt, Artificial Sequence
  Description of Artificial Sequence: Synthetic oligonucleotide
  Sense strand starting at position 1780 of SEQ ID NO: 1883552
cucugaauugcccagaaac

SEQ ID NO: 2200997 - RNA, 19 nt, Artificial Sequence
  Description of Artificial Sequence: Synthetic oligonucleotide
  Antisense strand to SEQ ID NO: 2200996
guuucugggcaauucagag

SEQ ID NO: 2200998 - RNA, 19 nt, Artificial Sequence
  Description of Artificial Sequence: Synthetic oligonucleotide
  Sense strand starting at position 1267 of SEQ ID NO: 1883552
uggcaauaauuauccaaag

SEQ ID NO: 2200999 - RNA, 19 nt, Artificial Sequence
  Description of Artificial Sequence: Synthetic oligonucleotide
  Antisense strand to SEQ ID NO: 2200998
cuuuggauaauuauugcca

SEQ ID NO: 2201000 - RNA, 19 nt, Artificial Sequence
  Description of Artificial Sequence: Synthetic oligonucleotide
  Sense strand starting at position 713 of SEQ ID NO: 1883552
uuccauggaguguauaaau

SEQ ID NO: 2201001 - RNA, 19 nt, Artificial Sequence
  Description of Artificial Sequence: Synthetic oligonucleotide
  Antisense strand to SEQ ID NO: 2201000
auuuauacacuccauggaa

SEQ ID NO: 2201002 - RNA, 19 nt, Artificial Sequence
  Description of Artificial Sequence: Synthetic oligonucleotide
  Sense strand starting at position 724 of SEQ ID NO: 1883552
guauaaaucgugucccgug

SEQ ID NO: 2201003 - RNA, 19 nt, Artificial Sequence
  Description of Artificial Sequence: Synthetic oligonucleotide
  Antisense strand to SEQ ID NO: 2201002
cacgggacacgauuuauac

SEQ ID NO: 2201004 - RNA, 19 nt, Artificial Sequence
  Description of Artificial Sequence: Synthetic oligonucleotide
  Sense strand starting at position 3318 of SEQ ID NO: 1883552
uauugacgugaagaaugua

SEQ ID NO: 2201005 - RNA, 19 nt, Artificial Sequence
  Description of Artificial Sequence: Synthetic oligonucleotide
  Antisense strand to SEQ ID NO: 2201004
uacauucuucacgucaaua

SEQ ID NO: 2201006 - RNA, 19 nt, Artificial Sequence
  Description of Artificial Sequence: Synthetic oligonucleotide
  Sense strand starting at position 2381 of SEQ ID NO: 1883552
ucaggacccugauuauauu

SEQ ID NO: 2201007 - RNA, 19 nt, Artificial Sequence
  Description of Artificial Sequence: Synthetic oligonucleotide
  Antisense strand to SEQ ID NO: 2201006
aauauaaucaggguccuga

SEQ ID NO: 2201008 - RNA, 19 nt, Artificial Sequence
  Description of Artificial Sequence: Synthetic oligonucleotide
  Sense strand starting at position 3223 of SEQ ID NO: 1883552
ugguaaaucuaggcaagaa

SEQ ID NO: 2201009 - RNA, 19 nt, Artificial Sequence
  Description of Artificial Sequence: Synthetic oligonucleotide
  Antisense strand to SEQ ID NO: 2201008
uucuugccuagauuuacca

SEQ ID NO: 2201010 - RNA, 19 nt, Artificial Sequence
  Description of Artificial Sequence: Synthetic oligonucleotide
  Sense strand starting at position 1226 of SEQ ID NO: 1883552
ggugcuugacugugauuua

SEQ ID NO: 2201011 - RNA, 19 nt, Artificial Sequence
  Description of Artificial Sequence: Synthetic oligonucleotide
  Antisense strand to SEQ ID NO: 2201010
uaaaucacagucaagcacc

SEQ ID NO: 2201012 - RNA, 19 nt, Artificial Sequence
  Description of Artificial Sequence: Synthetic oligonucleotide
  Sense strand starting at position 3441 of SEQ ID NO: 1883552
ugaaguggucacuggagaa

SEQ ID NO: 2201013 - RNA, 19 nt, Artificial Sequence
  Description of Artificial Sequence: Synthetic oligonucleotide
  Antisense strand to SEQ ID NO: 2201012
uucuccagugaccacuuca

SEQ ID NO: 2201014 - RNA, 19 nt, Artificial Sequence
  Description of Artificial Sequence: Synthetic oligonucleotide
  Sense strand starting at position 723 of SEQ ID NO: 1883552
uguauaaaucgugucccgu

SEQ ID NO: 2201015 - RNA, 19 nt, Artificial Sequence
  Description of Artificial Sequence: Synthetic oligonucleotide
  Antisense strand to SEQ ID NO: 2201014
acgggacacgauuuauaca

SEQ ID NO: 2201016 - RNA, 19 nt, Artificial Sequence
  Description of Artificial Sequence: Synthetic oligonucleotide
  Sense strand starting at position 646 of SEQ ID NO: 1883552
guaagaugacuuuagcacu

SEQ ID NO: 2201017 - RNA, 19 nt, Artificial Sequence
  Description of Artificial Sequence: Synthetic oligonucleotide
  Antisense strand to SEQ ID NO: 2201016
agugcuaaagucaucuuac

SEQ ID NO: 2201018 - RNA, 19 nt, Artificial Sequence
  Description of Artificial Sequence: Synthetic oligonucleotide
  Sense strand starting at position 2592 of SEQ ID NO: 1883552
acuaguaaguucuuaagga

SEQ ID NO: 2201019 - RNA, 19 nt, Artificial Sequence
  Description of Artificial Sequence: Synthetic oligonucleotide
  Antisense strand to SEQ ID NO: 2201018
uccuuaagaacuuacuagu

SEQ ID NO: 2201020 - RNA, 19 nt, Artificial Sequence
  Description of Artificial Sequence: Synthetic oligonucleotide
  Sense strand starting at position 3454 of SEQ ID NO: 1883552
ggagaaacgugguugagau

SEQ ID NO: 2201021 - RNA, 19 nt, Artificial Sequence
  Description of Artificial Sequence: Synthetic oligonucleotide
  Antisense strand to SEQ ID NO: 2201020
aucucaaccacguuucucc

SEQ ID NO: 2201022 - RNA, 19 nt, Artificial Sequence
  Description of Artificial Sequence: Synthetic oligonucleotide
  Sense strand starting at position 2378 of SEQ ID NO: 1883552
uagucaggacccugauuau

SEQ ID NO: 2201023 - RNA, 19 nt, Artificial Sequence
  Description of Artificial Sequence: Synthetic oligonucleotide
  Antisense strand to SEQ ID NO: 2201022
auaaucaggguccugacua

SEQ ID NO: 2201024 - RNA, 19 nt, Artificial Sequence
  Description of Artificial Sequence: Synthetic oligonucleotide
  Sense strand starting at position 1417 of SEQ ID NO: 1883552
gcgucugagcuguuuccau

SEQ ID NO: 2201025 - RNA, 19 nt, Artificial Sequence
  Description of Artificial Sequence: Synthetic oligonucleotide
  Antisense strand to SEQ ID NO: 2201024
auggaaacagcucagacgc

SEQ ID NO: 2201026 - RNA, 19 nt, Artificial Sequence
  Description of Artificial Sequence: Synthetic oligonucleotide
  Sense strand starting at position 3222 of SEQ ID NO: 1883552
uugguaaaucuaggcaaga

SEQ ID NO: 2201027 - RNA, 19 nt, Artificial Sequence
  Description of Artificial Sequence: Synthetic oligonucleotide
  Antisense strand to SEQ ID NO: 2201026
ucuugccuagauuuaccaa

SEQ ID NO: 2201028 - RNA, 19 nt, Artificial Sequence
  Description of Artificial Sequence: Synthetic oligonucleotide
  Sense strand starting at position 1036 of SEQ ID NO: 1883552
aaacaugguguuggacauu

SEQ ID NO: 2201029 - RNA, 19 nt, Artificial Sequence
  Description of Artificial Sequence: Synthetic oligonucleotide
  Antisense strand to SEQ ID NO: 2201028
aauguccaacaccauguuu

SEQ ID NO: 2201030 - RNA, 19 nt, Artificial Sequence
  Description of Artificial Sequence: Synthetic oligonucleotide
  Sense strand starting at position 3238 of SEQ ID NO: 1883552
agaaaugacuugcccaagu

SEQ ID NO: 2201031 - RNA, 19 nt, Artificial Sequence
  Description of Artificial Sequence: Synthetic oligonucleotide
  Antisense strand to SEQ ID NO: 2201030
acuugggcaagucauuucu

SEQ ID NO: 2201032 - RNA, 19 nt, Artificial Sequence
  Description of Artificial Sequence: Synthetic oligonucleotide
  Sense strand starting at position 1062 of SEQ ID NO: 1883552
cuaggaaguuaggauauuu

SEQ ID NO: 2201033 - RNA, 19 nt, Artificial Sequence
  Description of Artificial Sequence: Synthetic oligonucleotide
  Antisense strand to SEQ ID NO: 2201032
aaauauccuaacuuccuag

SEQ ID NO: 2201034 - RNA, 19 nt, Artificial Sequence
  Description of Artificial Sequence: Synthetic oligonucleotide
  Sense strand starting at position 3087 of SEQ ID NO: 1883552
uuguuuagauaaguacuga

SEQ ID NO: 2201035 - RNA, 19 nt, Artificial Sequence
  Description of Artificial Sequence: Synthetic oligonucleotide
  Antisense strand to SEQ ID NO: 2201034
ucaguacuuaucuaaacaa

SEQ ID NO: 2201036 - RNA, 19 nt, Artificial Sequence
  Description of Artificial Sequence: Synthetic oligonucleotide
  Sense strand starting at position 59 of SEQ ID NO: 1883552
gagaccaaaugugcugauu

SEQ ID NO: 2201037 - RNA, 19 nt, Artificial Sequence
  Description of Artificial Sequence: Synthetic oligonucleotide
  Antisense strand to SEQ ID NO: 2201036
aaucagcacauuuggucuc

SEQ ID NO: 2201038 - RNA, 19 nt, Artificial Sequence
  Description of Artificial Sequence: Synthetic oligonucleotide
  Sense strand starting at position 3455 of SEQ ID NO: 1883552
gagaaacgugguugagauu

SEQ ID NO: 2201039 - RNA, 19 nt, Artificial Sequence
  Description of Artificial Sequence: Synthetic oligonucleotide
  Antisense strand to SEQ ID NO: 2201038
aaucucaaccacguuucuc

SEQ ID NO: 2201040 - RNA, 19 nt, Artificial Sequence
  Description of Artificial Sequence: Synthetic oligonucleotide
  Sense strand starting at position 1874 of SEQ ID NO: 1883552
gccuaugugacagagcuaa

SEQ ID NO: 2201041 - RNA, 19 nt, Artificial Sequence
  Description of Artificial Sequence: Synthetic oligonucleotide
  Antisense strand to SEQ ID NO: 2201040
uuagcucugucacauaggc

SEQ ID NO: 2201042 - RNA, 19 nt, Artificial Sequence
  Description of Artificial Sequence: Synthetic oligonucleotide
  Sense strand starting at position 1116 of SEQ ID NO: 1883552
uuugcaaagucacucagaa

SEQ ID NO: 2201043 - RNA, 19 nt, Artificial Sequence
  Description of Artificial Sequence: Synthetic oligonucleotide
  Antisense strand to SEQ ID NO: 2201042
uucugagugacuuugcaaa

SEQ ID NO: 2201044 - RNA, 19 nt, Artificial Sequence
  Description of Artificial Sequence: Synthetic oligonucleotide
  Sense strand starting at position 3321 of SEQ ID NO: 1883552
ugacgugaagaauguauau

SEQ ID NO: 2201045 - RNA, 19 nt, Artificial Sequence
  Description of Artificial Sequence: Synthetic oligonucleotide
  Antisense strand to SEQ ID NO: 2201044
auauacauucuucacguca

SEQ ID NO: 2201046 - RNA, 19 nt, Artificial Sequence
  Description of Artificial Sequence: Synthetic oligonucleotide
  Sense strand starting at position 940 of SEQ ID NO: 1883552
gggaaagucuuacuuguug

SEQ ID NO: 2201047 - RNA, 19 nt, Artificial Sequence
  Description of Artificial Sequence: Synthetic oligonucleotide
  Antisense strand to SEQ ID NO: 2201046
caacaaguaagacuuuccc

SEQ ID NO: 2201048 - RNA, 19 nt, Artificial Sequence
  Description of Artificial Sequence: Synthetic oligonucleotide
  Sense strand starting at position 3333 of SEQ ID NO: 1883552
uguauauaaucuguaacug

SEQ ID NO: 2201049 - RNA, 19 nt, Artificial Sequence
  Description of Artificial Sequence: Synthetic oligonucleotide
  Antisense strand to SEQ ID NO: 2201048
caguuacagauuauauaca

SEQ ID NO: 2201050 - RNA, 19 nt, Artificial Sequence
  Description of Artificial Sequence: Synthetic oligonucleotide
  Sense strand starting at position 2641 of SEQ ID NO: 1883552
cucuuugcugagcaauaau

SEQ ID NO: 2201051 - RNA, 19 nt, Artificial Sequence
  Description of Artificial Sequence: Synthetic oligonucleotide
  Antisense strand to SEQ ID NO: 2201050
auuauugcucagcaaagag

SEQ ID NO: 2201052 - RNA, 19 nt, Artificial Sequence
  Description of Artificial Sequence: Synthetic oligonucleotide
  Sense strand starting at position 2571 of SEQ ID NO: 1883552
aucuaagaugcucagcuuu

SEQ ID NO: 2201053 - RNA, 19 nt, Artificial Sequence
  Description of Artificial Sequence: Synthetic oligonucleotide
  Antisense strand to SEQ ID NO: 2201052
aaagcugagcaucuuagau

SEQ ID NO: 2201054 - RNA, 19 nt, Artificial Sequence
  Description of Artificial Sequence: Synthetic oligonucleotide
  Sense strand starting at position 670 of SEQ ID NO: 1883552
cuacuucuaccuugaagug

SEQ ID NO: 2201055 - RNA, 19 nt, Artificial Sequence
  Description of Artificial Sequence: Synthetic oligonucleotide
  Antisense strand to SEQ ID NO: 2201054
cacuucaagguagaaguag

SEQ ID NO: 2201056 - RNA, 19 nt, Artificial Sequence
  Description of Artificial Sequence: Synthetic oligonucleotide
  Sense strand starting at position 769 of SEQ ID NO: 1883552
accugucagcuguauauga

SEQ ID NO: 2201057 - RNA, 19 nt, Artificial Sequence
  Description of Artificial Sequence: Synthetic oligonucleotide
  Antisense strand to SEQ ID NO: 2201056
ucauauacagcugacaggu

SEQ ID NO: 2201058 - RNA, 19 nt, Artificial Sequence
  Description of Artificial Sequence: Synthetic oligonucleotide
  Sense strand starting at position 3422 of SEQ ID NO: 1883552
gagggauggcugugugaau

SEQ ID NO: 2201059 - RNA, 19 nt, Artificial Sequence
  Description of Artificial Sequence: Synthetic oligonucleotide
  Antisense strand to SEQ ID NO: 2201058
auucacacagccaucccuc

SEQ ID NO: 2201060 - RNA, 19 nt, Artificial Sequence
  Description of Artificial Sequence: Synthetic oligonucleotide
  Sense strand starting at position 771 of SEQ ID NO: 1883552
cugucagcuguauaugaug

SEQ ID NO: 2201061 - RNA, 19 nt, Artificial Sequence
  Description of Artificial Sequence: Synthetic oligonucleotide
  Antisense strand to SEQ ID NO: 2201060
caucauauacagcugacag

SEQ ID NO: 2201062 - RNA, 19 nt, Artificial Sequence
  Description of Artificial Sequence: Synthetic oligonucleotide
  Sense strand starting at position 1216 of SEQ ID NO: 1883552
uagguaaauaggugcuuga

SEQ ID NO: 2201063 - RNA, 19 nt, Artificial Sequence
  Description of Artificial Sequence: Synthetic oligonucleotide
  Antisense strand to SEQ ID NO: 2201062
ucaagcaccuauuuaccua

SEQ ID NO: 2201064 - RNA, 19 nt, Artificial Sequence
  Description of Artificial Sequence: Synthetic oligonucleotide
  Sense strand starting at position 3435 of SEQ ID NO: 1883552
gugaauugaaguggucacu

SEQ ID NO: 2201065 - RNA, 19 nt, Artificial Sequence
  Description of Artificial Sequence: Synthetic oligonucleotide
  Antisense strand to SEQ ID NO: 2201064
agugaccacuucaauucac

SEQ ID NO: 2201066 - RNA, 19 nt, Artificial Sequence
  Description of Artificial Sequence: Synthetic oligonucleotide
  Sense strand starting at position 1942 of SEQ ID NO: 1883552
gucagaaguuccuucuuag

SEQ ID NO: 2201067 - RNA, 19 nt, Artificial Sequence
  Description of Artificial Sequence: Synthetic oligonucleotide
  Antisense strand to SEQ ID NO: 2201066
cuaagaaggaacuucugac

SEQ ID NO: 2201068 - RNA, 19 nt, Artificial Sequence
  Description of Artificial Sequence: Synthetic oligonucleotide
  Sense strand starting at position 630 of SEQ ID NO: 1883552
ggacuuuguuauucuagua

SEQ ID NO: 2201069 - RNA, 19 nt, Artificial Sequence
  Description of Artificial Sequence: Synthetic oligonucleotide
  Antisense strand to SEQ ID NO: 2201068
uacuagaauaacaaagucc

SEQ ID NO: 2201070 - RNA, 19 nt, Artificial Sequence
  Description of Artificial Sequence: Synthetic oligonucleotide
  Sense strand starting at position 3423 of SEQ ID NO: 1883552
agggauggcugugugaauu

SEQ ID NO: 2201071 - RNA, 19 nt, Artificial Sequence
  Description of Artificial Sequence: Synthetic oligonucleotide
  Antisense strand to SEQ ID NO: 2201070
aauucacacagccaucccu

SEQ ID NO: 2201072 - RNA, 19 nt, Artificial Sequence
  Description of Artificial Sequence: Synthetic oligonucleotide
  Sense strand starting at position 3038 of SEQ ID NO: 1883552
uggccagauuucuaauaua

SEQ ID NO: 2201073 - RNA, 19 nt, Artificial Sequence
  Description of Artificial Sequence: Synthetic oligonucleotide
  Antisense strand to SEQ ID NO: 2201072
uauauuagaaaucuggcca

SEQ ID NO: 2201074 - RNA, 19 nt, Artificial Sequence
  Description of Artificial Sequence: Synthetic oligonucleotide
  Sense strand starting at position 2573 of SEQ ID NO: 1883552
cuaagaugcucagcuuuaa

SEQ ID NO: 2201075 - RNA, 19 nt, Artificial Sequence
  Description of Artificial Sequence: Synthetic oligonucleotide
  Antisense strand to SEQ ID NO: 2201074
uuaaagcugagcaucuuag

SEQ ID NO: 2201076 - RNA, 19 nt, Artificial Sequence
  Description of Artificial Sequence: Synthetic oligonucleotide
  Sense strand starting at position 3456 of SEQ ID NO: 1883556
ggagaaacgugguugagau

SEQ ID NO: 2201077 - RNA, 19 nt, Artificial Sequence
  Description of Artificial Sequence: Synthetic oligonucleotide
  Antisense strand to SEQ ID NO: 2201076
aucucaaccacguuucucc

SEQ ID NO: 2201078 - RNA, 19 nt, Artificial Sequence
  Description of Artificial Sequence: Synthetic oligonucleotide
  Sense strand starting at position 3325 of SEQ ID NO: 1883556
acgugaaguauguauauaa

SEQ ID NO: 2201079 - RNA, 19 nt, Artificial Sequence
  Description of Artificial Sequence: Synthetic oligonucleotide
  Antisense strand to SEQ ID NO: 2201078
uuauauacauacuucacgu

SEQ ID NO: 2201080 - RNA, 19 nt, Artificial Sequence
  Description of Artificial Sequence: Synthetic oligonucleotide
  Sense strand starting at position 3317 of SEQ ID NO: 1883556
acuuauugacgugaaguau

SEQ ID NO: 2201081 - RNA, 19 nt, Artificial Sequence
  Description of Artificial Sequence: Synthetic oligonucleotide
  Antisense strand to SEQ ID NO: 2201080
auacuucacgucaauaagu

SEQ ID NO: 2201082 - RNA, 19 nt, Artificial Sequence
  Description of Artificial Sequence: Synthetic oligonucleotide
  Sense strand starting at position 3278 of SEQ ID NO: 1883556
gagcucaucugacuccaga

SEQ ID NO: 2201083 - RNA, 19 nt, Artificial Sequence
  Description of Artificial Sequence: Synthetic oligonucleotide
  Antisense strand to SEQ ID NO: 2201082
ucuggagucagaugagcuc

SEQ ID NO: 2201084 - RNA, 19 nt, Artificial Sequence
  Description of Artificial Sequence: Synthetic oligonucleotide
  Sense strand starting at position 3457 of SEQ ID NO: 1883556
gagaaacgugguugagauu

SEQ ID NO: 2201085 - RNA, 19 nt, Artificial Sequence
  Description of Artificial Sequence: Synthetic oligonucleotide
  Antisense strand to SEQ ID NO: 2201084
aaucucaaccacguuucuc

SEQ ID NO: 2201086 - RNA, 19 nt, Artificial Sequence
  Description of Artificial Sequence: Synthetic oligonucleotide
  Sense strand starting at position 3321 of SEQ ID NO: 1883556
auugacgugaaguauguau

SEQ ID NO: 2201087 - RNA, 19 nt, Artificial Sequence
  Description of Artificial Sequence: Synthetic oligonucleotide
  Antisense strand to SEQ ID NO: 2201086
auacauacuucacgucaau

SEQ ID NO: 2201088 - RNA, 19 nt, Artificial Sequence
  Description of Artificial Sequence: Synthetic oligonucleotide
  Sense strand starting at position 3650 of SEQ ID NO: 1883556
agugaugucacccacguuu

SEQ ID NO: 2201089 - RNA, 19 nt, Artificial Sequence
  Description of Artificial Sequence: Synthetic oligonucleotide
  Antisense strand to SEQ ID NO: 2201088
aaacgugggugacaucacu

SEQ ID NO: 2201090 - RNA, 19 nt, Artificial Sequence
  Description of Artificial Sequence: Synthetic oligonucleotide
  Sense strand starting at position 3323 of SEQ ID NO: 1883556
ugacgugaaguauguauau

SEQ ID NO: 2201091 - RNA, 19 nt, Artificial Sequence
  Description of Artificial Sequence: Synthetic oligonucleotide
  Antisense strand to SEQ ID NO: 2201090
auauacauacuucacguca

SEQ ID NO: 2201092 - RNA, 19 nt, Artificial Sequence
  Description of Artificial Sequence: Synthetic oligonucleotide
  Sense strand starting at position 3908 of SEQ ID NO: 1883556
cccugaucucgugaucugu

SEQ ID NO: 2201093 - RNA, 19 nt, Artificial Sequence
  Description of Artificial Sequence: Synthetic oligonucleotide
  Antisense strand to SEQ ID NO: 2201092
acagaucacgagaucaggg

SEQ ID NO: 2201094 - RNA, 19 nt, Artificial Sequence
  Description of Artificial Sequence: Synthetic oligonucleotide
  Sense strand starting at position 3463 of SEQ ID NO: 1883556
cgugguugagauugugaac

SEQ ID NO: 2201095 - RNA, 19 nt, Artificial Sequence
  Description of Artificial Sequence: Synthetic oligonucleotide
  Antisense strand to SEQ ID NO: 2201094
guucacaaucucaaccacg

SEQ ID NO: 2201096 - RNA, 19 nt, Artificial Sequence
  Description of Artificial Sequence: Synthetic oligonucleotide
  Sense strand starting at position 73 of SEQ ID NO: 1883556
ugugcugauuccuugaucu

SEQ ID NO: 2201097 - RNA, 19 nt, Artificial Sequence
  Description of Artificial Sequence: Synthetic oligonucleotide
  Antisense strand to SEQ ID NO: 2201096
agaucaaggaaucagcaca

SEQ ID NO: 2201098 - RNA, 19 nt, Artificial Sequence
  Description of Artificial Sequence: Synthetic oligonucleotide
  Sense strand starting at position 3466 of SEQ ID NO: 1883556
gguugagauugugaaccau

SEQ ID NO: 2201099 - RNA, 19 nt, Artificial Sequence
  Description of Artificial Sequence: Synthetic oligonucleotide
  Antisense strand to SEQ ID NO: 2201098
augguucacaaucucaacc

SEQ ID NO: 2201100 - RNA, 19 nt, Artificial Sequence
  Description of Artificial Sequence: Synthetic oligonucleotide
  Sense strand starting at position 3682 of SEQ ID NO: 1883557
ugacaagggucucacugau

SEQ ID NO: 2201101 - RNA, 19 nt, Artificial Sequence
  Description of Artificial Sequence: Synthetic oligonucleotide
  Antisense strand to SEQ ID NO: 2201100
aucagugagacccuuguca

SEQ ID NO: 2201102 - RNA, 19 nt, Artificial Sequence
  Description of Artificial Sequence: Synthetic oligonucleotide
  Sense strand starting at position 153 of SEQ ID NO: 1883559
auaugaaacccuggaagca

SEQ ID NO: 2201103 - RNA, 19 nt, Artificial Sequence
  Description of Artificial Sequence: Synthetic oligonucleotide
  Antisense strand to SEQ ID NO: 2201102
ugcuuccaggguuucauau

SEQ ID NO: 2201104 - RNA, 19 nt, Artificial Sequence
  Description of Artificial Sequence: Synthetic oligonucleotide
  Sense strand starting at position 3916 of SEQ ID NO: 1883559
acucgaucccucuaaugag

SEQ ID NO: 2201105 - RNA, 19 nt, Artificial Sequence
  Description of Artificial Sequence: Synthetic oligonucleotide
  Antisense strand to SEQ ID NO: 2201104
cucauuagagggaucgagu

SEQ ID NO: 2201106 - RNA, 19 nt, Artificial Sequence
  Description of Artificial Sequence: Synthetic oligonucleotide
  Sense strand starting at position 2464 of SEQ ID NO: 1883559
ccuaaaugggccugaggaa

SEQ ID NO: 2201107 - RNA, 19 nt, Artificial Sequence
  Description of Artificial Sequence: Synthetic oligonucleotide
  Antisense strand to SEQ ID NO: 2201106
uuccucaggcccauuuagg

SEQ ID NO: 2201108 - RNA, 19 nt, Artificial Sequence
  Description of Artificial Sequence: Synthetic oligonucleotide
  Sense strand starting at position 1129 of SEQ ID NO: 1883559
ccucaaagaguuuagguuu

SEQ ID NO: 2201109 - RNA, 19 nt, Artificial Sequence
  Description of Artificial Sequence: Synthetic oligonucleotide
  Antisense strand to SEQ ID NO: 2201108
aaaccuaaacucuuugagg

SEQ ID NO: 2201110 - RNA, 19 nt, Artificial Sequence
  Description of Artificial Sequence: Synthetic oligonucleotide
  Sense strand starting at position 198 of SEQ ID NO: 1883559
guuauaugcagauaugggu

SEQ ID NO: 2201111 - RNA, 19 nt, Artificial Sequence
  Description of Artificial Sequence: Synthetic oligonucleotide
  Antisense strand to SEQ ID NO: 2201110
acccauaucugcauauaac

SEQ ID NO: 2201112 - RNA, 19 nt, Artificial Sequence
  Description of Artificial Sequence: Synthetic oligonucleotide
  Sense strand starting at position 2356 of SEQ ID NO: 1883559
cagggacagucucuuccau

SEQ ID NO: 2201113 - RNA, 19 nt, Artificial Sequence
  Description of Artificial Sequence: Synthetic oligonucleotide
  Antisense strand to SEQ ID NO: 2201112
auggaagagacugucccug

SEQ ID NO: 2201114 - RNA, 19 nt, Artificial Sequence
  Description of Artificial Sequence: Synthetic oligonucleotide
  Sense strand starting at position 1927 of SEQ ID NO: 1883559
ccaggaaugaugugucacu

SEQ ID NO: 2201115 - RNA, 19 nt, Artificial Sequence
  Description of Artificial Sequence: Synthetic oligonucleotide
  Antisense strand to SEQ ID NO: 2201114
agugacacaucauuccugg

SEQ ID NO: 2201116 - RNA, 19 nt, Artificial Sequence
  Description of Artificial Sequence: Synthetic oligonucleotide
  Sense strand starting at position 2389 of SEQ ID NO: 1883559
cugacugauccaugucacu

SEQ ID NO: 2201117 - RNA, 19 nt, Artificial Sequence
  Description of Artificial Sequence: Synthetic oligonucleotide
  Antisense strand to SEQ ID NO: 2201116
agugacauggaucagucag

SEQ ID NO: 2201118 - RNA, 19 nt, Artificial Sequence
  Description of Artificial Sequence: Synthetic oligonucleotide
  Sense strand starting at position 502 of SEQ ID NO: 1883559
caugacacguuucucugaa

SEQ ID NO: 2201119 - RNA, 19 nt, Artificial Sequence
  Description of Artificial Sequence: Synthetic oligonucleotide
  Antisense strand to SEQ ID NO: 2201118
uucagagaaacgugucaug

SEQ ID NO: 2201120 - RNA, 19 nt, Artificial Sequence
  Description of Artificial Sequence: Synthetic oligonucleotide
  Sense strand starting at position 503 of SEQ ID NO: 1883559
augacacguuucucugaau

SEQ ID NO: 2201121 - RNA, 19 nt, Artificial Sequence
  Description of Artificial Sequence: Synthetic oligonucleotide
  Antisense strand to SEQ ID NO: 2201120
auucagagaaacgugucau

SEQ ID NO: 2201122 - RNA, 19 nt, Artificial Sequence
  Description of Artificial Sequence: Synthetic oligonucleotide
  Sense strand starting at position 504 of SEQ ID NO: 1883559
ugacacguuucucugaaug

SEQ ID NO: 2201123 - RNA, 19 nt, Artificial Sequence
  Description of Artificial Sequence: Synthetic oligonucleotide
  Antisense strand to SEQ ID NO: 2201122
cauucagagaaacguguca

SEQ ID NO: 2201124 - RNA, 19 nt, Artificial Sequence
  Description of Artificial Sequence: Synthetic oligonucleotide
  Sense strand starting at position 1505 of SEQ ID NO: 1883559
uucuucuggucauuaagca

SEQ ID NO: 2201125 - RNA, 19 nt, Artificial Sequence
  Description of Artificial Sequence: Synthetic oligonucleotide
  Antisense strand to SEQ ID NO: 2201124
ugcuuaaugaccagaagaa

SEQ ID NO: 2201126 - RNA, 19 nt, Artificial Sequence
  Description of Artificial Sequence: Synthetic oligonucleotide
  Sense strand starting at position 1845 of SEQ ID NO: 1883559
auagcaguucuggguuaug

SEQ ID NO: 2201127 - RNA, 19 nt, Artificial Sequence
  Description of Artificial Sequence: Synthetic oligonucleotide
  Antisense strand to SEQ ID NO: 2201126
cauaacccagaacugcuau

SEQ ID NO: 2201128 - RNA, 19 nt, Artificial Sequence
  Description of Artificial Sequence: Synthetic oligonucleotide
  Sense strand starting at position 1186 of SEQ ID NO: 1883559
gggugagugcuaugcauca

SEQ ID NO: 2201129 - RNA, 19 nt, Artificial Sequence
  Description of Artificial Sequence: Synthetic oligonucleotide
  Antisense strand to SEQ ID NO: 2201128
ugaugcauagcacucaccc

SEQ ID NO: 2201130 - RNA, 19 nt, Artificial Sequence
  Description of Artificial Sequence: Synthetic oligonucleotide
  Sense strand starting at position 615 of SEQ ID NO: 1883559
agccuaaucucagaaugga

SEQ ID NO: 2201131 - RNA, 19 nt, Artificial Sequence
  Description of Artificial Sequence: Synthetic oligonucleotide
  Antisense strand to SEQ ID NO: 2201130
uccauucugagauuaggcu

SEQ ID NO: 2201132 - RNA, 19 nt, Artificial Sequence
  Description of Artificial Sequence: Synthetic oligonucleotide
  Sense strand starting at position 471 of SEQ ID NO: 1883559
ggccuuacucgaugccuua

SEQ ID NO: 2201133 - RNA, 19 nt, Artificial Sequence
  Description of Artificial Sequence: Synthetic oligonucleotide
  Antisense strand to SEQ ID NO: 2201132
uaaggcaucgaguaaggcc

SEQ ID NO: 2201134 - RNA, 19 nt, Artificial Sequence
  Description of Artificial Sequence: Synthetic oligonucleotide
  Sense strand starting at position 3681 of SEQ ID NO: 1883559
ugacaagggucucacugau

SEQ ID NO: 2201135 - RNA, 19 nt, Artificial Sequence
  Description of Artificial Sequence: Synthetic oligonucleotide
  Antisense strand to SEQ ID NO: 2201134
aucagugagacccuuguca

SEQ ID NO: 2201136 - RNA, 19 nt, Artificial Sequence
  Description of Artificial Sequence: Synthetic oligonucleotide
  Sense strand starting at position 903 of SEQ ID NO: 1883559
aaggcuguaucugguauuu

SEQ ID NO: 2201137 - RNA, 19 nt, Artificial Sequence
  Description of Artificial Sequence: Synthetic oligonucleotide
  Antisense strand to SEQ ID NO: 2201136
aaauaccagauacagccuu

SEQ ID NO: 2201138 - RNA, 19 nt, Artificial Sequence
  Description of Artificial Sequence: Synthetic oligonucleotide
  Sense strand starting at position 506 of SEQ ID NO: 1883559
acacguuucucugaaugug

SEQ ID NO: 2201139 - RNA, 19 nt, Artificial Sequence
  Description of Artificial Sequence: Synthetic oligonucleotide
  Antisense strand to SEQ ID NO: 2201138
cacauucagagaaacgugu

SEQ ID NO: 2201140 - RNA, 19 nt, Artificial Sequence
  Description of Artificial Sequence: Synthetic oligonucleotide
  Sense strand starting at position 1844 of SEQ ID NO: 1883559
aauagcaguucuggguuau

SEQ ID NO: 2201141 - RNA, 19 nt, Artificial Sequence
  Description of Artificial Sequence: Synthetic oligonucleotide
  Antisense strand to SEQ ID NO: 2201140
auaacccagaacugcuauu

SEQ ID NO: 2201142 - RNA, 19 nt, Artificial Sequence
  Description of Artificial Sequence: Synthetic oligonucleotide
  Sense strand starting at position 673 of SEQ ID NO: 1883559
agcagugcuucuggaugga

SEQ ID NO: 2201143 - RNA, 19 nt, Artificial Sequence
  Description of Artificial Sequence: Synthetic oligonucleotide
  Antisense strand to SEQ ID NO: 2201142
uccauccagaagcacugcu

SEQ ID NO: 2201144 - RNA, 19 nt, Artificial Sequence
  Description of Artificial Sequence: Synthetic oligonucleotide
  Sense strand starting at position 1184 of SEQ ID NO: 1883559
gugggugagugcuaugcau

SEQ ID NO: 2201145 - RNA, 19 nt, Artificial Sequence
  Description of Artificial Sequence: Synthetic oligonucleotide
  Antisense strand to SEQ ID NO: 2201144
augcauagcacucacccac

SEQ ID NO: 2201146 - RNA, 19 nt, Artificial Sequence
  Description of Artificial Sequence: Synthetic oligonucleotide
  Sense strand starting at position 1347 of SEQ ID NO: 1883560
cuaucucaggacuggaauu

SEQ ID NO: 2201147 - RNA, 19 nt, Artificial Sequence
  Description of Artificial Sequence: Synthetic oligonucleotide
  Antisense strand to SEQ ID NO: 2201146
aauuccaguccugagauag

SEQ ID NO: 2201148 - RNA, 19 nt, Artificial Sequence
  Description of Artificial Sequence: Synthetic oligonucleotide
  Sense strand starting at position 2127 of SEQ ID NO: 1883560
uggaaucucugagcaagau

SEQ ID NO: 2201149 - RNA, 19 nt, Artificial Sequence
  Description of Artificial Sequence: Synthetic oligonucleotide
  Antisense strand to SEQ ID NO: 2201148
aucuugcucagagauucca

SEQ ID NO: 2201150 - RNA, 19 nt, Artificial Sequence
  Description of Artificial Sequence: Synthetic oligonucleotide
  Sense strand starting at position 2933 of SEQ ID NO: 1883560
ccaggucuccauugacaaa

SEQ ID NO: 2201151 - RNA, 19 nt, Artificial Sequence
  Description of Artificial Sequence: Synthetic oligonucleotide
  Antisense strand to SEQ ID NO: 2201150
uuugucaauggagaccugg

SEQ ID NO: 2201152 - RNA, 19 nt, Artificial Sequence
  Description of Artificial Sequence: Synthetic oligonucleotide
  Sense strand starting at position 3981 of SEQ ID NO: 1883560
accuaugagucccugaauu

SEQ ID NO: 2201153 - RNA, 19 nt, Artificial Sequence
  Description of Artificial Sequence: Synthetic oligonucleotide
  Antisense strand to SEQ ID NO: 2201152
aauucagggacucauaggu

SEQ ID NO: 2201154 - RNA, 19 nt, Artificial Sequence
  Description of Artificial Sequence: Synthetic oligonucleotide
  Sense strand starting at position 3384 of SEQ ID NO: 1883560
uugggaaacuucuaccaug

SEQ ID NO: 2201155 - RNA, 19 nt, Artificial Sequence
  Description of Artificial Sequence: Synthetic oligonucleotide
  Antisense strand to SEQ ID NO: 2201154
caugguagaaguuucccaa

SEQ ID NO: 2201156 - RNA, 19 nt, Artificial Sequence
  Description of Artificial Sequence: Synthetic oligonucleotide
  Sense strand starting at position 452 of SEQ ID NO: 1883560
ugcuguccuccggguaaag

SEQ ID NO: 2201157 - RNA, 19 nt, Artificial Sequence
  Description of Artificial Sequence: Synthetic oligonucleotide
  Antisense strand to SEQ ID NO: 2201156
cuuuacccggaggacagca

SEQ ID NO: 2201158 - RNA, 19 nt, Artificial Sequence
  Description of Artificial Sequence: Synthetic oligonucleotide
  Sense strand starting at position 186 of SEQ ID NO: 1883560
ccagaagauucugaaggcu

SEQ ID NO: 2201159 - RNA, 19 nt, Artificial Sequence
  Description of Artificial Sequence: Synthetic oligonucleotide
  Antisense strand to SEQ ID NO: 2201158
agccuucagaaucuucugg

SEQ ID NO: 2201160 - RNA, 19 nt, Artificial Sequence
  Description of Artificial Sequence: Synthetic oligonucleotide
  Sense strand starting at position 3387 of SEQ ID NO: 1883560
ggaaacuucuaccauggca

SEQ ID NO: 2201161 - RNA, 19 nt, Artificial Sequence
  Description of Artificial Sequence: Synthetic oligonucleotide
  Antisense strand to SEQ ID NO: 2201160
ugccaugguagaaguuucc

SEQ ID NO: 2201162 - RNA, 19 nt, Artificial Sequence
  Description of Artificial Sequence: Synthetic oligonucleotide
  Sense strand starting at position 450 of SEQ ID NO: 1883560
ccugcuguccuccggguaa

SEQ ID NO: 2201163 - RNA, 19 nt, Artificial Sequence
  Description of Artificial Sequence: Synthetic oligonucleotide
  Antisense strand to SEQ ID NO: 2201162
uuacccggaggacagcagg

SEQ ID NO: 2201164 - RNA, 19 nt, Artificial Sequence
  Description of Artificial Sequence: Synthetic oligonucleotide
  Sense strand starting at position 2125 of SEQ ID NO: 1883560
guuggaaucucugagcaag

SEQ ID NO: 2201165 - RNA, 19 nt, Artificial Sequence
  Description of Artificial Sequence: Synthetic oligonucleotide
  Antisense strand to SEQ ID NO: 2201164
cuugcucagagauuccaac

SEQ ID NO: 2201166 - RNA, 19 nt, Artificial Sequence
  Description of Artificial Sequence: Synthetic oligonucleotide
  Sense strand starting at position 39 of SEQ ID NO: 1883560
guuuccaccuucuagacau

SEQ ID NO: 2201167 - RNA, 19 nt, Artificial Sequence
  Description of Artificial Sequence: Synthetic oligonucleotide
  Antisense strand to SEQ ID NO: 2201166
augucuagaagguggaaac

SEQ ID NO: 2201168 - RNA, 19 nt, Artificial Sequence
  Description of Artificial Sequence: Synthetic oligonucleotide
  Sense strand starting at position 284 of SEQ ID NO: 1883560
gggugagugcucugcguca

SEQ ID NO: 2201169 - RNA, 19 nt, Artificial Sequence
  Description of Artificial Sequence: Synthetic oligonucleotide
  Antisense strand to SEQ ID NO: 2201168
ugacgcagagcacucaccc

SEQ ID NO: 2201170 - RNA, 19 nt, Artificial Sequence
  Description of Artificial Sequence: Synthetic oligonucleotide
  Sense strand starting at position 3236 of SEQ ID NO: 1883560
ggugccacauccuguuaua

SEQ ID NO: 2201171 - RNA, 19 nt, Artificial Sequence
  Description of Artificial Sequence: Synthetic oligonucleotide
  Antisense strand to SEQ ID NO: 2201170
uauaacaggauguggcacc

SEQ ID NO: 2201172 - RNA, 19 nt, Artificial Sequence
  Description of Artificial Sequence: Synthetic oligonucleotide
  Sense strand starting at position 2112 of SEQ ID NO: 1883560
uucccuuuguccuguugga

SEQ ID NO: 2201173 - RNA, 19 nt, Artificial Sequence
  Description of Artificial Sequence: Synthetic oligonucleotide
  Antisense strand to SEQ ID NO: 2201172
uccaacaggacaaagggaa

SEQ ID NO: 2201174 - RNA, 19 nt, Artificial Sequence
  Description of Artificial Sequence: Synthetic oligonucleotide
  Sense strand starting at position 374 of SEQ ID NO: 1883560
ggugcaagcucuggcauga

SEQ ID NO: 2201175 - RNA, 19 nt, Artificial Sequence
  Description of Artificial Sequence: Synthetic oligonucleotide
  Antisense strand to SEQ ID NO: 2201174
ucaugccagagcuugcacc

SEQ ID NO: 2201176 - RNA, 19 nt, Artificial Sequence
  Description of Artificial Sequence: Synthetic oligonucleotide
  Sense strand starting at position 1100 of SEQ ID NO: 1883561
agaugauacuaggucuaca

SEQ ID NO: 2201177 - RNA, 19 nt, Artificial Sequence
  Description of Artificial Sequence: Synthetic oligonucleotide
  Antisense strand to SEQ ID NO: 2201176
uguagaccuaguaucaucu

SEQ ID NO: 2201178 - RNA, 19 nt, Artificial Sequence
  Description of Artificial Sequence: Synthetic oligonucleotide
  Sense strand starting at position 2787 of SEQ ID NO: 1883561
auauuucuggaguguugua

SEQ ID NO: 2201179 - RNA, 19 nt, Artificial Sequence
  Description of Artificial Sequence: Synthetic oligonucleotide
  Antisense strand to SEQ ID NO: 2201178
uacaacacuccagaaauau

SEQ ID NO: 2201180 - RNA, 19 nt, Artificial Sequence
  Description of Artificial Sequence: Synthetic oligonucleotide
  Sense strand starting at position 3354 of SEQ ID NO: 1883561
uguuauuuguuuccuuaag

SEQ ID NO: 2201181 - RNA, 19 nt, Artificial Sequence
  Description of Artificial Sequence: Synthetic oligonucleotide
  Antisense strand to SEQ ID NO: 2201180
cuuaaggaaacaaauaaca

SEQ ID NO: 2201182 - RNA, 19 nt, Artificial Sequence
  Description of Artificial Sequence: Synthetic oligonucleotide
  Sense strand starting at position 108 of SEQ ID NO: 1883561
ugccuacucuggguaauuu

SEQ ID NO: 2201183 - RNA, 19 nt, Artificial Sequence
  Description of Artificial Sequence: Synthetic oligonucleotide
  Antisense strand to SEQ ID NO: 2201182
aaauuacccagaguaggca

SEQ ID NO: 2201184 - RNA, 19 nt, Artificial Sequence
  Description of Artificial Sequence: Synthetic oligonucleotide
  Sense strand starting at position 3377 of SEQ ID NO: 1883561
aauaguguaccagauagua

SEQ ID NO: 2201185 - RNA, 19 nt, Artificial Sequence
  Description of Artificial Sequence: Synthetic oligonucleotide
  Antisense strand to SEQ ID NO: 2201184
uacuaucugguacacuauu

SEQ ID NO: 2201186 - RNA, 19 nt, Artificial Sequence
  Description of Artificial Sequence: Synthetic oligonucleotide
  Sense strand starting at position 480 of SEQ ID NO: 1883561
gguggauugguaggauaaa

SEQ ID NO: 2201187 - RNA, 19 nt, Artificial Sequence
  Description of Artificial Sequence: Synthetic oligonucleotide
  Antisense strand to SEQ ID NO: 2201186
uuuauccuaccaauccacc

SEQ ID NO: 2201188 - RNA, 19 nt, Artificial Sequence
  Description of Artificial Sequence: Synthetic oligonucleotide
  Sense strand starting at position 3507 of SEQ ID NO: 1883561
cuuggacauguaggauuaa

SEQ ID NO: 2201189 - RNA, 19 nt, Artificial Sequence
  Description of Artificial Sequence: Synthetic oligonucleotide
  Antisense strand to SEQ ID NO: 2201188
uuaauccuacauguccaag

SEQ ID NO: 2201190 - RNA, 19 nt, Artificial Sequence
  Description of Artificial Sequence: Synthetic oligonucleotide
  Sense strand starting at position 2060 of SEQ ID NO: 1883561
acacaauaagcaugugaaa

SEQ ID NO: 2201191 - RNA, 19 nt, Artificial Sequence
  Description of Artificial Sequence: Synthetic oligonucleotide
  Antisense strand to SEQ ID NO: 2201190
uuucacaugcuuauugugu

SEQ ID NO: 2201192 - RNA, 19 nt, Artificial Sequence
  Description of Artificial Sequence: Synthetic oligonucleotide
  Sense strand starting at position 287 of SEQ ID NO: 1883561
gagaauucuguuuacagug

SEQ ID NO: 2201193 - RNA, 19 nt, Artificial Sequence
  Description of Artificial Sequence: Synthetic oligonucleotide
  Antisense strand to SEQ ID NO: 2201192
cacuguaaacagaauucuc

SEQ ID NO: 2201194 - RNA, 19 nt, Artificial Sequence
  Description of Artificial Sequence: Synthetic oligonucleotide
  Sense strand starting at position 1382 of SEQ ID NO: 1883561
gucaaugaauagccagaga

SEQ ID NO: 2201195 - RNA, 19 nt, Artificial Sequence
  Description of Artificial Sequence: Synthetic oligonucleotide
  Antisense strand to SEQ ID NO: 2201194
ucucuggcuauucauugac

SEQ ID NO: 2201196 - RNA, 19 nt, Artificial Sequence
  Description of Artificial Sequence: Synthetic oligonucleotide
  Sense strand starting at position 2320 of SEQ ID NO: 1883561
ugaaauauugcauggauua

SEQ ID NO: 2201197 - RNA, 19 nt, Artificial Sequence
  Description of Artificial Sequence: Synthetic oligonucleotide
  Antisense strand to SEQ ID NO: 2201196
uaauccaugcaauauuuca

SEQ ID NO: 2201198 - RNA, 19 nt, Artificial Sequence
  Description of Artificial Sequence: Synthetic oligonucleotide
  Sense strand starting at position 28 of SEQ ID NO: 1883561
guaaauaacguccagauac

SEQ ID NO: 2201199 - RNA, 19 nt, Artificial Sequence
  Description of Artificial Sequence: Synthetic oligonucleotide
  Antisense strand to SEQ ID NO: 2201198
guaucuggacguuauuuac

SEQ ID NO: 2201200 - RNA, 19 nt, Artificial Sequence
  Description of Artificial Sequence: Synthetic oligonucleotide
  Sense strand starting at position 526 of SEQ ID NO: 1883561
cuggaaugugccuaacuaa

SEQ ID NO: 2201201 - RNA, 19 nt, Artificial Sequence
  Description of Artificial Sequence: Synthetic oligonucleotide
  Antisense strand to SEQ ID NO: 2201200
uuaguuaggcacauuccag

SEQ ID NO: 2201202 - RNA, 19 nt, Artificial Sequence
  Description of Artificial Sequence: Synthetic oligonucleotide
  Sense strand starting at position 2605 of SEQ ID NO: 1883561
cgaauugagcccuaaauug

SEQ ID NO: 2201203 - RNA, 19 nt, Artificial Sequence
  Description of Artificial Sequence: Synthetic oligonucleotide
  Antisense strand to SEQ ID NO: 2201202
caauuuagggcucaauucg

SEQ ID NO: 2201204 - RNA, 19 nt, Artificial Sequence
  Description of Artificial Sequence: Synthetic oligonucleotide
  Sense strand starting at position 2625 of SEQ ID NO: 1883561
guuagugacaguuaaauac

SEQ ID NO: 2201205 - RNA, 19 nt, Artificial Sequence
  Description of Artificial Sequence: Synthetic oligonucleotide
  Antisense strand to SEQ ID NO: 2201204
guauuuaacugucacuaac

SEQ ID NO: 2201206 - RNA, 19 nt, Artificial Sequence
  Description of Artificial Sequence: Synthetic oligonucleotide
  Sense strand starting at position 1158 of SEQ ID NO: 1883561
cuccucugucgagaaauga

SEQ ID NO: 2201207 - RNA, 19 nt, Artificial Sequence
  Description of Artificial Sequence: Synthetic oligonucleotide
  Antisense strand to SEQ ID NO: 2201206
ucauuucucgacagaggag

SEQ ID NO: 2201208 - RNA, 19 nt, Artificial Sequence
  Description of Artificial Sequence: Synthetic oligonucleotide
  Sense strand starting at position 3503 of SEQ ID NO: 1883561
uuaccuuggacauguagga

SEQ ID NO: 2201209 - RNA, 19 nt, Artificial Sequence
  Description of Artificial Sequence: Synthetic oligonucleotide
  Antisense strand to SEQ ID NO: 2201208
uccuacauguccaagguaa

SEQ ID NO: 2201210 - RNA, 19 nt, Artificial Sequence
  Description of Artificial Sequence: Synthetic oligonucleotide
  Sense strand starting at position 2594 of SEQ ID NO: 1883561
ugauacuuuggcgaauuga

SEQ ID NO: 2201211 - RNA, 19 nt, Artificial Sequence
  Description of Artificial Sequence: Synthetic oligonucleotide
  Antisense strand to SEQ ID NO: 2201210
ucaauucgccaaaguauca

SEQ ID NO: 2201212 - RNA, 19 nt, Artificial Sequence
  Description of Artificial Sequence: Synthetic oligonucleotide
  Sense strand starting at position 791 of SEQ ID NO: 1883561
agggauccuacguaaaugu

SEQ ID NO: 2201213 - RNA, 19 nt, Artificial Sequence
  Description of Artificial Sequence: Synthetic oligonucleotide
  Antisense strand to SEQ ID NO: 2201212
acauuuacguaggaucccu

SEQ ID NO: 2201214 - RNA, 19 nt, Artificial Sequence
  Description of Artificial Sequence: Synthetic oligonucleotide
  Sense strand starting at position 3587 of SEQ ID NO: 1883561
uagauauccaguggaggua

SEQ ID NO: 2201215 - RNA, 19 nt, Artificial Sequence
  Description of Artificial Sequence: Synthetic oligonucleotide
  Antisense strand to SEQ ID NO: 2201214
uaccuccacuggauaucua

SEQ ID NO: 2201216 - RNA, 19 nt, Artificial Sequence
  Description of Artificial Sequence: Synthetic oligonucleotide
  Sense strand starting at position 3586 of SEQ ID NO: 1883561
auagauauccaguggaggu

SEQ ID NO: 2201217 - RNA, 19 nt, Artificial Sequence
  Description of Artificial Sequence: Synthetic oligonucleotide
  Antisense strand to SEQ ID NO: 2201216
accuccacuggauaucuau

SEQ ID NO: 2201218 - RNA, 19 nt, Artificial Sequence
  Description of Artificial Sequence: Synthetic oligonucleotide
  Sense strand starting at position 3156 of SEQ ID NO: 1883561
guugauugugcugaaagaa

SEQ ID NO: 2201219 - RNA, 19 nt, Artificial Sequence
  Description of Artificial Sequence: Synthetic oligonucleotide
  Antisense strand to SEQ ID NO: 2201218
uucuuucagcacaaucaac

SEQ ID NO: 2201220 - RNA, 19 nt, Artificial Sequence
  Description of Artificial Sequence: Synthetic oligonucleotide
  Sense strand starting at position 3887 of SEQ ID NO: 1883561
ggaauauuaucacuugguc

SEQ ID NO: 2201221 - RNA, 19 nt, Artificial Sequence
  Description of Artificial Sequence: Synthetic oligonucleotide
  Antisense strand to SEQ ID NO: 2201220
gaccaagugauaauauucc

SEQ ID NO: 2201222 - RNA, 19 nt, Artificial Sequence
  Description of Artificial Sequence: Synthetic oligonucleotide
  Sense strand starting at position 1951 of SEQ ID NO: 1883561
ccaguaacucgagagcaca

SEQ ID NO: 2201223 - RNA, 19 nt, Artificial Sequence
  Description of Artificial Sequence: Synthetic oligonucleotide
  Antisense strand to SEQ ID NO: 2201222
ugugcucucgaguuacugg

SEQ ID NO: 2201224 - RNA, 19 nt, Artificial Sequence
  Description of Artificial Sequence: Synthetic oligonucleotide
  Sense strand starting at position 761 of SEQ ID NO: 1883561
aaauuagaguuuguuugga

SEQ ID NO: 2201225 - RNA, 19 nt, Artificial Sequence
  Description of Artificial Sequence: Synthetic oligonucleotide
  Antisense strand to SEQ ID NO: 2201224
uccaaacaaacucuaauuu

SEQ ID NO: 2201226 - RNA, 19 nt, Artificial Sequence
  Description of Artificial Sequence: Synthetic oligonucleotide
  Sense strand starting at position 763 of SEQ ID NO: 1883561
auuagaguuuguuuggaaa

SEQ ID NO: 2201227 - RNA, 19 nt, Artificial Sequence
  Description of Artificial Sequence: Synthetic oligonucleotide
  Antisense strand to SEQ ID NO: 2201226
uuuccaaacaaacucuaau

SEQ ID NO: 2201228 - RNA, 19 nt, Artificial Sequence
  Description of Artificial Sequence: Synthetic oligonucleotide
  Sense strand starting at position 790 of SEQ ID NO: 1883561
cagggauccuacguaaaug

SEQ ID NO: 2201229 - RNA, 19 nt, Artificial Sequence
  Description of Artificial Sequence: Synthetic oligonucleotide
  Antisense strand to SEQ ID NO: 2201228
cauuuacguaggaucccug

SEQ ID NO: 2201230 - RNA, 19 nt, Artificial Sequence
  Description of Artificial Sequence: Synthetic oligonucleotide
  Sense strand starting at position 3552 of SEQ ID NO: 1883561
ggacauaaauugcuucuua

SEQ ID NO: 2201231 - RNA, 19 nt, Artificial Sequence
  Description of Artificial Sequence: Synthetic oligonucleotide
  Antisense strand to SEQ ID NO: 2201230
uaagaagcaauuuaugucc

SEQ ID NO: 2201232 - RNA, 19 nt, Artificial Sequence
  Description of Artificial Sequence: Synthetic oligonucleotide
  Sense strand starting at position 3846 of SEQ ID NO: 1883561
ucaguuggucauugaaaga

SEQ ID NO: 2201233 - RNA, 19 nt, Artificial Sequence
  Description of Artificial Sequence: Synthetic oligonucleotide
  Antisense strand to SEQ ID NO: 2201232
ucuuucaaugaccaacuga

SEQ ID NO: 2201234 - RNA, 19 nt, Artificial Sequence
  Description of Artificial Sequence: Synthetic oligonucleotide
  Sense strand starting at position 2151 of SEQ ID NO: 1883561
uguuguggcauuuguaaau

SEQ ID NO: 2201235 - RNA, 19 nt, Artificial Sequence
  Description of Artificial Sequence: Synthetic oligonucleotide
  Antisense strand to SEQ ID NO: 2201234
auuuacaaaugccacaaca

SEQ ID NO: 2201236 - RNA, 19 nt, Artificial Sequence
  Description of Artificial Sequence: Synthetic oligonucleotide
  Sense strand starting at position 2179 of SEQ ID NO: 1883561
uuuggaguugaucauguuu

SEQ ID NO: 2201237 - RNA, 19 nt, Artificial Sequence
  Description of Artificial Sequence: Synthetic oligonucleotide
  Antisense strand to SEQ ID NO: 2201236
aaacaugaucaacuccaaa

SEQ ID NO: 2201238 - RNA, 19 nt, Artificial Sequence
  Description of Artificial Sequence: Synthetic oligonucleotide
  Sense strand starting at position 273 of SEQ ID NO: 1883561
gguauucugcuagggagaa

SEQ ID NO: 2201239 - RNA, 19 nt, Artificial Sequence
  Description of Artificial Sequence: Synthetic oligonucleotide
  Antisense strand to SEQ ID NO: 2201238
uucucccuagcagaauacc

SEQ ID NO: 2201240 - RNA, 19 nt, Artificial Sequence
  Description of Artificial Sequence: Synthetic oligonucleotide
  Sense strand starting at position 2794 of SEQ ID NO: 1883561
uggaguguuguauaaagua

SEQ ID NO: 2201241 - RNA, 19 nt, Artificial Sequence
  Description of Artificial Sequence: Synthetic oligonucleotide
  Antisense strand to SEQ ID NO: 2201240
uacuuuauacaacacucca

SEQ ID NO: 2201242 - RNA, 19 nt, Artificial Sequence
  Description of Artificial Sequence: Synthetic oligonucleotide
  Sense strand starting at position 1078 of SEQ ID NO: 1883561
guucaagguccguaagaga

SEQ ID NO: 2201243 - RNA, 19 nt, Artificial Sequence
  Description of Artificial Sequence: Synthetic oligonucleotide
  Antisense strand to SEQ ID NO: 2201242
ucucuuacggaccuugaac

SEQ ID NO: 2201244 - RNA, 19 nt, Artificial Sequence
  Description of Artificial Sequence: Synthetic oligonucleotide
  Sense strand starting at position 969 of SEQ ID NO: 1883561
uaguaagagguuuguggaa

SEQ ID NO: 2201245 - RNA, 19 nt, Artificial Sequence
  Description of Artificial Sequence: Synthetic oligonucleotide
  Antisense strand to SEQ ID NO: 2201244
uuccacaaaccucuuacua

SEQ ID NO: 2201246 - RNA, 19 nt, Artificial Sequence
  Description of Artificial Sequence: Synthetic oligonucleotide
  Sense strand starting at position 3352 of SEQ ID NO: 1883561
guuguuauuuguuuccuua

SEQ ID NO: 2201247 - RNA, 19 nt, Artificial Sequence
  Description of Artificial Sequence: Synthetic oligonucleotide
  Antisense strand to SEQ ID NO: 2201246
uaaggaaacaaauaacaac

SEQ ID NO: 2201248 - RNA, 19 nt, Artificial Sequence
  Description of Artificial Sequence: Synthetic oligonucleotide
  Sense strand starting at position 1156 of SEQ ID NO: 1883561
cccuccucugucgagaaau

SEQ ID NO: 2201249 - RNA, 19 nt, Artificial Sequence
  Description of Artificial Sequence: Synthetic oligonucleotide
  Antisense strand to SEQ ID NO: 2201248
auuucucgacagaggaggg

SEQ ID NO: 2201250 - RNA, 19 nt, Artificial Sequence
  Description of Artificial Sequence: Synthetic oligonucleotide
  Sense strand starting at position 286 of SEQ ID NO: 1883561
ggagaauucuguuuacagu

SEQ ID NO: 2201251 - RNA, 19 nt, Artificial Sequence
  Description of Artificial Sequence: Synthetic oligonucleotide
  Antisense strand to SEQ ID NO: 2201250
acuguaaacagaauucucc

SEQ ID NO: 2201252 - RNA, 19 nt, Artificial Sequence
  Description of Artificial Sequence: Synthetic oligonucleotide
  Sense strand starting at position 1049 of SEQ ID NO: 1883561
uguaguauaucccuauaaa

SEQ ID NO: 2201253 - RNA, 19 nt, Artificial Sequence
  Description of Artificial Sequence: Synthetic oligonucleotide
  Antisense strand to SEQ ID NO: 2201252
uuuauagggauauacuaca

SEQ ID NO: 2201254 - RNA, 19 nt, Artificial Sequence
  Description of Artificial Sequence: Synthetic oligonucleotide
  Sense strand starting at position 3207 of SEQ ID NO: 1883561
caauuacaugcuggaguga

SEQ ID NO: 2201255 - RNA, 19 nt, Artificial Sequence
  Description of Artificial Sequence: Synthetic oligonucleotide
  Antisense strand to SEQ ID NO: 2201254
ucacuccagcauguaauug

SEQ ID NO: 2201256 - RNA, 19 nt, Artificial Sequence
  Description of Artificial Sequence: Synthetic oligonucleotide
  Sense strand starting at position 734 of SEQ ID NO: 1883562
gggauaauuggucagccac

SEQ ID NO: 2201257 - RNA, 19 nt, Artificial Sequence
  Description of Artificial Sequence: Synthetic oligonucleotide
  Antisense strand to SEQ ID NO: 2201256
guggcugaccaauuauccc

SEQ ID NO: 2201258 - RNA, 19 nt, Artificial Sequence
  Description of Artificial Sequence: Synthetic oligonucleotide
  Sense strand starting at position 2481 of SEQ ID NO: 1883562
gggucauccacggacgaaa

SEQ ID NO: 2201259 - RNA, 19 nt, Artificial Sequence
  Description of Artificial Sequence: Synthetic oligonucleotide
  Antisense strand to SEQ ID NO: 2201258
uuucguccguggaugaccc

SEQ ID NO: 2201260 - RNA, 19 nt, Artificial Sequence
  Description of Artificial Sequence: Synthetic oligonucleotide
  Sense strand starting at position 3455 of SEQ ID NO: 1883562
gaaagugagcugugaggga

SEQ ID NO: 2201261 - RNA, 19 nt, Artificial Sequence
  Description of Artificial Sequence: Synthetic oligonucleotide
  Antisense strand to SEQ ID NO: 2201260
ucccucacagcucacuuuc

SEQ ID NO: 2201262 - RNA, 19 nt, Artificial Sequence
  Description of Artificial Sequence: Synthetic oligonucleotide
  Sense strand starting at position 3239 of SEQ ID NO: 1883562
ggugaaauuugagggagga

SEQ ID NO: 2201263 - RNA, 19 nt, Artificial Sequence
  Description of Artificial Sequence: Synthetic oligonucleotide
  Antisense strand to SEQ ID NO: 2201262
uccucccucaaauuucacc

SEQ ID NO: 2201264 - RNA, 19 nt, Artificial Sequence
  Description of Artificial Sequence: Synthetic oligonucleotide
  Sense strand starting at position 3176 of SEQ ID NO: 1883562
ugugcuuuggccgcuaauu

SEQ ID NO: 2201265 - RNA, 19 nt, Artificial Sequence
  Description of Artificial Sequence: Synthetic oligonucleotide
  Antisense strand to SEQ ID NO: 2201264
aauuagcggccaaagcaca

SEQ ID NO: 2201266 - RNA, 19 nt, Artificial Sequence
  Description of Artificial Sequence: Synthetic oligonucleotide
  Sense strand starting at position 1488 of SEQ ID NO: 1883562
ucaucucugcauuaggagu

SEQ ID NO: 2201267 - RNA, 19 nt, Artificial Sequence
  Description of Artificial Sequence: Synthetic oligonucleotide
  Antisense strand to SEQ ID NO: 2201266
acuccuaaugcagagauga

SEQ ID NO: 2201268 - RNA, 19 nt, Artificial Sequence
  Description of Artificial Sequence: Synthetic oligonucleotide
  Sense strand starting at position 733 of SEQ ID NO: 1883562
ugggauaauuggucagcca

SEQ ID NO: 2201269 - RNA, 19 nt, Artificial Sequence
  Description of Artificial Sequence: Synthetic oligonucleotide
  Antisense strand to SEQ ID NO: 2201268
uggcugaccaauuauccca

SEQ ID NO: 2201270 - RNA, 19 nt, Artificial Sequence
  Description of Artificial Sequence: Synthetic oligonucleotide
  Sense strand starting at position 1506 of SEQ ID NO: 1883562
ugcugcauuugucuuccaa

SEQ ID NO: 2201271 - RNA, 19 nt, Artificial Sequence
  Description of Artificial Sequence: Synthetic oligonucleotide
  Antisense strand to SEQ ID NO: 2201270
uuggaagacaaaugcagca

SEQ ID NO: 2201272 - RNA, 19 nt, Artificial Sequence
  Description of Artificial Sequence: Synthetic oligonucleotide
  Sense strand starting at position 1424 of SEQ ID NO: 1883562
gaggcaaugcauuagcauu

SEQ ID NO: 2201273 - RNA, 19 nt, Artificial Sequence
  Description of Artificial Sequence: Synthetic oligonucleotide
  Antisense strand to SEQ ID NO: 2201272
aaugcuaaugcauugccuc

SEQ ID NO: 2201274 - RNA, 19 nt, Artificial Sequence
  Description of Artificial Sequence: Synthetic oligonucleotide
  Sense strand starting at position 1416 of SEQ ID NO: 1883562
uuuguauugaggcaaugca

SEQ ID NO: 2201275 - RNA, 19 nt, Artificial Sequence
  Description of Artificial Sequence: Synthetic oligonucleotide
  Antisense strand to SEQ ID NO: 2201274
ugcauugccucaauacaaa

SEQ ID NO: 2201276 - RNA, 19 nt, Artificial Sequence
  Description of Artificial Sequence: Synthetic oligonucleotide
  Sense strand starting at position 3259 of SEQ ID NO: 1883562
aggugaggcaacugucaua

SEQ ID NO: 2201277 - RNA, 19 nt, Artificial Sequence
  Description of Artificial Sequence: Synthetic oligonucleotide
  Antisense strand to SEQ ID NO: 2201276
uaugacaguugccucaccu

SEQ ID NO: 2201278 - RNA, 19 nt, Artificial Sequence
  Description of Artificial Sequence: Synthetic oligonucleotide
  Sense strand starting at position 3108 of SEQ ID NO: 1883562
gaaaguguguucccaucag

SEQ ID NO: 2201279 - RNA, 19 nt, Artificial Sequence
  Description of Artificial Sequence: Synthetic oligonucleotide
  Antisense strand to SEQ ID NO: 2201278
cugaugggaacacacuuuc

SEQ ID NO: 2201280 - RNA, 19 nt, Artificial Sequence
  Description of Artificial Sequence: Synthetic oligonucleotide
  Sense strand starting at position 1485 of SEQ ID NO: 1883562
gugucaucucugcauuagg

SEQ ID NO: 2201281 - RNA, 19 nt, Artificial Sequence
  Description of Artificial Sequence: Synthetic oligonucleotide
  Antisense strand to SEQ ID NO: 2201280
ccuaaugcagagaugacac

SEQ ID NO: 2201282 - RNA, 19 nt, Artificial Sequence
  Description of Artificial Sequence: Synthetic oligonucleotide
  Sense strand starting at position 3104 of SEQ ID NO: 1883562
ggacgaaaguguguuccca

SEQ ID NO: 2201283 - RNA, 19 nt, Artificial Sequence
  Description of Artificial Sequence: Synthetic oligonucleotide
  Antisense strand to SEQ ID NO: 2201282
ugggaacacacuuucgucc

SEQ ID NO: 2201284 - RNA, 19 nt, Artificial Sequence
  Description of Artificial Sequence: Synthetic oligonucleotide
  Sense strand starting at position 3106 of SEQ ID NO: 1883562
acgaaaguguguucccauc

SEQ ID NO: 2201285 - RNA, 19 nt, Artificial Sequence
  Description of Artificial Sequence: Synthetic oligonucleotide
  Antisense strand to SEQ ID NO: 2201284
gaugggaacacacuuucgu

SEQ ID NO: 2201286 - RNA, 19 nt, Artificial Sequence
  Description of Artificial Sequence: Synthetic oligonucleotide
  Sense strand starting at position 1484 of SEQ ID NO: 1883562
ggugucaucucugcauuag

SEQ ID NO: 2201287 - RNA, 19 nt, Artificial Sequence
  Description of Artificial Sequence: Synthetic oligonucleotide
  Antisense strand to SEQ ID NO: 2201286
cuaaugcagagaugacacc

SEQ ID NO: 2201288 - RNA, 19 nt, Artificial Sequence
  Description of Artificial Sequence: Synthetic oligonucleotide
  Sense strand starting at position 1483 of SEQ ID NO: 1883562
gggugucaucucugcauua

SEQ ID NO: 2201289 - RNA, 19 nt, Artificial Sequence
  Description of Artificial Sequence: Synthetic oligonucleotide
  Antisense strand to SEQ ID NO: 2201288
uaaugcagagaugacaccc

SEQ ID NO: 2201290 - RNA, 19 nt, Artificial Sequence
  Description of Artificial Sequence: Synthetic oligonucleotide
  Sense strand starting at position 1313 of SEQ ID NO: 1883562
gguucauuacuacguuugu

SEQ ID NO: 2201291 - RNA, 19 nt, Artificial Sequence
  Description of Artificial Sequence: Synthetic oligonucleotide
  Antisense strand to SEQ ID NO: 2201290
acaaacguaguaaugaacc

SEQ ID NO: 2201292 - RNA, 19 nt, Artificial Sequence
  Description of Artificial Sequence: Synthetic oligonucleotide
  Sense strand starting at position 3262 of SEQ ID NO: 1883562
ugaggcaacugucauagaa

SEQ ID NO: 2201293 - RNA, 19 nt, Artificial Sequence
  Description of Artificial Sequence: Synthetic oligonucleotide
  Antisense strand to SEQ ID NO: 2201292
uucuaugacaguugccuca

SEQ ID NO: 2201294 - RNA, 19 nt, Artificial Sequence
  Description of Artificial Sequence: Synthetic oligonucleotide
  Sense strand starting at position 1510 of SEQ ID NO: 1883562
gcauuugucuuccaaggcu

SEQ ID NO: 2201295 - RNA, 19 nt, Artificial Sequence
  Description of Artificial Sequence: Synthetic oligonucleotide
  Antisense strand to SEQ ID NO: 2201294
agccuuggaagacaaaugc

SEQ ID NO: 2201296 - RNA, 19 nt, Artificial Sequence
  Description of Artificial Sequence: Synthetic oligonucleotide
  Sense strand starting at position 3175 of SEQ ID NO: 1883562
gugugcuuuggccgcuaau

SEQ ID NO: 2201297 - RNA, 19 nt, Artificial Sequence
  Description of Artificial Sequence: Synthetic oligonucleotide
  Antisense strand to SEQ ID NO: 2201296
auuagcggccaaagcacac

SEQ ID NO: 2201298 - RNA, 19 nt, Artificial Sequence
  Description of Artificial Sequence: Synthetic oligonucleotide
  Sense strand starting at position 3316 of SEQ ID NO: 1883563
uccacaagugauuaguuga

SEQ ID NO: 2201299 - RNA, 19 nt, Artificial Sequence
  Description of Artificial Sequence: Synthetic oligonucleotide
  Antisense strand to SEQ ID NO: 2201298
ucaacuaaucacuugugga

SEQ ID NO: 2201300 - RNA, 19 nt, Artificial Sequence
  Description of Artificial Sequence: Synthetic oligonucleotide
  Sense strand starting at position 3221 of SEQ ID NO: 1883563
ccgguaaaucguuuggccu

SEQ ID NO: 2201301 - RNA, 19 nt, Artificial Sequence
  Description of Artificial Sequence: Synthetic oligonucleotide
  Antisense strand to SEQ ID NO: 2201300
aggccaaacgauuuaccgg

SEQ ID NO: 2201302 - RNA, 19 nt, Artificial Sequence
  Description of Artificial Sequence: Synthetic oligonucleotide
  Sense strand starting at position 1045 of SEQ ID NO: 1883563
ggcugucugcuuuaaauuu

SEQ ID NO: 2201303 - RNA, 19 nt, Artificial Sequence
  Description of Artificial Sequence: Synthetic oligonucleotide
  Antisense strand to SEQ ID NO: 2201302
aaauuuaaagcagacagcc

SEQ ID NO: 2201304 - RNA, 19 nt, Artificial Sequence
  Description of Artificial Sequence: Synthetic oligonucleotide
  Sense strand starting at position 2231 of SEQ ID NO: 1883563
agcuguggcguccugauau

SEQ ID NO: 2201305 - RNA, 19 nt, Artificial Sequence
  Description of Artificial Sequence: Synthetic oligonucleotide
  Antisense strand to SEQ ID NO: 2201304
auaucaggacgccacagcu

SEQ ID NO: 2201306 - RNA, 19 nt, Artificial Sequence
  Description of Artificial Sequence: Synthetic oligonucleotide
  Sense strand starting at position 2633 of SEQ ID NO: 1883563
cuguguuaacaggaaguaa

SEQ ID NO: 2201307 - RNA, 19 nt, Artificial Sequence
  Description of Artificial Sequence: Synthetic oligonucleotide
  Antisense strand to SEQ ID NO: 2201306
uuacuuccuguuaacacag

SEQ ID NO: 2201308 - RNA, 19 nt, Artificial Sequence
  Description of Artificial Sequence: Synthetic oligonucleotide
  Sense strand starting at position 2505 of SEQ ID NO: 1883563
ggguguaauccugauaacu

SEQ ID NO: 2201309 - RNA, 19 nt, Artificial Sequence
  Description of Artificial Sequence: Synthetic oligonucleotide
  Antisense strand to SEQ ID NO: 2201308
aguuaucaggauuacaccc

SEQ ID NO: 2201310 - RNA, 19 nt, Artificial Sequence
  Description of Artificial Sequence: Synthetic oligonucleotide
  Sense strand starting at position 3306 of SEQ ID NO: 1883563
ugggauauuguccacaagu

SEQ ID NO: 2201311 - RNA, 19 nt, Artificial Sequence
  Description of Artificial Sequence: Synthetic oligonucleotide
  Antisense strand to SEQ ID NO: 2201310
acuuguggacaauauccca

SEQ ID NO: 2201312 - RNA, 19 nt, Artificial Sequence
  Description of Artificial Sequence: Synthetic oligonucleotide
  Sense strand starting at position 2030 of SEQ ID NO: 1883563
ucagaucauguccacuuau

SEQ ID NO: 2201313 - RNA, 19 nt, Artificial Sequence
  Description of Artificial Sequence: Synthetic oligonucleotide
  Antisense strand to SEQ ID NO: 2201312
auaaguggacaugaucuga

SEQ ID NO: 2201314 - RNA, 19 nt, Artificial Sequence
  Description of Artificial Sequence: Synthetic oligonucleotide
  Sense strand starting at position 1042 of SEQ ID NO: 1883563
gucggcugucugcuuuaaa

SEQ ID NO: 2201315 - RNA, 19 nt, Artificial Sequence
  Description of Artificial Sequence: Synthetic oligonucleotide
  Antisense strand to SEQ ID NO: 2201314
uuuaaagcagacagccgac

SEQ ID NO: 2201316 - RNA, 19 nt, Artificial Sequence
  Description of Artificial Sequence: Synthetic oligonucleotide
  Sense strand starting at position 3305 of SEQ ID NO: 1883563
uugggauauuguccacaag

SEQ ID NO: 2201317 - RNA, 19 nt, Artificial Sequence
  Description of Artificial Sequence: Synthetic oligonucleotide
  Antisense strand to SEQ ID NO: 2201316
cuuguggacaauaucccaa

SEQ ID NO: 2201318 - RNA, 19 nt, Artificial Sequence
  Description of Artificial Sequence: Synthetic oligonucleotide
  Sense strand starting at position 2528 of SEQ ID NO: 1883563
caguaaugacuccagguuu

SEQ ID NO: 2201319 - RNA, 19 nt, Artificial Sequence
  Description of Artificial Sequence: Synthetic oligonucleotide
  Antisense strand to SEQ ID NO: 2201318
aaaccuggagucauuacug

SEQ ID NO: 2201320 - RNA, 19 nt, Artificial Sequence
  Description of Artificial Sequence: Synthetic oligonucleotide
  Sense strand starting at position 2019 of SEQ ID NO: 1883563
cggugacucacucagauca

SEQ ID NO: 2201321 - RNA, 19 nt, Artificial Sequence
  Description of Artificial Sequence: Synthetic oligonucleotide
  Antisense strand to SEQ ID NO: 2201320
ugaucugagugagucaccg

SEQ ID NO: 2201322 - RNA, 19 nt, Artificial Sequence
  Description of Artificial Sequence: Synthetic oligonucleotide
  Sense strand starting at position 2518 of SEQ ID NO: 1883563
auaacuguaucaguaauga

SEQ ID NO: 2201323 - RNA, 19 nt, Artificial Sequence
  Description of Artificial Sequence: Synthetic oligonucleotide
  Antisense strand to SEQ ID NO: 2201322
ucauuacugauacaguuau

SEQ ID NO: 2201324 - RNA, 19 nt, Artificial Sequence
  Description of Artificial Sequence: Synthetic oligonucleotide
  Sense strand starting at position 2939 of SEQ ID NO: 1883563
ugccuugauuauuugcuua

SEQ ID NO: 2201325 - RNA, 19 nt, Artificial Sequence
  Description of Artificial Sequence: Synthetic oligonucleotide
  Antisense strand to SEQ ID NO: 2201324
uaagcaaauaaucaaggca

SEQ ID NO: 2201326 - RNA, 19 nt, Artificial Sequence
  Description of Artificial Sequence: Synthetic oligonucleotide
  Sense strand starting at position 1429 of SEQ ID NO: 1883563
ucgcgauaugcagcccauu

SEQ ID NO: 2201327 - RNA, 19 nt, Artificial Sequence
  Description of Artificial Sequence: Synthetic oligonucleotide
  Antisense strand to SEQ ID NO: 2201326
aaugggcugcauaucgcga

SEQ ID NO: 2201328 - RNA, 19 nt, Artificial Sequence
  Description of Artificial Sequence: Synthetic oligonucleotide
  Sense strand starting at position 3319 of SEQ ID NO: 1883563
acaagugauuaguugaauu

SEQ ID NO: 2201329 - RNA, 19 nt, Artificial Sequence
  Description of Artificial Sequence: Synthetic oligonucleotide
  Antisense strand to SEQ ID NO: 2201328
aauucaacuaaucacuugu

SEQ ID NO: 2201330 - RNA, 19 nt, Artificial Sequence
  Description of Artificial Sequence: Synthetic oligonucleotide
  Sense strand starting at position 2513 of SEQ ID NO: 1883563
uccugauaacuguaucagu

SEQ ID NO: 2201331 - RNA, 19 nt, Artificial Sequence
  Description of Artificial Sequence: Synthetic oligonucleotide
  Antisense strand to SEQ ID NO: 2201330
acugauacaguuaucagga

SEQ ID NO: 2201332 - RNA, 19 nt, Artificial Sequence
  Description of Artificial Sequence: Synthetic oligonucleotide
  Sense strand starting at position 3775 of SEQ ID NO: 1883563
auaacuauauuuggaggaa

SEQ ID NO: 2201333 - RNA, 19 nt, Artificial Sequence
  Description of Artificial Sequence: Synthetic oligonucleotide
  Antisense strand to SEQ ID NO: 2201332
uuccuccaaauauaguuau

SEQ ID NO: 2201334 - RNA, 19 nt, Artificial Sequence
  Description of Artificial Sequence: Synthetic oligonucleotide
  Sense strand starting at position 1005 of SEQ ID NO: 1883563
uagcuauuaggcgaagaac

SEQ ID NO: 2201335 - RNA, 19 nt, Artificial Sequence
  Description of Artificial Sequence: Synthetic oligonucleotide
  Antisense strand to SEQ ID NO: 2201334
guucuucgccuaauagcua

SEQ ID NO: 2201336 - RNA, 19 nt, Artificial Sequence
  Description of Artificial Sequence: Synthetic oligonucleotide
  Sense strand starting at position 352 of SEQ ID NO: 1883563
cauaguugguuauugggaa

SEQ ID NO: 2201337 - RNA, 19 nt, Artificial Sequence
  Description of Artificial Sequence: Synthetic oligonucleotide
  Antisense strand to SEQ ID NO: 2201336
uucccaauaaccaacuaug

SEQ ID NO: 2201338 - RNA, 19 nt, Artificial Sequence
  Description of Artificial Sequence: Synthetic oligonucleotide
  Sense strand starting at position 2549 of SEQ ID NO: 1883563
guggccuaucuguaagaag

SEQ ID NO: 2201339 - RNA, 19 nt, Artificial Sequence
  Description of Artificial Sequence: Synthetic oligonucleotide
  Antisense strand to SEQ ID NO: 2201338
cuucuuacagauaggccac

SEQ ID NO: 2201340 - RNA, 19 nt, Artificial Sequence
  Description of Artificial Sequence: Synthetic oligonucleotide
  Sense strand starting at position 2987 of SEQ ID NO: 1883563
uuggcuaauguuuaucaau

SEQ ID NO: 2201341 - RNA, 19 nt, Artificial Sequence
  Description of Artificial Sequence: Synthetic oligonucleotide
  Antisense strand to SEQ ID NO: 2201340
auugauaaacauuagccaa

SEQ ID NO: 2201342 - RNA, 19 nt, Artificial Sequence
  Description of Artificial Sequence: Synthetic oligonucleotide
  Sense strand starting at position 3694 of SEQ ID NO: 1883563
ucaagauugcaagguuaau

SEQ ID NO: 2201343 - RNA, 19 nt, Artificial Sequence
  Description of Artificial Sequence: Synthetic oligonucleotide
  Antisense strand to SEQ ID NO: 2201342
auuaaccuugcaaucuuga

SEQ ID NO: 2201344 - RNA, 19 nt, Artificial Sequence
  Description of Artificial Sequence: Synthetic oligonucleotide
  Sense strand starting at position 892 of SEQ ID NO: 1883563
agcagaaacacuugggcua

SEQ ID NO: 2201345 - RNA, 19 nt, Artificial Sequence
  Description of Artificial Sequence: Synthetic oligonucleotide
  Antisense strand to SEQ ID NO: 2201344
uagcccaaguguuucugcu

SEQ ID NO: 2201346 - RNA, 19 nt, Artificial Sequence
  Description of Artificial Sequence: Synthetic oligonucleotide
  Sense strand starting at position 2773 of SEQ ID NO: 1883563
ccaauuccugcguagaaag

SEQ ID NO: 2201347 - RNA, 19 nt, Artificial Sequence
  Description of Artificial Sequence: Synthetic oligonucleotide
  Antisense strand to SEQ ID NO: 2201346
cuuucuacgcaggaauugg

SEQ ID NO: 2201348 - RNA, 19 nt, Artificial Sequence
  Description of Artificial Sequence: Synthetic oligonucleotide
  Sense strand starting at position 3971 of SEQ ID NO: 1883563
ucuagagaugcaugguaua

SEQ ID NO: 2201349 - RNA, 19 nt, Artificial Sequence
  Description of Artificial Sequence: Synthetic oligonucleotide
  Antisense strand to SEQ ID NO: 2201348
uauaccaugcaucucuaga

SEQ ID NO: 2201350 - RNA, 19 nt, Artificial Sequence
  Description of Artificial Sequence: Synthetic oligonucleotide
  Sense strand starting at position 2029 of SEQ ID NO: 1883563
cucagaucauguccacuua

SEQ ID NO: 2201351 - RNA, 19 nt, Artificial Sequence
  Description of Artificial Sequence: Synthetic oligonucleotide
  Antisense strand to SEQ ID NO: 2201350
uaaguggacaugaucugag

SEQ ID NO: 2201352 - RNA, 19 nt, Artificial Sequence
  Description of Artificial Sequence: Synthetic oligonucleotide
  Sense strand starting at position 380 of SEQ ID NO: 1883563
cggucugugauacauaauu

SEQ ID NO: 2201353 - RNA, 19 nt, Artificial Sequence
  Description of Artificial Sequence: Synthetic oligonucleotide
  Antisense strand to SEQ ID NO: 2201352
aauuauguaucacagaccg

SEQ ID NO: 2201354 - RNA, 19 nt, Artificial Sequence
  Description of Artificial Sequence: Synthetic oligonucleotide
  Sense strand starting at position 971 of SEQ ID NO: 1883563
uuauguguuggccaaauga

SEQ ID NO: 2201355 - RNA, 19 nt, Artificial Sequence
  Description of Artificial Sequence: Synthetic oligonucleotide
  Antisense strand to SEQ ID NO: 2201354
ucauuuggccaacacauaa

SEQ ID NO: 2201356 - RNA, 19 nt, Artificial Sequence
  Description of Artificial Sequence: Synthetic oligonucleotide
  Sense strand starting at position 3940 of SEQ ID NO: 1883563
guauuucuuuaggagauga

SEQ ID NO: 2201357 - RNA, 19 nt, Artificial Sequence
  Description of Artificial Sequence: Synthetic oligonucleotide
  Antisense strand to SEQ ID NO: 2201356
ucaucuccuaaagaaauac

SEQ ID NO: 2201358 - RNA, 19 nt, Artificial Sequence
  Description of Artificial Sequence: Synthetic oligonucleotide
  Sense strand starting at position 2961 of SEQ ID NO: 1883563
aaucaauguuagguaguua

SEQ ID NO: 2201359 - RNA, 19 nt, Artificial Sequence
  Description of Artificial Sequence: Synthetic oligonucleotide
  Antisense strand to SEQ ID NO: 2201358
uaacuaccuaacauugauu

SEQ ID NO: 2201360 - RNA, 19 nt, Artificial Sequence
  Description of Artificial Sequence: Synthetic oligonucleotide
  Sense strand starting at position 3810 of SEQ ID NO: 1883563
guuuaaggauuauuagucu

SEQ ID NO: 2201361 - RNA, 19 nt, Artificial Sequence
  Description of Artificial Sequence: Synthetic oligonucleotide
  Antisense strand to SEQ ID NO: 2201360
agacuaauaauccuuaaac

SEQ ID NO: 2201362 - RNA, 19 nt, Artificial Sequence
  Description of Artificial Sequence: Synthetic oligonucleotide
  Sense strand starting at position 1209 of SEQ ID NO: 1883563
ggcaguuuccuuuaaucug

SEQ ID NO: 2201363 - RNA, 19 nt, Artificial Sequence
  Description of Artificial Sequence: Synthetic oligonucleotide
  Antisense strand to SEQ ID NO: 2201362
cagauuaaaggaaacugcc

SEQ ID NO: 2201364 - RNA, 19 nt, Artificial Sequence
  Description of Artificial Sequence: Synthetic oligonucleotide
  Sense strand starting at position 2694 of SEQ ID NO: 1883563
ugugucaacgaacauugua

SEQ ID NO: 2201365 - RNA, 19 nt, Artificial Sequence
  Description of Artificial Sequence: Synthetic oligonucleotide
  Antisense strand to SEQ ID NO: 2201364
uacaauguucguugacaca

SEQ ID NO: 2201366 - RNA, 19 nt, Artificial Sequence
  Description of Artificial Sequence: Synthetic oligonucleotide
  Sense strand starting at position 2989 of SEQ ID NO: 1883563
ggcuaauguuuaucaauau

SEQ ID NO: 2201367 - RNA, 19 nt, Artificial Sequence
  Description of Artificial Sequence: Synthetic oligonucleotide
  Antisense strand to SEQ ID NO: 2201366
auauugauaaacauuagcc

SEQ ID NO: 2201368 - RNA, 19 nt, Artificial Sequence
  Description of Artificial Sequence: Synthetic oligonucleotide
  Sense strand starting at position 2472 of SEQ ID NO: 1883563
guucuaguaucccugaaac

SEQ ID NO: 2201369 - RNA, 19 nt, Artificial Sequence
  Description of Artificial Sequence: Synthetic oligonucleotide
  Antisense strand to SEQ ID NO: 2201368
guuucagggauacuagaac

SEQ ID NO: 2201370 - RNA, 19 nt, Artificial Sequence
  Description of Artificial Sequence: Synthetic oligonucleotide
  Sense strand starting at position 2360 of SEQ ID NO: 1883563
agccucauaccagguauua

SEQ ID NO: 2201371 - RNA, 19 nt, Artificial Sequence
  Description of Artificial Sequence: Synthetic oligonucleotide
  Antisense strand to SEQ ID NO: 2201370
uaauaccugguaugaggcu

SEQ ID NO: 2201372 - RNA, 19 nt, Artificial Sequence
  Description of Artificial Sequence: Synthetic oligonucleotide
  Sense strand starting at position 3061 of SEQ ID NO: 1883563
gauuguugucuccaguuga

SEQ ID NO: 2201373 - RNA, 19 nt, Artificial Sequence
  Description of Artificial Sequence: Synthetic oligonucleotide
  Antisense strand to SEQ ID NO: 2201372
ucaacuggagacaacaauc

SEQ ID NO: 2201374 - RNA, 19 nt, Artificial Sequence
  Description of Artificial Sequence: Synthetic oligonucleotide
  Sense strand starting at position 681 of SEQ ID NO: 1883563
ggaauuccacuccgucaua

SEQ ID NO: 2201375 - RNA, 19 nt, Artificial Sequence
  Description of Artificial Sequence: Synthetic oligonucleotide
  Antisense strand to SEQ ID NO: 2201374
uaugacggaguggaauucc

SEQ ID NO: 2201376 - RNA, 19 nt, Artificial Sequence
  Description of Artificial Sequence: Synthetic oligonucleotide
  Sense strand starting at position 2017 of SEQ ID NO: 1883563
cccggugacucacucagau

SEQ ID NO: 2201377 - RNA, 19 nt, Artificial Sequence
  Description of Artificial Sequence: Synthetic oligonucleotide
  Antisense strand to SEQ ID NO: 2201376
aucugagugagucaccggg

SEQ ID NO: 2201378 - RNA, 19 nt, Artificial Sequence
  Description of Artificial Sequence: Synthetic oligonucleotide
  Sense strand starting at position 2352 of SEQ ID NO: 1883564
agcugcugccguuuagaga

SEQ ID NO: 2201379 - RNA, 19 nt, Artificial Sequence
  Description of Artificial Sequence: Synthetic oligonucleotide
  Antisense strand to SEQ ID NO: 2201378
ucucuaaacggcagcagcu

SEQ ID NO: 2201380 - RNA, 19 nt, Artificial Sequence
  Description of Artificial Sequence: Synthetic oligonucleotide
  Sense strand starting at position 10 of SEQ ID NO: 1883564
acugaauguuuauugaaug

SEQ ID NO: 2201381 - RNA, 19 nt, Artificial Sequence
  Description of Artificial Sequence: Synthetic oligonucleotide
  Antisense strand to SEQ ID NO: 2201380
cauucaauaaacauucagu

SEQ ID NO: 2201382 - RNA, 19 nt, Artificial Sequence
  Description of Artificial Sequence: Synthetic oligonucleotide
  Sense strand starting at position 2429 of SEQ ID NO: 1883564
accuauuugucguccugga

SEQ ID NO: 2201383 - RNA, 19 nt, Artificial Sequence
  Description of Artificial Sequence: Synthetic oligonucleotide
  Antisense strand to SEQ ID NO: 2201382
uccaggacgacaaauaggu

SEQ ID NO: 2201384 - RNA, 19 nt, Artificial Sequence
  Description of Artificial Sequence: Synthetic oligonucleotide
  Sense strand starting at position 7 of SEQ ID NO: 1883564
cuaacugaauguuuauuga

SEQ ID NO: 2201385 - RNA, 19 nt, Artificial Sequence
  Description of Artificial Sequence: Synthetic oligonucleotide
  Antisense strand to SEQ ID NO: 2201384
ucaauaaacauucaguuag

SEQ ID NO: 2201386 - RNA, 19 nt, Artificial Sequence
  Description of Artificial Sequence: Synthetic oligonucleotide
  Sense strand starting at position 2716 of SEQ ID NO: 1883564
ugggaagagucugucauug

SEQ ID NO: 2201387 - RNA, 19 nt, Artificial Sequence
  Description of Artificial Sequence: Synthetic oligonucleotide
  Antisense strand to SEQ ID NO: 2201386
caaugacagacucuuccca

SEQ ID NO: 2201388 - RNA, 19 nt, Artificial Sequence
  Description of Artificial Sequence: Synthetic oligonucleotide
  Sense strand starting at position 2860 of SEQ ID NO: 1883564
auaguuuaaugacugcaua

SEQ ID NO: 2201389 - RNA, 19 nt, Artificial Sequence
  Description of Artificial Sequence: Synthetic oligonucleotide
  Antisense strand to SEQ ID NO: 2201388
uaugcagucauuaaacuau

SEQ ID NO: 2201390 - RNA, 19 nt, Artificial Sequence
  Description of Artificial Sequence: Synthetic oligonucleotide
  Sense strand starting at position 3420 of SEQ ID NO: 1883564
ccuguugacgacuaaguau

SEQ ID NO: 2201391 - RNA, 19 nt, Artificial Sequence
  Description of Artificial Sequence: Synthetic oligonucleotide
  Antisense strand to SEQ ID NO: 2201390
auacuuagucgucaacagg

SEQ ID NO: 2201392 - RNA, 19 nt, Artificial Sequence
  Description of Artificial Sequence: Synthetic oligonucleotide
  Sense strand starting at position 2715 of SEQ ID NO: 1883564
uugggaagagucugucauu

SEQ ID NO: 2201393 - RNA, 19 nt, Artificial Sequence
  Description of Artificial Sequence: Synthetic oligonucleotide
  Antisense strand to SEQ ID NO: 2201392
aaugacagacucuucccaa

SEQ ID NO: 2201394 - RNA, 19 nt, Artificial Sequence
  Description of Artificial Sequence: Synthetic oligonucleotide
  Sense strand starting at position 2433 of SEQ ID NO: 1883564
auuugucguccuggaguuu

SEQ ID NO: 2201395 - RNA, 19 nt, Artificial Sequence
  Description of Artificial Sequence: Synthetic oligonucleotide
  Antisense strand to SEQ ID NO: 2201394
aaacuccaggacgacaaau

SEQ ID NO: 2201396 - RNA, 19 nt, Artificial Sequence
  Description of Artificial Sequence: Synthetic oligonucleotide
  Sense strand starting at position 1428 of SEQ ID NO: 1883564
gccugaauuccugagucuc

SEQ ID NO: 2201397 - RNA, 19 nt, Artificial Sequence
  Description of Artificial Sequence: Synthetic oligonucleotide
  Antisense strand to SEQ ID NO: 2201396
gagacucaggaauucaggc

SEQ ID NO: 2201398 - RNA, 19 nt, Artificial Sequence
  Description of Artificial Sequence: Synthetic oligonucleotide
  Sense strand starting at position 1430 of SEQ ID NO: 1883564
cugaauuccugagucucuu

SEQ ID NO: 2201399 - RNA, 19 nt, Artificial Sequence
  Description of Artificial Sequence: Synthetic oligonucleotide
  Antisense strand to SEQ ID NO: 2201398
aagagacucaggaauucag

SEQ ID NO: 2201400 - RNA, 19 nt, Artificial Sequence
  Description of Artificial Sequence: Synthetic oligonucleotide
  Sense strand starting at position 2852 of SEQ ID NO: 1883564
gcauguauauaguuuaaug

SEQ ID NO: 2201401 - RNA, 19 nt, Artificial Sequence
  Description of Artificial Sequence: Synthetic oligonucleotide
  Antisense strand to SEQ ID NO: 2201400
cauuaaacuauauacaugc

SEQ ID NO: 2201402 - RNA, 19 nt, Artificial Sequence
  Description of Artificial Sequence: Synthetic oligonucleotide
  Sense strand starting at position 3429 of SEQ ID NO: 1883564
gacuaaguaugugucccau

SEQ ID NO: 2201403 - RNA, 19 nt, Artificial Sequence
  Description of Artificial Sequence: Synthetic oligonucleotide
  Antisense strand to SEQ ID NO: 2201402
augggacacauacuuaguc

SEQ ID NO: 2201404 - RNA, 19 nt, Artificial Sequence
  Description of Artificial Sequence: Synthetic oligonucleotide
  Sense strand starting at position 3431 of SEQ ID NO: 1883564
cuaaguaugugucccauag

SEQ ID NO: 2201405 - RNA, 19 nt, Artificial Sequence
  Description of Artificial Sequence: Synthetic oligonucleotide
  Antisense strand to SEQ ID NO: 2201404
cuaugggacacauacuuag

SEQ ID NO: 2201406 - RNA, 19 nt, Artificial Sequence
  Description of Artificial Sequence: Synthetic oligonucleotide
  Sense strand starting at position 2796 of SEQ ID NO: 1883564
agaaguucuuucuugguuu

SEQ ID NO: 2201407 - RNA, 19 nt, Artificial Sequence
  Description of Artificial Sequence: Synthetic oligonucleotide
  Antisense strand to SEQ ID NO: 2201406
aaaccaagaaagaacuucu

SEQ ID NO: 2201408 - RNA, 19 nt, Artificial Sequence
  Description of Artificial Sequence: Synthetic oligonucleotide
  Sense strand starting at position 3497 of SEQ ID NO: 1883564
ugccaaugcaggugacaau

SEQ ID NO: 2201409 - RNA, 19 nt, Artificial Sequence
  Description of Artificial Sequence: Synthetic oligonucleotide
  Antisense strand to SEQ ID NO: 2201408
auugucaccugcauuggca

SEQ ID NO: 2201410 - RNA, 19 nt, Artificial Sequence
  Description of Artificial Sequence: Synthetic oligonucleotide
  Sense strand starting at position 4 of SEQ ID NO: 1883564
gugcuaacugaauguuuau

SEQ ID NO: 2201411 - RNA, 19 nt, Artificial Sequence
  Description of Artificial Sequence: Synthetic oligonucleotide
  Antisense strand to SEQ ID NO: 2201410
auaaacauucaguuagcac

SEQ ID NO: 2201412 - RNA, 19 nt, Artificial Sequence
  Description of Artificial Sequence: Synthetic oligonucleotide
  Sense strand starting at position 902 of SEQ ID NO: 1883564
gguccauugcuauauugcu

SEQ ID NO: 2201413 - RNA, 19 nt, Artificial Sequence
  Description of Artificial Sequence: Synthetic oligonucleotide
  Antisense strand to SEQ ID NO: 2201412
agcaauauagcaauggacc

SEQ ID NO: 2201414 - RNA, 19 nt, Artificial Sequence
  Description of Artificial Sequence: Synthetic oligonucleotide
  Sense strand starting at position 2213 of SEQ ID NO: 1883564
gcacuccuuucgucaccaa

SEQ ID NO: 2201415 - RNA, 19 nt, Artificial Sequence
  Description of Artificial Sequence: Synthetic oligonucleotide
  Antisense strand to SEQ ID NO: 2201414
uuggugacgaaaggagugc

SEQ ID NO: 2201416 - RNA, 19 nt, Artificial Sequence
  Description of Artificial Sequence: Synthetic oligonucleotide
  Sense strand starting at position 3554 of SEQ ID NO: 1883564
gagacagggucccaaucua

SEQ ID NO: 2201417 - RNA, 19 nt, Artificial Sequence
  Description of Artificial Sequence: Synthetic oligonucleotide
  Antisense strand to SEQ ID NO: 2201416
uagauugggacccugucuc

SEQ ID NO: 2201418 - RNA, 19 nt, Artificial Sequence
  Description of Artificial Sequence: Synthetic oligonucleotide
  Sense strand starting at position 2353 of SEQ ID NO: 1883564
gcugcugccguuuagagaa

SEQ ID NO: 2201419 - RNA, 19 nt, Artificial Sequence
  Description of Artificial Sequence: Synthetic oligonucleotide
  Antisense strand to SEQ ID NO: 2201418
uucucuaaacggcagcagc

SEQ ID NO: 2201420 - RNA, 19 nt, Artificial Sequence
  Description of Artificial Sequence: Synthetic oligonucleotide
  Sense strand starting at position 3500 of SEQ ID NO: 1883564
caaugcaggugacaauauu

SEQ ID NO: 2201421 - RNA, 19 nt, Artificial Sequence
  Description of Artificial Sequence: Synthetic oligonucleotide
  Antisense strand to SEQ ID NO: 2201420
aauauugucaccugcauug

SEQ ID NO: 2201422 - RNA, 19 nt, Artificial Sequence
  Description of Artificial Sequence: Synthetic oligonucleotide
  Sense strand starting at position 11 of SEQ ID NO: 1883564
cugaauguuuauugaauga

SEQ ID NO: 2201423 - RNA, 19 nt, Artificial Sequence
  Description of Artificial Sequence: Synthetic oligonucleotide
  Antisense strand to SEQ ID NO: 2201422
ucauucaauaaacauucag

SEQ ID NO: 2201424 - RNA, 19 nt, Artificial Sequence
  Description of Artificial Sequence: Synthetic oligonucleotide
  Sense strand starting at position 731 of SEQ ID NO: 1883564
cagagaguauggcaucuuu

SEQ ID NO: 2201425 - RNA, 19 nt, Artificial Sequence
  Description of Artificial Sequence: Synthetic oligonucleotide
  Antisense strand to SEQ ID NO: 2201424
aaagaugccauacucucug

SEQ ID NO: 2201426 - RNA, 19 nt, Artificial Sequence
  Description of Artificial Sequence: Synthetic oligonucleotide
  Sense strand starting at position 2485 of SEQ ID NO: 1883564
cccaacugcuagcaugaaa

SEQ ID NO: 2201427 - RNA, 19 nt, Artificial Sequence
  Description of Artificial Sequence: Synthetic oligonucleotide
  Antisense strand to SEQ ID NO: 2201426
uuucaugcuagcaguuggg

SEQ ID NO: 2201428 - RNA, 19 nt, Artificial Sequence
  Description of Artificial Sequence: Synthetic oligonucleotide
  Sense strand starting at position 3416 of SEQ ID NO: 1883564
caauccuguugacgacuaa

SEQ ID NO: 2201429 - RNA, 19 nt, Artificial Sequence
  Description of Artificial Sequence: Synthetic oligonucleotide
  Antisense strand to SEQ ID NO: 2201428
uuagucgucaacaggauug

SEQ ID NO: 2201430 - RNA, 19 nt, Artificial Sequence
  Description of Artificial Sequence: Synthetic oligonucleotide
  Sense strand starting at position 2503 of SEQ ID NO: 1883564
aaaguugcauggugaaauc

SEQ ID NO: 2201431 - RNA, 19 nt, Artificial Sequence
  Description of Artificial Sequence: Synthetic oligonucleotide
  Antisense strand to SEQ ID NO: 2201430
gauuucaccaugcaacuuu

SEQ ID NO: 2201432 - RNA, 19 nt, Artificial Sequence
  Description of Artificial Sequence: Synthetic oligonucleotide
  Sense strand starting at position 2161 of SEQ ID NO: 1883564
ggaccagguuuaugagugu

SEQ ID NO: 2201433 - RNA, 19 nt, Artificial Sequence
  Description of Artificial Sequence: Synthetic oligonucleotide
  Antisense strand to SEQ ID NO: 2201432
acacucauaaaccuggucc

SEQ ID NO: 2201434 - RNA, 19 nt, Artificial Sequence
  Description of Artificial Sequence: Synthetic oligonucleotide
  Sense strand starting at position 3433 of SEQ ID NO: 1883564
aaguaugugucccauaguu

SEQ ID NO: 2201435 - RNA, 19 nt, Artificial Sequence
  Description of Artificial Sequence: Synthetic oligonucleotide
  Antisense strand to SEQ ID NO: 2201434
aacuaugggacacauacuu

SEQ ID NO: 2201436 - RNA, 19 nt, Artificial Sequence
  Description of Artificial Sequence: Synthetic oligonucleotide
  Sense strand starting at position 3485 of SEQ ID NO: 1883564
ucuauagggucuugccaau

SEQ ID NO: 2201437 - RNA, 19 nt, Artificial Sequence
  Description of Artificial Sequence: Synthetic oligonucleotide
  Antisense strand to SEQ ID NO: 2201436
auuggcaagacccuauaga

SEQ ID NO: 2201438 - RNA, 19 nt, Artificial Sequence
  Description of Artificial Sequence: Synthetic oligonucleotide
  Sense strand starting at position 958 of SEQ ID NO: 1883564
guauucgaauucuggaguu

SEQ ID NO: 2201439 - RNA, 19 nt, Artificial Sequence
  Description of Artificial Sequence: Synthetic oligonucleotide
  Antisense strand to SEQ ID NO: 2201438
aacuccagaauucgaauac

SEQ ID NO: 2201440 - RNA, 19 nt, Artificial Sequence
  Description of Artificial Sequence: Synthetic oligonucleotide
  Sense strand starting at position 2371 of SEQ ID NO: 1883565
ugcaaauaacucuacgaua

SEQ ID NO: 2201441 - RNA, 19 nt, Artificial Sequence
  Description of Artificial Sequence: Synthetic oligonucleotide
  Antisense strand to SEQ ID NO: 2201440
uaucguagaguuauuugca

SEQ ID NO: 2201442 - RNA, 19 nt, Artificial Sequence
  Description of Artificial Sequence: Synthetic oligonucleotide
  Sense strand starting at position 2412 of SEQ ID NO: 1883565
ggaauaacauguuuacuau

SEQ ID NO: 2201443 - RNA, 19 nt, Artificial Sequence
  Description of Artificial Sequence: Synthetic oligonucleotide
  Antisense strand to SEQ ID NO: 2201442
auaguaaacauguuauucc

SEQ ID NO: 2201444 - RNA, 19 nt, Artificial Sequence
  Description of Artificial Sequence: Synthetic oligonucleotide
  Sense strand starting at position 2186 of SEQ ID NO: 1883565
guuguugaagaguaauuaa

SEQ ID NO: 2201445 - RNA, 19 nt, Artificial Sequence
  Description of Artificial Sequence: Synthetic oligonucleotide
  Antisense strand to SEQ ID NO: 2201444
uuaauuacucuucaacaac

SEQ ID NO: 2201446 - RNA, 19 nt, Artificial Sequence
  Description of Artificial Sequence: Synthetic oligonucleotide
  Sense strand starting at position 3965 of SEQ ID NO: 1883565
agcucuggccaagacaaua

SEQ ID NO: 2201447 - RNA, 19 nt, Artificial Sequence
  Description of Artificial Sequence: Synthetic oligonucleotide
  Antisense strand to SEQ ID NO: 2201446
uauugucuuggccagagcu

SEQ ID NO: 2201448 - RNA, 19 nt, Artificial Sequence
  Description of Artificial Sequence: Synthetic oligonucleotide
  Sense strand starting at position 2183 of SEQ ID NO: 1883565
cauguuguugaagaguaau

SEQ ID NO: 2201449 - RNA, 19 nt, Artificial Sequence
  Description of Artificial Sequence: Synthetic oligonucleotide
  Antisense strand to SEQ ID NO: 2201448
auuacucuucaacaacaug

SEQ ID NO: 2201450 - RNA, 19 nt, Artificial Sequence
  Description of Artificial Sequence: Synthetic oligonucleotide
  Sense strand starting at position 1308 of SEQ ID NO: 1883565
gccuuuguauaguuauuua

SEQ ID NO: 2201451 - RNA, 19 nt, Artificial Sequence
  Description of Artificial Sequence: Synthetic oligonucleotide
  Antisense strand to SEQ ID NO: 2201450
uaaauaacuauacaaaggc

SEQ ID NO: 2201452 - RNA, 19 nt, Artificial Sequence
  Description of Artificial Sequence: Synthetic oligonucleotide
  Sense strand starting at position 2178 of SEQ ID NO: 1883565
aaucacauguuguugaaga

SEQ ID NO: 2201453 - RNA, 19 nt, Artificial Sequence
  Description of Artificial Sequence: Synthetic oligonucleotide
  Antisense strand to SEQ ID NO: 2201452
ucuucaacaacaugugauu

SEQ ID NO: 2201454 - RNA, 19 nt, Artificial Sequence
  Description of Artificial Sequence: Synthetic oligonucleotide
  Sense strand starting at position 721 of SEQ ID NO: 1883565
aggcaaugucauuaacagu

SEQ ID NO: 2201455 - RNA, 19 nt, Artificial Sequence
  Description of Artificial Sequence: Synthetic oligonucleotide
  Antisense strand to SEQ ID NO: 2201454
acuguuaaugacauugccu

SEQ ID NO: 2201456 - RNA, 19 nt, Artificial Sequence
  Description of Artificial Sequence: Synthetic oligonucleotide
  Sense strand starting at position 1140 of SEQ ID NO: 1883565
ggucauauauaagccaaau

SEQ ID NO: 2201457 - RNA, 19 nt, Artificial Sequence
  Description of Artificial Sequence: Synthetic oligonucleotide
  Antisense strand to SEQ ID NO: 2201456
auuuggcuuauauaugacc

SEQ ID NO: 2201458 - RNA, 19 nt, Artificial Sequence
  Description of Artificial Sequence: Synthetic oligonucleotide
  Sense strand starting at position 467 of SEQ ID NO: 1883565
acaguaagcuccuuaagaa

SEQ ID NO: 2201459 - RNA, 19 nt, Artificial Sequence
  Description of Artificial Sequence: Synthetic oligonucleotide
  Antisense strand to SEQ ID NO: 2201458
uucuuaaggagcuuacugu

SEQ ID NO: 2201460 - RNA, 19 nt, Artificial Sequence
  Description of Artificial Sequence: Synthetic oligonucleotide
  Sense strand starting at position 3962 of SEQ ID NO: 1883565
cugagcucuggccaagaca

SEQ ID NO: 2201461 - RNA, 19 nt, Artificial Sequence
  Description of Artificial Sequence: Synthetic oligonucleotide
  Antisense strand to SEQ ID NO: 2201460
ugucuuggccagagcucag

SEQ ID NO: 2201462 - RNA, 19 nt, Artificial Sequence
  Description of Artificial Sequence: Synthetic oligonucleotide
  Sense strand starting at position 21 of SEQ ID NO: 1883565
aggccuaccugauuccaaa

SEQ ID NO: 2201463 - RNA, 19 nt, Artificial Sequence
  Description of Artificial Sequence: Synthetic oligonucleotide
  Antisense strand to SEQ ID NO: 2201462
uuuggaaucagguaggccu

SEQ ID NO: 2201464 - RNA, 19 nt, Artificial Sequence
  Description of Artificial Sequence: Synthetic oligonucleotide
  Sense strand starting at position 377 of SEQ ID NO: 1883565
acagguguugacugaauca

SEQ ID NO: 2201465 - RNA, 19 nt, Artificial Sequence
  Description of Artificial Sequence: Synthetic oligonucleotide
  Antisense strand to SEQ ID NO: 2201464
ugauucagucaacaccugu

SEQ ID NO: 2201466 - RNA, 19 nt, Artificial Sequence
  Description of Artificial Sequence: Synthetic oligonucleotide
  Sense strand starting at position 720 of SEQ ID NO: 1883565
uaggcaaugucauuaacag

SEQ ID NO: 2201467 - RNA, 19 nt, Artificial Sequence
  Description of Artificial Sequence: Synthetic oligonucleotide
  Antisense strand to SEQ ID NO: 2201466
cuguuaaugacauugccua

SEQ ID NO: 2201468 - RNA, 19 nt, Artificial Sequence
  Description of Artificial Sequence: Synthetic oligonucleotide
  Sense strand starting at position 3378 of SEQ ID NO: 1883565
gagaauguccacuaugugu

SEQ ID NO: 2201469 - RNA, 19 nt, Artificial Sequence
  Description of Artificial Sequence: Synthetic oligonucleotide
  Antisense strand to SEQ ID NO: 2201468
acacauaguggacauucuc

SEQ ID NO: 2201470 - RNA, 19 nt, Artificial Sequence
  Description of Artificial Sequence: Synthetic oligonucleotide
  Sense strand starting at position 2180 of SEQ ID NO: 1883565
ucacauguuguugaagagu

SEQ ID NO: 2201471 - RNA, 19 nt, Artificial Sequence
  Description of Artificial Sequence: Synthetic oligonucleotide
  Antisense strand to SEQ ID NO: 2201470
acucuucaacaacauguga

SEQ ID NO: 2201472 - RNA, 19 nt, Artificial Sequence
  Description of Artificial Sequence: Synthetic oligonucleotide
  Sense strand starting at position 3698 of SEQ ID NO: 1883565
ugcuuacugcauuaaugaa

SEQ ID NO: 2201473 - RNA, 19 nt, Artificial Sequence
  Description of Artificial Sequence: Synthetic oligonucleotide
  Antisense strand to SEQ ID NO: 2201472
uucauuaaugcaguaagca

SEQ ID NO: 2201474 - RNA, 19 nt, Artificial Sequence
  Description of Artificial Sequence: Synthetic oligonucleotide
  Sense strand starting at position 3831 of SEQ ID NO: 1883565
auuauucccucaguccaga

SEQ ID NO: 2201475 - RNA, 19 nt, Artificial Sequence
  Description of Artificial Sequence: Synthetic oligonucleotide
  Antisense strand to SEQ ID NO: 2201474
ucuggacugagggaauaau

SEQ ID NO: 2201476 - RNA, 19 nt, Artificial Sequence
  Description of Artificial Sequence: Synthetic oligonucleotide
  Sense strand starting at position 3440 of SEQ ID NO: 1883565
gagggaugcuugcuaauag

SEQ ID NO: 2201477 - RNA, 19 nt, Artificial Sequence
  Description of Artificial Sequence: Synthetic oligonucleotide
  Antisense strand to SEQ ID NO: 2201476
cuauuagcaagcaucccuc

SEQ ID NO: 2201478 - RNA, 19 nt, Artificial Sequence
  Description of Artificial Sequence: Synthetic oligonucleotide
  Sense strand starting at position 3904 of SEQ ID NO: 1883565
uugucuuggacuuggacua

SEQ ID NO: 2201479 - RNA, 19 nt, Artificial Sequence
  Description of Artificial Sequence: Synthetic oligonucleotide
  Antisense strand to SEQ ID NO: 2201478
uaguccaaguccaagacaa

SEQ ID NO: 2201480 - RNA, 19 nt, Artificial Sequence
  Description of Artificial Sequence: Synthetic oligonucleotide
  Sense strand starting at position 106 of SEQ ID NO: 1883565
cggcauugccaggaaucau

SEQ ID NO: 2201481 - RNA, 19 nt, Artificial Sequence
  Description of Artificial Sequence: Synthetic oligonucleotide
  Antisense strand to SEQ ID NO: 2201480
augauuccuggcaaugccg

SEQ ID NO: 2201482 - RNA, 19 nt, Artificial Sequence
  Description of Artificial Sequence: Synthetic oligonucleotide
  Sense strand starting at position 3958 of SEQ ID NO: 1883565
gagacugagcucuggccaa

SEQ ID NO: 2201483 - RNA, 19 nt, Artificial Sequence
  Description of Artificial Sequence: Synthetic oligonucleotide
  Antisense strand to SEQ ID NO: 2201482
uuggccagagcucagucuc

SEQ ID NO: 2201484 - RNA, 19 nt, Artificial Sequence
  Description of Artificial Sequence: Synthetic oligonucleotide
  Sense strand starting at position 559 of SEQ ID NO: 1883565
auaacauaugcuugaguuc

SEQ ID NO: 2201485 - RNA, 19 nt, Artificial Sequence
  Description of Artificial Sequence: Synthetic oligonucleotide
  Antisense strand to SEQ ID NO: 2201484
gaacucaagcauauguuau

SEQ ID NO: 2201486 - RNA, 19 nt, Artificial Sequence
  Description of Artificial Sequence: Synthetic oligonucleotide
  Sense strand starting at position 354 of SEQ ID NO: 1883565
uggugucaccagugacaga

SEQ ID NO: 2201487 - RNA, 19 nt, Artificial Sequence
  Description of Artificial Sequence: Synthetic oligonucleotide
  Antisense strand to SEQ ID NO: 2201486
ucugucacuggugacacca

SEQ ID NO: 2201488 - RNA, 19 nt, Artificial Sequence
  Description of Artificial Sequence: Synthetic oligonucleotide
  Sense strand starting at position 727 of SEQ ID NO: 1883565
ugucauuaacaguguuaaa

SEQ ID NO: 2201489 - RNA, 19 nt, Artificial Sequence
  Description of Artificial Sequence: Synthetic oligonucleotide
  Antisense strand to SEQ ID NO: 2201488
uuuaacacuguuaaugaca

SEQ ID NO: 2201490 - RNA, 19 nt, Artificial Sequence
  Description of Artificial Sequence: Synthetic oligonucleotide
  Sense strand starting at position 1305 of SEQ ID NO: 1883565
auagccuuuguauaguuau

SEQ ID NO: 2201491 - RNA, 19 nt, Artificial Sequence
  Description of Artificial Sequence: Synthetic oligonucleotide
  Antisense strand to SEQ ID NO: 2201490
auaacuauacaaaggcuau

SEQ ID NO: 2201492 - RNA, 19 nt, Artificial Sequence
  Description of Artificial Sequence: Synthetic oligonucleotide
  Sense strand starting at position 1398 of SEQ ID NO: 1883565
ggcaaucgucucuaaaucu

SEQ ID NO: 2201493 - RNA, 19 nt, Artificial Sequence
  Description of Artificial Sequence: Synthetic oligonucleotide
  Antisense strand to SEQ ID NO: 2201492
agauuuagagacgauugcc

SEQ ID NO: 2201494 - RNA, 19 nt, Artificial Sequence
  Description of Artificial Sequence: Synthetic oligonucleotide
  Sense strand starting at position 715 of SEQ ID NO: 1883565
aauaguaggcaaugucauu

SEQ ID NO: 2201495 - RNA, 19 nt, Artificial Sequence
  Description of Artificial Sequence: Synthetic oligonucleotide
  Antisense strand to SEQ ID NO: 2201494
aaugacauugccuacuauu

SEQ ID NO: 2201496 - RNA, 19 nt, Artificial Sequence
  Description of Artificial Sequence: Synthetic oligonucleotide
  Sense strand starting at position 120 of SEQ ID NO: 1883565
aucauacuguuagcucaua

SEQ ID NO: 2201497 - RNA, 19 nt, Artificial Sequence
  Description of Artificial Sequence: Synthetic oligonucleotide
  Antisense strand to SEQ ID NO: 2201496
uaugagcuaacaguaugau

SEQ ID NO: 2201498 - RNA, 19 nt, Artificial Sequence
  Description of Artificial Sequence: Synthetic oligonucleotide
  Sense strand starting at position 1385 of SEQ ID NO: 1883565
aucugaugagcuuggcaau

SEQ ID NO: 2201499 - RNA, 19 nt, Artificial Sequence
  Description of Artificial Sequence: Synthetic oligonucleotide
  Antisense strand to SEQ ID NO: 2201498
auugccaagcucaucagau

SEQ ID NO: 2201500 - RNA, 19 nt, Artificial Sequence
  Description of Artificial Sequence: Synthetic oligonucleotide
  Sense strand starting at position 594 of SEQ ID NO: 1883565
guacacaacuccgcuauaa

SEQ ID NO: 2201501 - RNA, 19 nt, Artificial Sequence
  Description of Artificial Sequence: Synthetic oligonucleotide
  Antisense strand to SEQ ID NO: 2201500
uuauagcggaguuguguac

SEQ ID NO: 2201502 - RNA, 19 nt, Artificial Sequence
  Description of Artificial Sequence: Synthetic oligonucleotide
  Sense strand starting at position 105 of SEQ ID NO: 1883565
acggcauugccaggaauca

SEQ ID NO: 2201503 - RNA, 19 nt, Artificial Sequence
  Description of Artificial Sequence: Synthetic oligonucleotide
  Antisense strand to SEQ ID NO: 2201502
ugauuccuggcaaugccgu

SEQ ID NO: 2201504 - RNA, 19 nt, Artificial Sequence
  Description of Artificial Sequence: Synthetic oligonucleotide
  Sense strand starting at position 3690 of SEQ ID NO: 1883565
gcaguaaaugcuuacugca

SEQ ID NO: 2201505 - RNA, 19 nt, Artificial Sequence
  Description of Artificial Sequence: Synthetic oligonucleotide
  Antisense strand to SEQ ID NO: 2201504
ugcaguaagcauuuacugc

SEQ ID NO: 2201506 - RNA, 19 nt, Artificial Sequence
  Description of Artificial Sequence: Synthetic oligonucleotide
  Sense strand starting at position 87 of SEQ ID NO: 1883565
ugcucauugccuugggaca

SEQ ID NO: 2201507 - RNA, 19 nt, Artificial Sequence
  Description of Artificial Sequence: Synthetic oligonucleotide
  Antisense strand to SEQ ID NO: 2201506
ugucccaaggcaaugagca

SEQ ID NO: 2201508 - RNA, 19 nt, Artificial Sequence
  Description of Artificial Sequence: Synthetic oligonucleotide
  Sense strand starting at position 3692 of SEQ ID NO: 1883565
aguaaaugcuuacugcauu

SEQ ID NO: 2201509 - RNA, 19 nt, Artificial Sequence
  Description of Artificial Sequence: Synthetic oligonucleotide
  Antisense strand to SEQ ID NO: 2201508
aaugcaguaagcauuuacu

SEQ ID NO: 2201510 - RNA, 19 nt, Artificial Sequence
  Description of Artificial Sequence: Synthetic oligonucleotide
  Sense strand starting at position 1302 of SEQ ID NO: 1883565
aucauagccuuuguauagu

SEQ ID NO: 2201511 - RNA, 19 nt, Artificial Sequence
  Description of Artificial Sequence: Synthetic oligonucleotide
  Antisense strand to SEQ ID NO: 2201510
acuauacaaaggcuaugau

SEQ ID NO: 2201512 - RNA, 19 nt, Artificial Sequence
  Description of Artificial Sequence: Synthetic oligonucleotide
  Sense strand starting at position 1397 of SEQ ID NO: 1883565
uggcaaucgucucuaaauc

SEQ ID NO: 2201513 - RNA, 19 nt, Artificial Sequence
  Description of Artificial Sequence: Synthetic oligonucleotide
  Antisense strand to SEQ ID NO: 2201512
gauuuagagacgauugcca

SEQ ID NO: 2201514 - RNA, 19 nt, Artificial Sequence
  Description of Artificial Sequence: Synthetic oligonucleotide
  Sense strand starting at position 3826 of SEQ ID NO: 1883565
uggccauuauucccucagu

SEQ ID NO: 2201515 - RNA, 19 nt, Artificial Sequence
  Description of Artificial Sequence: Synthetic oligonucleotide
  Antisense strand to SEQ ID NO: 2201514
acugagggaauaauggcca

SEQ ID NO: 2201516 - RNA, 19 nt, Artificial Sequence
  Description of Artificial Sequence: Synthetic oligonucleotide
  Sense strand starting at position 350 of SEQ ID NO: 1883565
gguguggugucaccaguga

SEQ ID NO: 2201517 - RNA, 19 nt, Artificial Sequence
  Description of Artificial Sequence: Synthetic oligonucleotide
  Antisense strand to SEQ ID NO: 2201516
ucacuggugacaccacacc

SEQ ID NO: 2201518 - RNA, 19 nt, Artificial Sequence
  Description of Artificial Sequence: Synthetic oligonucleotide
  Sense strand starting at position 41 of SEQ ID NO: 1883565
cuugcuugcuuuguaauua

SEQ ID NO: 2201519 - RNA, 19 nt, Artificial Sequence
  Description of Artificial Sequence: Synthetic oligonucleotide
  Antisense strand to SEQ ID NO: 2201518
uaauuacaaagcaagcaag

SEQ ID NO: 2201520 - RNA, 19 nt, Artificial Sequence
  Description of Artificial Sequence: Synthetic oligonucleotide
  Sense strand starting at position 576 of SEQ ID NO: 1883566
gauugauugcuuuagauau

SEQ ID NO: 2201521 - RNA, 19 nt, Artificial Sequence
  Description of Artificial Sequence: Synthetic oligonucleotide
  Antisense strand to SEQ ID NO: 2201520
auaucuaaagcaaucaauc

SEQ ID NO: 2201522 - RNA, 19 nt, Artificial Sequence
  Description of Artificial Sequence: Synthetic oligonucleotide
  Sense strand starting at position 3180 of SEQ ID NO: 1883566
augguacugguguaagaac

SEQ ID NO: 2201523 - RNA, 19 nt, Artificial Sequence
  Description of Artificial Sequence: Synthetic oligonucleotide
  Antisense strand to SEQ ID NO: 2201522
guucuuacaccaguaccau

SEQ ID NO: 2201524 - RNA, 19 nt, Artificial Sequence
  Description of Artificial Sequence: Synthetic oligonucleotide
  Sense strand starting at position 559 of SEQ ID NO: 1883566
ccuucugaugauugauuga

SEQ ID NO: 2201525 - RNA, 19 nt, Artificial Sequence
  Description of Artificial Sequence: Synthetic oligonucleotide
  Antisense strand to SEQ ID NO: 2201524
ucaaucaaucaucagaagg

SEQ ID NO: 2201526 - RNA, 19 nt, Artificial Sequence
  Description of Artificial Sequence: Synthetic oligonucleotide
  Sense strand starting at position 2024 of SEQ ID NO: 1883566
gggauuccucccuaaugca

SEQ ID NO: 2201527 - RNA, 19 nt, Artificial Sequence
  Description of Artificial Sequence: Synthetic oligonucleotide
  Antisense strand to SEQ ID NO: 2201526
ugcauuagggaggaauccc

SEQ ID NO: 2201528 - RNA, 19 nt, Artificial Sequence
  Description of Artificial Sequence: Synthetic oligonucleotide
  Sense strand starting at position 187 of SEQ ID NO: 1883566
ccggcagaacuccaacauu

SEQ ID NO: 2201529 - RNA, 19 nt, Artificial Sequence
  Description of Artificial Sequence: Synthetic oligonucleotide
  Antisense strand to SEQ ID NO: 2201528
aauguuggaguucugccgg

SEQ ID NO: 2201530 - RNA, 19 nt, Artificial Sequence
  Description of Artificial Sequence: Synthetic oligonucleotide
  Sense strand starting at position 1300 of SEQ ID NO: 1883566
gaaugacucuuguugauua

SEQ ID NO: 2201531 - RNA, 19 nt, Artificial Sequence
  Description of Artificial Sequence: Synthetic oligonucleotide
  Antisense strand to SEQ ID NO: 2201530
uaaucaacaagagucauuc

SEQ ID NO: 2201532 - RNA, 19 nt, Artificial Sequence
  Description of Artificial Sequence: Synthetic oligonucleotide
  Sense strand starting at position 592 of SEQ ID NO: 1883566
uauggagacucacuauguu

SEQ ID NO: 2201533 - RNA, 19 nt, Artificial Sequence
  Description of Artificial Sequence: Synthetic oligonucleotide
  Antisense strand to SEQ ID NO: 2201532
aacauagugagucuccaua

SEQ ID NO: 2201534 - RNA, 19 nt, Artificial Sequence
  Description of Artificial Sequence: Synthetic oligonucleotide
  Sense strand starting at position 751 of SEQ ID NO: 1883566
gccaaagaauugguugaca

SEQ ID NO: 2201535 - RNA, 19 nt, Artificial Sequence
  Description of Artificial Sequence: Synthetic oligonucleotide
  Antisense strand to SEQ ID NO: 2201534
ugucaaccaauucuuuggc

SEQ ID NO: 2201536 - RNA, 19 nt, Artificial Sequence
  Description of Artificial Sequence: Synthetic oligonucleotide
  Sense strand starting at position 2609 of SEQ ID NO: 1883566
ucuuuccuugcagaugaua

SEQ ID NO: 2201537 - RNA, 19 nt, Artificial Sequence
  Description of Artificial Sequence: Synthetic oligonucleotide
  Antisense strand to SEQ ID NO: 2201536
uaucaucugcaaggaaaga

SEQ ID NO: 2201538 - RNA, 19 nt, Artificial Sequence
  Description of Artificial Sequence: Synthetic oligonucleotide
  Sense strand starting at position 595 of SEQ ID NO: 1883566
ggagacucacuauguuacu

SEQ ID NO: 2201539 - RNA, 19 nt, Artificial Sequence
  Description of Artificial Sequence: Synthetic oligonucleotide
  Antisense strand to SEQ ID NO: 2201538
aguaacauagugagucucc

SEQ ID NO: 2201540 - RNA, 19 nt, Artificial Sequence
  Description of Artificial Sequence: Synthetic oligonucleotide
  Sense strand starting at position 582 of SEQ ID NO: 1883566
uugcuuuagauauggagac

SEQ ID NO: 2201541 - RNA, 19 nt, Artificial Sequence
  Description of Artificial Sequence: Synthetic oligonucleotide
  Antisense strand to SEQ ID NO: 2201540
gucuccauaucuaaagcaa

SEQ ID NO: 2201542 - RNA, 19 nt, Artificial Sequence
  Description of Artificial Sequence: Synthetic oligonucleotide
  Sense strand starting at position 435 of SEQ ID NO: 1883566
cgaggaauucucgacaguc

SEQ ID NO: 2201543 - RNA, 19 nt, Artificial Sequence
  Description of Artificial Sequence: Synthetic oligonucleotide
  Antisense strand to SEQ ID NO: 2201542
gacugucgagaauuccucg

SEQ ID NO: 2201544 - RNA, 19 nt, Artificial Sequence
  Description of Artificial Sequence: Synthetic oligonucleotide
  Sense strand starting at position 573 of SEQ ID NO: 1883566
auugauugauugcuuuaga

SEQ ID NO: 2201545 - RNA, 19 nt, Artificial Sequence
  Description of Artificial Sequence: Synthetic oligonucleotide
  Antisense strand to SEQ ID NO: 2201544
ucuaaagcaaucaaucaau

SEQ ID NO: 2201546 - RNA, 19 nt, Artificial Sequence
  Description of Artificial Sequence: Synthetic oligonucleotide
  Sense strand starting at position 574 of SEQ ID NO: 1883566
uugauugauugcuuuagau

SEQ ID NO: 2201547 - RNA, 19 nt, Artificial Sequence
  Description of Artificial Sequence: Synthetic oligonucleotide
  Antisense strand to SEQ ID NO: 2201546
aucuaaagcaaucaaucaa

SEQ ID NO: 2201548 - RNA, 19 nt, Artificial Sequence
  Description of Artificial Sequence: Synthetic oligonucleotide
  Sense strand starting at position 3697 of SEQ ID NO: 1883566
agaagcaauuagcaaauuu

SEQ ID NO: 2201549 - RNA, 19 nt, Artificial Sequence
  Description of Artificial Sequence: Synthetic oligonucleotide
  Antisense strand to SEQ ID NO: 2201548
aaauuugcuaauugcuucu

SEQ ID NO: 2201550 - RNA, 19 nt, Artificial Sequence
  Description of Artificial Sequence: Synthetic oligonucleotide
  Sense strand starting at position 3652 of SEQ ID NO: 1883566
uguacugaaucccugaguu

SEQ ID NO: 2201551 - RNA, 19 nt, Artificial Sequence
  Description of Artificial Sequence: Synthetic oligonucleotide
  Antisense strand to SEQ ID NO: 2201550
aacucagggauucaguaca

SEQ ID NO: 2201552 - RNA, 19 nt, Artificial Sequence
  Description of Artificial Sequence: Synthetic oligonucleotide
  Sense strand starting at position 955 of SEQ ID NO: 1883566
guuugucaauggucucaau

SEQ ID NO: 2201553 - RNA, 19 nt, Artificial Sequence
  Description of Artificial Sequence: Synthetic oligonucleotide
  Antisense strand to SEQ ID NO: 2201552
auugagaccauugacaaac

SEQ ID NO: 2201554 - RNA, 19 nt, Artificial Sequence
  Description of Artificial Sequence: Synthetic oligonucleotide
  Sense strand starting at position 953 of SEQ ID NO: 1883566
auguuugucaauggucuca

SEQ ID NO: 2201555 - RNA, 19 nt, Artificial Sequence
  Description of Artificial Sequence: Synthetic oligonucleotide
  Antisense strand to SEQ ID NO: 2201554
ugagaccauugacaaacau

SEQ ID NO: 2201556 - RNA, 19 nt, Artificial Sequence
  Description of Artificial Sequence: Synthetic oligonucleotide
  Sense strand starting at position 163 of SEQ ID NO: 1883566
ugcucagccuuaucauaug

SEQ ID NO: 2201557 - RNA, 19 nt, Artificial Sequence
  Description of Artificial Sequence: Synthetic oligonucleotide
  Antisense strand to SEQ ID NO: 2201556
cauaugauaaggcugagca

SEQ ID NO: 2201558 - RNA, 19 nt, Artificial Sequence
  Description of Artificial Sequence: Synthetic oligonucleotide
  Sense strand starting at position 368 of SEQ ID NO: 1883566
uucugaguugccugugaua

SEQ ID NO: 2201559 - RNA, 19 nt, Artificial Sequence
  Description of Artificial Sequence: Synthetic oligonucleotide
  Antisense strand to SEQ ID NO: 2201558
uaucacaggcaacucagaa

SEQ ID NO: 2201560 - RNA, 19 nt, Artificial Sequence
  Description of Artificial Sequence: Synthetic oligonucleotide
  Sense strand starting at position 829 of SEQ ID NO: 1883566
gcuugugcucaacgagaag

SEQ ID NO: 2201561 - RNA, 19 nt, Artificial Sequence
  Description of Artificial Sequence: Synthetic oligonucleotide
  Antisense strand to SEQ ID NO: 2201560
cuucucguugagcacaagc

SEQ ID NO: 2201562 - RNA, 19 nt, Artificial Sequence
  Description of Artificial Sequence: Synthetic oligonucleotide
  Sense strand starting at position 756 of SEQ ID NO: 1883566
agaauugguugacacauua

SEQ ID NO: 2201563 - RNA, 19 nt, Artificial Sequence
  Description of Artificial Sequence: Synthetic oligonucleotide
  Antisense strand to SEQ ID NO: 2201562
uaaugugucaaccaauucu

SEQ ID NO: 2201564 - RNA, 19 nt, Artificial Sequence
  Description of Artificial Sequence: Synthetic oligonucleotide
  Sense strand starting at position 702 of SEQ ID NO: 1883566
ggccucuuaugaugauuua

SEQ ID NO: 2201565 - RNA, 19 nt, Artificial Sequence
  Description of Artificial Sequence: Synthetic oligonucleotide
  Antisense strand to SEQ ID NO: 2201564
uaaaucaucauaagaggcc

SEQ ID NO: 2201566 - RNA, 19 nt, Artificial Sequence
  Description of Artificial Sequence: Synthetic oligonucleotide
  Sense strand starting at position 333 of SEQ ID NO: 1883566
agaauuuacugguggcauc

SEQ ID NO: 2201567 - RNA, 19 nt, Artificial Sequence
  Description of Artificial Sequence: Synthetic oligonucleotide
  Antisense strand to SEQ ID NO: 2201566
gaugccaccaguaaauucu

SEQ ID NO: 2201568 - RNA, 19 nt, Artificial Sequence
  Description of Artificial Sequence: Synthetic oligonucleotide
  Sense strand starting at position 1446 of SEQ ID NO: 1883566
cuagaaagaucuuaagcua

SEQ ID NO: 2201569 - RNA, 19 nt, Artificial Sequence
  Description of Artificial Sequence: Synthetic oligonucleotide
  Antisense strand to SEQ ID NO: 2201568
uagcuuaagaucuuucuag

SEQ ID NO: 2201570 - RNA, 19 nt, Artificial Sequence
  Description of Artificial Sequence: Synthetic oligonucleotide
  Sense strand starting at position 370 of SEQ ID NO: 1883566
cugaguugccugugauacg

SEQ ID NO: 2201571 - RNA, 19 nt, Artificial Sequence
  Description of Artificial Sequence: Synthetic oligonucleotide
  Antisense strand to SEQ ID NO: 2201570
cguaucacaggcaacucag

SEQ ID NO: 2201572 - RNA, 19 nt, Artificial Sequence
  Description of Artificial Sequence: Synthetic oligonucleotide
  Sense strand starting at position 2372 of SEQ ID NO: 1883566
ugaacuagguacugaaaga

SEQ ID NO: 2201573 - RNA, 19 nt, Artificial Sequence
  Description of Artificial Sequence: Synthetic oligonucleotide
  Antisense strand to SEQ ID NO: 2201572
ucuuucaguaccuaguuca

SEQ ID NO: 2201574 - RNA, 19 nt, Artificial Sequence
  Description of Artificial Sequence: Synthetic oligonucleotide
  Sense strand starting at position 825 of SEQ ID NO: 1883566
uuuggcuugugcucaacga

SEQ ID NO: 2201575 - RNA, 19 nt, Artificial Sequence
  Description of Artificial Sequence: Synthetic oligonucleotide
  Antisense strand to SEQ ID NO: 2201574
ucguugagcacaagccaaa

SEQ ID NO: 2201576 - RNA, 19 nt, Artificial Sequence
  Description of Artificial Sequence: Synthetic oligonucleotide
  Sense strand starting at position 1312 of SEQ ID NO: 1883566
uugauuaauuaaggcagaa

SEQ ID NO: 2201577 - RNA, 19 nt, Artificial Sequence
  Description of Artificial Sequence: Synthetic oligonucleotide
  Antisense strand to SEQ ID NO: 2201576
uucugccuuaauuaaucaa

SEQ ID NO: 2201578 - RNA, 19 nt, Artificial Sequence
  Description of Artificial Sequence: Synthetic oligonucleotide
  Sense strand starting at position 958 of SEQ ID NO: 1883566
ugucaauggucucaaugaa

SEQ ID NO: 2201579 - RNA, 19 nt, Artificial Sequence
  Description of Artificial Sequence: Synthetic oligonucleotide
  Antisense strand to SEQ ID NO: 2201578
uucauugagaccauugaca

SEQ ID NO: 2201580 - RNA, 19 nt, Artificial Sequence
  Description of Artificial Sequence: Synthetic oligonucleotide
  Sense strand starting at position 700 of SEQ ID NO: 1883566
uuggccucuuaugaugauu

SEQ ID NO: 2201581 - RNA, 19 nt, Artificial Sequence
  Description of Artificial Sequence: Synthetic oligonucleotide
  Antisense strand to SEQ ID NO: 2201580
aaucaucauaagaggccaa

SEQ ID NO: 2201582 - RNA, 19 nt, Artificial Sequence
  Description of Artificial Sequence: Synthetic oligonucleotide
  Sense strand starting at position 583 of SEQ ID NO: 1883566
ugcuuuagauauggagacu

SEQ ID NO: 2201583 - RNA, 19 nt, Artificial Sequence
  Description of Artificial Sequence: Synthetic oligonucleotide
  Antisense strand to SEQ ID NO: 2201582
agucuccauaucuaaagca

SEQ ID NO: 2201584 - RNA, 19 nt, Artificial Sequence
  Description of Artificial Sequence: Synthetic oligonucleotide
  Sense strand starting at position 1298 of SEQ ID NO: 1883566
cugaaugacucuuguugau

SEQ ID NO: 2201585 - RNA, 19 nt, Artificial Sequence
  Description of Artificial Sequence: Synthetic oligonucleotide
  Antisense strand to SEQ ID NO: 2201584
aucaacaagagucauucag

SEQ ID NO: 2201586 - RNA, 19 nt, Artificial Sequence
  Description of Artificial Sequence: Synthetic oligonucleotide
  Sense strand starting at position 985 of SEQ ID NO: 1883566
cguauuaguuaagagagca

SEQ ID NO: 2201587 - RNA, 19 nt, Artificial Sequence
  Description of Artificial Sequence: Synthetic oligonucleotide
  Antisense strand to SEQ ID NO: 2201586
ugcucucuuaacuaauacg

SEQ ID NO: 2201588 - RNA, 19 nt, Artificial Sequence
  Description of Artificial Sequence: Synthetic oligonucleotide
  Sense strand starting at position 151 of SEQ ID NO: 1883566
ggagaauguucaugcucag

SEQ ID NO: 2201589 - RNA, 19 nt, Artificial Sequence
  Description of Artificial Sequence: Synthetic oligonucleotide
  Antisense strand to SEQ ID NO: 2201588
cugagcaugaacauucucc

SEQ ID NO: 2201590 - RNA, 19 nt, Artificial Sequence
  Description of Artificial Sequence: Synthetic oligonucleotide
  Sense strand starting at position 699 of SEQ ID NO: 1883566
uuuggccucuuaugaugau

SEQ ID NO: 2201591 - RNA, 19 nt, Artificial Sequence
  Description of Artificial Sequence: Synthetic oligonucleotide
  Antisense strand to SEQ ID NO: 2201590
aucaucauaagaggccaaa

SEQ ID NO: 2201592 - RNA, 19 nt, Artificial Sequence
  Description of Artificial Sequence: Synthetic oligonucleotide
  Sense strand starting at position 371 of SEQ ID NO: 1883566
ugaguugccugugauacga

SEQ ID NO: 2201593 - RNA, 19 nt, Artificial Sequence
  Description of Artificial Sequence: Synthetic oligonucleotide
  Antisense strand to SEQ ID NO: 2201592
ucguaucacaggcaacuca

SEQ ID NO: 2201594 - RNA, 19 nt, Artificial Sequence
  Description of Artificial Sequence: Synthetic oligonucleotide
  Sense strand starting at position 2147 of SEQ ID NO: 1883567
uuguuucccgaggaaggaa

SEQ ID NO: 2201595 - RNA, 19 nt, Artificial Sequence
  Description of Artificial Sequence: Synthetic oligonucleotide
  Antisense strand to SEQ ID NO: 2201594
uuccuuccucgggaaacaa

SEQ ID NO: 2201596 - RNA, 19 nt, Artificial Sequence
  Description of Artificial Sequence: Synthetic oligonucleotide
  Sense strand starting at position 3347 of SEQ ID NO: 1883567
guuuauuuguagguacacu

SEQ ID NO: 2201597 - RNA, 19 nt, Artificial Sequence
  Description of Artificial Sequence: Synthetic oligonucleotide
  Antisense strand to SEQ ID NO: 2201596
aguguaccuacaaauaaac

SEQ ID NO: 2201598 - RNA, 19 nt, Artificial Sequence
  Description of Artificial Sequence: Synthetic oligonucleotide
  Sense strand starting at position 622 of SEQ ID NO: 1883567
ccuguuuccagguaaagga

SEQ ID NO: 2201599 - RNA, 19 nt, Artificial Sequence
  Description of Artificial Sequence: Synthetic oligonucleotide
  Antisense strand to SEQ ID NO: 2201598
uccuuuaccuggaaacagg

SEQ ID NO: 2201600 - RNA, 19 nt, Artificial Sequence
  Description of Artificial Sequence: Synthetic oligonucleotide
  Sense strand starting at position 2347 of SEQ ID NO: 1883567
uggaauaacucuuuaguag

SEQ ID NO: 2201601 - RNA, 19 nt, Artificial Sequence
  Description of Artificial Sequence: Synthetic oligonucleotide
  Antisense strand to SEQ ID NO: 2201600
cuacuaaagaguuauucca

SEQ ID NO: 2201602 - RNA, 19 nt, Artificial Sequence
  Description of Artificial Sequence: Synthetic oligonucleotide
  Sense strand starting at position 491 of SEQ ID NO: 1883567
aaggaaggucuccaguagu

SEQ ID NO: 2201603 - RNA, 19 nt, Artificial Sequence
  Description of Artificial Sequence: Synthetic oligonucleotide
  Antisense strand to SEQ ID NO: 2201602
acuacuggagaccuuccuu

SEQ ID NO: 2201604 - RNA, 19 nt, Artificial Sequence
  Description of Artificial Sequence: Synthetic oligonucleotide
  Sense strand starting at position 2116 of SEQ ID NO: 1883567
aacucagagccuuggagau

SEQ ID NO: 2201605 - RNA, 19 nt, Artificial Sequence
  Description of Artificial Sequence: Synthetic oligonucleotide
  Antisense strand to SEQ ID NO: 2201604
aucuccaaggcucugaguu

SEQ ID NO: 2201606 - RNA, 19 nt, Artificial Sequence
  Description of Artificial Sequence: Synthetic oligonucleotide
  Sense strand starting at position 2101 of SEQ ID NO: 1883567
ggccaaacucugggaaacu

SEQ ID NO: 2201607 - RNA, 19 nt, Artificial Sequence
  Description of Artificial Sequence: Synthetic oligonucleotide
  Antisense strand to SEQ ID NO: 2201606
aguuucccagaguuuggcc

SEQ ID NO: 2201608 - RNA, 19 nt, Artificial Sequence
  Description of Artificial Sequence: Synthetic oligonucleotide
  Sense strand starting at position 377 of SEQ ID NO: 1883567
gccugauguagucaaagaa

SEQ ID NO: 2201609 - RNA, 19 nt, Artificial Sequence
  Description of Artificial Sequence: Synthetic oligonucleotide
  Antisense strand to SEQ ID NO: 2201608
uucuuugacuacaucaggc

SEQ ID NO: 2201610 - RNA, 19 nt, Artificial Sequence
  Description of Artificial Sequence: Synthetic oligonucleotide
  Sense strand starting at position 3343 of SEQ ID NO: 1883567
auguguuuauuuguaggua

SEQ ID NO: 2201611 - RNA, 19 nt, Artificial Sequence
  Description of Artificial Sequence: Synthetic oligonucleotide
  Antisense strand to SEQ ID NO: 2201610
uaccuacaaauaaacacau

SEQ ID NO: 2201612 - RNA, 19 nt, Artificial Sequence
  Description of Artificial Sequence: Synthetic oligonucleotide
  Sense strand starting at position 2211 of SEQ ID NO: 1883567
gcgagaguccugagcucug

SEQ ID NO: 2201613 - RNA, 19 nt, Artificial Sequence
  Description of Artificial Sequence: Synthetic oligonucleotide
  Antisense strand to SEQ ID NO: 2201612
cagagcucaggacucucgc

SEQ ID NO: 2201614 - RNA, 19 nt, Artificial Sequence
  Description of Artificial Sequence: Synthetic oligonucleotide
  Sense strand starting at position 2129 of SEQ ID NO: 1883567
ggagaucugauccaccguu

SEQ ID NO: 2201615 - RNA, 19 nt, Artificial Sequence
  Description of Artificial Sequence: Synthetic oligonucleotide
  Antisense strand to SEQ ID NO: 2201614
aacgguggaucagaucucc

SEQ ID NO: 2201616 - RNA, 19 nt, Artificial Sequence
  Description of Artificial Sequence: Synthetic oligonucleotide
  Sense strand starting at position 369 of SEQ ID NO: 1883567
uagaaagugccugauguag

SEQ ID NO: 2201617 - RNA, 19 nt, Artificial Sequence
  Description of Artificial Sequence: Synthetic oligonucleotide
  Antisense strand to SEQ ID NO: 2201616
cuacaucaggcacuuucua

SEQ ID NO: 2201618 - RNA, 19 nt, Artificial Sequence
  Description of Artificial Sequence: Synthetic oligonucleotide
  Sense strand starting at position 2218 of SEQ ID NO: 1883567
uccugagcucuggaaguga

SEQ ID NO: 2201619 - RNA, 19 nt, Artificial Sequence
  Description of Artificial Sequence: Synthetic oligonucleotide
  Antisense strand to SEQ ID NO: 2201618
ucacuuccagagcucagga

SEQ ID NO: 2201620 - RNA, 19 nt, Artificial Sequence
  Description of Artificial Sequence: Synthetic oligonucleotide
  Sense strand starting at position 23 of SEQ ID NO: 1883567
guuggaucugagcaaucug

SEQ ID NO: 2201621 - RNA, 19 nt, Artificial Sequence
  Description of Artificial Sequence: Synthetic oligonucleotide
  Antisense strand to SEQ ID NO: 2201620
cagauugcucagauccaac

SEQ ID NO: 2201622 - RNA, 19 nt, Artificial Sequence
  Description of Artificial Sequence: Synthetic oligonucleotide
  Sense strand starting at position 1442 of SEQ ID NO: 1883567
ccgauuuggcaccgaggua

SEQ ID NO: 2201623 - RNA, 19 nt, Artificial Sequence
  Description of Artificial Sequence: Synthetic oligonucleotide
  Antisense strand to SEQ ID NO: 2201622
uaccucggugccaaaucgg

SEQ ID NO: 2201624 - RNA, 19 nt, Artificial Sequence
  Description of Artificial Sequence: Synthetic oligonucleotide
  Sense strand starting at position 3589 of SEQ ID NO: 1883567
gaguuuggcauagaagguu

SEQ ID NO: 2201625 - RNA, 19 nt, Artificial Sequence
  Description of Artificial Sequence: Synthetic oligonucleotide
  Antisense strand to SEQ ID NO: 2201624
aaccuucuaugccaaacuc

SEQ ID NO: 2201626 - RNA, 19 nt, Artificial Sequence
  Description of Artificial Sequence: Synthetic oligonucleotide
  Sense strand starting at position 2099 of SEQ ID NO: 1883567
acggccaaacucugggaaa

SEQ ID NO: 2201627 - RNA, 19 nt, Artificial Sequence
  Description of Artificial Sequence: Synthetic oligonucleotide
  Antisense strand to SEQ ID NO: 2201626
uuucccagaguuuggccgu

SEQ ID NO: 2201628 - RNA, 19 nt, Artificial Sequence
  Description of Artificial Sequence: Synthetic oligonucleotide
  Sense strand starting at position 494 of SEQ ID NO: 1883567
gaaggucuccaguaguauc

SEQ ID NO: 2201629 - RNA, 19 nt, Artificial Sequence
  Description of Artificial Sequence: Synthetic oligonucleotide
  Antisense strand to SEQ ID NO: 2201628
gauacuacuggagaccuuc

SEQ ID NO: 2201630 - RNA, 19 nt, Artificial Sequence
  Description of Artificial Sequence: Synthetic oligonucleotide
  Sense strand starting at position 3778 of SEQ ID NO: 1883567
augcucacuggcuauuaaa

SEQ ID NO: 2201631 - RNA, 19 nt, Artificial Sequence
  Description of Artificial Sequence: Synthetic oligonucleotide
  Antisense strand to SEQ ID NO: 2201630
uuuaauagccagugagcau

SEQ ID NO: 2201632 - RNA, 19 nt, Artificial Sequence
  Description of Artificial Sequence: Synthetic oligonucleotide
  Sense strand starting at position 97 of SEQ ID NO: 1883567
agaacugguucugucugaa

SEQ ID NO: 2201633 - RNA, 19 nt, Artificial Sequence
  Description of Artificial Sequence: Synthetic oligonucleotide
  Antisense strand to SEQ ID NO: 2201632
uucagacagaaccaguucu

SEQ ID NO: 2201634 - RNA, 19 nt, Artificial Sequence
  Description of Artificial Sequence: Synthetic oligonucleotide
  Sense strand starting at position 3752 of SEQ ID NO: 1883567
cuuccuuauguuuagguga

SEQ ID NO: 2201635 - RNA, 19 nt, Artificial Sequence
  Description of Artificial Sequence: Synthetic oligonucleotide
  Antisense strand to SEQ ID NO: 2201634
ucaccuaaacauaaggaag

SEQ ID NO: 2201636 - RNA, 19 nt, Artificial Sequence
  Description of Artificial Sequence: Synthetic oligonucleotide
  Sense strand starting at position 19 of SEQ ID NO: 1883567
ucagguuggaucugagcaa

SEQ ID NO: 2201637 - RNA, 19 nt, Artificial Sequence
  Description of Artificial Sequence: Synthetic oligonucleotide
  Antisense strand to SEQ ID NO: 2201636
uugcucagauccaaccuga

SEQ ID NO: 2201638 - RNA, 19 nt, Artificial Sequence
  Description of Artificial Sequence: Synthetic oligonucleotide
  Sense strand starting at position 2146 of SEQ ID NO: 1883567
uuuguuucccgaggaagga

SEQ ID NO: 2201639 - RNA, 19 nt, Artificial Sequence
  Description of Artificial Sequence: Synthetic oligonucleotide
  Antisense strand to SEQ ID NO: 2201638
uccuuccucgggaaacaaa

SEQ ID NO: 2201640 - RNA, 19 nt, Artificial Sequence
  Description of Artificial Sequence: Synthetic oligonucleotide
  Sense strand starting at position 100 of SEQ ID NO: 1883567
acugguucugucugaaaua

SEQ ID NO: 2201641 - RNA, 19 nt, Artificial Sequence
  Description of Artificial Sequence: Synthetic oligonucleotide
  Antisense strand to SEQ ID NO: 2201640
uauuucagacagaaccagu

SEQ ID NO: 2201642 - RNA, 19 nt, Artificial Sequence
  Description of Artificial Sequence: Synthetic oligonucleotide
  Sense strand starting at position 2597 of SEQ ID NO: 1883567
cuaagaaauucgcuucuua

SEQ ID NO: 2201643 - RNA, 19 nt, Artificial Sequence
  Description of Artificial Sequence: Synthetic oligonucleotide
  Antisense strand to SEQ ID NO: 2201642
uaagaagcgaauuucuuag

SEQ ID NO: 2201644 - RNA, 19 nt, Artificial Sequence
  Description of Artificial Sequence: Synthetic oligonucleotide
  Sense strand starting at position 826 of SEQ ID NO: 1883567
ggcucuuugcgcgcugaca

SEQ ID NO: 2201645 - RNA, 19 nt, Artificial Sequence
  Description of Artificial Sequence: Synthetic oligonucleotide
  Antisense strand to SEQ ID NO: 2201644
ugucagcgcgcaaagagcc

SEQ ID NO: 2201646 - RNA, 19 nt, Artificial Sequence
  Description of Artificial Sequence: Synthetic oligonucleotide
  Sense strand starting at position 1202 of SEQ ID NO: 1883567
uaucuuguccugggcaaga

SEQ ID NO: 2201647 - RNA, 19 nt, Artificial Sequence
  Description of Artificial Sequence: Synthetic oligonucleotide
  Antisense strand to SEQ ID NO: 2201646
ucuugcccaggacaagaua

SEQ ID NO: 2201648 - RNA, 19 nt, Artificial Sequence
  Description of Artificial Sequence: Synthetic oligonucleotide
  Sense strand starting at position 3744 of SEQ ID NO: 1883567
uugauauccuuccuuaugu

SEQ ID NO: 2201649 - RNA, 19 nt, Artificial Sequence
  Description of Artificial Sequence: Synthetic oligonucleotide
  Antisense strand to SEQ ID NO: 2201648
acauaaggaaggauaucaa

SEQ ID NO: 2201650 - RNA, 19 nt, Artificial Sequence
  Description of Artificial Sequence: Synthetic oligonucleotide
  Sense strand starting at position 3745 of SEQ ID NO: 1883567
ugauauccuuccuuauguu

SEQ ID NO: 2201651 - RNA, 19 nt, Artificial Sequence
  Description of Artificial Sequence: Synthetic oligonucleotide
  Antisense strand to SEQ ID NO: 2201650
aacauaaggaaggauauca

SEQ ID NO: 2201652 - RNA, 19 nt, Artificial Sequence
  Description of Artificial Sequence: Synthetic oligonucleotide
  Sense strand starting at position 1037 of SEQ ID NO: 1883567
aaaguuagugucggaaacu

SEQ ID NO: 2201653 - RNA, 19 nt, Artificial Sequence
  Description of Artificial Sequence: Synthetic oligonucleotide
  Antisense strand to SEQ ID NO: 2201652
aguuuccgacacuaacuuu

SEQ ID NO: 2201654 - RNA, 19 nt, Artificial Sequence
  Description of Artificial Sequence: Synthetic oligonucleotide
  Sense strand starting at position 889 of SEQ ID NO: 1883567
ucaagaguuugugcaauca

SEQ ID NO: 2201655 - RNA, 19 nt, Artificial Sequence
  Description of Artificial Sequence: Synthetic oligonucleotide
  Antisense strand to SEQ ID NO: 2201654
ugauugcacaaacucuuga

SEQ ID NO: 2201656 - RNA, 19 nt, Artificial Sequence
  Description of Artificial Sequence: Synthetic oligonucleotide
  Sense strand starting at position 409 of SEQ ID NO: 1883567
gcagaauaacccuguccuc

SEQ ID NO: 2201657 - RNA, 19 nt, Artificial Sequence
  Description of Artificial Sequence: Synthetic oligonucleotide
  Antisense strand to SEQ ID NO: 2201656
gaggacaggguuauucugc

SEQ ID NO: 2201658 - RNA, 19 nt, Artificial Sequence
  Description of Artificial Sequence: Synthetic oligonucleotide
  Sense strand starting at position 827 of SEQ ID NO: 1883567
gcucuuugcgcgcugacau

SEQ ID NO: 2201659 - RNA, 19 nt, Artificial Sequence
  Description of Artificial Sequence: Synthetic oligonucleotide
  Antisense strand to SEQ ID NO: 2201658
augucagcgcgcaaagagc

SEQ ID NO: 2201660 - RNA, 19 nt, Artificial Sequence
  Description of Artificial Sequence: Synthetic oligonucleotide
  Sense strand starting at position 3324 of SEQ ID NO: 1883567
ucgguauauacaugucuag

SEQ ID NO: 2201661 - RNA, 19 nt, Artificial Sequence
  Description of Artificial Sequence: Synthetic oligonucleotide
  Antisense strand to SEQ ID NO: 2201660
cuagacauguauauaccga

SEQ ID NO: 2201662 - RNA, 19 nt, Artificial Sequence
  Description of Artificial Sequence: Synthetic oligonucleotide
  Sense strand starting at position 1091 of SEQ ID NO: 1883567
cuccgaagcucucugacau

SEQ ID NO: 2201663 - RNA, 19 nt, Artificial Sequence
  Description of Artificial Sequence: Synthetic oligonucleotide
  Antisense strand to SEQ ID NO: 2201662
augucagagagcuucggag

SEQ ID NO: 2201664 - RNA, 19 nt, Artificial Sequence
  Description of Artificial Sequence: Synthetic oligonucleotide
  Sense strand starting at position 368 of SEQ ID NO: 1883567
guagaaagugccugaugua

SEQ ID NO: 2201665 - RNA, 19 nt, Artificial Sequence
  Description of Artificial Sequence: Synthetic oligonucleotide
  Antisense strand to SEQ ID NO: 2201664
uacaucaggcacuuucuac

SEQ ID NO: 2201666 - RNA, 19 nt, Artificial Sequence
  Description of Artificial Sequence: Synthetic oligonucleotide
  Sense strand starting at position 367 of SEQ ID NO: 1883567
gguagaaagugccugaugu

SEQ ID NO: 2201667 - RNA, 19 nt, Artificial Sequence
  Description of Artificial Sequence: Synthetic oligonucleotide
  Antisense strand to SEQ ID NO: 2201666
acaucaggcacuuucuacc

SEQ ID NO: 2201668 - RNA, 19 nt, Artificial Sequence
  Description of Artificial Sequence: Synthetic oligonucleotide
  Sense strand starting at position 2216 of SEQ ID NO: 1883567
aguccugagcucuggaagu

SEQ ID NO: 2201669 - RNA, 19 nt, Artificial Sequence
  Description of Artificial Sequence: Synthetic oligonucleotide
  Antisense strand to SEQ ID NO: 2201668
acuuccagagcucaggacu

SEQ ID NO: 2201670 - RNA, 19 nt, Artificial Sequence
  Description of Artificial Sequence: Synthetic oligonucleotide
  Sense strand starting at position 787 of SEQ ID NO: 1883567
gcgggaagaucgaggaauc

SEQ ID NO: 2201671 - RNA, 19 nt, Artificial Sequence
  Description of Artificial Sequence: Synthetic oligonucleotide
  Antisense strand to SEQ ID NO: 2201670
gauuccucgaucuucccgc

SEQ ID NO: 2201672 - RNA, 19 nt, Artificial Sequence
  Description of Artificial Sequence: Synthetic oligonucleotide
  Sense strand starting at position 1092 of SEQ ID NO: 1883567
uccgaagcucucugacauc

SEQ ID NO: 2201673 - RNA, 19 nt, Artificial Sequence
  Description of Artificial Sequence: Synthetic oligonucleotide
  Antisense strand to SEQ ID NO: 2201672
gaugucagagagcuucgga

SEQ ID NO: 2201674 - RNA, 19 nt, Artificial Sequence
  Description of Artificial Sequence: Synthetic oligonucleotide
  Sense strand starting at position 2940 of SEQ ID NO: 1883568
agcauaauaaugugaagug

SEQ ID NO: 2201675 - RNA, 19 nt, Artificial Sequence
  Description of Artificial Sequence: Synthetic oligonucleotide
  Antisense strand to SEQ ID NO: 2201674
cacuucacauuauuaugcu

SEQ ID NO: 2201676 - RNA, 19 nt, Artificial Sequence
  Description of Artificial Sequence: Synthetic oligonucleotide
  Sense strand starting at position 3523 of SEQ ID NO: 1883568
agugauagguuggucaauu

SEQ ID NO: 2201677 - RNA, 19 nt, Artificial Sequence
  Description of Artificial Sequence: Synthetic oligonucleotide
  Antisense strand to SEQ ID NO: 2201676
aauugaccaaccuaucacu

SEQ ID NO: 2201678 - RNA, 19 nt, Artificial Sequence
  Description of Artificial Sequence: Synthetic oligonucleotide
  Sense strand starting at position 3122 of SEQ ID NO: 1883568
ccuuguuaucaggguaaug

SEQ ID NO: 2201679 - RNA, 19 nt, Artificial Sequence
  Description of Artificial Sequence: Synthetic oligonucleotide
  Antisense strand to SEQ ID NO: 2201678
cauuacccugauaacaagg

SEQ ID NO: 2201680 - RNA, 19 nt, Artificial Sequence
  Description of Artificial Sequence: Synthetic oligonucleotide
  Sense strand starting at position 3522 of SEQ ID NO: 1883568
uagugauagguuggucaau

SEQ ID NO: 2201681 - RNA, 19 nt, Artificial Sequence
  Description of Artificial Sequence: Synthetic oligonucleotide
  Antisense strand to SEQ ID NO: 2201680
auugaccaaccuaucacua

SEQ ID NO: 2201682 - RNA, 19 nt, Artificial Sequence
  Description of Artificial Sequence: Synthetic oligonucleotide
  Sense strand starting at position 550 of SEQ ID NO: 1883568
cugccauucccguauggga

SEQ ID NO: 2201683 - RNA, 19 nt, Artificial Sequence
  Description of Artificial Sequence: Synthetic oligonucleotide
  Antisense strand to SEQ ID NO: 2201682
ucccauacgggaauggcag

SEQ ID NO: 2201684 - RNA, 19 nt, Artificial Sequence
  Description of Artificial Sequence: Synthetic oligonucleotide
  Sense strand starting at position 2236 of SEQ ID NO: 1883568
gcaucagaccagcguguaa

SEQ ID NO: 2201685 - RNA, 19 nt, Artificial Sequence
  Description of Artificial Sequence: Synthetic oligonucleotide
  Antisense strand to SEQ ID NO: 2201684
uuacacgcuggucugaugc

SEQ ID NO: 2201686 - RNA, 19 nt, Artificial Sequence
  Description of Artificial Sequence: Synthetic oligonucleotide
  Sense strand starting at position 2938 of SEQ ID NO: 1883568
gaagcauaauaaugugaag

SEQ ID NO: 2201687 - RNA, 19 nt, Artificial Sequence
  Description of Artificial Sequence: Synthetic oligonucleotide
  Antisense strand to SEQ ID NO: 2201686
cuucacauuauuaugcuuc

SEQ ID NO: 2201688 - RNA, 19 nt, Artificial Sequence
  Description of Artificial Sequence: Synthetic oligonucleotide
  Sense strand starting at position 2941 of SEQ ID NO: 1883568
gcauaauaaugugaagugu

SEQ ID NO: 2201689 - RNA, 19 nt, Artificial Sequence
  Description of Artificial Sequence: Synthetic oligonucleotide
  Antisense strand to SEQ ID NO: 2201688
acacuucacauuauuaugc

SEQ ID NO: 2201690 - RNA, 19 nt, Artificial Sequence
  Description of Artificial Sequence: Synthetic oligonucleotide
  Sense strand starting at position 3119 of SEQ ID NO: 1883568
uguccuuguuaucagggua

SEQ ID NO: 2201691 - RNA, 19 nt, Artificial Sequence
  Description of Artificial Sequence: Synthetic oligonucleotide
  Antisense strand to SEQ ID NO: 2201690
uacccugauaacaaggaca

SEQ ID NO: 2201692 - RNA, 19 nt, Artificial Sequence
  Description of Artificial Sequence: Synthetic oligonucleotide
  Sense strand starting at position 3513 of SEQ ID NO: 1883568
uucuuagccuagugauagg

SEQ ID NO: 2201693 - RNA, 19 nt, Artificial Sequence
  Description of Artificial Sequence: Synthetic oligonucleotide
  Antisense strand to SEQ ID NO: 2201692
ccuaucacuaggcuaagaa

SEQ ID NO: 2201694 - RNA, 19 nt, Artificial Sequence
  Description of Artificial Sequence: Synthetic oligonucleotide
  Sense strand starting at position 988 of SEQ ID NO: 1883569
agccuagagggaugggauu

SEQ ID NO: 2201695 - RNA, 19 nt, Artificial Sequence
  Description of Artificial Sequence: Synthetic oligonucleotide
  Antisense strand to SEQ ID NO: 2201694
aaucccaucccucuaggcu

SEQ ID NO: 2201696 - RNA, 19 nt, Artificial Sequence
  Description of Artificial Sequence: Synthetic oligonucleotide
  Sense strand starting at position 713 of SEQ ID NO: 1883569
gggaccuagccuuacucau

SEQ ID NO: 2201697 - RNA, 19 nt, Artificial Sequence
  Description of Artificial Sequence: Synthetic oligonucleotide
  Antisense strand to SEQ ID NO: 2201696
augaguaaggcuagguccc

SEQ ID NO: 2201698 - RNA, 19 nt, Artificial Sequence
  Description of Artificial Sequence: Synthetic oligonucleotide
  Sense strand starting at position 739 of SEQ ID NO: 1883569
ggacaauccggaugaagca

SEQ ID NO: 2201699 - RNA, 19 nt, Artificial Sequence
  Description of Artificial Sequence: Synthetic oligonucleotide
  Antisense strand to SEQ ID NO: 2201698
ugcuucauccggauugucc

SEQ ID NO: 2201700 - RNA, 19 nt, Artificial Sequence
  Description of Artificial Sequence: Synthetic oligonucleotide
  Sense strand starting at position 474 of SEQ ID NO: 1883569
cuuuccauacugugaagaa

SEQ ID NO: 2201701 - RNA, 19 nt, Artificial Sequence
  Description of Artificial Sequence: Synthetic oligonucleotide
  Antisense strand to SEQ ID NO: 2201700
uucuucacaguauggaaag

SEQ ID NO: 2201702 - RNA, 19 nt, Artificial Sequence
  Description of Artificial Sequence: Synthetic oligonucleotide
  Sense strand starting at position 377 of SEQ ID NO: 1883569
ccaagcagauaucucgaaa

SEQ ID NO: 2201703 - RNA, 19 nt, Artificial Sequence
  Description of Artificial Sequence: Synthetic oligonucleotide
  Antisense strand to SEQ ID NO: 2201702
uuucgagauaucugcuugg

SEQ ID NO: 2201704 - RNA, 19 nt, Artificial Sequence
  Description of Artificial Sequence: Synthetic oligonucleotide
  Sense strand starting at position 865 of SEQ ID NO: 1883569
gaaacaggucuauggcuga

SEQ ID NO: 2201705 - RNA, 19 nt, Artificial Sequence
  Description of Artificial Sequence: Synthetic oligonucleotide
  Antisense strand to SEQ ID NO: 2201704
ucagccauagaccuguuuc

SEQ ID NO: 2201706 - RNA, 19 nt, Artificial Sequence
  Description of Artificial Sequence: Synthetic oligonucleotide
  Sense strand starting at position 2845 of SEQ ID NO: 1883569
auaccaacggcuuacgaau

SEQ ID NO: 2201707 - RNA, 19 nt, Artificial Sequence
  Description of Artificial Sequence: Synthetic oligonucleotide
  Antisense strand to SEQ ID NO: 2201706
auucguaagccguugguau

SEQ ID NO: 2201708 - RNA, 19 nt, Artificial Sequence
  Description of Artificial Sequence: Synthetic oligonucleotide
  Sense strand starting at position 6 of SEQ ID NO: 1883569
cugauuaagguguagccua

SEQ ID NO: 2201709 - RNA, 19 nt, Artificial Sequence
  Description of Artificial Sequence: Synthetic oligonucleotide
  Antisense strand to SEQ ID NO: 2201708
uaggcuacaccuuaaucag

SEQ ID NO: 2201710 - RNA, 19 nt, Artificial Sequence
  Description of Artificial Sequence: Synthetic oligonucleotide
  Sense strand starting at position 3383 of SEQ ID NO: 1883569
ggaagaauuccauguugcc

SEQ ID NO: 2201711 - RNA, 19 nt, Artificial Sequence
  Description of Artificial Sequence: Synthetic oligonucleotide
  Antisense strand to SEQ ID NO: 2201710
ggcaacauggaauucuucc

SEQ ID NO: 2201712 - RNA, 19 nt, Artificial Sequence
  Description of Artificial Sequence: Synthetic oligonucleotide
  Sense strand starting at position 2939 of SEQ ID NO: 1883569
uaguaccgucaugaguaau

SEQ ID NO: 2201713 - RNA, 19 nt, Artificial Sequence
  Description of Artificial Sequence: Synthetic oligonucleotide
  Antisense strand to SEQ ID NO: 2201712
auuacucaugacgguacua

SEQ ID NO: 2201714 - RNA, 19 nt, Artificial Sequence
  Description of Artificial Sequence: Synthetic oligonucleotide
  Sense strand starting at position 1076 of SEQ ID NO: 1883569
ucuggacagcucuagugua

SEQ ID NO: 2201715 - RNA, 19 nt, Artificial Sequence
  Description of Artificial Sequence: Synthetic oligonucleotide
  Antisense strand to SEQ ID NO: 2201714
uacacuagagcuguccaga

SEQ ID NO: 2201716 - RNA, 19 nt, Artificial Sequence
  Description of Artificial Sequence: Synthetic oligonucleotide
  Sense strand starting at position 3074 of SEQ ID NO: 1883569
guguuacagucaccuaaag

SEQ ID NO: 2201717 - RNA, 19 nt, Artificial Sequence
  Description of Artificial Sequence: Synthetic oligonucleotide
  Antisense strand to SEQ ID NO: 2201716
cuuuaggugacuguaacac

SEQ ID NO: 2201718 - RNA, 19 nt, Artificial Sequence
  Description of Artificial Sequence: Synthetic oligonucleotide
  Sense strand starting at position 549 of SEQ ID NO: 1883569
aggcuugcucaguaucaca

SEQ ID NO: 2201719 - RNA, 19 nt, Artificial Sequence
  Description of Artificial Sequence: Synthetic oligonucleotide
  Antisense strand to SEQ ID NO: 2201718
ugugauacugagcaagccu

SEQ ID NO: 2201720 - RNA, 19 nt, Artificial Sequence
  Description of Artificial Sequence: Synthetic oligonucleotide
  Sense strand starting at position 672 of SEQ ID NO: 1883569
ggcaucuccugaguccaga

SEQ ID NO: 2201721 - RNA, 19 nt, Artificial Sequence
  Description of Artificial Sequence: Synthetic oligonucleotide
  Antisense strand to SEQ ID NO: 2201720
ucuggacucaggagaugcc

SEQ ID NO: 2201722 - RNA, 19 nt, Artificial Sequence
  Description of Artificial Sequence: Synthetic oligonucleotide
  Sense strand starting at position 544 of SEQ ID NO: 1883569
gaaggaggcuugcucagua

SEQ ID NO: 2201723 - RNA, 19 nt, Artificial Sequence
  Description of Artificial Sequence: Synthetic oligonucleotide
  Antisense strand to SEQ ID NO: 2201722
uacugagcaagccuccuuc

SEQ ID NO: 2201724 - RNA, 19 nt, Artificial Sequence
  Description of Artificial Sequence: Synthetic oligonucleotide
  Sense strand starting at position 3573 of SEQ ID NO: 1883569
ggaugcauuuccuaacuua

SEQ ID NO: 2201725 - RNA, 19 nt, Artificial Sequence
  Description of Artificial Sequence: Synthetic oligonucleotide
  Antisense strand to SEQ ID NO: 2201724
uaaguuaggaaaugcaucc

SEQ ID NO: 2201726 - RNA, 19 nt, Artificial Sequence
  Description of Artificial Sequence: Synthetic oligonucleotide
  Sense strand starting at position 2979 of SEQ ID NO: 1883569
ccacauauacugugguagu

SEQ ID NO: 2201727 - RNA, 19 nt, Artificial Sequence
  Description of Artificial Sequence: Synthetic oligonucleotide
  Antisense strand to SEQ ID NO: 2201726
acuaccacaguauaugugg

SEQ ID NO: 2201728 - RNA, 19 nt, Artificial Sequence
  Description of Artificial Sequence: Synthetic oligonucleotide
  Sense strand starting at position 3026 of SEQ ID NO: 1883569
cuauguuucuauguuuaca

SEQ ID NO: 2201729 - RNA, 19 nt, Artificial Sequence
  Description of Artificial Sequence: Synthetic oligonucleotide
  Antisense strand to SEQ ID NO: 2201728
uguaaacauagaaacauag

SEQ ID NO: 2201730 - RNA, 19 nt, Artificial Sequence
  Description of Artificial Sequence: Synthetic oligonucleotide
  Sense strand starting at position 2840 of SEQ ID NO: 1883569
uuguaauaccaacggcuua

SEQ ID NO: 2201731 - RNA, 19 nt, Artificial Sequence
  Description of Artificial Sequence: Synthetic oligonucleotide
  Antisense strand to SEQ ID NO: 2201730
uaagccguugguauuacaa

SEQ ID NO: 2201732 - RNA, 19 nt, Artificial Sequence
  Description of Artificial Sequence: Synthetic oligonucleotide
  Sense strand starting at position 2999 of SEQ ID NO: 1883569
ccaagagauuaugauacca

SEQ ID NO: 2201733 - RNA, 19 nt, Artificial Sequence
  Description of Artificial Sequence: Synthetic oligonucleotide
  Antisense strand to SEQ ID NO: 2201732
ugguaucauaaucucuugg

SEQ ID NO: 2201734 - RNA, 19 nt, Artificial Sequence
  Description of Artificial Sequence: Synthetic oligonucleotide
  Sense strand starting at position 2465 of SEQ ID NO: 1883569
caaacauguucugggauuu

SEQ ID NO: 2201735 - RNA, 19 nt, Artificial Sequence
  Description of Artificial Sequence: Synthetic oligonucleotide
  Antisense strand to SEQ ID NO: 2201734
aaaucccagaacauguuug

SEQ ID NO: 2201736 - RNA, 19 nt, Artificial Sequence
  Description of Artificial Sequence: Synthetic oligonucleotide
  Sense strand starting at position 390 of SEQ ID NO: 1883569
ucgaaagacucgcucucau

SEQ ID NO: 2201737 - RNA, 19 nt, Artificial Sequence
  Description of Artificial Sequence: Synthetic oligonucleotide
  Antisense strand to SEQ ID NO: 2201736
augagagcgagucuuucga

SEQ ID NO: 2201738 - RNA, 19 nt, Artificial Sequence
  Description of Artificial Sequence: Synthetic oligonucleotide
  Sense strand starting at position 2697 of SEQ ID NO: 1883569
ccuagucaccugugccaga

SEQ ID NO: 2201739 - RNA, 19 nt, Artificial Sequence
  Description of Artificial Sequence: Synthetic oligonucleotide
  Antisense strand to SEQ ID NO: 2201738
ucuggcacaggugacuagg

SEQ ID NO: 2201740 - RNA, 19 nt, Artificial Sequence
  Description of Artificial Sequence: Synthetic oligonucleotide
  Sense strand starting at position 3777 of SEQ ID NO: 1883569
aauguauugucuuugugug

SEQ ID NO: 2201741 - RNA, 19 nt, Artificial Sequence
  Description of Artificial Sequence: Synthetic oligonucleotide
  Antisense strand to SEQ ID NO: 2201740
cacacaaagacaauacauu

SEQ ID NO: 2201742 - RNA, 19 nt, Artificial Sequence
  Description of Artificial Sequence: Synthetic oligonucleotide
  Sense strand starting at position 475 of SEQ ID NO: 1883569
uuuccauacugugaagaac

SEQ ID NO: 2201743 - RNA, 19 nt, Artificial Sequence
  Description of Artificial Sequence: Synthetic oligonucleotide
  Antisense strand to SEQ ID NO: 2201742
guucuucacaguauggaaa

SEQ ID NO: 2201744 - RNA, 19 nt, Artificial Sequence
  Description of Artificial Sequence: Synthetic oligonucleotide
  Sense strand starting at position 3778 of SEQ ID NO: 1883569
auguauugucuuugugugu

SEQ ID NO: 2201745 - RNA, 19 nt, Artificial Sequence
  Description of Artificial Sequence: Synthetic oligonucleotide
  Antisense strand to SEQ ID NO: 2201744
acacacaaagacaauacau

SEQ ID NO: 2201746 - RNA, 19 nt, Artificial Sequence
  Description of Artificial Sequence: Synthetic oligonucleotide
  Sense strand starting at position 313 of SEQ ID NO: 1883569
aaaguagccuaagggaauu

SEQ ID NO: 2201747 - RNA, 19 nt, Artificial Sequence
  Description of Artificial Sequence: Synthetic oligonucleotide
  Antisense strand to SEQ ID NO: 2201746
aauucccuuaggcuacuuu

SEQ ID NO: 2201748 - RNA, 19 nt, Artificial Sequence
  Description of Artificial Sequence: Synthetic oligonucleotide
  Sense strand starting at position 2464 of SEQ ID NO: 1883569
ccaaacauguucugggauu

SEQ ID NO: 2201749 - RNA, 19 nt, Artificial Sequence
  Description of Artificial Sequence: Synthetic oligonucleotide
  Antisense strand to SEQ ID NO: 2201748
aaucccagaacauguuugg

SEQ ID NO: 2201750 - RNA, 19 nt, Artificial Sequence
  Description of Artificial Sequence: Synthetic oligonucleotide
  Sense strand starting at position 1407 of SEQ ID NO: 1883569
gagagcuguugucacacuu

SEQ ID NO: 2201751 - RNA, 19 nt, Artificial Sequence
  Description of Artificial Sequence: Synthetic oligonucleotide
  Antisense strand to SEQ ID NO: 2201750
aagugugacaacagcucuc

SEQ ID NO: 2201752 - RNA, 19 nt, Artificial Sequence
  Description of Artificial Sequence: Synthetic oligonucleotide
  Sense strand starting at position 2945 of SEQ ID NO: 1883569
cgucaugaguaaugacauu

SEQ ID NO: 2201753 - RNA, 19 nt, Artificial Sequence
  Description of Artificial Sequence: Synthetic oligonucleotide
  Antisense strand to SEQ ID NO: 2201752
aaugucauuacucaugacg

SEQ ID NO: 2201754 - RNA, 19 nt, Artificial Sequence
  Description of Artificial Sequence: Synthetic oligonucleotide
  Sense strand starting at position 3103 of SEQ ID NO: 1883569
gggucaaauuggugcccaa

SEQ ID NO: 2201755 - RNA, 19 nt, Artificial Sequence
  Description of Artificial Sequence: Synthetic oligonucleotide
  Antisense strand to SEQ ID NO: 2201754
uugggcaccaauuugaccc

SEQ ID NO: 2201756 - RNA, 19 nt, Artificial Sequence
  Description of Artificial Sequence: Synthetic oligonucleotide
  Sense strand starting at position 1417 of SEQ ID NO: 1883569
gucacacuuuggugacuuu

SEQ ID NO: 2201757 - RNA, 19 nt, Artificial Sequence
  Description of Artificial Sequence: Synthetic oligonucleotide
  Antisense strand to SEQ ID NO: 2201756
aaagucaccaaagugugac

SEQ ID NO: 2201758 - RNA, 19 nt, Artificial Sequence
  Description of Artificial Sequence: Synthetic oligonucleotide
  Sense strand starting at position 2938 of SEQ ID NO: 1883569
uuaguaccgucaugaguaa

SEQ ID NO: 2201759 - RNA, 19 nt, Artificial Sequence
  Description of Artificial Sequence: Synthetic oligonucleotide
  Antisense strand to SEQ ID NO: 2201758
uuacucaugacgguacuaa

SEQ ID NO: 2201760 - RNA, 19 nt, Artificial Sequence
  Description of Artificial Sequence: Synthetic oligonucleotide
  Sense strand starting at position 2475 of SEQ ID NO: 1883570
uuugaauaauaggugacua

SEQ ID NO: 2201761 - RNA, 19 nt, Artificial Sequence
  Description of Artificial Sequence: Synthetic oligonucleotide
  Antisense strand to SEQ ID NO: 2201760
uagucaccuauuauucaaa

SEQ ID NO: 2201762 - RNA, 19 nt, Artificial Sequence
  Description of Artificial Sequence: Synthetic oligonucleotide
  Sense strand starting at position 869 of SEQ ID NO: 1883570
ggucuagagaaguauguaa

SEQ ID NO: 2201763 - RNA, 19 nt, Artificial Sequence
  Description of Artificial Sequence: Synthetic oligonucleotide
  Antisense strand to SEQ ID NO: 2201762
uuacauacuucucuagacc

SEQ ID NO: 2201764 - RNA, 19 nt, Artificial Sequence
  Description of Artificial Sequence: Synthetic oligonucleotide
  Sense strand starting at position 2188 of SEQ ID NO: 1883570
ggacuucugccagaaauuc

SEQ ID NO: 2201765 - RNA, 19 nt, Artificial Sequence
  Description of Artificial Sequence: Synthetic oligonucleotide
  Antisense strand to SEQ ID NO: 2201764
gaauuucuggcagaagucc

SEQ ID NO: 2201766 - RNA, 19 nt, Artificial Sequence
  Description of Artificial Sequence: Synthetic oligonucleotide
  Sense strand starting at position 2056 of SEQ ID NO: 1883570
gucuguguuguucuuuauc

SEQ ID NO: 2201767 - RNA, 19 nt, Artificial Sequence
  Description of Artificial Sequence: Synthetic oligonucleotide
  Antisense strand to SEQ ID NO: 2201766
gauaaagaacaacacagac

SEQ ID NO: 2201768 - RNA, 19 nt, Artificial Sequence
  Description of Artificial Sequence: Synthetic oligonucleotide
  Sense strand starting at position 289 of SEQ ID NO: 1883570
cuaugaacauuguugaaca

SEQ ID NO: 2201769 - RNA, 19 nt, Artificial Sequence
  Description of Artificial Sequence: Synthetic oligonucleotide
  Antisense strand to SEQ ID NO: 2201768
uguucaacaauguucauag

SEQ ID NO: 2201770 - RNA, 19 nt, Artificial Sequence
  Description of Artificial Sequence: Synthetic oligonucleotide
  Sense strand starting at position 3851 of SEQ ID NO: 1883570
uccguaacucuugagaaca

SEQ ID NO: 2201771 - RNA, 19 nt, Artificial Sequence
  Description of Artificial Sequence: Synthetic oligonucleotide
  Antisense strand to SEQ ID NO: 2201770
uguucucaagaguuacgga

SEQ ID NO: 2201772 - RNA, 19 nt, Artificial Sequence
  Description of Artificial Sequence: Synthetic oligonucleotide
  Sense strand starting at position 871 of SEQ ID NO: 1883570
ucuagagaaguauguaaca

SEQ ID NO: 2201773 - RNA, 19 nt, Artificial Sequence
  Description of Artificial Sequence: Synthetic oligonucleotide
  Antisense strand to SEQ ID NO: 2201772
uguuacauacuucucuaga

SEQ ID NO: 2201774 - RNA, 19 nt, Artificial Sequence
  Description of Artificial Sequence: Synthetic oligonucleotide
  Sense strand starting at position 1402 of SEQ ID NO: 1883570
cuuaaucaucucugggaug

SEQ ID NO: 2201775 - RNA, 19 nt, Artificial Sequence
  Description of Artificial Sequence: Synthetic oligonucleotide
  Antisense strand to SEQ ID NO: 2201774
caucccagagaugauuaag

SEQ ID NO: 2201776 - RNA, 19 nt, Artificial Sequence
  Description of Artificial Sequence: Synthetic oligonucleotide
  Sense strand starting at position 2608 of SEQ ID NO: 1883570
cucuguaauggugauauac

SEQ ID NO: 2201777 - RNA, 19 nt, Artificial Sequence
  Description of Artificial Sequence: Synthetic oligonucleotide
  Antisense strand to SEQ ID NO: 2201776
guauaucaccauuacagag

SEQ ID NO: 2201778 - RNA, 19 nt, Artificial Sequence
  Description of Artificial Sequence: Synthetic oligonucleotide
  Sense strand starting at position 160 of SEQ ID NO: 1883570
ggguacaaaucuucuuuaa

SEQ ID NO: 2201779 - RNA, 19 nt, Artificial Sequence
  Description of Artificial Sequence: Synthetic oligonucleotide
  Antisense strand to SEQ ID NO: 2201778
uuaaagaagauuuguaccc

SEQ ID NO: 2201780 - RNA, 19 nt, Artificial Sequence
  Description of Artificial Sequence: Synthetic oligonucleotide
  Sense strand starting at position 1401 of SEQ ID NO: 1883570
ucuuaaucaucucugggau

SEQ ID NO: 2201781 - RNA, 19 nt, Artificial Sequence
  Description of Artificial Sequence: Synthetic oligonucleotide
  Antisense strand to SEQ ID NO: 2201780
aucccagagaugauuaaga

SEQ ID NO: 2201782 - RNA, 19 nt, Artificial Sequence
  Description of Artificial Sequence: Synthetic oligonucleotide
  Sense strand starting at position 3701 of SEQ ID NO: 1883570
uguccaugacucuauucua

SEQ ID NO: 2201783 - RNA, 19 nt, Artificial Sequence
  Description of Artificial Sequence: Synthetic oligonucleotide
  Antisense strand to SEQ ID NO: 2201782
uagaauagagucauggaca

SEQ ID NO: 2201784 - RNA, 19 nt, Artificial Sequence
  Description of Artificial Sequence: Synthetic oligonucleotide
  Sense strand starting at position 2643 of SEQ ID NO: 1883570
agugauuguccuuacauau

SEQ ID NO: 2201785 - RNA, 19 nt, Artificial Sequence
  Description of Artificial Sequence: Synthetic oligonucleotide
  Antisense strand to SEQ ID NO: 2201784
auauguaaggacaaucacu

SEQ ID NO: 2201786 - RNA, 19 nt, Artificial Sequence
  Description of Artificial Sequence: Synthetic oligonucleotide
  Sense strand starting at position 2474 of SEQ ID NO: 1883570
guuugaauaauaggugacu

SEQ ID NO: 2201787 - RNA, 19 nt, Artificial Sequence
  Description of Artificial Sequence: Synthetic oligonucleotide
  Antisense strand to SEQ ID NO: 2201786
agucaccuauuauucaaac

SEQ ID NO: 2201788 - RNA, 19 nt, Artificial Sequence
  Description of Artificial Sequence: Synthetic oligonucleotide
  Sense strand starting at position 3242 of SEQ ID NO: 1883570
gugucugauuuguucagua

SEQ ID NO: 2201789 - RNA, 19 nt, Artificial Sequence
  Description of Artificial Sequence: Synthetic oligonucleotide
  Antisense strand to SEQ ID NO: 2201788
uacugaacaaaucagacac

SEQ ID NO: 2201790 - RNA, 19 nt, Artificial Sequence
  Description of Artificial Sequence: Synthetic oligonucleotide
  Sense strand starting at position 2261 of SEQ ID NO: 1883570
aggaaauguuuccuccuua

SEQ ID NO: 2201791 - RNA, 19 nt, Artificial Sequence
  Description of Artificial Sequence: Synthetic oligonucleotide
  Antisense strand to SEQ ID NO: 2201790
uaaggaggaaacauuuccu

SEQ ID NO: 2201792 - RNA, 19 nt, Artificial Sequence
  Description of Artificial Sequence: Synthetic oligonucleotide
  Sense strand starting at position 2262 of SEQ ID NO: 1883570
ggaaauguuuccuccuuaa

SEQ ID NO: 2201793 - RNA, 19 nt, Artificial Sequence
  Description of Artificial Sequence: Synthetic oligonucleotide
  Antisense strand to SEQ ID NO: 2201792
uuaaggaggaaacauuucc

SEQ ID NO: 2201794 - RNA, 19 nt, Artificial Sequence
  Description of Artificial Sequence: Synthetic oligonucleotide
  Sense strand starting at position 2295 of SEQ ID NO: 1883570
gcguguggauuucuuaaug

SEQ ID NO: 2201795 - RNA, 19 nt, Artificial Sequence
  Description of Artificial Sequence: Synthetic oligonucleotide
  Antisense strand to SEQ ID NO: 2201794
cauuaagaaauccacacgc

SEQ ID NO: 2201796 - RNA, 19 nt, Artificial Sequence
  Description of Artificial Sequence: Synthetic oligonucleotide
  Sense strand starting at position 3435 of SEQ ID NO: 1883570
uauaaaugguuucuaguga

SEQ ID NO: 2201797 - RNA, 19 nt, Artificial Sequence
  Description of Artificial Sequence: Synthetic oligonucleotide
  Antisense strand to SEQ ID NO: 2201796
ucacuagaaaccauuuaua

SEQ ID NO: 2201798 - RNA, 19 nt, Artificial Sequence
  Description of Artificial Sequence: Synthetic oligonucleotide
  Sense strand starting at position 2673 of SEQ ID NO: 1883570
acagucaugcuaugaagau

SEQ ID NO: 2201799 - RNA, 19 nt, Artificial Sequence
  Description of Artificial Sequence: Synthetic oligonucleotide
  Antisense strand to SEQ ID NO: 2201798
aucuucauagcaugacugu

SEQ ID NO: 2201800 - RNA, 19 nt, Artificial Sequence
  Description of Artificial Sequence: Synthetic oligonucleotide
  Sense strand starting at position 2956 of SEQ ID NO: 1883570
caaguauugcaagagcauc

SEQ ID NO: 2201801 - RNA, 19 nt, Artificial Sequence
  Description of Artificial Sequence: Synthetic oligonucleotide
  Antisense strand to SEQ ID NO: 2201800
gaugcucuugcaauacuug

SEQ ID NO: 2201802 - RNA, 19 nt, Artificial Sequence
  Description of Artificial Sequence: Synthetic oligonucleotide
  Sense strand starting at position 3929 of SEQ ID NO: 1883570
guaccuuaugacugugaaa

SEQ ID NO: 2201803 - RNA, 19 nt, Artificial Sequence
  Description of Artificial Sequence: Synthetic oligonucleotide
  Antisense strand to SEQ ID NO: 2201802
uuucacagucauaagguac

SEQ ID NO: 2201804 - RNA, 19 nt, Artificial Sequence
  Description of Artificial Sequence: Synthetic oligonucleotide
  Sense strand starting at position 3931 of SEQ ID NO: 1883570
accuuaugacugugaaagu

SEQ ID NO: 2201805 - RNA, 19 nt, Artificial Sequence
  Description of Artificial Sequence: Synthetic oligonucleotide
  Antisense strand to SEQ ID NO: 2201804
acuuucacagucauaaggu

SEQ ID NO: 2201806 - RNA, 19 nt, Artificial Sequence
  Description of Artificial Sequence: Synthetic oligonucleotide
  Sense strand starting at position 3928 of SEQ ID NO: 1883570
gguaccuuaugacugugaa

SEQ ID NO: 2201807 - RNA, 19 nt, Artificial Sequence
  Description of Artificial Sequence: Synthetic oligonucleotide
  Antisense strand to SEQ ID NO: 2201806
uucacagucauaagguacc

SEQ ID NO: 2201808 - RNA, 19 nt, Artificial Sequence
  Description of Artificial Sequence: Synthetic oligonucleotide
  Sense strand starting at position 1404 of SEQ ID NO: 1883570
uaaucaucucugggauguu

SEQ ID NO: 2201809 - RNA, 19 nt, Artificial Sequence
  Description of Artificial Sequence: Synthetic oligonucleotide
  Antisense strand to SEQ ID NO: 2201808
aacaucccagagaugauua

SEQ ID NO: 2201810 - RNA, 19 nt, Artificial Sequence
  Description of Artificial Sequence: Synthetic oligonucleotide
  Sense strand starting at position 1552 of SEQ ID NO: 1883570
guugccagaaguggaaaua

SEQ ID NO: 2201811 - RNA, 19 nt, Artificial Sequence
  Description of Artificial Sequence: Synthetic oligonucleotide
  Antisense strand to SEQ ID NO: 2201810
uauuuccacuucuggcaac

SEQ ID NO: 2201812 - RNA, 19 nt, Artificial Sequence
  Description of Artificial Sequence: Synthetic oligonucleotide
  Sense strand starting at position 1544 of SEQ ID NO: 1883570
gaaguugaguugccagaag

SEQ ID NO: 2201813 - RNA, 19 nt, Artificial Sequence
  Description of Artificial Sequence: Synthetic oligonucleotide
  Antisense strand to SEQ ID NO: 2201812
cuucuggcaacucaacuuc

SEQ ID NO: 2201814 - RNA, 19 nt, Artificial Sequence
  Description of Artificial Sequence: Synthetic oligonucleotide
  Sense strand starting at position 684 of SEQ ID NO: 1883570
ucaagaggcuuuccuugau

SEQ ID NO: 2201815 - RNA, 19 nt, Artificial Sequence
  Description of Artificial Sequence: Synthetic oligonucleotide
  Antisense strand to SEQ ID NO: 2201814
aucaaggaaagccucuuga

SEQ ID NO: 2201816 - RNA, 19 nt, Artificial Sequence
  Description of Artificial Sequence: Synthetic oligonucleotide
  Sense strand starting at position 2300 of SEQ ID NO: 1883570
uggauuucuuaaugaaaca

SEQ ID NO: 2201817 - RNA, 19 nt, Artificial Sequence
  Description of Artificial Sequence: Synthetic oligonucleotide
  Antisense strand to SEQ ID NO: 2201816
uguuucauuaagaaaucca

SEQ ID NO: 2201818 - RNA, 19 nt, Artificial Sequence
  Description of Artificial Sequence: Synthetic oligonucleotide
  Sense strand starting at position 1381 of SEQ ID NO: 1883570
guuaaaucucaaugggcau

SEQ ID NO: 2201819 - RNA, 19 nt, Artificial Sequence
  Description of Artificial Sequence: Synthetic oligonucleotide
  Antisense strand to SEQ ID NO: 2201818
augcccauugagauuuaac

SEQ ID NO: 2201820 - RNA, 19 nt, Artificial Sequence
  Description of Artificial Sequence: Synthetic oligonucleotide
  Sense strand starting at position 2962 of SEQ ID NO: 1883570
uugcaagagcaucagucau

SEQ ID NO: 2201821 - RNA, 19 nt, Artificial Sequence
  Description of Artificial Sequence: Synthetic oligonucleotide
  Antisense strand to SEQ ID NO: 2201820
augacugaugcucuugcaa

SEQ ID NO: 2201822 - RNA, 19 nt, Artificial Sequence
  Description of Artificial Sequence: Synthetic oligonucleotide
  Sense strand starting at position 781 of SEQ ID NO: 1883570
accaucugagguuguauau

SEQ ID NO: 2201823 - RNA, 19 nt, Artificial Sequence
  Description of Artificial Sequence: Synthetic oligonucleotide
  Antisense strand to SEQ ID NO: 2201822
auauacaaccucagauggu

SEQ ID NO: 2201824 - RNA, 19 nt, Artificial Sequence
  Description of Artificial Sequence: Synthetic oligonucleotide
  Sense strand starting at position 1221 of SEQ ID NO: 1883570
acauguaacucuuuaaugu

SEQ ID NO: 2201825 - RNA, 19 nt, Artificial Sequence
  Description of Artificial Sequence: Synthetic oligonucleotide
  Antisense strand to SEQ ID NO: 2201824
acauuaaagaguuacaugu

SEQ ID NO: 2201826 - RNA, 19 nt, Artificial Sequence
  Description of Artificial Sequence: Synthetic oligonucleotide
  Sense strand starting at position 2640 of SEQ ID NO: 1883570
auuagugauuguccuuaca

SEQ ID NO: 2201827 - RNA, 19 nt, Artificial Sequence
  Description of Artificial Sequence: Synthetic oligonucleotide
  Antisense strand to SEQ ID NO: 2201826
uguaaggacaaucacuaau

SEQ ID NO: 2201828 - RNA, 19 nt, Artificial Sequence
  Description of Artificial Sequence: Synthetic oligonucleotide
  Sense strand starting at position 261 of SEQ ID NO: 1883570
ucuagacuguuuguaccaa

SEQ ID NO: 2201829 - RNA, 19 nt, Artificial Sequence
  Description of Artificial Sequence: Synthetic oligonucleotide
  Antisense strand to SEQ ID NO: 2201828
uugguacaaacagucuaga

SEQ ID NO: 2201830 - RNA, 19 nt, Artificial Sequence
  Description of Artificial Sequence: Synthetic oligonucleotide
  Sense strand starting at position 1243 of SEQ ID NO: 1883570
agaucuaaauuguucuguu

SEQ ID NO: 2201831 - RNA, 19 nt, Artificial Sequence
  Description of Artificial Sequence: Synthetic oligonucleotide
  Antisense strand to SEQ ID NO: 2201830
aacagaacaauuuagaucu

SEQ ID NO: 2201832 - RNA, 19 nt, Artificial Sequence
  Description of Artificial Sequence: Synthetic oligonucleotide
  Sense strand starting at position 3238 of SEQ ID NO: 1883570
uugugugucugauuuguuc

SEQ ID NO: 2201833 - RNA, 19 nt, Artificial Sequence
  Description of Artificial Sequence: Synthetic oligonucleotide
  Antisense strand to SEQ ID NO: 2201832
gaacaaaucagacacacaa

SEQ ID NO: 2201834 - RNA, 19 nt, Artificial Sequence
  Description of Artificial Sequence: Synthetic oligonucleotide
  Sense strand starting at position 2070 of SEQ ID NO: 1883570
uuaucaaugggcugcaaau

SEQ ID NO: 2201835 - RNA, 19 nt, Artificial Sequence
  Description of Artificial Sequence: Synthetic oligonucleotide
  Antisense strand to SEQ ID NO: 2201834
auuugcagcccauugauaa

SEQ ID NO: 2201836 - RNA, 19 nt, Artificial Sequence
  Description of Artificial Sequence: Synthetic oligonucleotide
  Sense strand starting at position 2311 of SEQ ID NO: 1883570
augaaacaguuguugucau

SEQ ID NO: 2201837 - RNA, 19 nt, Artificial Sequence
  Description of Artificial Sequence: Synthetic oligonucleotide
  Antisense strand to SEQ ID NO: 2201836
augacaacaacuguuucau

SEQ ID NO: 2201838 - RNA, 19 nt, Artificial Sequence
  Description of Artificial Sequence: Synthetic oligonucleotide
  Sense strand starting at position 2637 of SEQ ID NO: 1883570
auaauuagugauuguccuu

SEQ ID NO: 2201839 - RNA, 19 nt, Artificial Sequence
  Description of Artificial Sequence: Synthetic oligonucleotide
  Antisense strand to SEQ ID NO: 2201838
aaggacaaucacuaauuau

SEQ ID NO: 2201840 - RNA, 19 nt, Artificial Sequence
  Description of Artificial Sequence: Synthetic oligonucleotide
  Sense strand starting at position 993 of SEQ ID NO: 1883571
agcaguacgcuacuuguau

SEQ ID NO: 2201841 - RNA, 19 nt, Artificial Sequence
  Description of Artificial Sequence: Synthetic oligonucleotide
  Antisense strand to SEQ ID NO: 2201840
auacaaguagcguacugcu

SEQ ID NO: 2201842 - RNA, 19 nt, Artificial Sequence
  Description of Artificial Sequence: Synthetic oligonucleotide
  Sense strand starting at position 2255 of SEQ ID NO: 1883571
uagugcucgcagucuuaga

SEQ ID NO: 2201843 - RNA, 19 nt, Artificial Sequence
  Description of Artificial Sequence: Synthetic oligonucleotide
  Antisense strand to SEQ ID NO: 2201842
ucuaagacugcgagcacua

SEQ ID NO: 2201844 - RNA, 19 nt, Artificial Sequence
  Description of Artificial Sequence: Synthetic oligonucleotide
  Sense strand starting at position 1443 of SEQ ID NO: 1883571
gugauuuagccuuggugga

SEQ ID NO: 2201845 - RNA, 19 nt, Artificial Sequence
  Description of Artificial Sequence: Synthetic oligonucleotide
  Antisense strand to SEQ ID NO: 2201844
uccaccaaggcuaaaucac

SEQ ID NO: 2201846 - RNA, 19 nt, Artificial Sequence
  Description of Artificial Sequence: Synthetic oligonucleotide
  Sense strand starting at position 2036 of SEQ ID NO: 1883571
cucauaauggacugugaag

SEQ ID NO: 2201847 - RNA, 19 nt, Artificial Sequence
  Description of Artificial Sequence: Synthetic oligonucleotide
  Antisense strand to SEQ ID NO: 2201846
cuucacaguccauuaugag

SEQ ID NO: 2201848 - RNA, 19 nt, Artificial Sequence
  Description of Artificial Sequence: Synthetic oligonucleotide
  Sense strand starting at position 3472 of SEQ ID NO: 1883571
gggcaaagcauuuguuacu

SEQ ID NO: 2201849 - RNA, 19 nt, Artificial Sequence
  Description of Artificial Sequence: Synthetic oligonucleotide
  Antisense strand to SEQ ID NO: 2201848
aguaacaaaugcuuugccc

SEQ ID NO: 2201850 - RNA, 19 nt, Artificial Sequence
  Description of Artificial Sequence: Synthetic oligonucleotide
  Sense strand starting at position 3752 of SEQ ID NO: 1883571
cuaagagaacucugucaac

SEQ ID NO: 2201851 - RNA, 19 nt, Artificial Sequence
  Description of Artificial Sequence: Synthetic oligonucleotide
  Antisense strand to SEQ ID NO: 2201850
guugacagaguucucuuag

SEQ ID NO: 2201852 - RNA, 19 nt, Artificial Sequence
  Description of Artificial Sequence: Synthetic oligonucleotide
  Sense strand starting at position 3473 of SEQ ID NO: 1883571
ggcaaagcauuuguuacuu

SEQ ID NO: 2201853 - RNA, 19 nt, Artificial Sequence
  Description of Artificial Sequence: Synthetic oligonucleotide
  Antisense strand to SEQ ID NO: 2201852
aaguaacaaaugcuuugcc

SEQ ID NO: 2201854 - RNA, 19 nt, Artificial Sequence
  Description of Artificial Sequence: Synthetic oligonucleotide
  Sense strand starting at position 1431 of SEQ ID NO: 1883571
gcuagauaguacgugauuu

SEQ ID NO: 2201855 - RNA, 19 nt, Artificial Sequence
  Description of Artificial Sequence: Synthetic oligonucleotide
  Antisense strand to SEQ ID NO: 2201854
aaaucacguacuaucuagc

SEQ ID NO: 2201856 - RNA, 19 nt, Artificial Sequence
  Description of Artificial Sequence: Synthetic oligonucleotide
  Sense strand starting at position 1990 of SEQ ID NO: 1883571
ccugaauaacucuguggag

SEQ ID NO: 2201857 - RNA, 19 nt, Artificial Sequence
  Description of Artificial Sequence: Synthetic oligonucleotide
  Antisense strand to SEQ ID NO: 2201856
cuccacagaguuauucagg

SEQ ID NO: 2201858 - RNA, 19 nt, Artificial Sequence
  Description of Artificial Sequence: Synthetic oligonucleotide
  Sense strand starting at position 3293 of SEQ ID NO: 1883571
acaaguaaguuucugaaac

SEQ ID NO: 2201859 - RNA, 19 nt, Artificial Sequence
  Description of Artificial Sequence: Synthetic oligonucleotide
  Antisense strand to SEQ ID NO: 2201858
guuucagaaacuuacuugu

SEQ ID NO: 2201860 - RNA, 19 nt, Artificial Sequence
  Description of Artificial Sequence: Synthetic oligonucleotide
  Sense strand starting at position 2133 of SEQ ID NO: 1883571
ugggcucagaucuggauaa

SEQ ID NO: 2201861 - RNA, 19 nt, Artificial Sequence
  Description of Artificial Sequence: Synthetic oligonucleotide
  Antisense strand to SEQ ID NO: 2201860
uuauccagaucugagccca

SEQ ID NO: 2201862 - RNA, 19 nt, Artificial Sequence
  Description of Artificial Sequence: Synthetic oligonucleotide
  Sense strand starting at position 859 of SEQ ID NO: 1883571
cuagaaguuugagcauaaa

SEQ ID NO: 2201863 - RNA, 19 nt, Artificial Sequence
  Description of Artificial Sequence: Synthetic oligonucleotide
  Antisense strand to SEQ ID NO: 2201862
uuuaugcucaaacuucuag

SEQ ID NO: 2201864 - RNA, 19 nt, Artificial Sequence
  Description of Artificial Sequence: Synthetic oligonucleotide
  Sense strand starting at position 1795 of SEQ ID NO: 1883571
gagccuugugacuaaaucu

SEQ ID NO: 2201865 - RNA, 19 nt, Artificial Sequence
  Description of Artificial Sequence: Synthetic oligonucleotide
  Antisense strand to SEQ ID NO: 2201864
agauuuagucacaaggcuc

SEQ ID NO: 2201866 - RNA, 19 nt, Artificial Sequence
  Description of Artificial Sequence: Synthetic oligonucleotide
  Sense strand starting at position 856 of SEQ ID NO: 1883571
agacuagaaguuugagcau

SEQ ID NO: 2201867 - RNA, 19 nt, Artificial Sequence
  Description of Artificial Sequence: Synthetic oligonucleotide
  Antisense strand to SEQ ID NO: 2201866
augcucaaacuucuagucu

SEQ ID NO: 2201868 - RNA, 19 nt, Artificial Sequence
  Description of Artificial Sequence: Synthetic oligonucleotide
  Sense strand starting at position 3711 of SEQ ID NO: 1883571
uuggacugucagugauaaa

SEQ ID NO: 2201869 - RNA, 19 nt, Artificial Sequence
  Description of Artificial Sequence: Synthetic oligonucleotide
  Antisense strand to SEQ ID NO: 2201868
uuuaucacugacaguccaa

SEQ ID NO: 2201870 - RNA, 19 nt, Artificial Sequence
  Description of Artificial Sequence: Synthetic oligonucleotide
  Sense strand starting at position 609 of SEQ ID NO: 1883571
cuaucauaccauuaucgua

SEQ ID NO: 2201871 - RNA, 19 nt, Artificial Sequence
  Description of Artificial Sequence: Synthetic oligonucleotide
  Antisense strand to SEQ ID NO: 2201870
uacgauaaugguaugauag

SEQ ID NO: 2201872 - RNA, 19 nt, Artificial Sequence
  Description of Artificial Sequence: Synthetic oligonucleotide
  Sense strand starting at position 3841 of SEQ ID NO: 1883571
auaacaugaccacguuuaa

SEQ ID NO: 2201873 - RNA, 19 nt, Artificial Sequence
  Description of Artificial Sequence: Synthetic oligonucleotide
  Antisense strand to SEQ ID NO: 2201872
uuaaacguggucauguuau

SEQ ID NO: 2201874 - RNA, 19 nt, Artificial Sequence
  Description of Artificial Sequence: Synthetic oligonucleotide
  Sense strand starting at position 545 of SEQ ID NO: 1883571
uguaucuaacuguaucuua

SEQ ID NO: 2201875 - RNA, 19 nt, Artificial Sequence
  Description of Artificial Sequence: Synthetic oligonucleotide
  Antisense strand to SEQ ID NO: 2201874
uaagauacaguuagauaca

SEQ ID NO: 2201876 - RNA, 19 nt, Artificial Sequence
  Description of Artificial Sequence: Synthetic oligonucleotide
  Sense strand starting at position 408 of SEQ ID NO: 1883571
accuauaugguuuagccua

SEQ ID NO: 2201877 - RNA, 19 nt, Artificial Sequence
  Description of Artificial Sequence: Synthetic oligonucleotide
  Antisense strand to SEQ ID NO: 2201876
uaggcuaaaccauauaggu

SEQ ID NO: 2201878 - RNA, 19 nt, Artificial Sequence
  Description of Artificial Sequence: Synthetic oligonucleotide
  Sense strand starting at position 1649 of SEQ ID NO: 1883571
guuagaaaccaauguagua

SEQ ID NO: 2201879 - RNA, 19 nt, Artificial Sequence
  Description of Artificial Sequence: Synthetic oligonucleotide
  Antisense strand to SEQ ID NO: 2201878
uacuacauugguuucuaac

SEQ ID NO: 2201880 - RNA, 19 nt, Artificial Sequence
  Description of Artificial Sequence: Synthetic oligonucleotide
  Sense strand starting at position 3087 of SEQ ID NO: 1883571
ggaggucaggcccagucau

SEQ ID NO: 2201881 - RNA, 19 nt, Artificial Sequence
  Description of Artificial Sequence: Synthetic oligonucleotide
  Antisense strand to SEQ ID NO: 2201880
augacugggccugaccucc

SEQ ID NO: 2201882 - RNA, 19 nt, Artificial Sequence
  Description of Artificial Sequence: Synthetic oligonucleotide
  Sense strand starting at position 2813 of SEQ ID NO: 1883571
ucucuuuggcuguauaaag

SEQ ID NO: 2201883 - RNA, 19 nt, Artificial Sequence
  Description of Artificial Sequence: Synthetic oligonucleotide
  Antisense strand to SEQ ID NO: 2201882
cuuuauacagccaaagaga

SEQ ID NO: 2201884 - RNA, 19 nt, Artificial Sequence
  Description of Artificial Sequence: Synthetic oligonucleotide
  Sense strand starting at position 1603 of SEQ ID NO: 1883571
aguuuacccugaucuacau

SEQ ID NO: 2201885 - RNA, 19 nt, Artificial Sequence
  Description of Artificial Sequence: Synthetic oligonucleotide
  Antisense strand to SEQ ID NO: 2201884
auguagaucaggguaaacu

SEQ ID NO: 2201886 - RNA, 19 nt, Artificial Sequence
  Description of Artificial Sequence: Synthetic oligonucleotide
  Sense strand starting at position 1342 of SEQ ID NO: 1883571
acaccaucguaagucagaa

SEQ ID NO: 2201887 - RNA, 19 nt, Artificial Sequence
  Description of Artificial Sequence: Synthetic oligonucleotide
  Antisense strand to SEQ ID NO: 2201886
uucugacuuacgauggugu

SEQ ID NO: 2201888 - RNA, 19 nt, Artificial Sequence
  Description of Artificial Sequence: Synthetic oligonucleotide
  Sense strand starting at position 720 of SEQ ID NO: 1883571
ggaauugccguuuaagacu

SEQ ID NO: 2201889 - RNA, 19 nt, Artificial Sequence
  Description of Artificial Sequence: Synthetic oligonucleotide
  Antisense strand to SEQ ID NO: 2201888
agucuuaaacggcaauucc

SEQ ID NO: 2201890 - RNA, 19 nt, Artificial Sequence
  Description of Artificial Sequence: Synthetic oligonucleotide
  Sense strand starting at position 117 of SEQ ID NO: 1883571
gguugauugacauggcaua

SEQ ID NO: 2201891 - RNA, 19 nt, Artificial Sequence
  Description of Artificial Sequence: Synthetic oligonucleotide
  Antisense strand to SEQ ID NO: 2201890
uaugccaugucaaucaacc

SEQ ID NO: 2201892 - RNA, 19 nt, Artificial Sequence
  Description of Artificial Sequence: Synthetic oligonucleotide
  Sense strand starting at position 3603 of SEQ ID NO: 1883571
gggcccuggucacuggaaa

SEQ ID NO: 2201893 - RNA, 19 nt, Artificial Sequence
  Description of Artificial Sequence: Synthetic oligonucleotide
  Antisense strand to SEQ ID NO: 2201892
uuuccagugaccagggccc

SEQ ID NO: 2201894 - RNA, 19 nt, Artificial Sequence
  Description of Artificial Sequence: Synthetic oligonucleotide
  Sense strand starting at position 902 of SEQ ID NO: 1883571
uacgucuaccucgaauaau

SEQ ID NO: 2201895 - RNA, 19 nt, Artificial Sequence
  Description of Artificial Sequence: Synthetic oligonucleotide
  Antisense strand to SEQ ID NO: 2201894
auuauucgagguagacgua

SEQ ID NO: 2201896 - RNA, 19 nt, Artificial Sequence
  Description of Artificial Sequence: Synthetic oligonucleotide
  Sense strand starting at position 611 of SEQ ID NO: 1883571
aucauaccauuaucguaua

SEQ ID NO: 2201897 - RNA, 19 nt, Artificial Sequence
  Description of Artificial Sequence: Synthetic oligonucleotide
  Antisense strand to SEQ ID NO: 2201896
uauacgauaaugguaugau

SEQ ID NO: 2201898 - RNA, 19 nt, Artificial Sequence
  Description of Artificial Sequence: Synthetic oligonucleotide
  Sense strand starting at position 2361 of SEQ ID NO: 1883571
agggauauauaacagauaa

SEQ ID NO: 2201899 - RNA, 19 nt, Artificial Sequence
  Description of Artificial Sequence: Synthetic oligonucleotide
  Antisense strand to SEQ ID NO: 2201898
uuaucuguuauauaucccu

SEQ ID NO: 2201900 - RNA, 19 nt, Artificial Sequence
  Description of Artificial Sequence: Synthetic oligonucleotide
  Sense strand starting at position 1538 of SEQ ID NO: 1883571
gcugucuucccauagaacu

SEQ ID NO: 2201901 - RNA, 19 nt, Artificial Sequence
  Description of Artificial Sequence: Synthetic oligonucleotide
  Antisense strand to SEQ ID NO: 2201900
aguucuaugggaagacagc

SEQ ID NO: 2201902 - RNA, 19 nt, Artificial Sequence
  Description of Artificial Sequence: Synthetic oligonucleotide
  Sense strand starting at position 1601 of SEQ ID NO: 1883571
gcaguuuacccugaucuac

SEQ ID NO: 2201903 - RNA, 19 nt, Artificial Sequence
  Description of Artificial Sequence: Synthetic oligonucleotide
  Antisense strand to SEQ ID NO: 2201902
guagaucaggguaaacugc

SEQ ID NO: 2201904 - RNA, 19 nt, Artificial Sequence
  Description of Artificial Sequence: Synthetic oligonucleotide
  Sense strand starting at position 2075 of SEQ ID NO: 1883571
cuguuaaggcacugaaauu

SEQ ID NO: 2201905 - RNA, 19 nt, Artificial Sequence
  Description of Artificial Sequence: Synthetic oligonucleotide
  Antisense strand to SEQ ID NO: 2201904
aauuucagugccuuaacag

SEQ ID NO: 2201906 - RNA, 19 nt, Artificial Sequence
  Description of Artificial Sequence: Synthetic oligonucleotide
  Sense strand starting at position 2871 of SEQ ID NO: 1883571
accucaguggcuuagcaaa

SEQ ID NO: 2201907 - RNA, 19 nt, Artificial Sequence
  Description of Artificial Sequence: Synthetic oligonucleotide
  Antisense strand to SEQ ID NO: 2201906
uuugcuaagccacugaggu

SEQ ID NO: 2201908 - RNA, 19 nt, Artificial Sequence
  Description of Artificial Sequence: Synthetic oligonucleotide
  Sense strand starting at position 950 of SEQ ID NO: 1883571
acacgcaugccugaugaau

SEQ ID NO: 2201909 - RNA, 19 nt, Artificial Sequence
  Description of Artificial Sequence: Synthetic oligonucleotide
  Antisense strand to SEQ ID NO: 2201908
auucaucaggcaugcgugu

SEQ ID NO: 2201910 - RNA, 19 nt, Artificial Sequence
  Description of Artificial Sequence: Synthetic oligonucleotide
  Sense strand starting at position 1794 of SEQ ID NO: 1883571
ggagccuugugacuaaauc

SEQ ID NO: 2201911 - RNA, 19 nt, Artificial Sequence
  Description of Artificial Sequence: Synthetic oligonucleotide
  Antisense strand to SEQ ID NO: 2201910
gauuuagucacaaggcucc

SEQ ID NO: 2201912 - RNA, 19 nt, Artificial Sequence
  Description of Artificial Sequence: Synthetic oligonucleotide
  Sense strand starting at position 1686 of SEQ ID NO: 1883571
agacucugugagugguaga

SEQ ID NO: 2201913 - RNA, 19 nt, Artificial Sequence
  Description of Artificial Sequence: Synthetic oligonucleotide
  Antisense strand to SEQ ID NO: 2201912
ucuaccacucacagagucu

SEQ ID NO: 2201914 - RNA, 19 nt, Artificial Sequence
  Description of Artificial Sequence: Synthetic oligonucleotide
  Sense strand starting at position 2299 of SEQ ID NO: 1883571
guaguuugggucugagaaa

SEQ ID NO: 2201915 - RNA, 19 nt, Artificial Sequence
  Description of Artificial Sequence: Synthetic oligonucleotide
  Antisense strand to SEQ ID NO: 2201914
uuucucagacccaaacuac

SEQ ID NO: 2201916 - RNA, 19 nt, Artificial Sequence
  Description of Artificial Sequence: Synthetic oligonucleotide
  Sense strand starting at position 2251 of SEQ ID NO: 1883571
gucuuagugcucgcagucu

SEQ ID NO: 2201917 - RNA, 19 nt, Artificial Sequence
  Description of Artificial Sequence: Synthetic oligonucleotide
  Antisense strand to SEQ ID NO: 2201916
agacugcgagcacuaagac

SEQ ID NO: 2201918 - RNA, 19 nt, Artificial Sequence
  Description of Artificial Sequence: Synthetic oligonucleotide
  Sense strand starting at position 2916 of SEQ ID NO: 1883571
gugucaauccaguauaagu

SEQ ID NO: 2201919 - RNA, 19 nt, Artificial Sequence
  Description of Artificial Sequence: Synthetic oligonucleotide
  Antisense strand to SEQ ID NO: 2201918
acuuauacuggauugacac

SEQ ID NO: 2201920 - RNA, 19 nt, Artificial Sequence
  Description of Artificial Sequence: Synthetic oligonucleotide
  Sense strand starting at position 2414 of SEQ ID NO: 1883572
aacaauaguuuccugagga

SEQ ID NO: 2201921 - RNA, 19 nt, Artificial Sequence
  Description of Artificial Sequence: Synthetic oligonucleotide
  Antisense strand to SEQ ID NO: 2201920
uccucaggaaacuauuguu

SEQ ID NO: 2201922 - RNA, 19 nt, Artificial Sequence
  Description of Artificial Sequence: Synthetic oligonucleotide
  Sense strand starting at position 1060 of SEQ ID NO: 1883572
gggcauuccaggcaagaag

SEQ ID NO: 2201923 - RNA, 19 nt, Artificial Sequence
  Description of Artificial Sequence: Synthetic oligonucleotide
  Antisense strand to SEQ ID NO: 2201922
cuucuugccuggaaugccc

SEQ ID NO: 2201924 - RNA, 19 nt, Artificial Sequence
  Description of Artificial Sequence: Synthetic oligonucleotide
  Sense strand starting at position 2443 of SEQ ID NO: 1883572
uuuaauuguguugaggaga

SEQ ID NO: 2201925 - RNA, 19 nt, Artificial Sequence
  Description of Artificial Sequence: Synthetic oligonucleotide
  Antisense strand to SEQ ID NO: 2201924
ucuccucaacacaauuaaa

SEQ ID NO: 2201926 - RNA, 19 nt, Artificial Sequence
  Description of Artificial Sequence: Synthetic oligonucleotide
  Sense strand starting at position 1765 of SEQ ID NO: 1883572
cuugucuuuggacauaaau

SEQ ID NO: 2201927 - RNA, 19 nt, Artificial Sequence
  Description of Artificial Sequence: Synthetic oligonucleotide
  Antisense strand to SEQ ID NO: 2201926
auuuauguccaaagacaag

SEQ ID NO: 2201928 - RNA, 19 nt, Artificial Sequence
  Description of Artificial Sequence: Synthetic oligonucleotide
  Sense strand starting at position 2090 of SEQ ID NO: 1883572
ggaacaguggcucauccaa

SEQ ID NO: 2201929 - RNA, 19 nt, Artificial Sequence
  Description of Artificial Sequence: Synthetic oligonucleotide
  Antisense strand to SEQ ID NO: 2201928
uuggaugagccacuguucc

SEQ ID NO: 2201930 - RNA, 19 nt, Artificial Sequence
  Description of Artificial Sequence: Synthetic oligonucleotide
  Sense strand starting at position 1242 of SEQ ID NO: 1883572
ugacuugauccaugggauu

SEQ ID NO: 2201931 - RNA, 19 nt, Artificial Sequence
  Description of Artificial Sequence: Synthetic oligonucleotide
  Antisense strand to SEQ ID NO: 2201930
aaucccauggaucaaguca

SEQ ID NO: 2201932 - RNA, 19 nt, Artificial Sequence
  Description of Artificial Sequence: Synthetic oligonucleotide
  Sense strand starting at position 1235 of SEQ ID NO: 1883572
ugaggagugacuugaucca

SEQ ID NO: 2201933 - RNA, 19 nt, Artificial Sequence
  Description of Artificial Sequence: Synthetic oligonucleotide
  Antisense strand to SEQ ID NO: 2201932
uggaucaagucacuccuca

SEQ ID NO: 2201934 - RNA, 19 nt, Artificial Sequence
  Description of Artificial Sequence: Synthetic oligonucleotide
  Sense strand starting at position 623 of SEQ ID NO: 1883572
cugggaaccauuggaaguu

SEQ ID NO: 2201935 - RNA, 19 nt, Artificial Sequence
  Description of Artificial Sequence: Synthetic oligonucleotide
  Antisense strand to SEQ ID NO: 2201934
aacuuccaaugguucccag

SEQ ID NO: 2201936 - RNA, 19 nt, Artificial Sequence
  Description of Artificial Sequence: Synthetic oligonucleotide
  Sense strand starting at position 319 of SEQ ID NO: 1883572
ucagguuaugggagcguuu

SEQ ID NO: 2201937 - RNA, 19 nt, Artificial Sequence
  Description of Artificial Sequence: Synthetic oligonucleotide
  Antisense strand to SEQ ID NO: 2201936
aaacgcucccauaaccuga

SEQ ID NO: 2201938 - RNA, 19 nt, Artificial Sequence
  Description of Artificial Sequence: Synthetic oligonucleotide
  Sense strand starting at position 1520 of SEQ ID NO: 1883572
aggucugggccugaaacau

SEQ ID NO: 2201939 - RNA, 19 nt, Artificial Sequence
  Description of Artificial Sequence: Synthetic oligonucleotide
  Antisense strand to SEQ ID NO: 2201938
auguuucaggcccagaccu

SEQ ID NO: 2201940 - RNA, 19 nt, Artificial Sequence
  Description of Artificial Sequence: Synthetic oligonucleotide
  Sense strand starting at position 1569 of SEQ ID NO: 1883572
ggacaagucccuuacucuu

SEQ ID NO: 2201941 - RNA, 19 nt, Artificial Sequence
  Description of Artificial Sequence: Synthetic oligonucleotide
  Antisense strand to SEQ ID NO: 2201940
aagaguaagggacuugucc

SEQ ID NO: 2201942 - RNA, 19 nt, Artificial Sequence
  Description of Artificial Sequence: Synthetic oligonucleotide
  Sense strand starting at position 2641 of SEQ ID NO: 1883572
aauucugacccauggguga

SEQ ID NO: 2201943 - RNA, 19 nt, Artificial Sequence
  Description of Artificial Sequence: Synthetic oligonucleotide
  Antisense strand to SEQ ID NO: 2201942
ucacccaugggucagaauu

SEQ ID NO: 2201944 - RNA, 19 nt, Artificial Sequence
  Description of Artificial Sequence: Synthetic oligonucleotide
  Sense strand starting at position 2407 of SEQ ID NO: 1883572
gagugugaacaauaguuuc

SEQ ID NO: 2201945 - RNA, 19 nt, Artificial Sequence
  Description of Artificial Sequence: Synthetic oligonucleotide
  Antisense strand to SEQ ID NO: 2201944
gaaacuauuguucacacuc

SEQ ID NO: 2201946 - RNA, 19 nt, Artificial Sequence
  Description of Artificial Sequence: Synthetic oligonucleotide
  Sense strand starting at position 3435 of SEQ ID NO: 1883572
ggcuucuaugagcauagga

SEQ ID NO: 2201947 - RNA, 19 nt, Artificial Sequence
  Description of Artificial Sequence: Synthetic oligonucleotide
  Antisense strand to SEQ ID NO: 2201946
uccuaugcucauagaagcc

SEQ ID NO: 2201948 - RNA, 19 nt, Artificial Sequence
  Description of Artificial Sequence: Synthetic oligonucleotide
  Sense strand starting at position 612 of SEQ ID NO: 1883572
augcuagaccucugggaac

SEQ ID NO: 2201949 - RNA, 19 nt, Artificial Sequence
  Description of Artificial Sequence: Synthetic oligonucleotide
  Antisense strand to SEQ ID NO: 2201948
guucccagaggucuagcau

SEQ ID NO: 2201950 - RNA, 19 nt, Artificial Sequence
  Description of Artificial Sequence: Synthetic oligonucleotide
  Sense strand starting at position 3952 of SEQ ID NO: 1883572
ggaaucuauuguuuccuga

SEQ ID NO: 2201951 - RNA, 19 nt, Artificial Sequence
  Description of Artificial Sequence: Synthetic oligonucleotide
  Antisense strand to SEQ ID NO: 2201950
ucaggaaacaauagauucc

SEQ ID NO: 2201952 - RNA, 19 nt, Artificial Sequence
  Description of Artificial Sequence: Synthetic oligonucleotide
  Sense strand starting at position 2419 of SEQ ID NO: 1883572
uaguuuccugaggaagugu

SEQ ID NO: 2201953 - RNA, 19 nt, Artificial Sequence
  Description of Artificial Sequence: Synthetic oligonucleotide
  Antisense strand to SEQ ID NO: 2201952
acacuuccucaggaaacua

SEQ ID NO: 2201954 - RNA, 19 nt, Artificial Sequence
  Description of Artificial Sequence: Synthetic oligonucleotide
  Sense strand starting at position 3301 of SEQ ID NO: 1883572
uuccuaaugguguaaccuu

SEQ ID NO: 2201955 - RNA, 19 nt, Artificial Sequence
  Description of Artificial Sequence: Synthetic oligonucleotide
  Antisense strand to SEQ ID NO: 2201954
aagguuacaccauuaggaa

SEQ ID NO: 2201956 - RNA, 19 nt, Artificial Sequence
  Description of Artificial Sequence: Synthetic oligonucleotide
  Sense strand starting at position 794 of SEQ ID NO: 1883572
ugggcaguccugggaaaug

SEQ ID NO: 2201957 - RNA, 19 nt, Artificial Sequence
  Description of Artificial Sequence: Synthetic oligonucleotide
  Antisense strand to SEQ ID NO: 2201956
cauuucccaggacugccca

SEQ ID NO: 2201958 - RNA, 19 nt, Artificial Sequence
  Description of Artificial Sequence: Synthetic oligonucleotide
  Sense strand starting at position 88 of SEQ ID NO: 1883572
cucaguguucccuaggauu

SEQ ID NO: 2201959 - RNA, 19 nt, Artificial Sequence
  Description of Artificial Sequence: Synthetic oligonucleotide
  Antisense strand to SEQ ID NO: 2201958
aauccuagggaacacugag

SEQ ID NO: 2201960 - RNA, 19 nt, Artificial Sequence
  Description of Artificial Sequence: Synthetic oligonucleotide
  Sense strand starting at position 1519 of SEQ ID NO: 1883572
caggucugggccugaaaca

SEQ ID NO: 2201961 - RNA, 19 nt, Artificial Sequence
  Description of Artificial Sequence: Synthetic oligonucleotide
  Antisense strand to SEQ ID NO: 2201960
uguuucaggcccagaccug

SEQ ID NO: 2201962 - RNA, 19 nt, Artificial Sequence
  Description of Artificial Sequence: Synthetic oligonucleotide
  Sense strand starting at position 712 of SEQ ID NO: 1883572
ccugauaagccaugagggu

SEQ ID NO: 2201963 - RNA, 19 nt, Artificial Sequence
  Description of Artificial Sequence: Synthetic oligonucleotide
  Antisense strand to SEQ ID NO: 2201962
acccucauggcuuaucagg

SEQ ID NO: 2201964 - RNA, 19 nt, Artificial Sequence
  Description of Artificial Sequence: Synthetic oligonucleotide
  Sense strand starting at position 2157 of SEQ ID NO: 1883572
ugcucacauguuuauuaca

SEQ ID NO: 2201965 - RNA, 19 nt, Artificial Sequence
  Description of Artificial Sequence: Synthetic oligonucleotide
  Antisense strand to SEQ ID NO: 2201964
uguaauaaacaugugagca

SEQ ID NO: 2201966 - RNA, 19 nt, Artificial Sequence
  Description of Artificial Sequence: Synthetic oligonucleotide
  Sense strand starting at position 651 of SEQ ID NO: 1883572
gagggugacuugcccagau

SEQ ID NO: 2201967 - RNA, 19 nt, Artificial Sequence
  Description of Artificial Sequence: Synthetic oligonucleotide
  Antisense strand to SEQ ID NO: 2201966
aucugggcaagucacccuc

SEQ ID NO: 2201968 - RNA, 19 nt, Artificial Sequence
  Description of Artificial Sequence: Synthetic oligonucleotide
  Sense strand starting at position 1693 of SEQ ID NO: 1883572
ggcuguguuagcuuugugu

SEQ ID NO: 2201969 - RNA, 19 nt, Artificial Sequence
  Description of Artificial Sequence: Synthetic oligonucleotide
  Antisense strand to SEQ ID NO: 2201968
acacaaagcuaacacagcc

SEQ ID NO: 2201970 - RNA, 19 nt, Artificial Sequence
  Description of Artificial Sequence: Synthetic oligonucleotide
  Sense strand starting at position 793 of SEQ ID NO: 1883572
uugggcaguccugggaaau

SEQ ID NO: 2201971 - RNA, 19 nt, Artificial Sequence
  Description of Artificial Sequence: Synthetic oligonucleotide
  Antisense strand to SEQ ID NO: 2201970
auuucccaggacugcccaa

SEQ ID NO: 2201972 - RNA, 19 nt, Artificial Sequence
  Description of Artificial Sequence: Synthetic oligonucleotide
  Sense strand starting at position 295 of SEQ ID NO: 1883572
uaauucuugcugugaagga

SEQ ID NO: 2201973 - RNA, 19 nt, Artificial Sequence
  Description of Artificial Sequence: Synthetic oligonucleotide
  Antisense strand to SEQ ID NO: 2201972
uccuucacagcaagaauua

SEQ ID NO: 2201974 - RNA, 19 nt, Artificial Sequence
  Description of Artificial Sequence: Synthetic oligonucleotide
  Sense strand starting at position 1674 of SEQ ID NO: 1883572
augucugguguauaacgau

SEQ ID NO: 2201975 - RNA, 19 nt, Artificial Sequence
  Description of Artificial Sequence: Synthetic oligonucleotide
  Antisense strand to SEQ ID NO: 2201974
aucguuauacaccagacau

SEQ ID NO: 2201976 - RNA, 19 nt, Artificial Sequence
  Description of Artificial Sequence: Synthetic oligonucleotide
  Sense strand starting at position 292 of SEQ ID NO: 1883572
gauuaauucuugcugugaa

SEQ ID NO: 2201977 - RNA, 19 nt, Artificial Sequence
  Description of Artificial Sequence: Synthetic oligonucleotide
  Antisense strand to SEQ ID NO: 2201976
uucacagcaagaauuaauc

SEQ ID NO: 2201978 - RNA, 19 nt, Artificial Sequence
  Description of Artificial Sequence: Synthetic oligonucleotide
  Sense strand starting at position 289 of SEQ ID NO: 1883572
gaagauuaauucuugcugu

SEQ ID NO: 2201979 - RNA, 19 nt, Artificial Sequence
  Description of Artificial Sequence: Synthetic oligonucleotide
  Antisense strand to SEQ ID NO: 2201978
acagcaagaauuaaucuuc

SEQ ID NO: 2201980 - RNA, 19 nt, Artificial Sequence
  Description of Artificial Sequence: Synthetic oligonucleotide
  Sense strand starting at position 1758 of SEQ ID NO: 1883572
gggaguucuugucuuugga

SEQ ID NO: 2201981 - RNA, 19 nt, Artificial Sequence
  Description of Artificial Sequence: Synthetic oligonucleotide
  Antisense strand to SEQ ID NO: 2201980
uccaaagacaagaacuccc

SEQ ID NO: 2201982 - RNA, 19 nt, Artificial Sequence
  Description of Artificial Sequence: Synthetic oligonucleotide
  Sense strand starting at position 3444 of SEQ ID NO: 1883572
gagcauaggagguguuauu

SEQ ID NO: 2201983 - RNA, 19 nt, Artificial Sequence
  Description of Artificial Sequence: Synthetic oligonucleotide
  Antisense strand to SEQ ID NO: 2201982
aauaacaccuccuaugcuc

SEQ ID NO: 2201984 - RNA, 19 nt, Artificial Sequence
  Description of Artificial Sequence: Synthetic oligonucleotide
  Sense strand starting at position 3285 of SEQ ID NO: 1883572
gucagacagcccugaauuc

SEQ ID NO: 2201985 - RNA, 19 nt, Artificial Sequence
  Description of Artificial Sequence: Synthetic oligonucleotide
  Antisense strand to SEQ ID NO: 2201984
gaauucagggcugucugac

SEQ ID NO: 2201986 - RNA, 19 nt, Artificial Sequence
  Description of Artificial Sequence: Synthetic oligonucleotide
  Sense strand starting at position 1320 of SEQ ID NO: 1883572
ggagcugguuggagagaau

SEQ ID NO: 2201987 - RNA, 19 nt, Artificial Sequence
  Description of Artificial Sequence: Synthetic oligonucleotide
  Antisense strand to SEQ ID NO: 2201986
auucucuccaaccagcucc

SEQ ID NO: 2201988 - RNA, 19 nt, Artificial Sequence
  Description of Artificial Sequence: Synthetic oligonucleotide
  Sense strand starting at position 1760 of SEQ ID NO: 1883572
gaguucuugucuuuggaca

SEQ ID NO: 2201989 - RNA, 19 nt, Artificial Sequence
  Description of Artificial Sequence: Synthetic oligonucleotide
  Antisense strand to SEQ ID NO: 2201988
uguccaaagacaagaacuc

SEQ ID NO: 2201990 - RNA, 19 nt, Artificial Sequence
  Description of Artificial Sequence: Synthetic oligonucleotide
  Sense strand starting at position 718 of SEQ ID NO: 1883572
aagccaugagggugcaauu

SEQ ID NO: 2201991 - RNA, 19 nt, Artificial Sequence
  Description of Artificial Sequence: Synthetic oligonucleotide
  Antisense strand to SEQ ID NO: 2201990
aauugcacccucauggcuu

SEQ ID NO: 2201992 - RNA, 19 nt, Artificial Sequence
  Description of Artificial Sequence: Synthetic oligonucleotide
  Sense strand starting at position 99 of SEQ ID NO: 1883572
cuaggauucugcccaccuu

SEQ ID NO: 2201993 - RNA, 19 nt, Artificial Sequence
  Description of Artificial Sequence: Synthetic oligonucleotide
  Antisense strand to SEQ ID NO: 2201992
aaggugggcagaauccuag

SEQ ID NO: 2201994 - RNA, 19 nt, Artificial Sequence
  Description of Artificial Sequence: Synthetic oligonucleotide
  Sense strand starting at position 824 of SEQ ID NO: 1883572
aggauucucucagcucuuu

SEQ ID NO: 2201995 - RNA, 19 nt, Artificial Sequence
  Description of Artificial Sequence: Synthetic oligonucleotide
  Antisense strand to SEQ ID NO: 2201994
aaagagcugagagaauccu

SEQ ID NO: 2201996 - RNA, 19 nt, Artificial Sequence
  Description of Artificial Sequence: Synthetic oligonucleotide
  Sense strand starting at position 968 of SEQ ID NO: 1883572
cagagugcucugugauaag

SEQ ID NO: 2201997 - RNA, 19 nt, Artificial Sequence
  Description of Artificial Sequence: Synthetic oligonucleotide
  Antisense strand to SEQ ID NO: 2201996
cuuaucacagagcacucug

SEQ ID NO: 2201998 - RNA, 19 nt, Artificial Sequence
  Description of Artificial Sequence: Synthetic oligonucleotide
  Sense strand starting at position 813 of SEQ ID NO: 1883572
ugcacuuucccaggauucu

SEQ ID NO: 2201999 - RNA, 19 nt, Artificial Sequence
  Description of Artificial Sequence: Synthetic oligonucleotide
  Antisense strand to SEQ ID NO: 2201998
agaauccugggaaagugca

SEQ ID NO: 2202000 - RNA, 19 nt, Artificial Sequence
  Description of Artificial Sequence: Synthetic oligonucleotide
  Sense strand starting at position 3135 of SEQ ID NO: 1883573
aacccauucguauaucgaa

SEQ ID NO: 2202001 - RNA, 19 nt, Artificial Sequence
  Description of Artificial Sequence: Synthetic oligonucleotide
  Antisense strand to SEQ ID NO: 2202000
uucgauauacgaauggguu

SEQ ID NO: 2202002 - RNA, 19 nt, Artificial Sequence
  Description of Artificial Sequence: Synthetic oligonucleotide
  Sense strand starting at position 3047 of SEQ ID NO: 1883573
gcaaguucuuucuucuuga

SEQ ID NO: 2202003 - RNA, 19 nt, Artificial Sequence
  Description of Artificial Sequence: Synthetic oligonucleotide
  Antisense strand to SEQ ID NO: 2202002
ucaagaagaaagaacuugc

SEQ ID NO: 2202004 - RNA, 19 nt, Artificial Sequence
  Description of Artificial Sequence: Synthetic oligonucleotide
  Sense strand starting at position 3044 of SEQ ID NO: 1883573
gccgcaaguucuuucuucu

SEQ ID NO: 2202005 - RNA, 19 nt, Artificial Sequence
  Description of Artificial Sequence: Synthetic oligonucleotide
  Antisense strand to SEQ ID NO: 2202004
agaagaaagaacuugcggc

SEQ ID NO: 2202006 - RNA, 19 nt, Artificial Sequence
  Description of Artificial Sequence: Synthetic oligonucleotide
  Sense strand starting at position 3935 of SEQ ID NO: 1883573
gcgucauccggcugcagau

SEQ ID NO: 2202007 - RNA, 19 nt, Artificial Sequence
  Description of Artificial Sequence: Synthetic oligonucleotide
  Antisense strand to SEQ ID NO: 2202006
aucugcagccggaugacgc

SEQ ID NO: 2202008 - RNA, 19 nt, Artificial Sequence
  Description of Artificial Sequence: Synthetic oligonucleotide
  Sense strand starting at position 3138 of SEQ ID NO: 1883573
ccauucguauaucgaaauu

SEQ ID NO: 2202009 - RNA, 19 nt, Artificial Sequence
  Description of Artificial Sequence: Synthetic oligonucleotide
  Antisense strand to SEQ ID NO: 2202008
aauuucgauauacgaaugg

SEQ ID NO: 2202010 - RNA, 19 nt, Artificial Sequence
  Description of Artificial Sequence: Synthetic oligonucleotide
  Sense strand starting at position 1267 of SEQ ID NO: 1883574
auuugacauuccuuguguu

SEQ ID NO: 2202011 - RNA, 19 nt, Artificial Sequence
  Description of Artificial Sequence: Synthetic oligonucleotide
  Antisense strand to SEQ ID NO: 2202010
aacacaaggaaugucaaau

SEQ ID NO: 2202012 - RNA, 19 nt, Artificial Sequence
  Description of Artificial Sequence: Synthetic oligonucleotide
  Sense strand starting at position 990 of SEQ ID NO: 1883574
agugaucuggacgacacuu

SEQ ID NO: 2202013 - RNA, 19 nt, Artificial Sequence
  Description of Artificial Sequence: Synthetic oligonucleotide
  Antisense strand to SEQ ID NO: 2202012
aagugucguccagaucacu

SEQ ID NO: 2202014 - RNA, 19 nt, Artificial Sequence
  Description of Artificial Sequence: Synthetic oligonucleotide
  Sense strand starting at position 196 of SEQ ID NO: 1883574
uguguaaaggcagauauag

SEQ ID NO: 2202015 - RNA, 19 nt, Artificial Sequence
  Description of Artificial Sequence: Synthetic oligonucleotide
  Antisense strand to SEQ ID NO: 2202014
cuauaucugccuuuacaca

SEQ ID NO: 2202016 - RNA, 19 nt, Artificial Sequence
  Description of Artificial Sequence: Synthetic oligonucleotide
  Sense strand starting at position 224 of SEQ ID NO: 1883574
gguuacauugguuacauca

SEQ ID NO: 2202017 - RNA, 19 nt, Artificial Sequence
  Description of Artificial Sequence: Synthetic oligonucleotide
  Antisense strand to SEQ ID NO: 2202016
ugauguaaccaauguaacc

SEQ ID NO: 2202018 - RNA, 19 nt, Artificial Sequence
  Description of Artificial Sequence: Synthetic oligonucleotide
  Sense strand starting at position 3127 of SEQ ID NO: 1883574
aacccauucguauaucgaa

SEQ ID NO: 2202019 - RNA, 19 nt, Artificial Sequence
  Description of Artificial Sequence: Synthetic oligonucleotide
  Antisense strand to SEQ ID NO: 2202018
uucgauauacgaauggguu

SEQ ID NO: 2202020 - RNA, 19 nt, Artificial Sequence
  Description of Artificial Sequence: Synthetic oligonucleotide
  Sense strand starting at position 989 of SEQ ID NO: 1883574
cagugaucuggacgacacu

SEQ ID NO: 2202021 - RNA, 19 nt, Artificial Sequence
  Description of Artificial Sequence: Synthetic oligonucleotide
  Antisense strand to SEQ ID NO: 2202020
agugucguccagaucacug

SEQ ID NO: 2202022 - RNA, 19 nt, Artificial Sequence
  Description of Artificial Sequence: Synthetic oligonucleotide
  Sense strand starting at position 3042 of SEQ ID NO: 1883574
aguucuuucuucuugaaag

SEQ ID NO: 2202023 - RNA, 19 nt, Artificial Sequence
  Description of Artificial Sequence: Synthetic oligonucleotide
  Antisense strand to SEQ ID NO: 2202022
cuuucaagaagaaagaacu

SEQ ID NO: 2202024 - RNA, 19 nt, Artificial Sequence
  Description of Artificial Sequence: Synthetic oligonucleotide
  Sense strand starting at position 2217 of SEQ ID NO: 1883574
agcgaauuaguguaacgag

SEQ ID NO: 2202025 - RNA, 19 nt, Artificial Sequence
  Description of Artificial Sequence: Synthetic oligonucleotide
  Antisense strand to SEQ ID NO: 2202024
cucguuacacuaauucgcu

SEQ ID NO: 2202026 - RNA, 19 nt, Artificial Sequence
  Description of Artificial Sequence: Synthetic oligonucleotide
  Sense strand starting at position 2212 of SEQ ID NO: 1883574
uuaucagcgaauuagugua

SEQ ID NO: 2202027 - RNA, 19 nt, Artificial Sequence
  Description of Artificial Sequence: Synthetic oligonucleotide
  Antisense strand to SEQ ID NO: 2202026
uacacuaauucgcugauaa

SEQ ID NO: 2202028 - RNA, 19 nt, Artificial Sequence
  Description of Artificial Sequence: Synthetic oligonucleotide
  Sense strand starting at position 3503 of SEQ ID NO: 1883574
acaggcuucugcccaaaua

SEQ ID NO: 2202029 - RNA, 19 nt, Artificial Sequence
  Description of Artificial Sequence: Synthetic oligonucleotide
  Antisense strand to SEQ ID NO: 2202028
uauuugggcagaagccugu

SEQ ID NO: 2202030 - RNA, 19 nt, Artificial Sequence
  Description of Artificial Sequence: Synthetic oligonucleotide
  Sense strand starting at position 787 of SEQ ID NO: 1883574
cacgauauguaugcacuau

SEQ ID NO: 2202031 - RNA, 19 nt, Artificial Sequence
  Description of Artificial Sequence: Synthetic oligonucleotide
  Antisense strand to SEQ ID NO: 2202030
auagugcauacauaucgug

SEQ ID NO: 2202032 - RNA, 19 nt, Artificial Sequence
  Description of Artificial Sequence: Synthetic oligonucleotide
  Sense strand starting at position 786 of SEQ ID NO: 1883574
ccacgauauguaugcacua

SEQ ID NO: 2202033 - RNA, 19 nt, Artificial Sequence
  Description of Artificial Sequence: Synthetic oligonucleotide
  Antisense strand to SEQ ID NO: 2202032
uagugcauacauaucgugg

SEQ ID NO: 2202034 - RNA, 19 nt, Artificial Sequence
  Description of Artificial Sequence: Synthetic oligonucleotide
  Sense strand starting at position 3039 of SEQ ID NO: 1883574
gcaaguucuuucuucuuga

SEQ ID NO: 2202035 - RNA, 19 nt, Artificial Sequence
  Description of Artificial Sequence: Synthetic oligonucleotide
  Antisense strand to SEQ ID NO: 2202034
ucaagaagaaagaacuugc

SEQ ID NO: 2202036 - RNA, 19 nt, Artificial Sequence
  Description of Artificial Sequence: Synthetic oligonucleotide
  Sense strand starting at position 344 of SEQ ID NO: 1883574
ccaucugaguguuugcacu

SEQ ID NO: 2202037 - RNA, 19 nt, Artificial Sequence
  Description of Artificial Sequence: Synthetic oligonucleotide
  Antisense strand to SEQ ID NO: 2202036
agugcaaacacucagaugg

SEQ ID NO: 2202038 - RNA, 19 nt, Artificial Sequence
  Description of Artificial Sequence: Synthetic oligonucleotide
  Sense strand starting at position 356 of SEQ ID NO: 1883574
uugcacuguguuugaggua

SEQ ID NO: 2202039 - RNA, 19 nt, Artificial Sequence
  Description of Artificial Sequence: Synthetic oligonucleotide
  Antisense strand to SEQ ID NO: 2202038
uaccucaaacacagugcaa

SEQ ID NO: 2202040 - RNA, 19 nt, Artificial Sequence
  Description of Artificial Sequence: Synthetic oligonucleotide
  Sense strand starting at position 3036 of SEQ ID NO: 1883574
gccgcaaguucuuucuucu

SEQ ID NO: 2202041 - RNA, 19 nt, Artificial Sequence
  Description of Artificial Sequence: Synthetic oligonucleotide
  Antisense strand to SEQ ID NO: 2202040
agaagaaagaacuugcggc

SEQ ID NO: 2202042 - RNA, 19 nt, Artificial Sequence
  Description of Artificial Sequence: Synthetic oligonucleotide
  Sense strand starting at position 3043 of SEQ ID NO: 1883574
guucuuucuucuugaaagg

SEQ ID NO: 2202043 - RNA, 19 nt, Artificial Sequence
  Description of Artificial Sequence: Synthetic oligonucleotide
  Antisense strand to SEQ ID NO: 2202042
ccuuucaagaagaaagaac

SEQ ID NO: 2202044 - RNA, 19 nt, Artificial Sequence
  Description of Artificial Sequence: Synthetic oligonucleotide
  Sense strand starting at position 359 of SEQ ID NO: 1883574
cacuguguuugagguacau

SEQ ID NO: 2202045 - RNA, 19 nt, Artificial Sequence
  Description of Artificial Sequence: Synthetic oligonucleotide
  Antisense strand to SEQ ID NO: 2202044
auguaccucaaacacagug

SEQ ID NO: 2202046 - RNA, 19 nt, Artificial Sequence
  Description of Artificial Sequence: Synthetic oligonucleotide
  Sense strand starting at position 3130 of SEQ ID NO: 1883574
ccauucguauaucgaaauu

SEQ ID NO: 2202047 - RNA, 19 nt, Artificial Sequence
  Description of Artificial Sequence: Synthetic oligonucleotide
  Antisense strand to SEQ ID NO: 2202046
aauuucgauauacgaaugg

SEQ ID NO: 2202048 - RNA, 19 nt, Artificial Sequence
  Description of Artificial Sequence: Synthetic oligonucleotide
  Sense strand starting at position 2195 of SEQ ID NO: 1883575
ggaaguacgucauuucgag

SEQ ID NO: 2202049 - RNA, 19 nt, Artificial Sequence
  Description of Artificial Sequence: Synthetic oligonucleotide
  Antisense strand to SEQ ID NO: 2202048
cucgaaaugacguacuucc

SEQ ID NO: 2202050 - RNA, 19 nt, Artificial Sequence
  Description of Artificial Sequence: Synthetic oligonucleotide
  Sense strand starting at position 1404 of SEQ ID NO: 1883575
gacggagaacuccgaaaua

SEQ ID NO: 2202051 - RNA, 19 nt, Artificial Sequence
  Description of Artificial Sequence: Synthetic oligonucleotide
  Antisense strand to SEQ ID NO: 2202050
uauuucggaguucuccguc

SEQ ID NO: 2202052 - RNA, 19 nt, Artificial Sequence
  Description of Artificial Sequence: Synthetic oligonucleotide
  Sense strand starting at position 1364 of SEQ ID NO: 1883575
gagaaacugcgccaggaaa

SEQ ID NO: 2202053 - RNA, 19 nt, Artificial Sequence
  Description of Artificial Sequence: Synthetic oligonucleotide
  Antisense strand to SEQ ID NO: 2202052
uuuccuggcgcaguuucuc

SEQ ID NO: 2202054 - RNA, 19 nt, Artificial Sequence
  Description of Artificial Sequence: Synthetic oligonucleotide
  Sense strand starting at position 516 of SEQ ID NO: 1883575
ucucucccucgacaagaua

SEQ ID NO: 2202055 - RNA, 19 nt, Artificial Sequence
  Description of Artificial Sequence: Synthetic oligonucleotide
  Antisense strand to SEQ ID NO: 2202054
uaucuugucgagggagaga

SEQ ID NO: 2202056 - RNA, 19 nt, Artificial Sequence
  Description of Artificial Sequence: Synthetic oligonucleotide
  Sense strand starting at position 3844 of SEQ ID NO: 1883575
auguuugguagagacaagu

SEQ ID NO: 2202057 - RNA, 19 nt, Artificial Sequence
  Description of Artificial Sequence: Synthetic oligonucleotide
  Antisense strand to SEQ ID NO: 2202056
acuugucucuaccaaacau

SEQ ID NO: 2202058 - RNA, 19 nt, Artificial Sequence
  Description of Artificial Sequence: Synthetic oligonucleotide
  Sense strand starting at position 390 of SEQ ID NO: 1883575
guaauuacuguccaucaau

SEQ ID NO: 2202059 - RNA, 19 nt, Artificial Sequence
  Description of Artificial Sequence: Synthetic oligonucleotide
  Antisense strand to SEQ ID NO: 2202058
auugauggacaguaauuac

SEQ ID NO: 2202060 - RNA, 19 nt, Artificial Sequence
  Description of Artificial Sequence: Synthetic oligonucleotide
  Sense strand starting at position 514 of SEQ ID NO: 1883575
uuucucucccucgacaaga

SEQ ID NO: 2202061 - RNA, 19 nt, Artificial Sequence
  Description of Artificial Sequence: Synthetic oligonucleotide
  Antisense strand to SEQ ID NO: 2202060
ucuugucgagggagagaaa

SEQ ID NO: 2202062 - RNA, 19 nt, Artificial Sequence
  Description of Artificial Sequence: Synthetic oligonucleotide
  Sense strand starting at position 2354 of SEQ ID NO: 1883575
uucuaugguucuccaagaa

SEQ ID NO: 2202063 - RNA, 19 nt, Artificial Sequence
  Description of Artificial Sequence: Synthetic oligonucleotide
  Antisense strand to SEQ ID NO: 2202062
uucuuggagaaccauagaa

SEQ ID NO: 2202064 - RNA, 19 nt, Artificial Sequence
  Description of Artificial Sequence: Synthetic oligonucleotide
  Sense strand starting at position 1017 of SEQ ID NO: 1883575
cgacaaacccucuaggcuu

SEQ ID NO: 2202065 - RNA, 19 nt, Artificial Sequence
  Description of Artificial Sequence: Synthetic oligonucleotide
  Antisense strand to SEQ ID NO: 2202064
aagccuagaggguuugucg

SEQ ID NO: 2202066 - RNA, 19 nt, Artificial Sequence
  Description of Artificial Sequence: Synthetic oligonucleotide
  Sense strand starting at position 9 of SEQ ID NO: 1883575
uguggaaacugggauuuca

SEQ ID NO: 2202067 - RNA, 19 nt, Artificial Sequence
  Description of Artificial Sequence: Synthetic oligonucleotide
  Antisense strand to SEQ ID NO: 2202066
ugaaaucccaguuuccaca

SEQ ID NO: 2202068 - RNA, 19 nt, Artificial Sequence
  Description of Artificial Sequence: Synthetic oligonucleotide
  Sense strand starting at position 389 of SEQ ID NO: 1883575
aguaauuacuguccaucaa

SEQ ID NO: 2202069 - RNA, 19 nt, Artificial Sequence
  Description of Artificial Sequence: Synthetic oligonucleotide
  Antisense strand to SEQ ID NO: 2202068
uugauggacaguaauuacu

SEQ ID NO: 2202070 - RNA, 19 nt, Artificial Sequence
  Description of Artificial Sequence: Synthetic oligonucleotide
  Sense strand starting at position 1524 of SEQ ID NO: 1883575
accuguauucgugaugaau

SEQ ID NO: 2202071 - RNA, 19 nt, Artificial Sequence
  Description of Artificial Sequence: Synthetic oligonucleotide
  Antisense strand to SEQ ID NO: 2202070
auucaucacgaauacaggu

SEQ ID NO: 2202072 - RNA, 19 nt, Artificial Sequence
  Description of Artificial Sequence: Synthetic oligonucleotide
  Sense strand starting at position 218 of SEQ ID NO: 1883575
agucaaagucugggucaaa

SEQ ID NO: 2202073 - RNA, 19 nt, Artificial Sequence
  Description of Artificial Sequence: Synthetic oligonucleotide
  Antisense strand to SEQ ID NO: 2202072
uuugacccagacuuugacu

SEQ ID NO: 2202074 - RNA, 19 nt, Artificial Sequence
  Description of Artificial Sequence: Synthetic oligonucleotide
  Sense strand starting at position 2451 of SEQ ID NO: 1883575
gcagaauguguaggacaca

SEQ ID NO: 2202075 - RNA, 19 nt, Artificial Sequence
  Description of Artificial Sequence: Synthetic oligonucleotide
  Antisense strand to SEQ ID NO: 2202074
uguguccuacacauucugc

SEQ ID NO: 2202076 - RNA, 19 nt, Artificial Sequence
  Description of Artificial Sequence: Synthetic oligonucleotide
  Sense strand starting at position 470 of SEQ ID NO: 1883575
ucuacuuaacgcgaaucaa

SEQ ID NO: 2202077 - RNA, 19 nt, Artificial Sequence
  Description of Artificial Sequence: Synthetic oligonucleotide
  Antisense strand to SEQ ID NO: 2202076
uugauucgcguuaaguaga

SEQ ID NO: 2202078 - RNA, 19 nt, Artificial Sequence
  Description of Artificial Sequence: Synthetic oligonucleotide
  Sense strand starting at position 2353 of SEQ ID NO: 1883575
uuucuaugguucuccaaga

SEQ ID NO: 2202079 - RNA, 19 nt, Artificial Sequence
  Description of Artificial Sequence: Synthetic oligonucleotide
  Antisense strand to SEQ ID NO: 2202078
ucuuggagaaccauagaaa

SEQ ID NO: 2202080 - RNA, 19 nt, Artificial Sequence
  Description of Artificial Sequence: Synthetic oligonucleotide
  Sense strand starting at position 1118 of SEQ ID NO: 1883575
ucuguauuauugucagaag

SEQ ID NO: 2202081 - RNA, 19 nt, Artificial Sequence
  Description of Artificial Sequence: Synthetic oligonucleotide
  Antisense strand to SEQ ID NO: 2202080
cuucugacaauaauacaga

SEQ ID NO: 2202082 - RNA, 19 nt, Artificial Sequence
  Description of Artificial Sequence: Synthetic oligonucleotide
  Sense strand starting at position 766 of SEQ ID NO: 1883575
accuacuaauagggauuua

SEQ ID NO: 2202083 - RNA, 19 nt, Artificial Sequence
  Description of Artificial Sequence: Synthetic oligonucleotide
  Antisense strand to SEQ ID NO: 2202082
uaaaucccuauuaguaggu

SEQ ID NO: 2202084 - RNA, 19 nt, Artificial Sequence
  Description of Artificial Sequence: Synthetic oligonucleotide
  Sense strand starting at position 1522 of SEQ ID NO: 1883575
aaaccuguauucgugauga

SEQ ID NO: 2202085 - RNA, 19 nt, Artificial Sequence
  Description of Artificial Sequence: Synthetic oligonucleotide
  Antisense strand to SEQ ID NO: 2202084
ucaucacgaauacagguuu

SEQ ID NO: 2202086 - RNA, 19 nt, Artificial Sequence
  Description of Artificial Sequence: Synthetic oligonucleotide
  Sense strand starting at position 1094 of SEQ ID NO: 1883575
caguuaagucagggcucaa

SEQ ID NO: 2202087 - RNA, 19 nt, Artificial Sequence
  Description of Artificial Sequence: Synthetic oligonucleotide
  Antisense strand to SEQ ID NO: 2202086
uugagcccugacuuaacug

SEQ ID NO: 2202088 - RNA, 19 nt, Artificial Sequence
  Description of Artificial Sequence: Synthetic oligonucleotide
  Sense strand starting at position 378 of SEQ ID NO: 1883575
ggccacugguuaguaauua

SEQ ID NO: 2202089 - RNA, 19 nt, Artificial Sequence
  Description of Artificial Sequence: Synthetic oligonucleotide
  Antisense strand to SEQ ID NO: 2202088
uaauuacuaaccaguggcc

SEQ ID NO: 2202090 - RNA, 19 nt, Artificial Sequence
  Description of Artificial Sequence: Synthetic oligonucleotide
  Sense strand starting at position 3831 of SEQ ID NO: 1883575
ggcuaucuucuguauguuu

SEQ ID NO: 2202091 - RNA, 19 nt, Artificial Sequence
  Description of Artificial Sequence: Synthetic oligonucleotide
  Antisense strand to SEQ ID NO: 2202090
aaacauacagaagauagcc

SEQ ID NO: 2202092 - RNA, 19 nt, Artificial Sequence
  Description of Artificial Sequence: Synthetic oligonucleotide
  Sense strand starting at position 3447 of SEQ ID NO: 1883575
agaucaguggcgugaucua

SEQ ID NO: 2202093 - RNA, 19 nt, Artificial Sequence
  Description of Artificial Sequence: Synthetic oligonucleotide
  Antisense strand to SEQ ID NO: 2202092
uagaucacgccacugaucu

SEQ ID NO: 2202094 - RNA, 19 nt, Artificial Sequence
  Description of Artificial Sequence: Synthetic oligonucleotide
  Sense strand starting at position 1350 of SEQ ID NO: 1883575
cauguagacuuggagagaa

SEQ ID NO: 2202095 - RNA, 19 nt, Artificial Sequence
  Description of Artificial Sequence: Synthetic oligonucleotide
  Antisense strand to SEQ ID NO: 2202094
uucucuccaagucuacaug

SEQ ID NO: 2202096 - RNA, 19 nt, Artificial Sequence
  Description of Artificial Sequence: Synthetic oligonucleotide
  Sense strand starting at position 1072 of SEQ ID NO: 1883575
gccuguucugccgaaacca

SEQ ID NO: 2202097 - RNA, 19 nt, Artificial Sequence
  Description of Artificial Sequence: Synthetic oligonucleotide
  Antisense strand to SEQ ID NO: 2202096
ugguuucggcagaacaggc

SEQ ID NO: 2202098 - RNA, 19 nt, Artificial Sequence
  Description of Artificial Sequence: Synthetic oligonucleotide
  Sense strand starting at position 31 of SEQ ID NO: 1883575
augcucgucuaaucacuau

SEQ ID NO: 2202099 - RNA, 19 nt, Artificial Sequence
  Description of Artificial Sequence: Synthetic oligonucleotide
  Antisense strand to SEQ ID NO: 2202098
auagugauuagacgagcau

SEQ ID NO: 2202100 - RNA, 19 nt, Artificial Sequence
  Description of Artificial Sequence: Synthetic oligonucleotide
  Sense strand starting at position 920 of SEQ ID NO: 1883575
cccauugugucaguuucua

SEQ ID NO: 2202101 - RNA, 19 nt, Artificial Sequence
  Description of Artificial Sequence: Synthetic oligonucleotide
  Antisense strand to SEQ ID NO: 2202100
uagaaacugacacaauggg

SEQ ID NO: 2202102 - RNA, 19 nt, Artificial Sequence
  Description of Artificial Sequence: Synthetic oligonucleotide
  Sense strand starting at position 469 of SEQ ID NO: 1883575
gucuacuuaacgcgaauca

SEQ ID NO: 2202103 - RNA, 19 nt, Artificial Sequence
  Description of Artificial Sequence: Synthetic oligonucleotide
  Antisense strand to SEQ ID NO: 2202102
ugauucgcguuaaguagac

SEQ ID NO: 2202104 - RNA, 19 nt, Artificial Sequence
  Description of Artificial Sequence: Synthetic oligonucleotide
  Sense strand starting at position 1069 of SEQ ID NO: 1883575
aaggccuguucugccgaaa

SEQ ID NO: 2202105 - RNA, 19 nt, Artificial Sequence
  Description of Artificial Sequence: Synthetic oligonucleotide
  Antisense strand to SEQ ID NO: 2202104
uuucggcagaacaggccuu

SEQ ID NO: 2202106 - RNA, 19 nt, Artificial Sequence
  Description of Artificial Sequence: Synthetic oligonucleotide
  Sense strand starting at position 1105 of SEQ ID NO: 1883575
gggcucaauugcuucugua

SEQ ID NO: 2202107 - RNA, 19 nt, Artificial Sequence
  Description of Artificial Sequence: Synthetic oligonucleotide
  Antisense strand to SEQ ID NO: 2202106
uacagaagcaauugagccc

SEQ ID NO: 2202108 - RNA, 19 nt, Artificial Sequence
  Description of Artificial Sequence: Synthetic oligonucleotide
  Sense strand starting at position 242 of SEQ ID NO: 1883575
ugaggaaauucugagcaua

SEQ ID NO: 2202109 - RNA, 19 nt, Artificial Sequence
  Description of Artificial Sequence: Synthetic oligonucleotide
  Antisense strand to SEQ ID NO: 2202108
uaugcucagaauuuccuca

SEQ ID NO: 2202110 - RNA, 19 nt, Artificial Sequence
  Description of Artificial Sequence: Synthetic oligonucleotide
  Sense strand starting at position 196 of SEQ ID NO: 1883575
gaacaagggucuugaaaga

SEQ ID NO: 2202111 - RNA, 19 nt, Artificial Sequence
  Description of Artificial Sequence: Synthetic oligonucleotide
  Antisense strand to SEQ ID NO: 2202110
ucuuucaagacccuuguuc

SEQ ID NO: 2202112 - RNA, 19 nt, Artificial Sequence
  Description of Artificial Sequence: Synthetic oligonucleotide
  Sense strand starting at position 2290 of SEQ ID NO: 1883575
uuugguagugauugcaguu

SEQ ID NO: 2202113 - RNA, 19 nt, Artificial Sequence
  Description of Artificial Sequence: Synthetic oligonucleotide
  Antisense strand to SEQ ID NO: 2202112
aacugcaaucacuaccaaa

SEQ ID NO: 2202114 - RNA, 19 nt, Artificial Sequence
  Description of Artificial Sequence: Synthetic oligonucleotide
  Sense strand starting at position 3830 of SEQ ID NO: 1883575
uggcuaucuucuguauguu

SEQ ID NO: 2202115 - RNA, 19 nt, Artificial Sequence
  Description of Artificial Sequence: Synthetic oligonucleotide
  Antisense strand to SEQ ID NO: 2202114
aacauacagaagauagcca

SEQ ID NO: 2202116 - RNA, 19 nt, Artificial Sequence
  Description of Artificial Sequence: Synthetic oligonucleotide
  Sense strand starting at position 26 of SEQ ID NO: 1883575
caagcaugcucgucuaauc

SEQ ID NO: 2202117 - RNA, 19 nt, Artificial Sequence
  Description of Artificial Sequence: Synthetic oligonucleotide
  Antisense strand to SEQ ID NO: 2202116
gauuagacgagcaugcuug

SEQ ID NO: 2202118 - RNA, 19 nt, Artificial Sequence
  Description of Artificial Sequence: Synthetic oligonucleotide
  Sense strand starting at position 2440 of SEQ ID NO: 1883575
auuaauaucuugcagaaug

SEQ ID NO: 2202119 - RNA, 19 nt, Artificial Sequence
  Description of Artificial Sequence: Synthetic oligonucleotide
  Antisense strand to SEQ ID NO: 2202118
cauucugcaagauauuaau

SEQ ID NO: 2202120 - RNA, 19 nt, Artificial Sequence
  Description of Artificial Sequence: Synthetic oligonucleotide
  Sense strand starting at position 2438 of SEQ ID NO: 1883575
ugauuaauaucuugcagaa

SEQ ID NO: 2202121 - RNA, 19 nt, Artificial Sequence
  Description of Artificial Sequence: Synthetic oligonucleotide
  Antisense strand to SEQ ID NO: 2202120
uucugcaagauauuaauca

SEQ ID NO: 2202122 - RNA, 19 nt, Artificial Sequence
  Description of Artificial Sequence: Synthetic oligonucleotide
  Sense strand starting at position 1121 of SEQ ID NO: 1883575
guauuauugucagaagcca

SEQ ID NO: 2202123 - RNA, 19 nt, Artificial Sequence
  Description of Artificial Sequence: Synthetic oligonucleotide
  Antisense strand to SEQ ID NO: 2202122
uggcuucugacaauaauac

SEQ ID NO: 2202124 - RNA, 19 nt, Artificial Sequence
  Description of Artificial Sequence: Synthetic oligonucleotide
  Sense strand starting at position 1119 of SEQ ID NO: 1883575
cuguauuauugucagaagc

SEQ ID NO: 2202125 - RNA, 19 nt, Artificial Sequence
  Description of Artificial Sequence: Synthetic oligonucleotide
  Antisense strand to SEQ ID NO: 2202124
gcuucugacaauaauacag

SEQ ID NO: 2202126 - RNA, 19 nt, Artificial Sequence
  Description of Artificial Sequence: Synthetic oligonucleotide
  Sense strand starting at position 217 of SEQ ID NO: 1883575
uagucaaagucugggucaa

SEQ ID NO: 2202127 - RNA, 19 nt, Artificial Sequence
  Description of Artificial Sequence: Synthetic oligonucleotide
  Antisense strand to SEQ ID NO: 2202126
uugacccagacuuugacua

SEQ ID NO: 2202128 - RNA, 19 nt, Artificial Sequence
  Description of Artificial Sequence: Synthetic oligonucleotide
  Sense strand starting at position 1135 of SEQ ID NO: 1883576
acugcacaacgauaugaau

SEQ ID NO: 2202129 - RNA, 19 nt, Artificial Sequence
  Description of Artificial Sequence: Synthetic oligonucleotide
  Antisense strand to SEQ ID NO: 2202128
auucauaucguugugcagu

SEQ ID NO: 2202130 - RNA, 19 nt, Artificial Sequence
  Description of Artificial Sequence: Synthetic oligonucleotide
  Sense strand starting at position 948 of SEQ ID NO: 1883576
ggcuauaugccugcauguu

SEQ ID NO: 2202131 - RNA, 19 nt, Artificial Sequence
  Description of Artificial Sequence: Synthetic oligonucleotide
  Antisense strand to SEQ ID NO: 2202130
aacaugcaggcauauagcc

SEQ ID NO: 2202132 - RNA, 19 nt, Artificial Sequence
  Description of Artificial Sequence: Synthetic oligonucleotide
  Sense strand starting at position 3340 of SEQ ID NO: 1883576
uauauaucugucgaauaga

SEQ ID NO: 2202133 - RNA, 19 nt, Artificial Sequence
  Description of Artificial Sequence: Synthetic oligonucleotide
  Antisense strand to SEQ ID NO: 2202132
ucuauucgacagauauaua

SEQ ID NO: 2202134 - RNA, 19 nt, Artificial Sequence
  Description of Artificial Sequence: Synthetic oligonucleotide
  Sense strand starting at position 3155 of SEQ ID NO: 1883576
ugcugauuaccugagauac

SEQ ID NO: 2202135 - RNA, 19 nt, Artificial Sequence
  Description of Artificial Sequence: Synthetic oligonucleotide
  Antisense strand to SEQ ID NO: 2202134
guaucucagguaaucagca

SEQ ID NO: 2202136 - RNA, 19 nt, Artificial Sequence
  Description of Artificial Sequence: Synthetic oligonucleotide
  Sense strand starting at position 3217 of SEQ ID NO: 1883576
guagccaguguguucuuua

SEQ ID NO: 2202137 - RNA, 19 nt, Artificial Sequence
  Description of Artificial Sequence: Synthetic oligonucleotide
  Antisense strand to SEQ ID NO: 2202136
uaaagaacacacuggcuac

SEQ ID NO: 2202138 - RNA, 19 nt, Artificial Sequence
  Description of Artificial Sequence: Synthetic oligonucleotide
  Sense strand starting at position 3477 of SEQ ID NO: 1883576
auuuccauuuguuacggaa

SEQ ID NO: 2202139 - RNA, 19 nt, Artificial Sequence
  Description of Artificial Sequence: Synthetic oligonucleotide
  Antisense strand to SEQ ID NO: 2202138
uuccguaacaaauggaaau

SEQ ID NO: 2202140 - RNA, 19 nt, Artificial Sequence
  Description of Artificial Sequence: Synthetic oligonucleotide
  Sense strand starting at position 3808 of SEQ ID NO: 1883576
uugugaacauaauuagauc

SEQ ID NO: 2202141 - RNA, 19 nt, Artificial Sequence
  Description of Artificial Sequence: Synthetic oligonucleotide
  Antisense strand to SEQ ID NO: 2202140
gaucuaauuauguucacaa

SEQ ID NO: 2202142 - RNA, 19 nt, Artificial Sequence
  Description of Artificial Sequence: Synthetic oligonucleotide
  Sense strand starting at position 3884 of SEQ ID NO: 1883576
auaguuugugaguagauaa

SEQ ID NO: 2202143 - RNA, 19 nt, Artificial Sequence
  Description of Artificial Sequence: Synthetic oligonucleotide
  Antisense strand to SEQ ID NO: 2202142
uuaucuacucacaaacuau

SEQ ID NO: 2202144 - RNA, 19 nt, Artificial Sequence
  Description of Artificial Sequence: Synthetic oligonucleotide
  Sense strand starting at position 1327 of SEQ ID NO: 1883576
agaauugagcgucaggaac

SEQ ID NO: 2202145 - RNA, 19 nt, Artificial Sequence
  Description of Artificial Sequence: Synthetic oligonucleotide
  Antisense strand to SEQ ID NO: 2202144
guuccugacgcucaauucu

SEQ ID NO: 2202146 - RNA, 19 nt, Artificial Sequence
  Description of Artificial Sequence: Synthetic oligonucleotide
  Sense strand starting at position 10 of SEQ ID NO: 1883576
cuuauauaugugcaaauag

SEQ ID NO: 2202147 - RNA, 19 nt, Artificial Sequence
  Description of Artificial Sequence: Synthetic oligonucleotide
  Antisense strand to SEQ ID NO: 2202146
cuauuugcacauauauaag

SEQ ID NO: 2202148 - RNA, 19 nt, Artificial Sequence
  Description of Artificial Sequence: Synthetic oligonucleotide
  Sense strand starting at position 2562 of SEQ ID NO: 1883576
agcuaaagacuguaguaua

SEQ ID NO: 2202149 - RNA, 19 nt, Artificial Sequence
  Description of Artificial Sequence: Synthetic oligonucleotide
  Antisense strand to SEQ ID NO: 2202148
uauacuacagucuuuagcu

SEQ ID NO: 2202150 - RNA, 19 nt, Artificial Sequence
  Description of Artificial Sequence: Synthetic oligonucleotide
  Sense strand starting at position 3876 of SEQ ID NO: 1883576
caugaagaauaguuuguga

SEQ ID NO: 2202151 - RNA, 19 nt, Artificial Sequence
  Description of Artificial Sequence: Synthetic oligonucleotide
  Antisense strand to SEQ ID NO: 2202150
ucacaaacuauucuucaug

SEQ ID NO: 2202152 - RNA, 19 nt, Artificial Sequence
  Description of Artificial Sequence: Synthetic oligonucleotide
  Sense strand starting at position 217 of SEQ ID NO: 1883576
gcuguuacagaauauuaug

SEQ ID NO: 2202153 - RNA, 19 nt, Artificial Sequence
  Description of Artificial Sequence: Synthetic oligonucleotide
  Antisense strand to SEQ ID NO: 2202152
cauaauauucuguaacagc

SEQ ID NO: 2202154 - RNA, 19 nt, Artificial Sequence
  Description of Artificial Sequence: Synthetic oligonucleotide
  Sense strand starting at position 3684 of SEQ ID NO: 1883576
caguacuuugacuagaguu

SEQ ID NO: 2202155 - RNA, 19 nt, Artificial Sequence
  Description of Artificial Sequence: Synthetic oligonucleotide
  Antisense strand to SEQ ID NO: 2202154
aacucuagucaaaguacug

SEQ ID NO: 2202156 - RNA, 19 nt, Artificial Sequence
  Description of Artificial Sequence: Synthetic oligonucleotide
  Sense strand starting at position 3017 of SEQ ID NO: 1883576
uguuaugggcccuaaauga

SEQ ID NO: 2202157 - RNA, 19 nt, Artificial Sequence
  Description of Artificial Sequence: Synthetic oligonucleotide
  Antisense strand to SEQ ID NO: 2202156
ucauuuagggcccauaaca

SEQ ID NO: 2202158 - RNA, 19 nt, Artificial Sequence
  Description of Artificial Sequence: Synthetic oligonucleotide
  Sense strand starting at position 3349 of SEQ ID NO: 1883576
gucgaauagagugaauucu

SEQ ID NO: 2202159 - RNA, 19 nt, Artificial Sequence
  Description of Artificial Sequence: Synthetic oligonucleotide
  Antisense strand to SEQ ID NO: 2202158
agaauucacucuauucgac

SEQ ID NO: 2202160 - RNA, 19 nt, Artificial Sequence
  Description of Artificial Sequence: Synthetic oligonucleotide
  Sense strand starting at position 3343 of SEQ ID NO: 1883576
auaucugucgaauagagug

SEQ ID NO: 2202161 - RNA, 19 nt, Artificial Sequence
  Description of Artificial Sequence: Synthetic oligonucleotide
  Antisense strand to SEQ ID NO: 2202160
cacucuauucgacagauau

SEQ ID NO: 2202162 - RNA, 19 nt, Artificial Sequence
  Description of Artificial Sequence: Synthetic oligonucleotide
  Sense strand starting at position 3271 of SEQ ID NO: 1883576
guugauagagacuguuaga

SEQ ID NO: 2202163 - RNA, 19 nt, Artificial Sequence
  Description of Artificial Sequence: Synthetic oligonucleotide
  Antisense strand to SEQ ID NO: 2202162
ucuaacagucucuaucaac

SEQ ID NO: 2202164 - RNA, 19 nt, Artificial Sequence
  Description of Artificial Sequence: Synthetic oligonucleotide
  Sense strand starting at position 3355 of SEQ ID NO: 1883576
uagagugaauucuuaguaa

SEQ ID NO: 2202165 - RNA, 19 nt, Artificial Sequence
  Description of Artificial Sequence: Synthetic oligonucleotide
  Antisense strand to SEQ ID NO: 2202164
uuacuaagaauucacucua

SEQ ID NO: 2202166 - RNA, 19 nt, Artificial Sequence
  Description of Artificial Sequence: Synthetic oligonucleotide
  Sense strand starting at position 2462 of SEQ ID NO: 1883576
agaaguuucuacuucugga

SEQ ID NO: 2202167 - RNA, 19 nt, Artificial Sequence
  Description of Artificial Sequence: Synthetic oligonucleotide
  Antisense strand to SEQ ID NO: 2202166
uccagaaguagaaacuucu

SEQ ID NO: 2202168 - RNA, 19 nt, Artificial Sequence
  Description of Artificial Sequence: Synthetic oligonucleotide
  Sense strand starting at position 1274 of SEQ ID NO: 1883576
ucgguuuaguuucuaauuu

SEQ ID NO: 2202169 - RNA, 19 nt, Artificial Sequence
  Description of Artificial Sequence: Synthetic oligonucleotide
  Antisense strand to SEQ ID NO: 2202168
aaauuagaaacuaaaccga

SEQ ID NO: 2202170 - RNA, 19 nt, Artificial Sequence
  Description of Artificial Sequence: Synthetic oligonucleotide
  Sense strand starting at position 3152 of SEQ ID NO: 1883576
gauugcugauuaccugaga

SEQ ID NO: 2202171 - RNA, 19 nt, Artificial Sequence
  Description of Artificial Sequence: Synthetic oligonucleotide
  Antisense strand to SEQ ID NO: 2202170
ucucagguaaucagcaauc

SEQ ID NO: 2202172 - RNA, 19 nt, Artificial Sequence
  Description of Artificial Sequence: Synthetic oligonucleotide
  Sense strand starting at position 3461 of SEQ ID NO: 1883576
gaauuugugugcuucuauu

SEQ ID NO: 2202173 - RNA, 19 nt, Artificial Sequence
  Description of Artificial Sequence: Synthetic oligonucleotide
  Antisense strand to SEQ ID NO: 2202172
aauagaagcacacaaauuc

SEQ ID NO: 2202174 - RNA, 19 nt, Artificial Sequence
  Description of Artificial Sequence: Synthetic oligonucleotide
  Sense strand starting at position 3459 of SEQ ID NO: 1883576
uugaauuugugugcuucua

SEQ ID NO: 2202175 - RNA, 19 nt, Artificial Sequence
  Description of Artificial Sequence: Synthetic oligonucleotide
  Antisense strand to SEQ ID NO: 2202174
uagaagcacacaaauucaa

SEQ ID NO: 2202176 - RNA, 19 nt, Artificial Sequence
  Description of Artificial Sequence: Synthetic oligonucleotide
  Sense strand starting at position 82 of SEQ ID NO: 1883576
acagucuaguauccaacaa

SEQ ID NO: 2202177 - RNA, 19 nt, Artificial Sequence
  Description of Artificial Sequence: Synthetic oligonucleotide
  Antisense strand to SEQ ID NO: 2202176
uuguuggauacuagacugu

SEQ ID NO: 2202178 - RNA, 19 nt, Artificial Sequence
  Description of Artificial Sequence: Synthetic oligonucleotide
  Sense strand starting at position 2527 of SEQ ID NO: 1883576
ggauuaugccuuggacuaa

SEQ ID NO: 2202179 - RNA, 19 nt, Artificial Sequence
  Description of Artificial Sequence: Synthetic oligonucleotide
  Antisense strand to SEQ ID NO: 2202178
uuaguccaaggcauaaucc

SEQ ID NO: 2202180 - RNA, 19 nt, Artificial Sequence
  Description of Artificial Sequence: Synthetic oligonucleotide
  Sense strand starting at position 819 of SEQ ID NO: 1883576
uguauccggauguauacaa

SEQ ID NO: 2202181 - RNA, 19 nt, Artificial Sequence
  Description of Artificial Sequence: Synthetic oligonucleotide
  Antisense strand to SEQ ID NO: 2202180
uuguauacauccggauaca

SEQ ID NO: 2202182 - RNA, 19 nt, Artificial Sequence
  Description of Artificial Sequence: Synthetic oligonucleotide
  Sense strand starting at position 3879 of SEQ ID NO: 1883576
gaagaauaguuugugagua

SEQ ID NO: 2202183 - RNA, 19 nt, Artificial Sequence
  Description of Artificial Sequence: Synthetic oligonucleotide
  Antisense strand to SEQ ID NO: 2202182
uacucacaaacuauucuuc

SEQ ID NO: 2202184 - RNA, 19 nt, Artificial Sequence
  Description of Artificial Sequence: Synthetic oligonucleotide
  Sense strand starting at position 3200 of SEQ ID NO: 1883576
gccuaugggagguaugagu

SEQ ID NO: 2202185 - RNA, 19 nt, Artificial Sequence
  Description of Artificial Sequence: Synthetic oligonucleotide
  Antisense strand to SEQ ID NO: 2202184
acucauaccucccauaggc

SEQ ID NO: 2202186 - RNA, 19 nt, Artificial Sequence
  Description of Artificial Sequence: Synthetic oligonucleotide
  Sense strand starting at position 3150 of SEQ ID NO: 1883576
gugauugcugauuaccuga

SEQ ID NO: 2202187 - RNA, 19 nt, Artificial Sequence
  Description of Artificial Sequence: Synthetic oligonucleotide
  Antisense strand to SEQ ID NO: 2202186
ucagguaaucagcaaucac

SEQ ID NO: 2202188 - RNA, 19 nt, Artificial Sequence
  Description of Artificial Sequence: Synthetic oligonucleotide
  Sense strand starting at position 2526 of SEQ ID NO: 1883576
gggauuaugccuuggacua

SEQ ID NO: 2202189 - RNA, 19 nt, Artificial Sequence
  Description of Artificial Sequence: Synthetic oligonucleotide
  Antisense strand to SEQ ID NO: 2202188
uaguccaaggcauaauccc

SEQ ID NO: 2202190 - RNA, 19 nt, Artificial Sequence
  Description of Artificial Sequence: Synthetic oligonucleotide
  Sense strand starting at position 3153 of SEQ ID NO: 1883576
auugcugauuaccugagau

SEQ ID NO: 2202191 - RNA, 19 nt, Artificial Sequence
  Description of Artificial Sequence: Synthetic oligonucleotide
  Antisense strand to SEQ ID NO: 2202190
aucucagguaaucagcaau

SEQ ID NO: 2202192 - RNA, 19 nt, Artificial Sequence
  Description of Artificial Sequence: Synthetic oligonucleotide
  Sense strand starting at position 639 of SEQ ID NO: 1883576
ggaacaucagccugggagu

SEQ ID NO: 2202193 - RNA, 19 nt, Artificial Sequence
  Description of Artificial Sequence: Synthetic oligonucleotide
  Antisense strand to SEQ ID NO: 2202192
acucccaggcugauguucc

SEQ ID NO: 2202194 - RNA, 19 nt, Artificial Sequence
  Description of Artificial Sequence: Synthetic oligonucleotide
  Sense strand starting at position 132 of SEQ ID NO: 1883576
ucauauacagguugagcaa

SEQ ID NO: 2202195 - RNA, 19 nt, Artificial Sequence
  Description of Artificial Sequence: Synthetic oligonucleotide
  Antisense strand to SEQ ID NO: 2202194
uugcucaaccuguauauga

SEQ ID NO: 2202196 - RNA, 19 nt, Artificial Sequence
  Description of Artificial Sequence: Synthetic oligonucleotide
  Sense strand starting at position 855 of SEQ ID NO: 1883576
acgaaauagaaacguaagu

SEQ ID NO: 2202197 - RNA, 19 nt, Artificial Sequence
  Description of Artificial Sequence: Synthetic oligonucleotide
  Antisense strand to SEQ ID NO: 2202196
acuuacguuucuauuucgu

SEQ ID NO: 2202198 - RNA, 19 nt, Artificial Sequence
  Description of Artificial Sequence: Synthetic oligonucleotide
  Sense strand starting at position 3883 of SEQ ID NO: 1883576
aauaguuugugaguagaua

SEQ ID NO: 2202199 - RNA, 19 nt, Artificial Sequence
  Description of Artificial Sequence: Synthetic oligonucleotide
  Antisense strand to SEQ ID NO: 2202198
uaucuacucacaaacuauu

SEQ ID NO: 2202200 - RNA, 19 nt, Artificial Sequence
  Description of Artificial Sequence: Synthetic oligonucleotide
  Sense strand starting at position 3719 of SEQ ID NO: 1883576
uggaguuacccaugaccuu

SEQ ID NO: 2202201 - RNA, 19 nt, Artificial Sequence
  Description of Artificial Sequence: Synthetic oligonucleotide
  Antisense strand to SEQ ID NO: 2202200
aaggucauggguaacucca

SEQ ID NO: 2202202 - RNA, 19 nt, Artificial Sequence
  Description of Artificial Sequence: Synthetic oligonucleotide
  Sense strand starting at position 3024 of SEQ ID NO: 1883576
ggcccuaaaugacucuauu

SEQ ID NO: 2202203 - RNA, 19 nt, Artificial Sequence
  Description of Artificial Sequence: Synthetic oligonucleotide
  Antisense strand to SEQ ID NO: 2202202
aauagagucauuuagggcc

SEQ ID NO: 2202204 - RNA, 19 nt, Artificial Sequence
  Description of Artificial Sequence: Synthetic oligonucleotide
  Sense strand starting at position 3458 of SEQ ID NO: 1883576
cuugaauuugugugcuucu

SEQ ID NO: 2202205 - RNA, 19 nt, Artificial Sequence
  Description of Artificial Sequence: Synthetic oligonucleotide
  Antisense strand to SEQ ID NO: 2202204
agaagcacacaaauucaag

SEQ ID NO: 2202206 - RNA, 19 nt, Artificial Sequence
  Description of Artificial Sequence: Synthetic oligonucleotide
  Sense strand starting at position 640 of SEQ ID NO: 1883576
gaacaucagccugggaguu

SEQ ID NO: 2202207 - RNA, 19 nt, Artificial Sequence
  Description of Artificial Sequence: Synthetic oligonucleotide
  Antisense strand to SEQ ID NO: 2202206
aacucccaggcugauguuc

SEQ ID NO: 2202208 - RNA, 19 nt, Artificial Sequence
  Description of Artificial Sequence: Synthetic oligonucleotide
  Sense strand starting at position 373 of SEQ ID NO: 1883577
caguuuagcccgccaagua

SEQ ID NO: 2202209 - RNA, 19 nt, Artificial Sequence
  Description of Artificial Sequence: Synthetic oligonucleotide
  Antisense strand to SEQ ID NO: 2202208
uacuuggcgggcuaaacug

SEQ ID NO: 2202210 - RNA, 19 nt, Artificial Sequence
  Description of Artificial Sequence: Synthetic oligonucleotide
  Sense strand starting at position 96 of SEQ ID NO: 1883577
cgagucagaaccugcauuu

SEQ ID NO: 2202211 - RNA, 19 nt, Artificial Sequence
  Description of Artificial Sequence: Synthetic oligonucleotide
  Antisense strand to SEQ ID NO: 2202210
aaaugcagguucugacucg

SEQ ID NO: 2202212 - RNA, 19 nt, Artificial Sequence
  Description of Artificial Sequence: Synthetic oligonucleotide
  Sense strand starting at position 1342 of SEQ ID NO: 1883577
agucaaauguaaccugaaa

SEQ ID NO: 2202213 - RNA, 19 nt, Artificial Sequence
  Description of Artificial Sequence: Synthetic oligonucleotide
  Antisense strand to SEQ ID NO: 2202212
uuucagguuacauuugacu

SEQ ID NO: 2202214 - RNA, 19 nt, Artificial Sequence
  Description of Artificial Sequence: Synthetic oligonucleotide
  Sense strand starting at position 3900 of SEQ ID NO: 1883577
agagaaaccucaucauguc

SEQ ID NO: 2202215 - RNA, 19 nt, Artificial Sequence
  Description of Artificial Sequence: Synthetic oligonucleotide
  Antisense strand to SEQ ID NO: 2202214
gacaugaugagguuucucu

SEQ ID NO: 2202216 - RNA, 19 nt, Artificial Sequence
  Description of Artificial Sequence: Synthetic oligonucleotide
  Sense strand starting at position 3228 of SEQ ID NO: 1883577
cuuguuaauuaacugaaag

SEQ ID NO: 2202217 - RNA, 19 nt, Artificial Sequence
  Description of Artificial Sequence: Synthetic oligonucleotide
  Antisense strand to SEQ ID NO: 2202216
cuuucaguuaauuaacaag

SEQ ID NO: 2202218 - RNA, 19 nt, Artificial Sequence
  Description of Artificial Sequence: Synthetic oligonucleotide
  Sense strand starting at position 3121 of SEQ ID NO: 1883577
cgucuuggcccugugugaa

SEQ ID NO: 2202219 - RNA, 19 nt, Artificial Sequence
  Description of Artificial Sequence: Synthetic oligonucleotide
  Antisense strand to SEQ ID NO: 2202218
uucacacagggccaagacg

SEQ ID NO: 2202220 - RNA, 19 nt, Artificial Sequence
  Description of Artificial Sequence: Synthetic oligonucleotide
  Sense strand starting at position 3647 of SEQ ID NO: 1883577
accacaguuggcuaaacau

SEQ ID NO: 2202221 - RNA, 19 nt, Artificial Sequence
  Description of Artificial Sequence: Synthetic oligonucleotide
  Antisense strand to SEQ ID NO: 2202220
auguuuagccaacuguggu

SEQ ID NO: 2202222 - RNA, 19 nt, Artificial Sequence
  Description of Artificial Sequence: Synthetic oligonucleotide
  Sense strand starting at position 1525 of SEQ ID NO: 1883577
aguaaauuacgguacauca

SEQ ID NO: 2202223 - RNA, 19 nt, Artificial Sequence
  Description of Artificial Sequence: Synthetic oligonucleotide
  Antisense strand to SEQ ID NO: 2202222
ugauguaccguaauuuacu

SEQ ID NO: 2202224 - RNA, 19 nt, Artificial Sequence
  Description of Artificial Sequence: Synthetic oligonucleotide
  Sense strand starting at position 3037 of SEQ ID NO: 1883577
ggccuagaauagguagaau

SEQ ID NO: 2202225 - RNA, 19 nt, Artificial Sequence
  Description of Artificial Sequence: Synthetic oligonucleotide
  Antisense strand to SEQ ID NO: 2202224
auucuaccuauucuaggcc

SEQ ID NO: 2202226 - RNA, 19 nt, Artificial Sequence
  Description of Artificial Sequence: Synthetic oligonucleotide
  Sense strand starting at position 2505 of SEQ ID NO: 1883577
aaauguuuccgguaaugaa

SEQ ID NO: 2202227 - RNA, 19 nt, Artificial Sequence
  Description of Artificial Sequence: Synthetic oligonucleotide
  Antisense strand to SEQ ID NO: 2202226
uucauuaccggaaacauuu

SEQ ID NO: 2202228 - RNA, 19 nt, Artificial Sequence
  Description of Artificial Sequence: Synthetic oligonucleotide
  Sense strand starting at position 1234 of SEQ ID NO: 1883577
ucaagucauguggauccua

SEQ ID NO: 2202229 - RNA, 19 nt, Artificial Sequence
  Description of Artificial Sequence: Synthetic oligonucleotide
  Antisense strand to SEQ ID NO: 2202228
uaggauccacaugacuuga

SEQ ID NO: 2202230 - RNA, 19 nt, Artificial Sequence
  Description of Artificial Sequence: Synthetic oligonucleotide
  Sense strand starting at position 3621 of SEQ ID NO: 1883577
ggaguugggccucacaauc

SEQ ID NO: 2202231 - RNA, 19 nt, Artificial Sequence
  Description of Artificial Sequence: Synthetic oligonucleotide
  Antisense strand to SEQ ID NO: 2202230
gauugugaggcccaacucc

SEQ ID NO: 2202232 - RNA, 19 nt, Artificial Sequence
  Description of Artificial Sequence: Synthetic oligonucleotide
  Sense strand starting at position 1242 of SEQ ID NO: 1883577
uguggauccuaccuauaag

SEQ ID NO: 2202233 - RNA, 19 nt, Artificial Sequence
  Description of Artificial Sequence: Synthetic oligonucleotide
  Antisense strand to SEQ ID NO: 2202232
cuuauagguaggauccaca

SEQ ID NO: 2202234 - RNA, 19 nt, Artificial Sequence
  Description of Artificial Sequence: Synthetic oligonucleotide
  Sense strand starting at position 3140 of SEQ ID NO: 1883577
ggauuaaagugguuucaug

SEQ ID NO: 2202235 - RNA, 19 nt, Artificial Sequence
  Description of Artificial Sequence: Synthetic oligonucleotide
  Antisense strand to SEQ ID NO: 2202234
caugaaaccacuuuaaucc

SEQ ID NO: 2202236 - RNA, 19 nt, Artificial Sequence
  Description of Artificial Sequence: Synthetic oligonucleotide
  Sense strand starting at position 3306 of SEQ ID NO: 1883577
uuugucaccuauccagaga

SEQ ID NO: 2202237 - RNA, 19 nt, Artificial Sequence
  Description of Artificial Sequence: Synthetic oligonucleotide
  Antisense strand to SEQ ID NO: 2202236
ucucuggauaggugacaaa

SEQ ID NO: 2202238 - RNA, 19 nt, Artificial Sequence
  Description of Artificial Sequence: Synthetic oligonucleotide
  Sense strand starting at position 1165 of SEQ ID NO: 1883577
auuacuuaggcaugacauu

SEQ ID NO: 2202239 - RNA, 19 nt, Artificial Sequence
  Description of Artificial Sequence: Synthetic oligonucleotide
  Antisense strand to SEQ ID NO: 2202238
aaugucaugccuaaguaau

SEQ ID NO: 2202240 - RNA, 19 nt, Artificial Sequence
  Description of Artificial Sequence: Synthetic oligonucleotide
  Sense strand starting at position 3367 of SEQ ID NO: 1883577
guaggccaagucuaauuau

SEQ ID NO: 2202241 - RNA, 19 nt, Artificial Sequence
  Description of Artificial Sequence: Synthetic oligonucleotide
  Antisense strand to SEQ ID NO: 2202240
auaauuagacuuggccuac

SEQ ID NO: 2202242 - RNA, 19 nt, Artificial Sequence
  Description of Artificial Sequence: Synthetic oligonucleotide
  Sense strand starting at position 2797 of SEQ ID NO: 1883577
uccuuaacuguugggauua

SEQ ID NO: 2202243 - RNA, 19 nt, Artificial Sequence
  Description of Artificial Sequence: Synthetic oligonucleotide
  Antisense strand to SEQ ID NO: 2202242
uaaucccaacaguuaagga

SEQ ID NO: 2202244 - RNA, 19 nt, Artificial Sequence
  Description of Artificial Sequence: Synthetic oligonucleotide
  Sense strand starting at position 2848 of SEQ ID NO: 1883577
uuauuaucauugcuaugag

SEQ ID NO: 2202245 - RNA, 19 nt, Artificial Sequence
  Description of Artificial Sequence: Synthetic oligonucleotide
  Antisense strand to SEQ ID NO: 2202244
cucauagcaaugauaauaa

SEQ ID NO: 2202246 - RNA, 19 nt, Artificial Sequence
  Description of Artificial Sequence: Synthetic oligonucleotide
  Sense strand starting at position 3426 of SEQ ID NO: 1883577
uuguguuggaaauaaugcu

SEQ ID NO: 2202247 - RNA, 19 nt, Artificial Sequence
  Description of Artificial Sequence: Synthetic oligonucleotide
  Antisense strand to SEQ ID NO: 2202246
agcauuauuuccaacacaa

SEQ ID NO: 2202248 - RNA, 19 nt, Artificial Sequence
  Description of Artificial Sequence: Synthetic oligonucleotide
  Sense strand starting at position 1598 of SEQ ID NO: 1883577
acguauugccuauacauaa

SEQ ID NO: 2202249 - RNA, 19 nt, Artificial Sequence
  Description of Artificial Sequence: Synthetic oligonucleotide
  Antisense strand to SEQ ID NO: 2202248
uuauguauaggcaauacgu

SEQ ID NO: 2202250 - RNA, 19 nt, Artificial Sequence
  Description of Artificial Sequence: Synthetic oligonucleotide
  Sense strand starting at position 676 of SEQ ID NO: 1883577
guauaacagcauugacuau

SEQ ID NO: 2202251 - RNA, 19 nt, Artificial Sequence
  Description of Artificial Sequence: Synthetic oligonucleotide
  Antisense strand to SEQ ID NO: 2202250
auagucaaugcuguuauac

SEQ ID NO: 2202252 - RNA, 19 nt, Artificial Sequence
  Description of Artificial Sequence: Synthetic oligonucleotide
  Sense strand starting at position 2420 of SEQ ID NO: 1883577
cauaaauggcuacgugaaa

SEQ ID NO: 2202253 - RNA, 19 nt, Artificial Sequence
  Description of Artificial Sequence: Synthetic oligonucleotide
  Antisense strand to SEQ ID NO: 2202252
uuucacguagccauuuaug

SEQ ID NO: 2202254 - RNA, 19 nt, Artificial Sequence
  Description of Artificial Sequence: Synthetic oligonucleotide
  Sense strand starting at position 54 of SEQ ID NO: 1883577
gcuuauuagagaugcagac

SEQ ID NO: 2202255 - RNA, 19 nt, Artificial Sequence
  Description of Artificial Sequence: Synthetic oligonucleotide
  Antisense strand to SEQ ID NO: 2202254
gucugcaucucuaauaagc

SEQ ID NO: 2202256 - RNA, 19 nt, Artificial Sequence
  Description of Artificial Sequence: Synthetic oligonucleotide
  Sense strand starting at position 869 of SEQ ID NO: 1883577
ccuuguugugcagagggau

SEQ ID NO: 2202257 - RNA, 19 nt, Artificial Sequence
  Description of Artificial Sequence: Synthetic oligonucleotide
  Antisense strand to SEQ ID NO: 2202256
aucccucugcacaacaagg

SEQ ID NO: 2202258 - RNA, 19 nt, Artificial Sequence
  Description of Artificial Sequence: Synthetic oligonucleotide
  Sense strand starting at position 2294 of SEQ ID NO: 1883577
caguauuuaucugacugga

SEQ ID NO: 2202259 - RNA, 19 nt, Artificial Sequence
  Description of Artificial Sequence: Synthetic oligonucleotide
  Antisense strand to SEQ ID NO: 2202258
uccagucagauaaauacug

SEQ ID NO: 2202260 - RNA, 19 nt, Artificial Sequence
  Description of Artificial Sequence: Synthetic oligonucleotide
  Sense strand starting at position 1596 of SEQ ID NO: 1883577
auacguauugccuauacau

SEQ ID NO: 2202261 - RNA, 19 nt, Artificial Sequence
  Description of Artificial Sequence: Synthetic oligonucleotide
  Antisense strand to SEQ ID NO: 2202260
auguauaggcaauacguau

SEQ ID NO: 2202262 - RNA, 19 nt, Artificial Sequence
  Description of Artificial Sequence: Synthetic oligonucleotide
  Sense strand starting at position 3005 of SEQ ID NO: 1883577
guauccguuagagggauau

SEQ ID NO: 2202263 - RNA, 19 nt, Artificial Sequence
  Description of Artificial Sequence: Synthetic oligonucleotide
  Antisense strand to SEQ ID NO: 2202262
auaucccucuaacggauac

SEQ ID NO: 2202264 - RNA, 19 nt, Artificial Sequence
  Description of Artificial Sequence: Synthetic oligonucleotide
  Sense strand starting at position 2881 of SEQ ID NO: 1883577
uacugaucugcugguuaaa

SEQ ID NO: 2202265 - RNA, 19 nt, Artificial Sequence
  Description of Artificial Sequence: Synthetic oligonucleotide
  Antisense strand to SEQ ID NO: 2202264
uuuaaccagcagaucagua

SEQ ID NO: 2202266 - RNA, 19 nt, Artificial Sequence
  Description of Artificial Sequence: Synthetic oligonucleotide
  Sense strand starting at position 771 of SEQ ID NO: 1883577
auugcuauggcccaucgaa

SEQ ID NO: 2202267 - RNA, 19 nt, Artificial Sequence
  Description of Artificial Sequence: Synthetic oligonucleotide
  Antisense strand to SEQ ID NO: 2202266
uucgaugggccauagcaau

SEQ ID NO: 2202268 - RNA, 19 nt, Artificial Sequence
  Description of Artificial Sequence: Synthetic oligonucleotide
  Sense strand starting at position 1560 of SEQ ID NO: 1883577
gcagccauugaagguaaua

SEQ ID NO: 2202269 - RNA, 19 nt, Artificial Sequence
  Description of Artificial Sequence: Synthetic oligonucleotide
  Antisense strand to SEQ ID NO: 2202268
uauuaccuucaauggcugc

SEQ ID NO: 2202270 - RNA, 19 nt, Artificial Sequence
  Description of Artificial Sequence: Synthetic oligonucleotide
  Sense strand starting at position 1465 of SEQ ID NO: 1883577
ccgaauaauuguuucucca

SEQ ID NO: 2202271 - RNA, 19 nt, Artificial Sequence
  Description of Artificial Sequence: Synthetic oligonucleotide
  Antisense strand to SEQ ID NO: 2202270
uggagaaacaauuauucgg

SEQ ID NO: 2202272 - RNA, 19 nt, Artificial Sequence
  Description of Artificial Sequence: Synthetic oligonucleotide
  Sense strand starting at position 1469 of SEQ ID NO: 1883577
auaauuguuucuccaggca

SEQ ID NO: 2202273 - RNA, 19 nt, Artificial Sequence
  Description of Artificial Sequence: Synthetic oligonucleotide
  Antisense strand to SEQ ID NO: 2202272
ugccuggagaaacaauuau

SEQ ID NO: 2202274 - RNA, 19 nt, Artificial Sequence
  Description of Artificial Sequence: Synthetic oligonucleotide
  Sense strand starting at position 3421 of SEQ ID NO: 1883577
uacuguuguguuggaaaua

SEQ ID NO: 2202275 - RNA, 19 nt, Artificial Sequence
  Description of Artificial Sequence: Synthetic oligonucleotide
  Antisense strand to SEQ ID NO: 2202274
uauuuccaacacaacagua

SEQ ID NO: 2202276 - RNA, 19 nt, Artificial Sequence
  Description of Artificial Sequence: Synthetic oligonucleotide
  Sense strand starting at position 3249 of SEQ ID NO: 1883577
uuuggaauguguuugaagu

SEQ ID NO: 2202277 - RNA, 19 nt, Artificial Sequence
  Description of Artificial Sequence: Synthetic oligonucleotide
  Antisense strand to SEQ ID NO: 2202276
acuucaaacacauuccaaa

SEQ ID NO: 2202278 - RNA, 19 nt, Artificial Sequence
  Description of Artificial Sequence: Synthetic oligonucleotide
  Sense strand starting at position 1472 of SEQ ID NO: 1883577
auuguuucuccaggcaaau

SEQ ID NO: 2202279 - RNA, 19 nt, Artificial Sequence
  Description of Artificial Sequence: Synthetic oligonucleotide
  Antisense strand to SEQ ID NO: 2202278
auuugccuggagaaacaau

SEQ ID NO: 2202280 - RNA, 19 nt, Artificial Sequence
  Description of Artificial Sequence: Synthetic oligonucleotide
  Sense strand starting at position 3250 of SEQ ID NO: 1883577
uuggaauguguuugaaguu

SEQ ID NO: 2202281 - RNA, 19 nt, Artificial Sequence
  Description of Artificial Sequence: Synthetic oligonucleotide
  Antisense strand to SEQ ID NO: 2202280
aacuucaaacacauuccaa

SEQ ID NO: 2202282 - RNA, 19 nt, Artificial Sequence
  Description of Artificial Sequence: Synthetic oligonucleotide
  Sense strand starting at position 3744 of SEQ ID NO: 1883577
uagucuucucuucggauaa

SEQ ID NO: 2202283 - RNA, 19 nt, Artificial Sequence
  Description of Artificial Sequence: Synthetic oligonucleotide
  Antisense strand to SEQ ID NO: 2202282
uuauccgaagagaagacua

SEQ ID NO: 2202284 - RNA, 19 nt, Artificial Sequence
  Description of Artificial Sequence: Synthetic oligonucleotide
  Sense strand starting at position 797 of SEQ ID NO: 1883577
gagagcuguccaugcacaa

SEQ ID NO: 2202285 - RNA, 19 nt, Artificial Sequence
  Description of Artificial Sequence: Synthetic oligonucleotide
  Antisense strand to SEQ ID NO: 2202284
uugugcauggacagcucuc

SEQ ID NO: 2202286 - RNA, 19 nt, Artificial Sequence
  Description of Artificial Sequence: Synthetic oligonucleotide
  Sense strand starting at position 2427 of SEQ ID NO: 1883577
ggcuacgugaaacgauaau

SEQ ID NO: 2202287 - RNA, 19 nt, Artificial Sequence
  Description of Artificial Sequence: Synthetic oligonucleotide
  Antisense strand to SEQ ID NO: 2202286
auuaucguuucacguagcc

SEQ ID NO: 2202288 - RNA, 19 nt, Artificial Sequence
  Description of Artificial Sequence: Synthetic oligonucleotide
  Sense strand starting at position 3191 of SEQ ID NO: 1883578
aguuauggucaauacacau

SEQ ID NO: 2202289 - RNA, 19 nt, Artificial Sequence
  Description of Artificial Sequence: Synthetic oligonucleotide
  Antisense strand to SEQ ID NO: 2202288
auguguauugaccauaacu

SEQ ID NO: 2202290 - RNA, 19 nt, Artificial Sequence
  Description of Artificial Sequence: Synthetic oligonucleotide
  Sense strand starting at position 3143 of SEQ ID NO: 1883578
ggcuguacaggugaagaaa

SEQ ID NO: 2202291 - RNA, 19 nt, Artificial Sequence
  Description of Artificial Sequence: Synthetic oligonucleotide
  Antisense strand to SEQ ID NO: 2202290
uuucuucaccuguacagcc

SEQ ID NO: 2202292 - RNA, 19 nt, Artificial Sequence
  Description of Artificial Sequence: Synthetic oligonucleotide
  Sense strand starting at position 580 of SEQ ID NO: 1883578
gaauguaaauccuuugagg

SEQ ID NO: 2202293 - RNA, 19 nt, Artificial Sequence
  Description of Artificial Sequence: Synthetic oligonucleotide
  Antisense strand to SEQ ID NO: 2202292
ccucaaaggauuuacauuc

SEQ ID NO: 2202294 - RNA, 19 nt, Artificial Sequence
  Description of Artificial Sequence: Synthetic oligonucleotide
  Sense strand starting at position 3593 of SEQ ID NO: 1883578
aucugaguaaccgagaagu

SEQ ID NO: 2202295 - RNA, 19 nt, Artificial Sequence
  Description of Artificial Sequence: Synthetic oligonucleotide
  Antisense strand to SEQ ID NO: 2202294
acuucucgguuacucagau

SEQ ID NO: 2202296 - RNA, 19 nt, Artificial Sequence
  Description of Artificial Sequence: Synthetic oligonucleotide
  Sense strand starting at position 623 of SEQ ID NO: 1883578
gcuauaugacaaugacaua

SEQ ID NO: 2202297 - RNA, 19 nt, Artificial Sequence
  Description of Artificial Sequence: Synthetic oligonucleotide
  Antisense strand to SEQ ID NO: 2202296
uaugucauugucauauagc

SEQ ID NO: 2202298 - RNA, 19 nt, Artificial Sequence
  Description of Artificial Sequence: Synthetic oligonucleotide
  Sense strand starting at position 3297 of SEQ ID NO: 1883578
ggaauagauguguaugcaa

SEQ ID NO: 2202299 - RNA, 19 nt, Artificial Sequence
  Description of Artificial Sequence: Synthetic oligonucleotide
  Antisense strand to SEQ ID NO: 2202298
uugcauacacaucuauucc

SEQ ID NO: 2202300 - RNA, 19 nt, Artificial Sequence
  Description of Artificial Sequence: Synthetic oligonucleotide
  Sense strand starting at position 2615 of SEQ ID NO: 1883578
aguguccauuugcuuuaaa

SEQ ID NO: 2202301 - RNA, 19 nt, Artificial Sequence
  Description of Artificial Sequence: Synthetic oligonucleotide
  Antisense strand to SEQ ID NO: 2202300
uuuaaagcaaauggacacu

SEQ ID NO: 2202302 - RNA, 19 nt, Artificial Sequence
  Description of Artificial Sequence: Synthetic oligonucleotide
  Sense strand starting at position 608 of SEQ ID NO: 1883578
uuaucuguccuguucgcua

SEQ ID NO: 2202303 - RNA, 19 nt, Artificial Sequence
  Description of Artificial Sequence: Synthetic oligonucleotide
  Antisense strand to SEQ ID NO: 2202302
uagcgaacaggacagauaa

SEQ ID NO: 2202304 - RNA, 19 nt, Artificial Sequence
  Description of Artificial Sequence: Synthetic oligonucleotide
  Sense strand starting at position 1270 of SEQ ID NO: 1883578
ggagccacccuccauauua

SEQ ID NO: 2202305 - RNA, 19 nt, Artificial Sequence
  Description of Artificial Sequence: Synthetic oligonucleotide
  Antisense strand to SEQ ID NO: 2202304
uaauauggaggguggcucc

SEQ ID NO: 2202306 - RNA, 19 nt, Artificial Sequence
  Description of Artificial Sequence: Synthetic oligonucleotide
  Sense strand starting at position 2403 of SEQ ID NO: 1883578
gauagauggguaugaguau

SEQ ID NO: 2202307 - RNA, 19 nt, Artificial Sequence
  Description of Artificial Sequence: Synthetic oligonucleotide
  Antisense strand to SEQ ID NO: 2202306
auacucauacccaucuauc

SEQ ID NO: 2202308 - RNA, 19 nt, Artificial Sequence
  Description of Artificial Sequence: Synthetic oligonucleotide
  Sense strand starting at position 3588 of SEQ ID NO: 1883578
uccacaucugaguaaccga

SEQ ID NO: 2202309 - RNA, 19 nt, Artificial Sequence
  Description of Artificial Sequence: Synthetic oligonucleotide
  Antisense strand to SEQ ID NO: 2202308
ucgguuacucagaugugga

SEQ ID NO: 2202310 - RNA, 19 nt, Artificial Sequence
  Description of Artificial Sequence: Synthetic oligonucleotide
  Sense strand starting at position 3440 of SEQ ID NO: 1883578
agacauguccaaggaucuu

SEQ ID NO: 2202311 - RNA, 19 nt, Artificial Sequence
  Description of Artificial Sequence: Synthetic oligonucleotide
  Antisense strand to SEQ ID NO: 2202310
aagauccuuggacaugucu

SEQ ID NO: 2202312 - RNA, 19 nt, Artificial Sequence
  Description of Artificial Sequence: Synthetic oligonucleotide
  Sense strand starting at position 965 of SEQ ID NO: 1883578
acccaucuaccuggaguaa

SEQ ID NO: 2202313 - RNA, 19 nt, Artificial Sequence
  Description of Artificial Sequence: Synthetic oligonucleotide
  Antisense strand to SEQ ID NO: 2202312
uuacuccagguagaugggu

SEQ ID NO: 2202314 - RNA, 19 nt, Artificial Sequence
  Description of Artificial Sequence: Synthetic oligonucleotide
  Sense strand starting at position 3750 of SEQ ID NO: 1883578
gauagacauuccuuguuga

SEQ ID NO: 2202315 - RNA, 19 nt, Artificial Sequence
  Description of Artificial Sequence: Synthetic oligonucleotide
  Antisense strand to SEQ ID NO: 2202314
ucaacaaggaaugucuauc

SEQ ID NO: 2202316 - RNA, 19 nt, Artificial Sequence
  Description of Artificial Sequence: Synthetic oligonucleotide
  Sense strand starting at position 3946 of SEQ ID NO: 1883578
ggagauuguaucuggaggu

SEQ ID NO: 2202317 - RNA, 19 nt, Artificial Sequence
  Description of Artificial Sequence: Synthetic oligonucleotide
  Antisense strand to SEQ ID NO: 2202316
accuccagauacaaucucc

SEQ ID NO: 2202318 - RNA, 19 nt, Artificial Sequence
  Description of Artificial Sequence: Synthetic oligonucleotide
  Sense strand starting at position 3536 of SEQ ID NO: 1883578
ggacuauuagcacaggugu

SEQ ID NO: 2202319 - RNA, 19 nt, Artificial Sequence
  Description of Artificial Sequence: Synthetic oligonucleotide
  Antisense strand to SEQ ID NO: 2202318
acaccugugcuaauagucc

SEQ ID NO: 2202320 - RNA, 19 nt, Artificial Sequence
  Description of Artificial Sequence: Synthetic oligonucleotide
  Sense strand starting at position 3751 of SEQ ID NO: 1883578
auagacauuccuuguugac

SEQ ID NO: 2202321 - RNA, 19 nt, Artificial Sequence
  Description of Artificial Sequence: Synthetic oligonucleotide
  Antisense strand to SEQ ID NO: 2202320
gucaacaaggaaugucuau

SEQ ID NO: 2202322 - RNA, 19 nt, Artificial Sequence
  Description of Artificial Sequence: Synthetic oligonucleotide
  Sense strand starting at position 3595 of SEQ ID NO: 1883578
cugaguaaccgagaagugu

SEQ ID NO: 2202323 - RNA, 19 nt, Artificial Sequence
  Description of Artificial Sequence: Synthetic oligonucleotide
  Antisense strand to SEQ ID NO: 2202322
acacuucucgguuacucag

SEQ ID NO: 2202324 - RNA, 19 nt, Artificial Sequence
  Description of Artificial Sequence: Synthetic oligonucleotide
  Sense strand starting at position 2399 of SEQ ID NO: 1883578
cguagauagauggguauga

SEQ ID NO: 2202325 - RNA, 19 nt, Artificial Sequence
  Description of Artificial Sequence: Synthetic oligonucleotide
  Antisense strand to SEQ ID NO: 2202324
ucauacccaucuaucuacg

SEQ ID NO: 2202326 - RNA, 19 nt, Artificial Sequence
  Description of Artificial Sequence: Synthetic oligonucleotide
  Sense strand starting at position 3296 of SEQ ID NO: 1883578
aggaauagauguguaugca

SEQ ID NO: 2202327 - RNA, 19 nt, Artificial Sequence
  Description of Artificial Sequence: Synthetic oligonucleotide
  Antisense strand to SEQ ID NO: 2202326
ugcauacacaucuauuccu

SEQ ID NO: 2202328 - RNA, 19 nt, Artificial Sequence
  Description of Artificial Sequence: Synthetic oligonucleotide
  Sense strand starting at position 655 of SEQ ID NO: 1883578
gcucaauaauuacugagua

SEQ ID NO: 2202329 - RNA, 19 nt, Artificial Sequence
  Description of Artificial Sequence: Synthetic oligonucleotide
  Antisense strand to SEQ ID NO: 2202328
uacucaguaauuauugagc

SEQ ID NO: 2202330 - RNA, 19 nt, Artificial Sequence
  Description of Artificial Sequence: Synthetic oligonucleotide
  Sense strand starting at position 2105 of SEQ ID NO: 1883578
uuccucuucccggaaguga

SEQ ID NO: 2202331 - RNA, 19 nt, Artificial Sequence
  Description of Artificial Sequence: Synthetic oligonucleotide
  Antisense strand to SEQ ID NO: 2202330
ucacuuccgggaagaggaa

SEQ ID NO: 2202332 - RNA, 19 nt, Artificial Sequence
  Description of Artificial Sequence: Synthetic oligonucleotide
  Sense strand starting at position 3300 of SEQ ID NO: 1883578
auagauguguaugcaaaua

SEQ ID NO: 2202333 - RNA, 19 nt, Artificial Sequence
  Description of Artificial Sequence: Synthetic oligonucleotide
  Antisense strand to SEQ ID NO: 2202332
uauuugcauacacaucuau

SEQ ID NO: 2202334 - RNA, 19 nt, Artificial Sequence
  Description of Artificial Sequence: Synthetic oligonucleotide
  Sense strand starting at position 3412 of SEQ ID NO: 1883578
ugauucuucuccuuggauu

SEQ ID NO: 2202335 - RNA, 19 nt, Artificial Sequence
  Description of Artificial Sequence: Synthetic oligonucleotide
  Antisense strand to SEQ ID NO: 2202334
aauccaaggagaagaauca

SEQ ID NO: 2202336 - RNA, 19 nt, Artificial Sequence
  Description of Artificial Sequence: Synthetic oligonucleotide
  Sense strand starting at position 3410 of SEQ ID NO: 1883578
ucugauucuucuccuugga

SEQ ID NO: 2202337 - RNA, 19 nt, Artificial Sequence
  Description of Artificial Sequence: Synthetic oligonucleotide
  Antisense strand to SEQ ID NO: 2202336
uccaaggagaagaaucaga

SEQ ID NO: 2202338 - RNA, 19 nt, Artificial Sequence
  Description of Artificial Sequence: Synthetic oligonucleotide
  Sense strand starting at position 1158 of SEQ ID NO: 1883578
guuagacuuugguuuaaac

SEQ ID NO: 2202339 - RNA, 19 nt, Artificial Sequence
  Description of Artificial Sequence: Synthetic oligonucleotide
  Antisense strand to SEQ ID NO: 2202338
guuuaaaccaaagucuaac

SEQ ID NO: 2202340 - RNA, 19 nt, Artificial Sequence
  Description of Artificial Sequence: Synthetic oligonucleotide
  Sense strand starting at position 3299 of SEQ ID NO: 1883578
aauagauguguaugcaaau

SEQ ID NO: 2202341 - RNA, 19 nt, Artificial Sequence
  Description of Artificial Sequence: Synthetic oligonucleotide
  Antisense strand to SEQ ID NO: 2202340
auuugcauacacaucuauu

SEQ ID NO: 2202342 - RNA, 19 nt, Artificial Sequence
  Description of Artificial Sequence: Synthetic oligonucleotide
  Sense strand starting at position 1403 of SEQ ID NO: 1883578
ggccaaaggucugugagag

SEQ ID NO: 2202343 - RNA, 19 nt, Artificial Sequence
  Description of Artificial Sequence: Synthetic oligonucleotide
  Antisense strand to SEQ ID NO: 2202342
cucucacagaccuuuggcc

SEQ ID NO: 2202344 - RNA, 19 nt, Artificial Sequence
  Description of Artificial Sequence: Synthetic oligonucleotide
  Sense strand starting at position 1155 of SEQ ID NO: 1883578
acaguuagacuuugguuua

SEQ ID NO: 2202345 - RNA, 19 nt, Artificial Sequence
  Description of Artificial Sequence: Synthetic oligonucleotide
  Antisense strand to SEQ ID NO: 2202344
uaaaccaaagucuaacugu

SEQ ID NO: 2202346 - RNA, 19 nt, Artificial Sequence
  Description of Artificial Sequence: Synthetic oligonucleotide
  Sense strand starting at position 1402 of SEQ ID NO: 1883578
uggccaaaggucugugaga

SEQ ID NO: 2202347 - RNA, 19 nt, Artificial Sequence
  Description of Artificial Sequence: Synthetic oligonucleotide
  Antisense strand to SEQ ID NO: 2202346
ucucacagaccuuuggcca

SEQ ID NO: 2202348 - RNA, 19 nt, Artificial Sequence
  Description of Artificial Sequence: Synthetic oligonucleotide
  Sense strand starting at position 921 of SEQ ID NO: 1883578
uuaucuuuguggcugagaa

SEQ ID NO: 2202349 - RNA, 19 nt, Artificial Sequence
  Description of Artificial Sequence: Synthetic oligonucleotide
  Antisense strand to SEQ ID NO: 2202348
uucucagccacaaagauaa

SEQ ID NO: 2202350 - RNA, 19 nt, Artificial Sequence
  Description of Artificial Sequence: Synthetic oligonucleotide
  Sense strand starting at position 3224 of SEQ ID NO: 1883578
ccaugugcugguuaauauc

SEQ ID NO: 2202351 - RNA, 19 nt, Artificial Sequence
  Description of Artificial Sequence: Synthetic oligonucleotide
  Antisense strand to SEQ ID NO: 2202350
gauauuaaccagcacaugg

SEQ ID NO: 2202352 - RNA, 19 nt, Artificial Sequence
  Description of Artificial Sequence: Synthetic oligonucleotide
  Sense strand starting at position 922 of SEQ ID NO: 1883578
uaucuuuguggcugagaac

SEQ ID NO: 2202353 - RNA, 19 nt, Artificial Sequence
  Description of Artificial Sequence: Synthetic oligonucleotide
  Antisense strand to SEQ ID NO: 2202352
guucucagccacaaagaua

SEQ ID NO: 2202354 - RNA, 19 nt, Artificial Sequence
  Description of Artificial Sequence: Synthetic oligonucleotide
  Sense strand starting at position 707 of SEQ ID NO: 1883578
aggccucccucaucugauu

SEQ ID NO: 2202355 - RNA, 19 nt, Artificial Sequence
  Description of Artificial Sequence: Synthetic oligonucleotide
  Antisense strand to SEQ ID NO: 2202354
aaucagaugagggaggccu

SEQ ID NO: 2202356 - RNA, 19 nt, Artificial Sequence
  Description of Artificial Sequence: Synthetic oligonucleotide
  Sense strand starting at position 80 of SEQ ID NO: 1883578
ggcugagacgcauggauca

SEQ ID NO: 2202357 - RNA, 19 nt, Artificial Sequence
  Description of Artificial Sequence: Synthetic oligonucleotide
  Antisense strand to SEQ ID NO: 2202356
ugauccaugcgucucagcc

SEQ ID NO: 2202358 - RNA, 19 nt, Artificial Sequence
  Description of Artificial Sequence: Synthetic oligonucleotide
  Sense strand starting at position 615 of SEQ ID NO: 1883578
uccuguucgcuauaugaca

SEQ ID NO: 2202359 - RNA, 19 nt, Artificial Sequence
  Description of Artificial Sequence: Synthetic oligonucleotide
  Antisense strand to SEQ ID NO: 2202358
ugucauauagcgaacagga

SEQ ID NO: 2202360 - RNA, 19 nt, Artificial Sequence
  Description of Artificial Sequence: Synthetic oligonucleotide
  Sense strand starting at position 3339 of SEQ ID NO: 1883578
ucgcuagcucaguaugaaa

SEQ ID NO: 2202361 - RNA, 19 nt, Artificial Sequence
  Description of Artificial Sequence: Synthetic oligonucleotide
  Antisense strand to SEQ ID NO: 2202360
uuucauacugagcuagcga

SEQ ID NO: 2202362 - RNA, 19 nt, Artificial Sequence
  Description of Artificial Sequence: Synthetic oligonucleotide
  Sense strand starting at position 2397 of SEQ ID NO: 1883578
gucguagauagauggguau

SEQ ID NO: 2202363 - RNA, 19 nt, Artificial Sequence
  Description of Artificial Sequence: Synthetic oligonucleotide
  Antisense strand to SEQ ID NO: 2202362
auacccaucuaucuacgac

SEQ ID NO: 2202364 - RNA, 19 nt, Artificial Sequence
  Description of Artificial Sequence: Synthetic oligonucleotide
  Sense strand starting at position 2515 of SEQ ID NO: 1883578
ggguugaguguugaccgua

SEQ ID NO: 2202365 - RNA, 19 nt, Artificial Sequence
  Description of Artificial Sequence: Synthetic oligonucleotide
  Antisense strand to SEQ ID NO: 2202364
uacggucaacacucaaccc

SEQ ID NO: 2202366 - RNA, 19 nt, Artificial Sequence
  Description of Artificial Sequence: Synthetic oligonucleotide
  Sense strand starting at position 3113 of SEQ ID NO: 1883578
ccgaguaggugagauuuca

SEQ ID NO: 2202367 - RNA, 19 nt, Artificial Sequence
  Description of Artificial Sequence: Synthetic oligonucleotide
  Antisense strand to SEQ ID NO: 2202366
ugaaaucucaccuacucgg

SEQ ID NO: 2202368 - RNA, 19 nt, Artificial Sequence
  Description of Artificial Sequence: Synthetic oligonucleotide
  Sense strand starting at position 525 of SEQ ID NO: 1883579
gcuuccuuugugucucuua

SEQ ID NO: 2202369 - RNA, 19 nt, Artificial Sequence
  Description of Artificial Sequence: Synthetic oligonucleotide
  Antisense strand to SEQ ID NO: 2202368
uaagagacacaaaggaagc

SEQ ID NO: 2202370 - RNA, 19 nt, Artificial Sequence
  Description of Artificial Sequence: Synthetic oligonucleotide
  Sense strand starting at position 2935 of SEQ ID NO: 1883579
ggcaaaugacagcacauau

SEQ ID NO: 2202371 - RNA, 19 nt, Artificial Sequence
  Description of Artificial Sequence: Synthetic oligonucleotide
  Antisense strand to SEQ ID NO: 2202370
auaugugcugucauuugcc

SEQ ID NO: 2202372 - RNA, 19 nt, Artificial Sequence
  Description of Artificial Sequence: Synthetic oligonucleotide
  Sense strand starting at position 3408 of SEQ ID NO: 1883579
augggagguaaaugugaua

SEQ ID NO: 2202373 - RNA, 19 nt, Artificial Sequence
  Description of Artificial Sequence: Synthetic oligonucleotide
  Antisense strand to SEQ ID NO: 2202372
uaucacauuuaccucccau

SEQ ID NO: 2202374 - RNA, 19 nt, Artificial Sequence
  Description of Artificial Sequence: Synthetic oligonucleotide
  Sense strand starting at position 1916 of SEQ ID NO: 1883579
agauucuccucauuugugu

SEQ ID NO: 2202375 - RNA, 19 nt, Artificial Sequence
  Description of Artificial Sequence: Synthetic oligonucleotide
  Antisense strand to SEQ ID NO: 2202374
acacaaaugaggagaaucu

SEQ ID NO: 2202376 - RNA, 19 nt, Artificial Sequence
  Description of Artificial Sequence: Synthetic oligonucleotide
  Sense strand starting at position 2992 of SEQ ID NO: 1883579
cuaguaaaccuugaaaugu

SEQ ID NO: 2202377 - RNA, 19 nt, Artificial Sequence
  Description of Artificial Sequence: Synthetic oligonucleotide
  Antisense strand to SEQ ID NO: 2202376
acauuucaagguuuacuag

SEQ ID NO: 2202378 - RNA, 19 nt, Artificial Sequence
  Description of Artificial Sequence: Synthetic oligonucleotide
  Sense strand starting at position 3881 of SEQ ID NO: 1883579
cauaauagguaagugauga

SEQ ID NO: 2202379 - RNA, 19 nt, Artificial Sequence
  Description of Artificial Sequence: Synthetic oligonucleotide
  Antisense strand to SEQ ID NO: 2202378
ucaucacuuaccuauuaug

SEQ ID NO: 2202380 - RNA, 19 nt, Artificial Sequence
  Description of Artificial Sequence: Synthetic oligonucleotide
  Sense strand starting at position 1441 of SEQ ID NO: 1883579
uguauuaaucauggaaaug

SEQ ID NO: 2202381 - RNA, 19 nt, Artificial Sequence
  Description of Artificial Sequence: Synthetic oligonucleotide
  Antisense strand to SEQ ID NO: 2202380
cauuuccaugauuaauaca

SEQ ID NO: 2202382 - RNA, 19 nt, Artificial Sequence
  Description of Artificial Sequence: Synthetic oligonucleotide
  Sense strand starting at position 136 of SEQ ID NO: 1883579
ugaaaucaaucugcagaca

SEQ ID NO: 2202383 - RNA, 19 nt, Artificial Sequence
  Description of Artificial Sequence: Synthetic oligonucleotide
  Antisense strand to SEQ ID NO: 2202382
ugucugcagauugauuuca

SEQ ID NO: 2202384 - RNA, 19 nt, Artificial Sequence
  Description of Artificial Sequence: Synthetic oligonucleotide
  Sense strand starting at position 2773 of SEQ ID NO: 1883579
agauauugucaagauuguu

SEQ ID NO: 2202385 - RNA, 19 nt, Artificial Sequence
  Description of Artificial Sequence: Synthetic oligonucleotide
  Antisense strand to SEQ ID NO: 2202384
aacaaucuugacaauaucu

SEQ ID NO: 2202386 - RNA, 19 nt, Artificial Sequence
  Description of Artificial Sequence: Synthetic oligonucleotide
  Sense strand starting at position 2817 of SEQ ID NO: 1883579
ugauguguugaacaauauc

SEQ ID NO: 2202387 - RNA, 19 nt, Artificial Sequence
  Description of Artificial Sequence: Synthetic oligonucleotide
  Antisense strand to SEQ ID NO: 2202386
gauauuguucaacacauca

SEQ ID NO: 2202388 - RNA, 19 nt, Artificial Sequence
  Description of Artificial Sequence: Synthetic oligonucleotide
  Sense strand starting at position 3882 of SEQ ID NO: 1883579
auaauagguaagugaugau

SEQ ID NO: 2202389 - RNA, 19 nt, Artificial Sequence
  Description of Artificial Sequence: Synthetic oligonucleotide
  Antisense strand to SEQ ID NO: 2202388
aucaucacuuaccuauuau

SEQ ID NO: 2202390 - RNA, 19 nt, Artificial Sequence
  Description of Artificial Sequence: Synthetic oligonucleotide
  Sense strand starting at position 3912 of SEQ ID NO: 1883579
ucccuuaguguauaaauaa

SEQ ID NO: 2202391 - RNA, 19 nt, Artificial Sequence
  Description of Artificial Sequence: Synthetic oligonucleotide
  Antisense strand to SEQ ID NO: 2202390
uuauuuauacacuaaggga

SEQ ID NO: 2202392 - RNA, 19 nt, Artificial Sequence
  Description of Artificial Sequence: Synthetic oligonucleotide
  Sense strand starting at position 2991 of SEQ ID NO: 1883579
ucuaguaaaccuugaaaug

SEQ ID NO: 2202393 - RNA, 19 nt, Artificial Sequence
  Description of Artificial Sequence: Synthetic oligonucleotide
  Antisense strand to SEQ ID NO: 2202392
cauuucaagguuuacuaga

SEQ ID NO: 2202394 - RNA, 19 nt, Artificial Sequence
  Description of Artificial Sequence: Synthetic oligonucleotide
  Sense strand starting at position 3237 of SEQ ID NO: 1883579
uuccuuugagagcaauauc

SEQ ID NO: 2202395 - RNA, 19 nt, Artificial Sequence
  Description of Artificial Sequence: Synthetic oligonucleotide
  Antisense strand to SEQ ID NO: 2202394
gauauugcucucaaaggaa

SEQ ID NO: 2202396 - RNA, 19 nt, Artificial Sequence
  Description of Artificial Sequence: Synthetic oligonucleotide
  Sense strand starting at position 3429 of SEQ ID NO: 1883579
auauaugggcuguacaauu

SEQ ID NO: 2202397 - RNA, 19 nt, Artificial Sequence
  Description of Artificial Sequence: Synthetic oligonucleotide
  Antisense strand to SEQ ID NO: 2202396
aauuguacagcccauauau

SEQ ID NO: 2202398 - RNA, 19 nt, Artificial Sequence
  Description of Artificial Sequence: Synthetic oligonucleotide
  Sense strand starting at position 1383 of SEQ ID NO: 1883579
ucaugucauggauauagca

SEQ ID NO: 2202399 - RNA, 19 nt, Artificial Sequence
  Description of Artificial Sequence: Synthetic oligonucleotide
  Antisense strand to SEQ ID NO: 2202398
ugcuauauccaugacauga

SEQ ID NO: 2202400 - RNA, 19 nt, Artificial Sequence
  Description of Artificial Sequence: Synthetic oligonucleotide
  Sense strand starting at position 1282 of SEQ ID NO: 1883579
acagauccaucagcaugau

SEQ ID NO: 2202401 - RNA, 19 nt, Artificial Sequence
  Description of Artificial Sequence: Synthetic oligonucleotide
  Antisense strand to SEQ ID NO: 2202400
aucaugcugauggaucugu

SEQ ID NO: 2202402 - RNA, 19 nt, Artificial Sequence
  Description of Artificial Sequence: Synthetic oligonucleotide
  Sense strand starting at position 3878 of SEQ ID NO: 1883579
cugcauaauagguaaguga

SEQ ID NO: 2202403 - RNA, 19 nt, Artificial Sequence
  Description of Artificial Sequence: Synthetic oligonucleotide
  Antisense strand to SEQ ID NO: 2202402
ucacuuaccuauuaugcag

SEQ ID NO: 2202404 - RNA, 19 nt, Artificial Sequence
  Description of Artificial Sequence: Synthetic oligonucleotide
  Sense strand starting at position 2157 of SEQ ID NO: 1883579
ggaacacacuaguuucuau

SEQ ID NO: 2202405 - RNA, 19 nt, Artificial Sequence
  Description of Artificial Sequence: Synthetic oligonucleotide
  Antisense strand to SEQ ID NO: 2202404
auagaaacuaguguguucc

SEQ ID NO: 2202406 - RNA, 19 nt, Artificial Sequence
  Description of Artificial Sequence: Synthetic oligonucleotide
  Sense strand starting at position 1414 of SEQ ID NO: 1883579
ggcagaauucaugaacgug

SEQ ID NO: 2202407 - RNA, 19 nt, Artificial Sequence
  Description of Artificial Sequence: Synthetic oligonucleotide
  Antisense strand to SEQ ID NO: 2202406
cacguucaugaauucugcc

SEQ ID NO: 2202408 - RNA, 19 nt, Artificial Sequence
  Description of Artificial Sequence: Synthetic oligonucleotide
  Sense strand starting at position 2811 of SEQ ID NO: 1883579
aauuaaugauguguugaac

SEQ ID NO: 2202409 - RNA, 19 nt, Artificial Sequence
  Description of Artificial Sequence: Synthetic oligonucleotide
  Antisense strand to SEQ ID NO: 2202408
guucaacacaucauuaauu

SEQ ID NO: 2202410 - RNA, 19 nt, Artificial Sequence
  Description of Artificial Sequence: Synthetic oligonucleotide
  Sense strand starting at position 2820 of SEQ ID NO: 1883579
uguguugaacaauaucagu

SEQ ID NO: 2202411 - RNA, 19 nt, Artificial Sequence
  Description of Artificial Sequence: Synthetic oligonucleotide
  Antisense strand to SEQ ID NO: 2202410
acugauauuguucaacaca

SEQ ID NO: 2202412 - RNA, 19 nt, Artificial Sequence
  Description of Artificial Sequence: Synthetic oligonucleotide
  Sense strand starting at position 328 of SEQ ID NO: 1883579
acgguuuauagugauuaau

SEQ ID NO: 2202413 - RNA, 19 nt, Artificial Sequence
  Description of Artificial Sequence: Synthetic oligonucleotide
  Antisense strand to SEQ ID NO: 2202412
auuaaucacuauaaaccgu

SEQ ID NO: 2202414 - RNA, 19 nt, Artificial Sequence
  Description of Artificial Sequence: Synthetic oligonucleotide
  Sense strand starting at position 1846 of SEQ ID NO: 1883579
agugguugccaugaaacac

SEQ ID NO: 2202415 - RNA, 19 nt, Artificial Sequence
  Description of Artificial Sequence: Synthetic oligonucleotide
  Antisense strand to SEQ ID NO: 2202414
guguuucauggcaaccacu

SEQ ID NO: 2202416 - RNA, 19 nt, Artificial Sequence
  Description of Artificial Sequence: Synthetic oligonucleotide
  Sense strand starting at position 2975 of SEQ ID NO: 1883579
ugauaugacuuagucaucu

SEQ ID NO: 2202417 - RNA, 19 nt, Artificial Sequence
  Description of Artificial Sequence: Synthetic oligonucleotide
  Antisense strand to SEQ ID NO: 2202416
agaugacuaagucauauca

SEQ ID NO: 2202418 - RNA, 19 nt, Artificial Sequence
  Description of Artificial Sequence: Synthetic oligonucleotide
  Sense strand starting at position 878 of SEQ ID NO: 1883579
ugagaacgauuauuguuua

SEQ ID NO: 2202419 - RNA, 19 nt, Artificial Sequence
  Description of Artificial Sequence: Synthetic oligonucleotide
  Antisense strand to SEQ ID NO: 2202418
uaaacaauaaucguucuca

SEQ ID NO: 2202420 - RNA, 19 nt, Artificial Sequence
  Description of Artificial Sequence: Synthetic oligonucleotide
  Sense strand starting at position 3427 of SEQ ID NO: 1883579
acauauaugggcuguacaa

SEQ ID NO: 2202421 - RNA, 19 nt, Artificial Sequence
  Description of Artificial Sequence: Synthetic oligonucleotide
  Antisense strand to SEQ ID NO: 2202420
uuguacagcccauauaugu

SEQ ID NO: 2202422 - RNA, 19 nt, Artificial Sequence
  Description of Artificial Sequence: Synthetic oligonucleotide
  Sense strand starting at position 1033 of SEQ ID NO: 1883579
agguaacugaaucguauaa

SEQ ID NO: 2202423 - RNA, 19 nt, Artificial Sequence
  Description of Artificial Sequence: Synthetic oligonucleotide
  Antisense strand to SEQ ID NO: 2202422
uuauacgauucaguuaccu

SEQ ID NO: 2202424 - RNA, 19 nt, Artificial Sequence
  Description of Artificial Sequence: Synthetic oligonucleotide
  Sense strand starting at position 3648 of SEQ ID NO: 1883579
uccagucacgauggaaauu

SEQ ID NO: 2202425 - RNA, 19 nt, Artificial Sequence
  Description of Artificial Sequence: Synthetic oligonucleotide
  Antisense strand to SEQ ID NO: 2202424
aauuuccaucgugacugga

SEQ ID NO: 2202426 - RNA, 19 nt, Artificial Sequence
  Description of Artificial Sequence: Synthetic oligonucleotide
  Sense strand starting at position 1072 of SEQ ID NO: 1883579
aauaaucaggcuuggaguu

SEQ ID NO: 2202427 - RNA, 19 nt, Artificial Sequence
  Description of Artificial Sequence: Synthetic oligonucleotide
  Antisense strand to SEQ ID NO: 2202426
aacuccaagccugauuauu

SEQ ID NO: 2202428 - RNA, 19 nt, Artificial Sequence
  Description of Artificial Sequence: Synthetic oligonucleotide
  Sense strand starting at position 3354 of SEQ ID NO: 1883579
acuaguugauucuuaucua

SEQ ID NO: 2202429 - RNA, 19 nt, Artificial Sequence
  Description of Artificial Sequence: Synthetic oligonucleotide
  Antisense strand to SEQ ID NO: 2202428
uagauaagaaucaacuagu

SEQ ID NO: 2202430 - RNA, 19 nt, Artificial Sequence
  Description of Artificial Sequence: Synthetic oligonucleotide
  Sense strand starting at position 1417 of SEQ ID NO: 1883579
agaauucaugaacguguga

SEQ ID NO: 2202431 - RNA, 19 nt, Artificial Sequence
  Description of Artificial Sequence: Synthetic oligonucleotide
  Antisense strand to SEQ ID NO: 2202430
ucacacguucaugaauucu

SEQ ID NO: 2202432 - RNA, 19 nt, Artificial Sequence
  Description of Artificial Sequence: Synthetic oligonucleotide
  Sense strand starting at position 2310 of SEQ ID NO: 1883579
uuagaaaugucucuguaau

SEQ ID NO: 2202433 - RNA, 19 nt, Artificial Sequence
  Description of Artificial Sequence: Synthetic oligonucleotide
  Antisense strand to SEQ ID NO: 2202432
auuacagagacauuucuaa

SEQ ID NO: 2202434 - RNA, 19 nt, Artificial Sequence
  Description of Artificial Sequence: Synthetic oligonucleotide
  Sense strand starting at position 2979 of SEQ ID NO: 1883579
augacuuagucaucuagua

SEQ ID NO: 2202435 - RNA, 19 nt, Artificial Sequence
  Description of Artificial Sequence: Synthetic oligonucleotide
  Antisense strand to SEQ ID NO: 2202434
uacuagaugacuaagucau

SEQ ID NO: 2202436 - RNA, 19 nt, Artificial Sequence
  Description of Artificial Sequence: Synthetic oligonucleotide
  Sense strand starting at position 3229 of SEQ ID NO: 1883579
acuuauuguuccuuugaga

SEQ ID NO: 2202437 - RNA, 19 nt, Artificial Sequence
  Description of Artificial Sequence: Synthetic oligonucleotide
  Antisense strand to SEQ ID NO: 2202436
ucucaaaggaacaauaagu

SEQ ID NO: 2202438 - RNA, 19 nt, Artificial Sequence
  Description of Artificial Sequence: Synthetic oligonucleotide
  Sense strand starting at position 3192 of SEQ ID NO: 1883579
ugaaauagguaagauuugu

SEQ ID NO: 2202439 - RNA, 19 nt, Artificial Sequence
  Description of Artificial Sequence: Synthetic oligonucleotide
  Antisense strand to SEQ ID NO: 2202438
acaaaucuuaccuauuuca

SEQ ID NO: 2202440 - RNA, 19 nt, Artificial Sequence
  Description of Artificial Sequence: Synthetic oligonucleotide
  Sense strand starting at position 11 of SEQ ID NO: 1883579
gaaggaaguuugucagguu

SEQ ID NO: 2202441 - RNA, 19 nt, Artificial Sequence
  Description of Artificial Sequence: Synthetic oligonucleotide
  Antisense strand to SEQ ID NO: 2202440
aaccugacaaacuuccuuc

SEQ ID NO: 2202442 - RNA, 19 nt, Artificial Sequence
  Description of Artificial Sequence: Synthetic oligonucleotide
  Sense strand starting at position 330 of SEQ ID NO: 1883579
gguuuauagugauuaauuc

SEQ ID NO: 2202443 - RNA, 19 nt, Artificial Sequence
  Description of Artificial Sequence: Synthetic oligonucleotide
  Antisense strand to SEQ ID NO: 2202442
gaauuaaucacuauaaacc

SEQ ID NO: 2202444 - RNA, 19 nt, Artificial Sequence
  Description of Artificial Sequence: Synthetic oligonucleotide
  Sense strand starting at position 3070 of SEQ ID NO: 1883579
uguaucuuccauggacuca

SEQ ID NO: 2202445 - RNA, 19 nt, Artificial Sequence
  Description of Artificial Sequence: Synthetic oligonucleotide
  Antisense strand to SEQ ID NO: 2202444
ugaguccauggaagauaca

SEQ ID NO: 2202446 - RNA, 19 nt, Artificial Sequence
  Description of Artificial Sequence: Synthetic oligonucleotide
  Sense strand starting at position 3036 of SEQ ID NO: 1883579
auagguuugcagcacugau

SEQ ID NO: 2202447 - RNA, 19 nt, Artificial Sequence
  Description of Artificial Sequence: Synthetic oligonucleotide
  Antisense strand to SEQ ID NO: 2202446
aucagugcugcaaaccuau

SEQ ID NO: 2202448 - RNA, 19 nt, Artificial Sequence
  Description of Artificial Sequence: Synthetic oligonucleotide
  Sense strand starting at position 86 of SEQ ID NO: 1883580
gcauuuacucucugaaagc

SEQ ID NO: 2202449 - RNA, 19 nt, Artificial Sequence
  Description of Artificial Sequence: Synthetic oligonucleotide
  Antisense strand to SEQ ID NO: 2202448
gcuuucagagaguaaaugc

SEQ ID NO: 2202450 - RNA, 19 nt, Artificial Sequence
  Description of Artificial Sequence: Synthetic oligonucleotide
  Sense strand starting at position 2522 of SEQ ID NO: 1883580
acuuauuucugucuguuga

SEQ ID NO: 2202451 - RNA, 19 nt, Artificial Sequence
  Description of Artificial Sequence: Synthetic oligonucleotide
  Antisense strand to SEQ ID NO: 2202450
ucaacagacagaaauaagu

SEQ ID NO: 2202452 - RNA, 19 nt, Artificial Sequence
  Description of Artificial Sequence: Synthetic oligonucleotide
  Sense strand starting at position 1094 of SEQ ID NO: 1883580
aguugaguccaccaaauua

SEQ ID NO: 2202453 - RNA, 19 nt, Artificial Sequence
  Description of Artificial Sequence: Synthetic oligonucleotide
  Antisense strand to SEQ ID NO: 2202452
uaauuugguggacucaacu

SEQ ID NO: 2202454 - RNA, 19 nt, Artificial Sequence
  Description of Artificial Sequence: Synthetic oligonucleotide
  Sense strand starting at position 3308 of SEQ ID NO: 1883580
aacuguagacauugauuag

SEQ ID NO: 2202455 - RNA, 19 nt, Artificial Sequence
  Description of Artificial Sequence: Synthetic oligonucleotide
  Antisense strand to SEQ ID NO: 2202454
cuaaucaaugucuacaguu

SEQ ID NO: 2202456 - RNA, 19 nt, Artificial Sequence
  Description of Artificial Sequence: Synthetic oligonucleotide
  Sense strand starting at position 2623 of SEQ ID NO: 1883580
uaauuagaagcagauguuu

SEQ ID NO: 2202457 - RNA, 19 nt, Artificial Sequence
  Description of Artificial Sequence: Synthetic oligonucleotide
  Antisense strand to SEQ ID NO: 2202456
aaacaucugcuucuaauua

SEQ ID NO: 2202458 - RNA, 19 nt, Artificial Sequence
  Description of Artificial Sequence: Synthetic oligonucleotide
  Sense strand starting at position 2520 of SEQ ID NO: 1883580
ggacuuauuucugucuguu

SEQ ID NO: 2202459 - RNA, 19 nt, Artificial Sequence
  Description of Artificial Sequence: Synthetic oligonucleotide
  Antisense strand to SEQ ID NO: 2202458
aacagacagaaauaagucc

SEQ ID NO: 2202460 - RNA, 19 nt, Artificial Sequence
  Description of Artificial Sequence: Synthetic oligonucleotide
  Sense strand starting at position 1091 of SEQ ID NO: 1883580
uugaguugaguccaccaaa

SEQ ID NO: 2202461 - RNA, 19 nt, Artificial Sequence
  Description of Artificial Sequence: Synthetic oligonucleotide
  Antisense strand to SEQ ID NO: 2202460
uuugguggacucaacucaa

SEQ ID NO: 2202462 - RNA, 19 nt, Artificial Sequence
  Description of Artificial Sequence: Synthetic oligonucleotide
  Sense strand starting at position 1678 of SEQ ID NO: 1883580
cuucaugaugcguugugua

SEQ ID NO: 2202463 - RNA, 19 nt, Artificial Sequence
  Description of Artificial Sequence: Synthetic oligonucleotide
  Antisense strand to SEQ ID NO: 2202462
uacacaacgcaucaugaag

SEQ ID NO: 2202464 - RNA, 19 nt, Artificial Sequence
  Description of Artificial Sequence: Synthetic oligonucleotide
  Sense strand starting at position 286 of SEQ ID NO: 1883580
ggagcacuaaucuaguaug

SEQ ID NO: 2202465 - RNA, 19 nt, Artificial Sequence
  Description of Artificial Sequence: Synthetic oligonucleotide
  Antisense strand to SEQ ID NO: 2202464
cauacuagauuagugcucc

SEQ ID NO: 2202466 - RNA, 19 nt, Artificial Sequence
  Description of Artificial Sequence: Synthetic oligonucleotide
  Sense strand starting at position 3896 of SEQ ID NO: 1883580
ugccauaaagggugagaaa

SEQ ID NO: 2202467 - RNA, 19 nt, Artificial Sequence
  Description of Artificial Sequence: Synthetic oligonucleotide
  Antisense strand to SEQ ID NO: 2202466
uuucucacccuuuauggca

SEQ ID NO: 2202468 - RNA, 19 nt, Artificial Sequence
  Description of Artificial Sequence: Synthetic oligonucleotide
  Sense strand starting at position 1696 of SEQ ID NO: 1883580
acgcuaugccguccuaaua

SEQ ID NO: 2202469 - RNA, 19 nt, Artificial Sequence
  Description of Artificial Sequence: Synthetic oligonucleotide
  Antisense strand to SEQ ID NO: 2202468
uauuaggacggcauagcgu

SEQ ID NO: 2202470 - RNA, 19 nt, Artificial Sequence
  Description of Artificial Sequence: Synthetic oligonucleotide
  Sense strand starting at position 705 of SEQ ID NO: 1883580
ccuaaaugagcuuaagcaa

SEQ ID NO: 2202471 - RNA, 19 nt, Artificial Sequence
  Description of Artificial Sequence: Synthetic oligonucleotide
  Antisense strand to SEQ ID NO: 2202470
uugcuuaagcucauuuagg

SEQ ID NO: 2202472 - RNA, 19 nt, Artificial Sequence
  Description of Artificial Sequence: Synthetic oligonucleotide
  Sense strand starting at position 459 of SEQ ID NO: 1883580
guagucuuacaauaaacuu

SEQ ID NO: 2202473 - RNA, 19 nt, Artificial Sequence
  Description of Artificial Sequence: Synthetic oligonucleotide
  Antisense strand to SEQ ID NO: 2202472
aaguuuauuguaagacuac

SEQ ID NO: 2202474 - RNA, 19 nt, Artificial Sequence
  Description of Artificial Sequence: Synthetic oligonucleotide
  Sense strand starting at position 1811 of SEQ ID NO: 1883580
ugagguuaccuagggacau

SEQ ID NO: 2202475 - RNA, 19 nt, Artificial Sequence
  Description of Artificial Sequence: Synthetic oligonucleotide
  Antisense strand to SEQ ID NO: 2202474
augucccuagguaaccuca

SEQ ID NO: 2202476 - RNA, 19 nt, Artificial Sequence
  Description of Artificial Sequence: Synthetic oligonucleotide
  Sense strand starting at position 1261 of SEQ ID NO: 1883580
caaauagggugagcucaaa

SEQ ID NO: 2202477 - RNA, 19 nt, Artificial Sequence
  Description of Artificial Sequence: Synthetic oligonucleotide
  Antisense strand to SEQ ID NO: 2202476
uuugagcucacccuauuug

SEQ ID NO: 2202478 - RNA, 19 nt, Artificial Sequence
  Description of Artificial Sequence: Synthetic oligonucleotide
  Sense strand starting at position 2818 of SEQ ID NO: 1883580
cugugugaauaauuggaaa

SEQ ID NO: 2202479 - RNA, 19 nt, Artificial Sequence
  Description of Artificial Sequence: Synthetic oligonucleotide
  Antisense strand to SEQ ID NO: 2202478
uuuccaauuauucacacag

SEQ ID NO: 2202480 - RNA, 19 nt, Artificial Sequence
  Description of Artificial Sequence: Synthetic oligonucleotide
  Sense strand starting at position 2523 of SEQ ID NO: 1883580
cuuauuucugucuguugau

SEQ ID NO: 2202481 - RNA, 19 nt, Artificial Sequence
  Description of Artificial Sequence: Synthetic oligonucleotide
  Antisense strand to SEQ ID NO: 2202480
aucaacagacagaaauaag

SEQ ID NO: 2202482 - RNA, 19 nt, Artificial Sequence
  Description of Artificial Sequence: Synthetic oligonucleotide
  Sense strand starting at position 2820 of SEQ ID NO: 1883580
gugugaauaauuggaaauu

SEQ ID NO: 2202483 - RNA, 19 nt, Artificial Sequence
  Description of Artificial Sequence: Synthetic oligonucleotide
  Antisense strand to SEQ ID NO: 2202482
aauuuccaauuauucacac

SEQ ID NO: 2202484 - RNA, 19 nt, Artificial Sequence
  Description of Artificial Sequence: Synthetic oligonucleotide
  Sense strand starting at position 2826 of SEQ ID NO: 1883580
auaauuggaaauuguguga

SEQ ID NO: 2202485 - RNA, 19 nt, Artificial Sequence
  Description of Artificial Sequence: Synthetic oligonucleotide
  Antisense strand to SEQ ID NO: 2202484
ucacacaauuuccaauuau

SEQ ID NO: 2202486 - RNA, 19 nt, Artificial Sequence
  Description of Artificial Sequence: Synthetic oligonucleotide
  Sense strand starting at position 597 of SEQ ID NO: 1883580
uggugccuacucuaaggaa

SEQ ID NO: 2202487 - RNA, 19 nt, Artificial Sequence
  Description of Artificial Sequence: Synthetic oligonucleotide
  Antisense strand to SEQ ID NO: 2202486
uuccuuagaguaggcacca

SEQ ID NO: 2202488 - RNA, 19 nt, Artificial Sequence
  Description of Artificial Sequence: Synthetic oligonucleotide
  Sense strand starting at position 1695 of SEQ ID NO: 1883580
uacgcuaugccguccuaau

SEQ ID NO: 2202489 - RNA, 19 nt, Artificial Sequence
  Description of Artificial Sequence: Synthetic oligonucleotide
  Antisense strand to SEQ ID NO: 2202488
auuaggacggcauagcgua

SEQ ID NO: 2202490 - RNA, 19 nt, Artificial Sequence
  Description of Artificial Sequence: Synthetic oligonucleotide
  Sense strand starting at position 1048 of SEQ ID NO: 1883580
ucaacagacucucugaagu

SEQ ID NO: 2202491 - RNA, 19 nt, Artificial Sequence
  Description of Artificial Sequence: Synthetic oligonucleotide
  Antisense strand to SEQ ID NO: 2202490
acuucagagagucuguuga

SEQ ID NO: 2202492 - RNA, 19 nt, Artificial Sequence
  Description of Artificial Sequence: Synthetic oligonucleotide
  Sense strand starting at position 794 of SEQ ID NO: 1883580
gguccuuaagugcaaggaa

SEQ ID NO: 2202493 - RNA, 19 nt, Artificial Sequence
  Description of Artificial Sequence: Synthetic oligonucleotide
  Antisense strand to SEQ ID NO: 2202492
uuccuugcacuuaaggacc

SEQ ID NO: 2202494 - RNA, 19 nt, Artificial Sequence
  Description of Artificial Sequence: Synthetic oligonucleotide
  Sense strand starting at position 3311 of SEQ ID NO: 1883580
uguagacauugauuaguga

SEQ ID NO: 2202495 - RNA, 19 nt, Artificial Sequence
  Description of Artificial Sequence: Synthetic oligonucleotide
  Antisense strand to SEQ ID NO: 2202494
ucacuaaucaaugucuaca

SEQ ID NO: 2202496 - RNA, 19 nt, Artificial Sequence
  Description of Artificial Sequence: Synthetic oligonucleotide
  Sense strand starting at position 592 of SEQ ID NO: 1883580
agauauggugccuacucua

SEQ ID NO: 2202497 - RNA, 19 nt, Artificial Sequence
  Description of Artificial Sequence: Synthetic oligonucleotide
  Antisense strand to SEQ ID NO: 2202496
uagaguaggcaccauaucu

SEQ ID NO: 2202498 - RNA, 19 nt, Artificial Sequence
  Description of Artificial Sequence: Synthetic oligonucleotide
  Sense strand starting at position 1624 of SEQ ID NO: 1883580
aaagcuucuggugaaagca

SEQ ID NO: 2202499 - RNA, 19 nt, Artificial Sequence
  Description of Artificial Sequence: Synthetic oligonucleotide
  Antisense strand to SEQ ID NO: 2202498
ugcuuucaccagaagcuuu

SEQ ID NO: 2202500 - RNA, 19 nt, Artificial Sequence
  Description of Artificial Sequence: Synthetic oligonucleotide
  Sense strand starting at position 2872 of SEQ ID NO: 1883580
gugguauauuuguugcuaa

SEQ ID NO: 2202501 - RNA, 19 nt, Artificial Sequence
  Description of Artificial Sequence: Synthetic oligonucleotide
  Antisense strand to SEQ ID NO: 2202500
uuagcaacaaauauaccac

SEQ ID NO: 2202502 - RNA, 19 nt, Artificial Sequence
  Description of Artificial Sequence: Synthetic oligonucleotide
  Sense strand starting at position 2871 of SEQ ID NO: 1883580
agugguauauuuguugcua

SEQ ID NO: 2202503 - RNA, 19 nt, Artificial Sequence
  Description of Artificial Sequence: Synthetic oligonucleotide
  Antisense strand to SEQ ID NO: 2202502
uagcaacaaauauaccacu

SEQ ID NO: 2202504 - RNA, 19 nt, Artificial Sequence
  Description of Artificial Sequence: Synthetic oligonucleotide
  Sense strand starting at position 1872 of SEQ ID NO: 1883580
uugcucugauuaucaagaa

SEQ ID NO: 2202505 - RNA, 19 nt, Artificial Sequence
  Description of Artificial Sequence: Synthetic oligonucleotide
  Antisense strand to SEQ ID NO: 2202504
uucuugauaaucagagcaa

SEQ ID NO: 2202506 - RNA, 19 nt, Artificial Sequence
  Description of Artificial Sequence: Synthetic oligonucleotide
  Sense strand starting at position 1165 of SEQ ID NO: 1883580
uaggaaagccaguaucugu

SEQ ID NO: 2202507 - RNA, 19 nt, Artificial Sequence
  Description of Artificial Sequence: Synthetic oligonucleotide
  Antisense strand to SEQ ID NO: 2202506
acagauacuggcuuuccua

SEQ ID NO: 2202508 - RNA, 19 nt, Artificial Sequence
  Description of Artificial Sequence: Synthetic oligonucleotide
  Sense strand starting at position 1870 of SEQ ID NO: 1883580
gguugcucugauuaucaag

SEQ ID NO: 2202509 - RNA, 19 nt, Artificial Sequence
  Description of Artificial Sequence: Synthetic oligonucleotide
  Antisense strand to SEQ ID NO: 2202508
cuugauaaucagagcaacc

SEQ ID NO: 2202510 - RNA, 19 nt, Artificial Sequence
  Description of Artificial Sequence: Synthetic oligonucleotide
  Sense strand starting at position 3042 of SEQ ID NO: 1883580
aagagauguuuauuguacu

SEQ ID NO: 2202511 - RNA, 19 nt, Artificial Sequence
  Description of Artificial Sequence: Synthetic oligonucleotide
  Antisense strand to SEQ ID NO: 2202510
aguacaauaaacaucucuu

SEQ ID NO: 2202512 - RNA, 19 nt, Artificial Sequence
  Description of Artificial Sequence: Synthetic oligonucleotide
  Sense strand starting at position 3786 of SEQ ID NO: 1883580
uggcaauaccuuuauguac

SEQ ID NO: 2202513 - RNA, 19 nt, Artificial Sequence
  Description of Artificial Sequence: Synthetic oligonucleotide
  Antisense strand to SEQ ID NO: 2202512
guacauaaagguauugcca

SEQ ID NO: 2202514 - RNA, 19 nt, Artificial Sequence
  Description of Artificial Sequence: Synthetic oligonucleotide
  Sense strand starting at position 1442 of SEQ ID NO: 1883580
agcuguuaucaaugaagau

SEQ ID NO: 2202515 - RNA, 19 nt, Artificial Sequence
  Description of Artificial Sequence: Synthetic oligonucleotide
  Antisense strand to SEQ ID NO: 2202514
aucuucauugauaacagcu

SEQ ID NO: 2202516 - RNA, 19 nt, Artificial Sequence
  Description of Artificial Sequence: Synthetic oligonucleotide
  Sense strand starting at position 3350 of SEQ ID NO: 1883580
uauaaagaugcaugacugu

SEQ ID NO: 2202517 - RNA, 19 nt, Artificial Sequence
  Description of Artificial Sequence: Synthetic oligonucleotide
  Antisense strand to SEQ ID NO: 2202516
acagucaugcaucuuuaua

SEQ ID NO: 2202518 - RNA, 19 nt, Artificial Sequence
  Description of Artificial Sequence: Synthetic oligonucleotide
  Sense strand starting at position 3792 of SEQ ID NO: 1883580
uaccuuuauguacgaggaa

SEQ ID NO: 2202519 - RNA, 19 nt, Artificial Sequence
  Description of Artificial Sequence: Synthetic oligonucleotide
  Antisense strand to SEQ ID NO: 2202518
uuccucguacauaaaggua

SEQ ID NO: 2202520 - RNA, 19 nt, Artificial Sequence
  Description of Artificial Sequence: Synthetic oligonucleotide
  Sense strand starting at position 3393 of SEQ ID NO: 1883580
acugauuacgaguaaugcu

SEQ ID NO: 2202521 - RNA, 19 nt, Artificial Sequence
  Description of Artificial Sequence: Synthetic oligonucleotide
  Antisense strand to SEQ ID NO: 2202520
agcauuacucguaaucagu

SEQ ID NO: 2202522 - RNA, 19 nt, Artificial Sequence
  Description of Artificial Sequence: Synthetic oligonucleotide
  Sense strand starting at position 1247 of SEQ ID NO: 1883580
acaaauggccacugcaaau

SEQ ID NO: 2202523 - RNA, 19 nt, Artificial Sequence
  Description of Artificial Sequence: Synthetic oligonucleotide
  Antisense strand to SEQ ID NO: 2202522
auuugcaguggccauuugu

SEQ ID NO: 2202524 - RNA, 19 nt, Artificial Sequence
  Description of Artificial Sequence: Synthetic oligonucleotide
  Sense strand starting at position 2725 of SEQ ID NO: 1883580
guuaauuaagguggcaaga

SEQ ID NO: 2202525 - RNA, 19 nt, Artificial Sequence
  Description of Artificial Sequence: Synthetic oligonucleotide
  Antisense strand to SEQ ID NO: 2202524
ucuugccaccuuaauuaac

SEQ ID NO: 2202526 - RNA, 19 nt, Artificial Sequence
  Description of Artificial Sequence: Synthetic oligonucleotide
  Sense strand starting at position 1451 of SEQ ID NO: 1883580
caaugaagauuggaaggaa

SEQ ID NO: 2202527 - RNA, 19 nt, Artificial Sequence
  Description of Artificial Sequence: Synthetic oligonucleotide
  Antisense strand to SEQ ID NO: 2202526
uuccuuccaaucuucauug

SEQ ID NO: 2202528 - RNA, 19 nt, Artificial Sequence
  Description of Artificial Sequence: Synthetic oligonucleotide
  Sense strand starting at position 403 of SEQ ID NO: 1883581
ggaucaaagcaucauguua

SEQ ID NO: 2202529 - RNA, 19 nt, Artificial Sequence
  Description of Artificial Sequence: Synthetic oligonucleotide
  Antisense strand to SEQ ID NO: 2202528
uaacaugaugcuuugaucc

SEQ ID NO: 2202530 - RNA, 19 nt, Artificial Sequence
  Description of Artificial Sequence: Synthetic oligonucleotide
  Sense strand starting at position 757 of SEQ ID NO: 1883581
ugaggcuuccuaggagaaa

SEQ ID NO: 2202531 - RNA, 19 nt, Artificial Sequence
  Description of Artificial Sequence: Synthetic oligonucleotide
  Antisense strand to SEQ ID NO: 2202530
uuucuccuaggaagccuca

SEQ ID NO: 2202532 - RNA, 19 nt, Artificial Sequence
  Description of Artificial Sequence: Synthetic oligonucleotide
  Sense strand starting at position 95 of SEQ ID NO: 1883581
uaguuagacgguuaggaca

SEQ ID NO: 2202533 - RNA, 19 nt, Artificial Sequence
  Description of Artificial Sequence: Synthetic oligonucleotide
  Antisense strand to SEQ ID NO: 2202532
uguccuaaccgucuaacua

SEQ ID NO: 2202534 - RNA, 19 nt, Artificial Sequence
  Description of Artificial Sequence: Synthetic oligonucleotide
  Sense strand starting at position 1167 of SEQ ID NO: 1883581
ggugucaucauggaucuga

SEQ ID NO: 2202535 - RNA, 19 nt, Artificial Sequence
  Description of Artificial Sequence: Synthetic oligonucleotide
  Antisense strand to SEQ ID NO: 2202534
ucagauccaugaugacacc

SEQ ID NO: 2202536 - RNA, 19 nt, Artificial Sequence
  Description of Artificial Sequence: Synthetic oligonucleotide
  Sense strand starting at position 3119 of SEQ ID NO: 1883581
agagaaaggucagucccau

SEQ ID NO: 2202537 - RNA, 19 nt, Artificial Sequence
  Description of Artificial Sequence: Synthetic oligonucleotide
  Antisense strand to SEQ ID NO: 2202536
augggacugaccuuucucu

SEQ ID NO: 2202538 - RNA, 19 nt, Artificial Sequence
  Description of Artificial Sequence: Synthetic oligonucleotide
  Sense strand starting at position 3101 of SEQ ID NO: 1883581
gucaaugcuggacacuuaa

SEQ ID NO: 2202539 - RNA, 19 nt, Artificial Sequence
  Description of Artificial Sequence: Synthetic oligonucleotide
  Antisense strand to SEQ ID NO: 2202538
uuaaguguccagcauugac

SEQ ID NO: 2202540 - RNA, 19 nt, Artificial Sequence
  Description of Artificial Sequence: Synthetic oligonucleotide
  Sense strand starting at position 1570 of SEQ ID NO: 1883581
gugggaaguguuggaaaga

SEQ ID NO: 2202541 - RNA, 19 nt, Artificial Sequence
  Description of Artificial Sequence: Synthetic oligonucleotide
  Antisense strand to SEQ ID NO: 2202540
ucuuuccaacacuucccac

SEQ ID NO: 2202542 - RNA, 19 nt, Artificial Sequence
  Description of Artificial Sequence: Synthetic oligonucleotide
  Sense strand starting at position 2207 of SEQ ID NO: 1883581
gucccugucagugagagau

SEQ ID NO: 2202543 - RNA, 19 nt, Artificial Sequence
  Description of Artificial Sequence: Synthetic oligonucleotide
  Antisense strand to SEQ ID NO: 2202542
aucucucacugacagggac

SEQ ID NO: 2202544 - RNA, 19 nt, Artificial Sequence
  Description of Artificial Sequence: Synthetic oligonucleotide
  Sense strand starting at position 190 of SEQ ID NO: 1883581
aagggucaugagugucaga

SEQ ID NO: 2202545 - RNA, 19 nt, Artificial Sequence
  Description of Artificial Sequence: Synthetic oligonucleotide
  Antisense strand to SEQ ID NO: 2202544
ucugacacucaugacccuu

SEQ ID NO: 2202546 - RNA, 19 nt, Artificial Sequence
  Description of Artificial Sequence: Synthetic oligonucleotide
  Sense strand starting at position 3099 of SEQ ID NO: 1883581
cugucaaugcuggacacuu

SEQ ID NO: 2202547 - RNA, 19 nt, Artificial Sequence
  Description of Artificial Sequence: Synthetic oligonucleotide
  Antisense strand to SEQ ID NO: 2202546
aaguguccagcauugacag

SEQ ID NO: 2202548 - RNA, 19 nt, Artificial Sequence
  Description of Artificial Sequence: Synthetic oligonucleotide
  Sense strand starting at position 803 of SEQ ID NO: 1883581
guuagaaaucacugcggga

SEQ ID NO: 2202549 - RNA, 19 nt, Artificial Sequence
  Description of Artificial Sequence: Synthetic oligonucleotide
  Antisense strand to SEQ ID NO: 2202548
ucccgcagugauuucuaac

SEQ ID NO: 2202550 - RNA, 19 nt, Artificial Sequence
  Description of Artificial Sequence: Synthetic oligonucleotide
  Sense strand starting at position 303 of SEQ ID NO: 1883581
gcacuucugagguaaggcu

SEQ ID NO: 2202551 - RNA, 19 nt, Artificial Sequence
  Description of Artificial Sequence: Synthetic oligonucleotide
  Antisense strand to SEQ ID NO: 2202550
agccuuaccucagaagugc

SEQ ID NO: 2202552 - RNA, 19 nt, Artificial Sequence
  Description of Artificial Sequence: Synthetic oligonucleotide
  Sense strand starting at position 1080 of SEQ ID NO: 1883581
ugggaauucugguauuuac

SEQ ID NO: 2202553 - RNA, 19 nt, Artificial Sequence
  Description of Artificial Sequence: Synthetic oligonucleotide
  Antisense strand to SEQ ID NO: 2202552
guaaauaccagaauuccca

SEQ ID NO: 2202554 - RNA, 19 nt, Artificial Sequence
  Description of Artificial Sequence: Synthetic oligonucleotide
  Sense strand starting at position 2370 of SEQ ID NO: 1883581
ccaaauguuuccuuagggu

SEQ ID NO: 2202555 - RNA, 19 nt, Artificial Sequence
  Description of Artificial Sequence: Synthetic oligonucleotide
  Antisense strand to SEQ ID NO: 2202554
acccuaaggaaacauuugg

SEQ ID NO: 2202556 - RNA, 19 nt, Artificial Sequence
  Description of Artificial Sequence: Synthetic oligonucleotide
  Sense strand starting at position 312 of SEQ ID NO: 1883581
agguaaggcucuuccuuua

SEQ ID NO: 2202557 - RNA, 19 nt, Artificial Sequence
  Description of Artificial Sequence: Synthetic oligonucleotide
  Antisense strand to SEQ ID NO: 2202556
uaaaggaagagccuuaccu

SEQ ID NO: 2202558 - RNA, 19 nt, Artificial Sequence
  Description of Artificial Sequence: Synthetic oligonucleotide
  Sense strand starting at position 2206 of SEQ ID NO: 1883581
ugucccugucagugagaga

SEQ ID NO: 2202559 - RNA, 19 nt, Artificial Sequence
  Description of Artificial Sequence: Synthetic oligonucleotide
  Antisense strand to SEQ ID NO: 2202558
ucucucacugacagggaca

SEQ ID NO: 2202560 - RNA, 19 nt, Artificial Sequence
  Description of Artificial Sequence: Synthetic oligonucleotide
  Sense strand starting at position 1619 of SEQ ID NO: 1883581
cuaacagugugucuauaug

SEQ ID NO: 2202561 - RNA, 19 nt, Artificial Sequence
  Description of Artificial Sequence: Synthetic oligonucleotide
  Antisense strand to SEQ ID NO: 2202560
cauauagacacacuguuag

SEQ ID NO: 2202562 - RNA, 19 nt, Artificial Sequence
  Description of Artificial Sequence: Synthetic oligonucleotide
  Sense strand starting at position 2786 of SEQ ID NO: 1883581
gcaucucaucacuguuaca

SEQ ID NO: 2202563 - RNA, 19 nt, Artificial Sequence
  Description of Artificial Sequence: Synthetic oligonucleotide
  Antisense strand to SEQ ID NO: 2202562
uguaacagugaugagaugc

SEQ ID NO: 2202564 - RNA, 19 nt, Artificial Sequence
  Description of Artificial Sequence: Synthetic oligonucleotide
  Sense strand starting at position 1069 of SEQ ID NO: 1883581
aguccagcuguugggaauu

SEQ ID NO: 2202565 - RNA, 19 nt, Artificial Sequence
  Description of Artificial Sequence: Synthetic oligonucleotide
  Antisense strand to SEQ ID NO: 2202564
aauucccaacagcuggacu

SEQ ID NO: 2202566 - RNA, 19 nt, Artificial Sequence
  Description of Artificial Sequence: Synthetic oligonucleotide
  Sense strand starting at position 930 of SEQ ID NO: 1883581
caucucaguccugggcuua

SEQ ID NO: 2202567 - RNA, 19 nt, Artificial Sequence
  Description of Artificial Sequence: Synthetic oligonucleotide
  Antisense strand to SEQ ID NO: 2202566
uaagcccaggacugagaug

SEQ ID NO: 2202568 - RNA, 19 nt, Artificial Sequence
  Description of Artificial Sequence: Synthetic oligonucleotide
  Sense strand starting at position 345 of SEQ ID NO: 1883581
uugugagaaugacagauaa

SEQ ID NO: 2202569 - RNA, 19 nt, Artificial Sequence
  Description of Artificial Sequence: Synthetic oligonucleotide
  Antisense strand to SEQ ID NO: 2202568
uuaucugucauucucacaa

SEQ ID NO: 2202570 - RNA, 19 nt, Artificial Sequence
  Description of Artificial Sequence: Synthetic oligonucleotide
  Sense strand starting at position 1617 of SEQ ID NO: 1883581
agcuaacagugugucuaua

SEQ ID NO: 2202571 - RNA, 19 nt, Artificial Sequence
  Description of Artificial Sequence: Synthetic oligonucleotide
  Antisense strand to SEQ ID NO: 2202570
uauagacacacuguuagcu

SEQ ID NO: 2202572 - RNA, 19 nt, Artificial Sequence
  Description of Artificial Sequence: Synthetic oligonucleotide
  Sense strand starting at position 3569 of SEQ ID NO: 1883581
cacugacagucguuaguca

SEQ ID NO: 2202573 - RNA, 19 nt, Artificial Sequence
  Description of Artificial Sequence: Synthetic oligonucleotide
  Antisense strand to SEQ ID NO: 2202572
ugacuaacgacugucagug

SEQ ID NO: 2202574 - RNA, 19 nt, Artificial Sequence
  Description of Artificial Sequence: Synthetic oligonucleotide
  Sense strand starting at position 1616 of SEQ ID NO: 1883581
aagcuaacagugugucuau

SEQ ID NO: 2202575 - RNA, 19 nt, Artificial Sequence
  Description of Artificial Sequence: Synthetic oligonucleotide
  Antisense strand to SEQ ID NO: 2202574
auagacacacuguuagcuu

SEQ ID NO: 2202576 - RNA, 19 nt, Artificial Sequence
  Description of Artificial Sequence: Synthetic oligonucleotide
  Sense strand starting at position 2200 of SEQ ID NO: 1883581
uacuuaugucccugucagu

SEQ ID NO: 2202577 - RNA, 19 nt, Artificial Sequence
  Description of Artificial Sequence: Synthetic oligonucleotide
  Antisense strand to SEQ ID NO: 2202576
acugacagggacauaagua

SEQ ID NO: 2202578 - RNA, 19 nt, Artificial Sequence
  Description of Artificial Sequence: Synthetic oligonucleotide
  Sense strand starting at position 3089 of SEQ ID NO: 1883581
gugggugugucugucaaug

SEQ ID NO: 2202579 - RNA, 19 nt, Artificial Sequence
  Description of Artificial Sequence: Synthetic oligonucleotide
  Antisense strand to SEQ ID NO: 2202578
cauugacagacacacccac

SEQ ID NO: 2202580 - RNA, 19 nt, Artificial Sequence
  Description of Artificial Sequence: Synthetic oligonucleotide
  Sense strand starting at position 1 of SEQ ID NO: 1883581
uggcauuagcacugcugua

SEQ ID NO: 2202581 - RNA, 19 nt, Artificial Sequence
  Description of Artificial Sequence: Synthetic oligonucleotide
  Antisense strand to SEQ ID NO: 2202580
uacagcagugcuaaugcca

SEQ ID NO: 2202582 - RNA, 19 nt, Artificial Sequence
  Description of Artificial Sequence: Synthetic oligonucleotide
  Sense strand starting at position 2947 of SEQ ID NO: 1883581
agguaucucuaguaagaca

SEQ ID NO: 2202583 - RNA, 19 nt, Artificial Sequence
  Description of Artificial Sequence: Synthetic oligonucleotide
  Antisense strand to SEQ ID NO: 2202582
ugucuuacuagagauaccu

SEQ ID NO: 2202584 - RNA, 19 nt, Artificial Sequence
  Description of Artificial Sequence: Synthetic oligonucleotide
  Sense strand starting at position 299 of SEQ ID NO: 1883581
gagggcacuucugagguaa

SEQ ID NO: 2202585 - RNA, 19 nt, Artificial Sequence
  Description of Artificial Sequence: Synthetic oligonucleotide
  Antisense strand to SEQ ID NO: 2202584
uuaccucagaagugcccuc

SEQ ID NO: 2202586 - RNA, 19 nt, Artificial Sequence
  Description of Artificial Sequence: Synthetic oligonucleotide
  Sense strand starting at position 416 of SEQ ID NO: 1883581
auguuauaaucuggagaca

SEQ ID NO: 2202587 - RNA, 19 nt, Artificial Sequence
  Description of Artificial Sequence: Synthetic oligonucleotide
  Antisense strand to SEQ ID NO: 2202586
ugucuccagauuauaacau

SEQ ID NO: 2202588 - RNA, 19 nt, Artificial Sequence
  Description of Artificial Sequence: Synthetic oligonucleotide
  Sense strand starting at position 195 of SEQ ID NO: 1883581
ucaugagugucagaccaac

SEQ ID NO: 2202589 - RNA, 19 nt, Artificial Sequence
  Description of Artificial Sequence: Synthetic oligonucleotide
  Antisense strand to SEQ ID NO: 2202588
guuggucugacacucauga

SEQ ID NO: 2202590 - RNA, 19 nt, Artificial Sequence
  Description of Artificial Sequence: Synthetic oligonucleotide
  Sense strand starting at position 2188 of SEQ ID NO: 1883581
gaggguggcuaauacuuau

SEQ ID NO: 2202591 - RNA, 19 nt, Artificial Sequence
  Description of Artificial Sequence: Synthetic oligonucleotide
  Antisense strand to SEQ ID NO: 2202590
auaaguauuagccacccuc

SEQ ID NO: 2202592 - RNA, 19 nt, Artificial Sequence
  Description of Artificial Sequence: Synthetic oligonucleotide
  Sense strand starting at position 793 of SEQ ID NO: 1883581
ggguaaggcuguuagaaau

SEQ ID NO: 2202593 - RNA, 19 nt, Artificial Sequence
  Description of Artificial Sequence: Synthetic oligonucleotide
  Antisense strand to SEQ ID NO: 2202592
auuucuaacagccuuaccc

SEQ ID NO: 2202594 - RNA, 19 nt, Artificial Sequence
  Description of Artificial Sequence: Synthetic oligonucleotide
  Sense strand starting at position 193 of SEQ ID NO: 1883581
ggucaugagugucagacca

SEQ ID NO: 2202595 - RNA, 19 nt, Artificial Sequence
  Description of Artificial Sequence: Synthetic oligonucleotide
  Antisense strand to SEQ ID NO: 2202594
uggucugacacucaugacc

SEQ ID NO: 2202596 - RNA, 19 nt, Artificial Sequence
  Description of Artificial Sequence: Synthetic oligonucleotide
  Sense strand starting at position 806 of SEQ ID NO: 1883581
agaaaucacugcgggaacu

SEQ ID NO: 2202597 - RNA, 19 nt, Artificial Sequence
  Description of Artificial Sequence: Synthetic oligonucleotide
  Antisense strand to SEQ ID NO: 2202596
aguucccgcagugauuucu

SEQ ID NO: 2202598 - RNA, 19 nt, Artificial Sequence
  Description of Artificial Sequence: Synthetic oligonucleotide
  Sense strand starting at position 2295 of SEQ ID NO: 1883581
gggcaugccuuugaacaca

SEQ ID NO: 2202599 - RNA, 19 nt, Artificial Sequence
  Description of Artificial Sequence: Synthetic oligonucleotide
  Antisense strand to SEQ ID NO: 2202598
uguguucaaaggcaugccc

SEQ ID NO: 2202600 - RNA, 19 nt, Artificial Sequence
  Description of Artificial Sequence: Synthetic oligonucleotide
  Sense strand starting at position 2373 of SEQ ID NO: 1883581
aauguuuccuuaggguaca

SEQ ID NO: 2202601 - RNA, 19 nt, Artificial Sequence
  Description of Artificial Sequence: Synthetic oligonucleotide
  Antisense strand to SEQ ID NO: 2202600
uguacccuaaggaaacauu

SEQ ID NO: 2202602 - RNA, 19 nt, Artificial Sequence
  Description of Artificial Sequence: Synthetic oligonucleotide
  Sense strand starting at position 1068 of SEQ ID NO: 1883581
caguccagcuguugggaau

SEQ ID NO: 2202603 - RNA, 19 nt, Artificial Sequence
  Description of Artificial Sequence: Synthetic oligonucleotide
  Antisense strand to SEQ ID NO: 2202602
auucccaacagcuggacug

SEQ ID NO: 2202604 - RNA, 19 nt, Artificial Sequence
  Description of Artificial Sequence: Synthetic oligonucleotide
  Sense strand starting at position 3091 of SEQ ID NO: 1883581
gggugugucugucaaugcu

SEQ ID NO: 2202605 - RNA, 19 nt, Artificial Sequence
  Description of Artificial Sequence: Synthetic oligonucleotide
  Antisense strand to SEQ ID NO: 2202604
agcauugacagacacaccc

SEQ ID NO: 2202606 - RNA, 19 nt, Artificial Sequence
  Description of Artificial Sequence: Synthetic oligonucleotide
  Sense strand starting at position 2646 of SEQ ID NO: 1883582
gagaauuagcccugaggga

SEQ ID NO: 2202607 - RNA, 19 nt, Artificial Sequence
  Description of Artificial Sequence: Synthetic oligonucleotide
  Antisense strand to SEQ ID NO: 2202606
ucccucagggcuaauucuc

SEQ ID NO: 2202608 - RNA, 19 nt, Artificial Sequence
  Description of Artificial Sequence: Synthetic oligonucleotide
  Sense strand starting at position 1520 of SEQ ID NO: 1883582
ccaguuuacgacgugcuau

SEQ ID NO: 2202609 - RNA, 19 nt, Artificial Sequence
  Description of Artificial Sequence: Synthetic oligonucleotide
  Antisense strand to SEQ ID NO: 2202608
auagcacgucguaaacugg

SEQ ID NO: 2202610 - RNA, 19 nt, Artificial Sequence
  Description of Artificial Sequence: Synthetic oligonucleotide
  Sense strand starting at position 3646 of SEQ ID NO: 1883582
aguauacaacagugaauga

SEQ ID NO: 2202611 - RNA, 19 nt, Artificial Sequence
  Description of Artificial Sequence: Synthetic oligonucleotide
  Antisense strand to SEQ ID NO: 2202610
ucauucacuguuguauacu

SEQ ID NO: 2202612 - RNA, 19 nt, Artificial Sequence
  Description of Artificial Sequence: Synthetic oligonucleotide
  Sense strand starting at position 1184 of SEQ ID NO: 1883582
gaguaauucugauuaggac

SEQ ID NO: 2202613 - RNA, 19 nt, Artificial Sequence
  Description of Artificial Sequence: Synthetic oligonucleotide
  Antisense strand to SEQ ID NO: 2202612
guccuaaucagaauuacuc

SEQ ID NO: 2202614 - RNA, 19 nt, Artificial Sequence
  Description of Artificial Sequence: Synthetic oligonucleotide
  Sense strand starting at position 1587 of SEQ ID NO: 1883582
agggauaagucauugacuc

SEQ ID NO: 2202615 - RNA, 19 nt, Artificial Sequence
  Description of Artificial Sequence: Synthetic oligonucleotide
  Antisense strand to SEQ ID NO: 2202614
gagucaaugacuuaucccu

SEQ ID NO: 2202616 - RNA, 19 nt, Artificial Sequence
  Description of Artificial Sequence: Synthetic oligonucleotide
  Sense strand starting at position 951 of SEQ ID NO: 1883582
ugagaaagccauuaugcag

SEQ ID NO: 2202617 - RNA, 19 nt, Artificial Sequence
  Description of Artificial Sequence: Synthetic oligonucleotide
  Antisense strand to SEQ ID NO: 2202616
cugcauaauggcuuucuca

SEQ ID NO: 2202618 - RNA, 19 nt, Artificial Sequence
  Description of Artificial Sequence: Synthetic oligonucleotide
  Sense strand starting at position 2964 of SEQ ID NO: 1883582
uagaguuugaaggguggaa

SEQ ID NO: 2202619 - RNA, 19 nt, Artificial Sequence
  Description of Artificial Sequence: Synthetic oligonucleotide
  Antisense strand to SEQ ID NO: 2202618
uuccacccuucaaacucua

SEQ ID NO: 2202620 - RNA, 19 nt, Artificial Sequence
  Description of Artificial Sequence: Synthetic oligonucleotide
  Sense strand starting at position 35 of SEQ ID NO: 1883582
auucuaagugaucagaguu

SEQ ID NO: 2202621 - RNA, 19 nt, Artificial Sequence
  Description of Artificial Sequence: Synthetic oligonucleotide
  Antisense strand to SEQ ID NO: 2202620
aacucugaucacuuagaau

SEQ ID NO: 2202622 - RNA, 19 nt, Artificial Sequence
  Description of Artificial Sequence: Synthetic oligonucleotide
  Sense strand starting at position 1588 of SEQ ID NO: 1883582
gggauaagucauugacuca

SEQ ID NO: 2202623 - RNA, 19 nt, Artificial Sequence
  Description of Artificial Sequence: Synthetic oligonucleotide
  Antisense strand to SEQ ID NO: 2202622
ugagucaaugacuuauccc

SEQ ID NO: 2202624 - RNA, 19 nt, Artificial Sequence
  Description of Artificial Sequence: Synthetic oligonucleotide
  Sense strand starting at position 3425 of SEQ ID NO: 1883582
agaaacaagucucuugacu

SEQ ID NO: 2202625 - RNA, 19 nt, Artificial Sequence
  Description of Artificial Sequence: Synthetic oligonucleotide
  Antisense strand to SEQ ID NO: 2202624
agucaagagacuuguuucu

SEQ ID NO: 2202626 - RNA, 19 nt, Artificial Sequence
  Description of Artificial Sequence: Synthetic oligonucleotide
  Sense strand starting at position 3448 of SEQ ID NO: 1883582
gugcuuauuccgccauauc

SEQ ID NO: 2202627 - RNA, 19 nt, Artificial Sequence
  Description of Artificial Sequence: Synthetic oligonucleotide
  Antisense strand to SEQ ID NO: 2202626
gauauggcggaauaagcac

SEQ ID NO: 2202628 - RNA, 19 nt, Artificial Sequence
  Description of Artificial Sequence: Synthetic oligonucleotide
  Sense strand starting at position 3659 of SEQ ID NO: 1883582
gaaugacuucuguaucgag

SEQ ID NO: 2202629 - RNA, 19 nt, Artificial Sequence
  Description of Artificial Sequence: Synthetic oligonucleotide
  Antisense strand to SEQ ID NO: 2202628
cucgauacagaagucauuc

SEQ ID NO: 2202630 - RNA, 19 nt, Artificial Sequence
  Description of Artificial Sequence: Synthetic oligonucleotide
  Sense strand starting at position 2932 of SEQ ID NO: 1883582
acuggagacugguuuggau

SEQ ID NO: 2202631 - RNA, 19 nt, Artificial Sequence
  Description of Artificial Sequence: Synthetic oligonucleotide
  Antisense strand to SEQ ID NO: 2202630
auccaaaccagucuccagu

SEQ ID NO: 2202632 - RNA, 19 nt, Artificial Sequence
  Description of Artificial Sequence: Synthetic oligonucleotide
  Sense strand starting at position 2096 of SEQ ID NO: 1883582
ggaaguucuagaugacgga

SEQ ID NO: 2202633 - RNA, 19 nt, Artificial Sequence
  Description of Artificial Sequence: Synthetic oligonucleotide
  Antisense strand to SEQ ID NO: 2202632
uccgucaucuagaacuucc

SEQ ID NO: 2202634 - RNA, 19 nt, Artificial Sequence
  Description of Artificial Sequence: Synthetic oligonucleotide
  Sense strand starting at position 3291 of SEQ ID NO: 1883582
uugaaaguaccuuaauugu

SEQ ID NO: 2202635 - RNA, 19 nt, Artificial Sequence
  Description of Artificial Sequence: Synthetic oligonucleotide
  Antisense strand to SEQ ID NO: 2202634
acaauuaagguacuuucaa

SEQ ID NO: 2202636 - RNA, 19 nt, Artificial Sequence
  Description of Artificial Sequence: Synthetic oligonucleotide
  Sense strand starting at position 3229 of SEQ ID NO: 1883582
ggacuaaacacguauggca

SEQ ID NO: 2202637 - RNA, 19 nt, Artificial Sequence
  Description of Artificial Sequence: Synthetic oligonucleotide
  Antisense strand to SEQ ID NO: 2202636
ugccauacguguuuagucc

SEQ ID NO: 2202638 - RNA, 19 nt, Artificial Sequence
  Description of Artificial Sequence: Synthetic oligonucleotide
  Sense strand starting at position 1637 of SEQ ID NO: 1883582
cuuuauaaugcaggaauua

SEQ ID NO: 2202639 - RNA, 19 nt, Artificial Sequence
  Description of Artificial Sequence: Synthetic oligonucleotide
  Antisense strand to SEQ ID NO: 2202638
uaauuccugcauuauaaag

SEQ ID NO: 2202640 - RNA, 19 nt, Artificial Sequence
  Description of Artificial Sequence: Synthetic oligonucleotide
  Sense strand starting at position 1230 of SEQ ID NO: 1883582
cagagauggugacauuuaa

SEQ ID NO: 2202641 - RNA, 19 nt, Artificial Sequence
  Description of Artificial Sequence: Synthetic oligonucleotide
  Antisense strand to SEQ ID NO: 2202640
uuaaaugucaccaucucug

SEQ ID NO: 2202642 - RNA, 19 nt, Artificial Sequence
  Description of Artificial Sequence: Synthetic oligonucleotide
  Sense strand starting at position 1464 of SEQ ID NO: 1883582
cguaauuauacuggaggag

SEQ ID NO: 2202643 - RNA, 19 nt, Artificial Sequence
  Description of Artificial Sequence: Synthetic oligonucleotide
  Antisense strand to SEQ ID NO: 2202642
cuccuccaguauaauuacg

SEQ ID NO: 2202644 - RNA, 19 nt, Artificial Sequence
  Description of Artificial Sequence: Synthetic oligonucleotide
  Sense strand starting at position 3176 of SEQ ID NO: 1883582
gagugugcagacuaauuga

SEQ ID NO: 2202645 - RNA, 19 nt, Artificial Sequence
  Description of Artificial Sequence: Synthetic oligonucleotide
  Antisense strand to SEQ ID NO: 2202644
ucaauuagucugcacacuc

SEQ ID NO: 2202646 - RNA, 19 nt, Artificial Sequence
  Description of Artificial Sequence: Synthetic oligonucleotide
  Sense strand starting at position 3024 of SEQ ID NO: 1883582
aucuuauugcaacguauuu

SEQ ID NO: 2202647 - RNA, 19 nt, Artificial Sequence
  Description of Artificial Sequence: Synthetic oligonucleotide
  Antisense strand to SEQ ID NO: 2202646
aaauacguugcaauaagau

SEQ ID NO: 2202648 - RNA, 19 nt, Artificial Sequence
  Description of Artificial Sequence: Synthetic oligonucleotide
  Sense strand starting at position 1531 of SEQ ID NO: 1883582
cgugcuaucccaucccgua

SEQ ID NO: 2202649 - RNA, 19 nt, Artificial Sequence
  Description of Artificial Sequence: Synthetic oligonucleotide
  Antisense strand to SEQ ID NO: 2202648
uacgggaugggauagcacg

SEQ ID NO: 2202650 - RNA, 19 nt, Artificial Sequence
  Description of Artificial Sequence: Synthetic oligonucleotide
  Sense strand starting at position 880 of SEQ ID NO: 1883582
ggagcacuagucuaggagu

SEQ ID NO: 2202651 - RNA, 19 nt, Artificial Sequence
  Description of Artificial Sequence: Synthetic oligonucleotide
  Antisense strand to SEQ ID NO: 2202650
acuccuagacuagugcucc

SEQ ID NO: 2202652 - RNA, 19 nt, Artificial Sequence
  Description of Artificial Sequence: Synthetic oligonucleotide
  Sense strand starting at position 3374 of SEQ ID NO: 1883582
uuuagugacgcauaugaag

SEQ ID NO: 2202653 - RNA, 19 nt, Artificial Sequence
  Description of Artificial Sequence: Synthetic oligonucleotide
  Antisense strand to SEQ ID NO: 2202652
cuucauaugcgucacuaaa

SEQ ID NO: 2202654 - RNA, 19 nt, Artificial Sequence
  Description of Artificial Sequence: Synthetic oligonucleotide
  Sense strand starting at position 3695 of SEQ ID NO: 1883582
uguuguuucuuggugauuu

SEQ ID NO: 2202655 - RNA, 19 nt, Artificial Sequence
  Description of Artificial Sequence: Synthetic oligonucleotide
  Antisense strand to SEQ ID NO: 2202654
aaaucaccaagaaacaaca

SEQ ID NO: 2202656 - RNA, 19 nt, Artificial Sequence
  Description of Artificial Sequence: Synthetic oligonucleotide
  Sense strand starting at position 1225 of SEQ ID NO: 1883582
guucucagagauggugaca

SEQ ID NO: 2202657 - RNA, 19 nt, Artificial Sequence
  Description of Artificial Sequence: Synthetic oligonucleotide
  Antisense strand to SEQ ID NO: 2202656
ugucaccaucucugagaac

SEQ ID NO: 2202658 - RNA, 19 nt, Artificial Sequence
  Description of Artificial Sequence: Synthetic oligonucleotide
  Sense strand starting at position 34 of SEQ ID NO: 1883582
cauucuaagugaucagagu

SEQ ID NO: 2202659 - RNA, 19 nt, Artificial Sequence
  Description of Artificial Sequence: Synthetic oligonucleotide
  Antisense strand to SEQ ID NO: 2202658
acucugaucacuuagaaug

SEQ ID NO: 2202660 - RNA, 19 nt, Artificial Sequence
  Description of Artificial Sequence: Synthetic oligonucleotide
  Sense strand starting at position 3615 of SEQ ID NO: 1883582
augauagagugucuuauug

SEQ ID NO: 2202661 - RNA, 19 nt, Artificial Sequence
  Description of Artificial Sequence: Synthetic oligonucleotide
  Antisense strand to SEQ ID NO: 2202660
caauaagacacucuaucau

SEQ ID NO: 2202662 - RNA, 19 nt, Artificial Sequence
  Description of Artificial Sequence: Synthetic oligonucleotide
  Sense strand starting at position 915 of SEQ ID NO: 1883582
gaguauuggcucuaucacu

SEQ ID NO: 2202663 - RNA, 19 nt, Artificial Sequence
  Description of Artificial Sequence: Synthetic oligonucleotide
  Antisense strand to SEQ ID NO: 2202662
agugauagagccaauacuc

SEQ ID NO: 2202664 - RNA, 19 nt, Artificial Sequence
  Description of Artificial Sequence: Synthetic oligonucleotide
  Sense strand starting at position 2897 of SEQ ID NO: 1883582
uguuguggcuugaugcgau

SEQ ID NO: 2202665 - RNA, 19 nt, Artificial Sequence
  Description of Artificial Sequence: Synthetic oligonucleotide
  Antisense strand to SEQ ID NO: 2202664
aucgcaucaagccacaaca

SEQ ID NO: 2202666 - RNA, 19 nt, Artificial Sequence
  Description of Artificial Sequence: Synthetic oligonucleotide
  Sense strand starting at position 2982 of SEQ ID NO: 1883582
aggugugguuaccugacaa

SEQ ID NO: 2202667 - RNA, 19 nt, Artificial Sequence
  Description of Artificial Sequence: Synthetic oligonucleotide
  Antisense strand to SEQ ID NO: 2202666
uugucagguaaccacaccu

SEQ ID NO: 2202668 - RNA, 19 nt, Artificial Sequence
  Description of Artificial Sequence: Synthetic oligonucleotide
  Sense strand starting at position 1237 of SEQ ID NO: 1883582
ggugacauuuaagauagca

SEQ ID NO: 2202669 - RNA, 19 nt, Artificial Sequence
  Description of Artificial Sequence: Synthetic oligonucleotide
  Antisense strand to SEQ ID NO: 2202668
ugcuaucuuaaaugucacc

SEQ ID NO: 2202670 - RNA, 19 nt, Artificial Sequence
  Description of Artificial Sequence: Synthetic oligonucleotide
  Sense strand starting at position 3958 of SEQ ID NO: 1883582
uuguaaagcuaaguuauga

SEQ ID NO: 2202671 - RNA, 19 nt, Artificial Sequence
  Description of Artificial Sequence: Synthetic oligonucleotide
  Antisense strand to SEQ ID NO: 2202670
ucauaacuuagcuuuacaa

SEQ ID NO: 2202672 - RNA, 19 nt, Artificial Sequence
  Description of Artificial Sequence: Synthetic oligonucleotide
  Sense strand starting at position 3265 of SEQ ID NO: 1883582
uugggcuguuaauuauaau

SEQ ID NO: 2202673 - RNA, 19 nt, Artificial Sequence
  Description of Artificial Sequence: Synthetic oligonucleotide
  Antisense strand to SEQ ID NO: 2202672
auuauaauuaacagcccaa

SEQ ID NO: 2202674 - RNA, 19 nt, Artificial Sequence
  Description of Artificial Sequence: Synthetic oligonucleotide
  Sense strand starting at position 2907 of SEQ ID NO: 1883582
ugaugcgauugguugggaa

SEQ ID NO: 2202675 - RNA, 19 nt, Artificial Sequence
  Description of Artificial Sequence: Synthetic oligonucleotide
  Antisense strand to SEQ ID NO: 2202674
uucccaaccaaucgcauca

SEQ ID NO: 2202676 - RNA, 19 nt, Artificial Sequence
  Description of Artificial Sequence: Synthetic oligonucleotide
  Sense strand starting at position 1387 of SEQ ID NO: 1883582
cacugaguguuugcagaag

SEQ ID NO: 2202677 - RNA, 19 nt, Artificial Sequence
  Description of Artificial Sequence: Synthetic oligonucleotide
  Antisense strand to SEQ ID NO: 2202676
cuucugcaaacacucagug

SEQ ID NO: 2202678 - RNA, 19 nt, Artificial Sequence
  Description of Artificial Sequence: Synthetic oligonucleotide
  Sense strand starting at position 1454 of SEQ ID NO: 1883582
uagggaauuucguaauuau

SEQ ID NO: 2202679 - RNA, 19 nt, Artificial Sequence
  Description of Artificial Sequence: Synthetic oligonucleotide
  Antisense strand to SEQ ID NO: 2202678
auaauuacgaaauucccua

SEQ ID NO: 2202680 - RNA, 19 nt, Artificial Sequence
  Description of Artificial Sequence: Synthetic oligonucleotide
  Sense strand starting at position 700 of SEQ ID NO: 1883582
gccaguacucaguagaugu

SEQ ID NO: 2202681 - RNA, 19 nt, Artificial Sequence
  Description of Artificial Sequence: Synthetic oligonucleotide
  Antisense strand to SEQ ID NO: 2202680
acaucuacugaguacuggc

SEQ ID NO: 2202682 - RNA, 19 nt, Artificial Sequence
  Description of Artificial Sequence: Synthetic oligonucleotide
  Sense strand starting at position 708 of SEQ ID NO: 1883582
ucaguagauguuuguugga

SEQ ID NO: 2202683 - RNA, 19 nt, Artificial Sequence
  Description of Artificial Sequence: Synthetic oligonucleotide
  Antisense strand to SEQ ID NO: 2202682
uccaacaaacaucuacuga

SEQ ID NO: 2202684 - RNA, 19 nt, Artificial Sequence
  Description of Artificial Sequence: Synthetic oligonucleotide
  Sense strand starting at position 911 of SEQ ID NO: 1883582
guaagaguauuggcucuau

SEQ ID NO: 2202685 - RNA, 19 nt, Artificial Sequence
  Description of Artificial Sequence: Synthetic oligonucleotide
  Antisense strand to SEQ ID NO: 2202684
auagagccaauacucuuac

SEQ ID NO: 2202686 - RNA, 19 nt, Artificial Sequence
  Description of Artificial Sequence: Synthetic oligonucleotide
  Sense strand starting at position 3968 of SEQ ID NO: 1883583
acuuacauggcugacaauu

SEQ ID NO: 2202687 - RNA, 19 nt, Artificial Sequence
  Description of Artificial Sequence: Synthetic oligonucleotide
  Antisense strand to SEQ ID NO: 2202686
aauugucagccauguaagu

SEQ ID NO: 2202688 - RNA, 19 nt, Artificial Sequence
  Description of Artificial Sequence: Synthetic oligonucleotide
  Sense strand starting at position 2716 of SEQ ID NO: 1883583
ugguccuuucuagaucaaa

SEQ ID NO: 2202689 - RNA, 19 nt, Artificial Sequence
  Description of Artificial Sequence: Synthetic oligonucleotide
  Antisense strand to SEQ ID NO: 2202688
uuugaucuagaaaggacca

SEQ ID NO: 2202690 - RNA, 19 nt, Artificial Sequence
  Description of Artificial Sequence: Synthetic oligonucleotide
  Sense strand starting at position 93 of SEQ ID NO: 1883583
ucuaccaaauguuugaaga

SEQ ID NO: 2202691 - RNA, 19 nt, Artificial Sequence
  Description of Artificial Sequence: Synthetic oligonucleotide
  Antisense strand to SEQ ID NO: 2202690
ucuucaaacauuugguaga

SEQ ID NO: 2202692 - RNA, 19 nt, Artificial Sequence
  Description of Artificial Sequence: Synthetic oligonucleotide
  Sense strand starting at position 2699 of SEQ ID NO: 1883583
gcccuuugaccucauuaug

SEQ ID NO: 2202693 - RNA, 19 nt, Artificial Sequence
  Description of Artificial Sequence: Synthetic oligonucleotide
  Antisense strand to SEQ ID NO: 2202692
cauaaugaggucaaagggc

SEQ ID NO: 2202694 - RNA, 19 nt, Artificial Sequence
  Description of Artificial Sequence: Synthetic oligonucleotide
  Sense strand starting at position 2585 of SEQ ID NO: 1883583
aaugacaggucuccugagu

SEQ ID NO: 2202695 - RNA, 19 nt, Artificial Sequence
  Description of Artificial Sequence: Synthetic oligonucleotide
  Antisense strand to SEQ ID NO: 2202694
acucaggagaccugucauu

SEQ ID NO: 2202696 - RNA, 19 nt, Artificial Sequence
  Description of Artificial Sequence: Synthetic oligonucleotide
  Sense strand starting at position 2596 of SEQ ID NO: 1883583
uccugaguucgugauggga

SEQ ID NO: 2202697 - RNA, 19 nt, Artificial Sequence
  Description of Artificial Sequence: Synthetic oligonucleotide
  Antisense strand to SEQ ID NO: 2202696
ucccaucacgaacucagga

SEQ ID NO: 2202698 - RNA, 19 nt, Artificial Sequence
  Description of Artificial Sequence: Synthetic oligonucleotide
  Sense strand starting at position 1351 of SEQ ID NO: 1883583
guccaaaucguauaauagu

SEQ ID NO: 2202699 - RNA, 19 nt, Artificial Sequence
  Description of Artificial Sequence: Synthetic oligonucleotide
  Antisense strand to SEQ ID NO: 2202698
acuauuauacgauuuggac

SEQ ID NO: 2202700 - RNA, 19 nt, Artificial Sequence
  Description of Artificial Sequence: Synthetic oligonucleotide
  Sense strand starting at position 3974 of SEQ ID NO: 1883583
auggcugacaauugauguu

SEQ ID NO: 2202701 - RNA, 19 nt, Artificial Sequence
  Description of Artificial Sequence: Synthetic oligonucleotide
  Antisense strand to SEQ ID NO: 2202700
aacaucaauugucagccau

SEQ ID NO: 2202702 - RNA, 19 nt, Artificial Sequence
  Description of Artificial Sequence: Synthetic oligonucleotide
  Sense strand starting at position 2710 of SEQ ID NO: 1883583
ucauuaugguccuuucuag

SEQ ID NO: 2202703 - RNA, 19 nt, Artificial Sequence
  Description of Artificial Sequence: Synthetic oligonucleotide
  Antisense strand to SEQ ID NO: 2202702
cuagaaaggaccauaauga

SEQ ID NO: 2202704 - RNA, 19 nt, Artificial Sequence
  Description of Artificial Sequence: Synthetic oligonucleotide
  Sense strand starting at position 2250 of SEQ ID NO: 1883583
aggagaggucggugaugca

SEQ ID NO: 2202705 - RNA, 19 nt, Artificial Sequence
  Description of Artificial Sequence: Synthetic oligonucleotide
  Antisense strand to SEQ ID NO: 2202704
ugcaucaccgaccucuccu

SEQ ID NO: 2202706 - RNA, 19 nt, Artificial Sequence
  Description of Artificial Sequence: Synthetic oligonucleotide
  Sense strand starting at position 2237 of SEQ ID NO: 1883583
ggaaauagguaguaggaga

SEQ ID NO: 2202707 - RNA, 19 nt, Artificial Sequence
  Description of Artificial Sequence: Synthetic oligonucleotide
  Antisense strand to SEQ ID NO: 2202706
ucuccuacuaccuauuucc

SEQ ID NO: 2202708 - RNA, 19 nt, Artificial Sequence
  Description of Artificial Sequence: Synthetic oligonucleotide
  Sense strand starting at position 548 of SEQ ID NO: 1883584
gauacauauguguauucga

SEQ ID NO: 2202709 - RNA, 19 nt, Artificial Sequence
  Description of Artificial Sequence: Synthetic oligonucleotide
  Antisense strand to SEQ ID NO: 2202708
ucgaauacacauauguauc

SEQ ID NO: 2202710 - RNA, 19 nt, Artificial Sequence
  Description of Artificial Sequence: Synthetic oligonucleotide
  Sense strand starting at position 551 of SEQ ID NO: 1883584
acauauguguauucgaaug

SEQ ID NO: 2202711 - RNA, 19 nt, Artificial Sequence
  Description of Artificial Sequence: Synthetic oligonucleotide
  Antisense strand to SEQ ID NO: 2202710
cauucgaauacacauaugu

SEQ ID NO: 2202712 - RNA, 19 nt, Artificial Sequence
  Description of Artificial Sequence: Synthetic oligonucleotide
  Sense strand starting at position 553 of SEQ ID NO: 1883584
auauguguauucgaauggu

SEQ ID NO: 2202713 - RNA, 19 nt, Artificial Sequence
  Description of Artificial Sequence: Synthetic oligonucleotide
  Antisense strand to SEQ ID NO: 2202712
accauucgaauacacauau

SEQ ID NO: 2202714 - RNA, 19 nt, Artificial Sequence
  Description of Artificial Sequence: Synthetic oligonucleotide
  Sense strand starting at position 1895 of SEQ ID NO: 1883585
cgggagucugcggcgaaau

SEQ ID NO: 2202715 - RNA, 19 nt, Artificial Sequence
  Description of Artificial Sequence: Synthetic oligonucleotide
  Antisense strand to SEQ ID NO: 2202714
auuucgccgcagacucccg

SEQ ID NO: 2202716 - RNA, 19 nt, Artificial Sequence
  Description of Artificial Sequence: Synthetic oligonucleotide
  Sense strand starting at position 1626 of SEQ ID NO: 1883585
cugaacuggcaguacaaau

SEQ ID NO: 2202717 - RNA, 19 nt, Artificial Sequence
  Description of Artificial Sequence: Synthetic oligonucleotide
  Antisense strand to SEQ ID NO: 2202716
auuuguacugccaguucag

SEQ ID NO: 2202718 - RNA, 19 nt, Artificial Sequence
  Description of Artificial Sequence: Synthetic oligonucleotide
  Sense strand starting at position 3029 of SEQ ID NO: 1883585
gucucaaacgauuauggau

SEQ ID NO: 2202719 - RNA, 19 nt, Artificial Sequence
  Description of Artificial Sequence: Synthetic oligonucleotide
  Antisense strand to SEQ ID NO: 2202718
auccauaaucguuugagac

SEQ ID NO: 2202720 - RNA, 19 nt, Artificial Sequence
  Description of Artificial Sequence: Synthetic oligonucleotide
  Sense strand starting at position 350 of SEQ ID NO: 1883585
gcaauuaagagugaguaua

SEQ ID NO: 2202721 - RNA, 19 nt, Artificial Sequence
  Description of Artificial Sequence: Synthetic oligonucleotide
  Antisense strand to SEQ ID NO: 2202720
uauacucacucuuaauugc

SEQ ID NO: 2202722 - RNA, 19 nt, Artificial Sequence
  Description of Artificial Sequence: Synthetic oligonucleotide
  Sense strand starting at position 145 of SEQ ID NO: 1883585
ggauguagcagagaaagcu

SEQ ID NO: 2202723 - RNA, 19 nt, Artificial Sequence
  Description of Artificial Sequence: Synthetic oligonucleotide
  Antisense strand to SEQ ID NO: 2202722
agcuuucucugcuacaucc

SEQ ID NO: 2202724 - RNA, 19 nt, Artificial Sequence
  Description of Artificial Sequence: Synthetic oligonucleotide
  Sense strand starting at position 2030 of SEQ ID NO: 1883585
acaguuucccaagagcuga

SEQ ID NO: 2202725 - RNA, 19 nt, Artificial Sequence
  Description of Artificial Sequence: Synthetic oligonucleotide
  Antisense strand to SEQ ID NO: 2202724
ucagcucuugggaaacugu

SEQ ID NO: 2202726 - RNA, 19 nt, Artificial Sequence
  Description of Artificial Sequence: Synthetic oligonucleotide
  Sense strand starting at position 1897 of SEQ ID NO: 1883585
ggagucugcggcgaaauuu

SEQ ID NO: 2202727 - RNA, 19 nt, Artificial Sequence
  Description of Artificial Sequence: Synthetic oligonucleotide
  Antisense strand to SEQ ID NO: 2202726
aaauuucgccgcagacucc

SEQ ID NO: 2202728 - RNA, 19 nt, Artificial Sequence
  Description of Artificial Sequence: Synthetic oligonucleotide
  Sense strand starting at position 2319 of SEQ ID NO: 1883585
guaaaugaaagcuauuggu

SEQ ID NO: 2202729 - RNA, 19 nt, Artificial Sequence
  Description of Artificial Sequence: Synthetic oligonucleotide
  Antisense strand to SEQ ID NO: 2202728
accaauagcuuucauuuac

SEQ ID NO: 2202730 - RNA, 19 nt, Artificial Sequence
  Description of Artificial Sequence: Synthetic oligonucleotide
  Sense strand starting at position 1292 of SEQ ID NO: 1883585
agauauuguagccagagua

SEQ ID NO: 2202731 - RNA, 19 nt, Artificial Sequence
  Description of Artificial Sequence: Synthetic oligonucleotide
  Antisense strand to SEQ ID NO: 2202730
uacucuggcuacaauaucu

SEQ ID NO: 2202732 - RNA, 19 nt, Artificial Sequence
  Description of Artificial Sequence: Synthetic oligonucleotide
  Sense strand starting at position 1475 of SEQ ID NO: 1883585
gggaauaguugguuaucaa

SEQ ID NO: 2202733 - RNA, 19 nt, Artificial Sequence
  Description of Artificial Sequence: Synthetic oligonucleotide
  Antisense strand to SEQ ID NO: 2202732
uugauaaccaacuauuccc

SEQ ID NO: 2202734 - RNA, 19 nt, Artificial Sequence
  Description of Artificial Sequence: Synthetic oligonucleotide
  Sense strand starting at position 3760 of SEQ ID NO: 1883585
agagauaauuuguauugag

SEQ ID NO: 2202735 - RNA, 19 nt, Artificial Sequence
  Description of Artificial Sequence: Synthetic oligonucleotide
  Antisense strand to SEQ ID NO: 2202734
cucaauacaaauuaucucu

SEQ ID NO: 2202736 - RNA, 19 nt, Artificial Sequence
  Description of Artificial Sequence: Synthetic oligonucleotide
  Sense strand starting at position 2276 of SEQ ID NO: 1883585
gugauacaauguucuaaag

SEQ ID NO: 2202737 - RNA, 19 nt, Artificial Sequence
  Description of Artificial Sequence: Synthetic oligonucleotide
  Antisense strand to SEQ ID NO: 2202736
cuuuagaacauuguaucac

SEQ ID NO: 2202738 - RNA, 19 nt, Artificial Sequence
  Description of Artificial Sequence: Synthetic oligonucleotide
  Sense strand starting at position 519 of SEQ ID NO: 1883585
uccagaaaguuugugaaca

SEQ ID NO: 2202739 - RNA, 19 nt, Artificial Sequence
  Description of Artificial Sequence: Synthetic oligonucleotide
  Antisense strand to SEQ ID NO: 2202738
uguucacaaacuuucugga

SEQ ID NO: 2202740 - RNA, 19 nt, Artificial Sequence
  Description of Artificial Sequence: Synthetic oligonucleotide
  Sense strand starting at position 2814 of SEQ ID NO: 1883585
ugguauggauagccacaaa

SEQ ID NO: 2202741 - RNA, 19 nt, Artificial Sequence
  Description of Artificial Sequence: Synthetic oligonucleotide
  Antisense strand to SEQ ID NO: 2202740
uuuguggcuauccauacca

SEQ ID NO: 2202742 - RNA, 19 nt, Artificial Sequence
  Description of Artificial Sequence: Synthetic oligonucleotide
  Sense strand starting at position 1035 of SEQ ID NO: 1883585
gagggucagcagugagaaa

SEQ ID NO: 2202743 - RNA, 19 nt, Artificial Sequence
  Description of Artificial Sequence: Synthetic oligonucleotide
  Antisense strand to SEQ ID NO: 2202742
uuucucacugcugacccuc

SEQ ID NO: 2202744 - RNA, 19 nt, Artificial Sequence
  Description of Artificial Sequence: Synthetic oligonucleotide
  Sense strand starting at position 1305 of SEQ ID NO: 1883585
agaguaaugcuguacucaa

SEQ ID NO: 2202745 - RNA, 19 nt, Artificial Sequence
  Description of Artificial Sequence: Synthetic oligonucleotide
  Antisense strand to SEQ ID NO: 2202744
uugaguacagcauuacucu

SEQ ID NO: 2202746 - RNA, 19 nt, Artificial Sequence
  Description of Artificial Sequence: Synthetic oligonucleotide
  Sense strand starting at position 769 of SEQ ID NO: 1883585
caucacugugaguaguuaa

SEQ ID NO: 2202747 - RNA, 19 nt, Artificial Sequence
  Description of Artificial Sequence: Synthetic oligonucleotide
  Antisense strand to SEQ ID NO: 2202746
uuaacuacucacagugaug

SEQ ID NO: 2202748 - RNA, 19 nt, Artificial Sequence
  Description of Artificial Sequence: Synthetic oligonucleotide
  Sense strand starting at position 3674 of SEQ ID NO: 1883585
gucacucuccaggaauguu

SEQ ID NO: 2202749 - RNA, 19 nt, Artificial Sequence
  Description of Artificial Sequence: Synthetic oligonucleotide
  Antisense strand to SEQ ID NO: 2202748
aacauuccuggagagugac

SEQ ID NO: 2202750 - RNA, 19 nt, Artificial Sequence
  Description of Artificial Sequence: Synthetic oligonucleotide
  Sense strand starting at position 1223 of SEQ ID NO: 1883585
augccaacggucuaaggau

SEQ ID NO: 2202751 - RNA, 19 nt, Artificial Sequence
  Description of Artificial Sequence: Synthetic oligonucleotide
  Antisense strand to SEQ ID NO: 2202750
auccuuagaccguuggcau

SEQ ID NO: 2202752 - RNA, 19 nt, Artificial Sequence
  Description of Artificial Sequence: Synthetic oligonucleotide
  Sense strand starting at position 1474 of SEQ ID NO: 1883585
ugggaauaguugguuauca

SEQ ID NO: 2202753 - RNA, 19 nt, Artificial Sequence
  Description of Artificial Sequence: Synthetic oligonucleotide
  Antisense strand to SEQ ID NO: 2202752
ugauaaccaacuauuccca

SEQ ID NO: 2202754 - RNA, 19 nt, Artificial Sequence
  Description of Artificial Sequence: Synthetic oligonucleotide
  Sense strand starting at position 3980 of SEQ ID NO: 1883585
uggaaaugauauccgucau

SEQ ID NO: 2202755 - RNA, 19 nt, Artificial Sequence
  Description of Artificial Sequence: Synthetic oligonucleotide
  Antisense strand to SEQ ID NO: 2202754
augacggauaucauuucca

SEQ ID NO: 2202756 - RNA, 19 nt, Artificial Sequence
  Description of Artificial Sequence: Synthetic oligonucleotide
  Sense strand starting at position 1976 of SEQ ID NO: 1883585
guuuauucucgugaggaag

SEQ ID NO: 2202757 - RNA, 19 nt, Artificial Sequence
  Description of Artificial Sequence: Synthetic oligonucleotide
  Antisense strand to SEQ ID NO: 2202756
cuuccucacgagaauaaac

SEQ ID NO: 2202758 - RNA, 19 nt, Artificial Sequence
  Description of Artificial Sequence: Synthetic oligonucleotide
  Sense strand starting at position 1014 of SEQ ID NO: 1883585
gguuuaguuauggauggca

SEQ ID NO: 2202759 - RNA, 19 nt, Artificial Sequence
  Description of Artificial Sequence: Synthetic oligonucleotide
  Antisense strand to SEQ ID NO: 2202758
ugccauccauaacuaaacc

SEQ ID NO: 2202760 - RNA, 19 nt, Artificial Sequence
  Description of Artificial Sequence: Synthetic oligonucleotide
  Sense strand starting at position 3981 of SEQ ID NO: 1883585
ggaaaugauauccgucauu

SEQ ID NO: 2202761 - RNA, 19 nt, Artificial Sequence
  Description of Artificial Sequence: Synthetic oligonucleotide
  Antisense strand to SEQ ID NO: 2202760
aaugacggauaucauuucc

SEQ ID NO: 2202762 - RNA, 19 nt, Artificial Sequence
  Description of Artificial Sequence: Synthetic oligonucleotide
  Sense strand starting at position 557 of SEQ ID NO: 1883585
uguaauuguaaguagguau

SEQ ID NO: 2202763 - RNA, 19 nt, Artificial Sequence
  Description of Artificial Sequence: Synthetic oligonucleotide
  Antisense strand to SEQ ID NO: 2202762
auaccuacuuacaauuaca

SEQ ID NO: 2202764 - RNA, 19 nt, Artificial Sequence
  Description of Artificial Sequence: Synthetic oligonucleotide
  Sense strand starting at position 474 of SEQ ID NO: 1883585
ggcagaaaguuacuuuauc

SEQ ID NO: 2202765 - RNA, 19 nt, Artificial Sequence
  Description of Artificial Sequence: Synthetic oligonucleotide
  Antisense strand to SEQ ID NO: 2202764
gauaaaguaacuuucugcc

SEQ ID NO: 2202766 - RNA, 19 nt, Artificial Sequence
  Description of Artificial Sequence: Synthetic oligonucleotide
  Sense strand starting at position 3673 of SEQ ID NO: 1883585
agucacucuccaggaaugu

SEQ ID NO: 2202767 - RNA, 19 nt, Artificial Sequence
  Description of Artificial Sequence: Synthetic oligonucleotide
  Antisense strand to SEQ ID NO: 2202766
acauuccuggagagugacu

SEQ ID NO: 2202768 - RNA, 19 nt, Artificial Sequence
  Description of Artificial Sequence: Synthetic oligonucleotide
  Sense strand starting at position 349 of SEQ ID NO: 1883585
ugcaauuaagagugaguau

SEQ ID NO: 2202769 - RNA, 19 nt, Artificial Sequence
  Description of Artificial Sequence: Synthetic oligonucleotide
  Antisense strand to SEQ ID NO: 2202768
auacucacucuuaauugca

SEQ ID NO: 2202770 - RNA, 19 nt, Artificial Sequence
  Description of Artificial Sequence: Synthetic oligonucleotide
  Sense strand starting at position 1316 of SEQ ID NO: 1883585
guacucaacuuuguacaau

SEQ ID NO: 2202771 - RNA, 19 nt, Artificial Sequence
  Description of Artificial Sequence: Synthetic oligonucleotide
  Antisense strand to SEQ ID NO: 2202770
auuguacaaaguugaguac

SEQ ID NO: 2202772 - RNA, 19 nt, Artificial Sequence
  Description of Artificial Sequence: Synthetic oligonucleotide
  Sense strand starting at position 653 of SEQ ID NO: 1883585
guacaauguuacucuuuaa

SEQ ID NO: 2202773 - RNA, 19 nt, Artificial Sequence
  Description of Artificial Sequence: Synthetic oligonucleotide
  Antisense strand to SEQ ID NO: 2202772
uuaaagaguaacauuguac

SEQ ID NO: 2202774 - RNA, 19 nt, Artificial Sequence
  Description of Artificial Sequence: Synthetic oligonucleotide
  Sense strand starting at position 1016 of SEQ ID NO: 1883585
uuuaguuauggauggcaua

SEQ ID NO: 2202775 - RNA, 19 nt, Artificial Sequence
  Description of Artificial Sequence: Synthetic oligonucleotide
  Antisense strand to SEQ ID NO: 2202774
uaugccauccauaacuaaa

SEQ ID NO: 2202776 - RNA, 19 nt, Artificial Sequence
  Description of Artificial Sequence: Synthetic oligonucleotide
  Sense strand starting at position 475 of SEQ ID NO: 1883585
gcagaaaguuacuuuaucu

SEQ ID NO: 2202777 - RNA, 19 nt, Artificial Sequence
  Description of Artificial Sequence: Synthetic oligonucleotide
  Antisense strand to SEQ ID NO: 2202776
agauaaaguaacuuucugc

SEQ ID NO: 2202778 - RNA, 19 nt, Artificial Sequence
  Description of Artificial Sequence: Synthetic oligonucleotide
  Sense strand starting at position 1315 of SEQ ID NO: 1883585
uguacucaacuuuguacaa

SEQ ID NO: 2202779 - RNA, 19 nt, Artificial Sequence
  Description of Artificial Sequence: Synthetic oligonucleotide
  Antisense strand to SEQ ID NO: 2202778
uuguacaaaguugaguaca

SEQ ID NO: 2202780 - RNA, 19 nt, Artificial Sequence
  Description of Artificial Sequence: Synthetic oligonucleotide
  Sense strand starting at position 2327 of SEQ ID NO: 1883585
aagcuauugguaugguaag

SEQ ID NO: 2202781 - RNA, 19 nt, Artificial Sequence
  Description of Artificial Sequence: Synthetic oligonucleotide
  Antisense strand to SEQ ID NO: 2202780
cuuaccauaccaauagcuu

SEQ ID NO: 2202782 - RNA, 19 nt, Artificial Sequence
  Description of Artificial Sequence: Synthetic oligonucleotide
  Sense strand starting at position 1084 of SEQ ID NO: 1883585
gugagacccucuucucacu

SEQ ID NO: 2202783 - RNA, 19 nt, Artificial Sequence
  Description of Artificial Sequence: Synthetic oligonucleotide
  Antisense strand to SEQ ID NO: 2202782
agugagaagagggucucac

SEQ ID NO: 2202784 - RNA, 19 nt, Artificial Sequence
  Description of Artificial Sequence: Synthetic oligonucleotide
  Sense strand starting at position 1291 of SEQ ID NO: 1883585
uagauauuguagccagagu

SEQ ID NO: 2202785 - RNA, 19 nt, Artificial Sequence
  Description of Artificial Sequence: Synthetic oligonucleotide
  Antisense strand to SEQ ID NO: 2202784
acucuggcuacaauaucua

SEQ ID NO: 2202786 - RNA, 19 nt, Artificial Sequence
  Description of Artificial Sequence: Synthetic oligonucleotide
  Sense strand starting at position 1473 of SEQ ID NO: 1883585
gugggaauaguugguuauc

SEQ ID NO: 2202787 - RNA, 19 nt, Artificial Sequence
  Description of Artificial Sequence: Synthetic oligonucleotide
  Antisense strand to SEQ ID NO: 2202786
gauaaccaacuauucccac

SEQ ID NO: 2202788 - RNA, 19 nt, Artificial Sequence
  Description of Artificial Sequence: Synthetic oligonucleotide
  Sense strand starting at position 652 of SEQ ID NO: 1883585
uguacaauguuacucuuua

SEQ ID NO: 2202789 - RNA, 19 nt, Artificial Sequence
  Description of Artificial Sequence: Synthetic oligonucleotide
  Antisense strand to SEQ ID NO: 2202788
uaaagaguaacauuguaca

SEQ ID NO: 2202790 - RNA, 19 nt, Artificial Sequence
  Description of Artificial Sequence: Synthetic oligonucleotide
  Sense strand starting at position 1922 of SEQ ID NO: 1883585
gaaggacucuaacaaugga

SEQ ID NO: 2202791 - RNA, 19 nt, Artificial Sequence
  Description of Artificial Sequence: Synthetic oligonucleotide
  Antisense strand to SEQ ID NO: 2202790
uccauuguuagaguccuuc

SEQ ID NO: 2202792 - RNA, 19 nt, Artificial Sequence
  Description of Artificial Sequence: Synthetic oligonucleotide
  Sense strand starting at position 1906 of SEQ ID NO: 1883585
ggcgaaauuugggagugaa

SEQ ID NO: 2202793 - RNA, 19 nt, Artificial Sequence
  Description of Artificial Sequence: Synthetic oligonucleotide
  Antisense strand to SEQ ID NO: 2202792
uucacucccaaauuucgcc

SEQ ID NO: 2202794 - RNA, 19 nt, Artificial Sequence
  Description of Artificial Sequence: Synthetic oligonucleotide
  Sense strand starting at position 2918 of SEQ ID NO: 1883586
gcugaaugggucaggcagu

SEQ ID NO: 2202795 - RNA, 19 nt, Artificial Sequence
  Description of Artificial Sequence: Synthetic oligonucleotide
  Antisense strand to SEQ ID NO: 2202794
acugccugacccauucagc

SEQ ID NO: 2202796 - RNA, 19 nt, Artificial Sequence
  Description of Artificial Sequence: Synthetic oligonucleotide
  Sense strand starting at position 1542 of SEQ ID NO: 1883586
aaagcaagcgauuaacuga

SEQ ID NO: 2202797 - RNA, 19 nt, Artificial Sequence
  Description of Artificial Sequence: Synthetic oligonucleotide
  Antisense strand to SEQ ID NO: 2202796
ucaguuaaucgcuugcuuu

SEQ ID NO: 2202798 - RNA, 19 nt, Artificial Sequence
  Description of Artificial Sequence: Synthetic oligonucleotide
  Sense strand starting at position 3367 of SEQ ID NO: 1883586
aggguaacuggccacuauu

SEQ ID NO: 2202799 - RNA, 19 nt, Artificial Sequence
  Description of Artificial Sequence: Synthetic oligonucleotide
  Antisense strand to SEQ ID NO: 2202798
aauaguggccaguuacccu

SEQ ID NO: 2202800 - RNA, 19 nt, Artificial Sequence
  Description of Artificial Sequence: Synthetic oligonucleotide
  Sense strand starting at position 1538 of SEQ ID NO: 1883586
agagaaagcaagcgauuaa

SEQ ID NO: 2202801 - RNA, 19 nt, Artificial Sequence
  Description of Artificial Sequence: Synthetic oligonucleotide
  Antisense strand to SEQ ID NO: 2202800
uuaaucgcuugcuuucucu

SEQ ID NO: 2202802 - RNA, 19 nt, Artificial Sequence
  Description of Artificial Sequence: Synthetic oligonucleotide
  Sense strand starting at position 792 of SEQ ID NO: 1883586
cagccauaugcugagacau

SEQ ID NO: 2202803 - RNA, 19 nt, Artificial Sequence
  Description of Artificial Sequence: Synthetic oligonucleotide
  Antisense strand to SEQ ID NO: 2202802
augucucagcauauggcug

SEQ ID NO: 2202804 - RNA, 19 nt, Artificial Sequence
  Description of Artificial Sequence: Synthetic oligonucleotide
  Sense strand starting at position 3090 of SEQ ID NO: 1883586
ucugcuuuccuggagauac

SEQ ID NO: 2202805 - RNA, 19 nt, Artificial Sequence
  Description of Artificial Sequence: Synthetic oligonucleotide
  Antisense strand to SEQ ID NO: 2202804
guaucuccaggaaagcaga

SEQ ID NO: 2202806 - RNA, 19 nt, Artificial Sequence
  Description of Artificial Sequence: Synthetic oligonucleotide
  Sense strand starting at position 2905 of SEQ ID NO: 1883586
uguuaauagggaugcugaa

SEQ ID NO: 2202807 - RNA, 19 nt, Artificial Sequence
  Description of Artificial Sequence: Synthetic oligonucleotide
  Antisense strand to SEQ ID NO: 2202806
uucagcaucccuauuaaca

SEQ ID NO: 2202808 - RNA, 19 nt, Artificial Sequence
  Description of Artificial Sequence: Synthetic oligonucleotide
  Sense strand starting at position 456 of SEQ ID NO: 1883586
gagagcagcguucaggaaa

SEQ ID NO: 2202809 - RNA, 19 nt, Artificial Sequence
  Description of Artificial Sequence: Synthetic oligonucleotide
  Antisense strand to SEQ ID NO: 2202808
uuuccugaacgcugcucuc

SEQ ID NO: 2202810 - RNA, 19 nt, Artificial Sequence
  Description of Artificial Sequence: Synthetic oligonucleotide
  Sense strand starting at position 2755 of SEQ ID NO: 1883586
uuguaagcaacggaguaau

SEQ ID NO: 2202811 - RNA, 19 nt, Artificial Sequence
  Description of Artificial Sequence: Synthetic oligonucleotide
  Antisense strand to SEQ ID NO: 2202810
auuacuccguugcuuacaa

SEQ ID NO: 2202812 - RNA, 19 nt, Artificial Sequence
  Description of Artificial Sequence: Synthetic oligonucleotide
  Sense strand starting at position 2546 of SEQ ID NO: 1883586
ccuguaucuccacauagca

SEQ ID NO: 2202813 - RNA, 19 nt, Artificial Sequence
  Description of Artificial Sequence: Synthetic oligonucleotide
  Antisense strand to SEQ ID NO: 2202812
ugcuauguggagauacagg

SEQ ID NO: 2202814 - RNA, 19 nt, Artificial Sequence
  Description of Artificial Sequence: Synthetic oligonucleotide
  Sense strand starting at position 3840 of SEQ ID NO: 1883586
cuaagaaaucagugcuauu

SEQ ID NO: 2202815 - RNA, 19 nt, Artificial Sequence
  Description of Artificial Sequence: Synthetic oligonucleotide
  Antisense strand to SEQ ID NO: 2202814
aauagcacugauuucuuag

SEQ ID NO: 2202816 - RNA, 19 nt, Artificial Sequence
  Description of Artificial Sequence: Synthetic oligonucleotide
  Sense strand starting at position 3495 of SEQ ID NO: 1883586
uagcauaggcucuaguuaa

SEQ ID NO: 2202817 - RNA, 19 nt, Artificial Sequence
  Description of Artificial Sequence: Synthetic oligonucleotide
  Antisense strand to SEQ ID NO: 2202816
uuaacuagagccuaugcua

SEQ ID NO: 2202818 - RNA, 19 nt, Artificial Sequence
  Description of Artificial Sequence: Synthetic oligonucleotide
  Sense strand starting at position 1583 of SEQ ID NO: 1883586
gaaagcgaguucuccagga

SEQ ID NO: 2202819 - RNA, 19 nt, Artificial Sequence
  Description of Artificial Sequence: Synthetic oligonucleotide
  Antisense strand to SEQ ID NO: 2202818
uccuggagaacucgcuuuc

SEQ ID NO: 2202820 - RNA, 19 nt, Artificial Sequence
  Description of Artificial Sequence: Synthetic oligonucleotide
  Sense strand starting at position 3001 of SEQ ID NO: 1883586
auggauggguggucugagu

SEQ ID NO: 2202821 - RNA, 19 nt, Artificial Sequence
  Description of Artificial Sequence: Synthetic oligonucleotide
  Antisense strand to SEQ ID NO: 2202820
acucagaccacccauccau

SEQ ID NO: 2202822 - RNA, 19 nt, Artificial Sequence
  Description of Artificial Sequence: Synthetic oligonucleotide
  Sense strand starting at position 3298 of SEQ ID NO: 1883586
aauaauuguugguugguga

SEQ ID NO: 2202823 - RNA, 19 nt, Artificial Sequence
  Description of Artificial Sequence: Synthetic oligonucleotide
  Antisense strand to SEQ ID NO: 2202822
ucaccaaccaacaauuauu

SEQ ID NO: 2202824 - RNA, 19 nt, Artificial Sequence
  Description of Artificial Sequence: Synthetic oligonucleotide
  Sense strand starting at position 2 of SEQ ID NO: 1883586
cucacaguuccuuauagcu

SEQ ID NO: 2202825 - RNA, 19 nt, Artificial Sequence
  Description of Artificial Sequence: Synthetic oligonucleotide
  Antisense strand to SEQ ID NO: 2202824
agcuauaaggaacugugag

SEQ ID NO: 2202826 - RNA, 19 nt, Artificial Sequence
  Description of Artificial Sequence: Synthetic oligonucleotide
  Sense strand starting at position 2945 of SEQ ID NO: 1883586
gguucagugugaucuggaa

SEQ ID NO: 2202827 - RNA, 19 nt, Artificial Sequence
  Description of Artificial Sequence: Synthetic oligonucleotide
  Antisense strand to SEQ ID NO: 2202826
uuccagaucacacugaacc

SEQ ID NO: 2202828 - RNA, 19 nt, Artificial Sequence
  Description of Artificial Sequence: Synthetic oligonucleotide
  Sense strand starting at position 3089 of SEQ ID NO: 1883586
cucugcuuuccuggagaua

SEQ ID NO: 2202829 - RNA, 19 nt, Artificial Sequence
  Description of Artificial Sequence: Synthetic oligonucleotide
  Antisense strand to SEQ ID NO: 2202828
uaucuccaggaaagcagag

SEQ ID NO: 2202830 - RNA, 19 nt, Artificial Sequence
  Description of Artificial Sequence: Synthetic oligonucleotide
  Sense strand starting at position 3762 of SEQ ID NO: 1883586
gccacacguauguagacau

SEQ ID NO: 2202831 - RNA, 19 nt, Artificial Sequence
  Description of Artificial Sequence: Synthetic oligonucleotide
  Antisense strand to SEQ ID NO: 2202830
augucuacauacguguggc

SEQ ID NO: 2202832 - RNA, 19 nt, Artificial Sequence
  Description of Artificial Sequence: Synthetic oligonucleotide
  Sense strand starting at position 3003 of SEQ ID NO: 1883586
ggauggguggucugaguuu

SEQ ID NO: 2202833 - RNA, 19 nt, Artificial Sequence
  Description of Artificial Sequence: Synthetic oligonucleotide
  Antisense strand to SEQ ID NO: 2202832
aaacucagaccacccaucc

SEQ ID NO: 2202834 - RNA, 19 nt, Artificial Sequence
  Description of Artificial Sequence: Synthetic oligonucleotide
  Sense strand starting at position 3621 of SEQ ID NO: 1883586
ucaucugucucuguaaauc

SEQ ID NO: 2202835 - RNA, 19 nt, Artificial Sequence
  Description of Artificial Sequence: Synthetic oligonucleotide
  Antisense strand to SEQ ID NO: 2202834
gauuuacagagacagauga

SEQ ID NO: 2202836 - RNA, 19 nt, Artificial Sequence
  Description of Artificial Sequence: Synthetic oligonucleotide
  Sense strand starting at position 1429 of SEQ ID NO: 1883586
gugucagcgcguuuccgaa

SEQ ID NO: 2202837 - RNA, 19 nt, Artificial Sequence
  Description of Artificial Sequence: Synthetic oligonucleotide
  Antisense strand to SEQ ID NO: 2202836
uucggaaacgcgcugacac

SEQ ID NO: 2202838 - RNA, 19 nt, Artificial Sequence
  Description of Artificial Sequence: Synthetic oligonucleotide
  Sense strand starting at position 3972 of SEQ ID NO: 1883586
guauuugccucacauagag

SEQ ID NO: 2202839 - RNA, 19 nt, Artificial Sequence
  Description of Artificial Sequence: Synthetic oligonucleotide
  Antisense strand to SEQ ID NO: 2202838
cucuaugugaggcaaauac

SEQ ID NO: 2202840 - RNA, 19 nt, Artificial Sequence
  Description of Artificial Sequence: Synthetic oligonucleotide
  Sense strand starting at position 2939 of SEQ ID NO: 1883586
ggcacagguucagugugau

SEQ ID NO: 2202841 - RNA, 19 nt, Artificial Sequence
  Description of Artificial Sequence: Synthetic oligonucleotide
  Antisense strand to SEQ ID NO: 2202840
aucacacugaaccugugcc

SEQ ID NO: 2202842 - RNA, 19 nt, Artificial Sequence
  Description of Artificial Sequence: Synthetic oligonucleotide
  Sense strand starting at position 3652 of SEQ ID NO: 1883586
uugaaagggucucaaagag

SEQ ID NO: 2202843 - RNA, 19 nt, Artificial Sequence
  Description of Artificial Sequence: Synthetic oligonucleotide
  Antisense strand to SEQ ID NO: 2202842
cucuuugagacccuuucaa

SEQ ID NO: 2202844 - RNA, 19 nt, Artificial Sequence
  Description of Artificial Sequence: Synthetic oligonucleotide
  Sense strand starting at position 2618 of SEQ ID NO: 1883586
guaugaagcccguauugug

SEQ ID NO: 2202845 - RNA, 19 nt, Artificial Sequence
  Description of Artificial Sequence: Synthetic oligonucleotide
  Antisense strand to SEQ ID NO: 2202844
cacaauacgggcuucauac

SEQ ID NO: 2202846 - RNA, 19 nt, Artificial Sequence
  Description of Artificial Sequence: Synthetic oligonucleotide
  Sense strand starting at position 3087 of SEQ ID NO: 1883586
gccucugcuuuccuggaga

SEQ ID NO: 2202847 - RNA, 19 nt, Artificial Sequence
  Description of Artificial Sequence: Synthetic oligonucleotide
  Antisense strand to SEQ ID NO: 2202846
ucuccaggaaagcagaggc

SEQ ID NO: 2202848 - RNA, 19 nt, Artificial Sequence
  Description of Artificial Sequence: Synthetic oligonucleotide
  Sense strand starting at position 3850 of SEQ ID NO: 1883586
agugcuauuuccgaaugga

SEQ ID NO: 2202849 - RNA, 19 nt, Artificial Sequence
  Description of Artificial Sequence: Synthetic oligonucleotide
  Antisense strand to SEQ ID NO: 2202848
uccauucggaaauagcacu

SEQ ID NO: 2202850 - RNA, 19 nt, Artificial Sequence
  Description of Artificial Sequence: Synthetic oligonucleotide
  Sense strand starting at position 2573 of SEQ ID NO: 1883586
ggaauuggguagggaauaa

SEQ ID NO: 2202851 - RNA, 19 nt, Artificial Sequence
  Description of Artificial Sequence: Synthetic oligonucleotide
  Antisense strand to SEQ ID NO: 2202850
uuauucccuacccaauucc

SEQ ID NO: 2202852 - RNA, 19 nt, Artificial Sequence
  Description of Artificial Sequence: Synthetic oligonucleotide
  Sense strand starting at position 2753 of SEQ ID NO: 1883586
gcuuguaagcaacggagua

SEQ ID NO: 2202853 - RNA, 19 nt, Artificial Sequence
  Description of Artificial Sequence: Synthetic oligonucleotide
  Antisense strand to SEQ ID NO: 2202852
uacuccguugcuuacaagc

SEQ ID NO: 2202854 - RNA, 19 nt, Artificial Sequence
  Description of Artificial Sequence: Synthetic oligonucleotide
  Sense strand starting at position 2894 of SEQ ID NO: 1883586
cagcgagugucuguuaaua

SEQ ID NO: 2202855 - RNA, 19 nt, Artificial Sequence
  Description of Artificial Sequence: Synthetic oligonucleotide
  Antisense strand to SEQ ID NO: 2202854
uauuaacagacacucgcug

SEQ ID NO: 2202856 - RNA, 19 nt, Artificial Sequence
  Description of Artificial Sequence: Synthetic oligonucleotide
  Sense strand starting at position 2634 of SEQ ID NO: 1883586
gugugucguuuguuaaaca

SEQ ID NO: 2202857 - RNA, 19 nt, Artificial Sequence
  Description of Artificial Sequence: Synthetic oligonucleotide
  Antisense strand to SEQ ID NO: 2202856
uguuuaacaaacgacacac

SEQ ID NO: 2202858 - RNA, 19 nt, Artificial Sequence
  Description of Artificial Sequence: Synthetic oligonucleotide
  Sense strand starting at position 2632 of SEQ ID NO: 1883586
uugugugucguuuguuaaa

SEQ ID NO: 2202859 - RNA, 19 nt, Artificial Sequence
  Description of Artificial Sequence: Synthetic oligonucleotide
  Antisense strand to SEQ ID NO: 2202858
uuuaacaaacgacacacaa

SEQ ID NO: 2202860 - RNA, 19 nt, Artificial Sequence
  Description of Artificial Sequence: Synthetic oligonucleotide
  Sense strand starting at position 2899 of SEQ ID NO: 1883586
agugucuguuaauagggau

SEQ ID NO: 2202861 - RNA, 19 nt, Artificial Sequence
  Description of Artificial Sequence: Synthetic oligonucleotide
  Antisense strand to SEQ ID NO: 2202860
aucccuauuaacagacacu

SEQ ID NO: 2202862 - RNA, 19 nt, Artificial Sequence
  Description of Artificial Sequence: Synthetic oligonucleotide
  Sense strand starting at position 2630 of SEQ ID NO: 1883586
uauugugugucguuuguua

SEQ ID NO: 2202863 - RNA, 19 nt, Artificial Sequence
  Description of Artificial Sequence: Synthetic oligonucleotide
  Antisense strand to SEQ ID NO: 2202862
uaacaaacgacacacaaua

SEQ ID NO: 2202864 - RNA, 19 nt, Artificial Sequence
  Description of Artificial Sequence: Synthetic oligonucleotide
  Sense strand starting at position 791 of SEQ ID NO: 1883586
acagccauaugcugagaca

SEQ ID NO: 2202865 - RNA, 19 nt, Artificial Sequence
  Description of Artificial Sequence: Synthetic oligonucleotide
  Antisense strand to SEQ ID NO: 2202864
ugucucagcauauggcugu

SEQ ID NO: 2202866 - RNA, 19 nt, Artificial Sequence
  Description of Artificial Sequence: Synthetic oligonucleotide
  Sense strand starting at position 1145 of SEQ ID NO: 1883586
uagagugcuuccgacaauu

SEQ ID NO: 2202867 - RNA, 19 nt, Artificial Sequence
  Description of Artificial Sequence: Synthetic oligonucleotide
  Antisense strand to SEQ ID NO: 2202866
aauugucggaagcacucua

SEQ ID NO: 2202868 - RNA, 19 nt, Artificial Sequence
  Description of Artificial Sequence: Synthetic oligonucleotide
  Sense strand starting at position 794 of SEQ ID NO: 1883586
gccauaugcugagacaugu

SEQ ID NO: 2202869 - RNA, 19 nt, Artificial Sequence
  Description of Artificial Sequence: Synthetic oligonucleotide
  Antisense strand to SEQ ID NO: 2202868
acaugucucagcauauggc

SEQ ID NO: 2202870 - RNA, 19 nt, Artificial Sequence
  Description of Artificial Sequence: Synthetic oligonucleotide
  Sense strand starting at position 2626 of SEQ ID NO: 1883586
cccguauugugugucguuu

SEQ ID NO: 2202871 - RNA, 19 nt, Artificial Sequence
  Description of Artificial Sequence: Synthetic oligonucleotide
  Antisense strand to SEQ ID NO: 2202870
aaacgacacacaauacggg

SEQ ID NO: 2202872 - RNA, 19 nt, Artificial Sequence
  Description of Artificial Sequence: Synthetic oligonucleotide
  Sense strand starting at position 3870 of SEQ ID NO: 1883586
cccggaguuucucagcacu

SEQ ID NO: 2202873 - RNA, 19 nt, Artificial Sequence
  Description of Artificial Sequence: Synthetic oligonucleotide
  Antisense strand to SEQ ID NO: 2202872
agugcugagaaacuccggg

SEQ ID NO: 2202874 - RNA, 19 nt, Artificial Sequence
  Description of Artificial Sequence: Synthetic oligonucleotide
  Sense strand starting at position 3952 of SEQ ID NO: 1883587
guucuaugccuugaacuaa

SEQ ID NO: 2202875 - RNA, 19 nt, Artificial Sequence
  Description of Artificial Sequence: Synthetic oligonucleotide
  Antisense strand to SEQ ID NO: 2202874
uuaguucaaggcauagaac

SEQ ID NO: 2202876 - RNA, 19 nt, Artificial Sequence
  Description of Artificial Sequence: Synthetic oligonucleotide
  Sense strand starting at position 2802 of SEQ ID NO: 1883587
ccaugaaagcaaggucuau

SEQ ID NO: 2202877 - RNA, 19 nt, Artificial Sequence
  Description of Artificial Sequence: Synthetic oligonucleotide
  Antisense strand to SEQ ID NO: 2202876
auagaccuugcuuucaugg

SEQ ID NO: 2202878 - RNA, 19 nt, Artificial Sequence
  Description of Artificial Sequence: Synthetic oligonucleotide
  Sense strand starting at position 3524 of SEQ ID NO: 1883587
agucuuccgaccugggaaa

SEQ ID NO: 2202879 - RNA, 19 nt, Artificial Sequence
  Description of Artificial Sequence: Synthetic oligonucleotide
  Antisense strand to SEQ ID NO: 2202878
uuucccaggucggaagacu

SEQ ID NO: 2202880 - RNA, 19 nt, Artificial Sequence
  Description of Artificial Sequence: Synthetic oligonucleotide
  Sense strand starting at position 3115 of SEQ ID NO: 1883587
ggaagaugcuuagugugag

SEQ ID NO: 2202881 - RNA, 19 nt, Artificial Sequence
  Description of Artificial Sequence: Synthetic oligonucleotide
  Antisense strand to SEQ ID NO: 2202880
cucacacuaagcaucuucc

SEQ ID NO: 2202882 - RNA, 19 nt, Artificial Sequence
  Description of Artificial Sequence: Synthetic oligonucleotide
  Sense strand starting at position 3112 of SEQ ID NO: 1883587
caaggaagaugcuuagugu

SEQ ID NO: 2202883 - RNA, 19 nt, Artificial Sequence
  Description of Artificial Sequence: Synthetic oligonucleotide
  Antisense strand to SEQ ID NO: 2202882
acacuaagcaucuuccuug

SEQ ID NO: 2202884 - RNA, 19 nt, Artificial Sequence
  Description of Artificial Sequence: Synthetic oligonucleotide
  Sense strand starting at position 3983 of SEQ ID NO: 1883587
uuuaguuaccuguaagcuu

SEQ ID NO: 2202885 - RNA, 19 nt, Artificial Sequence
  Description of Artificial Sequence: Synthetic oligonucleotide
  Antisense strand to SEQ ID NO: 2202884
aagcuuacagguaacuaaa

SEQ ID NO: 2202886 - RNA, 19 nt, Artificial Sequence
  Description of Artificial Sequence: Synthetic oligonucleotide
  Sense strand starting at position 3951 of SEQ ID NO: 1883587
uguucuaugccuugaacua

SEQ ID NO: 2202887 - RNA, 19 nt, Artificial Sequence
  Description of Artificial Sequence: Synthetic oligonucleotide
  Antisense strand to SEQ ID NO: 2202886
uaguucaaggcauagaaca

SEQ ID NO: 2202888 - RNA, 19 nt, Artificial Sequence
  Description of Artificial Sequence: Synthetic oligonucleotide
  Sense strand starting at position 2697 of SEQ ID NO: 1883587
uaauuaaauguccgggcuu

SEQ ID NO: 2202889 - RNA, 19 nt, Artificial Sequence
  Description of Artificial Sequence: Synthetic oligonucleotide
  Antisense strand to SEQ ID NO: 2202888
aagcccggacauuuaauua

SEQ ID NO: 2202890 - RNA, 19 nt, Artificial Sequence
  Description of Artificial Sequence: Synthetic oligonucleotide
  Sense strand starting at position 2699 of SEQ ID NO: 1883587
auuaaauguccgggcuuac

SEQ ID NO: 2202891 - RNA, 19 nt, Artificial Sequence
  Description of Artificial Sequence: Synthetic oligonucleotide
  Antisense strand to SEQ ID NO: 2202890
guaagcccggacauuuaau

SEQ ID NO: 2202892 - RNA, 19 nt, Artificial Sequence
  Description of Artificial Sequence: Synthetic oligonucleotide
  Sense strand starting at position 3121 of SEQ ID NO: 1883587
ugcuuagugugagcacuaa

SEQ ID NO: 2202893 - RNA, 19 nt, Artificial Sequence
  Description of Artificial Sequence: Synthetic oligonucleotide
  Antisense strand to SEQ ID NO: 2202892
uuagugcucacacuaagca

SEQ ID NO: 2202894 - RNA, 19 nt, Artificial Sequence
  Description of Artificial Sequence: Synthetic oligonucleotide
  Sense strand starting at position 3499 of SEQ ID NO: 1883587
acguuuaaaucuuacauga

SEQ ID NO: 2202895 - RNA, 19 nt, Artificial Sequence
  Description of Artificial Sequence: Synthetic oligonucleotide
  Antisense strand to SEQ ID NO: 2202894
ucauguaagauuuaaacgu

SEQ ID NO: 2202896 - RNA, 19 nt, Artificial Sequence
  Description of Artificial Sequence: Synthetic oligonucleotide
  Sense strand starting at position 2579 of SEQ ID NO: 1883587
acuguauggucuuaucauc

SEQ ID NO: 2202897 - RNA, 19 nt, Artificial Sequence
  Description of Artificial Sequence: Synthetic oligonucleotide
  Antisense strand to SEQ ID NO: 2202896
gaugauaagaccauacagu

SEQ ID NO: 2202898 - RNA, 19 nt, Artificial Sequence
  Description of Artificial Sequence: Synthetic oligonucleotide
  Sense strand starting at position 2698 of SEQ ID NO: 1883587
aauuaaauguccgggcuua

SEQ ID NO: 2202899 - RNA, 19 nt, Artificial Sequence
  Description of Artificial Sequence: Synthetic oligonucleotide
  Antisense strand to SEQ ID NO: 2202898
uaagcccggacauuuaauu

SEQ ID NO: 2202900 - RNA, 19 nt, Artificial Sequence
  Description of Artificial Sequence: Synthetic oligonucleotide
  Sense strand starting at position 2574 of SEQ ID NO: 1883587
gccggacuguauggucuua

SEQ ID NO: 2202901 - RNA, 19 nt, Artificial Sequence
  Description of Artificial Sequence: Synthetic oligonucleotide
  Antisense strand to SEQ ID NO: 2202900
uaagaccauacaguccggc

SEQ ID NO: 2202902 - RNA, 19 nt, Artificial Sequence
  Description of Artificial Sequence: Synthetic oligonucleotide
  Sense strand starting at position 3103 of SEQ ID NO: 1883588
uuuagagaagcauauguca

SEQ ID NO: 2202903 - RNA, 19 nt, Artificial Sequence
  Description of Artificial Sequence: Synthetic oligonucleotide
  Antisense strand to SEQ ID NO: 2202902
ugacauaugcuucucuaaa

SEQ ID NO: 2202904 - RNA, 19 nt, Artificial Sequence
  Description of Artificial Sequence: Synthetic oligonucleotide
  Sense strand starting at position 3857 of SEQ ID NO: 1883588
ggauuaaaccauugcuaaa

SEQ ID NO: 2202905 - RNA, 19 nt, Artificial Sequence
  Description of Artificial Sequence: Synthetic oligonucleotide
  Antisense strand to SEQ ID NO: 2202904
uuuagcaaugguuuaaucc

SEQ ID NO: 2202906 - RNA, 19 nt, Artificial Sequence
  Description of Artificial Sequence: Synthetic oligonucleotide
  Sense strand starting at position 1844 of SEQ ID NO: 1883588
gcugauuagcaacauauaa

SEQ ID NO: 2202907 - RNA, 19 nt, Artificial Sequence
  Description of Artificial Sequence: Synthetic oligonucleotide
  Antisense strand to SEQ ID NO: 2202906
uuauauguugcuaaucagc

SEQ ID NO: 2202908 - RNA, 19 nt, Artificial Sequence
  Description of Artificial Sequence: Synthetic oligonucleotide
  Sense strand starting at position 676 of SEQ ID NO: 1883588
ggucccuucccucaaggau

SEQ ID NO: 2202909 - RNA, 19 nt, Artificial Sequence
  Description of Artificial Sequence: Synthetic oligonucleotide
  Antisense strand to SEQ ID NO: 2202908
auccuugagggaagggacc

SEQ ID NO: 2202910 - RNA, 19 nt, Artificial Sequence
  Description of Artificial Sequence: Synthetic oligonucleotide
  Sense strand starting at position 3313 of SEQ ID NO: 1883588
cuuaaugacucugugaaau

SEQ ID NO: 2202911 - RNA, 19 nt, Artificial Sequence
  Description of Artificial Sequence: Synthetic oligonucleotide
  Antisense strand to SEQ ID NO: 2202910
auuucacagagucauuaag

SEQ ID NO: 2202912 - RNA, 19 nt, Artificial Sequence
  Description of Artificial Sequence: Synthetic oligonucleotide
  Sense strand starting at position 3059 of SEQ ID NO: 1883588
auuaauugacagcgaauaa

SEQ ID NO: 2202913 - RNA, 19 nt, Artificial Sequence
  Description of Artificial Sequence: Synthetic oligonucleotide
  Antisense strand to SEQ ID NO: 2202912
uuauucgcugucaauuaau

SEQ ID NO: 2202914 - RNA, 19 nt, Artificial Sequence
  Description of Artificial Sequence: Synthetic oligonucleotide
  Sense strand starting at position 2803 of SEQ ID NO: 1883588
agaugagacuuucucagca

SEQ ID NO: 2202915 - RNA, 19 nt, Artificial Sequence
  Description of Artificial Sequence: Synthetic oligonucleotide
  Antisense strand to SEQ ID NO: 2202914
ugcugagaaagucucaucu

SEQ ID NO: 2202916 - RNA, 19 nt, Artificial Sequence
  Description of Artificial Sequence: Synthetic oligonucleotide
  Sense strand starting at position 3788 of SEQ ID NO: 1883588
uccuuagggauguaguuau

SEQ ID NO: 2202917 - RNA, 19 nt, Artificial Sequence
  Description of Artificial Sequence: Synthetic oligonucleotide
  Antisense strand to SEQ ID NO: 2202916
auaacuacaucccuaagga

SEQ ID NO: 2202918 - RNA, 19 nt, Artificial Sequence
  Description of Artificial Sequence: Synthetic oligonucleotide
  Sense strand starting at position 3312 of SEQ ID NO: 1883588
ucuuaaugacucugugaaa

SEQ ID NO: 2202919 - RNA, 19 nt, Artificial Sequence
  Description of Artificial Sequence: Synthetic oligonucleotide
  Antisense strand to SEQ ID NO: 2202918
uuucacagagucauuaaga

SEQ ID NO: 2202920 - RNA, 19 nt, Artificial Sequence
  Description of Artificial Sequence: Synthetic oligonucleotide
  Sense strand starting at position 2479 of SEQ ID NO: 1883588
aggcucuuccuuuguauuu

SEQ ID NO: 2202921 - RNA, 19 nt, Artificial Sequence
  Description of Artificial Sequence: Synthetic oligonucleotide
  Antisense strand to SEQ ID NO: 2202920
aaauacaaaggaagagccu

SEQ ID NO: 2202922 - RNA, 19 nt, Artificial Sequence
  Description of Artificial Sequence: Synthetic oligonucleotide
  Sense strand starting at position 3111 of SEQ ID NO: 1883588
agcauaugucaugaguaug

SEQ ID NO: 2202923 - RNA, 19 nt, Artificial Sequence
  Description of Artificial Sequence: Synthetic oligonucleotide
  Antisense strand to SEQ ID NO: 2202922
cauacucaugacauaugcu

SEQ ID NO: 2202924 - RNA, 19 nt, Artificial Sequence
  Description of Artificial Sequence: Synthetic oligonucleotide
  Sense strand starting at position 597 of SEQ ID NO: 1883588
ccugucaugaaguagguau

SEQ ID NO: 2202925 - RNA, 19 nt, Artificial Sequence
  Description of Artificial Sequence: Synthetic oligonucleotide
  Antisense strand to SEQ ID NO: 2202924
auaccuacuucaugacagg

SEQ ID NO: 2202926 - RNA, 19 nt, Artificial Sequence
  Description of Artificial Sequence: Synthetic oligonucleotide
  Sense strand starting at position 570 of SEQ ID NO: 1883588
gaugaaugugguuguagga

SEQ ID NO: 2202927 - RNA, 19 nt, Artificial Sequence
  Description of Artificial Sequence: Synthetic oligonucleotide
  Antisense strand to SEQ ID NO: 2202926
uccuacaaccacauucauc

SEQ ID NO: 2202928 - RNA, 19 nt, Artificial Sequence
  Description of Artificial Sequence: Synthetic oligonucleotide
  Sense strand starting at position 2465 of SEQ ID NO: 1883588
agauuacuucuuggaggcu

SEQ ID NO: 2202929 - RNA, 19 nt, Artificial Sequence
  Description of Artificial Sequence: Synthetic oligonucleotide
  Antisense strand to SEQ ID NO: 2202928
agccuccaagaaguaaucu

SEQ ID NO: 2202930 - RNA, 19 nt, Artificial Sequence
  Description of Artificial Sequence: Synthetic oligonucleotide
  Sense strand starting at position 3194 of SEQ ID NO: 1883588
ugaggcuuggcauaagcaa

SEQ ID NO: 2202931 - RNA, 19 nt, Artificial Sequence
  Description of Artificial Sequence: Synthetic oligonucleotide
  Antisense strand to SEQ ID NO: 2202930
uugcuuaugccaagccuca

SEQ ID NO: 2202932 - RNA, 19 nt, Artificial Sequence
  Description of Artificial Sequence: Synthetic oligonucleotide
  Sense strand starting at position 3904 of SEQ ID NO: 1883588
guagcaagaguaugagauc

SEQ ID NO: 2202933 - RNA, 19 nt, Artificial Sequence
  Description of Artificial Sequence: Synthetic oligonucleotide
  Antisense strand to SEQ ID NO: 2202932
gaucucauacucuugcuac

SEQ ID NO: 2202934 - RNA, 19 nt, Artificial Sequence
  Description of Artificial Sequence: Synthetic oligonucleotide
  Sense strand starting at position 3611 of SEQ ID NO: 1883588
uuauuaguuccuuauagca

SEQ ID NO: 2202935 - RNA, 19 nt, Artificial Sequence
  Description of Artificial Sequence: Synthetic oligonucleotide
  Antisense strand to SEQ ID NO: 2202934
ugcuauaaggaacuaauaa

SEQ ID NO: 2202936 - RNA, 19 nt, Artificial Sequence
  Description of Artificial Sequence: Synthetic oligonucleotide
  Sense strand starting at position 1920 of SEQ ID NO: 1883588
cuuacaugaucuguugauu

SEQ ID NO: 2202937 - RNA, 19 nt, Artificial Sequence
  Description of Artificial Sequence: Synthetic oligonucleotide
  Antisense strand to SEQ ID NO: 2202936
aaucaacagaucauguaag

SEQ ID NO: 2202938 - RNA, 19 nt, Artificial Sequence
  Description of Artificial Sequence: Synthetic oligonucleotide
  Sense strand starting at position 557 of SEQ ID NO: 1883588
gcaucuaaugcaugaugaa

SEQ ID NO: 2202939 - RNA, 19 nt, Artificial Sequence
  Description of Artificial Sequence: Synthetic oligonucleotide
  Antisense strand to SEQ ID NO: 2202938
uucaucaugcauuagaugc

SEQ ID NO: 2202940 - RNA, 19 nt, Artificial Sequence
  Description of Artificial Sequence: Synthetic oligonucleotide
  Sense strand starting at position 1247 of SEQ ID NO: 1883588
uguuguuugcaccaaacaa

SEQ ID NO: 2202941 - RNA, 19 nt, Artificial Sequence
  Description of Artificial Sequence: Synthetic oligonucleotide
  Antisense strand to SEQ ID NO: 2202940
uuguuuggugcaaacaaca

SEQ ID NO: 2202942 - RNA, 19 nt, Artificial Sequence
  Description of Artificial Sequence: Synthetic oligonucleotide
  Sense strand starting at position 3005 of SEQ ID NO: 1883588
gguccucuccacugauaua

SEQ ID NO: 2202943 - RNA, 19 nt, Artificial Sequence
  Description of Artificial Sequence: Synthetic oligonucleotide
  Antisense strand to SEQ ID NO: 2202942
uauaucaguggagaggacc

SEQ ID NO: 2202944 - RNA, 19 nt, Artificial Sequence
  Description of Artificial Sequence: Synthetic oligonucleotide
  Sense strand starting at position 1310 of SEQ ID NO: 1883588
gucuccauccauggacauu

SEQ ID NO: 2202945 - RNA, 19 nt, Artificial Sequence
  Description of Artificial Sequence: Synthetic oligonucleotide
  Antisense strand to SEQ ID NO: 2202944
aauguccauggauggagac

SEQ ID NO: 2202946 - RNA, 19 nt, Artificial Sequence
  Description of Artificial Sequence: Synthetic oligonucleotide
  Sense strand starting at position 625 of SEQ ID NO: 1883588
guaucauauuuggaucaau

SEQ ID NO: 2202947 - RNA, 19 nt, Artificial Sequence
  Description of Artificial Sequence: Synthetic oligonucleotide
  Antisense strand to SEQ ID NO: 2202946
auugauccaaauaugauac

SEQ ID NO: 2202948 - RNA, 19 nt, Artificial Sequence
  Description of Artificial Sequence: Synthetic oligonucleotide
  Sense strand starting at position 2450 of SEQ ID NO: 1883588
agucuucucucacccagau

SEQ ID NO: 2202949 - RNA, 19 nt, Artificial Sequence
  Description of Artificial Sequence: Synthetic oligonucleotide
  Antisense strand to SEQ ID NO: 2202948
aucugggugagagaagacu

SEQ ID NO: 2202950 - RNA, 19 nt, Artificial Sequence
  Description of Artificial Sequence: Synthetic oligonucleotide
  Sense strand starting at position 1201 of SEQ ID NO: 1883588
gguaguggccuccaacauu

SEQ ID NO: 2202951 - RNA, 19 nt, Artificial Sequence
  Description of Artificial Sequence: Synthetic oligonucleotide
  Antisense strand to SEQ ID NO: 2202950
aauguuggaggccacuacc

SEQ ID NO: 2202952 - RNA, 19 nt, Artificial Sequence
  Description of Artificial Sequence: Synthetic oligonucleotide
  Sense strand starting at position 695 of SEQ ID NO: 1883588
caugcaguccaguggagaa

SEQ ID NO: 2202953 - RNA, 19 nt, Artificial Sequence
  Description of Artificial Sequence: Synthetic oligonucleotide
  Antisense strand to SEQ ID NO: 2202952
uucuccacuggacugcaug

SEQ ID NO: 2202954 - RNA, 19 nt, Artificial Sequence
  Description of Artificial Sequence: Synthetic oligonucleotide
  Sense strand starting at position 2512 of SEQ ID NO: 1883588
ggucuuaacucagucacca

SEQ ID NO: 2202955 - RNA, 19 nt, Artificial Sequence
  Description of Artificial Sequence: Synthetic oligonucleotide
  Antisense strand to SEQ ID NO: 2202954
uggugacugaguuaagacc

SEQ ID NO: 2202956 - RNA, 19 nt, Artificial Sequence
  Description of Artificial Sequence: Synthetic oligonucleotide
  Sense strand starting at position 2525 of SEQ ID NO: 1883588
ucaccagugugauccuaau

SEQ ID NO: 2202957 - RNA, 19 nt, Artificial Sequence
  Description of Artificial Sequence: Synthetic oligonucleotide
  Antisense strand to SEQ ID NO: 2202956
auuaggaucacacugguga

SEQ ID NO: 2202958 - RNA, 19 nt, Artificial Sequence
  Description of Artificial Sequence: Synthetic oligonucleotide
  Sense strand starting at position 1083 of SEQ ID NO: 1883588
gagugcacuuacucucaga

SEQ ID NO: 2202959 - RNA, 19 nt, Artificial Sequence
  Description of Artificial Sequence: Synthetic oligonucleotide
  Antisense strand to SEQ ID NO: 2202958
ucugagaguaagugcacuc

SEQ ID NO: 2202960 - RNA, 19 nt, Artificial Sequence
  Description of Artificial Sequence: Synthetic oligonucleotide
  Sense strand starting at position 1121 of SEQ ID NO: 1883588
agcagaagucaaugcaauu

SEQ ID NO: 2202961 - RNA, 19 nt, Artificial Sequence
  Description of Artificial Sequence: Synthetic oligonucleotide
  Antisense strand to SEQ ID NO: 2202960
aauugcauugacuucugcu

SEQ ID NO: 2202962 - RNA, 19 nt, Artificial Sequence
  Description of Artificial Sequence: Synthetic oligonucleotide
  Sense strand starting at position 1235 of SEQ ID NO: 1883588
acaggaacucuuuguuguu

SEQ ID NO: 2202963 - RNA, 19 nt, Artificial Sequence
  Description of Artificial Sequence: Synthetic oligonucleotide
  Antisense strand to SEQ ID NO: 2202962
aacaacaaagaguuccugu

SEQ ID NO: 2202964 - RNA, 19 nt, Artificial Sequence
  Description of Artificial Sequence: Synthetic oligonucleotide
  Sense strand starting at position 865 of SEQ ID NO: 1883588
uauacuguucuugggaguu

SEQ ID NO: 2202965 - RNA, 19 nt, Artificial Sequence
  Description of Artificial Sequence: Synthetic oligonucleotide
  Antisense strand to SEQ ID NO: 2202964
aacucccaagaacaguaua

SEQ ID NO: 2202966 - RNA, 19 nt, Artificial Sequence
  Description of Artificial Sequence: Synthetic oligonucleotide
  Sense strand starting at position 3786 of SEQ ID NO: 1883588
uuuccuuagggauguaguu

SEQ ID NO: 2202967 - RNA, 19 nt, Artificial Sequence
  Description of Artificial Sequence: Synthetic oligonucleotide
  Antisense strand to SEQ ID NO: 2202966
aacuacaucccuaaggaaa

SEQ ID NO: 2202968 - RNA, 19 nt, Artificial Sequence
  Description of Artificial Sequence: Synthetic oligonucleotide
  Sense strand starting at position 1299 of SEQ ID NO: 1883588
ggaccuaauucgucuccau

SEQ ID NO: 2202969 - RNA, 19 nt, Artificial Sequence
  Description of Artificial Sequence: Synthetic oligonucleotide
  Antisense strand to SEQ ID NO: 2202968
auggagacgaauuaggucc

SEQ ID NO: 2202970 - RNA, 19 nt, Artificial Sequence
  Description of Artificial Sequence: Synthetic oligonucleotide
  Sense strand starting at position 451 of SEQ ID NO: 1883588
ggaguuuagaucuggcuuu

SEQ ID NO: 2202971 - RNA, 19 nt, Artificial Sequence
  Description of Artificial Sequence: Synthetic oligonucleotide
  Antisense strand to SEQ ID NO: 2202970
aaagccagaucuaaacucc

SEQ ID NO: 2202972 - RNA, 19 nt, Artificial Sequence
  Description of Artificial Sequence: Synthetic oligonucleotide
  Sense strand starting at position 3642 of SEQ ID NO: 1883588
gugugcuguacccauagga

SEQ ID NO: 2202973 - RNA, 19 nt, Artificial Sequence
  Description of Artificial Sequence: Synthetic oligonucleotide
  Antisense strand to SEQ ID NO: 2202972
uccuauggguacagcacac

SEQ ID NO: 2202974 - RNA, 19 nt, Artificial Sequence
  Description of Artificial Sequence: Synthetic oligonucleotide
  Sense strand starting at position 1236 of SEQ ID NO: 1883588
caggaacucuuuguuguuu

SEQ ID NO: 2202975 - RNA, 19 nt, Artificial Sequence
  Description of Artificial Sequence: Synthetic oligonucleotide
  Antisense strand to SEQ ID NO: 2202974
aaacaacaaagaguuccug

SEQ ID NO: 2202976 - RNA, 19 nt, Artificial Sequence
  Description of Artificial Sequence: Synthetic oligonucleotide
  Sense strand starting at position 1014 of SEQ ID NO: 1883588
agagucauuuacgaaagca

SEQ ID NO: 2202977 - RNA, 19 nt, Artificial Sequence
  Description of Artificial Sequence: Synthetic oligonucleotide
  Antisense strand to SEQ ID NO: 2202976
ugcuuucguaaaugacucu

SEQ ID NO: 2202978 - RNA, 19 nt, Artificial Sequence
  Description of Artificial Sequence: Synthetic oligonucleotide
  Sense strand starting at position 1639 of SEQ ID NO: 1883588
gagguucuguaacuuguau

SEQ ID NO: 2202979 - RNA, 19 nt, Artificial Sequence
  Description of Artificial Sequence: Synthetic oligonucleotide
  Antisense strand to SEQ ID NO: 2202978
auacaaguuacagaaccuc

SEQ ID NO: 2202980 - RNA, 19 nt, Artificial Sequence
  Description of Artificial Sequence: Synthetic oligonucleotide
  Sense strand starting at position 586 of SEQ ID NO: 1883588
ggagcagaguuccugucau

SEQ ID NO: 2202981 - RNA, 19 nt, Artificial Sequence
  Description of Artificial Sequence: Synthetic oligonucleotide
  Antisense strand to SEQ ID NO: 2202980
augacaggaacucugcucc

SEQ ID NO: 2202982 - RNA, 19 nt, Artificial Sequence
  Description of Artificial Sequence: Synthetic oligonucleotide
  Sense strand starting at position 511 of SEQ ID NO: 1883589
ucuagaagaugggcauuau

SEQ ID NO: 2202983 - RNA, 19 nt, Artificial Sequence
  Description of Artificial Sequence: Synthetic oligonucleotide
  Antisense strand to SEQ ID NO: 2202982
auaaugcccaucuucuaga

SEQ ID NO: 2202984 - RNA, 19 nt, Artificial Sequence
  Description of Artificial Sequence: Synthetic oligonucleotide
  Sense strand starting at position 1464 of SEQ ID NO: 1883589
acugcucugcuggaagaga

SEQ ID NO: 2202985 - RNA, 19 nt, Artificial Sequence
  Description of Artificial Sequence: Synthetic oligonucleotide
  Antisense strand to SEQ ID NO: 2202984
ucucuuccagcagagcagu

SEQ ID NO: 2202986 - RNA, 19 nt, Artificial Sequence
  Description of Artificial Sequence: Synthetic oligonucleotide
  Sense strand starting at position 1623 of SEQ ID NO: 1883589
cccugcucgccugauauuu

SEQ ID NO: 2202987 - RNA, 19 nt, Artificial Sequence
  Description of Artificial Sequence: Synthetic oligonucleotide
  Antisense strand to SEQ ID NO: 2202986
aaauaucaggcgagcaggg

SEQ ID NO: 2202988 - RNA, 19 nt, Artificial Sequence
  Description of Artificial Sequence: Synthetic oligonucleotide
  Sense strand starting at position 2409 of SEQ ID NO: 1883589
ccugcacuuguuuagaaag

SEQ ID NO: 2202989 - RNA, 19 nt, Artificial Sequence
  Description of Artificial Sequence: Synthetic oligonucleotide
  Antisense strand to SEQ ID NO: 2202988
cuuucuaaacaagugcagg

SEQ ID NO: 2202990 - RNA, 19 nt, Artificial Sequence
  Description of Artificial Sequence: Synthetic oligonucleotide
  Sense strand starting at position 2662 of SEQ ID NO: 1883589
ggccuuauccuaggacaag

SEQ ID NO: 2202991 - RNA, 19 nt, Artificial Sequence
  Description of Artificial Sequence: Synthetic oligonucleotide
  Antisense strand to SEQ ID NO: 2202990
cuuguccuaggauaaggcc

SEQ ID NO: 2202992 - RNA, 19 nt, Artificial Sequence
  Description of Artificial Sequence: Synthetic oligonucleotide
  Sense strand starting at position 2793 of SEQ ID NO: 1883589
gcgccuugacuccaaagaa

SEQ ID NO: 2202993 - RNA, 19 nt, Artificial Sequence
  Description of Artificial Sequence: Synthetic oligonucleotide
  Antisense strand to SEQ ID NO: 2202992
uucuuuggagucaaggcgc

SEQ ID NO: 2202994 - RNA, 19 nt, Artificial Sequence
  Description of Artificial Sequence: Synthetic oligonucleotide
  Sense strand starting at position 2408 of SEQ ID NO: 1883589
accugcacuuguuuagaaa

SEQ ID NO: 2202995 - RNA, 19 nt, Artificial Sequence
  Description of Artificial Sequence: Synthetic oligonucleotide
  Antisense strand to SEQ ID NO: 2202994
uuucuaaacaagugcaggu

SEQ ID NO: 2202996 - RNA, 19 nt, Artificial Sequence
  Description of Artificial Sequence: Synthetic oligonucleotide
  Sense strand starting at position 2768 of SEQ ID NO: 1883589
ggagcagucuccucccuga

SEQ ID NO: 2202997 - RNA, 19 nt, Artificial Sequence
  Description of Artificial Sequence: Synthetic oligonucleotide
  Antisense strand to SEQ ID NO: 2202996
ucagggaggagacugcucc

SEQ ID NO: 2202998 - RNA, 19 nt, Artificial Sequence
  Description of Artificial Sequence: Synthetic oligonucleotide
  Sense strand starting at position 3643 of SEQ ID NO: 1883589
gcugcuccaaugugagauu

SEQ ID NO: 2202999 - RNA, 19 nt, Artificial Sequence
  Description of Artificial Sequence: Synthetic oligonucleotide
  Antisense strand to SEQ ID NO: 2202998
aaucucacauuggagcagc

SEQ ID NO: 2203000 - RNA, 19 nt, Artificial Sequence
  Description of Artificial Sequence: Synthetic oligonucleotide
  Sense strand starting at position 449 of SEQ ID NO: 1883589
gcuuuauucccaugacugc

SEQ ID NO: 2203001 - RNA, 19 nt, Artificial Sequence
  Description of Artificial Sequence: Synthetic oligonucleotide
  Antisense strand to SEQ ID NO: 2203000
gcagucaugggaauaaagc

SEQ ID NO: 2203002 - RNA, 19 nt, Artificial Sequence
  Description of Artificial Sequence: Synthetic oligonucleotide
  Sense strand starting at position 162 of SEQ ID NO: 1883589
uaaucagucuaggaagacu

SEQ ID NO: 2203003 - RNA, 19 nt, Artificial Sequence
  Description of Artificial Sequence: Synthetic oligonucleotide
  Antisense strand to SEQ ID NO: 2203002
agucuuccuagacugauua

SEQ ID NO: 2203004 - RNA, 19 nt, Artificial Sequence
  Description of Artificial Sequence: Synthetic oligonucleotide
  Sense strand starting at position 3488 of SEQ ID NO: 1883589
agaugagccuccuaagaag

SEQ ID NO: 2203005 - RNA, 19 nt, Artificial Sequence
  Description of Artificial Sequence: Synthetic oligonucleotide
  Antisense strand to SEQ ID NO: 2203004
cuucuuaggaggcucaucu

SEQ ID NO: 2203006 - RNA, 19 nt, Artificial Sequence
  Description of Artificial Sequence: Synthetic oligonucleotide
  Sense strand starting at position 47 of SEQ ID NO: 1883589
agggaauugugacaaguua

SEQ ID NO: 2203007 - RNA, 19 nt, Artificial Sequence
  Description of Artificial Sequence: Synthetic oligonucleotide
  Antisense strand to SEQ ID NO: 2203006
uaacuugucacaauucccu

SEQ ID NO: 2203008 - RNA, 19 nt, Artificial Sequence
  Description of Artificial Sequence: Synthetic oligonucleotide
  Sense strand starting at position 2663 of SEQ ID NO: 1883589
gccuuauccuaggacaaga

SEQ ID NO: 2203009 - RNA, 19 nt, Artificial Sequence
  Description of Artificial Sequence: Synthetic oligonucleotide
  Antisense strand to SEQ ID NO: 2203008
ucuuguccuaggauaaggc

SEQ ID NO: 2203010 - RNA, 19 nt, Artificial Sequence
  Description of Artificial Sequence: Synthetic oligonucleotide
  Sense strand starting at position 55 of SEQ ID NO: 1883589
gugacaaguuagugggaaa

SEQ ID NO: 2203011 - RNA, 19 nt, Artificial Sequence
  Description of Artificial Sequence: Synthetic oligonucleotide
  Antisense strand to SEQ ID NO: 2203010
uuucccacuaacuugucac

SEQ ID NO: 2203012 - RNA, 19 nt, Artificial Sequence
  Description of Artificial Sequence: Synthetic oligonucleotide
  Sense strand starting at position 2660 of SEQ ID NO: 1883589
ucggccuuauccuaggaca

SEQ ID NO: 2203013 - RNA, 19 nt, Artificial Sequence
  Description of Artificial Sequence: Synthetic oligonucleotide
  Antisense strand to SEQ ID NO: 2203012
uguccuaggauaaggccga

SEQ ID NO: 2203014 - RNA, 19 nt, Artificial Sequence
  Description of Artificial Sequence: Synthetic oligonucleotide
  Sense strand starting at position 2875 of SEQ ID NO: 1883589
cagguuuacugucagguuu

SEQ ID NO: 2203015 - RNA, 19 nt, Artificial Sequence
  Description of Artificial Sequence: Synthetic oligonucleotide
  Antisense strand to SEQ ID NO: 2203014
aaaccugacaguaaaccug

SEQ ID NO: 2203016 - RNA, 19 nt, Artificial Sequence
  Description of Artificial Sequence: Synthetic oligonucleotide
  Sense strand starting at position 3857 of SEQ ID NO: 1883589
uuagucucguucugggaaa

SEQ ID NO: 2203017 - RNA, 19 nt, Artificial Sequence
  Description of Artificial Sequence: Synthetic oligonucleotide
  Antisense strand to SEQ ID NO: 2203016
uuucccagaacgagacuaa

SEQ ID NO: 2203018 - RNA, 19 nt, Artificial Sequence
  Description of Artificial Sequence: Synthetic oligonucleotide
  Sense strand starting at position 2877 of SEQ ID NO: 1883589
gguuuacugucagguuuac

SEQ ID NO: 2203019 - RNA, 19 nt, Artificial Sequence
  Description of Artificial Sequence: Synthetic oligonucleotide
  Antisense strand to SEQ ID NO: 2203018
guaaaccugacaguaaacc

SEQ ID NO: 2203020 - RNA, 19 nt, Artificial Sequence
  Description of Artificial Sequence: Synthetic oligonucleotide
  Sense strand starting at position 1309 of SEQ ID NO: 1883590
ggagcucuccaaggaagga

SEQ ID NO: 2203021 - RNA, 19 nt, Artificial Sequence
  Description of Artificial Sequence: Synthetic oligonucleotide
  Antisense strand to SEQ ID NO: 2203020
uccuuccuuggagagcucc

SEQ ID NO: 2203022 - RNA, 19 nt, Artificial Sequence
  Description of Artificial Sequence: Synthetic oligonucleotide
  Sense strand starting at position 234 of SEQ ID NO: 1883590
gugauaggugaguacaaua

SEQ ID NO: 2203023 - RNA, 19 nt, Artificial Sequence
  Description of Artificial Sequence: Synthetic oligonucleotide
  Antisense strand to SEQ ID NO: 2203022
uauuguacucaccuaucac

SEQ ID NO: 2203024 - RNA, 19 nt, Artificial Sequence
  Description of Artificial Sequence: Synthetic oligonucleotide
  Sense strand starting at position 2608 of SEQ ID NO: 1883590
ccuuaaauaggagguuuaa

SEQ ID NO: 2203025 - RNA, 19 nt, Artificial Sequence
  Description of Artificial Sequence: Synthetic oligonucleotide
  Antisense strand to SEQ ID NO: 2203024
uuaaaccuccuauuuaagg

SEQ ID NO: 2203026 - RNA, 19 nt, Artificial Sequence
  Description of Artificial Sequence: Synthetic oligonucleotide
  Sense strand starting at position 2991 of SEQ ID NO: 1883590
cuagucacucuugguauuu

SEQ ID NO: 2203027 - RNA, 19 nt, Artificial Sequence
  Description of Artificial Sequence: Synthetic oligonucleotide
  Antisense strand to SEQ ID NO: 2203026
aaauaccaagagugacuag

SEQ ID NO: 2203028 - RNA, 19 nt, Artificial Sequence
  Description of Artificial Sequence: Synthetic oligonucleotide
  Sense strand starting at position 1196 of SEQ ID NO: 1883590
guuuauuugcagcaaaugu

SEQ ID NO: 2203029 - RNA, 19 nt, Artificial Sequence
  Description of Artificial Sequence: Synthetic oligonucleotide
  Antisense strand to SEQ ID NO: 2203028
acauuugcugcaaauaaac

SEQ ID NO: 2203030 - RNA, 19 nt, Artificial Sequence
  Description of Artificial Sequence: Synthetic oligonucleotide
  Sense strand starting at position 2719 of SEQ ID NO: 1883590
cuaccagguauugagugau

SEQ ID NO: 2203031 - RNA, 19 nt, Artificial Sequence
  Description of Artificial Sequence: Synthetic oligonucleotide
  Antisense strand to SEQ ID NO: 2203030
aucacucaauaccugguag

SEQ ID NO: 2203032 - RNA, 19 nt, Artificial Sequence
  Description of Artificial Sequence: Synthetic oligonucleotide
  Sense strand starting at position 539 of SEQ ID NO: 1883590
aaggauucugcugauguga

SEQ ID NO: 2203033 - RNA, 19 nt, Artificial Sequence
  Description of Artificial Sequence: Synthetic oligonucleotide
  Antisense strand to SEQ ID NO: 2203032
ucacaucagcagaauccuu

SEQ ID NO: 2203034 - RNA, 19 nt, Artificial Sequence
  Description of Artificial Sequence: Synthetic oligonucleotide
  Sense strand starting at position 1217 of SEQ ID NO: 1883590
uuggcuuuguauuuaaagu

SEQ ID NO: 2203035 - RNA, 19 nt, Artificial Sequence
  Description of Artificial Sequence: Synthetic oligonucleotide
  Antisense strand to SEQ ID NO: 2203034
acuuuaaauacaaagccaa

SEQ ID NO: 2203036 - RNA, 19 nt, Artificial Sequence
  Description of Artificial Sequence: Synthetic oligonucleotide
  Sense strand starting at position 3604 of SEQ ID NO: 1883590
aagcuuaggcgggaggaua
